United States Patent Application Publication US 2007/0054278 A1 - sequence listing, part 11

SEQ ID NO: 52918 - DNA, 201 bp, Homo sapiens; identical to SEQ ID NO: 52878

SEQ ID NO: 52919 - DNA, 201 bp, Homo sapiens; identical to SEQ ID NO: 52879

SEQ ID NO: 52920 - DNA, 201 bp, Homo sapiens; identical to SEQ ID NO: 52880

SEQ ID NO: 52921 - DNA, 201 bp, Homo sapiens; identical to SEQ ID NO: 52881

SEQ ID NO: 52922 - DNA, 201 bp, Homo sapiens; identical to SEQ ID NO: 52868

SEQ ID NO: 52923 - DNA, 201 bp, Homo sapiens; identical to SEQ ID NO: 52869

SEQ ID NO: 52924 - DNA, 201 bp, Homo sapiens; identical to SEQ ID NO: 52870

SEQ ID NO: 52925 - DNA, 201 bp, Homo sapiens; identical to SEQ ID NO: 52871

SEQ ID NO: 52926 - DNA, 201 bp, Homo sapiens; identical to SEQ ID NO: 52872

SEQ ID NO: 52927 - DNA, 201 bp, Homo sapiens; identical to SEQ ID NO: 52873

SEQ ID NO: 52928 - DNA, 201 bp, Homo sapiens; identical to SEQ ID NO: 52874

SEQ ID NO: 52929 - DNA, 201 bp, Homo sapiens; identical to SEQ ID NO: 52875

SEQ ID NO: 52930 - DNA, 201 bp, Homo sapiens; identical to SEQ ID NO: 52876

SEQ ID NO: 52931 - DNA, 201 bp, Homo sapiens; identical to SEQ ID NO: 52877

SEQ ID NO: 52932 - DNA, 201 bp, Homo sapiens; identical to SEQ ID NO: 52878

SEQ ID NO: 52933 - DNA, 201 bp, Homo sapiens; identical to SEQ ID NO: 52879

SEQ ID NO: 52934 - DNA, 201 bp, Homo sapiens; identical to SEQ ID NO: 52880

SEQ ID NO: 52935 - DNA, 201 bp, Homo sapiens; identical to SEQ ID NO: 52881

SEQ ID NO: 52936 - DNA, 201 bp, Homo sapiens; identical to SEQ ID NO: 52876

SEQ ID NO: 52937 - DNA, 182 bp, Homo sapiens
acatcaatcatagaaggtttgccgcttccttcagattgcaagaagtgacaaaaactgaccaggatttgtatcgctgtgtaactcagtcagaacgaggttcyggtgtgtccaattttgctcaacttattgtgagaggtaaggtgaaattgttttcacttcacgaaattgcatggctttattag

SEQ ID NO: 52938 - DNA, 201 bp, Homo sapiens
agctctttgggttgaagaaagatttacagctcacattgcccgggtccgtgatgtagaacttctcactgggcttgacttctatcaggataaagtgcagcctrtctctgaaattttgcaactaaagacatatttaccaacatttgaaaccactatttaacttaataatgtctacttaatatataatttactgtataaagtaat

SEQ ID NO: 52939 - DNA, 201 bp, Homo sapiens
tgatgtagaacttctcactgggcttgacttctatcaggataaagtgcagcctgtctctgaaattttgcaactaaagacatatttaccaacatttgaaaccmctatttaacttaataatgtctacttaatatataatttactgtataaagtaattttggcaaaatataagtgatttttttctggagaattgtaaaataaagt

SEQ ID NO: 52940 - DNA, 201 bp, Homo sapiens
taattttggcaaaatataagtgatttttttctggagaattgtaaaataaagttttctatttttccttaagtcccctaaaagccataatttttattattccyttttctcttttttcaattctatgaatatgtattattttaaagttatatttttcacacagagatgatgctatattacaccttcccttttttgttggtttct

SEQ ID NO: 52941 - DNA, 201 bp, Homo sapiens
ccatgtggagttcatacacagtcccccagttgggagacacatcgcctctgcctcccactgtcccagactgtctgcgggctgatgtcagggttcctccttcygagagccaaaaatgttccttctatttagcagacaagaatatcacccacggcttcctctatcctcctgccagcaatagaacatcagatagccaatatgatg

SEQ ID NO: 52942 - DNA, 201 bp, Homo sapiens
tactagcaatttggtacctatgtatgaagaattcagaaaaatgtgggactacttccacagtgttcttcttataaaacatgccacagaaagaaatggagtamatgtggttagtggaccaatatttgattataattatgatggccattttgatgctccagatgaaattaccaaacatttagccaacactgatgttcccatccc

SEQ ID NO: 52943 - DNA, 201 bp, Homo sapiens
aaagagaagactgaagttgaaccatttgaaaatattgaagtctataacctaatgtgtggtaaaggagttgttgctttccagtgtaaagctactttgaactwattttttcaaaaaacagatcttctacgcattcaaccagcaccaaacaatggaacccatggtagtttaaaccatcttctgaaggtgcctttttatgagcca

SEQ ID NO: 52944 - DNA, 201 bp, Homo sapiens
gtctcctttaccacagggaatatgtcagtggatttggaaaagctatgaggatgcccatgtggagttcatacacagtcccccagttgggagacacatcgccyctgcctcccactgtcccagactgtctgcgggctgatgtcagggttcctccttctgagagccaaaaatgttccttctatttagcagacaagaatatcaccc

SEQ ID NO: 52945 - DNA, 201 bp, Homo sapiens; identical to SEQ ID NO: 52938

SEQ ID NO: 52946 - DNA, 201 bp, Homo sapiens
ataaactgaaaacatgtggaattcattcaaaatacatgagagctatgtatcctaccaaaaccttcccaaatcattacaccattgtcacgggcttgtatccrgagtcacatggcatcattgacaataatatgtatgatgtaaatctcaacaagaatttttcactttcttcaaaggaacaaaataatccagcctggtggcatg

SEQ ID NO: 52947 - DNA, 201 bp, Homo sapiens; identical to SEQ ID NO: 52939

SEQ ID NO: 52948 - DNA, 149 bp, Homo sapiens
attgcccaatcactgaagagctgtgatcttcctaaacagttaaaagtcrggcacagctatgtaactcatacagtttctctttgccagactagactaaagaaggagcactactttattctgataaaacaggtctatgcagctaccaggac

SEQ ID NO: 52949 - DNA, 201 bp, Homo sapiens; identical to SEQ ID NO: 52940

SEQ ID NO: 52950 - DNA, 201 bp, Homo sapiens; identical to SEQ ID NO: 52941

SEQ ID NO: 52951 - DNA, 201 bp, Homo sapiens; identical to SEQ ID NO: 52944

SEQ ID NO: 52952 - DNA, 201 bp, Homo sapiens
ctgataaaacaggtctatgcagctaccaggacaatggaatctacgttgactttagcaacggaacaacctgttaagaagaacactcttaagaaatataaaakagcttgcattgttcttcttgctttgctggtgatcatgtcacttggattaggcctggggcttggactcaggaaactggaaaagcaaggcagctgcaggaag

SEQ ID NO: 52953 - DNA, 201 bp, Homo sapiens
cactgaagagctgtgatcttcctaaacagttaaaagtcaggcacagctatgtaactcatacagtttctctttgccagactagactaaagaaggagcactamtttattctgataaaacaggtctatgcagctaccaggacaatggaatctacgttgactttagcaacggaacaacctgttaagaagaacactcttaagaaat

SEQ ID NO: 52954 - DNA, 201 bp, Homo sapiens; identical to SEQ ID NO: 52942

SEQ ID NO: 52955 - DNA, 201 bp, Homo sapiens
ttgcagaggaaagattgctgtgctgactataagagtgtttgccaaggagaaacctcatggctggaagaaaactgtgacacagcccagcagtctcagtgccyagaagggtttgacctgccaccagttatcttgttttctatggatggatttagagctgaatatttatacacatgggatactttaatgccaaatatcaataaa

SEQ ID NO: 52956 - DNA, 201 bp, Homo sapiens; identical to SEQ ID NO: 52938

SEQ ID NO: 52957 - DNA, 201 bp, Homo sapiens; identical to SEQ ID NO: 52946

SEQ ID NO: 52958 - DNA, 201 bp, Homo sapiens; identical to SEQ ID NO: 52939

SEQ ID NO: 52959 - DNA, 201 bp, Homo sapiens; identical to SEQ ID NO: 52940

SEQ ID NO: 52960 - DNA, 201 bp, Homo sapiens; identical to SEQ ID NO: 52941

SEQ ID NO: 52961 - DNA, 201 bp, Homo sapiens; identical to SEQ ID NO: 52944

SEQ ID NO: 52962 - DNA, 201 bp, Homo sapiens
ctgataaaacaggtctatgcagctaccaggacaatggaatctacgttgactttagcaacggaacaacctgttaagaagaacactcttaagaaatataaaakagcttgcattacagggtctctctcctttgggatctcacctcaccacaacctctgtttcccaggctcaagtgatcctcctgcctcagcctcctgagtagct

SEQ ID NO: 52963 - DNA, 144 bp, Homo sapiens
atacagtttctctttgccagactagactaaagaaggagcactamtttattctgataaaacaggtctatgcagctaccaggacaatggaatctacgttgactttagcaacggaacaacctgttaagaagaacactcttaagaaat

SEQ ID NO: 52964 - DNA, 201 bp, Homo sapiens; identical to SEQ ID NO: 52942

SEQ ID NO: 52965 - DNA, 201 bp, Homo sapiens; identical to SEQ ID NO: 52955

SEQ ID NO: 52966 - DNA, 201 bp, Homo sapiens
aaataaaaattcaagtggaatatattctgaagctttgcttactacaaatatagtgccaatgtaccagagttttcaagttatatggcgctactttcatgacmccctactgcgaaagtatgctgaagaaagaaatggtgtcaatgtcgtcagtggtcctgtgtttgactttgattatgatggacgttgtgattccttagagaa

SEQ ID NO: 52967 - DNA, 201 bp, Homo sapiens
aagtagctgtgaacattgtctggataccagatatttgaatctttcttactattggtaataaaccttgatggcattgggcaaacagtagacttatagtaggrttggggtagcccatgttatgtgactatctttatgagaattttaaagtggttctggatatcttttaacttggagtttcatttcttttcattgtaatcaaaa

SEQ ID NO: 52968 - DNA, 201 bp, Homo sapiens
ctccccaccacaactaaataaaaattcaagtggaatatattctgaagctttgcttactacaaatatagtgccaatgtaccagagttttcaagttatatggygctactttcatgacaccctactgcgaaagtatgctgaagaaagaaatggtgtcaatgtcgtcagtggtcctgtgtttgactttgattatgatggacgttg

SEQ ID NO: 52969 - DNA, 201 bp, Homo sapiens
ggagacgtgcatagaaccagaacatatatggacttgcaacaaattcaggtgtggtgagaaaaggttgaccagaagcctctgtgcctgttcagatgactgcmaggacaagggcgactgctgcatcaactacagttctgtgtgtcaaggtgagaaaagttgggtagaagaaccatgtgagagcattaatgagccacagtgccc

SEQ ID NO: 52970 - DNA, 201 bp, Homo sapiens
acaaaaactttccccaatcactacagcattgtcaccggattgtatccagaatctcatggcataatcgacaataaaatgtatgatcccaaaatgaatgcttycttttcacttaaaagtaaagagaaatttaatcctgagtggtacaaaggagaaccaatttgggtcacagctaagtatcaaggcctcaagtctggcacattt

SEQ ID NO: 52971 - DNA, 201 bp, Homo sapiens
tttcatttcttttcattgtaatcaaaaaaaaaattaacagaagccaaaatacttctgagaccttgtttcaatctttgctgtatatcccctcaaaatccaarttattaatcttatgtgttttctttttaattttttgattggatttctttagatttaatggttcaaatgagttcaactttgagggacgatctttgaatatac

SEQ ID NO: 52972 - DNA, 201 bp, Homo sapiens
tggcattgggcaaacagtagacttatagtagggttggggtagcccatgttatgtgactatctttatgagaattttaaagtggttctggatatcttttaacwtggagtttcatttcttttcattgtaatcaaaaaaaaaattaacagaagccaaaatacttctgagaccttgtttcaatctttgctgtatatcccctcaaaa

SEQ ID NO: 52973 - DNA, 201 bp, Homo sapiens
tctagctacactattgcattgttcagaaactgtcgaccagagttagaacggagccctcggtgatgcggacatctcagggaaacttgcgtactcagcacagyagtggagagtgttcctgttgaatcttgcacatatttgaatgtgtaagcattgtatacattgatcaagttcgggggaataaagacagaccacacctaaaac

SEQ ID NO: 52974 - DNA, 201 bp, Homo sapiens
atatggacttgcaacaaattcaggtgtggtgagaaaaggttgaccagaagcctctgtgcctgttcagatgactgcaaggacaagggcgactgctgcatcarctacagttctgtgtgtcaaggtgagaaaagttgggtagaagaaccatgtgagagcattaatgagccacagtgcccagcagggtttgaaacgcctcctacc

SEQ ID NO: 52975 - DNA, 201 bp, Homo sapiens
accatgaatctttttgagagaaccttatattttatatagtcctctagctacactattgcattgttcagaaactgtcgaccagagttagaacggagccctcsgtgatgcggacatctcagggaaacttgcgtactcagcacagcagtggagagtgttcctgttgaatcttgcacatatttgaatgtgtaagcattgtataca

SEQ ID NO: 52976 - DNA, 201 bp, Homo sapiens
tccccaaacaccatgaatctttttgagagaaccttatattttatatagtcctctagctacactattgcattgttcagaaactgtcgaccagagttagaacrgagccctcggtgatgcggacatctcagggaaacttgcgtactcagcacagcagtggagagtgttcctgttgaatcttgcacatatttgaatgtgtaagca

SEQ ID NO: 52977 - DNA, 201 bp, Homo sapiens
tagctttcattttgcctcacaggactgataacagcgagagctgtgtgcatgggaagcatgactcctcatgggttgaagaattgttaatgttacacagagcrcggatcacagatgttgagcacatcactggactcagcttctatcaacaaagaaaagagccagtttcagacattttaaagttgaaaacacatttgccaacct

SEQ ID NO: 52978 - DNA, 201 bp, Homo sapiens
gtgcatagaaccagaacatatatggacttgcaacaaattcaggtgtggtgagaaaaggttgaccagaagcctctgtgcctgttcagatgactgcaaggacmagggcgactgctgcatcaactacagttctgtgtgtcaaggtgagaaaagttgggtagaagaaccatgtgagagcattaatgagccacagtgcccagcagg

SEQ ID NO: 52979 - DNA, 201 bp, Homo sapiens
aagatggaaaaatcagctcagaaaggccaattacttctttaatagatcagtttttttgacataataactcacatcaattttaaatactatcacataaagcmtggtggagaaaagaaattttgcttcataattagaaaaactcacaataaaacttgccaagaaaaacaaaaacgaaaaagccatttgaaaataaatacagtc

SEQ ID NO: 52980 - DNA, 201 bp, Homo sapiens
gtactacaagtacatcaatgtgaagaaggggagcatctcgggggttaccatggtgctggcatgctacgtgctcttcagctactccttttcctacaagcatytcaagcacgagtggctccgcaaataccactgaagaggacacgctctgcacccccccaccccacgaccttggcccgagcccctctgtgaggaacacaatct

SEQ ID NO: 52981 - DNA, 201 bp, Homo sapiens
ggggagcatctcgggggttaccatggtgctggcatgctacgtgctcttcagctactccttttcctacaagcatctcaagcacgagtggctccgcaaatacsactgaagaggacacgctctgcacccccccaccccacgaccttggcccgagcccctctgtgaggaacacaatctcgatcgttgctgaattctttcatatcc

SEQ ID NO: 52982 - DNA, 201 bp, Homo sapiens
gagcatctcgggggttaccatggtgctggcatgctacgtgctcttcagctactccttttcctacaagcatctcaagcacgagtggctccgcaaataccacwgaagaggacacgctctgcacccccccaccccacgaccttggcccgagcccctctgtgaggaacacaatctcgatcgttgctgaattctttcatatcctaa

SEQ ID NO: 52983 - DNA, 201 bp, Homo sapiens
gttaccatggtgctggcatgctacgtgctcttcagctactccttttcctacaagcatctcaagcacgagtggctccgcaaataccactgaagaggacacgytctgcacccccccaccccacgaccttggcccgagcccctctgtgaggaacacaatctcgatcgttgctgaattctttcatatcctaatggcaattaacct

SEQ ID NO: 52984 - DNA, 201 bp, Homo sapiens
tctcgggggttaccatggtgctggcatgctacgtgctcttcagctactccttttcctacaagcatctcaagcacgagtggctccgcaaataccactgaagrggacacgctctgcacccccccaccccacgaccttggcccgagcccctctgtgaggaacacaatctcgatcgttgctgaattctttcatatcctaatggca

SEQ ID NO: 52985 - DNA, 201 bp, Homo sapiens
caatttgtactgtaatgcgaagtgatgggacttctctctatgcaaccagagatcttgcagctgctatagatcgaatggacaagtataattttgatacaatratatatgtgacagataaaggacaaaaaaagcattttcagcaagtattccaaatgctgaagatcatgggatatgactgggcagaaaggtgccagcacgtgc

SEQ ID NO: 52986 - DNA, 159 bp, Homo sapiens
ctcaggttatctgtctgccttggcctcccaaagtgttgggattagaggcatgaaccaccacgcccagccaaagttaaactattattctgtgtcagaatctrtattaaatgtgacttgtcaagttattcagtctttatccttaaataaatgagttatctg

SEQ ID NO: 52987 - DNA, 201 bp, Homo sapiens
gcctcctgagtagctgggattacaggcacgtgccatcacgccaggctaattttgtatttttagtagagacagggtttctctatgttggtcaggctggtctygcactcccgacctcaggttatctgtctgccttggcctcccaaagtgttgggattagaggcatgaaccaccacgcccagccaaagttaaactattattctg

SEQ ID NO: 52988 - DNA, 201 bp, Homo sapiens
tttccattaaaatggcttttaaaatgtcaagtgaattctagttatctattctgagatgccttgctgttcagaataaatttaaattttttttttttttttttgagatggagtttcgctcttgttgcccaggctggagtgcaatggtgtgatgttggctcactgcaacctccacctcccaggttcaagcaattctcctgcctc

SEQ ID NO: 52989 - DNA, 201 bp, Homo sapiens
atggtgtgatgttggctcactgcaacctccacctcccaggttcaagcaattctcctgcctcagcctcctgagtagctgggattacaggcacgtgccatcaygccaggctaattttgtatttttagtagagacagggtttctctatgttggtcaggctggtcttgcactcccgacctcaggttatctgtctgccttggcctc

SEQ ID NO: 52990 - DNA, 201 bp, Homo sapiens
tctctttgaagtttatgtacaagttaataaagaagcagcagatgataaaagtgtagcaaaagcagcacaggagttcttccaacgattggaactgggcgatrtgcaagcactttcactgtggcaaaaatttcgggacttgagcattgaagagtacattcgggtttacaagcgtctgggagtatattttgatgaatattcagg

SEQ ID NO: 52991 - DNA, 201 bp, Homo sapiens
ctctggagctggtggagcttcagaagtcctgtggagcgtcggctgggatcagtttgtctcggtgaaaattttagctttccagagtgttgaatcttccaccrgaaaacttgatcacatcaatatctgcagttccaatttcccaaaaagaagaagtagctgattttcagctttctgtggattctttattggaaaaagacaatg

SEQ ID NO: 52992 - DNA, 201 bp, Homo sapiens
ggtgggtcccacggaatcctgttagtttctaccacctcctcccccttctctggagctggtggagcttcagaagtcctgtggagcgtcggctgggatcagtwtgtctcggtgaaaattttagctttccagagtgttgaatcttccaccagaaaacttgatcacatcaatatctgcagttccaatttcccaaaaagaagaagt

SEQ ID NO: 52993 - DNA, 201 bp, Homo sapiens
cgtctgggagtatattttgatgaatattcaggagaatcattttatcgtgaaaaatctcaagaggtcttaaagttgctggagagtaaaggactcctactgaraacaataaaaggaacggctgtagtagatctctctgggaatggcgacccctcctcaatttgtactgtaatgcgaagtgatgggacttctctctatgcaacc

SEQ ID NO: 52994 - DNA, 201 bp, Homo sapiens
atggacaagtataattttgatacaatgatatatgtgacagataaaggacaaaaaaagcattttcagcaagtattccaaatgctgaagatcatgggatatgrctgggcagaaaggtgccagcacgtgccctttggagtagtacagggaatgaagactcgaagaggagatgtcactttcctggaagatgttttaaatgagatt

SEQ ID NO: 52995 - DNA, 201 bp, Homo sapiens
cacacaaaacactacaaataaaagatagtcctcctgaagtggctggggccagacttcatcttttcaaagctgtccgttctgtcctagccaatggaatgaarcttcttggaataacacctgtatgtaggatgtaatttccattaaaatggcttttaaaatgtcaagtgaattctagttatctattctgagatgccttgctgt

SEQ ID NO: 52996 - DNA, 201 bp, Homo sapiens
tgtagtagatctctctgggaatggcgacccctcctcaatttgtactgtaatgcgaagtgatgggacttctctctatgcaaccagagatcttgcagctgctrtagatcgaatggacaagtataattttgatacaatgatatatgtgacagataaaggacaaaaaaagcattttcagcaagtattccaaatgctgaagatcat

SEQ ID NO: 52997 - DNA, 201 bp, Homo sapiens
aattcttcagcatcttctcaggttcgacgaggtgctttataaatcatctcaggactttcaacccaggcatatcgtcagttaccttctaactttaagatggygtctcgctctgttgtccaggctggagcgtgatctcggctcactgcaacctccacctgctggattcaagcgattctcctgcctcagcctccctagtagctg

SEQ ID NO: 52998 - DNA, 201 bp, Homo sapiens; identical to SEQ ID NO: 52985

SEQ ID NO: 52999 - DNA, 159 bp, Homo sapiens; identical to SEQ ID NO: 52986

SEQ ID NO: 53000 - DNA, 201 bp, Homo sapiens; identical to SEQ ID NO: 52987

SEQ ID NO: 53001 - DNA, 201 bp, Homo sapiens; identical to SEQ ID NO: 52988

SEQ ID NO: 53002 - DNA, 201 bp, Homo sapiens; identical to SEQ ID NO: 52989

SEQ ID NO: 53003 - DNA, 201 bp, Homo sapiens
tcagttaccttctaactttaagatggtgtctcgctctgttgtccaggctggagcgtgatctcggctcactgcaacctccacctgctggattcaagcgattstcctgcctcagcctccctagtagctgggattacagtcatcttgcagctgtggcacacaaaacactacaaataaaagatagtcctcctgaagtggctgggg

SEQ ID NO: 53004 - DNA, 201 bp, Homo sapiens; identical to SEQ ID NO: 52990

SEQ ID NO: 53005 - DNA, 201 bp, Homo sapiens
ctggtggagcttcagaagtcctgtggagcgtcggctgggatcagtttgtctcggtgaaaagtaaactttgaaagctttccagagtgttgaatcttccaccrgaaaacttgatcacatcaatatctgcagttccaatttcccaaaaagaagaagtagctgattttcagctttctgtggattctttattggaaaaagacaatg

SEQ ID NO: 53006 - DNA, 201 bp, Homo sapiens
ggtgggtcccacggaatcctgttagtttctaccacctcctcccccttctctggagctggtggagcttcagaagtcctgtggagcgtcggctgggatcagtwtgtctcggtgaaaagtaaactttgaaagctttccagagtgttgaatcttccaccagaaaacttgatcacatcaatatctgcagttccaatttcccaaaaa

SEQ ID NO: 53007 - DNA, 201 bp, Homo sapiens; identical to SEQ ID NO: 52993

SEQ ID NO: 53008 - DNA, 201 bp, Homo sapiens; identical to SEQ ID NO: 52994

SEQ ID NO: 53009 - DNA, 201 bp, Homo sapiens; identical to SEQ ID NO: 52995

SEQ ID NO: 53010 - DNA, 201 bp, Homo sapiens; identical to SEQ ID NO: 52996

SEQ ID NO: 53011 - DNA, 159 bp, Homo sapiens; identical to SEQ ID NO: 52986

SEQ ID NO: 53012 - DNA, 201 bp, Homo sapiens; identical to SEQ ID NO: 52985

SEQ ID NO: 53013 - DNA, 201 bp, Homo sapiens; identical to SEQ ID NO: 52987

SEQ ID NO: 53014 - DNA, 201 bp, Homo sapiens; identical to SEQ ID NO: 52988

SEQ ID NO: 53015 - DNA, 201 bp, Homo sapiens; identical to SEQ ID NO: 52989

SEQ ID NO: 53016 - DNA, 201 bp, Homo sapiens
cccattccaggtttatgtacaagttaataaagaagcagcagatgataaaagtgtagcaaaagcagcacaggagttcttccaacgattggaactgggcgatrtgcaagcactttcactgtggcaaaaatttcgggacttgagcattgaagagtacattcgggtttacaagcgtctgggagtatattttgatgaatattcagg

SEQ ID NO: 53017 - DNA, 201 bp, Homo sapiens; identical to SEQ ID NO: 53005

SEQ ID NO: 53018 - DNA, 201 bp, Homo sapiens; identical to SEQ ID NO: 53006

SEQ ID NO: 53019 - DNA, 201 bp, Homo sapiens; identical to SEQ ID NO: 52994

SEQ ID NO: 53020 - DNA, 201 bp, Homo sapiens; identical to SEQ ID NO: 52993

SEQ ID NO: 53021 - DNA, 201 bp, Homo sapiens; identical to SEQ ID NO: 52995

SEQ ID NO: 53022 - DNA, 201 bp, Homo sapiens; identical to SEQ ID NO: 52996

SEQ ID NO: 53023 - DNA, 201 bp, Homo sapiens; identical to SEQ ID NO: 52985

SEQ ID NO: 53024 - DNA, 159 bp, Homo sapiens; identical to SEQ ID NO: 52986

SEQ ID NO: 53025 - DNA, 201 bp, Homo sapiens; identical to SEQ ID NO: 52987

SEQ ID NO: 53026 - DNA, 201 bp, Homo sapiens; identical to SEQ ID NO: 52988

SEQ ID NO: 53027 - DNA, 201 bp, Homo sapiens; identical to SEQ ID NO: 52989

SEQ ID NO: 53028 - DNA, 201 bp, Homo sapiens; identical to SEQ ID NO: 52990

SEQ ID NO: 53029 - DNA, 191 bp, Homo sapiens
actgcggcgcacttccgtagaggtggacatggcgtgcggctttcgccgcgctattgcttgccagctttccagagtgttgaatcttccaccrgaaaacttgatcacatcaatatctgcagttccaatttcccaaaaagaagaagtagctgattttcagctttctgtggattctttattggaaaaagacaatg

SEQ ID NO: 53030 - DNA, 201 bp, Homo sapiens; identical to SEQ ID NO: 52993

SEQ ID NO: 53031 - DNA, 201 bp, Homo sapiens; identical to SEQ ID NO: 52994

SEQ ID NO: 53032 - DNA, 201 bp, Homo sapiens; identical to SEQ ID NO: 52995

SEQ ID NO: 53033 - DNA, 201 bp, Homo sapiens; identical to SEQ ID NO: 52996

SEQ ID NO: 53034 - DNA, 201 bp, Homo sapiens; identical to SEQ ID NO: 52985

SEQ ID NO: 53035 - DNA, 159 bp, Homo sapiens; identical to SEQ ID NO: 52986

SEQ ID NO: 53036 - DNA, 201 bp, Homo sapiens; identical to SEQ ID NO: 52987

SEQ ID NO: 53037 - DNA, 201 bp, Homo sapiens; identical to SEQ ID NO: 52988

SEQ ID NO: 53038 - DNA, 201 bp, Homo sapiens; identical to SEQ ID NO: 52989

SEQ ID NO: 53039 - DNA, 201 bp, Homo sapiens; identical to SEQ ID NO: 52990

SEQ ID NO: 53040 - DNA, 201 bp, Homo sapiens; identical to SEQ ID NO: 53005

SEQ ID NO: 53041 - DNA, 201 bp, Homo sapiens; identical to SEQ ID NO: 53006

SEQ ID NO: 53042 - DNA, 201 bp, Homo sapiens; identical to SEQ ID NO: 52993

SEQ ID NO: 53043 - DNA, 201 bp, Homo sapiens; identical to SEQ ID NO: 52994

SEQ ID NO: 53044 - DNA, 201 bp, Homo sapiens; identical to SEQ ID NO: 52995

SEQ ID NO: 53045 - DNA, 201 bp, Homo sapiens; identical to SEQ ID NO: 52996

SEQ ID NO: 53046 - DNA, 201 bp, Homo sapiens
acataacaccttcttctggtaaaggtatgtctcaatggagaactcatagtgattagtctttgtttaacaactaatgcttttaaggtaacagttctatctcrgttcgatgtctgtctttagagaagtagctgattttcagctttctgtggattctttattggaaaaagacaatgaccattcaagaccagatattcaagttca

SEQ ID NO: 53047 - DNA, 201 bp, Homo sapiens
cacataacaccttcttctggtaaaggtatgtctcaatggagaactcatagtgattagtctttgtttaacaactaatgcttttaaggtaacagttctatctyggttcgatgtctgtctttagagaagtagctgattttcagctttctgtggattctttattggaaaaagacaatgaccattcaagaccagatattcaagttc

SEQ ID NO: 53048 - DNA, 201 bp, Homo sapiens
gtgcagtggcacaatcttgactcgctgcagtctccacctccaggattcaagcgattcccctgcctcagtctcccaagcagctgggattgtaggtacacacmaccatgcctggctaatttttgtgtgtgtgtgtgtatttttagtagagatggggttttaccatgtggccaggctggtctagaactcaacctcaggtgatcc

SEQ ID NO: 53049 - DNA, 201 bp, Homo sapiens
ttatttctcattttcttgcttttaattttgttttttatttatttattttattttatttacttttttgagacagagtttcgctcttgtcacccaggctggartgcagtggcacaatcttgactcgctgcagtctccacctccaggattcaagcgattcccctgcctcagtctcccaagcagctgggattgtaggtacacacc

SEQ ID NO: 53050 - DNA, 201 bp, Homo sapiens
tcaagcaattctcgtgcctaagcctcccgagtagctgggcttaacgggcacatgccaccacgcctggctaatttttgtatttttagtagagatggggtttytccatgttggccaggctggtctcaaactcctgaccttaagtggtccacttgcctcggcctcccaaagtgctgggatctgtgcccagacagaagaggaaga

SEQ ID NO: 53051 - DNA, 201 bp, Homo sapiens
agtaggattttaaaggagacatttagcttgccagacatcagttttcatgtctataaaataaggtggctagtataagaggaagaattttttgagactaggtsttgctctgtcacccagactggagtgcagtggcatgatctcagctcactgcaacctctgcctcctgggttcaagcaattctcgtgcctaagcctcccgagt

SEQ ID NO: 53052 - DNA, 201 bp, Homo sapiens
tcatttggaggtcagtggagaggtttgaattagaagcatgtatttggagtagtagaggaagcattgtagaagaggtaaagagacctgggcttttttctcartctgtttttatttgcagtaggattttaaaggagacatttagcttgccagacatcagttttcatgtctataaaataaggtggctagtataagaggaagaat

SEQ ID NO: 53053 - DNA, 201 bp, Homo sapiens
cccagactggagtgcagtggcatgatctcagctcactgcaacctctgcctcctgggttcaagcaattctcgtgcctaagcctcccgagtagctgggcttaacgggcacatgccaccacgcctggctaatttttgtatttttagtagagatggggtttttccatgttggccaggctggtctcaaactcctgaccttaagtgg

SEQ ID NO: 53054 - DNA, 201 bp, Homo sapiens
cataacaccttcttctggtaaaggtatgtctcaatggagaactcatagtgattagtctttgtttaacaactaatgcttttaaggtaacagttctatctcgkttcgatgtctgtctttagagaagtagctgattttcagctttctgtggattctttattggaaaaagacaatgaccattcaagaccagatattcaagttcaa

SEQ ID NO: 53055 - DNA, 201 bp, Homo sapiens
ttccacatgggagtttctcagactgattcttgaactctcaatgaaagtgttgaaacaggatgggaaatattttacacaggggaactgtgtcagtctgaccraagcactgtcgctctgtgaagaacagctggggcgcctgtattgtcctgtggaattttcaaaggagattctctgtgtcccttcatacttggaatcgtgggt

SEQ ID NO: 53056 - DNA, 201 bp, Homo sapiens
gcgaagactgctaaatgcactgatccccccattagaatgtgatttttattcctttttatttctctgtgggcttttgtttttgttttggtagaccttcaatktggatatttggaggagtgaacatcattgttttgctggagggaagatcttgatggtgtttcttttcccaaaaattgacttagatattaaaatttggtgctt

SEQ ID NO: 53057 - DNA, 201 bp, Homo sapiens
taaaaccacccttcacagaatctatgggaaattcctaggcttgagagcttacatcagaaaacagataaataatatattttataggtttatttatgaaacasagcatcataatggcatagcagagttactggaaatattgggaagtataattaatggatttgccttaccactaaaagaagagcacaagattttcttattgaa

SEQ ID NO: 53058 - DNA, 201 bp, Homo sapiens
aatactggccaaagactcacagtccaaaagaagtaatgttcttaaacgaattagaagagattttagatgtcattgaaccatcagaatttgtgaagatcatkgaacccctcttccggcagttggccaaatgtgtctccagcccacacttccaggtggcagagcgagctctctattactggaataatgaatacatcatgagtt

SEQ ID NO: 53059 - DNA, 201 bp, Homo sapiens
tactacctttgcacaaagtgaaatctctgagtgtctaccatccccagctggcatactgtgtagtgcagtttttagaaaaggacagcaccctcacggaaccrgtggtgatggcacttctcaaatactggccaaagactcacagtccaaaagaagtaatgttcttaaacgaattagaagagattttagatgtcattgaaccat

SEQ ID NO: 53060 - DNA, 201 bp, Homo sapiens
gagaacttcaaaaactaccatccttaaaagatgttcctcctgctgatcaagagaagctttttatccagaagttacgtcagtgttgcgtcctctttgacttygtttctgatccactaagtgacctaaagtggaaggaagtaaaacgagctgctttaagtgaaatggtagaatatatcacccataatcggaatgtgatcacag

SEQ ID NO: 53061 - DNA, 201 bp, Homo sapiens; identical to SEQ ID NO: 53057

SEQ ID NO: 53062 - DNA, 201 bp, Homo sapiens; identical to SEQ ID NO: 53058

SEQ ID NO: 53063 - DNA, 201 bp, Homo sapiens; identical to SEQ ID NO: 53059

SEQ ID NO: 53064 - DNA, 201 bp, Homo sapiens
tccagcccgtggtccttctccatattcgagatgttcctcctgctgatcaagagaagctttttatccagaagttacgtcagtgttgcgtcctctttgacttygtttctgatccactaagtgacctaaagtggaaggaagtaaaacgagctgctttaagtgaaatggtagaatatatcacccataatcggaatgtgatcacag

SEQ ID NO: 53065 - DNA, 201 bp, Homo sapiens
gatgggcctttatttgaagatgtgcagatgctgagaaagacagtgaaggacgaggctcatcaggcacagaaagatccgaagaaggaccgtcctcttgcackccgcaagtccgagctgcctcaggacccccacaccaagaaagccttggaagctcactgcagggccgatgagctggcctcccaggacggccgctagcctccg

SEQ ID NO: 53066 - DNA, 201 bp, Homo sapiens
ggcacagaaagatccgaagaaggaccgtcctcttgcacgccgcaagtccgagctgcctcaggacccccacaccaagaaagccttggaagctcactgcaggsccgatgagctggcctcccaggacggccgctagcctccggggcgccgcgtcggggccgggcccgccagttcttttccggattctgtagaaaatacatactt

SEQ ID NO: 53067 - DNA, 201 bp, Homo sapiens
tttcaatctcagtgaaatggctctttgctttcgagttctcacgcaacgtactgggcaaatgacaatcctcagccgctggtattttctaaggggtctcttcrctttgatgagtgacatgaacaccgtgtctccttctcttgtgtgtacctaaagccatatttccaagtctgtggtactccaggattccaggagtaagcctgt

SEQ ID NO: 53068 - DNA, 201 bp, Homo sapiens
aacttaatgttaagtgtcttgaggcataaaagacaaaatgtggcttattttaggatctgttttttcatcgaggtctcgggtatcctttcaaagatagtgaraagcagacactgctccttgtgcagctctggtacctcctgcccactgctgtcacttcaagccactggcaatgcttctgtcctcgtgtcttggaggaaaatc

SEQ ID NO: 53069 - DNA, 201 bp, Homo sapiens
gcgtccgcctcagcgcgagattaggagttcaaacaatggtgacttcccagagcccgctggcagagccgcgggttgacgacggtgtcctcgcagtgtcgccrccaccccagcgtagtccaagtcagactatttcacaaagtcagagcgataggaaagcaccctgcccttcatcttcatgttctcccaaatggaacttaggat

SEQ ID NO: 53070 - DNA, 201 bp, Homo sapiens
aatgtggcttattttaggatctgttttttcatcgaggtctcgggtatcctttcaaagatagtgagaagcagacactgctccttgtgcagctctggtacctsctgcccactgctgtcacttcaagccactggcaatgcttctgtcctcgtgtcttggaggaaaatcacctggggggaggggacttcttgtggtaagagcaag

SEQ ID NO: 53071 - DNA, 201 bp, Homo sapiens
taagactttacagcctttgaaatggtttccacgtgattgttacgccagcagttctcgttttgtttgtttttcaatctcagtgaaatggctctttgctttcragttctcacgcaacgtactgggcaaatgacaatcctcagccgctggtattttctaaggggtctcttcactttgatgagtgacatgaacaccgtgtctcct

SEQ ID NO: 53072 - DNA, 201 bp, Homo sapiens
tactacattgaaaataaaccggtgactgtttttcttcataaagttctgcgtttggcatcttcactctttccaaaatgtatctgtacatcagaaatgtcacwattccaagtgtctttttagtgtggctttagtatggcttccttttaatattgtacatacattgtatctttgttttatggtaataagtaataaaaatgtaga

SEQ ID NO: 53073 - DNA, 201 bp, Homo sapiens
aggtttctgggaagactctctttttgccctcgggaaaaagcaaaatatcaatgtttgggtgactgtgtaaagctcagtgtgtaagaacatctttttgtctwggttttctttctgctctttattgaagacaaacactcaccaaaaagaaaaataaaagttttcagagaaactaattttctttggcaagagtattacttaata

SEQ ID NO: 53074 - DNA, 201 bp, Homo sapiens; identical to SEQ ID NO: 53057

SEQ ID NO: 53075 - DNA, 201 bp, Homo sapiens; identical to SEQ ID NO: 53058

SEQ ID NO: 53076 - DNA, 201 bp, Homo sapiens; identical to SEQ ID NO: 53059

SEQ ID NO: 53077 - DNA, 201 bp, Homo sapiens; identical to SEQ ID NO: 53064

SEQ ID NO: 53078 - DNA, 201 bp, Homo sapiens
aaaatgaaagaacgggaagaagcatgggttaaaatagaaaatctagccaaagccaatccccaggcacagaaagatccgaagaaggaccgtcctcttgcackccgcaagtccgagctgcctcaggacccccacaccaagaaagccttggaagctcactgcagggccgatgagctggcctcccaggacggccgctagcctccg

SEQ ID NO: 53079 - DNA, 201 bp, Homo sapiens; identical to SEQ ID NO: 53066

SEQ ID NO: 53080 - DNA, 201 bp, Homo sapiens; identical to SEQ ID NO: 53067

SEQ ID NO: 53081 - DNA, 201 bp, Homo sapiens; identical to SEQ ID NO: 53068

SEQ ID NO: 53082 - DNA, 201 bp, Homo sapiens; identical to SEQ ID NO: 53069

SEQ ID NO: 53083 - DNA, 201 bp, Homo sapiens; identical to SEQ ID NO: 53070

SEQ ID NO: 53084 - DNA, 201 bp, Homo sapiens; identical to SEQ ID NO: 53071

SEQ ID NO: 53085 - DNA, 201 bp, Homo sapiens; identical to SEQ ID NO: 53072

SEQ ID NO: 53086 - DNA, 201 bp, Homo sapiens; identical to SEQ ID NO: 53073

SEQ ID NO: 53087 - DNA, 201 bp, Homo sapiens; identical to SEQ ID NO: 53057

SEQ ID NO: 53088 - DNA, 201 bp, Homo sapiens; identical to SEQ ID NO: 53058

SEQ ID NO: 53089 - DNA, 201 bp, Homo sapiens; identical to SEQ ID NO: 53059

SEQ ID NO: 53090 - DNA, 201 bp, Homo sapiens; identical to SEQ ID NO: 53064

SEQ ID NO: 53091 - DNA, 201 bp, Homo sapiens; identical to SEQ ID NO: 53057

SEQ ID NO: 53092 - DNA, 152 bp, Homo sapiens
aatactggccaaagactcacagtccaaaagaagtaatgttcttaaacgaattagaagagattttagatgtcattgaaccatcagaatttgtgaagatcatkgaacccctcttccggcagttggccaaatgtgtctccagcccacacttccag

SEQ ID NO: 53093 - DNA, 201 bp, Homo sapiens; identical to SEQ ID NO: 53059

SEQ ID NO: 53094 - DNA, 201 bp, Homo sapiens; identical to SEQ ID NO: 53064

SEQ ID NO: 53095 - DNA, 201 bp, Homo sapiens; identical to SEQ ID NO: 53057

SEQ ID NO: 53096 - DNA, 201 bp, Homo sapiens; identical to SEQ ID NO: 53058

SEQ ID NO: 53097 - DNA, 201 bp, Homo sapiens; identical to SEQ ID NO: 53059

SEQ ID NO: 53098 - DNA, 201 bp, Homo sapiens; identical to SEQ ID NO: 53060

SEQ ID NO: 53099 - DNA, 201 bp, Homo sapiens; identical to SEQ ID NO: 53065

SEQ ID NO: 53100 - DNA, 201 bp, Homo sapiens; identical to SEQ ID NO: 53066

SEQ ID NO: 53101 - DNA, 201 bp, Homo sapiens; identical to SEQ ID NO: 53067

SEQ ID NO: 53102 - DNA, 201 bp, Homo sapiens; identical to SEQ ID NO: 53068

SEQ ID NO: 53103 - DNA, 201 bp, Homo sapiens; identical to SEQ ID NO: 53069

SEQ ID NO: 53104 - DNA, 201 bp, Homo sapiens; identical to SEQ ID NO: 53070

SEQ ID NO: 53105 - DNA, 201 bp, Homo sapiens; identical to SEQ ID NO: 53071

SEQ ID NO: 53106 - DNA, 201 bp, Homo sapiens; identical to SEQ ID NO: 53072

SEQ ID NO: 53107 - DNA, 201 bp, Homo sapiens; identical to SEQ ID NO: 53073

SEQ ID NO: 53108 - DNA, 201 bp, Homo sapiens; identical to SEQ ID NO: 53057

SEQ ID NO: 53109 - DNA, 201 bp, Homo sapiens
tgaattaagccatgtaatttagcattaattctgtagatatgtggctttgagaggctaatatttgcataccaataaagattcaatttctggtatattttaaycgccattcaataaaatctcatgttatttgactcattgttttttttcctcctagcttgtttatgaatttttcttaagatttttagagtctccagatttcca

SEQ ID NO: 53110 - DNA, 201 bp, Homo sapiens
tactacctttgcacaaagtgaaatctctgagtgtctaccatccccagctggcatactgtgtagtgcagtttttagaaaaggacagcaccctcacggaaccrtggctgaacaattcaccaaatgccacattgcgtttaccacagacagaggctgctcccacctaagccactgtcccagcatctctatcccgccatccactgt

SEQ ID NO: 53111 - DNA, 201 bp, Homo sapiens
aattaagccatgtaatttagcattaattctgtagatatgtggctttgagaggctaatatttgcataccaataaagattcaatttctggtatattttaacckccattcaataaaatctcatgttatttgactcattgttttttttcctcctagcttgtttatgaatttttcttaagatttttagagtctccagatttccaac

SEQ ID NO: 53112 - DNA, 201 bp, Homo sapiens
aacaagagatgcagattctgggtcacgaagatgttcctcctgctgatcaagagaagctttttatccagaagttacgtcagtgttgcgtcctctttgacttygtttctgatccactaagtgacctaaagtggaaggaagtaaaacgagctgctttaagtgaaatggtagaatatatcacccataatcggaatgtgatcacag

SEQ ID NO: 53113 - DNA, 201 bp, Homo sapiens
gcccccaggtcctgcgctggccactgcctttccccagggcatttgtaaggcagaaggttggttggcaaggaggcgccagggtcggcatgagcagagcgggrgccaggtgtgcgggtgggagggccatccatccgtgacaggcggcccacgctgtcccacccagcatgtctgcacagggaaagaattgtcccagctccagga

SEQ ID NO: 53114 - DNA, 201 bp, Homo sapiens
aaaaatatttcagcagaataaagttaatgtgtgtgtttgaccactttacaacagccagtgaagatgtgtaattgtgagtatgttctcagtgaagatggcckctgtgttgatggccgttgaattgaattcaggcccagaggtcctaagccaacaatctcccagtttttgctcctcatatttaataggtgcctgctgggcccc

SEQ ID NO: 53115 - DNA, 201 bp, Homo sapiens
tgaagggctgtgtctatggacaggaggcagtgcgtctctccgtgggccccatggcccgggacgtggagagcctggcactgtgcctgcgagccctgctgtgygaggacatgttccgcttggaccccactgtgcctcccttgcccttcagagaagaggtctacaccagctctcagcccctgcgtgtggggtactatgagactg

SEQ ID NO: 53116 - DNA, 201 bp, Homo sapiens
cgtgctcttcacctatgtgggaaaggcctgggaagtgaacaaagggaccaactgtgtgacctcctatctggctgactgtgagactcagctgtctcaggccmcaaggcagggcctgctctatggcgtccctgtgagcctcaaggagtgcttcacctacaagggccaggactccacgctgggcttgagcctgaatgaaggggt

SEQ ID NO: 53117 - DNA, 201 bp, Homo sapiens
agctgcagggtgccgtgcccttcgtgcacaccaatgttccacagtccatgttcagctatgactgcagtaaccccctctttggccagaccgtgaacccatgraagtcctccaaaagcccagggggctcctcagggggtgaaggggccctcatcgggtctggaggctcccccctgggcttaggcactgatatcggaggcagca

SEQ ID NO: 53118 - DNA, 201 bp, Homo sapiens
gcgaccaccctgtccatactgccggcccaaaccctggcaaaaggctgccacagagcccaaattccctgctgttcgactggctttgcagaattttgacatgrcttacagtgtgcagtttggagatctttggccatcaatccgtgtcagtctcctctcagagcagaagtatggtgcactggtcaataactttgctgcctggga

SEQ ID NO: 53119 - DNA, 201 bp, Homo sapiens
caaagtgctgggattacaggcgtgagccaccacgcccggccaggtcccgaaacttaagcttcatttgtttcactgcaaatctgcttctgcctacaagcctrgtctcattttcctctacctaaggatcttcctccatgcaatttcggcctaggaggcccttcccgccccttttcgcctagctaactctttcggtactcaacc

SEQ ID NO: 53120 - DNA, 201 bp, Homo sapiens
aggaggcccttcccgccccttttcgcctagctaactctttcggtactcaaccaccaactcctaatcctccctggtcccccaagtgggctaggggcttcttkggagtccctcgcactgctctaagcatccaggcagagtcattattccgggtgccaggttgctctttttccagcagccttcaggggactcctggctgggcgg

SEQ ID NO: 53121 - DNA, 201 bp, Homo sapiens
ccaaggattttgtgaatgaagccatctcccactgggaactgcagtctgagggtggccaatctgcagccccatcccctgcctcctgggcctgcagtccgaamcttcgatgcttcacttttgacagaggggatatcagtcgcttccctcctgccagacctggcagcctgggtgtcatggagtactacctgatggatgctgcct

SEQ ID NO: 53122 - DNA, 201 bp, Homo sapiens
atacagcatccaggtacaggtggaagatctgactcacttccgaagggttttcatggacacattttgtttcttctcatcctgtcaggttggggagctggtartaccaaacctcatggccaattttggccccatgtacttctgcaaaatgcgtaggctgacatagtatcacccaatccctgaagcaagaatacaaagggtata

SEQ ID NO: 53123 - DNA, 201 bp, Homo sapiens
tgactcacttccgaagggttttcatggacacattttgtttcttctcatcctgtcaggttggggagctggtaataccaaacctcatggccaattttggcccyatgtacttctgcaaaatgcgtaggctgacatagtatcacccaatccctgaagcaagaatacaaagggtatactctgttggatgcaccagaaactggaaac

SEQ ID NO: 53124 - DNA, 201 bp, Homo sapiens
ctgttcgtgtctttctgcagttttcggcaataagaagtagaagatttgctgtcctgctgtccaattgtggagcatcagcaggtttccaactcactcattamcccctaccccatctccaggcctgtactaaagtttgctgcccgcttaggggcttagaaggagaagccagtgagcaggctcacactaagttgtaaacatagg

SEQ ID NO: 53125 - DNA, 201 bp, Homo sapiens
agatttgctgtcctgctgtccaattgtggagcatcagcaggtttccaactcactcattaacccctaccccatctccaggcctgtactaaagtttgctgccygcttaggggcttagaaggagaagccagtgagcaggctcacactaagttgtaaacataggagaagcatttggccaataaagttgttgaaactctatagacc

SEQ ID NO: 53126 - DNA, 201 bp, Homo sapiens
gtgtcagtctcctctcagagcagaagtatggtgcactggtcaataactttgctgcctgggatcatgtaagtgctaagctggagcagctgagtgccaaggaytttgtgaatgaagccatctcccactgggaactgcagtctgagggtggccaatctgcagccccatcccctgcctcctgggcctgcagtccgaaccttcgat

SEQ ID NO: 53127 - DNA, 201 bp, Homo sapiens; identical to SEQ ID NO: 53115

SEQ ID NO: 53128 - DNA, 201 bp, Homo sapiens; identical to SEQ ID NO: 53116

SEQ ID NO: 53129 - DNA, 201 bp, Homo sapiens; identical to SEQ ID NO: 53117

SEQ ID NO: 53130 - DNA, 201 bp, Homo sapiens; identical to SEQ ID NO: 53120

SEQ ID NO: 53131 - DNA, 201 bp, Homo sapiens; identical to SEQ ID NO: 53118

SEQ ID NO: 53132 - DNA, 201 bp, Homo sapiens; identical to SEQ ID NO: 53121

SEQ ID NO: 53133 - DNA, 201 bp, Homo sapiens; identical to SEQ ID NO: 53119

SEQ ID NO: 53134 - DNA, 201 bp, Homo sapiens; identical to SEQ ID NO: 53116

SEQ ID NO: 53135 - DNA, 201 bp, Homo sapiens
gagtgcgacagcgtagtggtgcatgtgctgaagctgcagggtgccgtgcccttcgtgcacaccaatgttccacagtccatgttcagaccgtgaacccatgraagtcctccaaaagcccagggggctcctcagggggtgaaggggccctcatcgggtctggaggctcccccctgggcttaggcactgatatcggaggcagca

SEQ ID NO: 53136 - DNA, 201 bp, Homo sapiens; identical to SEQ ID NO: 53126

SEQ ID NO: 53137 - DNA, 201 bp, Homo sapiens
cctcgcgacggtcccgcggagacatcgatataagaagaaatgggctgccacagagcccaaattccctgctgttcgactggctttgcagaattttgacatgrcttacagtgtgcagtttggagatctttggccatcaatccgtgtcagtctcctctcagagcagaagtatggtgcactggtcaataactttgctgcctggga

SEQ ID NO: 53138 - DNA, 115 bp, Homo sapiens
ctgcctacaagcctrgtctcattttcctctacctaaggatcttcctccatgcaatttcggcctaggaggcccttcccgccccttttcgcctagctaactctttcggtactcaacc

SEQ ID NO: 53139 - DNA, 201 bp, Homo sapiens; identical to SEQ ID NO: 53120

SEQ ID NO: 53140 - DNA, 201 bp, Homo sapiens; identical to SEQ ID NO: 53121

SEQ ID NO: 53141 - DNA, 201 bp, Homo sapiens; identical to SEQ ID NO: 53122

SEQ ID NO: 53142 - DNA, 201 bp, Homo sapiens; identical to SEQ ID NO: 53123

SEQ ID NO: 53143 - DNA, 201 bp, Homo sapiens; identical to SEQ ID NO: 53124

SEQ ID NO: 53144 - DNA, 201 bp, Homo sapiens; identical to SEQ ID NO: 53125

SEQ ID NO: 53145 - DNA, 201 bp, Homo sapiens; identical to SEQ ID NO: 53126

SEQ ID NO: 53146 - DNA, 138 bp, Homo sapiens
ggacctcgctgtccctccagctgggcacattgagcctggagatcccttgccagggtgccagcccgaggggaggctgggttgagtatctgtggcctacccctgatctgagcttgttgtgaggtaggaggtgggcaggag

SEQ ID NO: 53147 - DNA, 201 bp, Homo sapiens; identical to SEQ ID NO: 53115

SEQ ID NO: 53148 - DNA, 201 bp, Homo sapiens
caaggccagcccctccctgggaaaggcctgggaagtgaacaaagggaccaactgtgtgacctcctatctggctgactgtgagactcagctgtctcaggccmcaaggcagggcctgctctatggcgtccctgtgagcctcaaggagtgcttcacctacaagggccaggactccacgctgggcttgagcctgaatgaaggggt

SEQ ID NO: 53149 - DNA, 201 bp, Homo sapiens; identical to SEQ ID NO: 53117

SEQ ID NO: 53150 - DNA, 171 bp, Homo sapiens
tgaatccaacaaaggcctgagcactctgggcagggacctcgctgtccctccagctgggcacattgagcctggagatcccttgccagggtgccagcccgagkggaggctgggttgagtatctgtggcctacccctgatctgagcttgttgtgaggtaggaggtgggcaggag

SEQ ID NO: 53151 - DNA, 201 bp, Homo sapiens; identical to SEQ ID NO: 53120

SEQ ID NO: 53152 - DNA, 201 bp, Homo sapiens; identical to SEQ ID NO: 53119

SEQ ID NO: 53153 - DNA, 201 bp, Homo sapiens; identical to SEQ ID NO: 53115

SEQ ID NO: 53154 - DNA, 201 bp, Homo sapiens; identical to SEQ ID NO: 53116

SEQ ID NO: 53155 - DNA, 201 bp, Homo sapiens; identical to SEQ ID NO: 53117

SEQ ID NO: 53156 - DNA, 201 bp, Homo sapiens; identical to SEQ ID NO: 53115

SEQ ID NO: 53157 - DNA, 201 bp, Homo sapiens; identical to SEQ ID NO: 53148

SEQ ID NO: 53158 - DNA, 201 bp, Homo sapiens; identical to SEQ ID NO: 53117

SEQ ID NO: 53159 - DNA, 201 bp, Homo sapiens
catgatttcacgttgataaacaaagaagacaggggtcccagggatgtgaagcatcttgcccaggcttctgctgctggtgaccagtgtagccaggactccarcccaggttttcctgactcagaagactgagctttttcctggatgttattaatagctaattgtgtccaagcaaccaagggccttgagtctgcttggttctgc

SEQ ID NO: 53160 - DNA, 201 bp, Homo sapiens
ggctgcgcgtttgaccgcccccctcctcgcgaaggcaatggcttccaaactcctgcgcgcggtcatcctcgggccgcccggctcgggcaagggcaccgtgwgccagaggatcgcccagaactttggtctccagcatctctccagcggccacttcttgcgggagaacatcaaggccagcaccgaagttggtgagatggcaaa

SEQ ID NO: 53161 - DNA, 201 bp, Homo sapiens
tccccatccatcctctcaaacataatgagattgtttactttttagatttatgcagtgaaaatgcccagtcaggtctgaatcgtcagtgcattatattgacyctgagcactttagaatttagagttgcaattgaatgccagctgtggagatggggtgcatatcagatatataaataaagctcaggtttgctagggaaccagg

SEQ ID NO: 53162 - DNA, 201 bp, Homo sapiens
taacactttagtggtgttgaaacacattacttactttctgaagatgtcccagtgaatcctctgtcaattcactgccatatgtaatctatatgataaggaawgcatcttccttctaagtactgcccaaactcttgccagctcctctcccattgtcccttcatgtgaatatttcttggctaccttagtggaaatatagatcag

SEQ ID NO: 53163 - DNA, 201 bp, Homo sapiens
aaacacttaaagatcgtctcagccgccgttggattcaccctcctagcggaagggtatataacctggacttcaatccacctcatgtacatggtattgatgaygtcactggtgaaccgttagtccagcaggaggatgataaacccgaagcagttgctgccaggctaagacagtacaaagacgtggcaaagccagtcattgaat

SEQ ID NO: 53164 - DNA, 201 bp, Homo sapiens
ggaaggattcttggagcgaggagccactgtggtttttcctgctatttaagatgttgagaccggataactttagaaagatacctgcacaaacccataaatastgcttttataaagtttagttcaccggaacctgagttcagtatttgacattagctttttgtccaaagagttgaagcctgctggaggtctttgctcaaataa

SEQ ID NO: 53165 - DNA, 201 bp, Homo sapiens
tctgcttgtcgtgcaacagttgaggcagtaaccaggggagattcacttcctgtcttgtccttccccagggatcacccccctgctgccctctagcagccaarctcagatgagttccattgttaccctaggtgtgcccatctctttggtagggaaggagaaaggtaagaatagccatcaatgaggaaggattcttggagcgag

SEQ ID NO: 53166 - DNA, 201 bp, Homo sapiens
gtctcagccgccgttggattcaccctcctagcggaagggtatataacctggacttcaatccacctcatgtacatggtattgatgacgtcactggtgaaccrttagtccagcaggaggatgataaacccgaagcagttgctgccaggctaagacagtacaaagacgtggcaaagccagtcattgaattatacaagagccgag

SEQ ID NO: 53167 - DNA, 201 bp, Homo sapiens
agtctttatgtaagctccaaggatattagggcttaaagggcttttctagttttatgagaatttgtactactgatttttatatattcctgtttttgagatgracagatctctggggaaattgttgagttacaatggcatttcactgtgatccctctcaagctcagatcagttctataacccaatgacaacctgtctctttgg

SEQ ID NO: 53168 - DNA, 201 bp, Homo sapiens
ttttcccttaaatgatattgtaaaaattaaagtaatcttgaaaatgttttgacaaaagtaaaattaaagggacatcttttcttgttttgttttttttttttctattgccacacatgaccgttccttcacctttaagcaaagagagtggttcagatggtttctaagatgccaacctgacctcgcattctgtcattctaccca

SEQ ID NO: 53169 - DNA, 201 bp, Homo sapiens
tttttggaaacaggaaaatcttcaaacttctttcttcacttccctttgtgtttagctgaccctccaatgtgatcattgcctttggagtttgggagaggtaygggaagtggcctgatccctgcttccatacttcactcctccatccatccttccctccctcttcccctccagctaaatggacaattctagccaacattgagt

SEQ ID NO: 53170 - DNA, 201 bp, Homo sapiens
catcttccttctaagtactgcccaaactcttgccagctcctctcccattgtcccttcatgtgaatatttcttggctaccttagtggaaatatagatcagtyttctccccatccatcctctcaaacataatgagattgtttactttttagatttatgcagtgaaaatgcccagtcaggtctgaatcgtcagtgcattatatt

SEQ ID NO: 53171 - DNA, 201 bp, Homo sapiens
gagcgatggggctatattgaatctctgtatgcactgagaactgagctatgaagaggatcttattaaactgctggtctgactttatggattgacactgttcmtttcttttattgtgaaaaaaaaaaaaaaaccctgaaagtcttgggaaccccctaaagtcttttgggaatcctcaaaaagcatgggaagttaagtatttag

SEQ ID NO: 53172 - DNA, 201 bp, Homo sapiens
ccctgctgccctctagcagccaagctcagatgagttccattgttaccctaggtgtgcccatctctttggtagggaaggagaaaggtaagaatagccatcartgaggaaggattcttggagcgaggagccactgtggtttttcctgctatttaagatgttgagaccggataactttagaaagatacctgcacaaacccataa

SEQ ID NO: 53173 - DNA, 201 bp, Homo sapiens
tccttttcagacatcctgggatgaaagaatttggcttttttttttttttttttttggacatctgttttcactcttaggcttttaaacaatagttattgctyttatccctctcagattctaataactgagagcgatggggctatattgaatctctgtatgcactgagaactgagctatgaagaggatcttattaaactgctg

SEQ ID NO: 53174 - DNA, 201 bp, Homo sapiens
ggggcggccggcgagtcccagtgagagcggagggtgccagaggtagggggccgagaaacaaagttcccggggcttcctccggggccgcggtcggggctgckcgtttgaccgcccccctcctcgcgaaggcaatggcttccaaactcctgcgcgcggtcatcctcgggccgcccggctcgggcaagggcaccgtgtgccaga

SEQ ID NO: 53175 - DNA, 201 bp, Homo sapiens
aatagctaattgtgtccaagcaaccaagggccttgagtctgcttggttctgcttatggcctcacatcaagaaatggagctagtccatgtctgtagtcccartgctttgggaagccatgatgggaaggttgtcggaggccaaaagttcaagaccaggctgggcaatatcacaagactccatctctacggaaaagtaaaaaat

SEQ ID NO: 53176 - DNA, 201 bp, Homo sapiens; identical to SEQ ID NO: 53159

SEQ ID NO: 53177 - DNA, 201 bp, Homo sapiens; identical to SEQ ID NO: 53161

SEQ ID NO: 53178 - DNA, 201 bp, Homo sapiens; identical to SEQ ID NO: 53167

SEQ ID NO: 53179 - DNA, 201 bp, Homo sapiens; identical to SEQ ID NO: 53168

SEQ ID NO: 53180 - DNA, 201 bp, Homo sapiens; identical to SEQ ID NO: 53169

SEQ ID NO: 53181 - DNA, 201 bp, Homo sapiens; identical to SEQ ID NO: 53162

SEQ ID NO: 53182 - DNA, 201 bp, Homo sapiens
tggacaaaatctatcgtctcagccgccgttggattcaccctcctagcggaagggtatataacctggacttcaatccacctcatgtacatggtattgatgaygtcactggtgaaccgttagtccagcaggaggatgataaacccgaagcagttgctgccaggctaagacagtacaaagacgtggcaaagccagtcattgaat

SEQ ID NO: 53183 - DNA, 201 bp, Homo sapiens; identical to SEQ ID NO: 53170

SEQ ID NO: 53184 - DNA, 201 bp, Homo sapiens; identical to SEQ ID NO: 53172

SEQ ID NO: 53185 - DNA, 201 bp, Homo sapiens; identical to SEQ ID NO: 53164

SEQ ID NO: 53186 - DNA, 201 bp, Homo sapiens; identical to SEQ ID NO: 53171

SEQ ID NO: 53187 - DNA, 201 bp, Homo sapiens; identical to SEQ ID NO: 53165

SEQ ID NO: 53188 - DNA, 201 bp, Homo sapiens; identical to SEQ ID NO: 53173

SEQ ID NO: 53189 - DNA, 201 bp, Homo sapiens; identical to SEQ ID NO: 53166

SEQ ID NO: 53190 - DNA, 201 bp, Homo sapiens; identical to SEQ ID NO: 53175

SEQ ID NO: 53191 - DNA, 201 bp, Homo sapiens; identical to SEQ ID NO: 53159

SEQ ID NO: 53192 - DNA, 201 bp, Homo sapiens; identical to SEQ ID NO: 53160

SEQ ID NO: 53193 - DNA, 201 bp, Homo sapiens; identical to SEQ ID NO: 53161

SEQ ID NO: 53194 - DNA, 201 bp, Homo sapiens; identical to SEQ ID NO: 53162

SEQ ID NO: 53195 - DNA, 201 bp, Homo sapiens; identical to SEQ ID NO: 53163

SEQ ID NO: 53196 - DNA, 201 bp, Homo sapiens; identical to SEQ ID NO: 53164

SEQ ID NO: 53197 - DNA, 201 bp, Homo sapiens; identical to SEQ ID NO: 53165

SEQ ID NO: 53198 - DNA, 201 bp, Homo sapiens; identical to SEQ ID NO: 53166

SEQ ID NO: 53199 - DNA, 201 bp, Homo sapiens; identical to SEQ ID NO: 53167

SEQ ID NO: 53200 - DNA, 201 bp, Homo sapiens; identical to SEQ ID NO: 53168

SEQ ID NO: 53201 - DNA, 201 bp, Homo sapiens; identical to SEQ ID NO: 53169

SEQ ID NO: 53202 - DNA, 201 bp, Homo sapiens; identical to SEQ ID NO: 53170

SEQ ID NO: 53203 - DNA, 201 bp, Homo sapiens; identical to SEQ ID NO: 53171

SEQ ID NO: 53204 - DNA, 201 bp, Homo sapiens; identical to SEQ ID NO: 53172

SEQ ID NO: 53205 - DNA, 201 bp, Homo sapiens; identical to SEQ ID NO: 53173

SEQ ID NO: 53206 - DNA, 201 bp, Homo sapiens; identical to SEQ ID NO: 53174

SEQ ID NO: 53207 - DNA, 201 bp, Homo sapiens; identical to SEQ ID NO: 53175

SEQ ID NO: 53208 - DNA, 201 bp, Homo sapiens; identical to SEQ ID NO: 53159

SEQ ID NO: 53209 - DNA, 201 bp, Homo sapiens; identical to SEQ ID NO: 53161

SEQ ID NO: 53210 - DNA, 201 bp, Homo sapiens; identical to SEQ ID NO: 53167

SEQ ID NO: 53211 - DNA, 201 bp, Homo sapiens; identical to SEQ ID NO: 53168

SEQ ID NO: 53212 - DNA, 201 bp, Homo sapiens; identical to SEQ ID NO: 53169

SEQ ID NO: 53213 - DNA, 201 bp, Homo sapiens; identical to SEQ ID NO: 53162

SEQ ID NO: 53214 - DNA, 201 bp, Homo sapiens; identical to SEQ ID NO: 53163

SEQ ID NO: 53215 - DNA, 201 bp, Homo sapiens; identical to SEQ ID NO: 53170

SEQ ID NO: 53216 - DNA, 201 bp, Homo sapiens; identical to SEQ ID NO: 53172

SEQ ID NO: 53217 - DNA, 201 bp, Homo sapiens; identical to SEQ ID NO: 53164

SEQ ID NO: 53218 - DNA, 201 bp, Homo sapiens; identical to SEQ ID NO: 53171

SEQ ID NO: 53219 - DNA, 201 bp, Homo sapiens; identical to SEQ ID NO: 53165

SEQ ID NO: 53220 - DNA, 201 bp, Homo sapiens; identical to SEQ ID NO: 53173

SEQ ID NO: 53221 - DNA, 201 bp, Homo sapiens; identical to SEQ ID NO: 53166

SEQ ID NO: 53222 - DNA, 201 bp, Homo sapiens; identical to SEQ ID NO: 53175

SEQ ID NO: 53223 - DNA, 201 bp, Homo sapiens; identical to SEQ ID NO: 53159

SEQ ID NO: 53224 - DNA, 201 bp, Homo sapiens; identical to SEQ ID NO: 53160

SEQ ID NO: 53225 - DNA, 201 bp, Homo sapiens; identical to SEQ ID NO: 53161

SEQ ID NO: 53226 - DNA, 201 bp, Homo sapiens; identical to SEQ ID NO: 53162

SEQ ID NO: 53227 - DNA, 201 bp, Homo sapiens; identical to SEQ ID NO: 53163

SEQ ID NO: 53228 - DNA, 201 bp, Homo sapiens; identical to SEQ ID NO: 53164

SEQ ID NO: 53229 - DNA, 201 bp, Homo sapiens; identical to SEQ ID NO: 53165

SEQ ID NO: 53230 - DNA, 201 bp, Homo sapiens; identical to SEQ ID NO: 53166

SEQ ID NO: 53231 - DNA, 201 bp, Homo sapiens; identical to SEQ ID NO: 53167

SEQ ID NO: 53232 - DNA, 201 bp, Homo sapiens; identical to SEQ ID NO: 53168

SEQ ID NO: 53233 - DNA, 201 bp, Homo sapiens; identical to SEQ ID NO: 53169

SEQ ID NO: 53234 - DNA, 201 bp, Homo sapiens; identical to SEQ ID NO: 53170

SEQ ID NO: 53235 - DNA, 201 bp, Homo sapiens; identical to SEQ ID NO: 53171

SEQ ID NO: 53236 - DNA, 201 bp, Homo sapiens; identical to SEQ ID NO: 53172

SEQ ID NO: 53237 - DNA, 201 bp, Homo sapiens; identical to SEQ ID NO: 53173

SEQ ID NO: 53238 - DNA, 201 bp, Homo sapiens; identical to SEQ ID NO: 53174

SEQ ID NO: 53239 - DNA, 201 bp, Homo sapiens; identical to SEQ ID NO: 53175

SEQ ID NO: 53240 - DNA, 201 bp, Homo sapiens; identical to SEQ ID NO: 53159

SEQ ID NO: 53241 - DNA, 201 bp, Homo sapiens; identical to SEQ ID NO: 53161

SEQ ID NO: 53242 - DNA, 201 bp, Homo sapiens; identical to SEQ ID NO: 53168

SEQ ID NO: 53243 - DNA, 201 bp, Homo sapiens; identical to SEQ ID NO: 53169

SEQ ID NO: 53244 - DNA, 201 bp, Homo sapiens; identical to SEQ ID NO: 53162

SEQ ID NO: 53245 - DNA, 201 bp, Homo sapiens; identical to SEQ ID NO: 53163

SEQ ID NO: 53246 - DNA, 201 bp, Homo sapiens; identical to SEQ ID NO: 53170

SEQ ID NO: 53247 - DNA, 201 bp, Homo sapiens; identical to SEQ ID NO: 53172

SEQ ID NO: 53248 - DNA, 201 bp, Homo sapiens; identical to SEQ ID NO: 53164

SEQ ID NO: 53249 - DNA, 201 bp, Homo sapiens; identical to SEQ ID NO: 53171

SEQ ID NO: 53250 - DNA, 201 bp, Homo sapiens; identical to SEQ ID NO: 53165

SEQ ID NO: 53251 - DNA, 201 bp, Homo sapiens; identical to SEQ ID NO: 53173

SEQ ID NO: 53252 - DNA, 201 bp, Homo sapiens; identical to SEQ ID NO: 53166

SEQ ID NO: 53253 - DNA, 201 bp, Homo sapiens; identical to SEQ ID NO: 53175

SEQ ID NO: 53254 - DNA, 201 bp, Homo sapiens; identical to SEQ ID NO: 53159

SEQ ID NO: 53255 - DNA, 201 bp, Homo sapiens; identical to SEQ ID NO: 53160

SEQ ID NO: 53256 - DNA, 201 bp, Homo sapiens; identical to SEQ ID NO: 53161

SEQ ID NO: 53257 - DNA, 201 bp, Homo sapiens; identical to SEQ ID NO: 53162

SEQ ID NO: 53258 - DNA, 201 bp, Homo sapiens; identical to SEQ ID NO: 53163

SEQ ID NO: 53259 - DNA, 201 bp, Homo sapiens; identical to SEQ ID NO: 53164

SEQ ID NO: 53260 - DNA, 201 bp, Homo sapiens; identical to SEQ ID NO: 53165

SEQ ID NO: 53261 - DNA, 201 bp, Homo sapiens; identical to SEQ ID NO: 53166

SEQ ID NO: 53262 - DNA, 201 bp, Homo sapiens; identical to SEQ ID NO: 53168

SEQ ID NO: 53263 - DNA, 201 bp, Homo sapiens; identical to SEQ ID NO: 53169

SEQ ID NO: 53264 - DNA, 201 bp, Homo sapiens; identical to SEQ ID NO: 53170

SEQ ID NO: 53265 - DNA, 201 bp, Homo sapiens; identical to SEQ ID NO: 53171

SEQ ID NO: 53266 - DNA, 201 bp, Homo sapiens; identical to SEQ ID NO: 53172

SEQ ID NO: 53267 - DNA, 201 bp, Homo sapiens; identical to SEQ ID NO: 53173

SEQ ID NO: 53268 - DNA, 201 bp, Homo sapiens; identical to SEQ ID NO: 53174

SEQ ID NO: 53269 - DNA, 201 bp, Homo sapiens; identical to SEQ ID NO: 53175

SEQ ID NO: 53270 - DNA, 201 bp, Homo sapiens
gggttgtcttaaaagtctctccttccccctgtaggcaatggcttccaaactcctgcgcgcggtcatcctcgggccgcccggctcgggcaagggcaccgtgwgccagaggatcgcccagaactttggtctccagcatctctccagcggccacttcttgcgggagaacatcaaggccagcaccggctcgtacgtgccggggcg

SEQ ID NO: 53271 - DNA, 201 bp, Homo sapiens; identical to SEQ ID NO: 53159

SEQ ID NO: 53272 - DNA, 201 bp, Homo sapiens; identical to SEQ ID NO: 53160

SEQ ID NO: 53273 - DNA, 201 bp, Homo sapiens; identical to SEQ ID NO: 53161

SEQ ID NO: 53274 - DNA, 201 bp, Homo sapiens; identical to SEQ ID NO: 53162

SEQ ID NO: 53275 - DNA, 201 bp, Homo sapiens; identical to SEQ ID NO: 53163

SEQ ID NO: 53276 - DNA, 201 bp, Homo sapiens; identical to SEQ ID NO: 53164

SEQ ID NO: 53277 - DNA, 201 bp, Homo sapiens; identical to SEQ ID NO: 53165

SEQ ID NO: 53278 - DNA, 201 bp, Homo sapiens; identical to SEQ ID NO: 53166

SEQ ID NO: 53279 - DNA, 201 bp, Homo sapiens; identical to SEQ ID NO: 53167

SEQ ID NO: 53280 - DNA, 201 bp, Homo sapiens; identical to SEQ ID NO: 53168

SEQ ID NO: 53281 - DNA, 201 bp, Homo sapiens; identical to SEQ ID NO: 53169

SEQ ID NO: 53282 - DNA, 201 bp, Homo sapiens; identical to SEQ ID NO: 53170

SEQ ID NO: 53283 - DNA, 201 bp, Homo sapiens; identical to SEQ ID NO: 53171

SEQ ID NO: 53284 - DNA, 201 bp, Homo sapiens; identical to SEQ ID NO: 53172

SEQ ID NO: 53285 - DNA, 201 bp, Homo sapiens; identical to SEQ ID NO: 53173

SEQ ID NO: 53286 - DNA, 201 bp, Homo sapiens; identical to SEQ ID NO: 53174

SEQ ID NO: 53287 - DNA, 201 bp, Homo sapiens; identical to SEQ ID NO: 53175

SEQ ID NO: 53288 - DNA, 137 bp, Homo sapiens
gtcgaggtggatggtttggccataagggtgtggctattaacatggtaacagaagaagacaagaggactctttaagaaactgagaccttatacaacacctcsattgaggtgatggccctcaatgttgctgacctcatc

SEQ ID NO: 53289 - DNA, 201 bp, Homo sapiens
tcaagcaaactggaatcaaggggagggggaagggaatgaaatggaaagggaggctgattcccttcccctgacttaccactaatttactaggctacctactytcatgagtaacctctcacagctacccagcacatgccacaatcctatgctcttgccttcttttatctgcactgtgtgaagggactcttttaaataaatgag

SEQ ID NO: 53290 - DNA, 201 bp, Homo sapiens
tttgtatcccctgttgtggcattttttttagataatctaagctagaaaaatgacattgaattctggacctggctggaaggaaaagaagccctttcttgtcrctggcagctgtgtggtagggaggtccaagtatgtgcatatgagataagcctgcaacctcttgaccttcagctcctatgcaggcttctcttgagcccagag

SEQ ID NO: 53291 - DNA, 201 bp, Homo sapiens
atttgtatcccctgttgtggcattttttttagataatctaagctagaaaaatgacattgaattctggacctggctggaaggaaaagaagccctttcttgtygctggcagctgtgtggtagggaggtccaagtatgtgcatatgagataagcctgcaacctcttgaccttcagctcctatgcaggcttctcttgagcccaga

SEQ ID NO: 53292 - DNA, 201 bp, Homo sapiens
agtgtgagcggcgagtgggacgtgcgtggcgtgcgtgcgttgacctgggaagcactggacctgtgaggcgtgcgaactggtggcagtgagagacttcggckgacatggctcccagcgtgccagcggcagaacccgagtatcctaaaggcatccgggccgtgctgctggggcctcccggggccggtaaagggacccaggcac

SEQ ID NO: 53293 - DNA, 201 bp, Homo sapiens
cactggacctgtgaggcgtgcgaactggtggcagtgagagacttcggcggacatggctcccagcgtgccagcggcagaacccgagtatcctaaaggcatcsgggccgtgctgctggggcctcccggggccggtaaagggacccaggcacccagattggctgaaaacttctgtgtctgccatttagctactggggacatgct

SEQ ID NO: 53294 - DNA, 201 bp, Homo sapiens
cctagtatcagaaggccaggcgagactgcaacactgctcatcaccccgcggcgtgatccctgctcttaggtgctgggcagaggggaagggtggtcagggtkaggatggtgagggagggctggtgaggggctcagaggaatacttggaacaacagcagtgttattgtagtgtggcagtttcttttatacataggtgagagtt

SEQ ID NO: 53295 - DNA, 201 bp, Homo sapiens
ctactctcatgagtaacctctcacagctacccagcacatgccacaatcctatgctcttgccttcttttatctgcactgtgtgaagggactcttttaaatawatgagcaagtgtcctaagctatgtcatccaaagattgtcctttccattctcaaatcctgtgactgggatcactcaacagcactgtgatgtattattttca

SEQ ID NO: 53296 - DNA, 201 bp, Homo sapiens
ggctggaagcaccactattcttctttaggcatcttgttacagagagaggcagggtcttcactgacatattaaatcctgttccctgaaccagcccctccctyttctgctccacttcctcacctgtgcagagtcattttcaggtgttagccttactgatttgcactgatctgtttgttccctgagctttttaaataccctgtg

SEQ ID NO: 53297 - DNA, 201 bp, Homo sapiens
taaatcctgttccctgaaccagcccctccctcttctgctccacttcctcacctgtgcagagtcattttcaggtgttagccttactgatttgcactgatctktttgttccctgagctttttaaataccctgtgaaaattttctttcctcccttggtcatcatgcatctaattgtggggaaatgtttgtcaaaccaacctgca

SEQ ID NO: 53298 - DNA, 201 bp, Homo sapiens; identical to SEQ ID NO: 53292

SEQ ID NO: 53299 - DNA, 201 bp, Homo sapiens; identical to SEQ ID NO: 53293

SEQ ID NO: 53300 - DNA, 201 bp, Homo sapiens
actcaaaccaccccactcatagagtactacaggaaacgggggatccactccgccatcgatgcatcccagacccccgatgtcgtgttcgcaagcatcctagyagccttctccaaagccacatgtaaagacttggttatgtttatctaatgttgggtccaagaaggaatttctttccatccctgtgaggcaatgggtgggaat

SEQ ID NO: 53301 - DNA, 201 bp, Homo sapiens; identical to SEQ ID NO: 53289

SEQ ID NO: 53302 - DNA, 201 bp, Homo sapiens; identical to SEQ ID NO: 53290

SEQ ID NO: 53303 - DNA, 201 bp, Homo sapiens; identical to SEQ ID NO: 53291

SEQ ID NO: 53304 - DNA, 201 bp, Homo sapiens; identical to SEQ ID NO: 53292

SEQ ID NO: 53305 - DNA, 201 bp, Homo sapiens; identical to SEQ ID NO: 53293

SEQ ID NO: 53306 - DNA, 201 bp, Homo sapiens
actcaaaccaccccactcatagagtactacaggaaacgggggatccactccgccatcgatgcatcccagacccccgatgtcgtgttcgcaagcatcctagyagccttctccaaagccacatcctagtatcagaaggccaggcgagactgcaacactgctcatcaccccgcggcgtgatccctgctcttaggtgctgggcag

SEQ ID NO: 53307 - DNA, 201 bp, Homo sapiens; identical to SEQ ID NO: 53294

SEQ ID NO: 53308 - DNA, 201 bp, Homo sapiens; identical to SEQ ID NO: 53295

SEQ ID NO: 53309 - DNA, 201 bp, Homo sapiens; identical to SEQ ID NO: 53296

SEQ ID NO: 53310 - DNA, 201 bp, Homo sapiens; identical to SEQ ID NO: 53297

SEQ ID NO: 53311 - DNA, 201 bp, Homo sapiens; identical to SEQ ID NO: 53289

SEQ ID NO: 53312 - DNA, 201 bp, Homo sapiens; identical to SEQ ID NO: 53290

SEQ ID NO: 53313 - DNA, 201 bp, Homo sapiens; identical to SEQ ID NO: 53291

SEQ ID NO: 53314 - DNA, 201 bp, Homo sapiens; identical to SEQ ID NO: 53292

SEQ ID NO: 53315 - DNA, 201 bp, Homo sapiens; identical to SEQ ID NO: 53293

SEQ ID NO: 53316 - DNA, 201 bp, Homo sapiens; identical to SEQ ID NO: 53300

SEQ ID NO: 53317 - DNA, 201 bp, Homo sapiens; identical to SEQ ID NO: 53294

SEQ ID NO: 53318 - DNA, 201 bp, Homo sapiens; identical to SEQ ID NO: 53295

SEQ ID NO: 53319 - DNA, 201 bp, Homo sapiens; identical to SEQ ID NO: 53296

SEQ ID NO: 53320 - DNA, 201 bp, Homo sapiens; identical to SEQ ID NO: 53297

SEQ ID NO: 53321 - DNA, 201 bp, Homo sapiens; identical to SEQ ID NO: 53289

SEQ ID NO: 53322 - DNA, 201 bp, Homo sapiens; identical to SEQ ID NO: 53290

SEQ ID NO: 53323 - DNA, 201 bp, Homo sapiens; identical to SEQ ID NO: 53291

SEQ ID NO: 53324 - DNA, 201 bp, Homo sapiens; identical to SEQ ID NO: 53292

SEQ ID NO: 53325 - DNA, 201 bp, Homo sapiens; identical to SEQ ID NO: 53293

SEQ ID NO: 53326 - DNA, 201 bp, Homo sapiens; identical to SEQ ID NO: 53306

SEQ ID NO: 53327 - DNA, 201 bp, Homo sapiens; identical to SEQ ID NO: 53294

SEQ ID NO: 53328 - DNA, 201 bp, Homo sapiens; identical to SEQ ID NO: 53295

SEQ ID NO: 53329 - DNA, 201 bp, Homo sapiens; identical to SEQ ID NO: 53296

SEQ ID NO: 53330 - DNA, 201 bp, Homo sapiens; identical to SEQ ID NO: 53297

SEQ ID NO: 53331 - DNA, 190 bp, Homo sapiens
ataccctgctgggcaaaggaggaagagccagaggatccagacgccttggaggacttggaacacctgtaacaggacaaggagttctgctcmggcacgtggccacagaaaactacttaggaagcctgtggtgagaacaacaacagtgcctgagaatcccacggctctggggaagtgagccccgaggatgagg

SEQ ID NO: 53332 - DNA, 183 bp, Homo sapiens
ataccctgctgggcaaaggaggaagagccagaggatccagacgccttggaggacttggaacacctgtaacaggacaaggagtyctgctcaggcacgtggccacagaaaactacttaggaagcctgtggtgagaacaacaacagtgcctgagaatcccacggctctggggaagtgagccccgag

SEQ ID NO: 53333 - DNA, 201 bp, Homo sapiens
ggccacgtgcccccggggttctttgagaagacgcaaaacaaggcatggttccgggagggcttcaatgaaaaatacctgaaggtggtccggaagcatcatcrcgtcatagcagggcagttcttcgggcaccaccacaccgacagctttcggatgctctatgatgatgcaggtgtccccataagcgccatgttcatcacacct

SEQ ID NO: 53334 - DNA, 201 bp, Homo sapiens
atgcgctgacagcagacatggcggaccctggccagcagttccagtggctggaagatgtgctgaccgatgcatccaaagctggggacatggtgtacattgtyggccacgtgcccccggggttctttgagaagacgcaaaacaaggcatggttccgggagggcttcaatgaaaaatacctgaaggtggtccggaagcatcatc

SEQ ID NO: 53335 - DNA, 201 bp, Homo sapiens
atggtgtacattgtcggccacgtgcccccggggttctttgagaagacgcaaaacaaggcatggttccgggagggcttcaatgaaaaatacctgaaggtggyccggaagcatcatcgcgtcatagcagggcagttcttcgggcaccaccacaccgacagctttcggatgctctatgatgatgcaggtgtccccataagcgcc

SEQ ID NO: 53336 - DNA, 201 bp, Homo sapiens
ttttcctggctaactggggaggtgccagggctgaaccagggaagttctggcacatcgctgacctgcaccttgaccctgactacaaggtatccaaagacccyttccaggtgtgcccatcagctggatcccagccagtgcccgacgcaggcccctggggtgactacctctgtgattctccctgggccctcatcaactcctcca

SEQ ID NO: 53337 - DNA, 190 bp, Homo sapiens; identical to SEQ ID NO: 53331

SEQ ID NO: 53338 - DNA, 201 bp, Homo sapiens
aatgctcaggggacgccgcgctgggagctcgagtaccagctgaccgaggcctatggggtgccggacgccagcgcccactccatgcacacagtgctggaccrcatcgctggcgaccagagcacactgcagcgctactacgtctataactcagtcagctactctgctggggtctgcgacgaggcctgcagcatgcagcacgtg

SEQ ID NO: 53339 - DNA, 130 bp, Homo sapiens
ggcgacaaagccagactctctccaaaaacaaaccagaaacagaaaagaaatgacgacccaagacccccctacaagcatacttcttttgcgtattatgtttwactcacaaaacaaagctcatcatgcgttt

SEQ ID NO: 53340 - DNA, 201 bp, Homo sapiens
ccgcgcctgaggagtgaactgaaataggacaaccgaatcaggaagcgaagccccaggagctgcagccatccgtgatcgcgccactgcactccagcctgggygacaaagccagactctctccaaaaacaaaccagaaacagaaaagaaatgacgacccaagacccccctacaagcatacttcttttgcgtattatgttttac

SEQ ID NO: 53341 - DNA, 201 bp, Homo sapiens; identical to SEQ ID NO: 53334

SEQ ID NO: 53342 - DNA, 201 bp, Homo sapiens; identical to SEQ ID NO: 53335

SEQ ID NO: 53343 - DNA, 183 bp, Homo sapiens; identical to SEQ ID NO: 53332

SEQ ID NO: 53344 - DNA, 201 bp, Homo sapiens; identical to SEQ ID NO: 53333

SEQ ID NO: 53345 - DNA, 201 bp, Homo sapiens; identical to SEQ ID NO: 53336

SEQ ID NO: 53346 - DNA, 201 bp, Homo sapiens
caccaaggctcgtcccagaaggaggtgatgtggacagcgtagctccggcgccagtggaagtagcggcgatagaccgcggggttgcggtcgaggaaaagcargtacgaggccagggaggaggcacttgggaagtcgtccacgtggatgaaggcgccgcggggcacaaagcgctcgtagttggcacggtctgggcccagcacc

SEQ ID NO: 53347 - DNA, 201 bp, Homo sapiens
gctctttttaagtggtgaaagcaatgcatttttattcttcaaattcagacattgaatgtgtattaaaatgtgtgtgcttacctttaatcctctccccaccracaattaggaacacgtttctccaattactgttggcaagactaccaagaaaaattgttgaattagaatcccagcaccgggcacggtggctcacgcctgtga

SEQ ID NO: 53348 - DNA, 201 bp, Homo sapiens
aggcatggtggtgggcgcctgtaatcccaactactcaggaggctgaggcaggagaattgcttgaacctgggagttggaggtcacggtgagctgatatcacrccattgcactccagcctgggcaacagagcaagactctgtctcaatcaatctatccatcaatcgataagaaccccagattgtatagctacatgttttagcc

SEQ ID NO: 53349 - DNA, 194 bp, Homo sapiens
ttggtacttattttgacattctgacttttctacatatgctttatcaacctcttaattaaaccatcattgtctattttgagagataactgcgctgcttcccrttgtgtgttttaaatgttattgttcagtttgagtcaaataaaaggatatttaatctgtggtgccttgacattaaaagtggtaaagtgattttt

SEQ ID NO: 53350 - DNA, 201 bp, Homo sapiens
gcaagactctgtctcaatcaatctatccatcaatcgataagaaccccagattgtatagctacatgttttagcccccttttcaaagtatatgttctccttgvtacttattttgacattctgacttttctacatatgctttatcaacctcttaattaaaccatcattgtctattttgagagataactgcgctgcttcccgttg

SEQ ID NO: 53351 - DNA, 201 bp, Homo sapiens
gcggatcacctgaggtcaggagttcgagaccagcagggccaacatggcgaaaccccgactctactaaaaatacaaaaattagccaggcatggtggtgggcrcctgtaatcccaactactcaggaggctgaggcaggagaattgcttgaacctgggagttggaggtcacggtgagctgatatcacgccattgcactccagcc

SEQ ID NO: 53352 - DNA, 201 bp, Homo sapiens
ccgggcacggtggctcacgcctgtgatcctagcactttgggaggccaaagcaggcggatcacctgaggtcaggagttcgagaccagcagggccaacatggygaaaccccgactctactaaaaatacaaaaattagccaggcatggtggtgggcgcctgtaatcccaactactcaggaggctgaggcaggagaattgcttga

SEQ ID NO: 53353 - DNA, 201 bp, Homo sapiens
accataaaaatgagtactgcagatgcacttgatgatgaaaacacatttaaaatattagttgcaacagatattcatcttggatttatggagaaagatgcagycagaggaaatgatacgtttgtaacactcgatgaaattttaagacttgcccaggaaaatgaagtggattttattttgttaggtggtgatctttttcatgaa

SEQ ID NO: 53354 - DNA, 201 bp, Homo sapiens
ttgatgatgaaaacacatttaaaatattagttgcaacagatattcatcttggatttatggagaaagatgcagtcagaggaaatgatacgtttgtaacactygatgaaattttaagacttgcccaggaaaatgaagtggattttattttgttaggtggtgatctttttcatgaaaataagccctcaaggaaaacattacata

SEQ ID NO: 53355 - DNA, 201 bp, Homo sapiens
tccataagtaagaaatttctagttcacagacatacaatagcattgattcaccttgtttttttaacctggttgttgtagtaagagctttgtttcaatatcastcttgagtaaagattaaaataaagctaccattttacatttctatttcataatgaaaaactatgtcagtattttaatatggttacatttagccaaagttga

SEQ ID NO: 53356 - DNA, 113 bp, Homo sapiens
tacgttatccatraagtgtcgcgagagaaacggacgccgttctctcccgcggaattcaggtttacggccctgcgggttctcagagaatttctagaatttggaatcgagtgcat

SEQ ID NO: 53357 - DNA, 201 bp, Homo sapiens
aagtattgtttcctgagcataactccataagtaagaaatttctagttcacagacatacaatagcattgattcaccttgtttttttaacctggttgttgtartaagagctttgtttcaatatcactcttgagtaaagattaaaataaagctaccattttacatttctatttcataatgaaaaactatgtcagtattttaata

SEQ ID NO: 53358 - DNA, 201 bp, Homo sapiens
tttagtaatttcctagaggttctgggttttctgaaagtaaaacaatttatgcgaacctatgtctaaattcactgtttgttactatgtatgtttttttccartgcttcttataagactaaatgattagaagtacctaatagtttgaacagatatgtttttatttaaaagagtagaataacctttcagaattactgagttttt

SEQ ID NO: 53359 - DNA, 201 bp, Homo sapiens
atagaagataatatatttaatggcactgagaaacatgcaagatacaggaaaaatgaaaatgttacaagctaagagtttacagtttaagattttaagtattrtttcctgagcataactccataagtaagaaatttctagttcacagacatacaatagcattgattcaccttgtttttttaacctggttgttgtagtaagagc

SEQ ID NO: 53360 - DNA, 201 bp, Homo sapiens
atattgttctagctaatcatccagacatttttaacccagataatcctaaagtaacccaagccatacaaagcttctgtttggagaagattgaagaaatgctkgaaaatgctgaacgggaacgtctgggtaattctcaccagccagagaagcctcttgtacgactgcgagtggactatagtggaggttttgaacctttcagtg

SEQ ID NO: 53361 - DNA, 201 bp, Homo sapiens
cagtactttcaaaccgcagagaagaatgtgcagctctcactgctaacagaaagagggatgggtgaagcagtacaagaatttgtggacaaggaggagaaagrtgccattgaggaattagtgaaataccagttggaaaaaacacagcgatttcttaaagaacgtcatattgatgccctcgaagacaaaatcgatgaggaggta

SEQ ID NO: 53362 - DNA, 201 bp, Homo sapiens
aaggtggtccagcacatcatccagcaaaatcatgtcccagagtcaagtatcgaaaggggttgattttgaatcaagtgaggatgatgatgatgatccttttrtgaacactagttctttaagaagaaatagaagataatatatttaatggcactgagaaacatgcaagatacaggaaaaatgaaaatgttacaagctaagagt

SEQ ID NO: 53363 - DNA, 201 bp, Homo sapiens
tgaactatcaagatggcaacctcaacatttcaattccagtgtttagtattcatggcaatcatgacgatcccacaggggcagatgcactttgtgccttggayattttaagttgtgctggatttgtaaatcactttggacgttcaatgtctgtggagaagatagacattagtccggttttgcttcaaaaaggaagcacaaaga

SEQ ID NO: 53364 - DNA, 201 bp, Homo sapiens
aagggaggaagatgaatatgcataaaattcctcttcacacagtgcggcagtttttcatggaggatattgttctagctaatcatccagacatttttaacccrgataatcctaaagtaacccaagccatacaaagcttctgtttggagaagattgaagaaatgcttgaaaatgctgaacgggaacgtctgggtaattctcacc

SEQ ID NO: 53365 - DNA, 201 bp, Homo sapiens; identical to SEQ ID NO: 53353

SEQ ID NO: 53366 - DNA, 201 bp, Homo sapiens; identical to SEQ ID NO: 53355

SEQ ID NO: 53367 - DNA, 201 bp, Homo sapiens; identical to SEQ ID NO: 53360

SEQ ID NO: 53368 - DNA, 201 bp, Homo sapiens; identical to SEQ ID NO: 53363

SEQ ID NO: 53369 - DNA, 201 bp, Homo sapiens; identical to SEQ ID NO: 53364

SEQ ID NO: 53370 - DNA, 201 bp, Homo sapiens; identical to SEQ ID NO: 53354

SEQ ID NO: 53371 - DNA, 167 bp, Homo sapiens
agagaaacggacgccgttctctcccgcggaattcaggtttacggccctgcgggttctcagaggcaarttcagaccgtgttgttttcttttcacggatcctgccctttcttcccgaaaagaagacagccttgggtcgcgattgtggggcttcgaagagtccagcagtg

SEQ ID NO: 53372 - DNA, 201 bp, Homo sapiens; identical to SEQ ID NO: 53357

SEQ ID NO: 53373 - DNA, 201 bp, Homo sapiens; identical to SEQ ID NO: 53358

SEQ ID NO: 53374 - DNA, 201 bp, Homo sapiens; identical to SEQ ID NO: 53359

SEQ ID NO: 53375 - DNA, 201 bp, Homo sapiens; identical to SEQ ID NO: 53361

SEQ ID NO: 53376 - DNA, 201 bp, Homo sapiens; identical to SEQ ID NO: 53362

SEQ ID NO: 53377 - DNA, 201 bp, Homo sapiens; identical to SEQ ID NO: 53353

SEQ ID NO: 53378 - DNA, 201 bp, Homo sapiens; identical to SEQ ID NO: 53355

SEQ ID NO: 53379 - DNA, 201 bp, Homo sapiens; identical to SEQ ID NO: 53360

SEQ ID NO: 53380 - DNA, 201 bp, Homo sapiens; identical to SEQ ID NO: 53363

SEQ ID NO: 53381 - DNA, 201 bp, Homo sapiens; identical to SEQ ID NO: 53364

SEQ ID NO: 53382 - DNA, 201 bp, Homo sapiens; identical to SEQ ID NO: 53354

SEQ ID NO: 53383 - DNA, 101 bp, Homo sapiens
gttttttattccagttgtagcaaagatttcaaaagattgtgttcccattaagtggtagtaatttcctttattattctgtatccttaatggtgttctctctr

SEQ ID NO: 53384 - DNA, 201 bp, Homo sapiens; identical to SEQ ID NO: 53357

SEQ ID NO: 53385 - DNA, 201 bp, Homo sapiens; identical to SEQ ID NO: 53358

SEQ ID NO: 53386 - DNA, 201 bp, Homo sapiens; identical to SEQ ID NO: 53359

SEQ ID NO: 53387 - DNA, 201 bp, Homo sapiens; identical to SEQ ID NO: 53361

SEQ ID NO: 53388 - DNA, 201 bp, Homo sapiens; identical to SEQ ID NO: 53362

SEQ ID NO: 53389 - DNA, 201 bp, Homo sapiens; identical to SEQ ID NO: 53353

SEQ ID NO: 53390 - DNA, 201 bp, Homo sapiens; identical to SEQ ID NO: 53355

SEQ ID NO: 53391 - DNA, 201 bp, Homo sapiens; identical to SEQ ID NO: 53360

SEQ ID NO: 53392 - DNA, 201 bp, Homo sapiens; identical to SEQ ID NO: 53363

SEQ ID NO: 53393 - DNA, 201 bp, Homo sapiens; identical to SEQ ID NO: 53364

SEQ ID NO: 53394 - DNA, 201 bp, Homo sapiens; identical to SEQ ID NO: 53354

SEQ ID NO: 53395 - DNA, 167 bp, Homo sapiens; identical to SEQ ID NO: 53371

SEQ ID NO: 53396 - DNA, 201 bp, Homo sapiens; identical to SEQ ID NO: 53357

SEQ ID NO: 53397 - DNA, 201 bp, Homo sapiens; identical to SEQ ID NO: 53358

SEQ ID NO: 53398 - DNA, 201 bp, Homo sapiens; identical to SEQ ID NO: 53359

SEQ ID NO: 53399 - DNA, 201 bp, Homo sapiens; identical to SEQ ID NO: 53361

SEQ ID NO: 53400 - DNA, 201 bp, Homo sapiens; identical to SEQ ID NO: 53362

SEQ ID NO: 53401 - DNA, 201 bp, Homo sapiens; identical to SEQ ID NO: 53353

SEQ ID NO: 53402 - DNA, 201 bp, Homo sapiens
aataattataaattgagcactgatggaatccctctacaggtcaagaaatagcgcagtgtcctggatgcccattatattgttttctcctttctgggtaacargccctaacttctgtaatttaaaagctcctacttttgccacaaggtggtgcttctgccattagacgcagttaggaggatgcaactgcaaatctaaaattac

SEQ ID NO: 53403 - DNA, 201 bp, Homo sapiens; identical to SEQ ID NO: 53347

SEQ ID NO: 53404 - DNA, 201 bp, Homo sapiens; identical to SEQ ID NO: 53348

SEQ ID NO: 53405 - DNA, 180 bp, Homo sapiens
ttggtacttattttgacattctgacttttctacatatgctttatcaacctcttaattaaaccatcattgtctattttgagagataactgcgctgcttcccrttgtgtgttttaaatgttattgttcagtttgagtcaaataaaaggatatttaatctgtggtgccttgacattaaaagtg

SEQ ID NO: 53406 - DNA, 201 bp, Homo sapiens; identical to SEQ ID NO: 53350

SEQ ID NO: 53407 - DNA, 201 bp, Homo sapiens; identical to SEQ ID NO: 53355

SEQ ID NO: 53408 - DNA, 201 bp, Homo sapiens; identical to SEQ ID NO: 53352

SEQ ID NO: 53409 - DNA, 201 bp, Homo sapiens; identical to SEQ ID NO: 53360

SEQ ID NO: 53410 - DNA, 201 bp, Homo sapiens; identical to SEQ ID NO: 53363

SEQ ID NO: 53411 - DNA, 201 bp, Homo sapiens; identical to SEQ ID NO: 53364

SEQ ID NO: 53412 - DNA, 201 bp, Homo sapiens; identical to SEQ ID NO: 53354

SEQ ID NO: 53413 - DNA, 167 bp, Homo sapiens; identical to SEQ ID NO: 53371

SEQ ID NO: 53414 - DNA, 201 bp, Homo sapiens; identical to SEQ ID NO: 53357

SEQ ID NO: 53415 - DNA, 201 bp, Homo sapiens; identical to SEQ ID NO: 53351

SEQ ID NO: 53416 - DNA, 201 bp, Homo sapiens; identical to SEQ ID NO: 53358

SEQ ID NO: 53417 - DNA, 201 bp, Homo sapiens; identical to SEQ ID NO: 53359

SEQ ID NO: 53418 - DNA, 201 bp, Homo sapiens; identical to SEQ ID NO: 53361

SEQ ID NO: 53419 - DNA, 201 bp, Homo sapiens; identical to SEQ ID NO: 53362

SEQ ID NO: 53420 - DNA, 201 bp, Homo sapiens; identical to SEQ ID NO: 53353

SEQ ID NO: 53421 - DNA, 201 bp, Homo sapiens; identical to SEQ ID NO: 53402

SEQ ID NO: 53422 - DNA, 201 bp, Homo sapiens; identical to SEQ ID NO: 53347

SEQ ID NO: 53423 - DNA, 201 bp, Homo sapiens; identical to SEQ ID NO: 53348

SEQ ID NO: 53424 - DNA, 180 bp, Homo sapiens; identical to SEQ ID NO: 53405

SEQ ID NO: 53425 - DNA, 201 bp, Homo sapiens; identical to SEQ ID NO: 53350

SEQ ID NO: 53426 - DNA, 201 bp, Homo sapiens; identical to SEQ ID NO: 53355

SEQ ID NO: 53427 - DNA, 201 bp, Homo sapiens; identical to SEQ ID NO: 53352

SEQ ID NO: 53428 - DNA, 201 bp, Homo sapiens; identical to SEQ ID NO: 53360

SEQ ID NO: 53429 - DNA, 201 bp, Homo sapiens; identical to SEQ ID NO: 53363

SEQ ID NO: 53430 - DNA, 201 bp, Homo sapiens; identical to SEQ ID NO: 53364

SEQ ID NO: 53431 - DNA, 201 bp, Homo sapiens; identical to SEQ ID NO: 53354

SEQ ID NO: 53432 - DNA, 167 bp, Homo sapiens; identical to SEQ ID NO: 53371

SEQ ID NO: 53433 - DNA, 201 bp, Homo sapiens; identical to SEQ ID NO: 53357

SEQ ID NO: 53434 - DNA, 201 bp, Homo sapiens; identical to SEQ ID NO: 53351

SEQ ID NO: 53435 - DNA, 201 bp, Homo sapiens; identical to SEQ ID NO: 53358

SEQ ID NO: 53436 - DNA, 201 bp, Homo sapiens; identical to SEQ ID NO: 53359

SEQ ID NO: 53437 - DNA, 201 bp, Homo sapiens; identical to SEQ ID NO: 53361

SEQ ID NO: 53438 - DNA, 201 bp, Homo sapiens; identical to SEQ ID NO: 53362

SEQ ID NO: 53439 - DNA, 201 bp, Homo sapiens
acattcaatccaatttggacttctctccagtaaacagtgcttctagtgaagaaaatgtgaagtactccagttctcagccagaaccccgcacaggtctttcyttatgggataccagcccctcatacattgataaattggtacaagggatcagcttttcccagcccacatgtcctgatcatatgcttttgaatagtcagttac

SEQ ID NO: 53440 - DNA, 201 bp, Homo sapiens
attggttgacttccggctttctaagggtgatggattggagttcaagagacacttcctgaagattaaagggaagctgattgatattgtgagcagccagaagrtttggcttcctgccacatgatcggaccatcggctctggggaatcctggtgaatatagtgctgctatgttgacattattcttcctagagaagattatcctg

SEQ ID NO: 53441 - DNA, 167 bp, Homo sapiens
ttccccagtcgttcgccggaaagcatttgtctcccacctcttcataacaacaattaatttcctctgrggcctgaggagggcagaatttcaaccttcggtgtgcttgggagtggcgattgtgatttacacgacaaaatgccgaggtgctcggtggagtcatggcagtg

SEQ ID NO: 53442 - DNA, 201 bp, Homo sapiens
tctggtggaaaccaagtttcaggggacatgagttttccagcttttatacacacgtatctcatttttatcaaaacattttgtttaattcaaaaagtacataytccatgttgatttaattctaagatgaaccaataaagacataattcttgtgacttttggacagtagatttatcagtctgtgaagcgaagccagcttcaaaa

SEQ ID NO: 53443 - DNA, 201 bp, Homo sapiens
tcctgccacatgatcggaccatcggctctggggaatcctggttgaggccttggctcctgcctgtagtcccagctacttaggaggctgagagaggaggatcrcgtgaacctggaagtttgaggctgtagtgagctatgattgcaccagtgcactccagcttggatgacagagtaagaccctacctctaataaaaatttttaa

SEQ ID NO: 53444 - DNA, 201 bp, Homo sapiens; identical to SEQ ID NO: 53439

SEQ ID NO: 53445 - DNA, 201 bp, Homo sapiens
attggttgacttccggctttctaagggtgatggattggagttcaagagacacttcctgaagattaaagggaagctgattgatattgtgagcagccagaagrtttggcttcctgccacatgatcggaccatcggctctggggaatcctggttgaggccttggctcctgcctgtagtcccagctacttaggaggctgagagag

SEQ ID NO: 53446 - DNA, 145 bp, Homo sapiens
gagcaattgggaggaggcgctgccgcaggcgttttctgccccatwccgctccctatatcctcttcctctcttccccagacccccacctctccctcctccttccccagtcgttcgccggaaagcatttgtctcccacctcttcata

SEQ ID NO: 53447 - DNA, 201 bp, Homo sapiens
ctctcttccccagacccccacctctccctcctccttccccagtcgttcgccggaaagcatttgtctcccacctcttcataacaacaattaatttcctctgrggcctgaggagggcagaatttcaaccttcggtgtgcttgggagtggcgattgtgatttacacgacaaaatggtcaggtttagaatagttgttcgtggttg

SEQ ID NO: 53448 - DNA, 201 bp, Homo sapiens
cagagcacatggcagcctttggggtctttggtctctgccagatccatgcctttgtggattacctgcgcagcaagttgaatccacaacaatttgaagttctyttccggagcgtcatctctctggtaggctttgtccttctcaccgtgggagctctcctcatgctgacaggaaaaatatctccctggacggggcgtttctact

SEQ ID NO: 53449 - DNA, 201 bp, Homo sapiens
gcagtttgtaagaacaaaactggatggcatcagaattgtctggaagttttgtcttgggcagtatgggctgggccaaatgaaatgatttttataattctaamcaggttaccaaatgaaatgtcatggctttactttggtcaattaaaggggggaatttttttaaaaaatgtgccttatttgttttgacttataactgatttg

SEQ ID NO: 53450 - DNA, 201 bp, Homo sapiens
tgcgtctaatgctagtgttggcacctgttatgtgcattctctctggcattggagtctcccaggtgctgtccacatacatgaagaatctggacataagtcgyccagacaagaagagcaagaagcaacaggattccacctaccctattaagaatgaagtggcaagtgggatgatactggtcatggctttctttctcatcacct

SEQ ID NO: 53451 - DNA, 201 bp, Homo sapiens
gagaagcatattattggcttcgtcataatactccagaggatgcgaaggtcatgtcctggtgggattatggctatcagattacagctatggcaaaccgaacrattttagtggacaataacacatggaataatacccatatttctcgagtagggcaggcaatggcgtccacagaggaaaaagcctatgagatcatgagggagc

SEQ ID NO: 53452 - DNA, 201 bp, Homo sapiens
ggaggaagcatataccacagaacattggctggtcaggatatacaaggtaaaggacctggataatcgaggcttgtcaaggacataaatgtcacgtccagctytgatatgcttcgcactgagcacatcacatttaggacgttgaagatttttttttttttttttttttaatatgcagtttgtaagaacaaaactggatggcat

SEQ ID NO: 53453 - DNA, 201 bp, Homo sapiens
ccatctgttgggcagctaagtgtgcccttgcttatttctacatggtctcgtcatggggaggttatgtgttcctgatcaacttaattcctctccacgtcctsgtgctgatgctcacaggccgtttctctcaccggatctatgtggcctactgtactgtttactgcctgggcactatactttctatgcagatctcctttgtgg

SEQ ID NO: 53454 - DNA, 201 bp, Homo sapiens
tccggagcgtcatctctctggtaggctttgtccttctcaccgtgggagctctcctcatgctgacaggaaaaatatctccctggacggggcgtttctactcrctgctggatccctcttatgctaagaacaacatccccatcattgcttctgtgtctgagcatcagcccacaacctggtcctcatactattttgacctgcagc

SEQ ID NO: 53455 - DNA, 201 bp, Homo sapiens
ggcaaaagctatgctaggctgccagaaggacataagcagaccttgtccattctcttagctccctaaattagccaaatagagacttctttctcaaatcaggraaactatcaaagaccaattcagatcctacatttacagacagttttgtcataaccctttgcattgcagcacctagtacaattccttggaaacagcgtggct

SEQ ID NO: 53456 - DNA, 201 bp, Homo sapiens
ggaaagccggccagctgatcgtcgtgtgttgccacccattcatgtcaagatgactaagtttggatttttgcgattgtcctatgagaagcaggacacacttytgaagcttctcattctgtcaatggctgctgtattatccttctccactcgtctgtttgctgtcctgagatttgaaagtgttatccatgagtttgatccgta

SEQ ID NO: 53457 - DNA, 201 bp, Homo sapiens
tatgggctgggccaaatgaaatgatttttataattctaaacaggttaccaaatgaaatgtcatggctttactttggtcaattaaaggggggaatttttttwaaaaatgtgccttatttgttttgacttataactgatttgagggaggcaaaagctatgctaggctgccagaaggacataagcagaccttgtccattctctt

SEQ ID NO: 53458 - DNA, 201 bp, Homo sapiens
aagtggcaagtgggatgatactggtcatggctttctttctcatcacctacacctttcattcaacctgggtgaccagtgaggcctactcttctccgtccatygtactatctgcccgtggtggggatggcagtaggatcatatttgatgacttccgagaagcatattattggcttcgtcataatactccagaggatgcgaagg

SEQ ID NO: 53459 - DNA, 201 bp, Homo sapiens; identical to SEQ ID NO: 53448

SEQ ID NO: 53460 - DNA, 201 bp, Homo sapiens; identical to SEQ ID NO: 53450

SEQ ID NO: 53461 - DNA, 201 bp, Homo sapiens; identical to SEQ ID NO: 53451

SEQ ID NO: 53462 - DNA, 201 bp, Homo sapiens
taagctaagcagatggtcttcctgcaaaaagaccgggctgaagtaaagcattgttttggagctggttcacagaaaaaaggcaaaactggttatcctgactycaagctccaacataaactgctcgctttctccgggaaacttgccccgccacatacacttgactgcgtggccagttctttcgaagcctctcgctcccaacac

SEQ ID NO: 53463 - DNA, 201 bp, Homo sapiens
gttttggagctggttcacagaaaaaaggcaaaactggttatcctgacttcaagctccaacataaactgctcgctttctccgggaaacttgccccgccacayacacttgactgcgtggccagttctttcgaagcctctcgctcccaacacggagttcctcccatttcttcacagtcggctctcagcagctgctgctggtttc

SEQ ID NO: 53464 - DNA, 201 bp, Homo sapiens
tgagttccagtctagtttactgtcagagaatacttatttccatttttcctattttgttcttgagtctctttcctcagaatttacttttccacttaaatgaygtacgcagcttttaaatttgcgttgtaagatttattttggctctccccgcctgttctttgcacattaaaaatgaaaaagtttgtagaactaagctaagca

SEQ ID NO: 53465 - DNA, 201 bp, Homo sapiens
cgactgtgatcctcacagtcctgtccggtggcctcacgcaggtggcggtgcagcctttcaggcccagagcggccaggagcgaagcccgcagccccgcctgkaagcgcagcgcggtcggtcgcgcgcccctgaggcttggaggcctgggcttcccccagcagcgctcgagcaccgcccagtcgagcctcacaccggatgcca

SEQ ID NO: 53466 - DNA, 201 bp, Homo sapiens
tcctgccacatgatcggaccatcggctctggggaatcctggttgaggccttggctcctgcctgtagtcccagctacttaggaggctgagagaggaggatcrcgtgaacctggaagtttgaggctgtagtgagctatgattgcaccagtgcactccagcttggatgacagaatggagtttcactcttgtctcccaggctgga

SEQ ID NO: 53467 - DNA, 201 bp, Homo sapiens; identical to SEQ ID NO: 53454

SEQ ID NO: 53468 - DNA, 201 bp, Homo sapiens; identical to SEQ ID NO: 53453

SEQ ID NO: 53469 - DNA, 201 bp, Homo sapiens; identical to SEQ ID NO: 53439

SEQ ID NO: 53470 - DNA, 201 bp, Homo sapiens; identical to SEQ ID NO: 53445

SEQ ID NO: 53471 - DNA, 201 bp, Homo sapiens
ctaagctaagcagatggtcttcctgcaaaaagaccgggctgaagtaaagcattgttttggagctggttcacagaaaaaaggcaaaactggttatcctgacytcaagctccaacataaactgctcgctttctccgggaaacttgccccgccacatacacttgactgcgtggccagttctttcgaagcctctcgctcccaaca

SEQ ID NO: 53472 - DNA, 201 bp, Homo sapiens; identical to SEQ ID NO: 53456

SEQ ID NO: 53473 - DNA, 201 bp, Homo sapiens; identical to SEQ ID NO: 53458

SEQ ID NO: 53474 - DNA, 201 bp, Homo sapiens; identical to SEQ ID NO: 53448

SEQ ID NO: 53475 - DNA, 201 bp, Homo sapiens; identical to SEQ ID NO: 53450

SEQ ID NO: 53476 - DNA, 201 bp, Homo sapiens; identical to SEQ ID NO: 53451

SEQ ID NO: 53477 - DNA, 201 bp, Homo sapiens; identical to SEQ ID NO: 53462

SEQ ID NO: 53478 - DNA, 201 bp, Homo sapiens; identical to SEQ ID NO: 53463

SEQ ID NO: 53479 - DNA, 201 bp, Homo sapiens; identical to SEQ ID NO: 53464

SEQ ID NO: 53480 - DNA, 201 bp, Homo sapiens; identical to SEQ ID NO: 53465

SEQ ID NO: 53481 - DNA, 201 bp, Homo sapiens; identical to SEQ ID NO: 53442

SEQ ID NO: 53482 - DNA, 201 bp, Homo sapiens; identical to SEQ ID NO: 53453

SEQ ID NO: 53483 - DNA, 201 bp, Homo sapiens; identical to SEQ ID NO: 53454

SEQ ID NO: 53484 - DNA, 201 bp, Homo sapiens; identical to SEQ ID NO: 53439

SEQ ID NO: 53485 - DNA, 201 bp, Homo sapiens; identical to SEQ ID NO: 53456

SEQ ID NO: 53486 - DNA, 201 bp, Homo sapiens; identical to SEQ ID NO: 53471

SEQ ID NO: 53487 - DNA, 201 bp, Homo sapiens; identical to SEQ ID NO: 53440

SEQ ID NO: 53488 - DNA, 201 bp, Homo sapiens; identical to SEQ ID NO: 53458

SEQ ID NO: 53489 - DNA, 201 bp, Homo sapiens
catagttgtaggctgaggctcctgcccttcggtcgagtggagcaagctctcgagggcagcactgacaaatgtgttcctaagaagacattcagacccaggtsttatgcaggattacatccgtttattatcaagggcaaccttggtgaaagcagaaagggtgtgtgctattgcatatatatgggggaaaaggcaatatatttt

SEQ ID NO: 53490 - DNA, 201 bp, Homo sapiens
gcccttcggtcgagtggagcaagctctcgagggcagcactgacaaatgtgttcctaagaagacattcagacccaggtcttatgcaggattacatccgtttrttatcaagggcaaccttggtgaaagcagaaagggtgtgtgctattgcatatatatgggggaaaaggcaatatatttttcactgaagctgagcaaccacat

SEQ ID NO: 53491 - DNA, 201 bp, Homo sapiens
ctgctgatgcaagttgtcccccaaggccatcacaaagcagtggggcatgagctgtgtttcaggggccactaaataacagctggtactgaccccagaaaccrccttcatctccattcggaagcaggtgacacaccccttcagaaggtgccctgggttgccgagtgtcagaatatactcaggactccagaggtgtcacacgtg

SEQ ID NO: 53492 - DNA, 201 bp, Homo sapiens
agcagatgcaatacagccctttcctcagccagtaccaagagatgcagcttcagcccctgccctccacttccggtccccgggctgctcctcctctgcccacrcagctacagcagcagcagccgccaccgccaccaccccctccaccaccacgacagccaggagctgccccagcccccttacagttctcctatcagacttgtg

SEQ ID NO: 53493 - DNA, 201 bp, Homo sapiens
ggtgccaggatgcttcgcagaggcactgtgctcacggttggacttggtgtcagtgggaaagggcagtgtggggactgtcatttttgtgatttaataacacmcagtgaaaatccaggaagaatgaattaagcttcttctgggagttgtttattcctgctcgtgcttaagattgatgatttcgtgaaataaagaacatcattt

SEQ ID NO: 53494 - DNA, 201 bp, Homo sapiens
ggcagagcctggagacccagtacctgcagcacagactccagaagcccagccttctgtcaaaggcccagaacacctgtcagctttattgcaaagaaccaccrcggagccttgagcagcagctgcaggaacataggctccagcagaagcgactctttcttcagaagcagtctcaactgcaggcctattttaatcagatgcaga

SEQ ID NO: 53495 - DNA, 201 bp, Homo sapiens; identical to SEQ ID NO: 53489

SEQ ID NO: 53496 - DNA, 201 bp, Homo sapiens; identical to SEQ ID NO: 53490

SEQ ID NO: 53497 - DNA, 201 bp, Homo sapiens; identical to SEQ ID NO: 53491

SEQ ID NO: 53498 - DNA, 201 bp, Homo sapiens; identical to SEQ ID NO: 53492

SEQ ID NO: 53499 - DNA, 201 bp, Homo sapiens; identical to SEQ ID NO: 53493

SEQ ID NO: 53500 - DNA, 201 bp, Homo sapiens; identical to SEQ ID NO: 53494

SEQ ID NO: 53501 - DNA, 201 bp, Homo sapiens
acttcctgcgctactggaccctcacctatctggcgctgcccacagtgaccgaccaggaggccacccctgtgccccccacaggggactccgaggccactccygtgccccccacgggtgactccgagaccgcccccgtgccgcccacgggtgactccggggccccccccgtgccgcccacgggtgactccggggccccccccg

SEQ ID NO: 53502 - DNA, 197 bp, Homo sapiens
gggccccccccgtgccgcccacgggtgactccggggccccccccgtgccgcccacgggtgactccggggccccccccgtgccgcccacgggtgactccggsgccccccccgtgccgcccacgggtgactccggcgccccccccgtgccgcccacggatgactccaaggaagctcagatgcctgcagtcattaggttt

SEQ ID NO: 53503 - DNA, 170 bp, Homo sapiens
actccggggccccccccgtgccgcccacgggtgactccggggccccccccgtgccgcccacgggtgactccggggccccccccgtgccgcccacgggtgaytccggcgccccccccgtgccgcccacggatgactccaaggaagctcagatgcctgcagtcattaggttt

SEQ ID NO: 53504 - DNA, 169 bp, Homo sapiens
ctccggggccccccccgtgccgcccacgggtgactccggggccccccccgtgccgcccacgggtgactccggggccccccccgtgccgcccacgggtgackccggcgccccccccgtgccgcccacggatgactccaaggaagctcagatgcctgcagtcattaggttt

SEQ ID NO: 53505 - DNA, 163 bp, Homo sapiens
ggccccccccgtgccgcccacgggtgactccggggccccccccgtgccgcccacgggtgactccggggccccccccgtgccgcccacgggtgactccggcsccccccccgtgccgcccacggatgactccaaggaagctcagatgcctgcagtcattaggttt

SEQ ID NO: 53506 - DNA, 201 bp, Homo sapiens
ccagcacagagccaatgccaagagtgccaagacctacgcctacctgttttcccatccctctcggatgcccgtctaccccaaatgggtgggggccgaccatrcagatgacattcagtacgttttcgggaagcccttcgccacccccacgggctaccggccccaagacaggacagtctctaaggccatgatcgcctactggac

SEQ ID NO: 53507 - DNA, 201 bp, Homo sapiens
cagcacagagccaatgccaagagtgccaagacctacgcctacctgttttcccatccctctcggatgcccgtctaccccaaatgggtgggggccgaccatgsagatgacattcagtacgttttcgggaagcccttcgccacccccacgggctaccggccccaagacaggacagtctctaaggccatgatcgcctactggacc

SEQ ID NO: 53508 - DNA, 201 bp, Homo sapiens
gagccaatgccaagagtgccaagacctacgcctacctgttttcccatccctctcggatgcccgtctaccccaaatgggtgggggccgaccatgcagatgasattcagtacgttttcgggaagcccttcgccacccccacgggctaccggccccaagacaggacagtctctaaggccatgatcgcctactggaccaactttg

SEQ ID NO: 53509 - DNA, 201 bp, Homo sapiens
ccaatgccaagagtgccaagacctacgcctacctgttttcccatccctctcggatgcccgtctaccccaaatgggtgggggccgaccatgcagatgacatycagtacgttttcgggaagcccttcgccacccccacgggctaccggccccaagacaggacagtctctaaggccatgatcgcctactggaccaactttgcca

SEQ ID NO: 53510 - DNA, 201 bp, Homo sapiens
caagacctacgcctacctgttttcccatccctctcggatgcccgtctaccccaaatgggtgggggccgaccatgcagatgacattcagtacgttttcgggragcccttcgccacccccacgggctaccggccccaagacaggacagtctctaaggccatgatcgcctactggaccaactttgccaaaacaggggaccccaa

SEQ ID NO: 53511 - DNA, 201 bp, Homo sapiens; identical to SEQ ID NO: 53501

SEQ ID NO: 53512 - DNA, 201 bp, Homo sapiens
gggccccccccgtgccgcccacgggtgactccggggccccccccgtgccgcccacgggtgactccggggccccccccgtgccgcccacgggtgactccggsgccccccccgtgccgcccacgggtgactccggcgccccccccgtgccgcccacgggtgacgccgggcccccccccgtgccgcccacgggtgactccggcg

SEQ ID NO: 53513 - DNA, 201 bp, Homo sapiens
actccggggccccccccgtgccgcccacgggtgactccggggccccccccgtgccgcccacgggtgactccggggccccccccgtgccgcccacgggtgaytccggcgccccccccgtgccgcccacgggtgacgccgggcccccccccgtgccgcccacgggtgactccggcgccccccccgtgccgcccacgggtgact

SEQ ID NO: 53514 - DNA, 201 bp, Homo sapiens
ctccggggccccccccgtgccgcccacgggtgactccggggccccccccgtgccgcccacgggtgactccggggccccccccgtgccgcccacgggtgackccggcgccccccccgtgccgcccacgggtgacgccgggcccccccccgtgccgcccacgggtgactccggcgccccccccgtgccgcccacgggtgactc

SEQ ID NO: 53515 - DNA, 201 bp, Homo sapiens
ggccccccccgtgccgcccacgggtgactccggggccccccccgtgccgcccacgggtgactccggggccccccccgtgccgcccacgggtgactccggcsccccccccgtgccgcccacgggtgacgccgggcccccccccgtgccgcccacgggtgactccggcgccccccccgtgccgcccacgggtgactccggggc

SEQ ID NO: 53516 - DNA, 201 bp, Homo sapiens; identical to SEQ ID NO: 53506

SEQ ID NO: 53517 - DNA, 201 bp, Homo sapiens
ggccccccccgtgccgcccacgggtgactccggggccccccccgtgccgcccacgggtgactccggcgccccccccgtgccgcccacgggtgacgccgggsccccccccgtgccgcccacgggtgactccggcgccccccccgtgccgcccacgggtgactccggggccccccccgtgacccccacgggtgactccgagac

SEQ ID NO: 53518 - DNA, 201 bp, Homo sapiens; identical to SEQ ID NO: 53507

SEQ ID NO: 53519 - DNA, 201 bp, Homo sapiens; identical to SEQ ID NO: 53508

SEQ ID NO: 53520 - DNA, 201 bp, Homo sapiens
ctccggggccccccccgtgccgcccacgggtgactccggcgccccccccgtgccgcccacgggtgacgccgggcccccccccgtgccgcccacgggtgackccggcgccccccccgtgccgcccacgggtgactccggggccccccccgtgacccccacgggtgactccgagaccgcccccgtgccgcccacgggtgactc

SEQ ID NO: 53521 - DNA, 201 bp, Homo sapiens; identical to SEQ ID NO: 53509

SEQ ID NO: 53522 - DNA, 201 bp, Homo sapiens; identical to SEQ ID NO: 53510

SEQ ID NO: 53523 - DNA, 201 bp, Homo sapiens
caagacctacgcctacctgttttcccatccctctcggatgcccgtctaccccaaatgggtgggggccgaccatagagatgagatccagtacatctttgggragccctttgccaccccactccgggctaccggccccaagacaggacagtctctaaggccatgaccgcctactggaccaactttgccaaaacaggggacccc

SEQ ID NO: 53524 - DNA, 201 bp, Homo sapiens
cttcctgcgctactggaccctcacctatctggcgctgcccacagtgaccgaccaggaggccagttccatgccctccacaggggactctgaggccactcccrtctcccccgacaggcaactccgagtctgcccccgtccctgcaacgggtgactctcaggatgcccctgtgcccctcacaagtgactctgaggctgcccccg

SEQ ID NO: 53525 - DNA, 201 bp, Homo sapiens
gatgcccgtctaccccaaatgggtgggggccgaccatagagatgagatccagtacatctttggggagccctttgccaccccactccgggctaccggccccragacaggacagtctctaaggccatgaccgcctactggaccaactttgccaaaacaggggaccccaacatgggccactcggctgtgcccacacactgggaa

SEQ ID NO: 53526 - DNA, 201 bp, Homo sapiens
acaggcaactccgagtctgcccccgtccctgcaacgggtgactctcaggatgcccctgtgcccctcacaagtgactctgaggctgcccccgtgcccccctyaggtgactctgaggctcccccgtaccccctacgggtgactctgaggcccgtgcccaccttgggtgactctgaggccgcccctgtgtcccccacagatgac

SEQ ID NO: 53527 - DNA, 201 bp, Homo sapiens
tcccccgacaggcaactccgagtctgcccccgtccctgcaacgggtgactctcaggatgcccctgtgcccctcacaagtgactctgaggctgcccccgtgyccccctcaggtgactctgaggctcccccgtaccccctacgggtgactctgaggcccgtgcccaccttgggtgactctgaggccgcccctgtgtcccccac

SEQ ID NO: 53528 - DNA, 201 bp, Homo sapiens
ccagcacagagccaatgccaagagtgccaagacctacgcctacctgttttcccatccctctcggatgcccgtctaccccaaatgggtgggggccgaccatrgagatgagatccagtacatctttggggagccctttgccaccccactccgggctaccggccccaagacaggacagtctctaaggccatgaccgcctactgg

SEQ ID NO: 53529 - DNA, 201 bp, Homo sapiens
ccaccccactccgggctaccggccccaagacaggacagtctctaaggccatgaccgcctactggaccaactttgccaaaacaggggaccccaacatgggcsactcggctgtgcccacacactgggaaccctacactacggaaaacagcggctacctggagatcaccaagaagatgggcagcagctccatgaagcggagcct

SEQ ID NO: 53530 - DNA, 201 bp, Homo sapiens
cagcacagagccaatgccaagagtgccaagacctacgcctacctgttttcccatccctctcggatgcccgtctaccccaaatgggtgggggccgaccatasagatgagatccagtacatctttggggagccctttgccaccccactccgggctaccggccccaagacaggacagtctctaaggccatgaccgcctactgga

SEQ ID NO: 53531 - DNA, 179 bp, Homo sapiens
tccctgcaacgggtgactctcaggatgcccctgtgcccctcacaagtgactctgaggctgcccccgtgcccccctcaggtgactctgaggctcccccgtaycccctacgggtgactctgaggcccgtgcccaccttgggtgactctgaggccgcccctgtgtcccccacagatgactcc

SEQ ID NO: 53532 - DNA, 201 bp, Homo sapiens
ctaccccaaatgggtgggggccgaccatagagatgagatccagtacatctttggggagccctttgccaccccactccgggctaccggccccaagacaggayagtctctaaggccatgaccgcctactggaccaactttgccaaaacaggggaccccaacatgggccactcggctgtgcccacacactgggaaccctacact

SEQ ID NO: 53533 - DNA, 182 bp, Homo sapiens
cacccagaggctgatgctcaccatggggcgcctgcaactggttgtgttgggcctcacctgctgctgggcagtggcgagtgcygcgaagaccccatgctgcactatgtgggcttcgtccctgtcattgatggagacttcatccccgctgacccgatcaacctgtacgccaacgccgccgacat

SEQ ID NO: 53534 - DNA, 201 bp, Homo sapiens
gtgggggccgaccatagagatgagatccagtacatctttggggagccctttgccaccccactccgggctaccggccccaagacaggacagtctctaaggcyatgaccgcctactggaccaactttgccaaaacaggggaccccaacatgggccactcggctgtgcccacacactgggaaccctacactacggaaaacagcg

SEQ ID NO: 53535 - DNA, 201 bp, Homo sapiens
gagccaatgccaagagtgccaagacctacgcctacctgttttcccatccctctcggatgcccgtctaccccaaatgggtgggggccgaccatagagatgasatccagtacatctttggggagccctttgccaccccactccgggctaccggccccaagacaggacagtctctaaggccatgaccgcctactggaccaactt

SEQ ID NO: 53536 - DNA, 201 bp, Homo sapiens; identical to SEQ ID NO: 53523

SEQ ID NO: 53537 - DNA, 201 bp, Homo sapiens
cttcctgcgctactggaccctcacctatctggcgctgcccacagtgaccgaccaggaggccagttccatgccctccacaggggactctgaggccactcccrtctcccccgacaggcaactccgagtctgcccccgtccctgcaacgggtgactctcaggatgcccctgtgcccctcacaagtgactctgaggctcccccgt

SEQ ID NO: 53538 - DNA, 201 bp, Homo sapiens; identical to SEQ ID NO: 53525

SEQ ID NO: 53539 - DNA, 201 bp, Homo sapiens; identical to SEQ ID NO: 53528

SEQ ID NO: 53540 - DNA, 201 bp, Homo sapiens; identical to SEQ ID NO: 53529

SEQ ID NO: 53541 - DNA, 201 bp, Homo sapiens; identical to SEQ ID NO: 53530

SEQ ID NO: 53542 - DNA, 201 bp, Homo sapiens
ctcccccgacaggcaactccgagtctgcccccgtccctgcaacgggtgactctcaggatgcccctgtgcccctcacaagtgactctgaggctcccccgtaycccctacgggtgactctgaggcccgtgcccaccttgggtgactctgaggccgcccctgtgtcccccacagatgactccgaggaagctcagatgctgcagt

SEQ ID NO: 53543 - DNA, 201 bp, Homo sapiens; identical to SEQ ID NO: 53532

SEQ ID NO: 53544 - DNA, 182 bp, Homo sapiens; identical to SEQ ID NO: 53533

SEQ ID NO: 53545 - DNA, 201 bp, Homo sapiens; identical to SEQ ID NO: 53534

SEQ ID NO: 53546 - DNA, 201 bp, Homo sapiens; identical to SEQ ID NO: 53535

SEQ ID NO: 53547 - DNA, 201 bp, Homo sapiens; identical to SEQ ID NO: 53523

SEQ ID NO: 53548 - DNA, 201 bp, Homo sapiens; identical to SEQ ID NO: 53537

SEQ ID NO: 53549 - DNA, 201 bp, Homo sapiens; identical to SEQ ID NO: 53525

SEQ ID NO: 53550 - DNA, 201 bp, Homo sapiens; identical to SEQ ID NO: 53528

SEQ ID NO: 53551 - DNA, 201 bp, Homo sapiens; identical to SEQ ID NO: 53529

SEQ ID NO: 53552 - DNA, 201 bp, Homo sapiens; identical to SEQ ID NO: 53530

SEQ ID NO: 53553 - DNA, 201 bp, Homo sapiens; identical to SEQ ID NO: 53542

SEQ ID NO: 53554 - DNA, 201 bp, Homo sapiens; identical to SEQ ID NO: 53532

SEQ ID NO: 53555 - DNA, 182 bp, Homo sapiens; identical to SEQ ID NO: 53533

SEQ ID NO: 53556 - DNA, 201 bp, Homo sapiens; identical to SEQ ID NO: 53534

SEQ ID NO: 53557 - DNA, 201 bp, Homo sapiens; identical to SEQ ID NO: 53535

SEQ ID NO: 53558 - DNA, 114 bp, Homo sapiens
ttcttaaaccaggcattttgttccctagagatgtaacttgagtatcaagttttgggaaagttctttggactgaaaccaagccaggattttatgatgaaccrgtcatgagctcat

SEQ ID NO: 53559 - DNA, 173 bp, Homo sapiens
tgttagccaggctggtctgagctcctgaccgcacccggcccttcccacccttaaatacattcttaaaccaggcattttgttccctagagatgtaacttgartatcaagttttgggaaagttctttggactgaaaccaagccaggattttatgatgaaccagtcatgagctcat

SEQ ID NO: 53560 - DNA, 174 bp, Homo sapiens
atgttagccaggctggtctgagctcctgaccgcacccggcccttcccacccttaaatacattcttaaaccaggcattttgttccctagagatgtaacttgmgtatcaagttttgggaaagttctttggactgaaaccaagccaggattttatgatgaaccagtcatgagctcat

SEQ ID NO: 53561 - DNA, 121 bp, Homo sapiens
ctttcctttctctctcctccygccgcccaagatggtgagtgagctgtagttccgtggcactatagccaggttccggctgtatccgctgccatcctcctccaggcgcggcctcggagggcct

SEQ ID NO: 53562 - DNA, 131 bp, Homo sapiens
ctttcctttctctctcctcccgccgcccaaratggtgagtgagctgtagttccgtggcactatagccaggttccggctgtatccgctgccatcctcctccaggcgcggcctcggagggcctcctgctcctc

SEQ ID NO: 53563 - DNA, 201 bp, Homo sapiens
agctggcccacaagtacagaccagagacaaagcaagagaagaagcagagactgttggcccgggccgagaagaaggctgctggcaaaggggacgtcccaacraagagaccacctgtccttcgagcaggagttaacaccgtcaccaccttggtggagaacaagaaagctcagctggtggtgattgcacacgacgtggatccca

SEQ ID NO: 53564 - DNA, 168 bp, Homo sapiens
ctttcctttctctctcctcccgccgcccaagatggtgagtgagctgtagttccgtggcactatagccrggttccggctgtatccgctgccatcctcctccaggcgcggcctcggagggcctcctgctcctcctggcgctaggagagccccactcggtgtggcacggag

SEQ ID NO: 53565 - DNA, 201 bp, Homo sapiens
cgggttgaatcttacttggggttagcaagtatctttttgagacacagcctcactctgtcgcccaggctggagtgcagtggtgtgatgtcaaagcaaccttmgcctcccaggtttaggatattctggtgcctcagcatcccaactggctggcccatatttgtgtttttggtagagatggggtttcaccatgttagccaggct

SEQ ID NO: 53566 - DNA, 201 bp, Homo sapiens
cccacttggtgtggcacggagacattgagatggactagagccccgggcggccgagagcggaatgcgttgttcccggtgtcgcagggctgggtgtcgcaggsctggagcaccgcagtgcggggctcggagccctagcgtctctcgggcttgctgggggccgctccagaggccttccgaaaggaaagaaggccaagggaaaga

SEQ ID NO: 53567 - DNA, 114 bp, Homo sapiens; identical to SEQ ID NO: 53558

SEQ ID NO: 53568 - DNA, 173 bp, Homo sapiens; identical to SEQ ID NO: 53559

SEQ ID NO: 53569 - DNA, 201 bp, Homo sapiens
ccgggcggccgagagcggaatgcgttgttcccggtgtcgcagggctgggtgtcgcaggcctggagcaccgcagtgcggggctcggagccctagcgtctctygggcttgctgggggccgctccagaggccttccgaaaggaaagaaggccaagggaaagaaggtggctccggccccagctgtcgtgaagaagcaggaggcta

SEQ ID NO: 53570 - DNA, 174 bp, Homo sapiens; identical to SEQ ID NO: 53560

SEQ ID NO: 53571 - DNA, 201 bp, Homo sapiens; identical to SEQ ID NO: 53563

SEQ ID NO: 53572 - DNA, 137 bp, Homo sapiens
atggtgagtgagctgtagttccgtggcactatagccrggttccggctgtatccgctgccatcctcctccaggcgcggcctcggagggcctcctgctcctcctggcgctaggagagccccactcggtgtggcacggag

SEQ ID NO: 53573 - DNA, 201 bp, Homo sapiens; identical to SEQ ID NO: 53565

SEQ ID NO: 53574 - DNA, 173 bp, Homo sapiens; identical to SEQ ID NO: 53559

SEQ ID NO: 53575 - DNA, 174 bp, Homo sapiens; identical to SEQ ID NO: 53560

SEQ ID NO: 53576 - DNA, 121 bp, Homo sapiens
ctttcctttctctctcctccygccgcccaagatgccgaaaggaaagaaggccaagggaaagaaggtggctccggccccagctgtcgtgaagaagcaggaggctaagaaagtggtgaatccc

SEQ ID NO: 53577 - DNA, 201 bp, Homo sapiens; identical to SEQ ID NO: 53563

SEQ ID NO: 53578 - DNA, 131 bp, Homo sapiens
ctttcctttctctctcctcccgccgcccaaratgccgaaaggaaagaaggccaagggaaagaaggtggctccggccccagctgtcgtgaagaagcaggaggctaagaaagtggtgaatcccctgtttgaga

SEQ ID NO: 53579 - DNA, 201 bp, Homo sapiens; identical to SEQ ID NO: 53565

SEQ ID NO: 53580 - DNA, 114 bp, Homo sapiens; identical to SEQ ID NO: 53558

SEQ ID NO: 53581 - DNA, 173 bp, Homo sapiens; identical to SEQ ID NO: 53559

SEQ ID NO: 53582 - DNA, 174 bp, Homo sapiens; identical to SEQ ID NO: 53560

SEQ ID NO: 53583 - DNA, 121 bp, Homo sapiens; identical to SEQ ID NO: 53576

SEQ ID NO: 53584 - DNA, 201 bp, Homo sapiens; identical to SEQ ID NO: 53563

SEQ ID NO: 53585 - DNA, 131 bp, Homo sapiens; identical to SEQ ID NO: 53578

SEQ ID NO: 53586 - DNA, 201 bp, Homo sapiens; identical to SEQ ID NO: 53565

SEQ ID NO: 53587 - DNA, 114 bp, Homo sapiens; identical to SEQ ID NO: 53558

SEQ ID NO: 53588 - DNA, 201 bp, Homo sapiens
aactggctggcttaacctatgagaagttctatctgacgatcagcttggaacagccaaacagaattaacgcaactaataaccttgaaaatctcagaaaacartaagccaagctaactgcctctttttgtcttttcagatccgccgtcactggggtggcaatgtcctgggtcctaagtctgtggctcgtatcgccaagctcga

SEQ ID NO: 53589 - DNA, 114 bp, Homo sapiens; identical to SEQ ID NO: 53558

SEQ ID NO: 53590 - DNA, 173 bp, Homo sapiens; identical to SEQ ID NO: 53559

SEQ ID NO: 53591 - DNA, 174 bp, Homo sapiens; identical to SEQ ID NO: 53560

SEQ ID NO: 53592 - DNA, 201 bp, Homo sapiens
gaagacaaaggcgctttggctaagctggtggaagctatcaggaccaattacaatgacagatacgatgaggtaagaggcagctttacaccaaaatactgtcrttcacaaatctttctcccaaataactggctggcttaacctatgagaagttctatctgacgatcagcttggaacagccaaacagaattaacgcaactaata

SEQ ID NO: 53593 - DNA, 121 bp, Homo sapiens; identical to SEQ ID NO: 53576

SEQ ID NO: 53594 - DNA, 201 bp, Homo sapiens; identical to SEQ ID NO: 53563

SEQ ID NO: 53595 - DNA, 131 bp, Homo sapiens; identical to SEQ ID NO: 53578

SEQ ID NO: 53596 - DNA, 201 bp, Homo sapiens; identical to SEQ ID NO: 53565

SEQ ID NO: 53597 - DNA, 201 bp, Homo sapiens
actccttcctagaggactgcgaactctcccggcagatcggggcgcagcttaagctgctgcctatgaatgatcagatacgggagctacagaccatcatccgkgacaagacagccagtagaggtgacttcatgttttctgcggatcgtttgatcagacttgttgtggaagagggattgaatcagctgccatataaagaatgca

SEQ ID NO: 53598 - DNA, 201 bp, Homo sapiens
aaccgagagagcacgtgagcatctgtcctttctacccgttcctctttatctttagtgttcagtagcagcggggatagcccggggcccggtgtatggccacrgagttacagtgtccggactccatgccctgtcacaaccagcaagtaaactctgcctcaaccccaagtcccgagcagctgcgacctggcgatctgatcctgg

SEQ ID NO: 53599 - DNA, 201 bp, Homo sapiens
ttctatttgttttactgattcacttgagggtggcagagaaaaatgtgttaaaatgctttttagttttggaagtgggtatatttgaggttatatctcatttrgttatttgtttactgttggcaccgaattcaacaatgaagtatatgcaactcttacaaaacataaattttaataatattctaatgcaaattactgaaccct

SEQ ID NO: 53600 - DNA, 201 bp, Homo sapiens
cagagatcacaattttaactactgaagttcatcctgttgcacctacacattttggacagaaatactttggaacagactaagttatttaagtaaaataattrtcttatgtaatattacaatcatgttttgattttctatttgttttactgattcacttgagggtggcagagaaaaatgtgttaaaatgctttttagttttgg

SEQ ID NO: 53601 - DNA, 201 bp, Homo sapiens; identical to SEQ ID NO: 53597

SEQ ID NO: 53602 - DNA, 201 bp, Homo sapiens; identical to SEQ ID NO: 53598

SEQ ID NO: 53603 - DNA, 201 bp, Homo sapiens
agctgctgcgggcattctatgtccccttcctgtcagatcagtatacagtgtacgtaaactacaccatcctcaaaccccggaaagcaaagcaaatcaggaaraaaagtggaggttagcaacacacctgtggccccaaaggacaaccatcttgttaactattgattccagtgacctgactccctgcaagtcatcgcctgtaac

SEQ ID NO: 53604 - DNA, 201 bp, Homo sapiens
cactacgttgatagccatgactggatggtatatggacaagacttccattgctgtgctgggagtagcagctggggctatcttaggctggccattcagtgcasctcttggtttacccattgcctttgatttgctggtcatgaaacacaggtggaagagtttctttcattggtcgctgatggccctcatactatttctggtgcc

SEQ ID NO: 53605 - DNA, 134 bp, Homo sapiens
aagtggaggttagcaacacacctgtggccccaaaggacaaccatcttgttaactattgattccagtgacctgactccctgcaagtcatcgcctgtaacatktgtaataaaggtcttctgacatgaatactggaa

SEQ ID NO: 53606 - DNA, 201 bp, Homo sapiens
ggcattctatgtccccttcctgtcagatcagtatacagtgtacgtaaactacaccatcctcaaaccccggaaagcaaagcaaatcaggaagaaaagtggargttagcaacacacctgtggccccaaaggacaaccatcttgttaactattgattccagtgacctgactccctgcaagtcatcgcctgtaacatttgtaata

SEQ ID NO: 53607 - DNA, 201 bp, Homo sapiens
ggggctatcttaggctggccattcagtgcagctcttggtttacccattgcctttgatttgctggtcatgaaacacaggtggaagagtttctttcattggtygctgatggccctcatactatttctggtgcctgtggtggtcattgacagctactattatgggaagttggtgattgcaccactcaacattgttttgtataat

SEQ ID NO: 53608 - DNA, 201 bp, Homo sapiens
ctactgacatgaatgaccagaatctagaagagccatccagatatattgatatcagtaaatgccattatttagtggatttggacaccatgagagaaacaccycgggagccaaaatattcatccaataaagaagaatggatcagcttggcctatagaccattccttgatgcttctagatcttcaaagctgctgcgggcattct

SEQ ID NO: 53609 - DNA, 201 bp, Homo sapiens
gctgatggccctcatactatttctggtgcctgtggtggtcattgacagctactattatgggaagttggtgattgcaccactcaacattgttttgtataatrtctttactcctcatggacctgatctttatggtacagaaccctggtatttctatttaattaatggatttctgaatttcaatgtagcctttgctttggctct

SEQ ID NO: 53610 - DNA, 201 bp, Homo sapiens
agctgctgcgggcattctatgtccccttcctgtcagatcagtatacagtgtacgtaaactacaccatcctcaaaccccggaaagcaaagcaaatcaggaaraaaagtggagaccggagaagagcagaaccaacttacaggaagaattgaaaatcctggtactggatggctgtgataagctgttctccacactctggcctgg

SEQ ID NO: 53611 - DNA, 201 bp, Homo sapiens; identical to SEQ ID NO: 53604

SEQ ID NO: 53612 - DNA, 201 bp, Homo sapiens
ctgcgcgagcgaggtatcgatgtacgtttcggtgtggactgcacccagctggcagatgtctttgaactgcacgagagagaatttgatcaaatttatttcawcttcccgcattgtggacgcaaagctggcgtagctaagaacagggaactgcttgccaaatttttccaaagctgtgcagacgttcttgcagaggaaggagaa

SEQ ID NO: 53613 - DNA, 201 bp, Homo sapiens; identical to SEQ ID NO: 53608

SEQ ID NO: 53614 - DNA, 201 bp, Homo sapiens
ccgggagtccgtggaggccatggcccctcggcgcctcctgttggttggggaggggaatttctccttcgccgccgctctgagcgaaaccctggatcagagcrctcaacttaccgccacctgcctccagcgcccggccgagttggctcgggatccactggcctgggagaatctgcagtgcctgcgcgagcgaggtatcgatgt

SEQ ID NO: 53615 - DNA, 201 bp, Homo sapiens
ggcattctatgtccccttcctgtcagatcagtatacagtgtacgtaaactacaccatcctcaaaccccggaaagcaaagcaaatcaggaagaaaagtggaraccggagaagagcagaaccaacttacaggaagaattgaaaatcctggtactggatggctgtgataagctgttctccacactctggcctggcatctgagaa

SEQ ID NO: 53616 - DNA, 201 bp, Homo sapiens; identical to SEQ ID NO: 53607

SEQ ID NO: 53617 - DNA, 201 bp, Homo sapiens; identical to SEQ ID NO: 53609

SEQ ID NO: 53618 - DNA, 201 bp, Homo sapiens
aggctgtggcagggtacaagtgcactggatataggagtcaagataagtcctttcatgtagaaggtgctttgaaccatatcttcaccaggagcttacctttygaaggttctcaacccagaatcttcaggatcaaactgggtaaccagtggttttcctttccagaaccagaagcacttgtaggaaagttgaacaggggtttcc

SEQ ID NO: 53619 - DNA, 201 bp, Homo sapiens; identical to SEQ ID NO: 53610

SEQ ID NO: 53620 - DNA, 201 bp, Homo sapiens; identical to SEQ ID NO: 53604

SEQ ID NO: 53621 - DNA, 201 bp, Homo sapiens; identical to SEQ ID NO: 53612

SEQ ID NO: 53622 - DNA, 201 bp, Homo sapiens; identical to SEQ ID NO: 53608

SEQ ID NO: 53623 - DNA, 201 bp, Homo sapiens; identical to SEQ ID NO: 53614

SEQ ID NO: 53624 - DNA, 201 bp, Homo sapiens; identical to SEQ ID NO: 53615

SEQ ID NO: 53625 - DNA, 201 bp, Homo sapiens; identical to SEQ ID NO: 53607

SEQ ID NO: 53626 - DNA, 201 bp, Homo sapiens; identical to SEQ ID NO: 53609

SEQ ID NO: 53627 - DNA, 201 bp, Homo sapiens; identical to SEQ ID NO: 53618

SEQ ID NO: 53628 - DNA, 201 bp, Homo sapiens; identical to SEQ ID NO: 53610

SEQ ID NO: 53629 - DNA, 201 bp, Homo sapiens; identical to SEQ ID NO: 53612

SEQ ID NO: 53630 - DNA, 201 bp, Homo sapiens
aatgaccagaatctagaagagccatccagatatgtacatttcagattgatatcagtaaatgccattatttagtggatttggacaccatgagagaaacaccycgggagccaaaatattcatccaataaagaagaatggatcagcttggcctatagaccattccttgatgcttctagatcttcaaagctgctgcgggcattct

SEQ ID NO: 53631 - DNA, 201 bp, Homo sapiens; identical to SEQ ID NO: 53614

SEQ ID NO: 53632 - DNA, 201 bp, Homo sapiens; identical to SEQ ID NO: 53615

SEQ ID NO: 53633 - DNA, 201 bp, Homo sapiens
cttggttctcagcactggcatgttttgctcatcatcagtttacccattgcctttgatttgctggtcatgaaacacaggtggaagagtttctttcattggtygctgatggccctcatactatttctggtgcctgtggtggtcattgacagctactattatgggaagttggtgattgcaccactcaacattgttttgtataat

SEQ ID NO: 53634 - DNA, 201 bp, Homo sapiens; identical to SEQ ID NO: 53609

SEQ ID NO: 53635 - DNA, 201 bp, Homo sapiens; identical to SEQ ID NO: 53618

SEQ ID NO: 53636 - DNA, 201 bp, Homo sapiens
tcagtcaaatggaaaggattatatgattcgtgtgaagactcataattttagcccagattgtactgaggatctaattattgggtctgttatcacatctgccmctagtgttatacataaagaccagtgttttgtgtttgtgtctatgaacttggacttattagccatgcttgtctggtgtatctctgactggagaatgttgtg

SEQ ID NO: 53637 - DNA, 201 bp, Homo sapiens; identical to SEQ ID NO: 53614

SEQ ID NO: 53638 - DNA, 201 bp, Homo sapiens
tagtgcatgttcaggatgtcatcgaagtaccagacttcctctcaggttctctgcacatcctcagtggacctgtctttcagaagtgccacattttgcctttmacaatgccagcatttcatgaaactttatttatccttggggttaatcaaaatctgaaggatggctgtcttcaatcactgctggatcatctgaagggcattc

SEQ ID NO: 53639 - DNA, 201 bp, Homo sapiens; identical to SEQ ID NO: 53612

SEQ ID NO: 53640 - DNA, 201 bp, Homo sapiens; identical to SEQ ID NO: 53618

SEQ ID NO: 53641 - DNA, 201 bp, Homo sapiens
gggatagtctgactccagaagcccgccgagaaaaggaggctggcctacagatgtttggacagctggcacgtttccataacatcatgtccaatgaaacaatyggtacccttgcctttctcacatcagagatcaagtcactctttgtgcatcccttcctggctgagcgcatcatctccatgttgaactacttcctgcaacacc

SEQ ID NO: 53642 - DNA, 131 bp, Homo sapiens
gacgtaacttccggttgctgtgctgagtcgraagtgggaacccttcggccgctgagattctgtcgtgtcgtcgctgctggcacttcaggctctgcctctcccactaggtctggatggaggataccttaaag

SEQ ID NO: 53643 - DNA, 164 bp, Homo sapiens
gacgtaacttccggttgctgtgctgagtcggaagtgggaacccttcggccgctgagattctgtygtgtcgtcgctgctggcacttcaggctctgcctctcccactaggtctggatggaggataccttaaagtgaaatgacagaccaggagaataacaacaacat

SEQ ID NO: 53644 - DNA, 201 bp, Homo sapiens
tcctggatcccattatgagcacactgatgtgtgaccctgtggtgctgccatcttccagagtcactgtggatagatccaccattgcaagacatttgctcagwgaccaaacagatccctttaaccgtagtcccctcaccatggaccagatccggccaaacacagaactaaaagaaaaaatccaacggtggcttgcagagagga

SEQ ID NO: 53645 - DNA, 201 bp, Homo sapiens
ccgtgagtacatgaacaagatctattttgaagatgtaactgagtttctggaagaggtcattgaagccttgatattggatgaggaagttagaacatttccasaagtcatgattccagtgtttgatattttattgggccgaataaaagatctagagctctgtcagatccttttgtatgcatatctggatattcttctctattt

SEQ ID NO: 53646 - DNA, 201 bp, Homo sapiens
gcctctcccactaggtctggatggaggataccttaaagtgaaatgacagaccaggagaataacaacaacatctcaagtaacccctttgctgctctttttgsctccctggctgatgccaaacagtttgcggcaatccaaaaagagcagctgaagcaacaatctgatgaactcccagctagcccagatgactcggataatagc

SEQ ID NO: 53647 - DNA, 201 bp, Homo sapiens
caacttgaatagatactgtgaactaaccaaaccaaaaccaaccccagagtgcagataaacaattgtttgtggtttctctctttctggttctgttccttttytttcttcttttctttttcttttttttttttttttttactaaattagagaactgctcttgctgaaattatgatagttaagattcctaagaacttgacaatg

SEQ ID NO: 53648 - DNA, 201 bp, Homo sapiens
atactgtgaactaaccaaaccaaaaccaaccccagagtgcagataaacaattgtttgtggtttctctctttctggttctgttccttttctttcttcttttytttttcttttttttttttttttttactaaattagagaactgctcttgctgaaattatgatagttaagattcctaagaacttgacaatgctcccctggctt

SEQ ID NO: 53649 - DNA, 201 bp, Homo sapiens
agaactaaaagaaaaaatccaacggtggcttgcagagaggaaacaacaaaaggagcaacttgaatagatactgtgaactaaccaaaccaaaaccaaccccrgagtgcagataaacaattgtttgtggtttctctctttctggttctgttccttttctttcttcttttctttttcttttttttttttttttttactaaatta

SEQ ID NO: 53650 - DNA, 201 bp, Homo sapiens
tgaactaaccaaaccaaaaccaaccccagagtgcagataaacaattgtttgtggtttctctctttctggttctgttccttttctttcttcttttctttttyttttttttttttttttttactaaattagagaactgctcttgctgaaattatgatagttaagattcctaagaacttgacaatgctcccctggcttgcagga

SEQ ID NO: 53651 - DNA, 201 bp, Homo sapiens
gtagttttatatttcaacacaagttgctataagcagtccttgatgggtttttgattgcatcagctggaaagcctcaaatctaagagggcttcccatcctasatataaaataggtgttgcctattgctgtgcttataaaatgaaaaaggaaattgaggacacttttgcaaatgccagaatgtaagattcattcagtgtgctc

SEQ ID NO: 53652 - DNA, 201 bp, Homo sapiens
ccacattttggtactacgccaaggttgagctggttcctcccacccctgctgagatccctagagctattcagagcctgaaaaaaatagtcaatagtgctcaractggtagcttcaaacagctcacagttaaggaagctgtgctgaatggtttggtggccactgaggtgttgatgtggttttatgtcggagagattataggca

SEQ ID NO: 53653 - DNA, 201 bp, Homo sapiens
gatgtggttttatgtcggagagattataggcaagcggggcatcattggctatgatgtttgaagaccaatctttaacatctgattatatttgatttattatytgagtgttgttggaccatgtgtgatcagactgctatctgaataaaataagatttgtcaaaactcagtgttttctccatcagatactccatgaaaggtcac

SEQ ID NO: 53654 - DNA, 201 bp, Homo sapiens
accctattgacaacatctatgtctgtaaaaatgttagagtacttgtcatcttgaatatagcctccccaagagagaacagggtggtattctaagtatgtttytttgtaacatctttagcagtaggacagagccatacatgtgaaatctgatttttatgtgtgttattcgtttgtctggttttactacctttgcaaaaacaaa

SEQ ID NO: 53655 - DNA, 201 bp, Homo sapiens
tatatttgatttattatttgagtgttgttggaccatgtgtgatcagactgctatctgaataaaataagatttgtcaaaactcagtgttttctccatcagayactccatgaaaggtcacaatttctcttgatattaagctgggttgtctttaaacaaccctaaatacacgtctgtttagcccgcaattggaaaggatatatg

SEQ ID NO: 53656 - DNA, 131 bp, Homo sapiens; identical to SEQ ID NO: 53642

SEQ ID NO: 53657 - DNA, 201 bp, Homo sapiens
cgctaagagcagggatctagaggggatggttctgttaggagagctaagaaaaggaagggcagaaacgtgaaagtaaatcaattcggcctcattacatgtgktgttgttctcagtggagtatttggaagtcaacagaaatgtttaaggatggctgctgtgacttactcgaagcctcgattggccacattttggtactacgcc

SEQ ID NO: 53658 - DNA, 201 bp, Homo sapiens; identical to SEQ ID NO: 53644

SEQ ID NO: 53659 - DNA, 201 bp, Homo sapiens
gttagaagccatccagggagcccattttgaagatgtaactgagtttctggaagaggtcattgaagccttgatattggatgaggaagttagaacatttccasaagtcatgattccagtgtttgatattttattgggccgaataaaagatctagagctctgtcagatccttttgtatgcatatctggatattcttctctattt

SEQ ID NO: 53660 - DNA, 201 bp, Homo sapiens; identical to SEQ ID NO: 53646

SEQ ID NO: 53661 - DNA, 201 bp, Homo sapiens; identical to SEQ ID NO: 53647

SEQ ID NO: 53662 - DNA, 201 bp, Homo sapiens; identical to SEQ ID NO: 53649

SEQ ID NO: 53663 - DNA, 201 bp, Homo sapiens; identical to SEQ ID NO: 53648

SEQ ID NO: 53664 - DNA, 201 bp, Homo sapiens; identical to SEQ ID NO: 53650

SEQ ID NO: 53665 - DNA, 201 bp, Homo sapiens; identical to SEQ ID NO: 53652

SEQ ID NO: 53666 - DNA, 201 bp, Homo sapiens
gggcgacggactctccattccagaaccatggcccaatttgtccgtaaccttgtggagaagaccccggcgctggtgaacggtgagcgcgatgtgagaccgcsgaggcgggcacacgggcggcagggaggcctgcgatggcctgagaggaagaagcgggctgcgaagacccgaggggcctgcgggtgccggggcgggatggcc

SEQ ID NO: 53667 - DNA, 201 bp, Homo sapiens; identical to SEQ ID NO: 53641

SEQ ID NO: 53668 - DNA, 201 bp, Homo sapiens; identical to SEQ ID NO: 53653

SEQ ID NO: 53669 - DNA, 164 bp, Homo sapiens; identical to SEQ ID NO: 53643

SEQ ID NO: 53670 - DNA, 201 bp, Homo sapiens; identical to SEQ ID NO: 53654

SEQ ID NO: 53671 - DNA, 201 bp, Homo sapiens; identical to SEQ ID NO: 53655

SEQ ID NO: 53672 - DNA, 201 bp, Homo sapiens
cggcgctggtgaacggtgagcgcgatgtgagaccgccgaggcgggcacacgggcggcagggaggcctgcgatggcctgagaggaagaagcgggctgcgaasacccgaggggcctgcgggtgccggggcgggatggcctgcaggtggagggagcaggaagcaggttggcgactcttttctagccttccactcgtctgacctg

SEQ ID NO: 53673 - DNA, 201 bp, Homo sapiens; identical to SEQ ID NO: 53652

SEQ ID NO: 53674 - DNA, 201 bp, Homo sapiens; identical to SEQ ID NO: 53641

SEQ ID NO: 53675 - DNA, 131 bp, Homo sapiens; identical to SEQ ID NO: 53642

SEQ ID NO: 53676 - DNA, 164 bp, Homo sapiens; identical to SEQ ID NO: 53643

SEQ ID NO: 53677 - DNA, 201 bp, Homo sapiens; identical to SEQ ID NO: 53644

SEQ ID NO: 53678 - DNA, 201 bp, Homo sapiens; identical to SEQ ID NO: 53659

SEQ ID NO: 53679 - DNA, 201 bp, Homo sapiens; identical to SEQ ID NO: 53646

SEQ ID NO: 53680 - DNA, 201 bp, Homo sapiens; identical to SEQ ID NO: 53647

SEQ ID NO: 53681 - DNA, 201 bp, Homo sapiens; identical to SEQ ID NO: 53648

SEQ ID NO: 53682 - DNA, 201 bp, Homo sapiens; identical to SEQ ID NO: 53649

SEQ ID NO: 53683 - DNA, 201 bp, Homo sapiens; identical to SEQ ID NO: 53650

SEQ ID NO: 53684 - DNA, 201 bp, Homo sapiens; identical to SEQ ID NO: 53651

SEQ ID NO: 53685 - DNA, 131 bp, Homo sapiens; identical to SEQ ID NO: 53642

SEQ ID NO: 53686 - DNA, 164 bp, Homo sapiens; identical to SEQ ID NO: 53643

SEQ ID NO: 53687 - DNA, 201 bp, Homo sapiens; identical to SEQ ID NO: 53646

SEQ ID NO: 53688 - DNA, 201 bp, Homo sapiens; identical to SEQ ID NO: 53651

SEQ ID NO: 53689 - DNA, 201 bp, Homo sapiens; identical to SEQ ID NO: 53659

SEQ ID NO: 53690 - DNA, 131 bp, Homo sapiens; identical to SEQ ID NO: 53642

SEQ ID NO: 53691 - DNA, 164 bp, Homo sapiens; identical to SEQ ID NO: 53643

SEQ ID NO: 53692 - DNA, 201 bp, Homo sapiens; identical to SEQ ID NO: 53646

SEQ ID NO: 53693 - DNA, 201 bp, Homo sapiens; identical to SEQ ID NO: 53653

SEQ ID NO: 53694 - DNA, 201 bp, Homo sapiens; identical to SEQ ID NO: 53655

SEQ ID NO: 53695 - DNA, 201 bp, Homo sapiens; identical to SEQ ID NO: 53654

SEQ ID NO: 53696 - DNA, 201 bp, Homo sapiens
acttaccactaatttactaggctacgtaatctcatgagtaacctctcacagctacccagcacatgccacaatcctatgctcttgccttcttttatctgcawtgtgtgaagggactcttttaaataaatgagcaagtgtcctaagctatgtcatccaaagattgtcctttccattctcaaatcctgtgactgggatcactca

SEQ ID NO: 53697 - DNA, 111 bp, Homo sapiens
cagcactgtgatgtattattttcaatgaggtgcctttcttaactgaccaaatgctgccttgtttggcccctaaatcaataaaatatgttaaaatttgaagaaaaaaaaaaa

SEQ ID NO: 53698 - DNA, 201 bp, Homo sapiens
gtacaggaaatcaaattgttgtcctgtctgtctatagcttggaacagggaggctttgattactgaccccggttccacacactgtaagatcaaaaaaccatytccacatctgaaagagatgtaaggtgtattcatagggatggtggctcaacaaatcaaacaaactggaatcaaggggagggagaagggaatgaaatggaaa

SEQ ID NO: 53699 - DNA, 109 bp, Homo sapiens
gcactgtgatgtattattttcaatgaggtgcctttcttaactgaccaaatgctgccttgtttggcccctaaatcaataaaatatgttaaaatttgaagaaraaaaaaaa

SEQ ID NO: 53700 - DNA, 183 bp, Homo sapiens
agagggacctgtgaggtgtgcgaactggtggcagtgagagacttcggcggacatggctcccagcgtgccagcggcagaacccragtgtcctaaaggctgtgctgctggggcctcccagggccggtaaaggcacccaggcacccagattggctgaaaacttctgtgtctgccatttagctactg

SEQ ID NO: 53701 - DNA, 201 bp, Homo sapiens
cggcggacatggctcccagcgtgccagcggcagaacccaagtgtcctaaaggctgtgctgctggggcctcccagggccggtaaaggcacccaggcacccakattggctgaaaacttctgtgtctgccatttagctactggggacatgctgagggccatggtggcttctggctcagagctaggaaaaaagctgaaggcaact

SEQ ID NO: 53702 - DNA, 201 bp, Homo sapiens
gaaactggtgagtgatgaaatggtagtggagctcattgagaagaatttggagacccccttgtgcaaaaatggttttcttctggatggcttccctcggactktgaggcaggcagaaatgctcgatgacctcatggagaagaggaaagagaagcttgattctgtgattgaattcagcatcccagactctctgctgatccgaag

SEQ ID NO: 53703 - DNA, 201 bp, Homo sapiens
acaaatcaaacaaactggaatcaaggggagggagaagggaatgaaatggaaagggaggctgattcccttcccctgacttaccactaatttactaggctacstaatctcatgagtaacctctcacagctacccagcacatgccacaatcctatgctcttgccttcttttatctgcaatgtgtgaagggactcttttaaataa

SEQ ID NO: 53704 - DNA, 201 bp, Homo sapiens
aatcaaacaaactggaatcaaggggagggagaagggaatgaaatggaaagggaggctgattcccttcccctgacttaccactaatttactaggctacgtamtctcatgagtaacctctcacagctacccagcacatgccacaatcctatgctcttgccttcttttatctgcaatgtgtgaagggactcttttaaataaatg

SEQ ID NO: 53705 - DNA, 201 bp, Homo sapiens
tcaaacaaactggaatcaaggggagggagaagggaatgaaatggaaagggaggctgattcccttcccctgacttaccactaatttactaggctacgtaatytcatgagtaacctctcacagctacccagcacatgccacaatcctatgctcttgccttcttttatctgcaatgtgtgaagggactcttttaaataaatgag

SEQ ID NO: 53706 - DNA, 201 bp, Homo sapiens
gctctgtttcttgtcctcctggtattgggatttgaggtccaggggacccaacagccccagcaagatgagatgcctagcccgaccttcctcacccaggtgamggaatctctctccagttactgggagtcagcaaagacagccgcccagaacctgtacgagaagacatacctgcccgctgtagatgagaaactcagggacttg

SEQ ID NO: 53707 - DNA, 139 bp, Homo sapiens
ccgtccggagctggtgaggacagcctgccagagtctgtytgggcacacgactcctcccagctctgtttcttgtcctcctggtattgggatttgaggtccaggggacccaacagccccagcaagatgagatgcctagccc

SEQ ID NO: 53708 - DNA, 201 bp, Homo sapiens
aggtgaaggaatctctctccagttactgggagtcagcaaagacagccgcccagaacctgtacgagaagacatacctgcccgctgtagatgagaaactcagwgacttgtacagcaaaagcacagcagccatgagcacttacacaggcatttttactgaccaagttctttctgtgctgaagggagaggagtaacagccagacc

SEQ ID NO: 53709 - DNA, 201 bp, Homo sapiens
ccctactcccctgatcccccaggttcagactgagctcccccttcccagtagctcttgcatcctcctcccaactctagcctgaattcttttcagactcaagkgccaagatggaggggctgactcagtccagccaacatttaatgagcacctactttatgtatggagctctaacccatgggtccatgggaataaagcagtgaa

SEQ ID NO: 53710 - DNA, 201 bp, Homo sapiens
ccagcaagatgagatgcctagcccgaccttcctcacccaggtgaaggaatctctctccagttactgggagtcagcaaagacagccgcccagaacctgtacragaagacatacctgcccgctgtagatgagaaactcagggacttgtacagcaaaagcacagcagccatgagcacttacacaggcatttttactgaccaagt

SEQ ID NO: 53711 - DNA, 201 bp, Homo sapiens
tctctccagttactgggagtcagcaaagacagccgcccagaacctgtacgagaagacatacctgcccgctgtagatgagaaactcagggacttgtacagcmaaagcacagcagccatgagcacttacacaggcatttttactgaccaagttctttctgtgctgaagggagaggagtaacagccagaccccccatcagtgga

SEQ ID NO: 53712 - DNA, 148 bp, Homo sapiens
ccgtccggagctggtgaggacagcctgccagagtctgtatgggcacaygactcctcccagctctgtttcttgtcctcctggtattgggatttgaggtccaggggacccaacagccccagcaagatgagatgcctagcccgaccttcct

SEQ ID NO: 53713 - DNA, 201 bp, Homo sapiens
ggtattgggatttgaggtccaggggacccaacagccccagcaagatgagatgcctagcccgaccttcctcacccaggtgaaggaatctctctccagttacygggagtcagcaaagacagccgcccagaacctgtacgagaagacatacctgcccgctgtagatgagaaactcagggacttgtacagcaaaagcacagcagc

SEQ ID NO: 53714 - DNA, 201 bp, Homo sapiens; identical to SEQ ID NO: 53706

SEQ ID NO: 53715 - DNA, 111 bp, Homo sapiens
gactcagtccagccaacatttaatgagcacctactttatgtatggagctctaacccatgggtccatgggaataaagcagtgaatagtaacaataaataatygtaacagcaa

SEQ ID NO: 53716 - DNA, 139 bp, Homo sapiens; identical to SEQ ID NO: 53707

SEQ ID NO: 53717 - DNA, 201 bp, Homo sapiens; identical to SEQ ID NO: 53708

SEQ ID NO: 53718 - DNA, 201 bp, Homo sapiens
ctcttgcatcctcctcccaactctagcctgaattcttttcaataaaaaatacaattcaagttgcttctcatggatggcactgcttttctgaggactcaagkgccaagatggaggggctgactcagtccagccaacatttaatgagcacctactttatgtatggagctctaacccatgggtccatgggaataaagcagtgaa

SEQ ID NO: 53719 - DNA, 201 bp, Homo sapiens; identical to SEQ ID NO: 53710

SEQ ID NO: 53720 - DNA, 201 bp, Homo sapiens; identical to SEQ ID NO: 53711

SEQ ID NO: 53721 - DNA, 148 bp, Homo sapiens; identical to SEQ ID NO: 53712

SEQ ID NO: 53722 - DNA, 201 bp, Homo sapiens; identical to SEQ ID NO: 53713

SEQ ID NO: 53723 - DNA, 201 bp, Homo sapiens; identical to SEQ ID NO: 53706

SEQ ID NO: 53724 - DNA, 111 bp, Homo sapiens; identical to SEQ ID NO: 53715

SEQ ID NO: 53725 - DNA, 201 bp, Homo sapiens
ttgtggctgtggagcggaagtgggtctcaaccactataaagcctctctgtgcccgtccggagctggtgaggacagcctgccagagtctggtctctggacaytatgggcacacgactcctcccagctctgtttcttgtcctcctggtattgggatttgaggtccaggggacccaacagccccagcaagatgagatgcctagc

SEQ ID NO: 53726 - DNA, 201 bp, Homo sapiens; identical to SEQ ID NO: 53708

SEQ ID NO: 53727 - DNA, 201 bp, Homo sapiens; identical to SEQ ID NO: 53718

SEQ ID NO: 53728 - DNA, 146 bp, Homo sapiens
gggggttgtggctgtggagcggaagtgggtctcaaccactataaakcctctctgtgcccgtccggagctggtgaggacagcctgccagagtctggtctctggacactatgggcacacgactcctcccagctctgtttcttgtcctc

SEQ ID NO: 53729 - DNA, 201 bp, Homo sapiens; identical to SEQ ID NO: 53710

SEQ ID NO: 53730 - DNA, 201 bp, Homo sapiens; identical to SEQ ID NO: 53711

SEQ ID NO: 53731 - DNA, 201 bp, Homo sapiens
gagcggaagtgggtctcaaccactataaagcctctctgtgcccgtccggagctggtgaggacagcctgccagagtctggtctctggacactatgggcacaygactcctcccagctctgtttcttgtcctcctggtattgggatttgaggtccaggggacccaacagccccagcaagatgagatgcctagcccgaccttcct

SEQ ID NO: 53732 - DNA, 201 bp, Homo sapiens; identical to SEQ ID NO: 53713

SEQ ID NO: 53733 - DNA, 101 bp, Homo sapiens
mccggcggaaatgcccgagcgatgacggaaacccggagggaggggagagaaagagcgagagaaggggaaagacaagtcgggagaggccggtaggcgtgagg

SEQ ID NO: 53734 - DNA, 201 bp, Homo sapiens
ctcgtcgtggtgagcctcatgttacacggcgcaccccagactacttcctataaatttctcctgggaaacctgcctttgtatgtggaagtatacctggcttwttaaaatatatgtatttaaaaacaaaaagcaacagtaatctatgtgtttctgtaacaaattgggatctgtcttggcattaaaccacatcatggaccaaat

SEQ ID NO: 53735 - DNA, 108 bp, Homo sapiens
tttaaactaaattactgttttatgttgatctgcatatttctgtatatttgtcatgacagtgcttgcatcctatttggtgtactcagcaaataaacttttcrttttaaa

SEQ ID NO: 53736 - DNA, 201 bp, Homo sapiens
gtatgtggaagtatacctggctttttaaaatatatgtatttaaaaacaaaaagcaacagtaatctatgtgtttctgtaacaaattgggatctgtcttggcrttaaaccacatcatggaccaaatgtgccatactaatgatgagcatttagcacaatttgagactgaaatttagtacactatgttctaggtcagtctaacag

SEQ ID NO: 53737 - DNA, 201 bp, Homo sapiens
ttcgtccggcgagagctaggccgaggacccgcgccgcgctccccggcacctcaccgcgtccttcaccgactcccgcggcgcgcggccgggcggggaagggmgggcgggggtctcctccaggctgcgcgctcggagccgcctgctgggcttgggcggggcgcggggcccgcggccgccctacccggctcagtcctccccctg

SEQ ID NO: 53738 - DNA, 201 bp, Homo sapiens
ttaaaaacaaaaagcaacagtaatctatgtgtttctgtaacaaattgggatctgtcttggcattaaaccacatcatggaccaaatgtgccatactaatgaygagcatttagcacaatttgagactgaaatttagtacactatgttctaggtcagtctaacagtttgcctgctgtatttatagtaaccattttcctttggac

SEQ ID NO: 53739 - DNA, 201 bp, Homo sapiens
ttaaaatattccttccttcaatttgacccagcgcctcgtcgtggtgagcctcatgttacacggcgcaccccagactacttcctataaatttctcctgggamacctgcctttgtatgtggaagtatacctggctttttaaaatatatgtatttaaaaacaaaaagcaacagtaatctatgtgtttctgtaacaaattgggat

SEQ ID NO: 53740 - DNA, 201 bp, Homo sapiens
aagcaacagtaatctatgtgtttctgtaacaaattgggatctgtcttggcattaaaccacatcatggaccaaatgtgccatactaatgatgagcatttagyacaatttgagactgaaatttagtacactatgttctaggtcagtctaacagtttgcctgctgtatttatagtaaccattttcctttggactgttcaagcaa

SEQ ID NO: 53741 - DNA, 201 bp, Homo sapiens
ggggaaagacaagtcgggagaggccggtaggcgtgaggcgggcctgaagcggcagcgggcggccttcgtccggcgagagctaggccgaggacccgaagggmgggcgggggtctcctccaggctgcgcgctcggagccgcctgctgggcttgggcggggcgcggggcccgcggccgccctacccggctcagtcctctggggc

SEQ ID NO: 53742 - DNA, 201 bp, Homo sapiens
ttaaaatattccttccttcaatttgacccagcgcctcgtcgtggtgagcctcatgttacacggcgcaccccagactacttcctataaatttctcctgggamacctgcctttgctggagtgcaatggtgtgatctcggctcactgcaacctccacctcccaagttcaaccgattctcctgcctcagcctcccaaatagctgg

SEQ ID NO: 53743 - DNA, 201 bp, Homo sapiens; identical to SEQ ID NO: 53734

SEQ ID NO: 53744 - DNA, 108 bp, Homo sapiens; identical to SEQ ID NO: 53735

SEQ ID NO: 53745 - DNA, 201 bp, Homo sapiens; identical to SEQ ID NO: 53736

SEQ ID NO: 53746 - DNA, 201 bp, Homo sapiens; identical to SEQ ID NO: 53741

SEQ ID NO: 53747 - DNA, 201 bp, Homo sapiens; identical to SEQ ID NO: 53738

SEQ ID NO: 53748 - DNA, 201 bp, Homo sapiens; identical to SEQ ID NO: 53740

SEQ ID NO: 53749 - DNA, 201 bp, Homo sapiens; identical to SEQ ID NO: 53739

SEQ ID NO: 53750 - DNA, 201 bp, Homo sapiens; identical to SEQ ID NO: 53734

SEQ ID NO: 53751 - DNA, 108 bp, Homo sapiens; identical to SEQ ID NO: 53735

SEQ ID NO: 53752 - DNA, 201 bp, Homo sapiens; identical to SEQ ID NO: 53736

SEQ ID NO: 53753 - DNA, 201 bp, Homo sapiens; identical to SEQ ID NO: 53741

SEQ ID NO: 53754 - DNA, 201 bp, Homo sapiens; identical to SEQ ID NO: 53738

SEQ ID NO: 53755 - DNA, 201 bp, Homo sapiens; identical to SEQ ID NO: 53740

SEQ ID NO: 53756 - DNA, 201 bp, Homo sapiens; identical to SEQ ID NO: 53739

SEQ ID NO: 53757 - DNA, 201 bp, Homo sapiens; identical to SEQ ID NO: 53734

SEQ ID NO: 53758 - DNA, 108 bp, Homo sapiens; identical to SEQ ID NO: 53735

SEQ ID NO: 53759 - DNA, 201 bp, Homo sapiens; identical to SEQ ID NO: 53736

SEQ ID NO: 53760 - DNA, 201 bp, Homo sapiens; identical to SEQ ID NO: 53738

SEQ ID NO: 53761 - DNA, 201 bp, Homo sapiens; identical to SEQ ID NO: 53740

SEQ ID NO: 53762 - DNA, 201 bp, Homo sapiens; identical to SEQ ID NO: 53739

SEQ ID NO: 53763 - DNA, 201 bp, Homo sapiens
tcatccatataccaccagataaccagaaaaacaaaaacactgcacagctgcaggatcaccacactggactcaaataccatagcccaatattggtatttccragcatggatgtttttccagagctcttccaggaaccgccggtccacaaagttatcaggaaagggctgttgctcatacaagaccctctgccactttacctcc

SEQ ID NO: 53764 - DNA, 201 bp, Homo sapiens
agcaagctacaaaatgtgattatttatgtcacgatatgacccagccataaatgtacttcaggtaagaaggacactgacatgatatcttactgatcaaatgyagtcagtaggtatatatgaacttttttctctgtgaagaaaagctattaataagtttgacttaataggcctatagtatgcacatactggccaagattctaa

SEQ ID NO: 53765 - DNA, 201 bp, Homo sapiens
tgtttttccagagctcttccaggaaccgccggtccacaaagttatcaggaaagggctgttgctcatacaagaccctctgccactttacctccttggtgttwgttacaggttgggtacacataatcctttcattcaaactcaggctagtttaatcatccctctcacagaggtccatgtggttcttgttgatgacattttgaa

SEQ ID NO: 53766 - DNA, 201 bp, Homo sapiens
tgtctctgaggcaggatataatacagccaagttcctggggatgcgtgactgggagatggcagttgcctgcctttttccttgtaagggttttttttttttttgagatggagtcttgctctgtcgcccaggctggagtgcagtggcgcgatctcggctcactgcaacctctgcctcccaggttcacgccattctcctgcctca

SEQ ID NO: 53767 - DNA, 165 bp, Homo sapiens
tgtcagggtcttagcactggtgaaaagccataagtgaaagtaatgaagactagggcactcttcargtcagcccaccgggtccacccactcttctgcccttcacctccatcagtgagatcaaacaaaacatacccaatcagtgaagaagccaggccagtcccaaaa

SEQ ID NO: 53768 - DNA, 201 bp, Homo sapiens
tgaagaagccaggccagtcccaaaaagccattggggggccagaagaccctcatccatataccaccagataaccagaaaaacaaaaacactgcacagctgcrggatcaccacactggactcaaataccatagcccaatattggtatttccgagcatggatgtttttccagagctcttccaggaaccgccggtccacaaagtt

SEQ ID NO: 53769 - DNA, 201 bp, Homo sapiens
cagggtcttagcactggtgaaaagccataagtgaaagtaatgaagactagggcactcttcaggtcagcccaccgggtccacccactcttctgcccttcacytccatcagtgagatcaaacaaaacatacccaatcagtgaagaagccaggccagtcccaaaaagccattggggggccagaagaccctcatccatataccac

SEQ ID NO: 53770 - DNA, 201 bp, Homo sapiens
tggtgtttttaaaaatctcattccagccgggcgcggtggctcacgcctgtaatcctagcactttgggaggctgaggcgggcagatcacctgaggtcaggarttcgaaaccagccttaccaacatggcaaaacccatctctattaaaaatacaaaaattagccgggtgtggtggcacgtgcctgtaatcccagctactcggg

SEQ ID NO: 53771 - DNA, 201 bp, Homo sapiens
aaaatgtgattatttatgtcacgatatgacccagccataaatgtacttcaggtaagaaggacactgacatgatatcttactgatcaaatgcagtcagtagktatatatgaacttttttctctgtgaagaaaagctattaataagtttgacttaataggcctatagtatgcacatactggccaagattctaaatggattatt

SEQ ID NO: 53772 - DNA, 201 bp, Homo sapiens
agagtgaggtcagtatcaccaagcctcttggatttcttcagtagtctcatggataagtgaatgtttaaagtaactactactttgttggctcttggttgggyggatggattctcagtcctggtgtttttaaaaatctcattccagccgggcgcggtggctcacgcctgtaatcctagcactttgggaggctgaggcgggcag

SEQ ID NO: 53773 - DNA, 201 bp, Homo sapiens
tcctaagacttgtttatgttcatcatctcttctatactagagctgcagtcttacatttgcttacttcctgacatccacccccaccccagtgatttctcccyatctccacctctatattatttgaactaaatgaattcatgaatgaacaaatgagtggatgaatgaatggtaatggataatgggctatgaagtcatatttaa

SEQ ID NO: 53774 - DNA, 201 bp, Homo sapiens
aactggattccctcatcaaagagtcgaagattcgggactgtgaggaccccaacaacttctccgtctccacactgtccccatctggaaagctcggacgcaakagcaaggctgaagaggacgtggagtctggggaggatgccggggccagcagacgcaatggccgcctcgtcgtgggaagcttctccaggcgcaagaagaagg

SEQ ID NO: 53775 - DNA, 201 bp, Homo sapiens
acaacgggttcaaccccacctgggaggagaccctggttttcatggtgcacatgccggagatcgcgctggtccgcttcctcgtctgggaccacgatcccatygggcgtgacttcattggccagaggacgctggccttcagcagcatgatgccaggctacagacacgtgtacctagaagggatggaagaggcctccatcttcg

SEQ ID NO: 53776 - DNA, 201 bp, Homo sapiens
gtgtgaccctcgagagctgccaggacatcatcgagcagtttgagccatgcccagaaaacaagagtaaggggctgctgggcattgatggcttcaccaactayaccaggagccctgctggtgacatcttcaaccctgagcaccaccatgtgcaccaggacatgacgcagccgctgagccactacttcatcacctcgtcccaca

SEQ ID NO: 53777 - DNA, 201 bp, Homo sapiens
ccagagccgaggggcgacccggcagaagaagaccatgaagctgtcccgggccctctctgacctggtgaagtacaccaagtccgtggccacccacgacatakagatggaggacgccggctgccaaatggttgccctgaactaccagtcagaggggcggatgctgcagctgaaccgagccaagttcagcgccaacggtggctg

SEQ ID NO: 53778 - DNA, 201 bp, Homo sapiens
tttgggcccgtggagagagtcgcgctgcggagcccccagggggacctgaggtcacaagagcctcgatgcacctgagcgcggagctgggggtccctggagcygctgtccccacctgcggcgctggagccctggaggtgtccaggggcttccttggaacgtggagacgtgctggttaaacgtggagccccgggccagccgggc

SEQ ID NO: 53779 - DNA, 201 bp, Homo sapiens
gggcagtgtggatgcaccagcaccctccaagggagccctcgggccagcatccgcggctgctgaaaacctggtcctgctccgcctctgaccgtcagtggtgsgaacctgggcggctctggaggcccagggcaggggtgggcgtgttgtttgctcaggaaacagggcagccaggcccccaaaactgtgtccccctggctgccc

SEQ ID NO: 53780 - DNA, 201 bp, Homo sapiens
ctctggaggcccagggcaggggtgggcgtgttgtttgctcaggaaacagggcagccaggcccccaaaactgtgtccccctggctgccctgtgtcccctccrcccctgcctccctcctgcccctgctcccggggaggaaaggctaaagctgctggcccggggcccacaggaggggcttcgaggctggccctgccaggcagtt

SEQ ID NO: 53781 - DNA, 201 bp, Homo sapiens; identical to SEQ ID NO: 53775

SEQ ID NO: 53782 - DNA, 201 bp, Homo sapiens
ttctgcgtggacggtgtcgcctcgtgtgctcgtgctcgtggctctgtatccgtggcactgtctccgtggcactctgctcccttggcttgcctgtggcccayagccccagccctcctgtctgagcttgaggccctgggacttgggtggagctggtttgaggcccgacaggctgggaagaaccagctgctcttgctgagggtc

SEQ ID NO: 53783 - DNA, 157 bp, Homo sapiens
gccctttgctgcggcagctttctgttctccctggctccctgcacggaactgagcttyggtgtgtgatgcgctgctggcccaggctacaccccgacaagggacaccgggggccccgggagcagagagacctcagagcagcctcctcctgcctcctgtg

SEQ ID NO: 53784 - DNA, 201 bp, Homo sapiens
gttgctgcccccaccgacagtcctcagtccctccatgatggctcccccgacagccggcccccttcctggcccagctcttccgcctgaggacccagggccgkatccggagagcaggtggcttttcttgagcgccaacattctgcccgtggtggagcggtgcatgggtgccatgcaagaggggatgcagatggtgaagctgcg

SEQ ID NO: 53785 - DNA, 201 bp, Homo sapiens; identical to SEQ ID NO: 53779

SEQ ID NO: 53786 - DNA, 201 bp, Homo sapiens
gcagctttctgttctccctggctccctgcacggaactgagcttcggtgtgtgatgcgctgctggcccaggctacaccccgacaagggacaccgggggcccygggagcagagagacctcagagcagcctcctcctgcctcctgtggacggccggccccagctggtgatcccagccagtcccagctttcagttgctgccccca

SEQ ID NO: 53787 - DNA, 201 bp, Homo sapiens; identical to SEQ ID NO: 53780

SEQ ID NO: 53788 - DNA, 201 bp, Homo sapiens
cttgggtggagctggtttgaggcccgacaggctgggaagaaccagctgctcttgctgagggtctggggccgggactgtggcctgacatgctgggcccctcyggctgggcgcttccccaaactcacctcctgggcggctggcgacctgcatggcccctgatgcctttcctgggactgggggccacgtaccatcccattccca

SEQ ID NO: 53789 - DNA, 201 bp, Homo sapiens
gacatgctgggcccctccggctgggcgcttccccaaactcacctcctgggcggctggcgacctgcatggcccctgatgcctttcctgggactgggggccaygtaccatcccattcccacctccctctagggcaggctccaggggtccctactgggaagtctgatgtgggcaggtagtgcagctgctgggcgtctcctgcgc

SEQ ID NO: 53790 - DNA, 201 bp, Homo sapiens
gctccggaagccccagcccaggaggggcccggcagcggcagcccccgaggtaaggcgccagctgcggtggcagagaagagccctgtgcgagtgcggccccygcgtgtcctggacggccccgggcctgctgggatggccgccacatgcatgaagtgtgtggtgggatcctgcgccggcgtgaacaccgggggcctgcagagg

SEQ ID NO: 53791 - DNA, 201 bp, Homo sapiens; identical to SEQ ID NO: 53774

SEQ ID NO: 53792 - DNA, 201 bp, Homo sapiens; identical to SEQ ID NO: 53776

SEQ ID NO: 53793 - DNA, 201 bp, Homo sapiens; identical to SEQ ID NO: 53779

SEQ ID NO: 53794 - DNA, 201 bp, Homo sapiens; identical to SEQ ID NO: 53788

SEQ ID NO: 53795 - DNA, 201 bp, Homo sapiens; identical to SEQ ID NO: 53789

SEQ ID NO: 53796 - DNA, 201 bp, Homo sapiens; identical to SEQ ID NO: 53790

SEQ ID NO: 53797 - DNA, 201 bp, Homo sapiens; identical to SEQ ID NO: 53782

SEQ ID NO: 53798 - DNA, 201 bp, Homo sapiens; identical to SEQ ID NO: 53775

SEQ ID NO: 53799 - DNA, 201 bp, Homo sapiens
ccagagccgaggggcgacccggcagaagaagaccatgaagctgtcccgggccctctctgacctggtgaagtacaccaagtccgtggccacccacgacatakagatggaggcggcgtccagctggcaggtgtcgtccttcagcgagaccaaggcccaccagattctgcagcagaagccggcgcagtacctacgcttcaacca

SEQ ID NO: 53800 - DNA, 201 bp, Homo sapiens; identical to SEQ ID NO: 53778

SEQ ID NO: 53801 - DNA, 201 bp, Homo sapiens
tgtcccgggccctctctgacctggtgaagtacaccaagtccgtggccacccacgacatagagatggaggcggcgtccagctggcaggtgtcgtccttcagygagaccaaggcccaccagattctgcagcagaagccggcgcagtacctacgcttcaaccagcagcagctctcccgcatctacccctcctcctaccgtgtgg

SEQ ID NO: 53802 - DNA, 201 bp, Homo sapiens; identical to SEQ ID NO: 53780

SEQ ID NO: 53803 - DNA, 201 bp, Homo sapiens
cctctcgcccggcccgagtgtgaggagaagggcccggcccggcctgcgtcgtgtgtgaggaggaccccgggcgggcccacgggccgtgtggggcctggtcyggcccgccgggtgtgtgaagaccggggcccggtgctgcccggccggagggcgagcggaggggaggggcctggtccggcccggccggtgcgtgaggactgg

SEQ ID NO: 53804 - DNA, 201 bp, Homo sapiens
atgatgatgattctgggaatgaggagtcgtgacgtgctccttcagtgcccctgtactgccctgccatctcaggccaaagggaggggagcaagtggggaccyggccatggcccctcagcaaaaacctattcacagcgggtggggaaacacacacagctcctgctgactccccttatggatctcagtttgctcctttttatgg

SEQ ID NO: 53805 - DNA, 201 bp, Homo sapiens
gacgacttgtatgatgacgacattgatgatgaagatgaggaggaggaagatgccgactgttatgatgatgatgattctgggaatgaggagtcgtgacgtgytccttcagtgcccctgtactgccctgccatctcaggccaaagggaggggagcaagtggggacctggccatggcccctcagcaaaaacctattcacagcgg

SEQ ID NO: 53806 - DNA, 201 bp, Homo sapiens
tttatggacctttaatggagagagagtaaccctccacagaatgtctgaattcttgcattctttacccttccatcactatattgattctttttttaaaaaayatgaacccaaactcccgcctcacttcgtctctacagaatgttcacagcaaaacacgtttggtctgtttttagattcttgaagaattcaatagtctttcaa

SEQ ID NO: 53807 - DNA, 201 bp, Homo sapiens; identical to SEQ ID NO: 53804

SEQ ID NO: 53808 - DNA, 201 bp, Homo sapiens; identical to SEQ ID NO: 53805

SEQ ID NO: 53809 - DNA, 201 bp, Homo sapiens; identical to SEQ ID NO: 53806

SEQ ID NO: 53810 - DNA, 201 bp, Homo sapiens; identical to SEQ ID NO: 53803

SEQ ID NO: 53811 - DNA, 201 bp, Homo sapiens; identical to SEQ ID NO: 53804

SEQ ID NO: 53812 - DNA, 201 bp, Homo sapiens; identical to SEQ ID NO: 53805

SEQ ID NO: 53813 - DNA, 201 bp, Homo sapiens; identical to SEQ ID NO: 53806

SEQ ID NO: 53814 - DNA, 201 bp, Homo sapiens
tcccggacttcgtgcgggacttcatgggcgccatgtacggggatcccaccctctgtcccacctgggccactgacgctctggcctctgtgggaatcacactkggctgacctggcattgggagagggagggaggaaggaagggagggaggggctggaagatactgaaggattcctttttgaaaggttttttttattgtaactt

SEQ ID NO: 53815 - DNA, 201 bp, Homo sapiens
aagtcttcttgacttctgattttcaaaaccattcctcagtatcttcaggcatttgacctcctgaatgtgcttggccctgggcttcagttatcctttgatgycctgcaggggtggctaatgtgctggggtttttctgtgttaatagtcacagtattgttttattggtgaatagctgaaaaacagagggattaagtcatattc

SEQ ID NO: 53816 - DNA, 201 bp, Homo sapiens
aaaataactgaagaagaatttgagaagggcttgttgacaactggcaaaagaacaatcaagacagtggatttagggatctcagatttggaagatgactgctrattccagtgccacagatgaacccacaaggacatagctgttccctaacttggtggatggctccagtttgcttttaacgaaaatcacaacttcaggagacat

SEQ ID NO: 53817 - DNA, 201 bp, Homo sapiens
atgaatgcaacctgattttcagattaaaggatcttgattttgccagccttgctcgaggttttgccctgctgaggatgcccaagatgccagaattgagaggraagcagtttccagattttgtgcccgtggacgttaataccgacacgattccatttaaagataaaatcagagaaaagcagaggcagaaactcctggagcaac

SEQ ID NO: 53818 - DNA, 201 bp, Homo sapiens
aggagaaacacctggtcttcttcagcacctgtgcctgtgtggaatactatgggaaggctctggaagtgctggtgaagggcgtgaagattatgtgcattcayggaaagatgaaatataaacgcaataagatcttcatggagttccgcaaattgcaaagtgggattttagtgtgcactgatgtgatggcccggggaattgata

SEQ ID NO: 53819 - DNA, 201 bp, Homo sapiens
gcagccagcagtgcccagaagaccccctcccgcctggaaaactactacatggtatgcaaggcagatgagaaatttaatcagctggtccattttcttcgcartcataagcaggagaaacacctggtcttcttcagcacctgtgcctgtgtggaatactatgggaaggctctggaagtgctggtgaagggcgtgaagattatg

SEQ ID NO: 53820 - DNA, 201 bp, Homo sapiens
gcagaaactcctggagcaacaaagaagagagaaaacagaaaatgaagggagaagaaaattcataaaaaataaagcttggtcaaagcagaaggccaaaaaaraaaagaagaaaaaaatgaatgagaaaaggaaaagggaagagggttctgatattgaagatgaggacatggaagaacttcttaatgacacaagactcttgaa

SEQ ID NO: 53821 - DNA, 201 bp, Homo sapiens
aactcctggagcaacaaagaagagagaaaacagaaaatgaagggagaagaaaattcataaaaaataaagcttggtcaaagcagaaggccaaaaaagaaaaraagaaaaaaatgaatgagaaaaggaaaagggaagagggttctgatattgaagatgaggacatggaagaacttcttaatgacacaagactcttgaaaaaac

SEQ ID NO: 53822 - DNA, 201 bp, Homo sapiens
catgatgggtcacatatagacatatgtacatattatatatatatatatatatctcttttttctgaggctattttatagttatttttaaacataaagatacwgaagtcttcttgacttctgattttcaaaaccattcctcagtatcttcaggcatttgacctcctgaatgtgcttggccctgggcttcagttatcctttgat

SEQ ID NO: 53823 - DNA, 201 bp, Homo sapiens
tcctggagcaacaaagaagagagaaaacagaaaatgaagggagaagaaaattcataaaaaataaagcttggtcaaagcagaaggccaaaaaagaaaagaaraaaaaaatgaatgagaaaaggaaaagggaagagggttctgatattgaagatgaggacatggaagaacttcttaatgacacaagactcttgaaaaaactta

SEQ ID NO: 53824 - DNA, 201 bp, Homo sapiens
gggaggcggagcttgcagtgaaccgttatagcgcccagcctccagcctgggcaacagagcgagactccgtctcaaacaacaacaacaacaacaacaacaamaaaaacagctttctgagtgaagttgtatgtggacatgaatggcccaggcaaacagtgaacagaggaatgggacagtgttcttagttaggactctgaccct

SEQ ID NO: 53825 - DNA, 201 bp, Homo sapiens
tggacgcggtcctgtgctgccacctgcctccgaggggcagagaaagtgggagggccgggccagaatccctcccgccaaaactcctgcccggtgcggagagrcgcccggagcccagggcgctgtgcggagcgggtgtaactccccaggcctgccccgccgcctgcctccaccgtcccgcggacgcctttcctccctcccgcg

SEQ ID NO: 53826 - DNA, 201 bp, Homo sapiens; identical to SEQ ID NO: 53819

SEQ ID NO: 53827 - DNA, 201 bp, Homo sapiens; identical to SEQ ID NO: 53820

SEQ ID NO: 53828 - DNA, 201 bp, Homo sapiens
ggacgcggtcctgtgctgccacctgcctccgaggggcagagaaagtgggagggccgggccagaatccctcccgccaaaactcctgcccggtgcggagaggygcccggagcccagggcgctgtgcggagcgggtgtaactccccaggcctgccccgccgcctgcctccaccgtcccgcggacgcctttcctccctcccgcgg

SEQ ID NO: 53829 - DNA, 201 bp, Homo sapiens; identical to SEQ ID NO: 53821

SEQ ID NO: 53830 - DNA, 201 bp, Homo sapiens; identical to SEQ ID NO: 53823

SEQ ID NO: 53831 - DNA, 201 bp, Homo sapiens; identical to SEQ ID NO: 53815

SEQ ID NO: 53832 - DNA, 201 bp, Homo sapiens; identical to SEQ ID NO: 53816

SEQ ID NO: 53833 - DNA, 201 bp, Homo sapiens
tcccgcggacgcctttcctccctcccgcggcgtgggagccttcgccgcgctccggaactctgctgctccagcgaagttcccggccggccgctggagctgcsggaagcggaagtgctcgttgggggtgcacaaggcgcgttcgagcagcggcgaccgacgcggcgaaggagcgcgccatggagcatgtgacagagggctcct

SEQ ID NO: 53834 - DNA, 201 bp, Homo sapiens; identical to SEQ ID NO: 53817

SEQ ID NO: 53835 - DNA, 201 bp, Homo sapiens; identical to SEQ ID NO: 53818

SEQ ID NO: 53836 - DNA, 201 bp, Homo sapiens
cccgggaggcggagcttgcagtgaaccgttatagcgcccagcctccagcctgggcaacagagcgagactccgtctcaaacaacaacaacaacaacaacaamaaaaaaaacagctttctgagtgaagttgtatgtggacatgaatggcccaggcaaacagtgaacagaggaatgggacagtgttcttagttaggactctgac

SEQ ID NO: 53837 - DNA, 201 bp, Homo sapiens
attatatatatatatatatatatatatatatatatatatatatatatataagctcttttttctgaggctattttatagttatttttaaacataaagatacwgaagtcttcttgacttctgattttcaaaaccattcctcagtatcttcaggcatttgacctcctgaatgtgcttggccctgggcttcagttatcctttgat

SEQ ID NO: 53838 - DNA, 201 bp, Homo sapiens; identical to SEQ ID NO: 53824

SEQ ID NO: 53839 - DNA, 201 bp, Homo sapiens; identical to SEQ ID NO: 53825

SEQ ID NO: 53840 - DNA, 201 bp, Homo sapiens; identical to SEQ ID NO: 53819

SEQ ID NO: 53841 - DNA, 201 bp, Homo sapiens; identical to SEQ ID NO: 53820

SEQ ID NO: 53842 - DNA, 201 bp, Homo sapiens; identical to SEQ ID NO: 53828

SEQ ID NO: 53843 - DNA, 201 bp, Homo sapiens; identical to SEQ ID NO: 53821

SEQ ID NO: 53844 - DNA, 201 bp, Homo sapiens; identical to SEQ ID NO: 53823

SEQ ID NO: 53845 - DNA, 201 bp, Homo sapiens; identical to SEQ ID NO: 53815

SEQ ID NO: 53846 - DNA, 201 bp, Homo sapiens; identical to SEQ ID NO: 53816

SEQ ID NO: 53847 - DNA, 201 bp, Homo sapiens; identical to SEQ ID NO: 53833

SEQ ID NO: 53848 - DNA, 201 bp, Homo sapiens; identical to SEQ ID NO: 53817

SEQ ID NO: 53849 - DNA, 201 bp, Homo sapiens; identical to SEQ ID NO: 53818

SEQ ID NO: 53850 - DNA, 201 bp, Homo sapiens; identical to SEQ ID NO: 53836

SEQ ID NO: 53851 - DNA, 201 bp, Homo sapiens; identical to SEQ ID NO: 53822

SEQ ID NO: 53852 - DNA, 191 bp, Homo sapiens
gccctggaggctgatctgattgggctgtgatcaggacagcaggagtgtacaggctctccaggtgattccagggtgcagccaaggctgagccacagctttarggtaaacccatgttcgattccacagattccttggttgctccttctacgtatgaaggccgaggtcggtgtttactaagcagcacaacctga

SEQ ID NO: 53853 - DNA, 201 bp, Homo sapiens
cagaggaacttggtggtgatccccaagtctgtgacaccagaacgcattgctgagaactttaaggtctttgactttgaactgagcagccaggatatgaccaycttactcagctacaacaggaactggagggtctgtgccttgttgagctgtacctcccacaaggattaccccttccatgaagagttttgaagctgtggttgc

SEQ ID NO: 53854 - DNA, 201 bp, Homo sapiens
tacgcgccgcggccaaggccgcaccgtactgggcgggggtctggggagcgcagcagccatggcaagccgtctcctgctcaacaacggcgccaagatgcccwtcctggggttgggtacctggaagtcccctccagggcaggtgactgaggccgtgaaggtggccattgacgtcgggtaccgccacatcgactgtgcccatgt

SEQ ID NO: 53855 - DNA, 201 bp, Homo sapiens
ggtggccattcaggagaagctcagggagcaggtggtgaagcgtgaggagctcttcatcgtcagcaagctgtggtgcacgtaccatgagaagggcctggtgraaggagcctgccagaagacactcagcgacctgaagctggactacctggacctctaccttattcactggccgactggctttaagcctgggaaggaattttt

SEQ ID NO: 53856 - DNA, 201 bp, Homo sapiens
cttaaacaaacctggcttgaagtataagcctgcagttaaccagattgagtgccacccatatctcactcaggagaagttaatccagtactgccagtccaaargcatcgtggtgaccgcctacagccccctcggctctcctgacaggccctgggccaagcccgaggacccttctctcctggaggatcccaggatcaaggcgat

SEQ ID NO: 53857 - DNA, 201 bp, Homo sapiens
tcatcctggctgcacaccaggtcacctttgggggctttaaggctggtgatgtctggacctcgccctggaggctgatctgattgggctgtgatcaggacagsaggagtgtacaggctctccaggtgattccagggtgcagccaaggctgagccacagctttagggtaaacccatgttcgattccacagattccttggttgct

SEQ ID NO: 53858 - DNA, 176 bp, Homo sapiens
ctccttcgcgcagcggcgcgccaaccgcaggcgccctttctgccgacctcacgggctatttaaaggtacgcgccgsggccaaggccgcaccgtactgggcgggggtctggggagcgcagcagccatggcaagccgtctcctgctcaacaacggcgccaagatgcccatcctggggt

SEQ ID NO: 53859 - DNA, 201 bp, Homo sapiens
aagtgacctatacctgtgtttcttgcctcatttttttccttgcaaatgtagtatggcctgtgtcactcagcagtgggacagcaacctgtagagtggccagmgagggcgtgtctagcttgatgttggatctcaagagccctgtcagtagagtagaagtctcttccagtttgctttgcccttctttctaccctgctggggaaa

SEQ ID NO: 53860 - DNA, 192 bp, Homo sapiens
cgccctggaggctgatctgattgggctgtgatcaggacagcaggagtgtacaggctctccaggtgattccagggtgcagccaaggctgagccacagctttwgggtaaacccatgttcgattccacagattccttggttgctccttctacgtatgaaggccgaggtcggtgtttactaagcagcacaacctga

SEQ ID NO: 53861 - DNA, 201 bp, Homo sapiens
tgcccatgtgtaccagaatgagaatgaggtgggggtggccattcaggagaagctcagggagcaggtggtgaagcgtgaggagctcttcatcgtcagcaagwtgtggtgcacgtaccatgagaagggcctggtgaaaggagcctgccagaagacactcagcgacctgaagctggactacctggacctctaccttattcactg

SEQ ID NO: 53862 - DNA, 201 bp, Homo sapiens
cctgtagagtggccagcgagggcgtgtctagcttgatgttggatctcaagagccctgtcagtagagtagaagtctcttccagtttgctttgcccttctttytaccctgctggggaaagtacaacctgaatacccttttctgaccaaagagaagcaaaatctaccaggtcaaaatagtgccactaacggttgagtactggaa

SEQ ID NO: 53863 - DNA, 201 bp, Homo sapiens
accttattcactggccgactggctttaagcctgggaaggaatttttcccattggatgagtcgggcaatgtggttcccagtgacaccaacattctggacacrtgggcggccatggaagagctggtggatgaagggctggtgaaagctattggcatctccaacttcaaccatctccaggtggagatgatcttaaacaaacctg

SEQ ID NO: 53864 - DNA, 201 bp, Homo sapiens
agcaggtggtgaagcgtgaggagctcttcatcgtcagcaagctgtggtgcacgtaccatgagaagggcctggtgaaaggagcctgccagaagacactcagygacctgaagctggactacctggacctctaccttattcactggccgactggctttaagcctgggaaggaatttttcccattggatgagtcgggcaatgtgg

SEQ ID NO: 53865 - DNA, 201 bp, Homo sapiens
ttccatgaagagttttgaagctgtggttgcctgctcgtccccaagtgacctatacctgtgtttcttgcctcatttttttccttgcaaatgtagtatggccygtgtcactcagcagtgggacagcaacctgtagagtggccagcgagggcgtgtctagcttgatgttggatctcaagagccctgtcagtagagtagaagtct

SEQ ID NO: 53866 - DNA, 201 bp, Homo sapiens
aacggcgccaagatgcccatcctggggttgggtacctggaagtcccctccagggcaggtgactgaggccgtgaaggtggccattgacgtcgggtaccgccwcatcgactgtgcccatgtgtaccagaatgagaatgaggtgggggtggccattcaggagaagctcagggagcaggtggtgaagcgtgaggagctcttcatc

SEQ ID NO: 53867 - DNA, 201 bp, Homo sapiens
accccttccatgaagagttttgaagctgtggttgcctgctcgtccccaagtgacctatacctgtgtttcttgcctcatttttttccttgcaaatgtagtakggcctgtgtcactcagcagtgggacagcaacctgtagagtggccagcgagggcgtgtctagcttgatgttggatctcaagagccctgtcagtagagtaga

SEQ ID NO: 53868 - DNA, 201 bp, Homo sapiens
gtaccgccacatcgactgtgcccatgtgtaccagaatgagaatgaggtgggggtggccattcaggagaagctcagggagcaggtggtgaagcgtgaggagstcttcatcgtcagcaagctgtggtgcacgtaccatgagaagggcctggtgaaaggagcctgccagaagacactcagcgacctgaagctggactacctgga

SEQ ID NO: 53869 - DNA, 201 bp, Homo sapiens; identical to SEQ ID NO: 53853

SEQ ID NO: 53870 - DNA, 201 bp, Homo sapiens; identical to SEQ ID NO: 53854

SEQ ID NO: 53871 - DNA, 201 bp, Homo sapiens; identical to SEQ ID NO: 53856

SEQ ID NO: 53872 - DNA, 201 bp, Homo sapiens; identical to SEQ ID NO: 53855

SEQ ID NO: 53873 - DNA, 176 bp, Homo sapiens; identical to SEQ ID NO: 53858

SEQ ID NO: 53874 - DNA, 165 bp, Homo sapiens
ctaccctgctggggaaagtacaacctgaatacccttttctgaccaaagagaagcaaaatctaccaggtcaaaatagtgccactaacggttgagttttgacygcttggaactggaatcctttcagcaagacttctctttgcctcaaataaaaagtgcttttgtgag

SEQ ID NO: 53875 - DNA, 201 bp, Homo sapiens; identical to SEQ ID NO: 53859

SEQ ID NO: 53876 - DNA, 201 bp, Homo sapiens; identical to SEQ ID NO: 53861

SEQ ID NO: 53877 - DNA, 201 bp, Homo sapiens
cctgtagagtggccagcgagggcgtgtctagcttgatgttggatctcaagagccctgtcagtagagtagaagtctcttccagtttgctttgcccttctttytaccctgctggggaaagtacaacctgaatacccttttctgaccaaagagaagcaaaatctaccaggtcaaaatagtgccactaacggttgagttttgact

SEQ ID NO: 53878 - DNA, 201 bp, Homo sapiens; identical to SEQ ID NO: 53864

SEQ ID NO: 53879 - DNA, 201 bp, Homo sapiens; identical to SEQ ID NO: 53863

SEQ ID NO: 53880 - DNA, 201 bp, Homo sapiens; identical to SEQ ID NO: 53865

SEQ ID NO: 53881 - DNA, 201 bp, Homo sapiens; identical to SEQ ID NO: 53866

SEQ ID NO: 53882 - DNA, 201 bp, Homo sapiens; identical to SEQ ID NO: 53867

SEQ ID NO: 53883 - DNA, 201 bp, Homo sapiens; identical to SEQ ID NO: 53868

SEQ ID NO: 53884 - DNA, 201 bp, Homo sapiens
acggtgggcgcctgtaatcccagctactcgggaggctgaggcaggagaattgcttgaacccaggagacagaggttgtagtgagctgagatcgcaccactgyactctagccttggcaacagtgcaagactgtctcaaaaacagcaacagagagcaggacgtgagacttctacctgctcactcagaatcatttctgcaccaac

SEQ ID NO: 53885 - DNA, 201 bp, Homo sapiens
tctccaatttcagccacttccagatcgagaagctcttgaacaaacctggactgaaatataaaccagtgactaaccaggttgagtgtcacccatacctcacrcaggagaaactgatccagtactgccactccaagggcatcaccgttacggcctacagccccctgggctctccggatagaccttgggccaagccagaagacc

SEQ ID NO: 53886 - DNA, 201 bp, Homo sapiens
gctctccggatagaccttgggccaagccagaagacccttccctgctggaggatcccaagattaaggagattgctgcaaagcacaaaaaaaccgcagcccargttctgatccgtttccatatccagaggaatgtgattgtcatccccaagtctgtgacaccagcacgcattgttgagaacattcaggtctttgactttaaat

SEQ ID NO: 53887 - DNA, 201 bp, Homo sapiens
tgggctctccggatagaccttgggccaagccagaagacccttccctgctggaggatcccaagattaaggagattgctgcaaagcacaaaaaaaccgcagcycaggttctgatccgtttccatatccagaggaatgtgattgtcatccccaagtctgtgacaccagcacgcattgttgagaacattcaggtctttgacttta

SEQ ID NO: 53888 - DNA, 201 bp, Homo sapiens
ttgcttgaacccaggagacagaggttgtagtgagctgagatcgcaccactgcactctagccttggcaacagtgcaagactgtctcaaaaacagcaacagaragcaggacgtgagacttctacctgctcactcagaatcatttctgcaccaaccatggccacgtttgtggagctcagtaccaaagccaagatgcccattgtg

SEQ ID NO: 53889 - DNA, 201 bp, Homo sapiens
acctcacacaggagaaactgatccagtactgccactccaagggcatcaccgttacggcctacagccccctgggctctccggatagaccttgggccaagccwgaagacccttccctgctggaggatcccaagattaaggagattgctgcaaagcacaaaaaaaccgcagcccaggttctgatccgtttccatatccagagga

SEQ ID NO: 53890 - DNA, 201 bp, Homo sapiens
tcacacaggagaaactgatccagtactgccactccaagggcatcaccgttacggcctacagccccctgggctctccggatagaccttgggccaagccagargacccttccctgctggaggatcccaagattaaggagattgctgcaaagcacaaaaaaaccgcagcccaggttctgatccgtttccatatccagaggaatg

SEQ ID NO: 53891 - DNA, 201 bp, Homo sapiens
ctacctgctcactcagaatcatttctgcaccaaccatggccacgtttgtggagctcagtaccaaagccaagatgcccattgtgggcctgggcacttggaartctcctcttggcaaagtgaaagaagcagtgaaggtggccattgatgcaggatatcggcacattgactgtgcctatgtctatcagaatgaacatgaagtgg

SEQ ID NO: 53892 - DNA, 201 bp, Homo sapiens
acctgagctcaggagtttgagaccagcctgtctctactaacaatataaaaattagctgggagtcacggtgggcgcctgtaatcccagctactcgggaggcygaggcaggagaattgcttgaacccaggagacagaggttgtagtgagctgagatcgcaccactgcactctagccttggcaacagtgcaagactgtctcaaa

SEQ ID NO: 53893 - DNA, 201 bp, Homo sapiens
  misc_feature (1)...(201): n = A,T,C or G
taaattgagtgatgaggagatggcaaccatactcagcttcaacagaaactggagggcctgtaacgtgttgcaatcctctcatttggaagactatcccttcnatgcagaatattgaggttgaatctcctggtgagattatacaggagattctctttcttcgctgaagtgtgactacctccactcatgtcccattttagccaa

SEQ ID NO: 53894 - DNA, 201 bp, Homo sapiens
agcagcctgtggccgggcacagtagctcacacctgtaatcccagcactttggaaggccgaggtgggcggatcacctgagctcaggagtttgagaccagccwgtctctactaacaatataaaaattagctgggagtcacggtgggcgcctgtaatcccagctactcgggaggctgaggcaggagaattgcttgaacccagga

SEQ ID NO: 53895 - DNA, 201 bp, Homo sapiens
cactcagaatcatttctgcaccaaccatggccacgtttgtggagctcagtaccaaagccaagatgcccattgtgggcctgggcacttggaagtctcctctyggcaaagtgaaagaagcagtgaaggtggccattgatgcaggatatcggcacattgactgtgcctatgtctatcagaatgaacatgaagtgggggaagcca

SEQ ID NO: 53896 - DNA, 201 bp, Homo sapiens
ttggcaacagtgcaagactgtctcaaaaacagcaacagagagcaggacgtgagacttctacctgctcactcagaatcatttctgcaccaaccatggccacrtttgtggagctcagtaccaaagccaagatgcccattgtgggcctgggcacttggaagtctcctcttggcaaagtgaaagaagcagtgaaggtggccattg

SEQ ID NO: 53897 - DNA, 201 bp, Homo sapiens
catatccagaggaatgtgattgtcatccccaagtctgtgacaccagcacgcattgttgagaacattcaggtctttgactttaaattgagtgatgaggagayggcaaccatactcagcttcaacagaaactggagggcctgtaacgtgttgcaatcctctcatttggaagactatcccttcaatgcagaatattgaggttga

SEQ ID NO: 53898 - DNA, 201 bp, Homo sapiens
tcttttcctctaggaaaagggatactttgataattaaggccagaggcccattagttgagaaagtcacagatatatttctccaagaaagccaacaaccaccmccacaatgacagaaatgacaacaaggccctttaacttgtcttctagtttagagacatccttcatttgacatttagtagaattcctctttggccacaagaa

SEQ ID NO: 53899 - DNA, 201 bp, Homo sapiens
tagtcttttcctctaggaaaagggatactttgataattaaggccagaggcccattagttgagaaagtcacagatatatttctccaagaaagccaacaaccmccaccacaatgacagaaatgacaacaaggccctttaacttgtcttctagtttagagacatccttcatttgacatttagtagaattcctctttggccacaa

SEQ ID NO: 53900 - DNA, 201 bp, Homo sapiens
aagctaaaaaatagtctttctcaactgttggctaagaagaaatgcaaaagaagtggcataggagtgtgttatgggtgctgaactctctctctttttccccrattttccagagctaggctgtggagtagagtttgtataggtaactaggtaacttattgtggcccagataaggctttaggatgcctcagtgcttatgtcata

SEQ ID NO: 53901 - DNA, 201 bp, Homo sapiens
cacatctgtccttaatcggtccattcacacagcctggctgatcctggaagagctaggccaggaatgggtgcctgtggaaagctcctggcgtctaaatgagygtcactatggggccttgatcggtctcaacagggagcagatggctttgaatcatggtgaagaacaagtgaggctctggagaagaagctacaatgtaacccc

SEQ ID NO: 53902 - DNA, 149 bp, Homo sapiens
aaaagagcgtcgatgccggcggcagtgatgagtcctaggaggcgctggstctttggcggctcggaggagcggctgctgctgctgctgctgctgctggtggcccctttgcagaaaagttctaagaacagtgctgttggctcagtgagatg

SEQ ID NO: 53903 - DNA, 201 bp, Homo sapiens
gcatagtccagctgcactctgcttcacacagctgcctgcccattgcaggcatttgagtttgcaatccatgccttaaactttaaatcacactggctacagcrttgtgtgtttcttggtaaacactgggtaaatcagctcctgtggatgttgactgaagtttctatgtttgcaagctaatcctcagcagtttctttatgtatt

SEQ ID NO: 53904 - DNA, 201 bp, Homo sapiens; identical to SEQ ID NO: 53898

SEQ ID NO: 53905 - DNA, 201 bp, Homo sapiens; identical to SEQ ID NO: 53899

SEQ ID NO: 53906 - DNA, 201 bp, Homo sapiens; identical to SEQ ID NO: 53900

SEQ ID NO: 53907 - DNA, 201 bp, Homo sapiens; identical to SEQ ID NO: 53901

SEQ ID NO: 53908 - DNA, 201 bp, Homo sapiens; identical to SEQ ID NO: 53898

SEQ ID NO: 53909 - DNA, 201 bp, Homo sapiens; identical to SEQ ID NO: 53899

SEQ ID NO: 53910 - DNA, 201 bp, Homo sapiens; identical to SEQ ID NO: 53900

SEQ ID NO: 53911 - DNA, 201 bp, Homo sapiens; identical to SEQ ID NO: 53901

SEQ ID NO: 53912 - DNA, 153 bp, Homo sapiens
ctagaaaagagcgtcgatgccggcggcagtgatgagtcctaggaggcgctggstctttggcggctcggaggagcggctgctgctgctgctgctgctgctggtggcccctttgcagatgtattgctgtccttgaatattagcccatttgaaaac

SEQ ID NO: 53913 - DNA, 201 bp, Homo sapiens; identical to SEQ ID NO: 53898

SEQ ID NO: 53914 - DNA, 201 bp, Homo sapiens; identical to SEQ ID NO: 53899

SEQ ID NO: 53915 - DNA, 201 bp, Homo sapiens; identical to SEQ ID NO: 53900

SEQ ID NO: 53916 - DNA, 201 bp, Homo sapiens; identical to SEQ ID NO: 53901

SEQ ID NO: 53917 - DNA, 191 bp, Homo sapiens
ctccttttcacggcgtcttgcattactattgtgcggctgcaggaggtgtcgagcggcgttatttttttttgcggtttgcctttttttttcttttttttttttttggaaccgcggttgtttaaaagcctgagggaacctggagaggggctcccactccctaccctctttcctccgagtttgtgactccgaga

SEQ ID NO: 53918 - DNA, 201 bp, Homo sapiens
ctggtacagtagtgaaccgcacagatttcatgaacttaggatgtgttttttattcatgaaaaacttagaatagtgaactattaatatttaaaaacgagaamtacaacatttaaaaaattaagagtattttgcattagtgattatgattcttatcccaaaattctagaaagtaataaattctgtatgaataagcataaaaaa

SEQ ID NO: 53919 - DNA, 201 bp, Homo sapiens
gaggtgtcgagcggcgttatttttttttgcggtttgcctttttttttcttttttttttttttggaaccgcggttgtttaaaagcctgagggaacctggagrggggctcccactccctaccctctttcctccgagtttgtgactccgagatggacaaagtgtgtgctgtttttggaggctcccgaggcattggcagagctgt

SEQ ID NO: 53920 - DNA, 201 bp, Homo sapiens
tgcctgggagtagagataaagacacaaaccgaatgtgaaataccaggtaataattattttgcattaaactctttttatcgggaatagtatgatattttcartgtcactccattcatgttgatttggagctgacagttattttgtgtaagcagagatttaattttatattgaaagtcagtgcaaaattatgaataggatata

SEQ ID NO: 53921 - DNA, 201 bp, Homo sapiens
ggaaggggccaaagccgccgccggtgacctcggcggagatcatttggcatttagctgtgatgttgctaaagaacatgatgttcaaaatacatttgaagagmtggagaaacatttaggtcgagtaaatttcttggtaaatgcagctggtattaacagggatggtcttttagtaagaacaaaaactgaagatatggtatctca

SEQ ID NO: 53922 - DNA, 201 bp, Homo sapiens
ttttttttgcggtttgcctttttttttcttttttttttttttggaaccgcggttgtttaaaagcctgagggaacctggagaggggctcccactccctaccytctttcctccgagtttgtgactccgagatggacaaagtgtgtgctgtttttggaggctcccgaggcattggcagagctgtggcccagttaatggcccgga

SEQ ID NO: 53923 - DNA, 201 bp, Homo sapiens
cgttatttttttttgcggtttgcctttttttttcttttttttttttttggaaccgcggttgtttaaaagcctgagggaacctggagaggggctcccactcyctaccctctttcctccgagtttgtgactccgagatggacaaagtgtgtgctgtttttggaggctcccgaggcattggcagagctgtggcccagttaatgg

SEQ ID NO: 53924 - DNA, 201 bp, Homo sapiens
tgtgtaagcagagatttaattttatattgaaagtcagtgcaaaattatgaataggatatactaataaatacaaagtaataacaaaagtcaaagcagtgttytaaataaaaattctgggttccttaaaaattattttaaatttatctttgaaatagttttcttagattaatctcaggatatgagaaagtcaattaagtgtga

SEQ ID NO: 53925 - DNA, 201 bp, Homo sapiens
ttagaaaactgtacctgggattcagagtgacttgcctaaggttacacagctagtttatggaagaactgttactaaaagctttgtcttttgatttccacctratgggagcttaaaaataatgtcctaccaggtatggtagctcatgtgggaggctgaggcaggagtattgtgaggccaggagttccagatcagcctgagcaa

SEQ ID NO: 53926 - DNA, 191 bp, Homo sapiens; identical to SEQ ID NO: 53917

SEQ ID NO: 53927 - DNA, 201 bp, Homo sapiens; identical to SEQ ID NO: 53919

SEQ ID NO: 53928 - DNA, 201 bp, Homo sapiens; identical to SEQ ID NO: 53921

SEQ ID NO: 53929 - DNA, 201 bp, Homo sapiens; identical to SEQ ID NO: 53922

SEQ ID NO: 53930 - DNA, 201 bp, Homo sapiens; identical to SEQ ID NO: 53923

SEQ ID NO: 53931 - DNA, 201 bp, Homo sapiens
agctattcatgaggaatccgcctccatgacccaaacacctcccgctaggcccacctccaacattgggaatcacatttcaacatgagatttggaggggacaracatccaaaccataagagtctttatttttaaattttgcactagtggaataacttaaggtggagagggtcttagaaataattttttccagtcatttttgta

SEQ ID NO: 53932 - DNA, 201 bp, Homo sapiens
tttgtacctcatattctatataaagtctatgtgttagcctgtttgcattgctctaaaggactgtctgaggtaattcataaaaaaaagaggcttatttggcwctcgggcctgcaggctgtacaagcatgacaccaacatctgctcagcttctggtgaggcccaggaaactttttttcagtcatggcggaaggtaaagaggta

SEQ ID NO: 53933 - DNA, 201 bp, Homo sapiens
gtggaataacttaaggtggagagggtcttagaaataattttttccagtcatttttgtagattagaaaactgtacctgggattcagagtgacttgcctaagrttacacagctagtttatggaagaactgttactaaaagctttgtcttttgatttccacctaatgggagcttaaaaataatgtcctaccaggtatggtagct

SEQ ID NO: 53934 - DNA, 174 bp, Homo sapiens
aggggagaagaagcggggggatgggtggagggtagaggggagaaaaatacgtgacaaagaaaacattctctgcytgggaggagactctctgagggtgtagagctagagggagcattcactggccatgccagtagttaccactgatgctgagtcagaaacaggtatcccaaaatc

SEQ ID NO: 53935 - DNA, 201 bp, Homo sapiens
gtcgctacgtagacgaagttatcagagatgctccctggacactcacgccagagtttctggaaaaacacaagattgactttgtggctcatgatgacattccktattcctctgctggctctgatgatgtttacaagcacataaaggaagcagggatgttcgttccaacgcagagaacagaaggcatctcaacatcggacatca

SEQ ID NO: 53936 - DNA, 201 bp, Homo sapiens
agagaagtcaagggaattcattggcaacttcctagaactgtttggacctgatggagcatggaagcagatgttccaggagaggagcagccggatgctgcagkccttatccccgaagcagagccctgtgagcagcccaacccggagccggtccccttcccgctccccatcgcccaccttctcatggcttccactcaaaacctc

SEQ ID NO: 53937 - DNA, 201 bp, Homo sapiens
agcgtctagagtcactctaaccttgctaaggaaggatgcagagttccctagagagacttgcactgatggggtgacttctgctttggtccttccaccacccycaccaagtaaaccacctgtggcagcggctgttccctcaacctgctacttctgcgtccataagggtcctgcacgttgcctcccaccaccccagctctgcca

SEQ ID NO: 53938 - DNA, 201 bp, Homo sapiens
agtcagaaacaggtatcccaaaatccctttccaatgagcctccctcagaaaccatggaggaaatagagcacacatgcccacagcctcgactgaccctgackgcacctgccccatttgctgatgaaaccaactgccagtgtcaagcaccccatgaaaaactgaccattgctcaggcccgcttaggaacaccagctgacaggc

SEQ ID NO: 53939 - DNA, 201 bp, Homo sapiens
gcgtctagagtcactctaaccttgctaaggaaggatgcagagttccctagagagacttgcactgatggggtgacttctgctttggtccttccaccaccccyaccaagtaaaccacctgtggcagcggctgttccctcaacctgctacttctgcgtccataagggtcctgcacgttgcctcccaccaccccagctctgccag

SEQ ID NO: 53940 - DNA, 174 bp, Homo sapiens; identical to SEQ ID NO: 53934

SEQ ID NO: 53941 - DNA, 201 bp, Homo sapiens; identical to SEQ ID NO: 53935

SEQ ID NO: 53942 - DNA, 201 bp, Homo sapiens; identical to SEQ ID NO: 53938

SEQ ID NO: 53943 - DNA, 174 bp, Homo sapiens; identical to SEQ ID NO: 53934

SEQ ID NO: 53944 - DNA, 201 bp, Homo sapiens; identical to SEQ ID NO: 53935

SEQ ID NO: 53945 - DNA, 201 bp, Homo sapiens
agagaagtcaagggaattcattggcaacttcctagaactgtttggacctgatggagcatggaagcagatgttccaggagaggagcagccggatgctgcagkccttatccccgaagcagagccctctgaagagttgggcgaggtgcagagacttctagctggacaacctacacaaaccttagcgtctagagtcactctaacc

SEQ ID NO: 53946 - DNA, 201 bp, Homo sapiens; identical to SEQ ID NO: 53937

SEQ ID NO: 53947 - DNA, 201 bp, Homo sapiens; identical to SEQ ID NO: 53938

SEQ ID NO: 53948 - DNA, 201 bp, Homo sapiens; identical to SEQ ID NO: 53939

SEQ ID NO: 53949 - DNA, 201 bp, Homo sapiens
ttgtacttgctggggacgctgcagtggggaagtctagtttcctcatgagactttgcaagaatgaatttcgagaaaatataagcgccaccctgggagttgayttccaaatgaaaaccctcattgtggatggagaacgaacagttctgcagctctgggatacagctggtcaggagagattcagaagtattgccaagtcttact

SEQ ID NO: 53950 - DNA, 201 bp, Homo sapiens
gggctacaacaaaagattctaatttaccttgcttcatctaggtccaggccccaagtagcttgctgaaggaacttaaaaagtagctgttatttattgtattrtataagctaaaaacatttatttttgttgaatcgaaacaattccatgtagcaatcttttttctgttcacggtgtttgtgatagaaccttaaattccgcaag

SEQ ID NO: 53951 - DNA, 201 bp, Homo sapiens
tgaggaagccctcagtgacctcagacgtcagtatgaaactgaagtaggagatctgcaggtgaccattaaaaagctaagaaagctcgaagaacaatcaaaaygcgtaagtcaaaaggaagatgtggctgcattgaaaaaacaaatttatgatttatcaatggaaaaccagaaagttaagaaagaccttttagaagcacagac

SEQ ID NO: 53952 - DNA, 201 bp, Homo sapiens
attgttgcaatggctaaatcccaaacatccttggcctgtgaagtcttcatttccagaatactgaatttgtgtgacttatttggctcttaacagagtggcayatcctactgacactgtcctatggagagttacagtgcaggaaacctgaacccagctctcaggtccctctggaactttggctcttctttgttttgtctcagt

SEQ ID NO: 53953 - DNA, 201 bp, Homo sapiens
agcaaaacctcagggttttgagtctcgtattcacatctttttactaagaagggctcctccagactcctggtgtatatttgttggaggccttaagctgttcrtggcagtacattgcggagcatagaacgaaaccgggtgtggaacactgagtcccaaggatagccatcttcagagatacggctcatgacccaggtacatggt

SEQ ID NO: 53954 - DNA, 201 bp, Homo sapiens
ccatcttcagagatacggctcatgacccaggtacatggtaagcagagagcatcacacctgagcagcattcttactcagctcaacagcaatatctgagcctragtttcccattccaatcaccaggatgcgttttccctcaaatccatctggatgcttgtattggcggctatggaaatattggcctttgaacctctccatacc

SEQ ID NO: 53955 - DNA, 201 bp, Homo sapiens
gccatcttcagagatacggctcatgacccaggtacatggtaagcagagagcatcacacctgagcagcattcttactcagctcaacagcaatatctgagccygagtttcccattccaatcaccaggatgcgttttccctcaaatccatctggatgcttgtattggcggctatggaaatattggcctttgaacctctccatac

SEQ ID NO: 53956 - DNA, 201 bp, Homo sapiens
aagcagagagcatcacacctgagcagcattcttactcagctcaacagcaatatctgagcctgagtttcccattccaatcaccaggatgcgttttccctcaratccatctggatgcttgtattggcggctatggaaatattggcctttgaacctctccataccttcagggggaagaagagagaagtctgtgagctccagagc

SEQ ID NO: 53957 - DNA, 201 bp, Homo sapiens
tcctggtgtatatttgttggaggccttaaggtacatggtaagcagagagcatcacacctgagcagcattcttactcagctcaacagcaatatctgagcctragtttcccattccaatcaccaggatgcgttttccctcaaatccatctggatgcttgtattggcggctatggaaatattggcctttgaacctctccatacc

SEQ ID NO: 53958 - DNA, 201 bp, Homo sapiens
ctcctggtgtatatttgttggaggccttaaggtacatggtaagcagagagcatcacacctgagcagcattcttactcagctcaacagcaatatctgagccygagtttcccattccaatcaccaggatgcgttttccctcaaatccatctggatgcttgtattggcggctatggaaatattggcctttgaacctctccatac

SEQ ID NO: 53959 - DNA, 201 bp, Homo sapiens; identical to SEQ ID NO: 53956

SEQ ID NO: 53960 - DNA, 140 bp, Homo sapiens
ggaagcggccatggtttgcaggaaacaagatcacttttgtagattttctcgtctatgatgtccttgacctccaccgtatatttgagcccaagtgcttggaygccttcccaaatctgaaggacttcatctcccgctttgag

SEQ ID NO: 53961 - DNA, 201 bp, Homo sapiens
agaaactgaagccaaagtacttggaggaactccctgaaaagctaaagctctactcagagtttctggggaagcggccatggtttgcaggaaacaagatcacytttgtagattttctcgtctatgatgtccttgacctccaccgtatatttgagcccaagtgcttggacgccttcccaaatctgaaggacttcatctcccgct

SEQ ID NO: 53962 - DNA, 201 bp, Homo sapiens; identical to SEQ ID NO: 37574

SEQ ID NO: 53963 - DNA, 201 bp, Homo sapiens; identical to SEQ ID NO: 37575

SEQ ID NO: 53964 - DNA, 201 bp, Homo sapiens; identical to SEQ ID NO: 37557

SEQ ID NO: 53965 - DNA, 171 bp, Homo sapiens; identical to SEQ ID NO: 37561

SEQ ID NO: 53966 - DNA, 201 bp, Homo sapiens; identical to SEQ ID NO: 37562

SEQ ID NO: 53967 - DNA, 201 bp, Homo sapiens; identical to SEQ ID NO: 37563

SEQ ID NO: 53968 - DNA, 201 bp, Homo sapiens
atctgagggcgctggcttgcgagctgggccagggaggaggagggttggggggctccggtggaaacctgcgaccccttctcctcagccttctccttagccgrtggcctcaggcagactctgcccagaggggcagccaggctgctcagggaaggggctgaaagcggcagaggagtgccctggcttggtcaccactggggccaa

SEQ ID NO: 53969 - DNA, 201 bp, Homo sapiens
cagaaggaggccagggagaacagcagcctttgagtggaagttggaccagccctcagctcccttcgaggacacagtctgttaggtcacccacaccttataaraagcagcttaatgaggaactccagcggcgctcttcagcattaggagacctccgagcttgcacatattgtagaaaaatagccttaagttatgctcattcca

SEQ ID NO: 53970 - DNA, 201 bp, Homo sapiens
tgcaggatcccaaaagccagataagagcctttagagaccctctacaggatgacactggattatatgttactgaggaagtcacctcctctgaagataaacgraagacttattctttggcctttaagcaggaattaaaagatgtgatcctctgtatctccccagtaatcacattccgagaaccctttcttttaactgaaaagg

SEQ ID NO: 53971 - DNA, 201 bp, Homo sapiens
gcagcaaacagttgtgctgcaggatcccaaaagccagataagagcctttagagaccctctacaggatgacactggattatatgttactgaggaagtcacckcctctgaagataaacgaaagacttattctttggcctttaagcaggaattaaaagatgtgatcctctgtatctccccagtaatcacattccgagaaccctt

SEQ ID NO: 53972 - DNA, 201 bp, Homo sapiens
tcataaatcctcatgtggaacttcaattttcagatgctaatgccaagttttactgtcggctctactatgcgggagagtttcataagatgcgtgaagtgatyctggacagcagtgaggaagatttcattcgttccctctcccactcatcaccctggcaggcccggggaggcaaatcaggagctgccttctatgcaactgagg

SEQ ID NO: 53973 - DNA, 201 bp, Homo sapiens
tttttgagtatgtttgatgtttttaaaattttgtcttctctgtggatgacaggaggctacagcaattaactttaagcctccttttagagatatttttaaarcttgtttaaaatttttgtgcaattcatatattaaattgcacttacttgcatacgctcatattctagggttttttctctatttttagggtatcatagtaaa

SEQ ID NO: 53974 - DNA, 201 bp, Homo sapiens
acctttgggctggcatcataacaacctggagctcctgagggaggagaatggggagaaacaagccatggagaggttgctttcagctaatcataaccacatgrtggcactactccagcagttgctccatagtgactcactgtcatcatcttggagggacatcatcgtgtcattggtctgccaggttgttcagacagtccgacc

SEQ ID NO: 53975 - DNA, 201 bp, Homo sapiens
aatttgacttaaactgggaatcctgtcatgttgtttatctttccagcttgcctgtttttgagtatgtttgatgtttttaaaattttgtcttctctgtggawgacaggaggctacagcaattaactttaagcctccttttagagatatttttaaagcttgtttaaaatttttgtgcaattcatatattaaattgcacttact

SEQ ID NO: 53976 - DNA, 201 bp, Homo sapiens
ccttcttcagagggacagcagggaaaagccccgatctctcttcccagaagagagagaccttacgtggagcagatagtgcttactaccaggttgggcagacrggcaaggaggggaccgagaatcaaggcgttgagcctcaagatgaagtagatggaggagatacgcaaaagaagcaactcataaatcctcatgtggaacttc

SEQ ID NO: 53977 - DNA, 201 bp, Homo sapiens
aaacggaccaggccattcattattcctcaagtgttaatatactgacttatgcagtattcaaaccatctagtgcaatgtttttgtttttgttttttttttttggtaacacaggtgcagtgtattatagaaaaaataaaaactacaatcattagcagttttaatactgctgtgtcagttttgtaaaaaatgtacattatgtct

SEQ ID NO: 53978 - DNA, 201 bp, Homo sapiens
tggaacttcaattttcagatgctaatgccaagttttactgtcggctctactatgcgggagagtttcataagatgcgtgaagtgattctggacagcagtgargaagatttcattcgttccctctcccactcatcaccctggcaggcccggggaggcaaatcaggagctgccttctatgcaactgaggatgatagatttattt

SEQ ID NO: 53979 - DNA, 201 bp, Homo sapiens
atcgagccagaggaggaagaattcagcccaaaaattcagacccttttgctcattcaaaggatgcatcaagtacttcaagtggcaaatcaggaagcaaaaaygagggtgatgaagagagagggcttattctgagtgatgctgtgtggtcaacaaaggtggactgtctgaatcccattaatcaccagagactttgtgtgctct

SEQ ID NO: 53980 - DNA, 201 bp, Homo sapiens
atttgcttccaggaaatagctataatcctattccatttccttttgatccagataaacactacttaatgtatgaacatgaacgagtgcccattgcagtctgygagaaggaacccagctccatcattgcttttgctctcagttgtaaagaataccgaaatgccttagaggaattgtctaaagcgactcagtggaacagtgccg

SEQ ID NO: 53981 - DNA, 201 bp, Homo sapiens
tagaatgctggccgattatcgagccagaggaggaagaattcagcccaaaaattcagacccttttgctcattcaaaggatgcatcaagtacttcaagtggcmaatcaggaagcaaaaacgagggtgatgaagagagagggcttattctgagtgatgctgtgtggtcaacaaaggtggactgtctgaatcccattaatcacca

SEQ ID NO: 53982 - DNA, 201 bp, Homo sapiens
gcttgcccggcgggtctcccttgtgctttctttgcacctgtaccggaatcattgttgccactccctgtggatgaccaacaagatgctttaggcagcgagcwgccagagagtttgcagcaaacagttgtgctgcaggatcccaaaagccagataagagcctttagagaccctctacaggatgacactggattatatgttact

SEQ ID NO: 53983 - DNA, 105 bp, Homo sapiens
ccgcrtcaaccatgtaagcagcttcgcttcctgccgcaaccgtccgcggcctgaggagcccaccgccgctctcgggggccgacttccgggggctgagccgttgaa

SEQ ID NO: 53984 - DNA, 201 bp, Homo sapiens
gcgggtctcccttgtgctttctttgcacctgtaccggaatcattgttgccactccctgtggatgaccaacaagatgctttaggcagcgagctgccagagastttgcagcaaacagttgtgctgcaggatcccaaaagccagataagagcctttagagaccctctacaggatgacactggattatatgttactgaggaagtc

SEQ ID NO: 53985 - DNA, 201 bp, Homo sapiens
aaatcccaggtggaaagaagtttgattctgtggttgtcaatggctttgtttgtaccaagaacattgcacataaaaagatgaattcttgtattaaaaacccyaaaattcttctgttgaagtgttccattgagtatctctacagagaagaaactaagtttacttgcattgatcctattgtgcttcaggaaagggaattcttga

SEQ ID NO: 53986 - DNA, 201 bp, Homo sapiens
tactatgcgggagagtttcataagatgcgtgaagtgattctggacagcagtgaggaagatttcattcgttccctctcccactcatcaccctggcaggcccrgggaggcaaatcaggagctgccttctatgcaactgaggatgatagatttattttgaagcaaatgcctcgtctggaagtccagtccttcctcgactttgca

SEQ ID NO: 53987 - DNA, 201 bp, Homo sapiens
gagggggctgtccaagagcagtacggtggaggttccatcccctgggatcctgacatccctcctgagtctctgccctgtgatgatagcagtttgctggaatygaggattgtgtttgagaagggtgagcaggaaaataaaaatcttccgcaggctgttgcctctgtgaagcatcaagaacatagcacaacagcttgcccggcg

SEQ ID NO: 53988 - DNA, 201 bp, Homo sapiens
cctataaccagatggtggcgtctttcagttattctcccattcggcttcttgaagtatgtgttccactccccaaaatattcattaagcgtcaggccccattraaagtgtcccttcttcaggatctgaaggacttctttcaaaaagtttcacaggtatatgttgccattgatgaaagacttgcatctttgaaaactgatacat

SEQ ID NO: 53989 - DNA, 201 bp, Homo sapiens; identical to SEQ ID NO: 53969

SEQ ID NO: 53990 - DNA, 201 bp, Homo sapiens
ctccacggaatatttctccaggacttcagaatggagaaaaagaggatcgcttcttaacaactttgtccagccagagctccaccagttctactcatctccarttgcctacgccacctgaagtcatgtctgaacagtcagtgggagggccccctgagctagatacagccagcagttccgaagatgtgtttgatgggcatttgc

SEQ ID NO: 53991 - DNA, 201 bp, Homo sapiens
gtggagcagatagtgcttactaccaggttgggcagacaggcaaggaggggaccgagaatcaaggcgttgagcctcaagatgaagtagatggaggagatacrcaaaagaagcaactcataaatcctcatgtggaacttcaattttcagatgctaatgccaagttttactgtcggctctactatgcgggagagtttcataaga

SEQ ID NO: 53992 - DNA, 201 bp, Homo sapiens
gtgaaggaaaaggggacaggaacaaaggaccaaaaataagctacatgttttatttcttcatcgtgttcaccactgtatgccaaggcttttcagttctgtgkctgtttagactgtccgtaatggaatggtaaaactccatgaatttgcactttggtttttgatacctgtggagctgtctgtacgttgggaagtggcatgaaa

SEQ ID NO: 53993 - DNA, 201 bp, Homo sapiens; identical to SEQ ID NO: 53970

SEQ ID NO: 53994 - DNA, 201 bp, Homo sapiens; identical to SEQ ID NO: 53971

SEQ ID NO: 53995 - DNA, 201 bp, Homo sapiens; identical to SEQ ID NO: 53972

SEQ ID NO: 53996 - DNA, 201 bp, Homo sapiens; identical to SEQ ID NO: 53973

SEQ ID NO: 53997 - DNA, 201 bp, Homo sapiens; identical to SEQ ID NO: 53974

SEQ ID NO: 53998 - DNA, 201 bp, Homo sapiens; identical to SEQ ID NO: 53975

SEQ ID NO: 53999 - DNA, 201 bp, Homo sapiens; identical to SEQ ID NO: 53976

SEQ ID NO: 54000 - DNA, 201 bp, Homo sapiens; identical to SEQ ID NO: 53977

SEQ ID NO: 54001 - DNA, 201 bp, Homo sapiens; identical to SEQ ID NO: 53978

SEQ ID NO: 54002 - DNA, 201 bp, Homo sapiens; identical to SEQ ID NO: 53979

SEQ ID NO: 54003 - DNA, 201 bp, Homo sapiens; identical to SEQ ID NO: 53980

SEQ ID NO: 54004 - DNA, 201 bp, Homo sapiens; identical to SEQ ID NO: 53981

SEQ ID NO: 54005 - DNA, 201 bp, Homo sapiens; identical to SEQ ID NO: 53982

SEQ ID NO: 54006 - DNA, 104 bp, Homo sapiens
cgcrtcaaccatgtaagcagcttcgcttcctgccgcaaccgtccgcggcctgaggagcccaccgccgctctcgggggccgacttccgggggctgagccgttgaa

SEQ ID NO: 54007 - DNA, 201 bp, Homo sapiens; identical to SEQ ID NO: 53984

SEQ ID NO: 54008 - DNA, 201 bp, Homo sapiens; identical to SEQ ID NO: 53985

SEQ ID NO: 54009 - DNA, 201 bp, Homo sapiens; identical to SEQ ID NO: 53986

SEQ ID NO: 54010 - DNA, 201 bp, Homo sapiens; identical to SEQ ID NO: 53987

SEQ ID NO: 54011 - DNA, 201 bp, Homo sapiens; identical to SEQ ID NO: 53988

SEQ ID NO: 54012 - DNA, 201 bp, Homo sapiens
cagaaggaggccagggagaacagcagcctttgagtggaagttggaccagccctcagctcccttcgaggacacagtctgttaggtcacccacaccttataaraagcagcttaatgaggaactccagcggcgctcttcagcattagacacaagaaggaaagcagaacctacctttggaggtcatgaccctcgtacagctgttc

SEQ ID NO: 54013 - DNA, 201 bp, Homo sapiens; identical to SEQ ID NO: 53990

SEQ ID NO: 54014 - DNA, 201 bp, Homo sapiens; identical to SEQ ID NO: 53991

SEQ ID NO: 54015 - DNA, 201 bp, Homo sapiens; identical to SEQ ID NO: 53992

SEQ ID NO: 54016 - DNA, 201 bp, Homo sapiens; identical to SEQ ID NO: 54012

SEQ ID NO: 54017 - DNA, 104 bp, Homo sapiens; identical to SEQ ID NO: 54006

SEQ ID NO: 54018 - DNA, 201 bp, Homo sapiens
ggacagctgggccataggatctcatgccagcctgtccttctggcttcctctgtcccacgtggctgagggtatttggtgtgggttttgttctaccctttctyatttctcccacacctcctccccataccttttttggttgattccttttatttcttgttttctccctcagcaccaccatgcccagtgtaaagcttgtagtct

SEQ ID NO: 54019 - DNA, 201 bp, Homo sapiens; identical to SEQ ID NO: 53969

SEQ ID NO: 54020 - DNA, 201 bp, Homo sapiens
atcaagttttgaaccacagtctttgatcgcctctgatgaccatgactctggaaagcctagaggaaatacaggatgtcacctgtgcctggaaagaacttaayagaaagctaagtagtaatacagcgtctcagattaccagtgtgtgcctcctgaaaggaaatatgggtgtttgctttgatgttcctacaactgaatcagaaa

SEQ ID NO: 54021 - DNA, 201 bp, Homo sapiens
gtgcccctgaggcccttgaccattgggaaggaggtgactatggatgttcctgctccaaatgccccaggagtgaggctgcagctcaaggcagagggctgccstgaggagctggccgtgcacctgggcttcaatctctgtgcagaggagcaggccttcctgagcaggaggaagcaggtggtggccaaggccctgaagcaggcc

SEQ ID NO: 54022 - DNA, 139 bp, Homo sapiens
agtgaggccgacccttacgtgatcctacagctgtcgacygcacctggaatgaagtttaagaccaagacgctcaccgacaccagtcatcctgtgtggaatgaggccttccgtttccttatccaaagtcaggtcaagaatg

SEQ ID NO: 54023 - DNA, 138 bp, Homo sapiens
aaggaggaagacttcgagcgcctgctgcggctcagtgactacaacgtgcagaccagccagggtgccatcctgcaggccctgaggaccgcgctgaagcaccrgactctagaggcgaggcctccaagggcacagacctga

SEQ ID NO: 54024 - DNA, 201 bp, Homo sapiens
ttccccagagcgcctggcgagctaccgccgggagctggagctgcgggctgagcagggccaccccacgacctttgtggacctgtgggcgctagtgctggagwccatgctgcacggccaggtgatggatcagaagctgtcaggacagagagccgccctggaacggggtcagaaccctctgcccctctacttgagcctcaatgt

SEQ ID NO: 54025 - DNA, 201 bp, Homo sapiens
gcagagctccagggtggccaagtggatctcaccggggccacctgcccctacaccctgtccaacatgacctacaaggaggaagacttcgagcgcctgctgcrgctcagtgactacaacgtgcagaccagccagggtgccatcctgcaggccctgaggaccgcgctgaagcaccggactctagaggcgaggcctccaagggca

SEQ ID NO: 54026 - DNA, 201 bp, Homo sapiens
ctcccagagtccccagggagaggaggagctggatgtggagttcctgatggaagaaacgtcagatcgcccagaaaacctcatcaccaacaaagtcattgtgrcccgagagctgtcatgcctggatgtgcatctggacagcacagggagcaccgctgtggttgcagatcaggacaagctggagctggagctggtgctgaaggg

SEQ ID NO: 54027 - DNA, 201 bp, Homo sapiens
gtgatatccaggactatgatgcgatggtgaagctggtggaaacactggagatgctgcctacgtgtgatttggccgatcagcataacattaaattccactaygcgtttgcactgaataggagaaacagcacaggtgaccgtgagaaggctctgcagatcatgctccaggttctgcagagctgtgatcacccgggccccgaca

SEQ ID NO: 54028 - DNA, 201 bp, Homo sapiens
agggcaagaagaaccgaattgccttcaagccctcagaaggtccccgcggtgtcgtcctggccctgcccacacagggagagcccatggccaccagcagcagygagcacggctctgtctccccagactccgacgcccagcctgacgcactctttgagaggacccgggcgcccaggcaccaccttggccacctcctcagtgttc

SEQ ID NO: 54029 - DNA, 201 bp, Homo sapiens
actaaggaaaataggtgtccggctgaacagtttgttgggaagaaaagggagcttggagaaaatgaacaattactgggatgtgggtcagttcttcagcgtcrgcatgctggcccatgatgtcgggaaagccgtccaggcagcagagaggttgttcaaactgaaacctccagtctggtacctgcgatcattagttcagaactt

SEQ ID NO: 54030 - DNA, 201 bp, Homo sapiens
gacgcactctttgagaggacccgggcgcccaggcaccaccttggccacctcctcagtgttccagacgagagctcagccttggaagaccggggcttggcctygtccccggaggacagggaccagggcctcttcctgctacgcaaggacagtgagcgccgtgccatcctgtacaaaatcctctgggaggagcagaaccaggtg

SEQ ID NO: 54031 - DNA, 141 bp, Homo sapiens
tcggatattcttaatgagatcactaaggaagatctaagataccttcgactacggggtggtctcctctgcagactctggagtgcggtctcccagtacagaarggctcaggaggcctcagaaaccaaagacaaggcttgatac

SEQ ID NO: 54032 - DNA, 201 bp, Homo sapiens
ctgttcggatttcaggatgccgtaaataaaattttgaggaaccacttaattaggccccactggatgttcgcgatggacaacatcatccgccgagcggtgcwggccgcggtcaccattctcatcccagagctccgagcccactttgagcctacctgtgagactgaaggggtagataaggacatggatgaagcggaagagggc

SEQ ID NO: 54033 - DNA, 201 bp, Homo sapiens
agaggttgttcaaactgaaacctccagtctggtacctgcgatcattagttcagaacttgttactaattcggcgcttcaagaaaaccattattgaacactcrcccaggcaagagcggctgaacttctggttagatataatttttgaggcaacaaatgaagtcactaatggactcagatttccagttctggtcatagagccaa

SEQ ID NO: 54034 - DNA, 201 bp, Homo sapiens
tcaccttcagttaaaattaaaatcgaattgtattacagagaacccagcaggcccctacgggcagagaacagataaagagcttatagactggttgcggctgsaaggagctgatgcaaagacaattgaaaagattgttgaagagggttatacactttcggatattcttaatgagatcactaaggaagatctaagataccttcg

SEQ ID NO: 54035 - DNA, 201 bp, Homo sapiens
gacgagcctccgagtacatgcagcccaactgggacaacatcctgggcccgctgtgcatgcctttggtggacaggttcattagcctccttaaggacatccaygtgacctcatgtgtttattacaaagaaaccttgttaaatgacatccggaaagccagagagaaataccaaggtgaggaactggcgaaggagctagctcgga

SEQ ID NO: 54036 - DNA, 201 bp, Homo sapiens
ctgcacagagacttttactggcaccctgcagtacatggcacctgagataattgaccaagggcctcgcggatatggtgccccagccgatatctggtccctgrgctgcaccatcattgagatggccaccagcaagcctccgttccatgagcttggtgagccgcaggcagccatgttcaaagtgggcatgtttaagatccaccc

SEQ ID NO: 54037 - DNA, 201 bp, Homo sapiens
taatgtgatcttgtaccatgacaccgatgccgacactgctctctctttgaaggcatccagtggaaattattatttcatcccatacatcgtgacaccgtgcrctgattatttttgctgcgagagtgatgcccagagacgagcctccgagtacatgcagcccaactgggacaacatcctgggcccgctgtgcatgcctttggt

SEQ ID NO: 54038 - DNA, 201 bp, Homo sapiens
ggccgatgaaggaaccgacaatcaagttttacaccaaacagatcctggagggccttaagtatcttcatgaaaaccagatcgtgcacagagacataaagggygataatgttctggtgaacacctacagcggagtggtgaaaatctccgattttggaacctcgaaacgtcttgcgggtgtgaacccctgcacagagactttta

SEQ ID NO: 54039 - DNA, 201 bp, Homo sapiens
tttttttttttttttttttggtgtgaaacttcctgttcccagctgcatcagagagcctgtctggggccaaggttgccagagatttctgaagacacagcttkttccttgttcttggctggtgggtgcacaaggacttctggaagggatttagacggggctgagtgctaggattaaagtggggatgggagtacggcaacagaa

SEQ ID NO: 54040 - DNA, 201 bp, Homo sapiens
gaagtaagataaatagctagacgaccttggcgccaccacctggccctggtggttaaaatgataataatattaacccctgaccaaaacgactggtgttatcygtaaatcccagacattgtgtgagaaagcaccgtaaaactttttgtcctattagctgatgtgtgtagcccccagtcacgttcctcacgcttacttgatcta

SEQ ID NO: 54041 - DNA, 201 bp, Homo sapiens
gctcaggggaatcccagggggttcagatgcccaggaaggaaaaggggacagcgctactgctatggaatgagaccaccacttctcctgttgtccttcccagyttctccccaacctccccttttccctagtttataagacaggagaaaagggagaaagcaaaaagctggaaagaaacagaagtaagataaatagctagacgac

SEQ ID NO: 54042 - DNA, 201 bp, Homo sapiens
ctacggcgacatcctgcagtggggctttctcgacaccttcttcaacctgaccctcaaggagatccacttcctcaagtggctggacatctactgcccccacrtccccttcattttcaaaggcgacgatgacgtcttcgtcaaccccaccaacctgctagaatttctggctgaccggcagccacaggaaaacctgttcgtggg

SEQ ID NO: 54043 - DNA, 201 bp, Homo sapiens
gataaatagctagacgaccttggcgccaccacctggccctggtggttaaaatgataataatattaacccctgaccaaaacgactggtgttatctgtaaatyccagacattgtgtgagaaagcaccgtaaaactttttgtcctattagctgatgtgtgtagcccccagtcacgttcctcacgcttacttgatctattatgac

SEQ ID NO: 54044 - DNA, 179 bp, Homo sapiens
gatgtgtgtagcccccagtcacgttcctcacgcttacttgatctattatgacccttttacgtggaccccttagagttgtaagctcttaaaagggctaggartttctttttcggggagctcggctcttaagacgcgagtctgccgacgctcccggccgaataaaaacctcttccttcttt

SEQ ID NO: 54045 - DNA, 201 bp, Homo sapiens
gagcaagccagccagcagctccgtgcctgcacccagctcaggggaatcccagggggttcagatgcccaggaaggaaaaggggacagcgctactgctatggwatgagaccaccacttctcctgttgtccttcccagcttctccccaacctccccttttccctagtttataagacaggagaaaagggagaaagcaaaaagctg

SEQ ID NO: 54046 - DNA, 201 bp, Homo sapiens
cattgtgtgagaaagcaccgtaaaactttttgtcctattagctgatgtgtgtagcccccagtcacgttcctcacgcttacttgatctattatgaccctttyacgtggaccccttagagttgtaagctcttaaaagggctaggaatttctttttcggggagctcggctcttaagacgcgagtctgccgacgctcccggccga

SEQ ID NO: 54047 - DNA, 201 bp, Homo sapiens; identical to SEQ ID NO: 54042

SEQ ID NO: 54048 - DNA, 201 bp, Homo sapiens
gagaaagaggagagagctctcaggactatctaaacaggcacaggattatgcaggtgcaaaggtacagaatcctgccatatggactgaggagtgggtgaggrggccttcatgaagcatcatggctttaatgctgaaccttaaaggactagatttatatcagcaaagatgagagaggcgcattgttggcagagagaagagcag

SEQ ID NO: 54049 - DNA, 201 bp, Homo sapiens
aacacctgagccagatgccttacgccacaatgtgcatcaaggaatgcctccgcctctacgcaccggtagtaaacatatcccggttactcgacaaacccatyacctttccagatggacgctccttacctgcaggtcttaaaacaactttttttttttttaacaatgcagctatgtttggattgaaatgtcttaacacactca

SEQ ID NO: 54050 - DNA, 198 bp, Homo sapiens
agttctctcaggctttccagagctcaggacctctgagaagaatggagccctcctggcttcaggaactcatggctcaccccttcttgctgctgatcctmctctgcatgtctctgctgctgtttcaggtaatcaggttgtaccagaggaggagatggacgatcagagccatgcacctgtttcctgcaccccctgcgcact

SEQ ID NO: 54051 - DNA, 201 bp, Homo sapiens
gggaactcctaggggatgggtcttctattacctgggaacacctgagccagatgccttacgccacaatgtgcatcaaggaatgcctccgcctctacgcaccrgtagtaaacatatcccggttactcgacaaacccattacctttccagatggacgctccttacctgcaggtcttaaaacaactttttttttttttaacaatg

SEQ ID NO: 54052 - DNA, 201 bp, Homo sapiens
ggatctctccagagaaagatctttgctatcatggggatctttgcaatcatctagtatctaaagaagtttcctctttttaattcagtgttatttttcacatrgtatttattgtaatatttattacctacataatattgcatctatgcacataatgttccacgcacctagttgttcaaacaagacagctcagagtcaactttt

SEQ ID NO: 54053 - DNA, 201 bp, Homo sapiens
cactgactcagactgaggagcagctccactgcactgtgtaccgaggagacaagagccaggctagcaggcccacaccagacgagctggaggccgtgcgcaartacttccagctagatgttaccctggctcaactgtatcaccactggggttccgtggactcccacttccaagaggtggctcagaaattccaaggtgtgcgac

SEQ ID NO: 54054 - DNA, 201 bp, Homo sapiens
taaacagcaccgtgtgggcgaggccttaagggtcgtggtccttgtctgggcggggtctttgggcgtcgacgaggcctggttctgggtaggcggggctactrcggggcggtgcctgctgtggaaatgcctgcccgcgcgcttctgcccaggcgcatggggcatcgtactctagcctccactcctgccctgtgggcctccatc

SEQ ID NO: 54055 - DNA, 201 bp, Homo sapiens
agcaccgtgtgggcgaggccttaagggtcgtggtccttgtctgggcggggtctttgggcgtcgacgaggcctggttctgggtaggcggggctactacgggkcggtgcctgctgtggaaatgcctgcccgcgcgcttctgcccaggcgcatggggcatcgtactctagcctccactcctgccctgtgggcctccatcccgtg

SEQ ID NO: 54056 - DNA, 201 bp, Homo sapiens
ctcaggaagctgggcctgggctatcgtgcccgttacgtgagtgccagtgcccgagccatcctggaagaacagggcgggctagcctggctgcagcagctacragagtcctcatatgaggaggcccacaaggccctctgcatcctgcctggagtgggcaccaaggtggctgactgcatctgcctgatggccctagacaagccc

SEQ ID NO: 54057 - DNA, 201 bp, Homo sapiens
gacacttcccgagggctctggggccggagctgtgttcgctccggttcttggtgaagacagggttcgtgggaggcggcccaaggagggcgaacgcctaagaytgcaaaggctcgggggagaacggctctcggagaacgggctggggaaggacgtggctctgaagacggacagccctgaggaaccgcggggcgcccagatgga

SEQ ID NO: 54058 - DNA, 201 bp, Homo sapiens
agtcgcaaggagggggcgggacctacacctcaggaaagccggagaattggggcacgaagcggggctttgatgacccgcaaagggcgaggcatgcaggaggyggaggaattaagtgaaacagggaaggttgttaaacagcaccgtgtgggcgaggccttaagggtcgtggtccttgtctgggcggggtctttgggcgtcgac

SEQ ID NO: 54059 - DNA, 201 bp, Homo sapiens; identical to SEQ ID NO: 54054

SEQ ID NO: 54060 - DNA, 201 bp, Homo sapiens
ctgcgccaatcccgccatgctcaggagccaccagcaaagcgcagaaagggttccaaagggccggaaggctagatggggcaccctggacaaagaaattcccyaagcaccttcccctccattccccacttctctctccccatccccacccagtctcatgttggggaggggcctccctgtgactacctcaaaggccaggcaccc

SEQ ID NO: 54061 - DNA, 201 bp, Homo sapiens
tgctgttcagtgccgacctgcgccaatcccgccatgctcaggagccaccagcaaagcgcagaaagggttccaaagggccggaaggctagatggggcacccwggacaaagaaattccccaagcaccttcccctccattccccacttctctctccccatccccacccagtctcatgttggggaggggcctccctgtgactacc

SEQ ID NO: 54062 - DNA, 201 bp, Homo sapiens; identical to SEQ ID NO: 54053

SEQ ID NO: 54063 - DNA, 201 bp, Homo sapiens; identical to SEQ ID NO: 54055

SEQ ID NO: 54064 - DNA, 201 bp, Homo sapiens
ctcaggaagctgggcctgggctatcgtgcccgttacgtgagtgccagtgcccgagccatcctggaagaacagggcgggctagcctggctgcagcagctacragagtcctcatatgaggaggcccacaaggccctctgcatcctgcctggagtgggcaccaaggaaactttttccggagcctgtggggaccttatgctggct

SEQ ID NO: 54065 - DNA, 201 bp, Homo sapiens; identical to SEQ ID NO: 54058

SEQ ID NO: 54066 - DNA, 201 bp, Homo sapiens; identical to SEQ ID NO: 54057

SEQ ID NO: 54067 - DNA, 201 bp, Homo sapiens
ccacaaggccctctgcatcctgcctggagtgggcaccaaggaaactttttccggagcctgtggggaccttatgctggctgggcccaagcggtgctgttcastgccgacctgcgccaatcccgccatgctcaggagccaccagcaaagcgcagaaagggttccaaagggccggaaggctagatggggcaccctggacaaaga

SEQ ID NO: 54068 - DNA, 201 bp, Homo sapiens
cctgcctggagtgggcaccaaggaaactttttccggagcctgtggggaccttatgctggctgggcccaagcggtgctgttcagtgccgacctgcgccaatsccgccatgctcaggagccaccagcaaagcgcagaaagggttccaaagggccggaaggctagatggggcaccctggacaaagaaattccccaagcaccttc

SEQ ID NO: 54069 - DNA, 201 bp, Homo sapiens; identical to SEQ ID NO: 54054

SEQ ID NO: 54070 - DNA, 201 bp, Homo sapiens; identical to SEQ ID NO: 54060

SEQ ID NO: 54071 - DNA, 201 bp, Homo sapiens; identical to SEQ ID NO: 54061

SEQ ID NO: 54072 - DNA, 201 bp, Homo sapiens; identical to SEQ ID NO: 54053

SEQ ID NO: 54073 - DNA, 201 bp, Homo sapiens; identical to SEQ ID NO: 54055

SEQ ID NO: 54074 - DNA, 201 bp, Homo sapiens; identical to SEQ ID NO: 54056

SEQ ID NO: 54075 - DNA, 201 bp, Homo sapiens; identical to SEQ ID NO: 54058

SEQ ID NO: 54076 - DNA, 201 bp, Homo sapiens; identical to SEQ ID NO: 54057

SEQ ID NO: 54077 - DNA, 201 bp, Homo sapiens
cccccagaccaacaaggaactgggaaactttttccggagcctgtggggaccttatgctggctgggcccaagcgactccaccctcctacaggtgctgttcastgccgacctgcgccaatcccgccatgctcaggagccaccagcaaagcgcagaaagggttccaaagggccggaaggctagatggggcaccctggacaaaga

SEQ ID NO: 54078 - DNA, 201 bp, Homo sapiens
actgggaaactttttccggagcctgtggggaccttatgctggctgggcccaagcgactccaccctcctacaggtgctgttcagtgccgacctgcgccaatsccgccatgctcaggagccaccagcaaagcgcagaaagggttccaaagggccggaaggctagatggggcaccctggacaaagaaattccccaagcaccttc

SEQ ID NO: 54079 - DNA, 201 bp, Homo sapiens; identical to SEQ ID NO: 54053

SEQ ID NO: 54080 - DNA, 201 bp, Homo sapiens; identical to SEQ ID NO: 54054

SEQ ID NO: 54081 - DNA, 201 bp, Homo sapiens; identical to SEQ ID NO: 54055

SEQ ID NO: 54082 - DNA, 201 bp, Homo sapiens; identical to SEQ ID NO: 54057

SEQ ID NO: 54083 - DNA, 201 bp, Homo sapiens; identical to SEQ ID NO: 54058

SEQ ID NO: 54084 - DNA, 201 bp, Homo sapiens; identical to SEQ ID NO: 54053

SEQ ID NO: 54085 - DNA, 201 bp, Homo sapiens; identical to SEQ ID NO: 54054

SEQ ID NO: 54086 - DNA, 201 bp, Homo sapiens; identical to SEQ ID NO: 54055

SEQ ID NO: 54087 - DNA, 201 bp, Homo sapiens
ctcaggaagctgggcctgggctatcgtgcccgttacgtgagtgccagtgcccgagccatcctggaagaacagggcgggctagcctggctgcagcagctacragagtcctcatatgaggaggcccacaaggccctctgcatcctgcctggagtgggcaccaagggcctccttggcaatgcatttgatggccaccagcttctg

SEQ ID NO: 54088 - DNA, 201 bp, Homo sapiens; identical to SEQ ID NO: 54057

SEQ ID NO: 54089 - DNA, 201 bp, Homo sapiens; identical to SEQ ID NO: 54058

SEQ ID NO: 54090 - DNA, 201 bp, Homo sapiens; identical to SEQ ID NO: 54053

SEQ ID NO: 54091 - DNA, 201 bp, Homo sapiens; identical to SEQ ID NO: 54054

SEQ ID NO: 54092 - DNA, 201 bp, Homo sapiens; identical to SEQ ID NO: 54055

SEQ ID NO: 54093 - DNA, 201 bp, Homo sapiens; identical to SEQ ID NO: 54056

SEQ ID NO: 54094 - DNA, 201 bp, Homo sapiens; identical to SEQ ID NO: 54057

SEQ ID NO: 54095 - DNA, 201 bp, Homo sapiens; identical to SEQ ID NO: 54058

SEQ ID NO: 54096 - DNA, 177 bp, Homo sapiens
gtcacctaccatggcttccccagcctgcaggccctggctggaaactttttccggagcctgtggggaccttatgctggctgggcccaagcggtgctgttcastgccgacctgcgccaatcccgccatgctcaggagccaccagcaaagcgcagaaagggttccaaagggccggaaggc

SEQ ID NO: 54097 - DNA, 159 bp, Homo sapiens
cccagcctgcaggccctggctggaaactttttccggagcctgtggggaccttatgctggctgggcccaagcggtgctgttcagtgccgacctgcgccaatsccgccatgctcaggagccaccagcaaagcgcagaaagggttccaaagggccggaaggc

SEQ ID NO: 54098 - DNA, 201 bp, Homo sapiens; identical to SEQ ID NO: 54054

SEQ ID NO: 54099 - DNA, 201 bp, Homo sapiens; identical to SEQ ID NO: 54060

SEQ ID NO: 54100 - DNA, 201 bp, Homo sapiens; identical to SEQ ID NO: 54061

SEQ ID NO: 54101 - DNA, 201 bp, Homo sapiens; identical to SEQ ID NO: 54053

SEQ ID NO: 54102 - DNA, 201 bp, Homo sapiens; identical to SEQ ID NO: 54055

SEQ ID NO: 54103 - DNA, 201 bp, Homo sapiens; identical to SEQ ID NO: 54056

SEQ ID NO: 54104 - DNA, 201 bp, Homo sapiens; identical to SEQ ID NO: 54058

SEQ ID NO: 54105 - DNA, 201 bp, Homo sapiens; identical to SEQ ID NO: 54057

SEQ ID NO: 54106 - DNA, 201 bp, Homo sapiens
caggcgaagggaccgagcccccagaccaacaaggaactgggaaactttttccggagcctgtggggaccttatgctggctgggcccaagcggtgctgttcastgccgacctgcgccaatcccgccatgctcaggagccaccagcaaagcgcagaaagggttccaaagggccggaaggctagatggggcaccctggacaaaga

SEQ ID NO: 54107 - DNA, 201 bp, Homo sapiens
ccccagaccaacaaggaactgggaaactttttccggagcctgtggggaccttatgctggctgggcccaagcggtgctgttcagtgccgacctgcgccaatsccgccatgctcaggagccaccagcaaagcgcagaaagggttccaaagggccggaaggctagatggggcaccctggacaaagaaattccccaagcaccttc

SEQ ID NO: 54108 - DNA, 201 bp, Homo sapiens; identical to SEQ ID NO: 54054

SEQ ID NO: 54109 - DNA, 201 bp, Homo sapiens; identical to SEQ ID NO: 54060

SEQ ID NO: 54110 - DNA, 201 bp, Homo sapiens; identical to SEQ ID NO: 54061

SEQ ID NO: 54111 - DNA, 201 bp, Homo sapiens; identical to SEQ ID NO: 54053

SEQ ID NO: 54112 - DNA, 201 bp, Homo sapiens
actcttccaccaccgccccaggtggccctaaaggactctccagccacccctgtcccaaccccagtggattctcattgccttcggccctgttccccaaggaytcttccacctcccaacactgtcactagtctcaccagccctgaccccagtgtaccctcctccccacacagactccaccctcctacaggtgctgttcagtgc

SEQ ID NO: 54113 - DNA, 201 bp, Homo sapiens; identical to SEQ ID NO: 54055

SEQ ID NO: 54114 - DNA, 201 bp, Homo sapiens; identical to SEQ ID NO: 54056

SEQ ID NO: 54115 - DNA, 201 bp, Homo sapiens; identical to SEQ ID NO: 54057

SEQ ID NO: 54116 - DNA, 201 bp, Homo sapiens; identical to SEQ ID NO: 54058

SEQ ID NO: 54117 - DNA, 201 bp, Homo sapiens
ggactcttccacctcccaacactgtcactagtctcaccagccctgaccccagtgtaccctcctccccacacagactccaccctcctacaggtgctgttcastgccgacctgcgccaatcccgccatgctcaggagccaccagcaaagcgcagaaagggttccaaagggccggaaggctagatggggcaccctggacaaaga

SEQ ID NO: 54118 - DNA, 201 bp, Homo sapiens
ccagccacccctgtcccaaccccagtggattctcattgccttcggccctgttccccaaggactcttccacctcccaacactgtcactagtctcaccagccstgaccccagtgtaccctcctccccacacagactccaccctcctacaggtgctgttcagtgccgacctgcgccaatcccgccatgctcaggagccaccagc

SEQ ID NO: 54119 - DNA, 201 bp, Homo sapiens
acactgtcactagtctcaccagccctgaccccagtgtaccctcctccccacacagactccaccctcctacaggtgctgttcagtgccgacctgcgccaatsccgccatgctcaggagccaccagcaaagcgcagaaagggttccaaagggccggaaggctagatggggcaccctggacaaagaaattccccaagcaccttc

SEQ ID NO: 54120 - DNA, 201 bp, Homo sapiens; identical to SEQ ID NO: 54053

SEQ ID NO: 54121 - DNA, 201 bp, Homo sapiens; identical to SEQ ID NO: 54054

SEQ ID NO: 54122 - DNA, 201 bp, Homo sapiens; identical to SEQ ID NO: 54055

SEQ ID NO: 54123 - DNA, 201 bp, Homo sapiens; identical to SEQ ID NO: 54056

SEQ ID NO: 54124 - DNA, 201 bp, Homo sapiens; identical to SEQ ID NO: 54057

SEQ ID NO: 54125 - DNA, 201 bp, Homo sapiens; identical to SEQ ID NO: 54058

SEQ ID NO: 54126 - DNA, 201 bp, Homo sapiens
ctcagggactgccgatacctgaggatcctggtggagaatcaaggacgagtcaatttttcatggcaaatacagaatgagcagaaaggaataactggatctgycagcatcaataactcttccctggagggctttaccatctattccctggagatgaaaatgagcttctttgagaggctccgctctgccacctggaagcctgtc

SEQ ID NO: 54127 - DNA, 201 bp, Homo sapiens
cagacagccaccagggcccggccttctactgtgggaccttgaaggctggcccttctcccaaggacaccttcctgagcctgctgaactggaattatggattygtgttcatcaatggacgtaaccttgggcgatattggaatattgggcctcagaaaacactgtaccttcctggagtttggcttcatccagaagacaatgagg

SEQ ID NO: 54128 - DNA, 201 bp, Homo sapiens
gaaccttcccataaacaatgggagcggccagtcctacgggcttgtcctgtatgagaagtccatctgctccggaggccgcctccgtgcccacgctcatgacrtggcacaggtgtttttggatgagacaatgatagggattctgaatgagaataataaggacctgcacattcctgaactcagggactgccgatacctgaggat

SEQ ID NO: 54129 - DNA, 201 bp, Homo sapiens
atcaaatctacagacaagcccacgctgtaaaactgtgtctgaacattttttttttttttttgagatggagtctcactttgtcgcccaggctggagtgcagkggcacaatctctgctcactgcaagctcagcctctcgggttcacgccattctcctgcctcagcctccccagcagctgggactacaggtgcacgccaccacg

SEQ ID NO: 54130 - DNA, 201 bp, Homo sapiens; identical to SEQ ID NO: 54126

SEQ ID NO: 54131 - DNA, 201 bp, Homo sapiens; identical to SEQ ID NO: 54127

SEQ ID NO: 54132 - DNA, 201 bp, Homo sapiens; identical to SEQ ID NO: 54128

SEQ ID NO: 54133 - DNA, 201 bp, Homo sapiens
cacctgcaggccccgcaggaacttctgggcctcctcccgcacgtggtcgtgcagggtgaactcctggaggatctcctggcggaggtggtggtagaaggtcyaggagcaggggtagccggtgaagcggacgtactcccccgggatgtggcggtattcctcctccatccagtcgttcaggtggtagttctgccaggggatcct

SEQ ID NO: 54134 - DNA, 201 bp, Homo sapiens
tctcctggcggaggtggtggtagaaggtccaggagcaggggtagccggtgaagcggacgtactcccccgggatgtggcggtattcctcctccatccagtcrttcaggtggtagttctgccaggggatcctgctggccgtggcgctgtgcagcaccggcagggtgattctgaagatgggggccagggtgctgtgcatctggg

SEQ ID NO: 54135 - DNA, 201 bp, Homo sapiens
aacgtcccaatggtcatgatggtgtggttacactgtgtgagtagagcaaaatctttggcaggtgagccctcaatgccatcgccagcaaacaccacatcacygtgggaggtgtcaatgttctcccgacaccaggccatgccattactggtgaccacgaagatgagggagctgtagcgagctcggaaccagtccagggcctgc

SEQ ID NO: 54136 - DNA, 201 bp, Homo sapiens
gcaggaaggctgcctctggcttaaagattttgaggaaaggggagtcggggagggtgtaattggccaggtagatggtgtctccgcccgtgaggtatgcggcycagatcccgaacgtcccaatggtcatgatggtgtggttacactgtgtgagtagagcaaaatctttggcaggtgagccctcaatgccatcgccagcaaaca

SEQ ID NO: 54137 - DNA, 201 bp, Homo sapiens
agccggtgaagcggacgtactcccccgggatgtggcggtattcctcctccatccagtcgttcaggtggtagttctgccaggggatcctgctggccgtggcrctgtgcagcaccggcagggtgattctgaagatgggggccagggtgctgtgcatctgggccgggatgaaggcgggccgcccgttcatcttggccagggcgt

SEQ ID NO: 54138 - DNA, 140 bp, Homo sapiens
ttagtgcttgagtaagggggacaggtctgcggcaatcccygtccactccggcaggaaggctgcctctggcttaaagattttgaggaaaggggagtcggggagggtgtaattggccaggtagatggtgtctccgcccgtga

SEQ ID NO: 54139 - DNA, 201 bp, Homo sapiens
tcacctgcaggccccgcaggaacttctgggcctcctcccgcacgtggtcgtgcagggtgaactcctggaggatctcctggcggaggtggtggtagaaggtycaggagcaggggtagccggtgaagcggacgtactcccccgggatgtggcggtattcctcctccatccagtcgttcaggtggtagttctgccaggggatcc

SEQ ID NO: 54140 - DNA, 201 bp, Homo sapiens
ggaaccagtccagggcctgctgtaggtatcgccggtcggccaccacccccttccacacttttggcatgacatggacatagtcccctcggcgaacatggacmcctacaaaggtgcccggccggctcccgttcacctgcaggccccgcaggaacttctgggcctcctcccgcacgtggtcgtgcagggtgaactcctggagga

SEQ ID NO: 54141 - DNA, 201 bp, Homo sapiens
tcaatgttctcccgacaccaggccatgccattactggtgaccacgaagatgagggagctgtagcgagctcggaaccagtccagggcctgctgtaggtatcrccggtcggccaccacccccttccacacttttggcatgacatggacatagtcccctcggcgaacatggacccctacaaaggtgcccggccggctcccgttc

SEQ ID NO: 54142 - DNA, 201 bp, Homo sapiens
ctgtagcgagctcggaaccagtccagggcctgctgtaggtatcgccggtcggccaccacccccttccacacttttggcatgacatggacatagtcccctcrgcgaacatggacccctacaaaggtgcccggccggctcccgttcacctgcaggccccgcaggaacttctgggcctcctcccgcacgtggtcgtgcagggtg

SEQ ID NO: 54143 - DNA, 201 bp, Homo sapiens
tagtcccctcggcgaacatggacccctacaaaggtgcccggccggctcccgttcacctgcaggccccgcaggaacttctgggcctcctcccgcacgtggtygtgcagggtgaactcctggaggatctcctggcggaggtggtggtagaaggtccaggagcaggggtagccggtgaagcggacgtactcccccgggatgtgg

SEQ ID NO: 54144 - DNA, 201 bp, Homo sapiens
agtcccctcggcgaacatggacccctacaaaggtgcccggccggctcccgttcacctgcaggccccgcaggaacttctgggcctcctcccgcacgtggtcrtgcagggtgaactcctggaggatctcctggcggaggtggtggtagaaggtccaggagcaggggtagccggtgaagcggacgtactcccccgggatgtggc

SEQ ID NO: 54145 - DNA, 125 bp, Homo sapiens
gccaggtgctggtggcagtgaaagatggtggacaccacaaaaatggcaaagacgaagtagaaggtggagaaggaagggcgggtggcccagaatcccttgayggctgtggggaggagagaggacat

SEQ ID NO: 54146 - DNA, 201 bp, Homo sapiens
tggtcgtgcagggtgaactcctggaggatctcctggcggaggtggtggtagaaggtccaggagcaggggtagccggtgaagcggacgtactcccccgggawgtggcggtattcctcctccatccagtcgttcaggtggtagttctgccaggggatcctgctggccgtggcgctgtgcagcaccggcagggtgattctgaag

SEQ ID NO: 54147 - DNA, 201 bp, Homo sapiens
cgctgtgcagcaccggcagggtgattctgaagatgggggccagggtgctgtgcatctgggccgggatgaaggcgggccgcccgttcatcttggccagggcrtacagtgtggcgtactcgcccatctggttccccaggcggcccttggagttgatagtgaacaggtcctcccggggcaggtgtctgggggccaggaccacac

SEQ ID NO: 54148 - DNA, 201 bp, Homo sapiens
ccagcaaacaccacatcaccgtgggaggtgtcaatgttctcccgacaccaggccatgccattactggtgaccacgaagatgagggagctgtagcgagctcrgaaccagtccagggcctgctgtaggtatcgccggtcggccaccacccccttccacacttttggcatgacatggacatagtcccctcggcgaacatggacc

SEQ ID NO: 54149 - DNA, 182 bp, Homo sapiens
aggtgtctgggggccaggaccacacgggctgagtatgcccagggcgcaggcaccagagccaggtgctggtggcagtgaaagatggtggacaccacaaaaayggcaaagacgaagtagaaggtggagaaggaagggcgggtggcccagaatcccttgacggctgtggggaggagagaggacat

SEQ ID NO: 54150 - DNA, 201 bp, Homo sapiens
gggtgaactcctggaggatctcctggcggaggtggtggtagaaggtccaggagcaggggtagccggtgaagcggacgtactcccccgggatgtggcggtaytcctcctccatccagtcgttcaggtggtagttctgccaggggatcctgctggccgtggcgctgtgcagcaccggcagggtgattctgaagatgggggcca

SEQ ID NO: 54151 - DNA, 201 bp, Homo sapiens
tgcagggtgaactcctggaggatctcctggcggaggtggtggtagaaggtccaggagcaggggtagccggtgaagcggacgtactcccccgggatgtggcrgtattcctcctccatccagtcgttcaggtggtagttctgccaggggatcctgctggccgtggcgctgtgcagcaccggcagggtgattctgaagatgggg

SEQ ID NO: 54152 - DNA, 200 bp, Homo sapiens
tctaccggaggggtaaagaaacctcaccgaatgctacaaatgccgcttgcaagtgcaccctctactggaggggtgaagaaacctcaccgcaagccttatrctgtagtgcttcatgaaattagatattatgaaaagcccattgaacttctgattcaaaaacttctttctagcatctggtgtgaaaaatttctcaagacttc

SEQ ID NO: 54153 - DNA, 201 bp, Homo sapiens
ataaaggaagagatcccagttctgatacatatgaggaagattctgagttgttgctccagatacgaaatgatgtgcttgactcactgggtattagtcctgayctgcttcctgaggactttgtcaggtactgcttctccgagatggccccagtgtgtgcggtggttggagggattttggcacaggaaattgtgaaggccctgt

SEQ ID NO: 54154 - DNA, 201 bp, Homo sapiens
ttagccaaggagtagaagatgggcccgacaccaagagagcaaaacttgattcttctgagacaacgatggtcaaaaagaaggtggtcttctgccctgttaargaagccctggaggtggactggagcagtgagaaagcaaaggctgctctgaagcgcacgacctccgactactttctccttcaagtgctcttaaagttccgta

SEQ ID NO: 54155 - DNA, 105 bp, Homo sapiens
agaarcactccgggcgtgctgccggcggcggtaggtggcgcgcgggtccggcgggcggttggcttgagcgggaccggagctgaggcaggaagagccggcgccatg

SEQ ID NO: 54156 - DNA, 201 bp, Homo sapiens
atcccgggcctgccagctcccctgagtgatgagcacttccaagcacccctctgccctttctctgtccttatgctgtcccggcctcgccagccctctggggmattgtgggagatgcctgccaggaatgagcaagctctgttgctcgggagcctcttgtcaccttcttggacttattccccacctgataccttatagagaaaa

SEQ ID NO: 54157 - DNA, 102 bp, Homo sapiens
asaagcactccgggcgtgctgccggcggcggtaggtggcgcgcgggtccggcgggcggttggcttgagcgggaccggagctgaggcaggaagagccggcgcc

SEQ ID NO: 54158 - DNA, 115 bp, Homo sapiens
agaagcactccgggmgtgctgccggcggcggtaggtggcgcgcgggtccggcgggcggttggcttgagcgggaccggagctgaggcaggaagagccggcgccatggtggagaagg

SEQ ID NO: 54159 - DNA, 201 bp, Homo sapiens; identical to SEQ ID NO: 54153

SEQ ID NO: 54160 - DNA, 201 bp, Homo sapiens; identical to SEQ ID NO: 54154

SEQ ID NO: 54161 - DNA, 105 bp, Homo sapiens; identical to SEQ ID NO: 54155

SEQ ID NO: 54162 - DNA, 201 bp, Homo sapiens; identical to SEQ ID NO: 54156

SEQ ID NO: 54163 - DNA, 102 bp, Homo sapiens; identical to SEQ ID NO: 54157

SEQ ID NO: 54164 - DNA, 115 bp, Homo sapiens; identical to SEQ ID NO: 54158

SEQ ID NO: 54165 - DNA, 201 bp, Homo sapiens
attgtaatttgacgtgaagagaaaaaaaaattcctcctgcgtgagccaaggcagcgggtgctgtttcccaggcggggagcccctccctgggtgtcacaggkcctgtgctcctccctcctccatcctctctcctcccgctcctccctccccccactgtgggctggggacgcctgcccttctgtctccggacgctctaggcga

SEQ ID NO: 54166 - DNA, 201 bp, Homo sapiens
ctttttctgcccattctgtggttcccagggagcgtggccctggtgggccaggggtggtttgacctcttcagcccgtccggtggcctggaggccggaggctstcctgagtgtctgcccctgcagtggcttcttgtcgcctgctgctgggcgtgatgtcgctggaggtgctggcagggactctgatttggtggtccgcgctgc

SEQ ID NO: 54167 - DNA, 201 bp, Homo sapiens
tttctgcccattctgtggttcccagggagcgtggccctggtgggccaggggtggtttgacctcttcagcccgtccggtggcctggaggccggaggctctcytgagtgtctgcccctgcagtggcttcttgtcgcctgctgctgggcgtgatgtcgctggaggtgctggcagggactctgatttggtggtccgcgctgcccc

SEQ ID NO: 54168 - DNA, 201 bp, Homo sapiens
tctggcctggctgcctggccgtggcttctctttggctcccaaagagaaggacagtgttgggagtatctgccgtggcttctctttggctcccaaagagaagsacagtgttgggagtatctgccggcgctgtccaggtcctttagtcagcgtcactccatctgatgtgcagaagctgggctgcacctgcgggggtgggcatag

SEQ ID NO: 54169 - DNA, 201 bp, Homo sapiens
ccgaagacttcagcgaggattccgaggtacagcagattctcttctatgaagactcggttgcagcccacctttctaaaatcctcacctcggaccagcactcrgtggtcatctcctcggccaaagtgctctgtgagacggtgaaggacttcgtggcacgggtggggaaggcctatgagaagacgaccgagagctcggaggagt

SEQ ID NO: 54170 - DNA, 201 bp, Homo sapiens
tgttggctgggtcctctccgaaatcgacagcctcaaccttcataaacagtgtcagctgggagtgctgccgctcggcacagggaacgacttggcccgagtaytgggctggggctcagcctgcgatgacgacacccagctcccccagatcttggagaagttggagagagccagcaccaagatgctggacaggtggagcgtcat

SEQ ID NO: 54171 - DNA, 201 bp, Homo sapiens
aagatgatactttcgcagctccatcattcgatgacaagattctggaggtggtcgccgtgttcggcagcatgcagatggccgtctctcgagtcatcaggctrcagcatcatcggatcgcccagtgtcgcacggtgaagatctccatccttggggatgagggcgtgcctgtgcaggtggacggagaggcctgggtccagccgc

SEQ ID NO: 54172 - DNA, 201 bp, Homo sapiens
tgcagcttttgttgaacaaaaatcgtgctctttcctggtttgaaagtagcatggatgtttccagtcttgttgattgtaatttgacgtgaagagaaaaaaamattcctcctgcgtgagccaaggcagcgggtgctgtttcccaggcggggagcccctccctgggtgtcacagggcctgtgctcctccctcctccatcctctc

SEQ ID NO: 54173 - DNA, 201 bp, Homo sapiens
tgttgggatttttggatgaaagactctcccacgctctgttggtggacttagctgcctcactggaagtgatgtgggtggaaggtggttgtatgttacctttwccacctctcattgttttccccagaacattgtagatgggggttggcagagggagaaataagccagccacggcagtcgcttggtttcccaggtggaatgggc

SEQ ID NO: 54174 - DNA, 201 bp, Homo sapiens
gcctcactggaagtgatgtgggtggaaggtggttgtatgttaccttttccacctctcattgttttccccagaacattgtagatgggggttggcagagggaraaataagccagccacggcagtcgcttggtttcccaggtggaatgggctaacacaggagatgatgggaacctgtcccgcagtccctgcatgaccattggcc

SEQ ID NO: 54175 - DNA, 201 bp, Homo sapiens
gtacattcggattgtccacaagaaccgggcacagacactgaccagagacagggcatttgagagcaccctgaagtcctgggaagacaagcagaagtgcgagstgccccgccctccatcctgttccctgcacccggagatgctgtccgaggaggaggccacccagatggaccagtttgggcaggcagcaggggtcctcattca

SEQ ID NO: 54176 - DNA, 201 bp, Homo sapiens
ccatggaccgtgtgtatggcaagcccagaaccacagaggggctcaactgcagcttcgtcctggaaatggtgaataacttcagagctctgcgcagtgagacrgagctgctgctgtctgggaagatggccctgcagctggatccgcctcagaaggagcagctggggagtgctcttgccgagatggaccgacagctcaggaggc

SEQ ID NO: 54177 - DNA, 201 bp, Homo sapiens
gtagcatggatgtttccagtcttgttgattgtaatttgacgtgaagagaaaaaaaaattcctcctgcgtgagccaaggcagcgggtgctgtttcccaggcrgggagcccctccctgggtgtcacagggcctgtgctcctccctcctccatcctctctcctcccgctcctccctccccccactgtgggctggggacgcctgc

SEQ ID NO: 54178 - DNA, 201 bp, Homo sapiens
aaagactctcccacgctctgttggtggacttagctgcctcactggaagtgatgtgggtggaaggtggttgtatgttaccttttccacctctcattgttttccccagaacattgtagatgggggttggcagagggagaaataagccagccacggcagtcgcttggtttcccaggtggaatgggctaacacaggagatgatgg

SEQ ID NO: 54179 - DNA, 201 bp, Homo sapiens
ctggaagtgatgtgggtggaaggtggttgtatgttaccttttccacctctcattgttttccccagaacattgtagatgggggttggcagagggagaaatawgccagccacggcagtcgcttggtttcccaggtggaatgggctaacacaggagatgatgggaacctgtcccgcagtccctgcatgaccattggccctgctg

SEQ ID NO: 54180 - DNA, 201 bp, Homo sapiens
tggccaagaagtgctctgtcctgaaagagaagctggattcccttctcaagaccttggacgatgagtcccaggcctcgtcctctctgcccaacccgcccccsaccattgccgaggaggctgaagatggagatgggtcgggcagcatctgcggttccaccggagaccgcttggtggcatcagcttgcccggcccggccgcaga

SEQ ID NO: 54181 - DNA, 201 bp, Homo sapiens
cctcccgctcctccctccccccactgtgggctggggacgcctgcccttctgtctccggacgctctaggcgagttcagcttggggtgtgagtgagacagctygccagctgcatccctgcagacagaggatgtgtgtccacatgagtgtttctgtgtgggaaatgcttcctggctctgggaaactttttctgcccattctgtg

SEQ ID NO: 54182 - DNA, 201 bp, Homo sapiens
cggcagtcgcttggtttcccaggtggaatgggctaacacaggagatgatgggaacctgtcccgcagtccctgcatgaccattggccctgctggcctggcgrtgtgggcatcctggggttcttagggtcccagaacaagccccaggcaagctggaacttgggtggggaggggacatgaggaggataaacagctgactgtggc

SEQ ID NO: 54183 - DNA, 201 bp, Homo sapiens; identical to SEQ ID NO: 54165

SEQ ID NO: 54184 - DNA, 201 bp, Homo sapiens; identical to SEQ ID NO: 54166

SEQ ID NO: 54185 - DNA, 201 bp, Homo sapiens; identical to SEQ ID NO: 54167

SEQ ID NO: 54186 - DNA, 201 bp, Homo sapiens; identical to SEQ ID NO: 54168

SEQ ID NO: 54187 - DNA, 201 bp, Homo sapiens; identical to SEQ ID NO: 54169

SEQ ID NO: 54188 - DNA, 201 bp, Homo sapiens; identical to SEQ ID NO: 54170

SEQ ID NO: 54189 - DNA, 201 bp, Homo sapiens; identical to SEQ ID NO: 54171

SEQ ID NO: 54190 - DNA, 201 bp, Homo sapiens; identical to SEQ ID NO: 54172

SEQ ID NO: 54191 - DNA, 201 bp, Homo sapiens; identical to SEQ ID NO: 54173

SEQ ID NO: 54192 - DNA, 201 bp, Homo sapiens; identical to SEQ ID NO: 54174

SEQ ID NO: 54193 - DNA, 201 bp, Homo sapiens; identical to SEQ ID NO: 54175

SEQ ID NO: 54194 - DNA, 201 bp, Homo sapiens; identical to SEQ ID NO: 54176

SEQ ID NO: 54195 - DNA, 201 bp, Homo sapiens; identical to SEQ ID NO: 54177

SEQ ID NO: 54196 - DNA, 201 bp, Homo sapiens; identical to SEQ ID NO: 54178

SEQ ID NO: 54197 - DNA, 201 bp, Homo sapiens; identical to SEQ ID NO: 54179

SEQ ID NO: 54198 - DNA, 201 bp, Homo sapiens
agaggcaggaaggatccctgaagagtcttggagaaaaggttctgtgccctcaggtggggcttaccccctcgtatttataatcttaatttatatagtgaccmccgtggaaacaaacgcctcttgtattgtcatgtacatagtccatacctgagtgctgtacataagttgttctgtgtataaataaaacaagcctgtttttga

SEQ ID NO: 54199 - DNA, 201 bp, Homo sapiens; identical to SEQ ID NO: 54180

SEQ ID NO: 54200 - DNA, 178 bp, Homo sapiens
ggagaaaaggttctgtgccctcaggtggggcttaccccctcgtatttataatcttaatttatatagtgaccaccgtggaaacaaacgcctcttgtattgtyatgtacatagtccatacctgagtgctgtacataagttgttctgtgtataaataaaacaagcctgtttttgatcttcc

SEQ ID NO: 54201 - DNA, 201 bp, Homo sapiens; identical to SEQ ID NO: 54181

SEQ ID NO: 54202 - DNA, 201 bp, Homo sapiens; identical to SEQ ID NO: 54182

SEQ ID NO: 54203 - DNA, 201 bp, Homo sapiens; identical to SEQ ID NO: 54169

SEQ ID NO: 54204 - DNA, 201 bp, Homo sapiens; identical to SEQ ID NO: 54170

SEQ ID NO: 54205 - DNA, 201 bp, Homo sapiens; identical to SEQ ID NO: 54180

SEQ ID NO: 54206 - DNA, 201 bp, Homo sapiens
tccttccagcatgaccctgagacctctgtgttggtcctgcgcaagcctggcatcaatgtggcatctgattggagtattcacctgcgataacccaagggatrttctgggttagggggagggaaggggagcattagtgctgagagatattctttcttctgccttggagttcggccctccccagacttcacttatgctagtcta

SEQ ID NO: 54207 - DNA, 201 bp, Homo sapiens
ggctgatccaccaatagcccggctttctgtctctggtcgtgatgagaacagtgtggagttaaccatggctgagggaccctacaagatcatcttgacagcayggccattccgccttgacctactagaggaccgaagtcttttgcttagtgtcaatgcccgaggactcttggagtttgagcatcagagggcccctagggtctc

SEQ ID NO: 54208 - DNA, 201 bp, Homo sapiens
ttaaccatggctgagggaccctacaagatcatcttgacagcacggccattccgccttgacctactagaggaccgaagtcttttgcttagtgtcaatgcccraggactcttggagtttgagcatcagagggcccctagggtctctttctcggataaggttaatctcacgcttggtagcatatgggataagatcaagaacctt

SEQ ID NO: 54209 - DNA, 201 bp, Homo sapiens
caaattcctcttgtgatctcctcacctctcccactccattgataccaactctttcccttcattcccccaacatcctgttgctctaactggagcacattcayttacgaacaccaggaaaccacagggcccttgtcgccccttctctttcccttatttaggagccctgaactcccccagagtctatccattcatgcctcttgt

SEQ ID NO: 54210 - DNA, 201 bp, Homo sapiens
gccatatcgcctctacaatttggatgtgttccagtatgagctgtacaacccaatggccttgtatgggtctgtgcctgtgctcctggcacacaaccctcatygcgacttgggcatcttctggctcaatgctgcagagacctgggttgatatatcttccaacactgccgggaagaccctgtttgggaagatgatggactacct

SEQ ID NO: 54211 - DNA, 201 bp, Homo sapiens
tcttgtgatctcctcacctctcccactccattgataccaactctttcccttcattcccccaacatcctgttgctctaactggagcacattcacttacgaasaccaggaaaccacagggcccttgtcgccccttctctttcccttatttaggagccctgaactcccccagagtctatccattcatgcctcttgtatgttgat

SEQ ID NO: 54212 - DNA, 162 bp, Homo sapiens
agaacatccttttccctctcattctacccttttcctctccccgattccttgtagagctgctgcattctacctcctctgtccctcggcagaaagacgtttcyacacctcttaggggatgcgcattaaacttcttttgcccccttcttgtcccctttgaggggc

SEQ ID NO: 54213 - DNA, 201 bp, Homo sapiens
ttcctcttgtgatctcctcacctctcccactccattgataccaactctttcccttcattcccccaacatcctgttgctctaactggagcacattcacttaygaacaccaggaaaccacagggcccttgtcgccccttctctttcccttatttaggagccctgaactcccccagagtctatccattcatgcctcttgtatgt

SEQ ID NO: 54214 - DNA, 201 bp, Homo sapiens
gccccaccgatacactgggaccaccccttaccccggacaggatgaatggatcaaaggagtgaggttgctaaagaacatccttttccctctcattctacccytttcctctccccgattccttgtagagctgctgcattctacctcctctgtccctcggcagaaagacgtttccacacctcttaggggatgcgcattaaactt

SEQ ID NO: 54215 - DNA, 201 bp, Homo sapiens
tcccttatttaggagccctgaactcccccagagtctatccattcatgcctcttgtatgttgatgccacttcttggaagaagatgagggcaatgagttaggkctccttttccccttccctcccaccagattgctctcccacctttcatttcttcctccaggctttactcccctttttatgccccaccgatacactgggacca

SEQ ID NO: 54216 - DNA, 201 bp, Homo sapiens
tatgccccaccgatacactgggaccaccccttaccccggacaggatgaatggatcaaaggagtgaggttgctaaagaacatccttttccctctcattctayccttttcctctccccgattccttgtagagctgctgcattctacctcctctgtccctcggcagaaagacgtttccacacctcttaggggatgcgcattaaa

SEQ ID NO: 54217 - DNA, 201 bp, Homo sapiens; identical to SEQ ID NO: 54207

SEQ ID NO: 54218 - DNA, 201 bp, Homo sapiens
ttaaccatggctgagggaccctacaagatcatcttgacagcacggccattccgccttgacctactagaggaccgaagtcttttgcttagtgtcaatgcccraggactcttggagtttgagcatcagagggcccctagggtctcgcaaggatcaaaagacccagctgagggcgatggggcccagcctgaggaaacacccagg

SEQ ID NO: 54219 - DNA, 201 bp, Homo sapiens
acgtttccacacctcttaggggatgcgcattaaacttcttttgcccccttcttgtcccctttgaggggcacttaagatggagaaatcagttgtggtttcastgaatcatggtcacctgtatttattgctaggagaagcctgagggtggggggagatgatcatgtgtgctcggggttggctggaagccctgggtggggggtt

SEQ ID NO: 54220 - DNA, 201 bp, Homo sapiens; identical to SEQ ID NO: 54209

SEQ ID NO: 54221 - DNA, 201 bp, Homo sapiens
tctcattctacccttttcctctccccgattccttgtagagctgctgcaattcttagaggggcagttctacctcctctgtccctcggcagaaagacgtttcyacacctcttaggggatgcgcattaaacttcttttgcccccttcttgtcccctttgaggggcacttaagatggagaaatcagttgtggtttcagtgaatca

SEQ ID NO: 54222 - DNA, 201 bp, Homo sapiens
gccccaccgatacactgggaccaccccttaccccggacaggatgaatggatcaaaggagtgaggttgctaaagaacatccttttccctctcattctacccytttcctctccccgattccttgtagagctgctgcaattcttagaggggcagttctacctcctctgtccctcggcagaaagacgtttccacacctcttaggg

SEQ ID NO: 54223 - DNA, 201 bp, Homo sapiens
tatgccccaccgatacactgggaccaccccttaccccggacaggatgaatggatcaaaggagtgaggttgctaaagaacatccttttccctctcattctayccttttcctctccccgattccttgtagagctgctgcaattcttagaggggcagttctacctcctctgtccctcggcagaaagacgtttccacacctctta

SEQ ID NO: 54224 - DNA, 201 bp, Homo sapiens; identical to SEQ ID NO: 54206

SEQ ID NO: 54225 - DNA, 201 bp, Homo sapiens; identical to SEQ ID NO: 54210

SEQ ID NO: 54226 - DNA, 201 bp, Homo sapiens; identical to SEQ ID NO: 54211

SEQ ID NO: 54227 - DNA, 201 bp, Homo sapiens; identical to SEQ ID NO: 54213

SEQ ID NO: 54228 - DNA, 201 bp, Homo sapiens; identical to SEQ ID NO: 54215

SEQ ID NO: 54229 - DNA, 201 bp, Homo sapiens; identical to SEQ ID NO: 54206

SEQ ID NO: 54230 - DNA, 201 bp, Homo sapiens; identical to SEQ ID NO: 54207

SEQ ID NO: 54231 - DNA, 201 bp, Homo sapiens; identical to SEQ ID NO: 54218

SEQ ID NO: 54232 - DNA, 201 bp, Homo sapiens; identical to SEQ ID NO: 54209

SEQ ID NO: 54233 - DNA, 201 bp, Homo sapiens; identical to SEQ ID NO: 54210

SEQ ID NO: 54234 - DNA, 201 bp, Homo sapiens; identical to SEQ ID NO: 54211

SEQ ID NO: 54235 - DNA, 162 bp, Homo sapiens; identical to SEQ ID NO: 54212

SEQ ID NO: 54236 - DNA, 201 bp, Homo sapiens; identical to SEQ ID NO: 54213

SEQ ID NO: 54237 - DNA, 201 bp, Homo sapiens; identical to SEQ ID NO: 54214

SEQ ID NO: 54238 - DNA, 201 bp, Homo sapiens; identical to SEQ ID NO: 54215

SEQ ID NO: 54239 - DNA, 201 bp, Homo sapiens; identical to SEQ ID NO: 54216

SEQ ID NO: 54240 - DNA, 201 bp, Homo sapiens; identical to SEQ ID NO: 54206

SEQ ID NO: 54241 - DNA, 201 bp, Homo sapiens; identical to SEQ ID NO: 54207

SEQ ID NO: 54242 - DNA, 201 bp, Homo sapiens; identical to SEQ ID NO: 54218

SEQ ID NO: 54243 - DNA, 201 bp, Homo sapiens; identical to SEQ ID NO: 54209

SEQ ID NO: 54244 - DNA, 201 bp, Homo sapiens; identical to SEQ ID NO: 54210

SEQ ID NO: 54245 - DNA, 201 bp, Homo sapiens; identical to SEQ ID NO: 54211

SEQ ID NO: 54246 - DNA, 162 bp, Homo sapiens; identical to SEQ ID NO: 54212

SEQ ID NO: 54247 - DNA, 201 bp, Homo sapiens; identical to SEQ ID NO: 54213

SEQ ID NO: 54248 - DNA, 201 bp, Homo sapiens; identical to SEQ ID NO: 54214

SEQ ID NO: 54249 - DNA, 201 bp, Homo sapiens; identical to SEQ ID NO: 54215

SEQ ID NO: 54250 - DNA, 201 bp, Homo sapiens; identical to SEQ ID NO: 54216

SEQ ID NO: 54251 - DNA, 201 bp, Homo sapiens
cgccgtgctgtcccgataccaggcccagcacggggccctgtgaggctgccccacatccccacctggcggagctctcctccgccttgctgagacttacgccmtgttcccttcctgccctgtggcccacgggccggccagctgggtgccccagggacgtgataatgcagataaatacatttatatttttaagaaaaagcgagc

SEQ ID NO: 54252 - DNA, 201 bp, Homo sapiens
ccgcctccgttaacacgatcctgaataaatcttgagaaccccagagccagctgttgtggaagaagagggcagctccctggcatactggctgcagcccgtgrgcagctccgggctgtcgtccatagagggcaggcgctgctggaagtgctggagtctgagtcctcccgcgggctgtcggatggaggaagggcagaaggtctg

SEQ ID NO: 54253 - DNA, 103 bp, Homo sapiens
gccgggggaacgtgagggcgccgatggcgggggcctgggaggaagggaggaggagggaagcaggcgtcagcacgtgactcggccctgaacctgtgtccttagc

SEQ ID NO: 54254 - DNA, 201 bp, Homo sapiens
ctcctgggctgattggccagctaaatggaggcaccggagtggatggggcgaggctgcgggccctgaccggccgactcactgaggcctaccccagccagtamattccaggtcctgtcattgggcgacgcgtaaaatagactccgccctcagccatcctggccgggtaggagcaggtggcaagcgtcaggactgagccctgcc

SEQ ID NO: 54255 - DNA, 201 bp, Homo sapiens
acgtcagggaccctatcctcccaccgcctccgttaacacgatcctgaataaatcttgagaaccccagagccagctgttgtggaagaagagggcagctcccwggcatactggctgcagcccgtgggcagctccgggctgtcgtccatagagggcaggcgctgctggaagtgctggagtctgagtcctcccgcgggctgtcgg

SEQ ID NO: 54256 - DNA, 201 bp, Homo sapiens
gactcggccctgaacctgtgtccttagctggccccggctggctggtgcttaaaggcctgacctctcgggacacacccagccctgtggacccagacaccgtsgaggtgttgatgacctttgaacccgacccagctgatcttgccctatcaagcattcctggccacgagacctttgaccctcgaagacatcgcttctcagaag

SEQ ID NO: 54257 - DNA, 201 bp, Homo sapiens; identical to SEQ ID NO: 54252

SEQ ID NO: 54258 - DNA, 201 bp, Homo sapiens; identical to SEQ ID NO: 54251

SEQ ID NO: 54259 - DNA, 201 bp, Homo sapiens; identical to SEQ ID NO: 54254

SEQ ID NO: 54260 - DNA, 201 bp, Homo sapiens
aacccgtgagcctgggggcaggtgccaggcgatggcgcggcctgtgagcgacaggaccccggcccctctgctgctgggcggcccggccgggacaccccctrgcgggggagcgctgcttgggttgcggagccttctgcaggggaccagcaagcccaaagagccggccagctgtctcctgaaggaaaaggagcgcaaggcggc

SEQ ID NO: 54261 - DNA, 201 bp, Homo sapiens
ctgggcacgcccccgcccgggctgccctcgggaccgccagcggccaccgcgcaggcctgacctctcgggacacacccagccctgtggacccagacaccgtsgaggtgttgatgacctttgaacccgacccagctgatcttgccctatcaagcattcctggccacgagacctttgaccctcgaagacatcgcttctcagaag

SEQ ID NO: 54262 - DNA, 201 bp, Homo sapiens
agaagtttgctttggccacgcctcaaggcggccgcctcctcctgccccctcctccgcccctccgcgcacacctctcggtgcagattgcaaagcgccttccrttgcgagagctgcagattttgcaagagccaggctcgcccaccttgtagaaggagcgccttgagtcccctctcaccctcggttgcaaagagccgaccgctt

SEQ ID NO: 54263 - DNA, 201 bp, Homo sapiens
tcctaggatttgcagcgttctggatactggagggttgcaggctacactcgcccgcccctgggcagacactcgtccaaaccactggagtgtgctggtgactsgcaggccagcccttcgcctctccatgaacccgtgagcctgggggcaggtgccaggcgatggcgcggcctgtgagcgacaggaccccggcccctctgctgc

SEQ ID NO: 54264 - DNA, 201 bp, Homo sapiens; identical to SEQ ID NO: 54255

SEQ ID NO: 54265 - DNA, 201 bp, Homo sapiens
gcgctgtggcgtcgggtgttttggtttggatttttttttccgcgaaagaagtttgctttggccacgcctcaaggcggccgcctcctcctgccccctcctcsgcccctccgcgcacacctctcggtgcagattgcaaagcgccttccgttgcgagagctgcagattttgcaagagccaggctcgcccaccttgtagaaggag

SEQ ID NO: 54266 - DNA, 201 bp, Homo sapiens; identical to SEQ ID NO: 54252

SEQ ID NO: 54267 - DNA, 201 bp, Homo sapiens; identical to SEQ ID NO: 54251

SEQ ID NO: 54268 - DNA, 201 bp, Homo sapiens; identical to SEQ ID NO: 54254

SEQ ID NO: 54269 - DNA, 201 bp, Homo sapiens; identical to SEQ ID NO: 54255

SEQ ID NO: 54270 - DNA, 201 bp, Homo sapiens
gggtctgttggcgccactgctgtgggagcgcacgctgccgttcggcgatgtggagcctgacctctcgggacacacccagccctgtggacccagacaccgtsgaggtgttgatgacctttgaacccgacccagctgatcttgccctatcaagcattcctggccacgagacctttgaccctcgaagacatcgcttctcagaag

SEQ ID NO: 54271 - DNA, 201 bp, Homo sapiens; identical to SEQ ID NO: 54251

SEQ ID NO: 54272 - DNA, 201 bp, Homo sapiens; identical to SEQ ID NO: 54252

SEQ ID NO: 54273 - DNA, 201 bp, Homo sapiens; identical to SEQ ID NO: 54254

SEQ ID NO: 54274 - DNA, 201 bp, Homo sapiens; identical to SEQ ID NO: 54255

SEQ ID NO: 54275 - DNA, 201 bp, Homo sapiens
agtagattctttttctctggacagtctggggtctaagcttaggtcgtggattcggcctgacctctcgggacacacccagccctgtggacccagacaccgtsgaggtgttgatgacctttgaacccgacccagctgatcttgccctatcaagcattcctggccacgagacctttgaccctcgaagacatcgcttctcagaag

SEQ ID NO: 54276 - DNA, 201 bp, Homo sapiens
ttaggggcagccagaggctctttttccccctcctttcttccactcatcctctgaatatctcctcatctttccagaaaccactcaatgtccattgtattctwctgctgcccaactaggaggaaatttctacttctttctctgagctcctttagttctttgcatccttgattctgctcatatctggtccagagcctaccaggt

SEQ ID NO: 54277 - DNA, 201 bp, Homo sapiens
cacaaaactgggaggccgcatctgtgcagggagcttgtgtctgagggtgttgacagctgttttctgcctcaggagaaactgaaaccagaatacctgcaggmactccctgaaatgctgaagctctactcacagtttctggggaagcagccatggtttcttggggacaagatcacctttgtggatttcatcgcttatgatgtc

SEQ ID NO: 54278 - DNA, 201 bp, Homo sapiens
aggccgcatctgtgcagggagcttgtgtctgagggtgttgacagctgttttctgcctcaggagaaactgaaaccagaatacctgcaggcactccctgaaawgctgaagctctactcacagtttctggggaagcagccatggtttcttggggacaagatcacctttgtggatttcatcgcttatgatgtccttgagagaaac

SEQ ID NO: 54279 - DNA, 201 bp, Homo sapiens
cgcatctgtgcagggagcttgtgtctgagggtgttgacagctgttttctgcctcaggagaaactgaaaccagaatacctgcaggcactccctgaaatgctraagctctactcacagtttctggggaagcagccatggtttcttggggacaagatcacctttgtggatttcatcgcttatgatgtccttgagagaaaccaag

SEQ ID NO: 54280 - DNA, 201 bp, Homo sapiens
tgccttcccaaacctgaaggacttcatctcccgatttgagggcttggagaagatctctgcctacatgaagtccagccgcttcctcccaagacctgtgttcwcaaagatggctgtctggggcaacaagtagggccttgaaggccaggaggtgggagtgaggagcccatactcagcctgctgcccaggctgtgcagcgcagct

SEQ ID NO: 54281 - DNA, 201 bp, Homo sapiens
tacagagtgctgattggtctgtttttacagagtgctgattggtgcgtttacaaacctttagctagacacagagcgctgatttgtgcatttacaatcctttrgctaggcagaaaagttctccaagtcctcacctgacccagaagcccagccagcttcacctctcattttgatcaggagccaagactgtggtcctgccaaata

SEQ ID NO: 54282 - DNA, 201 bp, Homo sapiens
ccgatttgagggcttggagaagatctctgcctacatgaagtccagccgcttcctcccaagacctgtgttcacaaagatggctgtctggggcaacaagtagrgccttgaaggccaggaggtgggagtgaggagcccatactcagcctgctgcccaggctgtgcagcgcagctggactctgcatcccagcacctgcctcctcg

SEQ ID NO: 54283 - DNA, 201 bp, Homo sapiens
ctcccaagacttcattgtccctcttcactccccctaaacccctgtcccatgcaggccctttgaagcctcagctacccactatccttcgtgaacatcccctyccatcattacccttccctgcactaaagccagcctgaccttccttcctgttagtggttgtgtctgctttaaagggcctgcctggcccctcgcctgtggagc

SEQ ID NO: 54284 - DNA, 201 bp, Homo sapiens
catctttactcccaagacttcattgtccctcttcactccccctaaacccctgtcccatgcaggccctttgaagcctcagctacccactatccttcgtgaamatcccctcccatcattacccttccctgcactaaagccagcctgaccttccttcctgttagtggttgtgtctgctttaaagggcctgcctggcccctcgcc

SEQ ID NO: 54285 - DNA, 201 bp, Homo sapiens
cagcgcagctggactctgcatcccagcacctgcctcctcgttcctttctcctgtttattcccatctttactcccaagacttcattgtccctcttcactccycctaaacccctgtcccatgcaggccctttgaagcctcagctacccactatccttcgtgaacatcccctcccatcattacccttccctgcactaaagccag

SEQ ID NO: 54286 - DNA, 201 bp, Homo sapiens
tacccttccctgcactaaagccagcctgaccttccttcctgttagtggttgtgtctgctttaaagggcctgcctggcccctcgcctgtggagctcagcccygagctgtccccgtgttgcatgaaggagcagcattgactggtttacaggccctgctcctgcagcatggtccctgccttaggcctacctgatggaagtaaag

SEQ ID NO: 54287 - DNA, 201 bp, Homo sapiens
cttccgagtgctctcttgacatacactgagatcagcgaattttcctaacagacagcttaggggcagccagaggctctttttccccctcctttcttccactyatcctctgaatatctcctcatctttccagaaaccactcaatgtccattgtattcttctgctgcccaactaggaggaaatttctacttctttctctgagct

SEQ ID NO: 54288 - DNA, 201 bp, Homo sapiens
gcatttacaatcctttggctaggcagaaaagttctccaagtcctcacctgacccagaagcccagccagcttcacctctcattttgatcaggagccaagacwgtggtcctgccaaatacacgggtcctgttttctgtttgaactctttagtgctactcatccttcaagctatttcctatactgccaccagagtgaccctcaa

SEQ ID NO: 54289 - DNA, 125 bp, Homo sapiens
aaggcttcccctctaccctctctgkgcctctcacaaacgctgagccccgccccgctgaggcctgtctgcagaatccacagcaaccagcaccatgcccatgacactggggtactggaacatccgcg

SEQ ID NO: 54290 - DNA, 201 bp, Homo sapiens
atgacagaagccagtggctgaatgaaaaattcaagctgggcctggactttcccaatctgccctacttgattgatgggactcacaagatcacccagagcaaygccatcctgcggtacattgcccgcaagcacaacctgtgcggggaatcagaaaaggagcagattcgcgaagacattttggagaaccagtttatggacagcc

SEQ ID NO: 54291 - DNA, 201 bp, Homo sapiens
gaagacattttggagaaccagtttatggacagccgtatgcagctggccaaactctgctatgacccagattttgagaaactgaaaccagaatacctgcaggmactccctgaaatgctgaagctctactcacagtttctggggaagcagccatggtttcttggggacaagatcacctttgtggatttcatcgcttatgatgtc

SEQ ID NO: 54292 - DNA, 201 bp, Homo sapiens
gagaaccagtttatggacagccgtatgcagctggccaaactctgctatgacccagattttgagaaactgaaaccagaatacctgcaggcactccctgaaawgctgaagctctactcacagtttctggggaagcagccatggtttcttggggacaagatcacctttgtggatttcatcgcttatgatgtccttgagagaaac

SEQ ID NO: 54293 - DNA, 201 bp, Homo sapiens
accagtttatggacagccgtatgcagctggccaaactctgctatgacccagattttgagaaactgaaaccagaatacctgcaggcactccctgaaatgctraagctctactcacagtttctggggaagcagccatggtttcttggggacaagatcacctttgtggatttcatcgcttatgatgtccttgagagaaaccaag

SEQ ID NO: 54294 - DNA, 201 bp, Homo sapiens; identical to SEQ ID NO: 54280

SEQ ID NO: 54295 - DNA, 201 bp, Homo sapiens
actggaacatccgcgggctggcccattccatccgcctgctcctggaatacacagactcaagctacgaggaaaagaagtacacgatgggggacgctcctgaytatgacagaagccagtggctgaatgaaaaattcaagctgggcctggactttcccaatctgccctacttgattgatgggactcacaagatcacccagagca

SEQ ID NO: 54296 - DNA, 201 bp, Homo sapiens; identical to SEQ ID NO: 54282

SEQ ID NO: 54297 - DNA, 201 bp, Homo sapiens; identical to SEQ ID NO: 54283

SEQ ID NO: 54298 - DNA, 201 bp, Homo sapiens; identical to SEQ ID NO: 54284

SEQ ID NO: 54299 - DNA, 201 bp, Homo sapiens; identical to SEQ ID NO: 54285

SEQ ID NO: 54300 - DNA, 201 bp, Homo sapiens; identical to SEQ ID NO: 54286

SEQ ID NO: 54301 - DNA, 125 bp, Homo sapiens; identical to SEQ ID NO: 54289

SEQ ID NO: 54302 - DNA, 182 bp, Homo sapiens
gcatgtgatctctgttctgctttttgccccttaaagcatgtgatctttgtacctaccccccgttcgtacaccccctccccttttgcaatccttaataaaarcttgctggttttgaggctcgggccggcatcacggtcctactgatatgtgatgtcacccctggcggcccagctgtaaaattc

SEQ ID NO: 54303 - DNA, 201 bp, Homo sapiens; identical to SEQ ID NO: 54290

SEQ ID NO: 54304 - DNA, 201 bp, Homo sapiens; identical to SEQ ID NO: 54291

SEQ ID NO: 54305 - DNA, 201 bp, Homo sapiens; identical to SEQ ID NO: 54292

SEQ ID NO: 54306 - DNA, 201 bp, Homo sapiens; identical to SEQ ID NO: 54293

SEQ ID NO: 54307 - DNA, 201 bp, Homo sapiens; identical to SEQ ID NO: 54295

SEQ ID NO: 54308 - DNA, 201 bp, Homo sapiens
aagtagggaagatattgctaaattcttttcctagcaaggaatattactattaatactctgggaaaggaatgcattcctggggggaggtctataaacggccrctctgggaatgtctgtcctatgcagttgagacaaggactgaagtacaccctggtctcctgcagtaccctcaggcttactagggtggggaaaaacctggcc

SEQ ID NO: 54309 - DNA, 168 bp, Homo sapiens
  misc_feature (1)...(168): n = A,T,C or G
cattaggagacagcaatcaaatatatgactgatggatgtttactgaaacatattctgggagacccaantcttaccaaattcagagtcattattttggatgaagcccatgaaagaactctaactacagatatcttatttggtctattgaagaagctatttcaggagaag

SEQ ID NO: 54310 - DNA, 201 bp, Homo sapiens
ctgtagttctgaccttaaagtgccttgccatacacgatgtcataaggtttccctatttggatccacctaatgagagacttattttagaagctcttaaacarctttaccagtgtgatgctattgacaggagtggccatgtcaccagattgggtttgtctatggtggagtttcctttgcctccacatctgacatgtgcagtaa

SEQ ID NO: 54311 - DNA, 201 bp, Homo sapiens
tggccatgtcaccagattgggtttgtctatggtggagtttcctttgcctccacatctgacatgtgcagtaataaaagctgcttccctggattgtgaagatytactacttccaatagcagcaatgttgtctgtggaaaacgtcttcattagacctgttgatccagagtaccagaaggaagcagaacagagacatcgagaatt

SEQ ID NO: 54312 - DNA, 184 bp, Homo sapiens
cattaggagacagcaatcaaatatatgactgatggatgtttactgaaacatattctgggagacccaagtcttaccaaattcagwgtcattattttggatgaagcccatgaaagaactctaactacagatatcttatttggtctattgaagaagctatttcaggagaagtctcctaataggaagg

SEQ ID NO: 54313 - DNA, 201 bp, Homo sapiens
caatcttgaggtgccttctgaatcatcagattaaattatgcttcatatgtttttgcttttactgtatttctttaaaaactctaaatctttattcatgtgtyactggattaatttatctgataatgtgtctcacaagaatctgttagatcgtttattcttcagttgtactttgaatggtggggtggaagtttcaggtgaaca

SEQ ID NO: 54314 - DNA, 201 bp, Homo sapiens
ttgtaactatgtttcttaaatattattttaaggttatgtgttctttaattatggtcaaatataatttggtcaccaaaaatgaaataatagtttaaaacaartagctgttactaagtgtgctaaaaatactcattttataattaattttagttttcttagtatattattataaattgtgccctaagtcaggtacaaatgtac

SEQ ID NO: 54315 - DNA, 201 bp, Homo sapiens
tggcatcatcggtggttagcctctatttcctcgaactcacagatgtcttcaaacctgtgcactctggatttagctgctatgaccggagtcttagcatgccrtacattgaaccaacccaggaggcaattccattcctcatgttgcttagcttggcttttgctggacctgcaattacgattatggtaggagaaggaattctct

SEQ ID NO: 54316 - DNA, 126 bp, Homo sapiens
gaggaggcagctcgcctcagctgcgytgtgcacacctcgcccgggggaggacgcagacccgggcaggcggcagggatgtcggcgaaggagaggccaaagggcaaagtgatcaaggacagcgtcacc

SEQ ID NO: 54317 - DNA, 201 bp, Homo sapiens
taaatcagactaaaaggtggtatctcttcttagtgttctatttatcttatttgctaatgggagcacttcttcctttgttaggctgtgctttactgataaamccaagtattgaataaagagagttaattatctttttaaagtaaataaaattatgaaaatatatatagtatatataaagtactgtgtttaaaaaaatgttat

SEQ ID NO: 54318 - DNA, 201 bp, Homo sapiens; identical to SEQ ID NO: 49023

SEQ ID NO: 54319 - DNA, 201 bp, Homo sapiens; identical to SEQ ID NO: 49024

SEQ ID NO: 54320 - DNA, 201 bp, Homo sapiens
gagctcgcctctgcattcagaaactgctataccctcttcagccttgcagaggtttgcagcagatgccaggaaagccaagtacattccaatacccaatcttytccctcagattttccatctccagagcttccctttatggagctttctgaggatattctgaaaggatttatgagtaactaaaatggaaggccatagaagaag

SEQ ID NO: 54321 - DNA, 201 bp, Homo sapiens
ctgagccgacagtcttcccttctctccaagaggcctcagtccccaagactgccaccagtctacacatacagcagccccctggacagaatcagcatttcagytcagctggcctggaatgggccaggctggtcctggctgcctgttccctgtgctcttcagaattactgtttttgtttccttttaccccagctgccattaaag

SEQ ID NO: 54322 - DNA, 201 bp, Homo sapiens
gcgctggggctgccagcctggatgtcatccaggaggtagaatatgtgaaggaggaggccaagatggtgtacctgctcgagtgcctgcagaagacacccccrcctgtactcatctttgcagagaagaaggcagacgtggacgccatccacgagtacctgctgctcaagggggttgaggccgtagccatccatgggggcaaag

SEQ ID NO: 54323 - DNA, 201 bp, Homo sapiens
ctgctgcagcgaagacgcaagggagctgcggaggaagagcagcaggacagcggtagtgaaccccggggagatgaggacgacatcccgctaggccctcagtccaacgtcagcctcctggatcagcaccagcaccttaaagagaaggctgaagcgcgcaaagagtctgccaaggagaagcagctgaaggaagaagagaagatc

SEQ ID NO: 54324 - DNA, 201 bp, Homo sapiens
ttcccttctctccaagaggcctcagtccccaagactgccaccagtctacacatacagcagccccctggacagaatcagcatttcagctcagctggcctggratgggccaggctggtcctggctgcctgttccctgtgctcttcagaattactgtttttgtttccttttaccccagctgccattaaagcccaaacctctagc

SEQ ID NO: 54325 - DNA, 104 bp, Homo sapiens
cgasaccccgcgcgtgtgggagcgggcgtgaagaggggagcaggccgtgcctgactggcgtgtgcttgcagcgggctcgcaccgacgaggtgcctgccggagga

SEQ ID NO: 54326 - DNA, 201 bp, Homo sapiens
ggatcactgactgccccaaactcgaggctatgcagaccaagcaggtcagcaacatcggtcgcaaggactacctggcccacagctccatggacttctgagcygacagtcttcccttctctccaagaggcctcagtccccaagactgccaccagtctacacatacagcagccccctggacagaatcagcatttcagctcagct

SEQ ID NO: 54327 - DNA, 201 bp, Homo sapiens
gccagcgacagaccctgctcttcagtgccaccatgccgaagaagattcagaactttgctaagagtgcccttgtaaagcctgtgaccatcaatgtggggcgygctggggctgccagcctggatgtcatccaggaggtagaatatgtgaaggaggaggccaagatggtgtacctgctcgagtgcctgcagaagacacccccgc

SEQ ID NO: 54328 - DNA, 201 bp, Homo sapiens
gtcatcggatcactgactgccccaaactcgaggctatgcagaccaagcaggtcagcaacatcggtcgcaaggactacctggcccacagctccatggacttytgagccgacagtcttcccttctctccaagaggcctcagtccccaagactgccaccagtctacacatacagcagccccctggacagaatcagcatttcagc

SEQ ID NO: 54329 - DNA, 182 bp, Homo sapiens
cgagaccccgcgcgtgtgggagcgggcgtgaagaggggagcaggccgtgcctgactggcgtgtgcttgcagcgggctcgcaycgacgaggtgcctgccggaggaagccgctccgaggcggaagatgaggacgacgaggactacgtgccctatgtgccgttacggcagcgccggcagctactg

SEQ ID NO: 54330 - DNA, 201 bp, Homo sapiens; identical to SEQ ID NO: 54324

SEQ ID NO: 54331 - DNA, 201 bp, Homo sapiens; identical to SEQ ID NO: 54321

SEQ ID NO: 54332 - DNA, 201 bp, Homo sapiens; identical to SEQ ID NO: 54322

SEQ ID NO: 54333 - DNA, 201 bp, Homo sapiens; identical to SEQ ID NO: 54326

SEQ ID NO: 54334 - DNA, 201 bp, Homo sapiens; identical to SEQ ID NO: 54327

SEQ ID NO: 54335 - DNA, 201 bp, Homo sapiens; identical to SEQ ID NO: 54323

SEQ ID NO: 54336 - DNA, 159 bp, Homo sapiens
cgcgcatgcgtgcagcaaagaatggaggagtcggaacccgaacggaagcgggctcgcaycgacgaggtgcctgccggaggaagccgctccgaggcggaagatgaggacgacgaggactacgtgccctatgtgccgttacggcagcgccggcagctactg

SEQ ID NO: 54337 - DNA, 201 bp, Homo sapiens; identical to SEQ ID NO: 54328

SEQ ID NO: 54338 - DNA, 201 bp, Homo sapiens
acgaggactacgtgccctatgtgccgttacggcagcgccggcagctactggtgaggggcacgcgtccggggagggatggggccgtgaccgcggggtcgcakggggcgggcgtggcctcggcctccgtggggaggagggcagtctgaggagtgagcttcagtacaccagggcgcggcccccagacaaacgagggaccgacgg

SEQ ID NO: 54339 - DNA, 201 bp, Homo sapiens; identical to SEQ ID NO: 54321

SEQ ID NO: 54340 - DNA, 201 bp, Homo sapiens; identical to SEQ ID NO: 54322

SEQ ID NO: 54341 - DNA, 201 bp, Homo sapiens; identical to SEQ ID NO: 54323

SEQ ID NO: 54342 - DNA, 201 bp, Homo sapiens; identical to SEQ ID NO: 54324

SEQ ID NO: 54343 - DNA, 201 bp, Homo sapiens; identical to SEQ ID NO: 54326

SEQ ID NO: 54344 - DNA, 201 bp, Homo sapiens; identical to SEQ ID NO: 54327

SEQ ID NO: 54345 - DNA, 159 bp, Homo sapiens; identical to SEQ ID NO: 54336

SEQ ID NO: 54346 - DNA, 201 bp, Homo sapiens
gaggactacgtgccctatgtgccgttacggcagcgccggcagctactggtgaggggcacgcgtccggggagggatggggccgtgaccgcggggtcgcaggrggcgggcgtggcctcggcctccgtggggaggagggcagtctgaggagtgagcttcagtacaccagggcgcggcccccagacaaacgagggaccgacggct

SEQ ID NO: 54347 - DNA, 201 bp, Homo sapiens; identical to SEQ ID NO: 54328

SEQ ID NO: 54348 - DNA, 201 bp, Homo sapiens; identical to SEQ ID NO: 54324

SEQ ID NO: 54349 - DNA, 201 bp, Homo sapiens; identical to SEQ ID NO: 54321

SEQ ID NO: 54350 - DNA, 201 bp, Homo sapiens; identical to SEQ ID NO: 54322

SEQ ID NO: 54351 - DNA, 201 bp, Homo sapiens; identical to SEQ ID NO: 54327

SEQ ID NO: 54352 - DNA, 201 bp, Homo sapiens; identical to SEQ ID NO: 54326

SEQ ID NO: 54353 - DNA, 201 bp, Homo sapiens; identical to SEQ ID NO: 54328

SEQ ID NO: 54354 - DNA, 159 bp, Homo sapiens; identical to SEQ ID NO: 54336

SEQ ID NO: 54355 - DNA, 201 bp, Homo sapiens; identical to SEQ ID NO: 54324

SEQ ID NO: 54356 - DNA, 201 bp, Homo sapiens; identical to SEQ ID NO: 54321

SEQ ID NO: 54357 - DNA, 201 bp, Homo sapiens; identical to SEQ ID NO: 54322

SEQ ID NO: 54358 - DNA, 201 bp, Homo sapiens; identical to SEQ ID NO: 54327

SEQ ID NO: 54359 - DNA, 201 bp, Homo sapiens; identical to SEQ ID NO: 54326

SEQ ID NO: 54360 - DNA, 159 bp, Homo sapiens; identical to SEQ ID NO: 54336

SEQ ID NO: 54361 - DNA, 201 bp, Homo sapiens; identical to SEQ ID NO: 54328

SEQ ID NO: 54362 - DNA, 201 bp, Homo sapiens
ctgtgcattttttctgcaattacgaagagagccgaggcaattacctggttgatgtggacggcaaccgaatgctggatctttattcccagatctcctctgtycccataggttacagccaccccgccctgctgaaactcatccaacagcctcaaaatgcgacacgaagcttggagtagaactgctggccatgtacagctcctg

SEQ ID NO: 54363 - DNA, 201 bp, Homo sapiens
cctggatccagacacattagtcaagctgcagccaaagtcgacgttgaatttgattatgatgggcctctgatgaagacggaagtcccagggcctagatctcrggagttaatgaaacagctgaatataattcagaatgcagaggctgtgcattttttctgcaattacgaagagagccgaggcaattacctggttgatgtggac

SEQ ID NO: 54364 - DNA, 201 bp, Homo sapiens
gatcccgcagatcggagacggggcctggagggtggcagcacgcaaagggtgtccctgtccctcaaggggtcatggcctccatgttgctcgcccagcgcctrgcctgcagcttccagcacagctaccgcctgctggtgcctggatccagacacattagtcaagctgcagccaaagtcgacgttgaatttgattatgatgggc

SEQ ID NO: 54365 - DNA, 201 bp, Homo sapiens
tggcctgcagcttccagcacagctaccgcctgctggtgcctggatccagacacattagtcaagctgcagccaaagtcgacgttgaatttgattatgatggrcctctgatgaagacggaagtcccagggcctagatctcgggagttaatgaaacagctgaatataattcagaatgcagaggctgtgcattttttctgcaatt

SEQ ID NO: 54366 - DNA, 201 bp, Homo sapiens
aggggcttctcccaggaggagctggagacgtgcatgattaaccaggcccctggctgccccgactacagcatcctctccttcatgggcgcgttccatgggargaccatgggttgcttagcgaccacgcactctaaagccattcacaagatcgacatcccttcctttgactggcccatcgcaccgttcccacggctgaaatac

SEQ ID NO: 54367 - DNA, 201 bp, Homo sapiens
catcgcatcatgtttcccagggcaagttgaggtctgacttttggctccctcgccctaagaggctcttcctctcttttgctcatccaccttcacaccacttstgagctgacccccaggaacagcttggctgttccaccagagcagagggaatcattgctggactggatttcttctggagggaagcaccatgaattaaaggtg

SEQ ID NO: 54368 - DNA, 201 bp, Homo sapiens; identical to SEQ ID NO: 54365

SEQ ID NO: 54369 - DNA, 201 bp, Homo sapiens
acttcttgtaaaaacttttaagccatttatcaacaagttcttgttgactcagggcataatgagttcctgagacatgctcttttgggggctggggctttagstagaagaatttcaaggaaaagaattctcagcagagctcaagattgtagaaactcagcagaagctggtaaaaacatggggagcccggaggacaggctgctg

SEQ ID NO: 54370 - DNA, 201 bp, Homo sapiens
cagagggaatcattgctggactggatttcttctggagggaagcaccatgaattaaaggtgccagagctccatgcatggaaaagtggcctgttggttcaacrtggtttccttgtacttgatcctcctgaaatgagagattttcctgagatgactgagtatggagattaccaggcagatgataccgaaatgcttaaaggggct

SEQ ID NO: 54371 - DNA, 201 bp, Homo sapiens
aaggtgtcattggagcagtgttttgcagaatgagccagagttcaccaagcaggcaaggcaaggaagggtgttgcagagagggaacagcatatgcaaaggcrtatcagttcatggcatcacatctttcactggggaagccagtttccacaggcagcatcccaaggttcaataaggccttatttaacaagcaagcaaaatgca

SEQ ID NO: 54372 - DNA, 201 bp, Homo sapiens
atgattccatacggaataagctcattttaattgccagaaacaaaggtgtggtgttgggtggctgtggtgacaaatccattcgtttccgtcccacgctggtsttcagggatcaccacgctcacctgttcctcaatattttcagtgacatcttagcagacttcaagtaaagaagccatttccactacagtgagaaagcccgga

SEQ ID NO: 54373 - DNA, 201 bp, Homo sapiens
cactttgctcttttaataacaaatcgtccaaagatctcaaagtaagggtttttttttttagcttccactcttccgcagacttggtcatcgacctatttttrttgaagaatgaaaggcaatgacaagtttaacatatacaaattcgtgaattcttgttcattttgcattcctgcagtcagtgctaatccgtcgttcttaatc

SEQ ID NO: 54374 - DNA, 201 bp, Homo sapiens
acacgtgagccacagggctagaagcacaggcccgtcaccccaggaggaaaagcccagggtctggggcagcagagccatcgcatcatgtttcccagggcaasttgaggtctgacttttggctccctcgccctaagaggctcttcctctcttttgctcatccaccttcacaccacttctgagctgacccccaggaacagcttg

SEQ ID NO: 54375 - DNA, 201 bp, Homo sapiens
ctcaaagtaagggtttttttttttagcttccactcttccgcagacttggtcatcgacctatttttgttgaagaatgaaaggcaatgacaagtttaacatawacaaattcgtgaattcttgttcattttgcattcctgcagtcagtgctaatccgtcgttcttaatcaggagttctgccaggtttaaggtcacctgcactcc

SEQ ID NO: 54376 - DNA, 201 bp, Homo sapiens
aacaaatcgtccaaagatctcaaagtaagggtttttttttttagcttccactcttccgcagacttggtcatcgacctatttttgttgaagaatgaaaggcratgacaagtttaacatatacaaattcgtgaattcttgttcattttgcattcctgcagtcagtgctaatccgtcgttcttaatcaggagttctgccaggtt

SEQ ID NO: 54377 - DNA, 201 bp, Homo sapiens
agcaaaatgcaaaccaaaccattattcatttattggcttaagtatgctttctcctgaaaactttagcattgggtgcaaatattcagtatggttctcggagwccaaagggttttaagccagggcacaaccagaaaagtggctctctttggtagggagaggggctccaatatttcgttctctccccatggggcactgacagag

SEQ ID NO: 54378 - DNA, 201 bp, Homo sapiens
ttactccttaccaagggaagttacttcttgtaaaaacttttaagccatttatcaacaagttcttgttgactcagggcataatgagttcctgagacatgctyttttgggggctggggctttagctagaagaatttcaaggaaaagaattctcagcagagctcaagattgtagaaactcagcagaagctggtaaaaacatggg

SEQ ID NO: 54379 - DNA, 201 bp, Homo sapiens
gctgccccgactacagcatcctctccttcatgggcgcgttccatgggaggaccatgggttgcttagcgaccacgcactctaaagccattcacaagatcgayatcccttcctttgactggcccatcgcaccgttcccacggctgaaataccctctggaagagtttgtgaaagagaaccaacaggaggaggcccgctgtctgg

SEQ ID NO: 54380 - DNA, 201 bp, Homo sapiens
aaaacaaggtccagtaatagcaagtcttagtacatcctcacttttattataaatgggtgttttttcataatttttactgacgctcagtaaccatgcaaaaytgtgtatagcattaatgtatctacatacctacacctatctatatataagctcatggtagaaaaccatagctaagtagcatcgcagacttaagcgtacaaa

SEQ ID NO: 54381 - DNA, 201 bp, Homo sapiens
ctgtgcattttttctgcaattacgaagagagccgaggcaattacctggttgatgtggacggcaaccgaatgctggatctttattcccagatctcctctgtycccataggttacagccaccccgccctgctgaaactcatccaacagcctcaaaatgcgagcatgtttgtcaacagacccgccctcggaatcctgcctccgg

SEQ ID NO: 54382 - DNA, 201 bp, Homo sapiens
tccagtccgagggtggagacaaccacgcatccgatgacttctttcggaagctgagagacatcgccaggaagcatggctgcgccttcttggtggacgaggtmcagaccggaggaggctgcacgggcaagttctgggcccatgagcactggggcctggatgacccagcagacgtgatgaccttcagcaagaagatgatgactg

SEQ ID NO: 54383 - DNA, 201 bp, Homo sapiens
caaggaggagttcaggcctaatgctccctaccggatcttcaacacctggctgggggacccgtccaagaacctgttgctggctgaggtcatcaacatcatcwagcgggaggacctgctaaataatgcagcccatgccgggaaggccctgctcacaggactgctggacctccaggcccggtacccccagttcatcagcagggt

SEQ ID NO: 54384 - DNA, 201 bp, Homo sapiens
ggtcttgggggaggggaggggagggaagggctggtgttgattttcctccctgcagagccaatggtgcacattggtttaagcccagagatcctgcttgagcmctggactcatcttgggaagggccatgggaggtcctggctagagttctgcccaaccttgaccaaccccagcaatttttccaaaagccagtcaagggcatta

SEQ ID NO: 54385 - DNA, 201 bp, Homo sapiens
gtcttcagggatcaccacgctcacctgttcctcaatattttcagtgacatcttagcagacttcaagtaaagaagccatttccactacagtgagaaagcccrgatcccaacagttgtcaaattgattagtttgcctaattcatgttttcacttaaaagtatcagaggtgaatgcacagtgaagggtgatttgtggggaggga

SEQ ID NO: 54386 - DNA, 201 bp, Homo sapiens
gagccaatggtgcacattggtttaagcccagagatcctgcttgagccctggactcatcttgggaagggccatgggaggtcctggctagagttctgcccaaycttgaccaaccccagcaatttttccaaaagccagtcaagggcattacatttgttcctgggactggcagctgggcctcctgggtgccagtccatctcaagt

SEQ ID NO: 54387 - DNA, 201 bp, Homo sapiens
gtggtcttgggggaggggaggggagggaagggctggtgttgattttcctccctgcagagccaatggtgcacattggtttaagcccagagatcctgcttgakccctggactcatcttgggaagggccatgggaggtcctggctagagttctgcccaaccttgaccaaccccagcaatttttccaaaagccagtcaagggcat

SEQ ID NO: 54388 - DNA, 201 bp, Homo sapiens
ggaggggagggaagggctggtgttgattttcctccctgcagagccaatggtgcacattggtttaagcccagagatcctgcttgagccctggactcatcttsggaagggccatgggaggtcctggctagagttctgcccaaccttgaccaaccccagcaatttttccaaaagccagtcaagggcattacatttgttcctggg

SEQ ID NO: 54389 - DNA, 201 bp, Homo sapiens
ctgggtgccagtccatctcaagtgccatattctgtgatcacggatgttggctccccctcgccctatgcaagcaaacacactctcacctcctctcccagccycccggagctctgagcacgccccacgcatggtgcaggagggactggacagatctgaggaaggccgtaaaatggggacaggaggattcagctcaggcgtgag

SEQ ID NO: 54390 - DNA, 201 bp, Homo sapiens; identical to SEQ ID NO: 54363

SEQ ID NO: 54391 - DNA, 201 bp, Homo sapiens
atcacggatgttggctccccctcgccctatgcaagcaaacacactctcacctcctctcccagccccccggagctctgagcacgccccacgcatggtgcagragggactggacagatctgaggaaggccgtaaaatggggacaggaggattcagctcaggcgtgagggaagaggtcctctggccccctgaagatgagaatca

SEQ ID NO: 54392 - DNA, 201 bp, Homo sapiens
ataagctcattttaattgccagaaacaaaggtgtggtgttgggtggctgtggtgacaaatccattcgtttccgtcccacgctggtcttcagggatcaccaygctcacctgttcctcaatattttcagtgacatcttagcagacttcaagtaaagaagccatttccactacagtgagaaagcccggatcccaacagttgtca

SEQ ID NO: 54393 - DNA, 201 bp, Homo sapiens
cagccccccggagctctgagcacgccccacgcatggtgcaggagggactggacagatctgaggaaggccgtaaaatggggacaggaggattcagctcaggmgtgagggaagaggtcctctggccccctgaagatgagaatcacccctctcagtgcacctggggatccccctaaactgtgaattctgccctggacagggctt

SEQ ID NO: 54394 - DNA, 201 bp, Homo sapiens
acaaagatgagataaaacattgtccctgcccccgggggctcacatgccactggaaacaacagactcttaaactaacaattcaagcaggcgccaagtgctaygacagaggtgtgaataaaagcatcaggaaatcggatggagaaccaccattcacccaagggtcagaggaggtttcaaagaaaaggtgtcattggagcagtg

SEQ ID NO: 54395 - DNA, 201 bp, Homo sapiens
ccccccggagctctgagcacgccccacgcatggtgcaggagggactggacagatctgaggaaggccgtaaaatggggacaggaggattcagctcaggcgtragggaagaggtcctctggccccctgaagatgagaatcacccctctcagtgcacctggggatccccctaaactgtgaattctgccctggacagggctttgc

SEQ ID NO: 54396 - DNA, 201 bp, Homo sapiens; identical to SEQ ID NO: 54364

SEQ ID NO: 54397 - DNA, 201 bp, Homo sapiens
gagccacatggatcccgagacttgtgttctcttggctgaaaacactgaggtgctcccatctgtgcgtggcccatgagctgggatggtcctccagctgcccmcaaggtccgcccctctgtctctgcaccacctgtttgcataaacacactttgctacaatcttgctagtgcgttttcttaaaagataatctatttactgtaa

SEQ ID NO: 54398 - DNA, 201 bp, Homo sapiens
gaggtgctcccatctgtgcgtggcccatgagctgggatggtcctccagctgcccacaaggtccgcccctctgtctctgcaccacctgtttgcataaacacmctttgctacaatcttgctagtgcgttttcttaaaagataatctatttactgtaaaaataaattggactttgcaaaagcttttagaaggaaaagaaagagg

SEQ ID NO: 54399 - DNA, 201 bp, Homo sapiens
ctcttggctgaaaacactgaggtgctcccatctgtgcgtggcccatgagctgggatggtcctccagctgcccacaaggtccgcccctctgtctctgcaccmcctgtttgcataaacacactttgctacaatcttgctagtgcgttttcttaaaagataatctatttactgtaaaaataaattggactttgcaaaagctttt

SEQ ID NO: 54400 - DNA, 201 bp, Homo sapiens
attgggttccggattgctgagattttcatgcggcacggctgccatacggtgattgccagtaggagcctgccgcgagtgctgacgagatgggttttcaccaygttgaccaggctggtctcgaattcctgacctcaggtgatccgcccacctcagcctcccaaagtgccaggattacaggtgtgaaccactgtgcccggccgg

SEQ ID NO: 54401 - DNA, 201 bp, Homo sapiens; identical to SEQ ID NO: 54397

SEQ ID NO: 54402 - DNA, 201 bp, Homo sapiens; identical to SEQ ID NO: 54398

SEQ ID NO: 54403 - DNA, 201 bp, Homo sapiens; identical to SEQ ID NO: 54399

SEQ ID NO: 54404 - DNA, 201 bp, Homo sapiens; identical to SEQ ID NO: 54397

SEQ ID NO: 54405 - DNA, 201 bp, Homo sapiens; identical to SEQ ID NO: 54398

SEQ ID NO: 54406 - DNA, 201 bp, Homo sapiens; identical to SEQ ID NO: 54399

SEQ ID NO: 54407 - DNA, 201 bp, Homo sapiens
ctggtgctgatcccgctgcacgcggcgccgcatcaagccgtggcggagatcgacgcgctctacgacgtgtacctggacgtgatcgacaagtggggcaccgmcgacatgctgttcctgggcgacttcaacgccgactgcagctatgtgcgggcgcaggactgggccgccatccgtctgaggagcagtgaggtcttcaagtgg

SEQ ID NO: 54408 - DNA, 201 bp, Homo sapiens; identical to SEQ ID NO: 54407

SEQ ID NO: 54409 - DNA, 201 bp, Homo sapiens; identical to SEQ ID NO: 54407

SEQ ID NO: 54410 - DNA, 201 bp, Homo sapiens
agaatcagacttttgaagatgaatgactttggagaagcaaattaaacatttggccctgagccagcagatcaagcaaatgtctatctttgcgcatgggttgktttttttttttttctttttattctacttggtcagctttgggacgatagtgcagctttgggtgatcttgaaaatcaaatactatcctatactccagctgct

SEQ ID NO: 54411 - DNA, 201 bp, Homo sapiens
gaagatgaatgactttggagaagcaaattaaacatttggccctgagccagcagatcaagcaaatgtctatctttgcgcatgggttgttttttttttttttytttttattctacttggtcagctttgggacgatagtgcagctttgggtgatcttgaaaatcaaatactatcctatactccagctgcttaacttcattttat

SEQ ID NO: 54412 - DNA, 201 bp, Homo sapiens
ccacctaccgcgtcgtggcccattccagtgtgttccgcgtgctgaggaggccccaggagtttgtcaaccggacccctgaaaccgtgttcatcttctggggrcccccgagcaagatgcagaagccccagggcagcctcgtgcgtgtgatccagcgagcgggcctggtgttccccaacatggaagcatatgccgtctctcccg

SEQ ID NO: 54413 - DNA, 201 bp, Homo sapiens
aaactccttcagggttgggggactctgaaggaaacgggacaaaaccttaagctgttttcttagcccctcagccagctgccattagcttggctcttaaaggrccaggcctccttttctgccctctagcagggaggttttccaactgttggaggcgcctttggggctgcccctttgtctggagtcactgggggcttccgaggg

SEQ ID NO: 54414 - DNA, 201 bp, Homo sapiens
tttattaaagctgggcctcagtggggtgtgtttgtctcctgctcttctggagcctggaaggaaagggcttcaggaggaggctgtgaggctggagggaccaratggaggaggccagcagctagccattgcacactggggtgatgggtgggggcggtgactgccccagacttggttttgtaatgatttgtacaggaataaaca

SEQ ID NO: 54415 - DNA, 201 bp, Homo sapiens
gagattgtgtgggggtagaagctgtctggaggcccggccagagaatttgtggggttgtggaggttgtgggggcggtggggaggtcccagaggtgggaggcyggcatccaggtcttggctctgccctgagaccttggacaaacccttccccctctctgggcacccttctgcccacaccagtttccagtgcggagtctgagac

SEQ ID NO: 54416 - DNA, 201 bp, Homo sapiens
agtgtacaatccgcatgaatgatgcacccaccactggctactcagctgatgtgggcaacaagaccacctaccgcgtcgtggcccattccagtgtgttccgygtgctgaggaggccccaggagtttgtcaaccggacccctgaaaccgtgttcatcttctgggggcccccgagcaagatgcagaagccccagggcagcctcg

SEQ ID NO: 54417 - DNA, 201 bp, Homo sapiens
gggggtatttctgagtcaatctgaggctaaggacatgtcctttcccatgaggccttggttcagagccccaggaatggaccccccaatcactccccactctsctgggataatggggtcctgtcccaaggagctgggaacttggtgttgccccctcaatttccagcaccagaaagagagattgtgtgggggtagaagctgtct

SEQ ID NO: 54418 - DNA, 201 bp, Homo sapiens
ggagtgtctcccagccaatcagggccttgaggaggatgtatcctccagccaatcagggcctggggaatctgttggcgaatcagggatttgggagtctatgyggttaatcaggggtgtctttcttgtgcagtcagggtctgcgcacagtcaatcagggtagagggggtatttctgagtcaatctgaggctaaggacatgtcc

SEQ ID NO: 54419 - DNA, 201 bp, Homo sapiens
tctcggtgccaccagtgtgtgattgtcagcagctccagccacctgctgggcaccaagctgggccctgagatcgagcgggctgagtgtacaatccgcatgartgatgcacccaccactggctactcagctgatgtgggcaacaagaccacctaccgcgtcgtggcccattccagtgtgttccgcgtgctgaggaggccccag

SEQ ID NO: 54420 - DNA, 201 bp, Homo sapiens
tccccattctcggcaacaagacactgccctctcggtgccaccagtgtgtgattgtcagcagctccagccacctgctgggcaccaagctgggccctgagatygagcgggctgagtgtacaatccgcatgaatgatgcacccaccactggctactcagctgatgtgggcaacaagaccacctaccgcgtcgtggcccattcca

SEQ ID NO: 54421 - DNA, 201 bp, Homo sapiens
caggcactttattaaagctgggcctcagtggggtgtgtttgtctcctgctcttctggagcctggaaggaaagggcttcaggaggaggctgtgaggctggarggaccagatggaggaggccagcagctagccattgcacactggggtgatgggtgggggcggtgactgccccagacttggttttgtaatgatttgtacagga

SEQ ID NO: 54422 - DNA, 201 bp, Homo sapiens
ccacatccctgcccccagggccacctgcaggacgccgacacctacccctcagcagacgccggagagaaatgagtagcaacaaagagcagcggtcagcagtrttcgtgatcctctttgccctcatcaccatcctcatcctctacagctccaacagtgccaatgaggtcttccattacggctccctgcggggccgtagccgcc

SEQ ID NO: 54423 - DNA, 201 bp, Homo sapiens; identical to SEQ ID NO: 54412

SEQ ID NO: 54424 - DNA, 201 bp, Homo sapiens; identical to SEQ ID NO: 54413

SEQ ID NO: 54425 - DNA, 201 bp, Homo sapiens; identical to SEQ ID NO: 54414

SEQ ID NO: 54426 - DNA, 201 bp, Homo sapiens; identical to SEQ ID NO: 54415

SEQ ID NO: 54427 - DNA, 201 bp, Homo sapiens; identical to SEQ ID NO: 54416

SEQ ID NO: 54428 - DNA, 201 bp, Homo sapiens; identical to SEQ ID NO: 54417

SEQ ID NO: 54429 - DNA, 201 bp, Homo sapiens; identical to SEQ ID NO: 54418

SEQ ID NO: 54430 - DNA, 201 bp, Homo sapiens; identical to SEQ ID NO: 54419

SEQ ID NO: 54431 - DNA, 201 bp, Homo sapiens; identical to SEQ ID NO: 54420

SEQ ID NO: 54432 - DNA, 201 bp, Homo sapiens; identical to SEQ ID NO: 54421

SEQ ID NO: 54433 - DNA, 201 bp, Homo sapiens; identical to SEQ ID NO: 54422

SEQ ID NO: 54434 - DNA, 201 bp, Homo sapiens; identical to SEQ ID NO: 54412

SEQ ID NO: 54435 - DNA, 201 bp, Homo sapiens; identical to SEQ ID NO: 54413

SEQ ID NO: 54436 - DNA, 201 bp, Homo sapiens; identical to SEQ ID NO: 54414

SEQ ID NO: 54437 - DNA, 201 bp, Homo sapiens; identical to SEQ ID NO: 54415

SEQ ID NO: 54438 - DNA, 201 bp, Homo sapiens; identical to SEQ ID NO: 54416

SEQ ID NO: 54439 - DNA, 201 bp, Homo sapiens; identical to SEQ ID NO: 54417

SEQ ID NO: 54440 - DNA, 201 bp, Homo sapiens; identical to SEQ ID NO: 54418

SEQ ID NO: 54441 - DNA, 201 bp, Homo sapiens; identical to SEQ ID NO: 54419

SEQ ID NO: 54442 - DNA, 201 bp, Homo sapiens; identical to SEQ ID NO: 54420

SEQ ID NO: 54443 - DNA, 201 bp, Homo sapiens; identical to SEQ ID NO: 54421

SEQ ID NO: 54444 - DNA, 201 bp, Homo sapiens; identical to SEQ ID NO: 54422

SEQ ID NO: 54445 - DNA, 201 bp, Homo sapiens; identical to SEQ ID NO: 54412

SEQ ID NO: 54446 - DNA, 201 bp, Homo sapiens; identical to SEQ ID NO: 54413

SEQ ID NO: 54447 - DNA, 201 bp, Homo sapiens; identical to SEQ ID NO: 54414

SEQ ID NO: 54448 - DNA, 201 bp, Homo sapiens; identical to SEQ ID NO: 54415

SEQ ID NO: 54449 - DNA, 201 bp, Homo sapiens; identical to SEQ ID NO: 54416

SEQ ID NO: 54450 - DNA, 201 bp, Homo sapiens; identical to SEQ ID NO: 54417

SEQ ID NO: 54451 - DNA, 201 bp, Homo sapiens; identical to SEQ ID NO: 54418

SEQ ID NO: 54452 - DNA, 201 bp, Homo sapiens; identical to SEQ ID NO: 54419

SEQ ID NO: 54453 - DNA, 201 bp, Homo sapiens; identical to SEQ ID NO: 54420

SEQ ID NO: 54454 - DNA, 201 bp, Homo sapiens; identical to SEQ ID NO: 54421

SEQ ID NO: 54455 - DNA, 201 bp, Homo sapiens; identical to SEQ ID NO: 54422

SEQ ID NO: 54456 - DNA, 201 bp, Homo sapiens
ggacatgctccgggatgccatggtggccaaagtcaatacttccaaaggcttcctgattgatggctacccgcgggaggtgcagcaaggagaagagtttgagygacggattggacagcccacactgctgctgtatgtggacgcaggccctgagaccatgacccagcggctcttgaaacgtggagagaccagcgggcgtgtgga

SEQ ID NO: 54457 - DNA, 201 bp, Homo sapiens
gctcagggaagggcacccagtgtgagaagatcgtgcagaagtatggctacacccacctctccaccggggacctcctgcggtccgaggtcagctcaggctcrgccaggggcaagaagctgtcggaaatcatggagaaggggcagctggttccactggagacagtgttggacatgctccgggatgccatggtggccaaagtca

SEQ ID NO: 54458 - DNA, 201 bp, Homo sapiens
acagtgtcttctcccaggtctgcacccacctggacgccctaaagtagcaacgctggagccgcttccccagctcagagccccgccccaccccgtcctgattmgaggtcctcctggcctgagcgcagcgcctccaccctgccctgctgagcacagacggaggaagccgcttatcctgttttcatggacagctgagcactaaag

SEQ ID NO: 54459 - DNA, 201 bp, Homo sapiens
tgcagaagtatggctacacccacctctccaccggggacctcctgcggtccgaggtcagctcaggctcggccaggggcaagaagctgtcggaaatcatggaraaggggcagctggttccactggagacagtgttggacatgctccgggatgccatggtggccaaagtcaatacttccaaaggcttcctgattgatggctacc

SEQ ID NO: 54460 - DNA, 201 bp, Homo sapiens
cccagcggctcttgaaacgtggagagaccagcgggcgtgtggacgacaatgaggagaccatcaaaaagcggctggagacctattacaaggccacagaaccygtcatcgccttctatgagaaacgtggcattgtgcgcaaggtcaacgctgagggctccgtggacagtgtcttctcccaggtctgcacccacctggacgccc

SEQ ID NO: 54461 - DNA, 201 bp, Homo sapiens
tggaagagaagctgaagaaaaccaagatcatctttgtggtgggtgggcctggctcagggaagggcacccagtgtgagaagatcgtgcagaagtatggctayacccacctctccaccggggacctcctgcggtccgaggtcagctcaggctcggccaggggcaagaagctgtcggaaatcatggagaaggggcagctggttc

SEQ ID NO: 54462 - DNA, 201 bp, Homo sapiens
gctcttgaaacgtggagagaccagcgggcgtgtggacgacaatgaggagaccatcaaaaagcggctggagacctattacaaggccacagaacccgtcatcrccttctatgagaaacgtggcattgtgcgcaaggtcaacgctgagggctccgtggacagtgtcttctcccaggtctgcacccacctggacgccctaaagta

SEQ ID NO: 54463 - DNA, 201 bp, Homo sapiens
cttcctgattgatggctacccgcgggaggtgcagcaaggagaagagtttgagcgacggattggacagcccacactgctgctgtatgtggacgcaggccctsagaccatgacccagcggctcttgaaacgtggagagaccagcgggcgtgtggacgacaatgaggagaccatcaaaaagcggctggagacctattacaaggc

SEQ ID NO: 54464 - DNA, 201 bp, Homo sapiens
ctacccgcgggaggtgcagcaaggagaagagtttgagcgacggattggacagcccacactgctgctgtatgtggacgcaggccctgagaccatgacccagyggctcttgaaacgtggagagaccagcgggcgtgtggacgacaatgaggagaccatcaaaaagcggctggagacctattacaaggccacagaacccgtcat

SEQ ID NO: 54465 - DNA, 201 bp, Homo sapiens; identical to SEQ ID NO: 54456

SEQ ID NO: 54466 - DNA, 201 bp, Homo sapiens; identical to SEQ ID NO: 54457

SEQ ID NO: 54467 - DNA, 201 bp, Homo sapiens; identical to SEQ ID NO: 54458

SEQ ID NO: 54468 - DNA, 201 bp, Homo sapiens; identical to SEQ ID NO: 54459

SEQ ID NO: 54469 - DNA, 201 bp, Homo sapiens; identical to SEQ ID NO: 54460

SEQ ID NO: 54470 - DNA, 201 bp, Homo sapiens; identical to SEQ ID NO: 54461

SEQ ID NO: 54471 - DNA, 159 bp, Homo sapiens
ttctgggagtttcgaggggagcagctctgcagttgtgtggccgctgtttatgtccctcgtgccatcctcactgtcccagcccctccagcgggaacccaggtggatgggagggggctactgcccttctgtgacagagcactgacacggctcccgggacct

SEQ ID NO: 54472 - DNA, 201 bp, Homo sapiens; identical to SEQ ID NO: 54462

SEQ ID NO: 54473 - DNA, 201 bp, Homo sapiens; identical to SEQ ID NO: 54463

SEQ ID NO: 54474 - DNA, 201 bp, Homo sapiens; identical to SEQ ID NO: 54464

SEQ ID NO: 54475 - DNA, 201 bp, Homo sapiens; identical to SEQ ID NO: 54456

SEQ ID NO: 54476 - DNA, 194 bp, Homo sapiens
atggcaacatatgttgtggttgctaagcccccactgccgggggaggcgggtgatgggccggcccagggcctgagaggggaagggcagggtgcayaggagacacggcaggacgggaccatgggctgctgctcctcgagtgacccccgcagagaagacgatctgagagccagagagaagctgaagaaaaccaagat

SEQ ID NO: 54477 - DNA, 201 bp, Homo sapiens
ggcaacatatgttgtggttgctaagcccccactgccgggggaggcgggtgatgggccggcccagggcctgagaggggaagggcagggtgcacaggagacayggcaggacgggaccatgggctgctgctcctcgagtgacccccgcagagaagacgatctgagagccagagagaagctgaagaaaaccaagatcatctttgt

SEQ ID NO: 54478 - DNA, 201 bp, Homo sapiens; identical to SEQ ID NO: 54457

SEQ ID NO: 54479 - DNA, 201 bp, Homo sapiens; identical to SEQ ID NO: 54458

SEQ ID NO: 54480 - DNA, 201 bp, Homo sapiens; identical to SEQ ID NO: 54459

SEQ ID NO: 54481 - DNA, 201 bp, Homo sapiens; identical to SEQ ID NO: 54460

SEQ ID NO: 54482 - DNA, 201 bp, Homo sapiens
ccagagagaagctgaagaaaaccaagatcatctttgtggtgggtgggcctggctcagggaagggcacccagtgtgagaagatcgtgcagaagtatggctayacccacctctccaccggggacctcctgcggtccgaggtcagctcaggctcggccaggggcaagaagctgtcggaaatcatggagaaggggcagctggttc

SEQ ID NO: 54483 - DNA, 201 bp, Homo sapiens; identical to SEQ ID NO: 54462

SEQ ID NO: 54484 - DNA, 201 bp, Homo sapiens; identical to SEQ ID NO: 54463

SEQ ID NO: 54485 - DNA, 201 bp, Homo sapiens; identical to SEQ ID NO: 54464

SEQ ID NO: 54486 - DNA, 201 bp, Homo sapiens
ctactggttcatctcccgggacaaagaggaaactttgccacttgaagatgggtggtgggggccaggcacgaggtccgcagccagggaggacgacagcatcygccctttcaaggtggaaacgtcagatgaggagatccacgacttacaccagaggatcgataagttccgtttcaccccacctttggaggacagctgcttcca

SEQ ID NO: 54487 - DNA, 201 bp, Homo sapiens
gaggatggaggcctggaaaggaagttctccctggacgacctgctgaccaacgtcatgctctactggacaacaggcaccatcatctcctcccagcgcttctmcaaggagaacctgggacagggctggatgacccagaagcatgagcggatgaaggtctatgtgcccactggcttctctgccttcccttttgagctattgcac

SEQ ID NO: 54488 - DNA, 201 bp, Homo sapiens
tctctaccctgaccctcctcctgggacagcgtttcgggaggtttcttggcctcactgagagggatgtggagctgctgtaccccgtcaaggagaaggtattytacagcctgatgagggagagcggctacatgcacatccagtgcaccaagcctgacaccgtaggctctgctctgaatgactctcctgtgggtctggctgcct

SEQ ID NO: 54489 - DNA, 201 bp, Homo sapiens
ggctgggcttccaggaattctacattcaaggaggggactgggggtccctgatctgcactaatatggcccagctggtgcccagccacgtgaaaggcctgcayttgaacatggctttggttttaagcaacttctctaccctgaccctcctcctgggacagcgtttcgggaggtttcttggcctcactgagagggatgtggagc

SEQ ID NO: 54490 - DNA, 201 bp, Homo sapiens
ctttggttttaagcaacttctctaccctgaccctcctcctgggacagcgtttcgggaggtttcttggcctcactgagagggatgtggagctgctgtacccygtcaaggagaaggtattctacagcctgatgagggagagcggctacatgcacatccagtgcaccaagcctgacaccgtaggctctgctctgaatgactctc

SEQ ID NO: 54491 - DNA, 201 bp, Homo sapiens
atgaggccactggccagggctatgctgcaccagaccaatggcaccgcccccacccctcccagcgcaggggcagcttggagcagaggcagcactggccaccrctgcgggggcaagtcagcgtcaagagagtccctgagtgagaaggcccagataagcccaggccccccaggccagcggacaggcacaggcagggcctacaga

SEQ ID NO: 54492 - DNA, 201 bp, Homo sapiens
actccaactacctgaagaaagtcatctcctactggcggaatgaatttgactggaagaagcaggtggagattctcaacagataccctcacttcaagactaarattgaagggctggacatccacttcatccacgtgaagcccccccagctgcccgcaggccataccccgaagcccttgctgatggtgcacggctggcccggct

SEQ ID NO: 54493 - DNA, 162 bp, Homo sapiens
ctgacttggcaggactgtgcaattgtcagaaggccgtggggagtgggggccagtgcctgcakcctgccctgcctctctcacaggcccttagagcatcgccaggtgcagagctccacagctctctttcccaaggagtaatcagagggtgagaacgtggagcct

SEQ ID NO: 54494 - DNA, 201 bp, Homo sapiens
gccagcggacaggcacaggcagggcctacagaggtgccaaggccccaggccagttgtgctaggagcctggacctgctcttccacacccccatcccgccccwactgcacaggcttgtgccttggtgccccctggaggcagcagggaggaggcttctcaggcagaagtcttaagttgcatcccattccccagaatccccagga

SEQ ID NO: 54495 - DNA, 166 bp, Homo sapiens
ctgacttggcaggactgtgcaattgtcagaaggccgtggggagtgggggccagtgcctgcagcctrccctgcctctctcacaggcccttagagcatcgccaggtgcagagctccacagctctctttcccaaggagtaatcagagggtgagaacgtggagcctggtg

SEQ ID NO: 54496 - DNA, 201 bp, Homo sapiens
tgctgaccaacgtcatgctctactggacaacaggcaccatcatctcctcccagcgcttctacaaggagaacctgggacagggctggatgacccagaagcawgagcggatgaaggtctatgtgcccactggcttctctgccttcccttttgagctattgcacacgcctgaaaagtgggtgaggttcaagtacccaaagctca

SEQ ID NO: 54497 - DNA, 201 bp, Homo sapiens
caccagaggatcgataagttccgtttcaccccacctttggaggacagctgcttccactatggcttcaactccaactacctgaagaaagtcatctcctactrgcggaatgaatttgactggaagaagcaggtggagattctcaacagataccctcacttcaagactaagattgaagggctggacatccacttcatccacgtg

SEQ ID NO: 54498 - DNA, 201 bp, Homo sapiens
atattctagagaagttttccacctggaccaatacggaattccgatacctggaggatggaggcctggaaaggaagttctccctggacgacctgctgaccaaygtcatgctctactggacaacaggcaccatcatctcctcccagcgcttctacaaggagaacctgggacagggctggatgacccagaagcatgagcggatga

SEQ ID NO: 54499 - DNA, 201 bp, Homo sapiens
ctgcttccactatggcttcaactccaactacctgaagaaagtcatctcctactggcggaatgaatttgactggaagaagcaggtggagattctcaacagayaccctcacttcaagactaagattgaagggctggacatccacttcatccacgtgaagcccccccagctgcccgcaggccataccccgaagcccttgctgat

SEQ ID NO: 54500 - DNA, 201 bp, Homo sapiens
acattcaaggaggggactgggggtccctgatctgcactaatatggcccagctggtgcccagccacgtgaaaggcctgcacttgaacatggctttggttttragcaacttctctaccctgaccctcctcctgggacagcgtttcgggaggtttcttggcctcactgagagggatgtggagctgctgtaccccgtcaaggaga

SEQ ID NO: 54501 - DNA, 201 bp, Homo sapiens
atctcctattcctacatggttcgtgggggccactttgcggcctttgaggagccggagctgctcgcccaggacatccgcaagttcctgtcggtgctggagcrgcaatgacccacccctctccccccgcctgccacctccccccacaagtgccctccaggcttttcttggggaagataccccttttctgaggaatgagtttgc

SEQ ID NO: 54502 - DNA, 201 bp, Homo sapiens
gtgctgggctttgccatctactggttcatctcccgggacaaagaggaaactttgccacttgaagatgggtggtgggggccaggcacgaggtccgcagccasggaggacgacagcatccgccctttcaaggtggaaacgtcagatgaggagatccacgacttacaccagaggatcgataagttccgtttcaccccacctttg

SEQ ID NO: 54503 - DNA, 201 bp, Homo sapiens
cttctacaaggagaacctgggacagggctggatgacccagaagcatgagcggatgaaggtctatgtgcccactggcttctctgccttcccttttgagctaytgcacacgcctgaaaagtgggtgaggttcaagtacccaaagctcatctcctattcctacatggttcgtgggggccactttgcggcctttgaggagccgga

SEQ ID NO: 54504 - DNA, 201 bp, Homo sapiens
tgcctgcagcctgccctgcctctctcacaggcccttagagcatcgccaggtgcagagctccacagctctctttcccaaggagtaatcagagggtgagaacrtggagcctggtggacaggtgaaagcactgggatctttctgcccagaaaggggaaagttgcacatttatatcctagagggaagcgacagcagtgcttctcc

SEQ ID NO: 54505 - DNA, 201 bp, Homo sapiens
caggtggagattctcaacagataccctcacttcaagactaagattgaagggctggacatccacttcatccacgtgaagcccccccagctgcccgcaggccrtaccccgaagcccttgctgatggtgcacggctggcccggctctttctacgagttttataagatcatcccactcctgactgaccccaagaaccatggcctg

SEQ ID NO: 54506 - DNA, 201 bp, Homo sapiens
ataagttccgtttcaccccacctttggaggacagctgcttccactatggcttcaactccaactacctgaagaaagtcatctcctactggcggaatgaattygactggaagaagcaggtggagattctcaacagataccctcacttcaagactaagattgaagggctggacatccacttcatccacgtgaagcccccccagc

SEQ ID NO: 54507 - DNA, 201 bp, Homo sapiens
ggccaggcacgaggtccgcagccagggaggacgacagcatccgccctttcaaggtggaaacgtcagatgaggagatccacgacttacaccagaggatcgayaagttccgtttcaccccacctttggaggacagctgcttccactatggcttcaactccaactacctgaagaaagtcatctcctactggcggaatgaatttg

SEQ ID NO: 54508 - DNA, 201 bp, Homo sapiens
cttctcaggcagaagtcttaagttgcatcccattccccagaatccccaggagggagaagagggatgggctgcccctccttcctgccagagccacagctcamgggcagtgggatggccctgcacccagcccaggtaccccttcctctgtgccgaccatgctgtcctttggctccgaggaggccctgagcactgcccaccccc

SEQ ID NO: 54509 - DNA, 201 bp, Homo sapiens; identical to SEQ ID NO: 54486

SEQ ID NO: 54510 - DNA, 201 bp, Homo sapiens; identical to SEQ ID NO: 54487

SEQ ID NO: 54511 - DNA, 201 bp, Homo sapiens; identical to SEQ ID NO: 54488

SEQ ID NO: 54512 - DNA, 201 bp, Homo sapiens; identical to SEQ ID NO: 54489

SEQ ID NO: 54513 - DNA, 201 bp, Homo sapiens; identical to SEQ ID NO: 54490

SEQ ID NO: 54514 - DNA, 201 bp, Homo sapiens; identical to SEQ ID NO: 54491

SEQ ID NO: 54515 - DNA, 201 bp, Homo sapiens; identical to SEQ ID NO: 54492

SEQ ID NO: 54516 - DNA, 201 bp, Homo sapiens; identical to SEQ ID NO: 54494

SEQ ID NO: 54517 - DNA, 201 bp, Homo sapiens; identical to SEQ ID NO: 54497

SEQ ID NO: 54518 - DNA, 201 bp, Homo sapiens; identical to SEQ ID NO: 54496

SEQ ID NO: 54519 - DNA, 201 bp, Homo sapiens; identical to SEQ ID NO: 54499

SEQ ID NO: 54520 - DNA, 201 bp, Homo sapiens; identical to SEQ ID NO: 54498

SEQ ID NO: 54521 - DNA, 201 bp, Homo sapiens; identical to SEQ ID NO: 54500

SEQ ID NO: 54522 - DNA, 201 bp, Homo sapiens; identical to SEQ ID NO: 54501

SEQ ID NO: 54523 - DNA, 201 bp, Homo sapiens; identical to SEQ ID NO: 54502

SEQ ID NO: 54524 - DNA, 201 bp, Homo sapiens; identical to SEQ ID NO: 54503

SEQ ID NO: 54525 - DNA, 201 bp, Homo sapiens; identical to SEQ ID NO: 54505

SEQ ID NO: 54526 - DNA, 201 bp, Homo sapiens; identical to SEQ ID NO: 54506

SEQ ID NO: 54527 - DNA, 201 bp, Homo sapiens; identical to SEQ ID NO: 54507

SEQ ID NO: 54528 - DNA, 201 bp, Homo sapiens; identical to SEQ ID NO: 54508

SEQ ID NO: 54529 - DNA, 201 bp, Homo sapiens; identical to SEQ ID NO: 54486

SEQ ID NO: 54530 - DNA, 201 bp, Homo sapiens; identical to SEQ ID NO: 54487

SEQ ID NO: 54531 - DNA, 201 bp, Homo sapiens; identical to SEQ ID NO: 54488

SEQ ID NO: 54532 - DNA, 201 bp, Homo sapiens; identical to SEQ ID NO: 54489

SEQ ID NO: 54533 - DNA, 201 bp, Homo sapiens; identical to SEQ ID NO: 54490

SEQ ID NO: 54534 - DNA, 201 bp, Homo sapiens; identical to SEQ ID NO: 54491

SEQ ID NO: 54535 - DNA, 201 bp, Homo sapiens; identical to SEQ ID NO: 54492

SEQ ID NO: 54536 - DNA, 201 bp, Homo sapiens; identical to SEQ ID NO: 54494

SEQ ID NO: 54537 - DNA, 201 bp, Homo sapiens; identical to SEQ ID NO: 54497

SEQ ID NO: 54538 - DNA, 201 bp, Homo sapiens; identical to SEQ ID NO: 54496

SEQ ID NO: 54539 - DNA, 201 bp, Homo sapiens; identical to SEQ ID NO: 54499

SEQ ID NO: 54540 - DNA, 201 bp, Homo sapiens; identical to SEQ ID NO: 54498

SEQ ID NO: 54541 - DNA, 201 bp, Homo sapiens; identical to SEQ ID NO: 54500

SEQ ID NO: 54542 - DNA, 201 bp, Homo sapiens; identical to SEQ ID NO: 54501

SEQ ID NO: 54543 - DNA, 201 bp, Homo sapiens; identical to SEQ ID NO: 54502

SEQ ID NO: 54544 - DNA, 201 bp, Homo sapiens; identical to SEQ ID NO: 54503

SEQ ID NO: 54545 - DNA, 201 bp, Homo sapiens; identical to SEQ ID NO: 54505

SEQ ID NO: 54546 - DNA, 201 bp, Homo sapiens; identical to SEQ ID NO: 54506

SEQ ID NO: 54547 - DNA, 201 bp, Homo sapiens; identical to SEQ ID NO: 54507

SEQ ID NO: 54548 - DNA, 201 bp, Homo sapiens; identical to SEQ ID NO: 54508

SEQ ID NO: 54549 - DNA, 201 bp, Homo sapiens; identical to SEQ ID NO: 54486

SEQ ID NO: 54550 - DNA, 201 bp, Homo sapiens; identical to SEQ ID NO: 54487

SEQ ID NO: 54551 - DNA, 201 bp, Homo sapiens; identical to SEQ ID NO: 54488

SEQ ID NO: 54552 - DNA, 201 bp, Homo sapiens; identical to SEQ ID NO: 54489

SEQ ID NO: 54553 - DNA, 201 bp, Homo sapiens; identical to SEQ ID NO: 54490

SEQ ID NO: 54554 - DNA, 121 bp, Homo sapiens
atgaggccactggccagggctatgctgcaccagaccaatggcaccgcccccacccctcccagcgcaggggcagcttggagcagaggcagcactggccaccrctgcgggggcaagtcagcgt

SEQ ID NO: 54555 - DNA, 201 bp, Homo sapiens; identical to SEQ ID NO: 54492

SEQ ID NO: 54556 - DNA, 201 bp, Homo sapiens; identical to SEQ ID NO: 54497

SEQ ID NO: 54557 - DNA, 201 bp, Homo sapiens; identical to SEQ ID NO: 54496

SEQ ID NO: 54558 - DNA, 201 bp, Homo sapiens; identical to SEQ ID NO: 54499

SEQ ID NO: 54559 - DNA, 201 bp, Homo sapiens; identical to SEQ ID NO: 54498

SEQ ID NO: 54560 - DNA, 201 bp, Homo sapiens; identical to SEQ ID NO: 54500

SEQ ID NO: 54561 - DNA, 201 bp, Homo sapiens; identical to SEQ ID NO: 54501

SEQ ID NO: 54562 - DNA, 201 bp, Homo sapiens; identical to SEQ ID NO: 54502

SEQ ID NO: 54563 - DNA, 201 bp, Homo sapiens; identical to SEQ ID NO: 54503

SEQ ID NO: 54564 - DNA, 201 bp, Homo sapiens; identical to SEQ ID NO: 54505

SEQ ID NO: 54565 - DNA, 201 bp, Homo sapiens; identical to SEQ ID NO: 54506

SEQ ID NO: 54566 - DNA, 201 bp, Homo sapiens; identical to SEQ ID NO: 54507

SEQ ID NO: 54567 - DNA, 201 bp, Homo sapiens
gttaaagaaggcaggaggtttaatattgatttggtgtcaaaactgctgtattctcaaggattgctaattgatcttttaatcaaatcagatgttagtcgttmtgtagaatttaaaaatgtcactaggattcttgcatttcgggaaggaaaggtagaacaagttccttgttccagagcagatgtctttaatagcaaggaactc

SEQ ID NO: 54568 - DNA, 201 bp, Homo sapiens
attttattacagcataatcacacctcatttctttcatcagcagttgtcaccagacgctgttacttcctaaaatggcggacaatcttcccacagagtttgaygtggttataatagggacaggtttgcccgaatccatccttgcagctgcatgttcaagaagtggtcagagggttctgcatattgattcaagaagctactatg

SEQ ID NO: 54569 - DNA, 201 bp, Homo sapiens
ttgaagagattggtgctctgcagaaaaatccttctttgggggtgtctaataccttcactgaagttctggattctgcattacctgaagaaagccagttatcrtattttaatagcgacgaaatgcctgcaaaacacactcagaaaagtgatacagagatttcactagaagtaactgatgtagaggaatcagtggagaaggaaa

SEQ ID NO: 54570 - DNA, 201 bp, Homo sapiens
gtggagaaggaaaagtattgtggagataaaacttgtatgcacacagtttcagataaagatggagataaagatgaaagcaaatctacagtagaagataaggycgatgaaccaattagaaataggattacttactctcaaatagttaaagaaggcaggaggtttaatattgatttggtgtcaaaactgctgtattctcaagga

SEQ ID NO: 54571 - DNA, 201 bp, Homo sapiens
ccgcaggagacagagttccctgggccaggtgtcgtcaggcctattttggacgtgggaaaaataagcagtctcttgatgctgtggagaaagcagcgttcttygtgacgttagatgaaactgaagaaggatacagaagtgaagacccggatacgtcaatggacagctacgccaaatctctactacacggccgatgttacgaca

SEQ ID NO: 54572 - DNA, 201 bp, Homo sapiens
agaacggcatcatcactggcgtgtacccggcaagcccctccagttggcttatcgtggtggtgggcgtgatgacaacgatgtacgccaagatcgacccctcrttaggaataattgcaaaaatcaatcggactctggaaacggccaactgcatgtccagccagacgaagaacgtggtcagcggcgtgctgtttggcaccggcc

SEQ ID NO: 54573 - DNA, 201 bp, Homo sapiens
caccatccagcacatgagagacagcaagcacatcgtcgtgtaccatcgaggacgctacttcaaggtctggctctaccatgatgggcggctgctgaagcccygggagatggagcagcagatgcagaggatcctggacaatacctcggagcctcagcccggggaggccaggctggcagccctcaccgcaggagacagagttcc

SEQ ID NO: 54574 - DNA, 201 bp, Homo sapiens
gcagccctcaccgcaggagacagagttccctgggccaggtgtcgtcaggcctattttggacgtgggaaaaataagcagtctcttgatgctgtggagaaagyagcgttcttcgtgacgttagatgaaactgaagaaggatacagaagtgaagacccggatacgtcaatggacagctacgccaaatctctactacacggccga

SEQ ID NO: 54575 - DNA, 201 bp, Homo sapiens
cctcgttaggaataattgcaaaaatcaatcggactctggaaacggccaactgcatgtccagccagacgaagaacgtggtcagcggcgtgctgtttggcacyggcctgtgggtggccctcatcgtcaccatgcgctactccctgaaagtgctgctctcctaccacgggtggatgttcactgagcacggcaagatgagtcgtg

SEQ ID NO: 54576 - DNA, 201 bp, Homo sapiens
aggtggtttgacaagtcgttcacgtttgttgtcttcaaaaacgggaagatgggcctcaacgctgaacactcctgggcagatgcgccgatcgtggcccaccyttgggagtacgtcatgtccattgacagcctccagctgggctatgcggaggatgggcactgcaaaggcgacatcaatccgaacattccgtaccccaccagg

SEQ ID NO: 54577 - DNA, 201 bp, Homo sapiens
gaatcatcaagaaatgtcgcacgagcccagacgcctttgtgcagctggccctccagctggcgcactacaaggacatgggcaagttttgcctcacatacgargcctccatgacccggctcttccgagaggggaggacggagaccgtgcgctcctgcaccactgagtcatgcgacttcgtgcgggccatggtggacccggccc

SEQ ID NO: 54578 - DNA, 201 bp, Homo sapiens
ggcgtgatgacaacgatgtacgccaagatcgacccctcgttaggaataattgcaaaaatcaatcggactctggaaacggccaactgcatgtccagccagaygaagaacgtggtcagcggcgtgctgtttggcaccggcctgtgggtggccctcatcgtcaccatgcgctactccctgaaagtgctgctctcctaccacggg

SEQ ID NO: 54579 - DNA, 201 bp, Homo sapiens
gatgaaactgaagaaggatacagaagtgaagacccggatacgtcaatggacagctacgccaaatctctactacacggccgatgttacgacaggtggtttgrcaagtcgttcacgtttgttgtcttcaaaaacgggaagatgggcctcaacgctgaacactcctgggcagatgcgccgatcgtggcccacctttgggagtac

SEQ ID NO: 54580 - DNA, 201 bp, Homo sapiens
ggtgggcgtgatgacaacgatgtacgccaagatcgacccctcgttaggaataattgcaaaaatcaatcggactctggaaacggccaactgcatgtccagcyagacgaagaacgtggtcagcggcgtgctgtttggcaccggcctgtgggtggccctcatcgtcaccatgcgctactccctgaaagtgctgctctcctacca

SEQ ID NO: 54581 - DNA, 201 bp, Homo sapiens
gactctggaaacggccaactgcatgtccagccagacgaagaacgtggtcagcggcgtgctgtttggcaccggcctgtgggtggccctcatcgtcaccatgygctactccctgaaagtgctgctctcctaccacgggtggatgttcactgagcacggcaagatgagtcgtgccaccaagatctggatgggtatggtcaagat

SEQ ID NO: 54582 - DNA, 201 bp, Homo sapiens
gttttatctgagccttggagattatcaacaagccagacccctcagcagcaagtggagctgtttgacttggagaataacccagagtacgtgtccagcggagrgggctttggaccggttgctgatgacggctatggtgtgtcgtacatccttgtgggagagaacctcatcaatttccacatttcttccaagttctcttgccct

SEQ ID NO: 54583 - DNA, 201 bp, Homo sapiens
cctccgaggacgagggccgctcatggtgaacagcaactattatgccatggatctgctgtatatccttccaactcacattcaggcagcaagagccggcaacrccatccatgccatcctgctttacaggcgcaaactggaccgggaggaaatcaaaccaattcgtcttttgggatccacgattccactctgctccgctcagtg

SEQ ID NO: 54584 - DNA, 201 bp, Homo sapiens
gatgcgccgatcgtggcccacctttgggagtacgtcatgtccattgacagcctccagctgggctatgcggaggatgggcactgcaaaggcgacatcaatcygaacattccgtaccccaccaggctgcagtgggacatcccgggggaatgtcaagaggttatagagacctccctgaacaccgcaaatcttctggcaaacgac

SEQ ID NO: 54585 - DNA, 201 bp, Homo sapiens; identical to SEQ ID NO: 54571

SEQ ID NO: 54586 - DNA, 201 bp, Homo sapiens; identical to SEQ ID NO: 54572

SEQ ID NO: 54587 - DNA, 201 bp, Homo sapiens; identical to SEQ ID NO: 54573

SEQ ID NO: 54588 - DNA, 201 bp, Homo sapiens; identical to SEQ ID NO: 54574

SEQ ID NO: 54589 - DNA, 201 bp, Homo sapiens; identical to SEQ ID NO: 54575

SEQ ID NO: 54590 - DNA, 201 bp, Homo sapiens; identical to SEQ ID NO: 54576

SEQ ID NO: 54591 - DNA, 201 bp, Homo sapiens; identical to SEQ ID NO: 54577

SEQ ID NO: 54592 - DNA, 201 bp, Homo sapiens; identical to SEQ ID NO: 54578

SEQ ID NO: 54593 - DNA, 201 bp, Homo sapiens; identical to SEQ ID NO: 54579

SEQ ID NO: 54594 - DNA, 201 bp, Homo sapiens; identical to SEQ ID NO: 54580

SEQ ID NO: 54595 - DNA, 201 bp, Homo sapiens; identical to SEQ ID NO: 54581

SEQ ID NO: 54596 - DNA, 201 bp, Homo sapiens; identical to SEQ ID NO: 54582

SEQ ID NO: 54597 - DNA, 201 bp, Homo sapiens; identical to SEQ ID NO: 54583

SEQ ID NO: 54598 - DNA, 201 bp, Homo sapiens; identical to SEQ ID NO: 54584

SEQ ID NO: 54599 - DNA, 201 bp, Homo sapiens
tgcagtctaacccactaatcagttcttagattcaggggaagggcaggcaccaacaactcagaatgggggctttcggggagggcgcctagtccccccagctytaagcagccaggagggacctgcatctaagcatctgggttgccatggcaatggcatgccccccagctactgtatgcccccgacccccgcagaggcagaatg

SEQ ID NO: 54600 - DNA, 201 bp, Homo sapiens
cctacaatcaccagcacgaatacttcttcctgattgggccgccgctgctcatccccatgtatttccagtaccagatcatcatgaccatgatcgtccataaraactgggtggacctggcctgggccgtcagctactacatccggttcttcatcacctacatccctttctacggcatcctgggagccctccttttcctcaact

SEQ ID NO: 54601 - DNA, 201 bp, Homo sapiens
acaagatcgccccgctggtgaagtctctatgtgccaagcatggcattgaataccaggagaagccgctactgagggccctgctggacatcatcaggtccctraagaagtctgggaagctgtggctggacgcctaccttcacaaatgaagccacagcccccgggacaccgtggggaaggggtgcaggtggggtgatggccaga

SEQ ID NO: 54602 - DNA, 201 bp, Homo sapiens
ggcaatggcatgccccccagctactgtatgcccccgacccccgcagaggcagaatgaacccatagggagctgatcgtaatgtttatcatgttacttccccmcccctacattttttgaaataaaataaggaattttattctcacttcctgtgtttcctgcacgccaatgccaggccatggtattgggtgatagatgaggccc

SEQ ID NO: 54603 - DNA, 201 bp, Homo sapiens
tactgagggccctgctggacatcatcaggtccctgaagaagtctgggaagctgtggctggacgcctaccttcacaaatgaagccacagcccccgggacacygtggggaaggggtgcaggtggggtgatggccagaggaatgatgggcttttgttctgaggggtgtccgagaggctggtgtatgcactgctcacggacccca

SEQ ID NO: 54604 - DNA, 201 bp, Homo sapiens
aggggaagggcaggcaccaacaactcagaatgggggctttcggggagggcgcctagtccccccagctctaagcagccaggagggacctgcatctaagcatytgggttgccatggcaatggcatgccccccagctactgtatgcccccgacccccgcagaggcagaatgaacccatagggagctgatcgtaatgtttatcat

SEQ ID NO: 54605 - DNA, 201 bp, Homo sapiens
ttagattcaggggaagggcaggcaccaacaactcagaatgggggctttcggggagggcgcctagtccccccagctctaagcagccaggagggacctgcatytaagcatctgggttgccatggcaatggcatgccccccagctactgtatgcccccgacccccgcagaggcagaatgaacccatagggagctgatcgtaatg

SEQ ID NO: 54606 - DNA, 201 bp, Homo sapiens; identical to SEQ ID NO: 54599

SEQ ID NO: 54607 - DNA, 201 bp, Homo sapiens; identical to SEQ ID NO: 54600

SEQ ID NO: 54608 - DNA, 201 bp, Homo sapiens; identical to SEQ ID NO: 54601

SEQ ID NO: 54609 - DNA, 201 bp, Homo sapiens; identical to SEQ ID NO: 54602

SEQ ID NO: 54610 - DNA, 201 bp, Homo sapiens; identical to SEQ ID NO: 54603

SEQ ID NO: 54611 - DNA, 201 bp, Homo sapiens; identical to SEQ ID NO: 54604

SEQ ID NO: 54612 - DNA, 201 bp, Homo sapiens; identical to SEQ ID NO: 54605

SEQ ID NO: 54613 - DNA, 201 bp, Homo sapiens
ataaacactgaggactccaaaaggggggcaaggaggaagaggggcaggggttaaaaagctacctattgaatactatgttccctatttgggtgatgggttcrttagaagtccaaacctcagcagcacacaatatactcatgtaacaagcctgcacatgtaccccagaatctaaaataaaaataaaaagaaaaacaaagaatg

SEQ ID NO: 54614 - DNA, 201 bp, Homo sapiens
agtcccatggtgctgaacaccaactcaccctaattaaggttgatgacaacaagaaaccagaggaatgggtaggcctctgtaaaactgagagggaaaccccygaaaagtggttggctgcagttgtgcagtagttaaggactaggtcaaagaatcttaagtcaaggatgtcatcgaagagtatttcaaatgtaagaaatgaac

SEQ ID NO: 54615 - DNA, 201 bp, Homo sapiens
ctcagaacctgtttttgttccagcaccaggaaccaatgaagaagatggtggggttattctttctgtggtgatcactcccaaccagaatgaaagcaattttmtcctagttttggatgccaagaactttgaagagctgggccgagcagaggtacctgtgcagatgccttatgggttccatggtaccttcatacccatctgatg

SEQ ID NO: 54616 - DNA, 201 bp, Homo sapiens
ataaagcaaatgacatggcaactggatcttgaaggatgagttagttttcaaaaggtacatgggaaatactcctcagaaaaaagccgtctttgggcagtgtsggggtctgccatgtgttgcaccgctgctgaccacagtggaagaggctccacggggcatctctgctcgagtctggggacattttcctaagtggctcaatgg

SEQ ID NO: 54617 - DNA, 201 bp, Homo sapiens
actgccctcactcatcatggcctagcatgtgcaatttgtgaagctgccaaagcgttagacaagcaccaagcccacttttgtctgcctgcacccaactgcartgagcctatgtatgtcaagttggtggagtcccatggtgctgaacaccaactcaccctaattaaggttgatgacaacaagaaaccagaggaatgggtaggc

SEQ ID NO: 54618 - DNA, 201 bp, Homo sapiens
atgaataaagtggacattgaaactctggaaaaaacagaaaaggtagattggagcaaatttattgctgtgaatggagcaactgcacatcctcattatgaccyggatggaacagcatacaatatggggaactcctttgggccatatggtttctcctataaggttattcgggttcctccagagaaggtggaccttggggagaca

SEQ ID NO: 54619 - DNA, 201 bp, Homo sapiens
cagaatttggcacactggctctcccggatccatgcaagaatgtttttgaacgtttcatgtccaggtttgagctgcctggtaaagctgcagccatgactgayaatactaatgtcaactatgtgcggtacaagggtgattactacctctgcactgagaccaactttatgaataaagtggacattgaaactctggaaaaaacag

SEQ ID NO: 54620 - DNA, 201 bp, Homo sapiens; identical to SEQ ID NO: 54613

SEQ ID NO: 54621 - DNA, 201 bp, Homo sapiens; identical to SEQ ID NO: 54614

SEQ ID NO: 54622 - DNA, 201 bp, Homo sapiens; identical to SEQ ID NO: 54615

SEQ ID NO: 54623 - DNA, 201 bp, Homo sapiens
cactgcagtggatttccttcctgtgatggtgcaccggctcccagttttcaaaaggtacatgggaaatactcctcagaaaaaagccgtctttgggcagtgtsggggtctgccatgtgttgcaccgctgctgaccacagtggaagaggctccacggggcatctctgctcgagtctggggacattttcctaagtggctcaatgg

SEQ ID NO: 54624 - DNA, 201 bp, Homo sapiens; identical to SEQ ID NO: 54617

SEQ ID NO: 54625 - DNA, 201 bp, Homo sapiens; identical to SEQ ID NO: 54618

SEQ ID NO: 54626 - DNA, 201 bp, Homo sapiens; identical to SEQ ID NO: 54619

SEQ ID NO: 54627 - DNA, 201 bp, Homo sapiens; identical to SEQ ID NO: 54613

SEQ ID NO: 54628 - DNA, 201 bp, Homo sapiens; identical to SEQ ID NO: 54614

SEQ ID NO: 54629 - DNA, 201 bp, Homo sapiens; identical to SEQ ID NO: 54615

SEQ ID NO: 54630 - DNA, 201 bp, Homo sapiens; identical to SEQ ID NO: 54616

SEQ ID NO: 54631 - DNA, 201 bp, Homo sapiens; identical to SEQ ID NO: 54617

SEQ ID NO: 54632 - DNA, 201 bp, Homo sapiens; identical to SEQ ID NO: 54618

SEQ ID NO: 54633 - DNA, 201 bp, Homo sapiens; identical to SEQ ID NO: 54619

SEQ ID NO: 54634 - DNA, 201 bp, Homo sapiens
agtggggaacccagaaggcccggaatctgttccccggagggtttcaggtgaccacagacacccagaaggagcctgaccgggcctcttgcactgactgagaygactcctcagggccccactcctggcagctgagtgctgcacctgccttctcgatcacgagcctgagaactgcacgggggagcagcccagactggctggaaa

SEQ ID NO: 54635 - DNA, 201 bp, Homo sapiens
gctctggcacgccgatgacgtcgccggcctcgtccagctccatgtcgccctccgtcgccaggatgcgctgcacggtctgcaggacgttggttgccatggtracatcgccgcagacaaacatgtggccccgctcgaggcacagcacgcggtgcacctccgcagccagctccgtcctcaggatgtcctgcacgttaccattgc

SEQ ID NO: 54636 - DNA, 201 bp, Homo sapiens
aactgcacctcgcccctgcctgaggccttcctggccaacctcttcgtgcaccctctcctgcctccgagagatctgagcccgacagccccctgtccagctgyggccacagccagcctccttgcctccatttcccgaattgcccaggaccccagctctgtgtccccaggaggcactgggggccagaagctggcccagctccca

SEQ ID NO: 54637 - DNA, 201 bp, Homo sapiens
cagacacccagaaggagcctgaccgggcctcttgcactgactgagacgactcctcagggccccactcctggcagctgagtgctgcacctgccttctcgatyacgagcctgagaactgcacgggggagcagcccagactggctggaaaccatgttttcagagtgcagggtcaagtggcgtcctctggacagatgtgagaagg

SEQ ID NO: 54638 - DNA, 201 bp, Homo sapiens
gcgcttgggaaggctcttctccggggcacagtgctagtggggcctccccacaggccaccgtcgcccagcctggcagcccagcgttttgggctgaaaccacyattactttggctgtttcatctctaagagagtgtagaatgctttcacagagaccctgcacagccctgatttacagagggaagggaagcgcgggtgaggtgg

SEQ ID NO: 54639 - DNA, 201 bp, Homo sapiens
tccactctggcgccccccagggcacagctctaagtttcttgggcacctctggggccgagtacaacaagatgcagctgcctggggtgccacctcggctcgcrgcccctccaccccgggggtgctcagcaactgcacctcgcccctgcctgaggccttcctggccaacctcttcgtgcaccctctcctgcctccgagagatct

SEQ ID NO: 54640 - DNA, 201 bp, Homo sapiens
ccattgcgccctcagggtctcacaccttggggttgtcaggttcccgggagaaggcggtgaggactcggccaaacaccccgcgctgctgggcgttctgcacytcgtcgcggtagagatggtcaagttgggagcatcggcagccgaacaccaaagtcatgggagtgggctgcagccctgcaagcaaccccgcgcttgggaagg

SEQ ID NO: 54641 - DNA, 201 bp, Homo sapiens
tggacagacctcggtcagctctggcacagtcaagaatccaccttgggcagttcttctttgagtcttagccctaatccctttgaaaattctattttcctttstcctcaatccagtcaacacctactatgtaccaggcaccaggaagccagaagctcagggcccagcccttgcctttggtacctgccctccccttggtctcat

SEQ ID NO: 54642 - DNA, 201 bp, Homo sapiens
cttgtagcatccttaggtcttggacagacctcggtcagctctggcacagtcaagaatccaccttgggcagttcttctttgagtcttagccctaatcccttygaaaattctattttcctttgtcctcaatccagtcaacacctactatgtaccaggcaccaggaagccagaagctcagggcccagcccttgcctttggtacc

SEQ ID NO: 54643 - DNA, 201 bp, Homo sapiens
aacttgcttctgccgagatgagtctccatgtcatctacctgcaccagcttcaccagcagcagcagcagcaggagccgtggggtgaggctgcagcctccatsctgtccaggccctgctccagcccctcacagccaccctcgcctgatgaggagaagccatcctggtcaagtgacggctccagtcctgcctctagccccagac

SEQ ID NO: 54644 - DNA, 201 bp, Homo sapiens
tggcccgcgcctaccgccccgccgccgccttcctgcgcaccgctgcgccccccgcgcccctgcgcacgctgctggcccgccagctcgttttcttcgcgggygcactcttcgccgcgctgcttgtgctcaccgtctacgacgaggacgtgctagccgtggagcacgtgctcaccgccatgaccgcgctcggggtcaccgcca

SEQ ID NO: 54645 - DNA, 201 bp, Homo sapiens
ccagacaacagtggggaacccagaaggcccggaatctgttccccggagggtttcaggtgaccacagacacccagaaggagcctgaccgggcctcttgcackgactgagacgactcctcagggccccactcctggcagctgagtgctgcacctgccttctcgatcacgagcctgagaactgcacgggggagcagcccagact

SEQ ID NO: 54646 - DNA, 201 bp, Homo sapiens
tgcaccagcttcaccagcagcagcagcagcaggagccgtggggtgaggctgcagcctccatcctgtccaggccctgctccagcccctcacagccaccctcrcctgatgaggagaagccatcctggtcaagtgacggctccagtcctgcctctagccccagacaacagtggggaacccagaaggcccggaatctgttccccg

SEQ ID NO: 54647 - DNA, 201 bp, Homo sapiens
tgagaaggcaccacctcaagaggggaggagcggggctgatcctggtcgggcggacctgagtcgggcagccgctctcccggaactggaagggaaagccaggyggctctcaggggctgttggtgtctgagccgggagggtcgaacgcccagggcactgcgccccgcaactgacgctcctgcaaggaaaagctctggcacgccg

SEQ ID NO: 54648 - DNA, 201 bp, Homo sapiens
gccggacatggtacattctttcactgaccctctgccgtttcctggcctggaattattttgcacaccttcgtttggaggttttacagctgacccgccaccckgagaactggaccctgcaagcccggtggcggcttgtggggctgcccgtccacttgctctttttgcggttctacaagcgtgacaaagacgagcattaccgga

SEQ ID NO: 54649 - DNA, 201 bp, Homo sapiens
tctacaagcgtgacaaagacgagcattaccggacctatgatgcctactccactttctacctgaattccagtggcctcatttgtcgccatcgtctagataakctgatgccttcacactcacctccaacgcctgtgaagaagctgctagtgggagccctggtggccctggggctgtcagagccagaacctgacttaaacctgt

SEQ ID NO: 54650 - DNA, 188 bp, Homo sapiens
ccaattacctgtcccaggccctccaggcgggcactgtgtgggtcaactgctatgatgtgtttggagcccagtcaccctttggtggctacaagatgtcgggragtggccgggagttgggcgagtacgggctgcaggcatacactgaagtgaaaactgtcacagtcaaagtgcctcagaagaactcataa

SEQ ID NO: 54651 - DNA, 145 bp, Homo sapiens
caactgctatgatgtgtttggagcccagtcaccctttggtggctacaagatgtcggggagtggccgggagttgggcgagtacgggctgcaggcatacactraagtgaaaactgtcacagtcaaagtgcctcagaagaactcataa

SEQ ID NO: 54652 - DNA, 201 bp, Homo sapiens
gggaccggacctacctggcggccttggagaccctggacaatggcaagccctatgtcatctcctacctggtggatttggacatgctatgatgagtttgtggwgcggagcgttgcccgggccaagtctcgggtggtcgggaacccctttgatagcaagaccgagcaggggccgcaggtggatgaaactcagtttaagaagatc

SEQ ID NO: 54653 - DNA, 201 bp, Homo sapiens
ccaattacctgtcccaggccctccaggcgggcactgtgtgggtcaactgctatgatgtgtttggagcccagtcaccctttggtggctacaagatgtcgggragtggccgggagttgggcgagtacgggctgcaggcatacactgaagtcacagtcaaagtgcctcagaagaactcataagaatcatgcaagcttcctccct

SEQ ID NO: 54654 - DNA, 201 bp, Homo sapiens
agtaccacgggaaaaccatccccattgacggagacttcttcagctacacacgccatgaacctgtgggggtgtgcgggcagatcattccgtggaatttcccrctcctgatgcaagcatggaagctgggcccagccttggcaactggaaacgtggttgtgatgaaggtagctgagcagacacccctcaccgccctctatgtgg

SEQ ID NO: 54655 - DNA, 201 bp, Homo sapiens
gctcagtggccctgagaccctagctctgctctcggtccgctcgctgtccgctagcccgctgcgatgttgcgcgctgccgcccgcttcgggccccgcctggsccgccgcctcttgtcagccgccgccacccaggccgtgcctgcccccaaccagcagcccgaggtcttctgcaaccagtctagattgaaaatgtcaactcca

SEQ ID NO: 54656 - DNA, 201 bp, Homo sapiens
caactgctatgatgtgtttggagcccagtcaccctttggtggctacaagatgtcggggagtggccgggagttgggcgagtacgggctgcaggcatacactraagtcacagtcaaagtgcctcagaagaactcataagaatcatgcaagcttcctccctcagccattgatggaaagttcagcaagatcagcaacaaaaccaa

SEQ ID NO: 54657 - DNA, 201 bp, Homo sapiens
gtggaacaggcccacttcgccctgttcttcaaccagggccagtgctgctgtgccggctcccggaccttcgtgcaggaggacatctatgatgagtttgtggwgcggagcgttgcccgggccaagtctcgggtggtcgggaacccctttgatagcaagaccgagcaggggccgcaggtggatgaaactcagtttaagaagatc

SEQ ID NO: 54658 - DNA, 201 bp, Homo sapiens
gcaacaaaaccaagaaaaatgatccttgcgtgctgaatatctgaaaagagaaatttttcctacaaaatctcttgggtcaagaaagttctagaatttgaatygataaacatggtgggttggctgagggtaagagtatatgaggaaccttttaaacgacaacaatactgctagctttcaggatgatttttaaaaaatagattc

SEQ ID NO: 54659 - DNA, 201 bp, Homo sapiens
ccaattacctgtcccaggccctccaggcgggcactgtgtgggtcaactgctatgatgtgtttggagcccagtcaccctttggtggctacaagatgtcgggragtggccgggagttgggcgagtacgggctgcaggcatacactgaagtgaaaactgtcacagtcaaagtgcctcagaagaactcataagaatcatgcaagc

SEQ ID NO: 54660 - DNA, 201 bp, Homo sapiens
caactgctatgatgtgtttggagcccagtcaccctttggtggctacaagatgtcggggagtggccgggagttgggcgagtacgggctgcaggcatacactraagtgaaaactgtcacagtcaaagtgcctcagaagaactcataagaatcatgcaagcttcctccctcagccattgatggaaagttcagcaagatcagcaa

SEQ ID NO: 54661 - DNA, 189 bp, Homo sapiens
gcaacaaaaccaagaaaaatgatccttgcgtgctgaatatctgaaaagagaaatttttcctacaaaatctcttgggtcaagaaagttctagaatttgaatygataaacatggtgggttggctgagggtaagagtatatgaggaaccttttaaacgacaacaatactgctagctttcaggatgattttta

SEQ ID NO: 54662 - DNA, 201 bp, Homo sapiens; identical to SEQ ID NO: 54659

SEQ ID NO: 54663 - DNA, 201 bp, Homo sapiens; identical to SEQ ID NO: 54654

SEQ ID NO: 54664 - DNA, 201 bp, Homo sapiens
gctcagtggccctgagaccctagctctgctctcggtccgctcgctgtccgctagcccgctgcgatgttgcgcgctgccgcccgcttcgggccccgcctggsccgccgcctcttgtcagccgccgccacccaggccgtgcctgcccccaaccagcagcccgaggtcttctgcaaccagattttcataaacaatgaatggcac

SEQ ID NO: 54665 - DNA, 201 bp, Homo sapiens; identical to SEQ ID NO: 54660

SEQ ID NO: 54666 - DNA, 201 bp, Homo sapiens; identical to SEQ ID NO: 54657

SEQ ID NO: 54667 - DNA, 201 bp, Homo sapiens; identical to SEQ ID NO: 54658

SEQ ID NO: 54668 - DNA, 201 bp, Homo sapiens
cctccaagatacaagagaacgcattacccatgatgcttgctgaacccccacagaatctgattgcccagtctcagtctggcactggtaaaacagctgccttygtcttagccatgctcagccgagtggagccatcagacagatacccccagtgtctgtgcctctccccaacatatgagctggcgcttcaaacaggaaaagtga

SEQ ID NO: 54669 - DNA, 201 bp, Homo sapiens
aatgatggggggcaatagaagaaaaaatttgcattttggaaaattgggtcctttccccacttttttaaagccacattcccccatctttataataatctggwcacagtggtagtcgctggccccaggaccccctcctgattttggctaggcatcgtggaaccagctccagcccctgaagaaacgatagatgtgcaggttgtg

SEQ ID NO: 54670 - DNA, 201 bp, Homo sapiens
ccatgctcagccgagtggagccatcagacagatacccccagtgtctgtgcctctccccaacatatgagctggcgcttcaaacaggaaaagtgattgagcaratgggcaaattttacccagaactgaagcttgcctatgccgttcgaggcaataaattggaaagaggccagaagatcagtgagcagattgtcattggcaccc

SEQ ID NO: 54671 - DNA, 201 bp, Homo sapiens
tagccatgctcagccgagtggagccatcagacagatacccccagtgtctgtgcctctccccaacatatgagctggcgcttcaaacaggaaaagtgattgarcagatgggcaaattttacccagaactgaagcttgcctatgccgttcgaggcaataaattggaaagaggccagaagatcagtgagcagattgtcattggca

SEQ ID NO: 54672 - DNA, 201 bp, Homo sapiens
cagatgatttggacgagattgagaaaatagccaactgagaagctccaccagccactgatgccagccctggcactgcccctgcacaggagacaagtgcattyagggcacaggccccgacatcaccccaaggacaacggcagaagtagagagaaactacctacctcacttcaaattatgtttggacttgacaaaaataggtgc

SEQ ID NO: 54673 - DNA, 201 bp, Homo sapiens
acacagatgatttggacgagattgagaaaatagccaactgagaagctccaccagccactgatgccagccctggcactgcccctgcacaggagacaagtgcrtttagggcacaggccccgacatcaccccaaggacaacggcagaagtagagagaaactacctacctcacttcaaattatgtttggacttgacaaaaatagg

SEQ ID NO: 54674 - DNA, 201 bp, Homo sapiens
gggatccaaactcccctctgtactcggtgaagtcgtttgaagagcttcggctgaaaccacagcttctccagggagtctatgccatgggcttcaatcgacchtccaagatacaagagaacgcattacccatgatgcttgctgaacccccacagaatctgattgcccagtctcagtctggcactggtaaaacagctgcctttg

SEQ ID NO: 54675 - DNA, 201 bp, Homo sapiens
aagctccaccagccactgatgccagccctggcactgcccctgcacaggagacaagtgcatttagggcacaggccccgacatcaccccaaggacaacggcasaagtagagagaaactacctacctcacttcaaattatgtttggacttgacaaaaataggtgcaaatgatggggggcaatagaagaaaaaatttgcattttg

SEQ ID NO: 54676 - DNA, 201 bp, Homo sapiens
aacgggatccaaactcccctctgtactcggtgaagtcgtttgaagagcttcggctgaaaccacagcttctccagggagtctatgccatgggcttcaatcgwccctccaagatacaagagaacgcattacccatgatgcttgctgaacccccacagaatctgattgcccagtctcagtctggcactggtaaaacagctgcct

SEQ ID NO: 54677 - DNA, 201 bp, Homo sapiens
gcgcttcaaacaggaaaagtgattgagcagatgggcaaattttacccagaactgaagcttgcctatgccgttcgaggcaataaattggaaagaggccagawgatcagtgagcagattgtcattggcacccctgggaccgtgctggactggtgctccaagctcaagttcattgatcccaagaaaatcaaggtgtttgttctg

SEQ ID NO: 54678 - DNA, 201 bp, Homo sapiens
gcaacctgctttcactgatcagcatgtgttagacatgttgacatgtccaatacacacacatcttccttgccctggaaacaccatccaccttcctttctgcrtgtagctgtcccggcatttatctcctggttcctctagtgacaggcatgggggatttctagtacatggctgttatccacagtaccacaatgaacatttttt

SEQ ID NO: 54679 - DNA, 201 bp, Homo sapiens
tgtactcggtgaagtcgtttgaagagcttcggctgaaaccacagcttctccagggagtctatgccatgggcttcaatcgaccctccaagatacaagagaaygcattacccatgatgcttgctgaacccccacagaatctgattgcccagtctcagtctggcactggtaaaacagctgcctttgtcttagccatgctcagcc

SEQ ID NO: 54680 - DNA, 201 bp, Homo sapiens
ctgtgcactttgacggttagatgccaccatgtagggattatcgcgagtggttgaccttacacttactccttaaatagcagtgagtaatgcatttgagctgycccaggctctgtctcctcagctcatttcctactctttttctctatataactcattctattaaatacattgcaccaaagagatatggagacataaacctgt

SEQ ID NO: 54681 - DNA, 201 bp, Homo sapiens
tgtcctgcccgtttctgcggacttgttctgaggccgaggcacctctaagatactgatggctctgcagaggacccattcattgcttctgcttttgctgctgwccctgctggggctggggctggtccagccctcctatggccaggatggcatgtaccagcgattcctgcggcaacacgtgcaccctgaggagacaggtggcag

SEQ ID NO: 54682 - DNA, 201 bp, Homo sapiens
tgtagggattatcgcgagtggttgaccttacacttactccttaaatagcagtgagtaatgcatttgagctgtcccaggctctgtctcctcagctcatttcytactctttttctctatataactcattctattaaatacattgcaccaaagagatatggagacataaacctgtaatgaatgaggctgggcttttctgtaata

SEQ ID NO: 54683 - DNA, 201 bp, Homo sapiens
tctgcttttgctgctgaccctgctggggctggggctggtccagccctcctatggccaggatggcatgtaccagcgattcctgcggcaacacgtgcaccctsaggagacaggtggcagtgatcgctactgcaacttgatgatgcaaagacggaagatgactttgtatcactgcaagcgcttcaacaccttcatccatgaaga

SEQ ID NO: 54684 - DNA, 201 bp, Homo sapiens
gtagtatctgcagcaccaccaatatccaatgcaagaacggcaagatgaactgccatgagggtgtagtgaaggtcacagattgcagggacacaggaagttcyagggcacccaactgcagatatcgggccatagcgagcactagacgtgttgtcattgcctgtgagggtaacccacaggtgcctgtgcactttgacggttaga

SEQ ID NO: 54685 - DNA, 201 bp, Homo sapiens; identical to SEQ ID NO: 54680

SEQ ID NO: 54686 - DNA, 201 bp, Homo sapiens
gggaaactgccagatttttgtaagattcttcctcctgggcacctctaagatactgatggctctgcagaggacccattcattgcttctgcttttgctgctgwccctgctggggctggggctggtccagccctcctatggccaggatggcatgtaccagcgattcctgcggcaacacgtgcaccctgaggagacaggtggcag

SEQ ID NO: 54687 - DNA, 201 bp, Homo sapiens; identical to SEQ ID NO: 54682

SEQ ID NO: 54688 - DNA, 201 bp, Homo sapiens; identical to SEQ ID NO: 54683

SEQ ID NO: 54689 - DNA, 201 bp, Homo sapiens; identical to SEQ ID NO: 54684

SEQ ID NO: 54690 - DNA, 201 bp, Homo sapiens
gacacattctcctacaacttttataatagacccatcctttctcgtcggaataccgtctggctgtgctacgaagtgaaaacaaagggtccctcaaggccccstttggacgcaaagatctttcgaggccaggtgcccaggtctttcatcagagccccatttcaagtgctcagtagcccctttggccagtgcgccccaccacat

SEQ ID NO: 54691 - DNA, 201 bp, Homo sapiens
ggtttcaacatcttgaccaggctggtcttgaactcctgacctcgtgatccacccgtctcggcctcccaaagtgctgggattacaggcgtgagccacctggscaggcttaggctggtcttaaactcctgacctcaagtgatccaacctccttggcctcccaaattgctgggattgctggtgtgagccacagcgcctagccca

SEQ ID NO: 54692 - DNA, 122 bp, Homo sapiens
catgttgctcaggctggtcttgaactcatgagctcaggcgatccactctcctcagcctcccaaagtgctgggattacagatataagccaccatacacaacttttttttttttttgagatgga

SEQ ID NO: 54693 - DNA, 201 bp, Homo sapiens
ctgtggcaaccagctgcctgcttacaagtgtttccagatcacctggtttgtatcctggaccccctgcccggactgtgtggcgaagctggccgaattcctgkctgagcaccccaatgtcaccctgaccatctccgccgcccgcctctactactactgggaaagagattaccgaagggcgctctgcaggctgagtcaggcagg

SEQ ID NO: 54694 - DNA, 201 bp, Homo sapiens
gacacattctcctacaacttttataatagacccatcctttctcgtcggaataccgtctggctgtgctacgaagtgaaaacaaagggtccctcaaggccccstttggacgcaaagatctttcgaggccaggtgtattcccagcctgagcaccacgcagaaatgtgcttcctctcttggttctgtggcaaccagctgcctgct

SEQ ID NO: 54695 - DNA, 201 bp, Homo sapiens
tggcctcccaaattgctgggattgctggtgtgagccacagcgcctagcccatttctccttttaataggacctgttgctgtctctgttctcccaacatggtraacaccacccggactgcgtgtatgtcccaaattacaattctttctttgcaaatgaaatgtgaaatttagaggcccttctccacactttaaatttgacttg

SEQ ID NO: 54696 - DNA, 201 bp, Homo sapiens
actttgtgtacagtgaaggtcagccattcatgccttggtacaaattcgatgacaattatgcattcctgcaccgcacgctaaaggagattctcagaaacccratggaggcaatgtatccacacatattctacttccactttaaaaacctacgcaaagcctatggtcggaacgaaagctggctgtgcttcaccatggaagttg

SEQ ID NO: 54697 - DNA, 201 bp, Homo sapiens
acacatattctacttccactttaaaaacctacgcaaagcctatggtcggaacgaaagctggctgtgcttcaccatggaagttgtaaagcaccactcacctrtctcctggaagaggggcgtcttccgaaaccaggtggatcctgagacccattgtcatgcagaaaggtgcttcctctcttggttctgtgacgacatactgtc

SEQ ID NO: 54698 - DNA, 201 bp, Homo sapiens
aaatacaactttctattcctggacagcaagctgcaggagattctcgagtgaggggtctccccgggcctcatggtctgtctcctctagcctcctgctcatgytgtgcaggcctcccctccatcctggaccagctgtgcttttgcctggtcatcctgagcccctcctggcctcagggccattccatagtgctcccctgcctca

SEQ ID NO: 54699 - DNA, 201 bp, Homo sapiens
accccaatgtcaccctgaccatctccgccgcccgcctctactactactgggaaagagattaccgaagggcgctctgcaggctgagtcaggcaggggcccgygtgaagattatggacgatgaagaatttgcatactgctgggaaaactttgtgtacagtgaaggtcagccattcatgccttggtacaaattcgatgacaatt

SEQ ID NO: 54700 - DNA, 201 bp, Homo sapiens
caggaattcgagaccagcctgggccacatgacaaagccccatctctacaaaaaaattacaaaaaaaaaaaaaacaggtgtggtggcatgcacctgtagttkaagctacttggaaggatgaagtgggaggattgcttgagccggggaggtggaggctgcagtgaactgagatcacgtcactgaactccagtctgagcaacag

SEQ ID NO: 54701 - DNA, 201 bp, Homo sapiens
ggctgcagtgaactgagatcacgtcactgaactccagtctgagcaacagatcgagaccctgcctgaaaataaatcaataaataaactcaaccgaaatgggyatgaaagttgaaatgggtatgtaagttgaaaaccagaagttttgagaaacatcctttgttaactttcatcctacaaattgggtcattcatgtcctacgca

SEQ ID NO: 54702 - DNA, 201 bp, Homo sapiens
gattaccaggaggggctccgcagcctgagtcaggaaggggcctccgtggagatcatgggctacaaagattttaaatattgttgggaaaactttgtgtacartgatgatgagccattcaagccttggaaaggactaaaatacaactttctattcctggacagcaagctgcaggagattctcgagtgaggggtctccccgggc

SEQ ID NO: 54703 - DNA, 201 bp, Homo sapiens
acagcaacgtgaatctcaccatcttcaccgcccgcctctactacttctgggatacagattaccaggaggggctccgcagcctgagtcaggaaggggcctcygtggagatcatgggctacaaagattttaaatattgttgggaaaactttgtgtacaatgatgatgagccattcaagccttggaaaggactaaaatacaact

SEQ ID NO: 54704 - DNA, 201 bp, Homo sapiens
tacaatgatgatgagccattcaagccttggaaaggactaaaatacaactttctattcctggacagcaagctgcaggagattctcgagtgaggggtctcccmgggcctcatggtctgtctcctctagcctcctgctcatgttgtgcaggcctcccctccatcctggaccagctgtgcttttgcctggtcatcctgagcccct

SEQ ID NO: 54705 - DNA, 201 bp, Homo sapiens
aagctacgggacccgccgcgcctcccgcgccggggtggagctgaccccgccgagccccgccccagcctgcgtctgccaatgatccaggagccgctcctttmcactcgggaaaccttcagaggagtctcagaaaggacacggctggctgcttttctcagcgccgaagccgcgccatgctcgtcctcagaagcgccctgactc

SEQ ID NO: 54706 - DNA, 201 bp, Homo sapiens
aaggaggtgttaagttaatttgctatgtttcttgcattatgaaggctacatctgtgctttgtaagtaccacttcaaaaaatagttctgtttactttctgcrtggtatttcagtgtctgtcatacattaaaaatacttgtcactgttttaagatcttgactcttcatttgtttcagaatagctcttctactgtattctgaca

SEQ ID NO: 54707 - DNA, 201 bp, Homo sapiens
tctgaattggttggatactggagtgtagaatttggaggcagaatgaatacagtgtttcatatttggaagtatgataattttgctcatcgaactgaagttcrgaaagccttggccaaagataaggaatggcaagaacaattcctcattccaaatttggctctcattgataaacaagagagtgagattacttatctggtacca

SEQ ID NO: 54708 - DNA, 201 bp, Homo sapiens
tcggacagctcactctgaattggttggatactggagtgtagaatttggaggcagaatgaatacagtgtttcatatttggaagtatgataattttgctcatygaactgaagttcggaaagccttggccaaagataaggaatggcaagaacaattcctcattccaaatttggctctcattgataaacaagagagtgagattac

SEQ ID NO: 54709 - DNA, 201 bp, Homo sapiens
tctactgaaatacaaaacatttcattaactgctataggatctgtctgctaatggtgcttaaattctcccaagaggttctcacttttatttgaaggaggtgktaagttaatttgctatgtttcttgcattatgaaggctacatctgtgctttgtaagtaccacttcaaaaaatagttctgtttactttctgcatggtatttc

SEQ ID NO: 54710 - DNA, 201 bp, Homo sapiens
acagcgttcctagtcaggcagccacaccttggtcctcatcttggtcccttccaatctgaaacctcgtgcctggctcgtctgccacctacatttctctttckagctgctgttttgtaaaaagaaaaagaaaaaagaagcccaaactagtgagagtaatatctaattatctcattttttgtaggtctgtgataaagaacttag

SEQ ID NO: 54711 - DNA, 201 bp, Homo sapiens
cctccttctagggcctatggcagttctcccaggatgtgtggcgagagcctgggccagcccacagcgttcctagtcaggcagccacaccttggtcctcatcrtggtcccttccaatctgaaacctcgtgcctggctcgtctgccacctacatttctctttccagctgctgttttgtaaaaagaaaaagaaaaaagaagccca

SEQ ID NO: 54712 - DNA, 201 bp, Homo sapiens
tgggcatcaaggatgaggatcagttggaggccttcctgaagaagctgattggctgacaagcagggatgagtcctggttcccttgcccgcgtgggaccccastagaactcagcccttccatgccagcccttcctgctgcctccctcctgtctggctcctggggcccatgcttagagcccaggctccagccctgagtgcttcc

SEQ ID NO: 54713 - DNA, 133 bp, Homo sapiens
cccgaggaagtgacgacaggcgtgcccttgacrggcagggagggctaggctgtgcatccctccgctcgcattgcagggagatggctcagcgacttcttctgaggaggttcctggcctctgtcatctccaggaa

SEQ ID NO: 54714 - DNA, 201 bp, Homo sapiens
tttgtaaaaagaaaaagaaaaaagaagcccaaactagtgagagtaatatctaattatctcattttttgtaggtctgtgataaagaacttagtcatcccttkcacctcctactgtgaagaacagaccctgggtcccacactgaaatcccctctagtcacccattcccaccccccagggagctgcctcccaggcagggggtgc

SEQ ID NO: 54715 - DNA, 201 bp, Homo sapiens
gcattgcagggagatggctcagcgacttcttctgaggaggttcctggcctctgtcatctccaggaagccctctcagggtcagtggccacccctcacttccrgagccctgcagaccccacaatgcagtcctggtggcctgactgtaacacccaacccagcccggacaatatacaccacgaggatctccttgacaacctttaa

SEQ ID NO: 54716 - DNA, 201 bp, Homo sapiens; identical to SEQ ID NO: 54710

SEQ ID NO: 54717 - DNA, 201 bp, Homo sapiens; identical to SEQ ID NO: 54711

SEQ ID NO: 54718 - DNA, 201 bp, Homo sapiens; identical to SEQ ID NO: 54712

SEQ ID NO: 54719 - DNA, 133 bp, Homo sapiens; identical to SEQ ID NO: 54713

SEQ ID NO: 54720 - DNA, 201 bp, Homo sapiens; identical to SEQ ID NO: 54714

SEQ ID NO: 54721 - DNA, 201 bp, Homo sapiens; identical to SEQ ID NO: 54715

SEQ ID NO: 54722 - DNA, 201 bp, Homo sapiens
tccccgagtgcggaaaccctacctttgcggtggggtctggacgcccgagagcccttctcagcaaagtccctgaagaggagcgaggcggctccgaggaaccrcggaggaagtgaagccagtcccgccactcttcagaccggccctccacctcggccaccgtcaccacagagctgaaggaggcctagagagccgcgcgtgccg

SEQ ID NO: 54723 - DNA, 201 bp, Homo sapiens
tcggccaccgtcaccacagagctgaaggaggcctagagagccgcgcgtgccgcgccaccgagaccggaaggaggcggcacagacctggaggacgaccgcgragctgagcgcttagagccgccgaaccatagagatcggaaataggagcgagcggcagcgccggaaaggaggccaagagcgcgggcggcgaggcaagatggc

SEQ ID NO: 54724 - DNA, 201 bp, Homo sapiens
cggccaccgtcaccacagagctgaaggaggcctagagagccgcgcgtgccgcgccaccgagaccggaaggaggcggcacagacctggaggacgaccgcggrgctgagcgcttagagccgccgaaccatagagatcggaaataggagcgagcggcagcgccggaaaggaggccaagagcgcgggcggcgaggcaagatggcg

SEQ ID NO: 54725 - DNA, 201 bp, Homo sapiens
cggcaaccaagaggaaacggcgtggaggctttgcagttcaggcgaagaagccaaaaagaaacgaaatagatgcggagccgccagctaagcggcacgccacrgcagaggaggtggaggaagaagagagggaccggatcccaggccccgtttgcaagggaaagtggaaaaataaggaacggattctcatcttttcttccagag

SEQ ID NO: 54726 - DNA, 201 bp, Homo sapiens
aatacttttattatctaatactatcttacgtctaattagtgtagcatttacaagaaagaaaaattaagatcttaaaatcagtgattatctttttctaaatwaaatatcaccagaattcatcagttaatttctgatttctttttgaagtttgtgttgctaaaaatgtagcacacttaatgtagcctgttctcttgggttgga

SEQ ID NO: 54727 - DNA, 201 bp, Homo sapiens
taaactcatttaagtggatttgttctttgtaccttttatgttatagactcctagtgtttcatgttaagggttgagaatgaagcaaacttttgatttcacgraacttgatacctttaaagaaaattaaatgtataaatattataagcatattatttatggtgaataggtggtaagcattgactacatttgctaattagttga

SEQ ID NO: 54728 - DNA, 201 bp, Homo sapiens; identical to SEQ ID NO: 54722

SEQ ID NO: 54729 - DNA, 201 bp, Homo sapiens; identical to SEQ ID NO: 54723

SEQ ID NO: 54730 - DNA, 201 bp, Homo sapiens; identical to SEQ ID NO: 54724

SEQ ID NO: 54731 - DNA, 201 bp, Homo sapiens
cttttgtcttttgaccctgtaagtttctcattcagtgtatgaggtctaattttcttatctggcatggttgtttttagtagatatagttgtgttattcaatktagtttcacccccaccttggttttatggattatcaattctttcaggtacatttataatgaggttatagccaagttatagaaacaaatgagcaaacagttt

SEQ ID NO: 54732 - DNA, 201 bp, Homo sapiens; identical to SEQ ID NO: 54725

SEQ ID NO: 54733 - DNA, 201 bp, Homo sapiens; identical to SEQ ID NO: 54726

SEQ ID NO: 54734 - DNA, 201 bp, Homo sapiens
ttcctcattggccacagcctcggctgtctacacttgctctatttcctgctgcgccagccccaggcctggaaggaccgctttattgatggcttcatctctcytggggctccctggggtggctccatcaagcccatgctggtcttggcctcaggtgacaaccagggcatccccatcatgtccagcatcaagctgaaagaggag

SEQ ID NO: 54735 - DNA, 201 bp, Homo sapiens
cttcttcaccatctggctggatctcaacatgttcctaccccttggggtagactgctggatcgataacaccagggttgtctacaaccggagctctgggctcrtgtccaacgcccctggtgtccagatccgcgtccctggctttggcaagacctactctgtggagtacctggacagcagcaagctggcagggtacctgcacac

SEQ ID NO: 54736 - DNA, 201 bp, Homo sapiens
gaggaaggctggtacatgtggctgcagtcacgtgacctcctggcaggactcccagcacctggtgtggaagtatactgtctttacggcgtgggcctgcccaygccccgcacctacatctacgaccacggcttcccctacacggaccctgtgggtgtgctctatgaggatggtgatgacacggtggcgacccgcagcaccgag

SEQ ID NO: 54737 - DNA, 146 bp, Homo sapiens
ccagggctggaatggggccgcccggctccccatggcagtgggtgaygctgctgctggggctgctgctccctcctgccgcccccttctggctcctcaatgtgctcttccccccgcacaccacgcccaaggctgagctcagtaaccac

SEQ ID NO: 54738 - DNA, 201 bp, Homo sapiens
cagcagcaagctggcagggtacctgcacacactggtgcagaacctggtcaacaatggctacgtgcgggacgagactgtgcgcgccgccccctatgactggyggctggagcccggccagcaggaggagtactaccgcaagctcgcagggctggtggaggagatgcacgctgcctatgggaagcctgtcttcctcattggcca

SEQ ID NO: 54739 - DNA, 201 bp, Homo sapiens
cacactggtgcagaacctggtcaacaatggctacgtgcgggacgagactgtgcgcgccgccccctatgactggcggctggagcccggccagcaggaggagwactaccgcaagctcgcagggctggtggaggagatgcacgctgcctatgggaagcctgtcttcctcattggccacagcctcggctgtctacacttgctcta

SEQ ID NO: 54740 - DNA, 201 bp, Homo sapiens
ggtgcagaacctggtcaacaatggctacgtgcgggacgagactgtgcgcgccgccccctatgactggcggctggagcccggccagcaggaggagtactacygcaagctcgcagggctggtggaggagatgcacgctgcctatgggaagcctgtcttcctcattggccacagcctcggctgtctacacttgctctatttcct

SEQ ID NO: 54741 - DNA, 197 bp, Homo sapiens
ccagggctggaatggggccgcccggctccccatggcagtgggtgacgctgctgctggggctgctgctccctcctgccgcccccttctggctcctcawtgtgctcttccccccgcacaccacgcccaaggctgagctcagtaaccacacacggcccgtcatcctcgtgcccggctgcctggggaatcagctagaagcc

SEQ ID NO: 54742 - DNA, 201 bp, Homo sapiens
cccaggcctggaaggaccgctttattgatggcttcatctctcttggggctccctggggtggctccatcaagcccatgctggtcttggcctcaggtgacaamcagggcatccccatcatgtccagcatcaagctgaaagaggagcagcgcataaccaccacctccccctggatgtttccctctcgcatggcgtggcctgagg

SEQ ID NO: 54743 - DNA, 201 bp, Homo sapiens
tcctgccgcccccttctggctcctcaatgtgctcttccccccgcacaccacgcccaaggctgagctcagtaaccacacacggcccgtcatcctcgtgcccrgctgcctggggaatcagctagaagccaagctggacaaaccagatgtggtgaactggatgtgctaccgcaagacagaggacttcttcaccatctggctgga

SEQ ID NO: 54744 - DNA, 201 bp, Homo sapiens
ggcctggaaggaccgctttattgatggcttcatctctcttggggctccctggggtggctccatcaagcccatgctggtcttggcctcaggtgacaaccagsgcatccccatcatgtccagcatcaagctgaaagaggagcagcgcataaccaccacctccccctggatgtttccctctcgcatggcgtggcctgaggacca

SEQ ID NO: 54745 - DNA, 201 bp, Homo sapiens
ccccttctggctcctcaatgtgctcttccccccgcacaccacgcccaaggctgagctcagtaaccacacacggcccgtcatcctcgtgcccggctgcctgsggaatcagctagaagccaagctggacaaaccagatgtggtgaactggatgtgctaccgcaagacagaggacttcttcaccatctggctggatctcaacat

SEQ ID NO: 54746 - DNA, 201 bp, Homo sapiens
gctaccgcaagacagaggacttcttcaccatctggctggatctcaacatgttcctaccccttggggtagactgctggatcgataacaccagggttgtctamaaccggagctctgggctcgtgtccaacgcccctggtgtccagatccgcgtccctggctttggcaagacctactctgtggagtacctggacagcagcaagc

SEQ ID NO: 54747 - DNA, 201 bp, Homo sapiens
gtgtccaacgcccctggtgtccagatccgcgtccctggctttggcaagacctactctgtggagtacctggacagcagcaagctggcagggtacctgcacayactggtgcagaacctggtcaacaatggctacgtgcgggacgagactgtgcgcgccgccccctatgactggcggctggagcccggccagcaggaggagtac

SEQ ID NO: 54748 - DNA, 201 bp, Homo sapiens
ccccctatgactggcggctggagcccggccagcaggaggagtactaccgcaagctcgcagggctggtggaggagatgcacgctgcctatgggaagcctgtyttcctcattggccacagcctcggctgtctacacttgctctatttcctgctgcgccagccccaggcctggaaggaccgctttattgatggcttcatctctc

SEQ ID NO: 54749 - DNA, 201 bp, Homo sapiens
agaggagcagcgcataaccaccacctccccctggatgtttccctctcgcatggcgtggcctgaggaccacgtgttcatttccacacccagcttcaactacrcaggccgtgacttccaacgcttctttgcagacctgcactttgaggaaggctggtacatgtggctgcagtcacgtgacctcctggcaggactcccagcacc

SEQ ID NO: 54750 - DNA, 201 bp, Homo sapiens
tacctggacagcagcaagctggcagggtacctgcacacactggtgcagaacctggtcaacaatggctacgtgcgggacgagactgtgcgcgccgccccctrtgactggcggctggagcccggccagcaggaggagtactaccgcaagctcgcagggctggtggaggagatgcacgctgcctatgggaagcctgtcttcctc

SEQ ID NO: 54751 - DNA, 201 bp, Homo sapiens
ctgaggaccacgtgttcatttccacacccagcttcaactacacaggccgtgacttccaacgcttctttgcagacctgcactttgaggaaggctggtacatrtggctgcagtcacgtgacctcctggcaggactcccagcacctggtgtggaagtatactgtctttacggcgtgggcctgcccacgccccgcacctacatct

SEQ ID NO: 54752 - DNA, 201 bp, Homo sapiens
agcgcataaccaccacctccccctggatgtttccctctcgcatggcgtggcctgaggaccacgtgttcatttccacacccagcttcaactacacaggccgygacttccaacgcttctttgcagacctgcactttgaggaaggctggtacatgtggctgcagtcacgtgacctcctggcaggactcccagcacctggtgtgg

SEQ ID NO: 54753 - DNA, 201 bp, Homo sapiens
ccctgtgggtgtgctctatgaggatggtgatgacacggtggcgacccgcagcaccgagctctgtggcctgtggcagggccgccagccacagcctgtgcacytgctgcccctgcacgggatacagcatctcaacatggtcttcagcaacctgaccctggagcacatcaatgccatcctgctgggtgcctaccgccagggtcc

SEQ ID NO: 54754 - DNA, 201 bp, Homo sapiens
cacaggccgtgacttccaacgcttctttgcagacctgcactttgaggaaggctggtacatgtggctgcagtcacgtgacctcctggcaggactcccagcayctggtgtggaagtatactgtctttacggcgtgggcctgcccacgccccgcacctacatctacgaccacggcttcccctacacggaccctgtgggtgtgct

SEQ ID NO: 54755 - DNA, 201 bp, Homo sapiens
gactggcggctggagcccggccagcaggaggagtactaccgcaagctcgcagggctggtggaggagatgcacgctgcctatgggaagcctgtcttcctcaytggccacagcctcggctgtctacacttgctctatttcctgctgcgccagccccaggcctggaaggaccgctttattgatggcttcatctctcttggggct

SEQ ID NO: 54756 - DNA, 201 bp, Homo sapiens
agtatactgtctttacggcgtgggcctgcccacgccccgcacctacatctacgaccacggcttcccctacacggaccctgtgggtgtgctctatgaggatrgtgatgacacggtggcgacccgcagcaccgagctctgtggcctgtggcagggccgccagccacagcctgtgcacctgctgcccctgcacgggatacagca

SEQ ID NO: 54757 - DNA, 201 bp, Homo sapiens
atggggccgcccggctccccatggcagtgggtgacgctgctgctggggctgctgctccctcctgccgcccccttctggctcctcaatgtgctcttccccchgcacaccacgcccaaggctgagctcagtaaccacacacggcccgtcatcctcgtgcccggctgcctggggaatcagctagaagccaagctggacaaacca

SEQ ID NO: 54758 - DNA, 201 bp, Homo sapiens
tggctttggcaagacctactctgtggagtacctggacagcagcaagctggcagggtacctgcacacactggtgcagaacctggtcaacaatggctacgtgygggacgagactgtgcgcgccgccccctatgactggcggctggagcccggccagcaggaggagtactaccgcaagctcgcagggctggtggaggagatgca

SEQ ID NO: 54759 - DNA, 201 bp, Homo sapiens
ctttacggcgtgggcctgcccacgccccgcacctacatctacgaccacggcttcccctacacggaccctgtgggtgtgctctatgaggatggtgatgacayggtggcgacccgcagcaccgagctctgtggcctgtggcagggccgccagccacagcctgtgcacctgctgcccctgcacgggatacagcatctcaacatg

SEQ ID NO: 54760 - DNA, 201 bp, Homo sapiens
cccggctccccatggcagtgggtgacgctgctgctggggctgctgctccctcctgccgcccccttctggctcctcaatgtgctcttccccccgcacaccaygcccaaggctgagctcagtaaccacacacggcccgtcatcctcgtgcccggctgcctggggaatcagctagaagccaagctggacaaaccagatgtggtg

SEQ ID NO: 54761 - DNA, 201 bp, Homo sapiens
cccatgctggtcttggcctcaggtgacaaccagggcatccccatcatgtccagcatcaagctgaaagaggagcagcgcataaccaccacctccccctggawgtttccctctcgcatggcgtggcctgaggaccacgtgttcatttccacacccagcttcaactacacaggccgtgacttccaacgcttctttgcagacctg

SEQ ID NO: 54762 - DNA, 201 bp, Homo sapiens
ggctttggcaagacctactctgtggagtacctggacagcagcaagctggcagggtacctgcacacactggtgcagaacctggtcaacaatggctacgtgcrggacgagactgtgcgcgccgccccctatgactggcggctggagcccggccagcaggaggagtactaccgcaagctcgcagggctggtggaggagatgcac

SEQ ID NO: 54763 - DNA, 201 bp, Homo sapiens
tgtcttcctcattggccacagcctcggctgtctacacttgctctatttcctgctgcgccagccccaggcctggaaggaccgctttattgatggcttcatcwctcttggggctccctggggtggctccatcaagcccatgctggtcttggcctcaggtgacaaccagggcatccccatcatgtccagcatcaagctgaaaga

SEQ ID NO: 54764 - DNA, 201 bp, Homo sapiens
gcctgtgcacctgctgcccctgcacgggatacagcatctcaacatggtcttcagcaacctgaccctggagcacatcaatgccatcctgctgggtgcctacygccagggtccccctgcatccccgactgccagcccagagcccccgcctcctgaataaagaccttcctttgctaccgtaagccctgatggctatgtttcagg

SEQ ID NO: 54765 - DNA, 201 bp, Homo sapiens
ggagaacatggaattgtggttttctctttgggatcaatggtctcagaaattccagagaagaaagctatggcaattgctgatgctttgggcaaaatccctcrgacagtcctgtggcggtacactggaacccgaccatcgaatcttgcgaacaacacgatacttgttaagtggctaccccaaaacgatctgcttggtcacccg

SEQ ID NO: 54766 - DNA, 201 bp, Homo sapiens
tggagaacatggaattgtggttttctctttgggatcaatggtctcagaaattccagagaagaaagctatggcaattgctgatgctttgggcaaaatccctyagacagtcctgtggcggtacactggaacccgaccatcgaatcttgcgaacaacacgatacttgttaagtggctaccccaaaacgatctgcttggtcaccc

SEQ ID NO: 54767 - DNA, 201 bp, Homo sapiens
ttgtggttttctctttgggatcaatggtctcagaaattccagagaagaaagctatggcaattgctgatgctttgggcaaaatccctcagacagtcctgtgrcggtacactggaacccgaccatcgaatcttgcgaacaacacgatacttgttaagtggctaccccaaaacgatctgcttggtcacccgatgacccgtgcct

SEQ ID NO: 54768 - DNA, 201 bp, Homo sapiens
actacacaagaaaaatctatccagtgccgtatgaccaagaagagctgaagaaccgttaccaatcatttggaaacaatcactttgctgagcgatcattcctractgctcctcagacagagtacaggaataacatgattgttattggcctgtacttcatcaactgccagagcctcctgcaggacagggacaccctgaacttct

SEQ ID NO: 54769 - DNA, 201 bp, Homo sapiens
gtcatcaatgacaaaagttacaaggagaacatcatgcgcctctccagccttcacaaggaccgcccggtggagccgctggacctggccgtgttctgggtggmgtttgtgatgaggcacaagggcgcgccacacctgcgccccgcagcccacgacctcacctggtaccagtaccattccttggacgtgattggtttcctcttg

SEQ ID NO: 54770 - DNA, 201 bp, Homo sapiens
gttccctggagcatacattcagcagaagcccagaccctgtgtcctacattcccaggtgctacacaaagttttcagaccacatgactttttcccaacgagtkgccaacttccttgttaatttgttggagccctatctattttattgtctgttttcaaagtatgaagaactcgcatcagctgtcctcaagagagatgtggata

SEQ ID NO: 54771 - DNA, 201 bp, Homo sapiens
cagccttaccctgtggggtgatcctggctgagtatttgggcctaccatctgtgtacctcttcaggggttttccgtgttccctggagcatacattcagcagmagcccagaccctgtgtcctacattcccaggtgctacacaaagttttcagaccacatgactttttcccaacgagtggccaacttccttgttaatttgttgg

SEQ ID NO: 54772 - DNA, 201 bp, Homo sapiens
gcccggtggagccgctggacctggccgtgttctgggtggagtttgtgatgaggcacaagggcgcgccacacctgcgccccgcagcccacgacctcacctgrtaccagtaccattccttggacgtgattggtttcctcttggccgtcgtgctgacagtggccttcatcacctttaaatgttgtgcttatggctaccggaaat

SEQ ID NO: 54773 - DNA, 176 bp, Homo sapiens
actctttccaggatggcctgcctccttcgctcatttcagagaatttctgcaggggttttcttcttagcactttggkgcatggttgtaggtgacaagctgctggtggtccctcaggacggaagccactggcttagtatgaaggatatagttgaggttctcagtgaccggggtcatga

SEQ ID NO: 54774 - DNA, 201 bp, Homo sapiens
ccgtgcctttatcacccatgctggttcccatggtgtttatgaaagcatatgcaatggcgttcccatggtgatgatgcccttgtttggtgatcagatggacratgcaaagcgcatggagactaagggagctggagtgaccctgaatgttctggaaatgacttctgaagatttagaaaatgctctaaaagcagtcatcaatga

SEQ ID NO: 54775 - DNA, 201 bp, Homo sapiens
ctggacctggccgtgttctgggtggagtttgtgatgaggcacaagggcgcgccacacctgcgccccgcagcccacgacctcacctggtaccagtaccattycttggacgtgattggtttcctcttggccgtcgtgctgacagtggccttcatcacctttaaatgttgtgcttatggctaccggaaatgcttggggaaaaaa

SEQ ID NO: 54776 - DNA, 201 bp, Homo sapiens
tttcacagacccagccttaccctgtggggtgatcctggctgagtatttgggcctaccatctgtgtacctcttcaggggttttccgtgttccctggagcatrcattcagcagaagcccagaccctgtgtcctacattcccaggtgctacacaaagttttcagaccacatgactttttcccaacgagtggccaacttccttgt

SEQ ID NO: 54777 - DNA, 131 bp, Homo sapiens
actctttccaggatggcctgcctccttcgckcatttcagagaatttctgcaggggttttcttcttagcactttggggcatggttgtaggtgacaagctgctggtggtccctcaggacggaagccactggct

SEQ ID NO: 54778 - DNA, 201 bp, Homo sapiens
agcccacgacctcacctggtaccagtaccattccttggacgtgattggtttcctcttggccgtcgtgctgacagtggccttcatcacctttaaatgttgtscttatggctaccggaaatgcttggggaaaaaagggcgagttaagaaagcccacaaatccaagacccattgagaagtgggtgggaaataaggtaaaatttt

SEQ ID NO: 54779 - DNA, 169 bp, Homo sapiens
actctttccaggatggcctgcctccttcgctcatttcagagaatttctgcaggggttttcttcttagcwctttggggcatggttgtaggtgacaagctgctggtggtccctcaggacggaagccactggcttagtatgaaggatatagttgaggttctcagtgaccggg

SEQ ID NO: 54780 - DNA, 201 bp, Homo sapiens
tggccttcatcacctttaaatgttgtgcttatggctaccggaaatgcttggggaaaaaagggcgagttaagaaagcccacaaatccaagacccattgagargtgggtgggaaataaggtaaaattttgaaccattccctagtcatttccaaacttgaaaacagaatcagtgttaaattcattttattcttattaaggaaat

SEQ ID NO: 54781 - DNA, 201 bp, Homo sapiens
catttttcagaggacgtgcagacaggctggcattctagattacttttcttactctgaaacatggcctgtttgggagtgcgggattcaaaggtggtcccacsgctgcccctactgcaaatggcagttttaatcttatcttttggcttctgcagatggttgcaattgatccttaaccaataatggtcagtcctcatctctgtc

SEQ ID NO: 54782 - DNA, 201 bp, Homo sapiens
gctgcccctactgcaaatggcagttttaatcttatcttttggcttctgcagatggttgcaattgatccttaaccaataatggtcagtcctcatctctgtcstgcttcataggtgccaccttgtgtgtttaaagaagggaagctttgtacctttagagtgtaggtgaaatgaatgaatggcttggagtgcactgagaacagc

SEQ ID NO: 54783 - DNA, 201 bp, Homo sapiens
tcgaatcttgcgaacaacacgatacttgttaagtggctaccccaaaacgatctgcttggtcacccgatgacccgtgcctttatcacccatgctggttcccrtggtgtttatgaaagcatatgcaatggcgttcccatggtgatgatgcccttgtttggtgatcagatggacaatgcaaagcgcatggagactaagggagct

SEQ ID NO: 54784 - DNA, 201 bp, Homo sapiens
tgtggttttctctttgggatcaatggtctcagaaattccagagaagaaagctatggcaattgctgatgctttgggcaaaatccctcagacagtcctgtggyggtacactggaacccgaccatcgaatcttgcgaacaacacgatacttgttaagtggctaccccaaaacgatctgcttggtcacccgatgacccgtgcctt

SEQ ID NO: 54785 - DNA, 201 bp, Homo sapiens
gatgctttgggcaaaatccctcagacagtcctgtggcggtacactggaacccgaccatcgaatcttgcgaacaacacgatacttgttaagtggctaccccraaacgatctgcttggtcacccgatgacccgtgcctttatcacccatgctggttcccatggtgtttatgaaagcatatgcaatggcgttcccatggtgatg

SEQ ID NO: 54786 - DNA, 201 bp, Homo sapiens
aatcttgcgaacaacacgatacttgttaagtggctaccccaaaacgatctgcttggtcacccgatgacccgtgcctttatcacccatgctggttcccatgktgtttatgaaagcatatgcaatggcgttcccatggtgatgatgcccttgtttggtgatcagatggacaatgcaaagcgcatggagactaagggagctgga

SEQ ID NO: 54787 - DNA, 201 bp, Homo sapiens
tgatgctttgggcaaaatccctcagacagtcctgtggcggtacactggaacccgaccatcgaatcttgcgaacaacacgatacttgttaagtggctacccyaaaacgatctgcttggtcacccgatgacccgtgcctttatcacccatgctggttcccatggtgtttatgaaagcatatgcaatggcgttcccatggtgat

SEQ ID NO: 54788 - DNA, 201 bp, Homo sapiens
cctgtggcggtacactggaacccgaccatcgaatcttgcgaacaacacgatacttgttaagtggctaccccaaaacgatctgcttggtcacccgatgaccsgtgcctttatcacccatgctggttcccatggtgtttatgaaagcatatgcaatggcgttcccatggtgatgatgcccttgtttggtgatcagatggacaa

SEQ ID NO: 54789 - DNA, 201 bp, Homo sapiens
gagtttgtgatgaggcacaagggcgcgccacacctgcgccccgcagcccacgacctcacctggtaccagtaccattccttggacgtgattggtttcctctwggccgtcgtgctgacagtggccttcatcacctttaaatgttgtgcttatggctaccggaaatgcttggggaaaaaagggcgagttaagaaagcccacaaa

SEQ ID NO: 54790 - DNA, 201 bp, Homo sapiens
gtggcggtacactggaacccgaccatcgaatcttgcgaacaacacgatacttgttaagtggctaccccaaaacgatctgcttggtcacccgatgacccgtrcctttatcacccatgctggttcccatggtgtttatgaaagcatatgcaatggcgttcccatggtgatgatgcccttgtttggtgatcagatggacaatgc

SEQ ID NO: 54791 - DNA, 201 bp, Homo sapiens
tggtgatcagatggacaatgcaaagcgcatggagactaagggagctggagtgaccctgaatgttctggaaatgacttctgaagatttagaaaatgctctaraagcagtcatcaatgacaaaagttacaaggagaacatcatgcgcctctccagccttcacaaggaccgcccggtggagccgctggacctggccgtgttctg

SEQ ID NO: 54792 - DNA, 201 bp, Homo sapiens
catggagactaagggagctggagtgaccctgaatgttctggaaatgacttctgaagatttagaaaatgctctaaaagcagtcatcaatgacaaaagttacwaggagaacatcatgcgcctctccagccttcacaaggaccgcccggtggagccgctggacctggccgtgttctgggtggagtttgtgatgaggcacaaggg

SEQ ID NO: 54793 - DNA, 201 bp, Homo sapiens
agccactggcttagtatgaaggatatagttgaggttctcagtgaccggggtcatgagattgtagtggtggtgcctgaagttaatttgcttttgaaagaatmcaaatactacacaagaaaaatctatccagtgccgtatgaccaagaagagctgaagaaccgttaccaatcatttggaaacaatcactttgctgagcgatca

SEQ ID NO: 54794 - DNA, 201 bp, Homo sapiens
tctccagccttcacaaggaccgcccggtggagccgctggacctggccgtgttctgggtggagtttgtgatgaggcacaagggcgcgccacacctgcgcccygcagcccacgacctcacctggtaccagtaccattccttggacgtgattggtttcctcttggccgtcgtgctgacagtggccttcatcacctttaaatgtt

SEQ ID NO: 54795 - DNA, 201 bp, Homo sapiens
ataaattaatcagccccagagtgctttaaaaaattctcttaaataaaaataatagactcgctagtcagtaaagatatttgaatatgtatcgtgccccctcyggtgtctttgatcaggatgacatgtgccatttttcagaggacgtgcagacaggctggcattctagattacttttcttactctgaaacatggcctgtttgg

SEQ ID NO: 54796 - DNA, 201 bp, Homo sapiens
ccatcgaatcttgcgaacaacacgatacttgttaagtggctaccccaaaacgatctgcttggtcacccgatgacccgtgcctttatcacccatgctggttyccatggtgtttatgaaagcatatgcaatggcgttcccatggtgatgatgcccttgtttggtgatcagatggacaatgcaaagcgcatggagactaaggga

SEQ ID NO: 54797 - DNA, 201 bp, Homo sapiens
catgcgcctctccagccttcacaaggaccgcccggtggagccgctggacctggccgtgttctgggtggagtttgtgatgaggcacaagggcgcgccacacmtgcgccccgcagcccacgacctcacctggtaccagtaccattccttggacgtgattggtttcctcttggccgtcgtgctgacagtggccttcatcacctt

SEQ ID NO: 54798 - DNA, 201 bp, Homo sapiens
ggagccgctggacctggccgtgttctgggtggagtttgtgatgaggcacaagggcgcgccacacctgcgccccgcagcccacgacctcacctggtaccagkaccattccttggacgtgattggtttcctcttggccgtcgtgctgacagtggccttcatcacctttaaatgttgtgcttatggctaccggaaatgcttggg

SEQ ID NO: 54799 - DNA, 201 bp, Homo sapiens
tgcctttatcacccatgctggttcccatggtgtttatgaaagcatatgcaatggcgttcccatggtgatgatgcccttgtttggtgatcagatggacaatscaaagcgcatggagactaagggagctggagtgaccctgaatgttctggaaatgacttctgaagatttagaaaatgctctaaaagcagtcatcaatgacaa

SEQ ID NO: 54800 - DNA, 201 bp, Homo sapiens
cgcccggtggagccgctggacctggccgtgttctgggtggagtttgtgatgaggcacaagggcgcgccacacctgcgccccgcagcccacgacctcacctrgtaccagtaccattccttggacgtgattggtttcctcttggccgtcgtgctgacagtggccttcatcacctttaaatgttgtgcttatggctaccggaaa

SEQ ID NO: 54801 - DNA, 201 bp, Homo sapiens
attggaggtatcaactgtaagaagaggaaagacttgtctcaggaatttgaagcctacattaatgcttctggagaacatggaattgtggttttctctttggratcaatggtctcagaaattccagagaagaaagctatggcaattgctgatgctttgggcaaaatccctcagacagtcctgtggcggtacactggaacccga

SEQ ID NO: 54802 - DNA, 201 bp, Homo sapiens
acacgatacttgttaagtggctaccccaaaacgatctgcttggtcacccgatgacccgtgcctttatcacccatgctggttcccatggtgtttatgaaagsatatgcaatggcgttcccatggtgatgatgcccttgtttggtgatcagatggacaatgcaaagcgcatggagactaagggagctggagtgaccctgaatg

SEQ ID NO: 54803 - DNA, 201 bp, Homo sapiens; identical to SEQ ID NO: 54788

SEQ ID NO: 54804 - DNA, 201 bp, Homo sapiens; identical to SEQ ID NO: 54789

SEQ ID NO: 54805 - DNA, 201 bp, Homo sapiens; identical to SEQ ID NO: 54790

SEQ ID NO: 54806 - DNA, 201 bp, Homo sapiens; identical to SEQ ID NO: 54765

SEQ ID NO: 54807 - DNA, 201 bp, Homo sapiens; identical to SEQ ID NO: 54791

SEQ ID NO: 54808 - DNA, 201 bp, Homo sapiens; identical to SEQ ID NO: 54766

SEQ ID NO: 54809 - DNA, 201 bp, Homo sapiens; identical to SEQ ID NO: 54792

SEQ ID NO: 54810 - DNA, 201 bp, Homo sapiens; identical to SEQ ID NO: 54767

SEQ ID NO: 54811 - DNA, 201 bp, Homo sapiens; identical to SEQ ID NO: 54769

SEQ ID NO: 54812 - DNA, 201 bp, Homo sapiens; identical to SEQ ID NO: 54772

SEQ ID NO: 54813 - DNA, 201 bp, Homo sapiens; identical to SEQ ID NO: 54794

SEQ ID NO: 54814 - DNA, 201 bp, Homo sapiens; identical to SEQ ID NO: 54774

SEQ ID NO: 54815 - DNA, 201 bp, Homo sapiens; identical to SEQ ID NO: 54795

SEQ ID NO: 54816 - DNA, 201 bp, Homo sapiens; identical to SEQ ID NO: 54775

SEQ ID NO: 54817 - DNA, 201 bp, Homo sapiens
ctgatggcttgcacagggtggaccagcccccttcctctatgtgtgtgtctgctgctgacctgtggctttgccgaggcagggaagctactggtagtgcccayggatgggagccactggttcaccatgaggtcggtggtggagaaactcattctcagggggcatgaggtggttgtagtcatgccagaggtgagttggcaactg

SEQ ID NO: 54818 - DNA, 201 bp, Homo sapiens; identical to SEQ ID NO: 54778

SEQ ID NO: 54819 - DNA, 201 bp, Homo sapiens; identical to SEQ ID NO: 54797

SEQ ID NO: 54820 - DNA, 201 bp, Homo sapiens; identical to SEQ ID NO: 54796

SEQ ID NO: 54821 - DNA, 201 bp, Homo sapiens; identical to SEQ ID NO: 54798

SEQ ID NO: 54822 - DNA, 201 bp, Homo sapiens; identical to SEQ ID NO: 54799

SEQ ID NO: 54823 - DNA, 201 bp, Homo sapiens
tctgaaattctccaaacacctgttacggagtatgatctctacagccacacatcaatttggttgttgcgaacggactttgttttggactatcccaaacccgwgatgcccaacatgatcttcattggtggtatcaactgccatcagggaaagccgttgcctatggaatttgaagcctacattaatgcttctggagaacatgga

SEQ ID NO: 54824 - DNA, 201 bp, Homo sapiens; identical to SEQ ID NO: 54780

SEQ ID NO: 54825 - DNA, 201 bp, Homo sapiens; identical to SEQ ID NO: 54781

SEQ ID NO: 54826 - DNA, 201 bp, Homo sapiens; identical to SEQ ID NO: 54800

SEQ ID NO: 54827 - DNA, 201 bp, Homo sapiens; identical to SEQ ID NO: 54782

SEQ ID NO: 54828 - DNA, 201 bp, Homo sapiens; identical to SEQ ID NO: 54784

SEQ ID NO: 54829 - DNA, 201 bp, Homo sapiens
attggtggtatcaactgccatcagggaaagccgttgcctatggaatttgaagcctacattaatgcttctggagaacatggaattgtggttttctctttggratcaatggtctcagaaattccagagaagaaagctatggcaattgctgatgctttgggcaaaatccctcagacagtcctgtggcggtacactggaacccga

SEQ ID NO: 54830 - DNA, 201 bp, Homo sapiens; identical to SEQ ID NO: 54783

SEQ ID NO: 54831 - DNA, 201 bp, Homo sapiens; identical to SEQ ID NO: 54785

SEQ ID NO: 54832 - DNA, 201 bp, Homo sapiens; identical to SEQ ID NO: 54802

SEQ ID NO: 54833 - DNA, 201 bp, Homo sapiens; identical to SEQ ID NO: 54786

SEQ ID NO: 54834 - DNA, 201 bp, Homo sapiens; identical to SEQ ID NO: 54787

SEQ ID NO: 54835 - DNA, 201 bp, Homo sapiens; identical to SEQ ID NO: 54789

SEQ ID NO: 54836 - DNA, 201 bp, Homo sapiens; identical to SEQ ID NO: 54788

SEQ ID NO: 54837 - DNA, 201 bp, Homo sapiens; identical to SEQ ID NO: 54790

SEQ ID NO: 54838 - DNA, 201 bp, Homo sapiens; identical to SEQ ID NO: 54791

SEQ ID NO: 54839 - DNA, 201 bp, Homo sapiens; identical to SEQ ID NO: 54765

SEQ ID NO: 54840 - DNA, 201 bp, Homo sapiens; identical to SEQ ID NO: 54792

SEQ ID NO: 54841 - DNA, 201 bp, Homo sapiens; identical to SEQ ID NO: 54766

SEQ ID NO: 54842 - DNA, 201 bp, Homo sapiens; identical to SEQ ID NO: 54767

SEQ ID NO: 54843 - DNA, 201 bp, Homo sapiens; identical to SEQ ID NO: 54769

SEQ ID NO: 54844 - DNA, 201 bp, Homo sapiens; identical to SEQ ID NO: 54772

SEQ ID NO: 54845 - DNA, 201 bp, Homo sapiens; identical to SEQ ID NO: 54794

SEQ ID NO: 54846 - DNA, 138 bp, Homo sapiens
ataaattaatcagccccagagtgctttaaaaaattctcttaaataaaaataatagactcgctagtcagtaaagatatttgaatatgtatcgtgccccctcyggtgtctttgatcaggatgacatgtgccatttttcag

SEQ ID NO: 54847 - DNA, 201 bp, Homo sapiens; identical to SEQ ID NO: 54774

SEQ ID NO: 54848 - DNA, 201 bp, Homo sapiens; identical to SEQ ID NO: 54775

SEQ ID NO: 54849 - DNA, 201 bp, Homo sapiens
tgagctttttcagagagaggtgtcagtggtggatattctcagtcatgcatctgtgtggctgttccgaggggactttgtgatggactaccccaggccaatcrtgcccaacatggtcttcattgggggcatcaactgtgccaacaggaagccactatctcaggaatttgaagcctacattaatgcttctggagaacatggaat

SEQ ID NO: 54850 - DNA, 201 bp, Homo sapiens; identical to SEQ ID NO: 54778

SEQ ID NO: 54851 - DNA, 201 bp, Homo sapiens; identical to SEQ ID NO: 54797

SEQ ID NO: 54852 - DNA, 201 bp, Homo sapiens; identical to SEQ ID NO: 54796

SEQ ID NO: 54853 - DNA, 201 bp, Homo sapiens; identical to SEQ ID NO: 54798

SEQ ID NO: 54854 - DNA, 201 bp, Homo sapiens; identical to SEQ ID NO: 54799

SEQ ID NO: 54855 - DNA, 131 bp, Homo sapiens
atggccacaggactccaggttcccctgccgyggctggccacaggactgctgcttctcctcagtgtccagccctgggctgagagtggaaaggtgttggtggtgcccattgatggcagccactggctcagcat

SEQ ID NO: 54856 - DNA, 201 bp, Homo sapiens; identical to SEQ ID NO: 54780

SEQ ID NO: 54857 - DNA, 201 bp, Homo sapiens; identical to SEQ ID NO: 54800

SEQ ID NO: 54858 - DNA, 201 bp, Homo sapiens
acaggactgctgcttctcctcagtgtccagccctgggctgagagtggaaaggtgttggtggtgcccattgatggcagccactggctcagcatgcgggaggycttgcgggagctccatgccagaggccaccaggcagtggtcctcaccccagaggtgaatatgcacatcaaagaagagaactttttcaccctgacaacctat

SEQ ID NO: 54859 - DNA, 201 bp, Homo sapiens
ggtcttgtgtggagctactacataatgaggccctgatcaggcacctgaatgctacttcctttgatgtggttttaacagaccccgttaacctctgcgcggcrgtgctggctaagtacctgtcgattcctactgtgttttttttgaggaacattccatgtgatttagactttaagggcacacagtgtccaaacccttcctcct

SEQ ID NO: 54860 - DNA, 181 bp, Homo sapiens
atggccacaggactccaggttcccctgccgtggctggccacaggactgctgcttctcctcagtgtccagccctgggctgaragtggaaaggtgttggtggtgcccattgatggcagccactggctcagcatgcgggaggtcttgcgggagctccatgccagaggccaccaggcagtggtcc

SEQ ID NO: 54861 - DNA, 201 bp, Homo sapiens
attgggggcatcaactgtgccaacaggaagccactatctcaggaatttgaagcctacattaatgcttctggagaacatggaattgtggttttctctttggratcaatggtctcagaaattccagagaagaaagctatggcaattgctgatgctttgggcaaaatccctcagacagtcctgtggcggtacactggaacccga

SEQ ID NO: 54862 - DNA, 201 bp, Homo sapiens; identical to SEQ ID NO: 54784

SEQ ID NO: 54863 - DNA, 201 bp, Homo sapiens; identical to SEQ ID NO: 54783

SEQ ID NO: 54864 - DNA, 201 bp, Homo sapiens
tattcctagattactaacaaccaattcagaccacatgacattcatgcaaagggtcaagaacatgctctaccctctggccctgtcctacatttgccatgctktttctgctccttatgcaagccttgcctctgagctttttcagagagaggtgtcagtggtggatattctcagtcatgcatctgtgtggctgttccgagggga

SEQ ID NO: 54865 - DNA, 201 bp, Homo sapiens; identical to SEQ ID NO: 54802

SEQ ID NO: 54866 - DNA, 201 bp, Homo sapiens; identical to SEQ ID NO: 54785

SEQ ID NO: 54867 - DNA, 201 bp, Homo sapiens; identical to SEQ ID NO: 54786

SEQ ID NO: 54868 - DNA, 201 bp, Homo sapiens; identical to SEQ ID NO: 54787

SEQ ID NO: 54869 - DNA, 201 bp, Homo sapiens; identical to SEQ ID NO: 54765

SEQ ID NO: 54870 - DNA, 201 bp, Homo sapiens; identical to SEQ ID NO: 54766

SEQ ID NO: 54871 - DNA, 201 bp, Homo sapiens; identical to SEQ ID NO: 54767

SEQ ID NO: 54872 - DNA, 201 bp, Homo sapiens; identical to SEQ ID NO: 54769

SEQ ID NO: 54873 - DNA, 201 bp, Homo sapiens
ggtgttgtgtggagctactgcataatgaggccctgatcaggcacctgaatgctacttcctttgatgtggttttaacagaccccgttaacctctgcggggcrgtgctggctaagtacctgtcgattcctgctgtgtttttttggaggtacattccatgtgacttagactttaagggcacacagtgtccaaatccttcctcct

SEQ ID NO: 54874 - DNA, 201 bp, Homo sapiens; identical to SEQ ID NO: 54772

SEQ ID NO: 54875 - DNA, 201 bp, Homo sapiens
gcccactgatggcagcccctggctcagcatgcgggaggccttgcgggagctccatgccagaggccaccaggcggtggtcctcaccccagaggtgaatatgyacatcaaagaagagaaatttttcaccctgacagcctatgctgttccatggacccagaaggaatttgatcgcgttacgctgggctacactcaagggttctt

SEQ ID NO: 54876 - DNA, 201 bp, Homo sapiens; identical to SEQ ID NO: 54774

SEQ ID NO: 54877 - DNA, 201 bp, Homo sapiens; identical to SEQ ID NO: 54775

SEQ ID NO: 54878 - DNA, 201 bp, Homo sapiens; identical to SEQ ID NO: 54778

SEQ ID NO: 54879 - DNA, 201 bp, Homo sapiens
ttcataggtgttgtgtggagctactgcataatgaggccctgatcaggcacctgaatgctacttcctttgatgtggttttaacagaccccgttaacctctgyggggcggtgctggctaagtacctgtcgattcctgctgtgtttttttggaggtacattccatgtgacttagactttaagggcacacagtgtccaaatcctt

SEQ ID NO: 54880 - DNA, 201 bp, Homo sapiens; identical to SEQ ID NO: 54780

SEQ ID NO: 54881 - DNA, 199 bp, Homo sapiens
acagtcagctgtcggtggcttctgctgagatggccagaggactccaggttcccctgccgcggctggccacaggactgctgctcctcctcagtgtccagmcctgggctgagagtggaaaggtgttggtggtgcccactgatggcagcccctggctcagcatgcgggaggccttgcgggagctccatgccagaggccacca

SEQ ID NO: 54882 - DNA, 201 bp, Homo sapiens; identical to SEQ ID NO: 54781

SEQ ID NO: 54883 - DNA, 201 bp, Homo sapiens; identical to SEQ ID NO: 54782

SEQ ID NO: 54884 - DNA, 201 bp, Homo sapiens
tatgaacaatgtatctttggcccttcataggtgttgtgtggagctactgcataatgaggccctgatcaggcacctgaatgctacttcctttgatgtggttytaacagaccccgttaacctctgcggggcggtgctggctaagtacctgtcgattcctgctgtgtttttttggaggtacattccatgtgacttagactttaa

SEQ ID NO: 54885 - DNA, 201 bp, Homo sapiens; identical to SEQ ID NO: 54784

SEQ ID NO: 54886 - DNA, 201 bp, Homo sapiens
tgctacttcctttgatgtggttttaacagaccccgttaacctctgcggggcggtgctggctaagtacctgtcgattcctgctgtgtttttttggaggtacwttccatgtgacttagactttaagggcacacagtgtccaaatccttcctcctatattcctaagttactaacgaccaattcagaccacatgacattcctgca

SEQ ID NO: 54887 - DNA, 201 bp, Homo sapiens; identical to SEQ ID NO: 54783

SEQ ID NO: 54888 - DNA, 201 bp, Homo sapiens; identical to SEQ ID NO: 54785

SEQ ID NO: 54889 - DNA, 201 bp, Homo sapiens; identical to SEQ ID NO: 54786

SEQ ID NO: 54890 - DNA, 201 bp, Homo sapiens; identical to SEQ ID NO: 54787

SEQ ID NO: 54891 - DNA, 201 bp, Homo sapiens; identical to SEQ ID NO: 54789

SEQ ID NO: 54892 - DNA, 201 bp, Homo sapiens
gggttctttgaaacagaacatcttctgaagagatattctagaagtatggcaattatgaacaatgtatctttggcccttcataggtgttgtgtggagctacygcataatgaggccctgatcaggcacctgaatgctacttcctttgatgtggttttaacagaccccgttaacctctgcggggcggtgctggctaagtacctg

SEQ ID NO: 54893 - DNA, 201 bp, Homo sapiens; identical to SEQ ID NO: 54788

SEQ ID NO: 54894 - DNA, 201 bp, Homo sapiens; identical to SEQ ID NO: 54790

SEQ ID NO: 54895 - DNA, 201 bp, Homo sapiens; identical to SEQ ID NO: 54791

SEQ ID NO: 54896 - DNA, 201 bp, Homo sapiens; identical to SEQ ID NO: 54792

SEQ ID NO: 54897 - DNA, 201 bp, Homo sapiens; identical to SEQ ID NO: 54794

SEQ ID NO: 54898 - DNA, 201 bp, Homo sapiens; identical to SEQ ID NO: 54795

SEQ ID NO: 54899 - DNA, 201 bp, Homo sapiens
aggactgctgctcctcctcagtgtccagccctgggctgagagtggaaaggtgttggtggtgcccactgatggcagcccctggctcagcatgcgggaggccktgcgggagctccatgccagaggccaccaggcggtggtcctcaccccagaggtgaatatgcacatcaaagaagagaaatttttcaccctgacagcctatgc

SEQ ID NO: 54900 - DNA, 201 bp, Homo sapiens; identical to SEQ ID NO: 54796

SEQ ID NO: 54901 - DNA, 201 bp, Homo sapiens; identical to SEQ ID NO: 54797

SEQ ID NO: 54902 - DNA, 201 bp, Homo sapiens; identical to SEQ ID NO: 54798

SEQ ID NO: 54903 - DNA, 201 bp, Homo sapiens; identical to SEQ ID NO: 54799

SEQ ID NO: 54904 - DNA, 201 bp, Homo sapiens
atgctgttccatggacccagaaggaatttgatcgcgttacgctgggctacactcaagggttctttgaaacagaacatcttctgaagagatattctagaagyatggcaattatgaacaatgtatctttggcccttcataggtgttgtgtggagctactgcataatgaggccctgatcaggcacctgaatgctacttcctttg

SEQ ID NO: 54905 - DNA, 201 bp, Homo sapiens
ccaattcagaccacatgacattcctgcaaagggtcaagaacatgctctaccctctggccctgtcctacatttgccatactttttctgccccttatgcaagycttgcctctgagctttttcagagagaggtgtcagtggtggatcttgtcagctatgcatccgtgtggctgttccgaggggactttgtgatggactacccca

SEQ ID NO: 54906 - DNA, 160 bp, Homo sapiens
acagtcagctgtcggtggcttctgctgagatggccagaggactccaggttcccctgccgyggctggccacaggactgctgctcctcctcagtgtccagccctgggctgagagtggaaaggtgttggtggtgcccactgatggcagcccctggctcagcat

SEQ ID NO: 54907 - DNA, 201 bp, Homo sapiens
tccttcctcctatattcctaagttactaacgaccaattcagaccacatgacattcctgcaaagggtcaagaacatgctctaccctctggccctgtcctacmtttgccatactttttctgccccttatgcaagtcttgcctctgagctttttcagagagaggtgtcagtggtggatcttgtcagctatgcatccgtgtggct

SEQ ID NO: 54908 - DNA, 201 bp, Homo sapiens; identical to SEQ ID NO: 54800

SEQ ID NO: 54909 - DNA, 201 bp, Homo sapiens
tattcctaagttactaacgaccaattcagaccacatgacattcctgcaaagggtcaagaacatgctctaccctctggccctgtcctacatttgccatactktttctgccccttatgcaagtcttgcctctgagctttttcagagagaggtgtcagtggtggatcttgtcagctatgcatccgtgtggctgttccgagggga

SEQ ID NO: 54910 - DNA, 201 bp, Homo sapiens
attgggggcatcaactgtgccaacgggaagccactatctcaggaatttgaagcctacattaatgcttctggagaacatggaattgtggttttctctttggratcaatggtctcagaaattccagagaagaaagctatggcaattgctgatgctttgggcaaaatccctcagacagtcctgtggcggtacactggaacccga

SEQ ID NO: 54911 - DNA, 201 bp, Homo sapiens; identical to SEQ ID NO: 54802

SEQ ID NO: 54912 - DNA, 201 bp, Homo sapiens
ctatattcctaagttactaacgaccaattcagaccacatgacattcctgcaaagggtcaagaacatgctctaccctctggccctgtcctacatttgccatrctttttctgccccttatgcaagtcttgcctctgagctttttcagagagaggtgtcagtggtggatcttgtcagctatgcatccgtgtggctgttccgagg

SEQ ID NO: 54913 - DNA, 201 bp, Homo sapiens; identical to SEQ ID NO: 54788

SEQ ID NO: 54914 - DNA, 201 bp, Homo sapiens; identical to SEQ ID NO: 54789

SEQ ID NO: 54915 - DNA, 201 bp, Homo sapiens; identical to SEQ ID NO: 54790

SEQ ID NO: 54916 - DNA, 201 bp, Homo sapiens; identical to SEQ ID NO: 54765

SEQ ID NO: 54917 - DNA, 201 bp, Homo sapiens; identical to SEQ ID NO: 54791

SEQ ID NO: 54918 - DNA, 201 bp, Homo sapiens; identical to SEQ ID NO: 54766

SEQ ID NO: 54919 - DNA, 201 bp, Homo sapiens; identical to SEQ ID NO: 54792

SEQ ID NO: 54920 - DNA, 201 bp, Homo sapiens; identical to SEQ ID NO: 54767

SEQ ID NO: 54921 - DNA, 201 bp, Homo sapiens; identical to SEQ ID NO: 54769

SEQ ID NO: 54922 - DNA, 201 bp, Homo sapiens; identical to SEQ ID NO: 54772

SEQ ID NO: 54923 - DNA, 201 bp, Homo sapiens; identical to SEQ ID NO: 54794

SEQ ID NO: 54924 - DNA, 201 bp, Homo sapiens
tgggctgagagtgggaaggtgctggtggtacccattgatggcagccactggctcgcatgcgggaggccgtgcgggagctccatgccagaggccaccaggcrgtggtcctcaccccagaggtgaatatgcacatcaaacaagagaaatttttcaccctgacaacctatgccatttcatggacccaggatgaatttgatcgcc

SEQ ID NO: 54925 - DNA, 201 bp, Homo sapiens; identical to SEQ ID NO: 54774

SEQ ID NO: 54926 - DNA, 201 bp, Homo sapiens; identical to SEQ ID NO: 54775

SEQ ID NO: 54927 - DNA, 172 bp, Homo sapiens
agcccacgacctcacctggtaccagtaccattccttggacgtgattggtttcctcttggccgtcgtgctgacagtggccttcatcacctttaaatgttgtscttatggctaccggaaatgcttggggaaaaaagggcgagttaagaaagcccacaaatccaagacccattga

SEQ ID NO: 54928 - DNA, 201 bp, Homo sapiens; identical to SEQ ID NO: 54797

SEQ ID NO: 54929 - DNA, 201 bp, Homo sapiens; identical to SEQ ID NO: 54796

SEQ ID NO: 54930 - DNA, 201 bp, Homo sapiens; identical to SEQ ID NO: 54798

SEQ ID NO: 54931 - DNA, 201 bp, Homo sapiens; identical to SEQ ID NO: 54799

SEQ ID NO: 54932 - DNA, 201 bp, Homo sapiens
ctaccctctggccctgtcctacctttgccatgctctttctgctccttatgcaagccttgcctctgagctttttcagagggaggtgtcagtggtggatcttstcagccatgcatctgtgtggctgttccgaggggactttgtgatggattaccccaggccgatcatgcccaacatggtcttcattgggggcatcaactgtgc

SEQ ID NO: 54933 - DNA, 201 bp, Homo sapiens; identical to SEQ ID NO: 54800

SEQ ID NO: 54934 - DNA, 201 bp, Homo sapiens
atggacccaggatgaatttgatcgccttgtgctgggccacactcaactgtactttgaaacagaacattttctgaagacattttctaaaagtatggcaattwtgaaaaattcatctttggtctttcataggtcttgtgtggagctactgcataatgaggccctgatcaggcacctgaatgctacttccttcgatgtggtttt

SEQ ID NO: 54935 - DNA, 201 bp, Homo sapiens
tgtccaaatccttcctcctatattcctaagttactaacgaccaattcagaccacatgacattcctgcaaagggtcaagaacatgctctaccctctggcccygtcctacctttgccatgctctttctgctccttatgcaagccttgcctctgagctttttcagagggaggtgtcagtggtggatcttctcagccatgcatct

SEQ ID NO: 54936 - DNA, 201 bp, Homo sapiens; identical to SEQ ID NO: 54783

SEQ ID NO: 54937 - DNA, 201 bp, Homo sapiens; identical to SEQ ID NO: 54861

SEQ ID NO: 54938 - DNA, 201 bp, Homo sapiens; identical to SEQ ID NO: 54784

SEQ ID NO: 54939 - DNA, 201 bp, Homo sapiens; identical to SEQ ID NO: 54802

SEQ ID NO: 54940 - DNA, 201 bp, Homo sapiens
tctgctccttatgcaagccttgcctctgagctttttcagagggaggtgtcagtggtggatcttctcagccatgcatctgtgtggctgttccgaggggactytgtgatggattaccccaggccgatcatgcccaacatggtcttcattgggggcatcaactgtgccaacaggaagccactatctcaggaatttgaagcctac

SEQ ID NO: 54941 - DNA, 201 bp, Homo sapiens; identical to SEQ ID NO: 54785

SEQ ID NO: 54942 - DNA, 201 bp, Homo sapiens
acctatgccatttcatggacccaggatgaatttgatcgccttgtgctgggccacactcaactgtactttgaaacagaacattttctgaagacattttctaraagtatggcaattttgaaaaattcatctttggtctttcataggtcttgtgtggagctactgcataatgaggccctgatcaggcacctgaatgctacttcc

SEQ ID NO: 54943 - DNA, 201 bp, Homo sapiens; identical to SEQ ID NO: 54786

SEQ ID NO: 54944 - DNA, 201 bp, Homo sapiens; identical to SEQ ID NO: 54787

SEQ ID NO: 54945 - DNA, 201 bp, Homo sapiens
ctcgctggacggcaccattgcgaagtgcattttctctattaacaagttcatccaatggtatttttgacttatttttttcaaattgcaggagtttgtttaakgacaaaaaattagtagaatacttaaaggagagttgttttgatgcagtgtttctcgatccttttgatgcctgtggcttaattgttgccaaatatttctccc

SEQ ID NO: 54946 - DNA, 133 bp, Homo sapiens
atggctcgtgcagggtggactggcctccttccmctatatgtgtgtctactgctgacctgtggctttgccaaggcagggaagctgctggtagtgcccatggatgggagccactggttcaccatgcagtcggtgg

SEQ ID NO: 54947 - DNA, 201 bp, Homo sapiens; identical to SEQ ID NO: 54765

SEQ ID NO: 54948 - DNA, 201 bp, Homo sapiens; identical to SEQ ID NO: 54766

SEQ ID NO: 54949 - DNA, 201 bp, Homo sapiens; identical to SEQ ID NO: 54767

SEQ ID NO: 54950 - DNA, 201 bp, Homo sapiens; identical to SEQ ID NO: 54769

SEQ ID NO: 54951 - DNA, 201 bp, Homo sapiens; identical to SEQ ID NO: 54772

SEQ ID NO: 54952 - DNA, 201 bp, Homo sapiens; identical to SEQ ID NO: 54774

SEQ ID NO: 54953 - DNA, 201 bp, Homo sapiens; identical to SEQ ID NO: 54775

SEQ ID NO: 54954 - DNA, 201 bp, Homo sapiens; identical to SEQ ID NO: 54778

SEQ ID NO: 54955 - DNA, 201 bp, Homo sapiens; identical to SEQ ID NO: 54780

SEQ ID NO: 54956 - DNA, 201 bp, Homo sapiens; identical to SEQ ID NO: 54781

SEQ ID NO: 54957 - DNA, 201 bp, Homo sapiens; identical to SEQ ID NO: 54782

SEQ ID NO: 54958 - DNA, 201 bp, Homo sapiens; identical to SEQ ID NO: 54784

SEQ ID NO: 54959 - DNA, 201 bp, Homo sapiens; identical to SEQ ID NO: 54783

SEQ ID NO: 54960 - DNA, 201 bp, Homo sapiens; identical to SEQ ID NO: 54785

SEQ ID NO: 54961 - DNA, 201 bp, Homo sapiens; identical to SEQ ID NO: 54786

SEQ ID NO: 54962 - DNA, 201 bp, Homo sapiens; identical to SEQ ID NO: 54787

SEQ ID NO: 54963 - DNA, 201 bp, Homo sapiens; identical to SEQ ID NO: 54788

SEQ ID NO: 54964 - DNA, 201 bp, Homo sapiens; identical to SEQ ID NO: 54789

SEQ ID NO: 54965 - DNA, 201 bp, Homo sapiens; identical to SEQ ID NO: 54790

SEQ ID NO: 54966 - DNA, 201 bp, Homo sapiens; identical to SEQ ID NO: 54791

SEQ ID NO: 54967 - DNA, 201 bp, Homo sapiens; identical to SEQ ID NO: 54792

SEQ ID NO: 54968 - DNA, 201 bp, Homo sapiens
tcgtagtcatgccagaggtgagttggcaactgggaagatcactgaattgcacagtgaagacttactcaacctcatacactctggaggatcaggaccgggarttcatggtttttgccgatgctcgctggacggcaccattgcgaagtgcattttctctattaacaagttcatccaatggtatttttgacttatttttttcaa

SEQ ID NO: 54969 - DNA, 201 bp, Homo sapiens; identical to SEQ ID NO: 54794

SEQ ID NO: 54970 - DNA, 201 bp, Homo sapiens; identical to SEQ ID NO: 54795

SEQ ID NO: 54971 - DNA, 201 bp, Homo sapiens; identical to SEQ ID NO: 54797

SEQ ID NO: 54972 - DNA, 201 bp, Homo sapiens; identical to SEQ ID NO: 54796

SEQ ID NO: 54973 - DNA, 201 bp, Homo sapiens
cactctggaggatcaggaccgggagttcatggtttttgccgatgctcgctggacggcaccattgcgaagtgcattttctctattaacaagttcatccaatrgtatttttgacttatttttttcaaattgcaggagtttgtttaaggacaaaaaattagtagaatacttaaaggagagttgttttgatgcagtgtttctcga

SEQ ID NO: 54974 - DNA, 201 bp, Homo sapiens; identical to SEQ ID NO: 54799

SEQ ID NO: 54975 - DNA, 201 bp, Homo sapiens; identical to SEQ ID NO: 54798

SEQ ID NO: 54976 - DNA, 201 bp, Homo sapiens
gtgcagggtggactggcctccttccactatatgtgtgtctactgctgacctgtggctttgccaaggcagggaagctgctggtagtgcccatggatgggagycactggttcaccatgcagtcggtggtggagaaactcatcctcagggggcatgaggtggtcgtagtcatgccagaggtgagttggcaactgggaagatcac

SEQ ID NO: 54977 - DNA, 201 bp, Homo sapiens
ctattaacaagttcatccaatggtatttttgacttatttttttcaaattgcaggagtttgtttaaggacaaaaaattagtagaatacttaaaggagagttsttttgatgcagtgtttctcgatccttttgatgcctgtggcttaattgttgccaaatatttctccctcccctctgtggtcttcgccaggggaatattttgc

SEQ ID NO: 54978 - DNA, 201 bp, Homo sapiens; identical to SEQ ID NO: 54800

SEQ ID NO: 54979 - DNA, 201 bp, Homo sapiens
tttgcccctattttttcaaaaatgtcttagaaatagcctctgaaattctccaaacccctgtcacggcatatgatctctacagccacacatcaatttggttrttgcgaactgactttgttttggagtatcccaaacccgtgatgcccaatatgatcttcattggtggtatcaactgtcatcagggaaagccagtgcctatgg

SEQ ID NO: 54980 - DNA, 201 bp, Homo sapiens
ccactatcttgaagaaggtgcacagtgccctgctcctctttcctatgtccccagacttctcttagggttctcagacgccatgactttcaaggagagagtayggaaccacatcatgcacttggaggaacatttattttgcccctattttttcaaaaatgtcttagaaatagcctctgaaattctccaaacccctgtcacggc

SEQ ID NO: 54981 - DNA, 201 bp, Homo sapiens
attggtggtatcaactgtcatcagggaaagccagtgcctatggaatttgaagcctacattaatgcttctggagaacatggaattgtggttttctctttggratcaatggtctcagaaattccagagaagaaagctatggcaattgctgatgctttgggcaaaatccctcagacagtcctgtggcggtacactggaacccga

SEQ ID NO: 54982 - DNA, 201 bp, Homo sapiens
tggacggcaccattgcgaagtgcattttctctattaacaagttcatccaatggtatttttgacttatttttttcaaattgcaggagtttgtttaaggacaraaaattagtagaatacttaaaggagagttgttttgatgcagtgtttctcgatccttttgatgcctgtggcttaattgttgccaaatatttctccctcccc

SEQ ID NO: 54983 - DNA, 201 bp, Homo sapiens; identical to SEQ ID NO: 54802

SEQ ID NO: 54984 - DNA, 201 bp, Homo sapiens
ctggacggcaccattgcgaagtgcattttctctattaacaagttcatccaatggtatttttgacttatttttttcaaattgcaggagtttgtttaaggacmaaaaattagtagaatacttaaaggagagttgttttgatgcagtgtttctcgatccttttgatgcctgtggcttaattgttgccaaatatttctccctccc

SEQ ID NO: 54985 - DNA, 201 bp, Homo sapiens; identical to SEQ ID NO: 54789

SEQ ID NO: 54986 - DNA, 201 bp, Homo sapiens; identical to SEQ ID NO: 54788

SEQ ID NO: 54987 - DNA, 201 bp, Homo sapiens; identical to SEQ ID NO: 54790

SEQ ID NO: 54988 - DNA, 201 bp, Homo sapiens; identical to SEQ ID NO: 54791

SEQ ID NO: 54989 - DNA, 201 bp, Homo sapiens; identical to SEQ ID NO: 54765

SEQ ID NO: 54990 - DNA, 201 bp, Homo sapiens; identical to SEQ ID NO: 54792

SEQ ID NO: 54991 - DNA, 201 bp, Homo sapiens; identical to SEQ ID NO: 54766

SEQ ID NO: 54992 - DNA, 201 bp, Homo sapiens; identical to SEQ ID NO: 54767

SEQ ID NO: 54993 - DNA, 201 bp, Homo sapiens
ccgttcctttatgtgtgtgtctactgctgacctgtggctttgccgaggcagggaagctgctggtagtgcccatggatgggagtcactggttcaccatgcartcggtggtggagaaacttatcctcagggggcatgaggtggttgtagtcatgccagaggtgagttggcaactggaaagatcactgaattgcacagtgaaga

SEQ ID NO: 54994 - DNA, 201 bp, Homo sapiens; identical to SEQ ID NO: 54769

SEQ ID NO: 54995 - DNA, 201 bp, Homo sapiens
cagatgccatgactttcaaggagagagtatggaaccacatcgtgcacttggaggaccatttattttgccagtatctttttagaaatgccctagaaatagcytctgaaattctccaaacccctgtcacggcatatgatctctacagtcacacatcaatttggttgttgcgaacggactttgttttggactatcccaaacccg

SEQ ID NO: 54996 - DNA, 201 bp, Homo sapiens
catcgtgcacttggaggaccatttattttgccagtatctttttagaaatgccctagaaatagcctctgaaattctccaaacccctgtcacggcatatgatmtctacagtcacacatcaatttggttgttgcgaacggactttgttttggactatcccaaacccgtgatgcccaacatgatcttcattggtggtatcaactg

SEQ ID NO: 54997 - DNA, 201 bp, Homo sapiens; identical to SEQ ID NO: 54772

SEQ ID NO: 54998 - DNA, 201 bp, Homo sapiens; identical to SEQ ID NO: 54794

SEQ ID NO: 54999 - DNA, 201 bp, Homo sapiens; identical to SEQ ID NO: 54795

SEQ ID NO: 55000 - DNA, 201 bp, Homo sapiens; identical to SEQ ID NO: 54774

SEQ ID NO: 55001 - DNA, 201 bp, Homo sapiens; identical to SEQ ID NO: 54775

SEQ ID NO: 55002 - DNA, 201 bp, Homo sapiens; identical to SEQ ID NO: 54778

SEQ ID NO: 55003 - DNA, 201 bp, Homo sapiens; identical to SEQ ID NO: 54797

SEQ ID NO: 55004 - DNA, 201 bp, Homo sapiens; identical to SEQ ID NO: 54796

SEQ ID NO: 55005 - DNA, 201 bp, Homo sapiens; identical to SEQ ID NO: 54798

SEQ ID NO: 55006 - DNA, 201 bp, Homo sapiens; identical to SEQ ID NO: 54799

SEQ ID NO: 55007 - DNA, 201 bp, Homo sapiens
ccagtatctttttagaaatgccctagaaatagcctctgaaattctccaaacccctgtcacggcatatgatctctacagtcacacatcaatttggttgttgygaacggactttgttttggactatcccaaacccgtgatgcccaacatgatcttcattggtggtatcaactgtcatcagggaaagccattgcctatggaatt

SEQ ID NO: 55008 - DNA, 201 bp, Homo sapiens; identical to SEQ ID NO: 54780

SEQ ID NO: 55009 - DNA, 201 bp, Homo sapiens; identical to SEQ ID NO: 54781

SEQ ID NO: 55010 - DNA, 201 bp, Homo sapiens; identical to SEQ ID NO: 54800

SEQ ID NO: 55011 - DNA, 201 bp, Homo sapiens; identical to SEQ ID NO: 54782

SEQ ID NO: 55012 - DNA, 201 bp, Homo sapiens
tggtcttcaccaggggaatattttgccaccatcttgaagaaggtgcacagtgccctgctcctctttcctatgtccccaatgatctcttagggttctcagaygccatgactttcaaggagagagtatggaaccacatcgtgcacttggaggaccatttattttgccagtatctttttagaaatgccctagaaatagcctctg

SEQ ID NO: 55013 - DNA, 201 bp, Homo sapiens
attggtggtatcaactgtcatcagggaaagccattgcctatggaatttgaagcctacattaatgcttctggagaacatggaattgtggttttctctttggratcaatggtctcagaaattccagagaagaaagctatggcaattgctgatgctttgggcaaaatccctcagacagtcctgtggcggtacactggaacccga

SEQ ID NO: 55014 - DNA, 201 bp, Homo sapiens; identical to SEQ ID NO: 54784

SEQ ID NO: 55015 - DNA, 201 bp, Homo sapiens; identical to SEQ ID NO: 54783

SEQ ID NO: 55016 - DNA, 201 bp, Homo sapiens; identical to SEQ ID NO: 54802

SEQ ID NO: 55017 - DNA, 201 bp, Homo sapiens; identical to SEQ ID NO: 54785

SEQ ID NO: 55018 - DNA, 201 bp, Homo sapiens; identical to SEQ ID NO: 54786

SEQ ID NO: 55019 - DNA, 201 bp, Homo sapiens; identical to SEQ ID NO: 54787

SEQ ID NO: 55020 - DNA, 201 bp, Homo sapiens; identical to SEQ ID NO: 54765

SEQ ID NO: 55021 - DNA, 201 bp, Homo sapiens; identical to SEQ ID NO: 54766

SEQ ID NO: 55022 - DNA, 201 bp, Homo sapiens; identical to SEQ ID NO: 54767

SEQ ID NO: 55023 - DNA, 201 bp, Homo sapiens; identical to SEQ ID NO: 54769

SEQ ID NO: 55024 - DNA, 201 bp, Homo sapiens; identical to SEQ ID NO: 54772

SEQ ID NO: 55025 - DNA, 201 bp, Homo sapiens; identical to SEQ ID NO: 54774

SEQ ID NO: 55026 - DNA, 201 bp, Homo sapiens; identical to SEQ ID NO: 54775

SEQ ID NO: 55027 - DNA, 172 bp, Homo sapiens; identical to SEQ ID NO: 54927

SEQ ID NO: 55028 - DNA, 201 bp, Homo sapiens
ggtgagttggcaactgggaaaatcactgaattgcacagtgaagacttactcaacctcatacactctggaggatctggaccgggaattcatggatttcgccsatgctcaatggaaagcacaagtacgaagtttgttttctctatttctgagttcatccaatggtttttttaacttatttttttcgcattgcaggagtttgtt

SEQ ID NO: 55029 - DNA, 201 bp, Homo sapiens
ttgcacagtgaagacttactcaacctcatacactctggaggatctggaccgggaattcatggatttcgccgatgctcaatggaaagcacaagtacgaagtwtgttttctctatttctgagttcatccaatggtttttttaacttatttttttcgcattgcaggagtttgtttaatgaccgaaaattagtagaatacttaaa

SEQ ID NO: 55030 - DNA, 201 bp, Homo sapiens
agttcttttgatgcggtgtttcttgatccttttgatgcctgtggcttaattgttgccaaatatttctccctcccctctgtggtcttcgccaggggaatagbttgccactatcttgaagaaggtgcacagtgccctgctcctctttcctatgtccccagaattctcttagggttctcagatgccatgactttcaaggagaga

SEQ ID NO: 55031 - DNA, 144 bp, Homo sapiens
atggctcgcacagggtggaccagccccattcccctatgtgtttstctgctgctgacctgtggctttgctgaggcagggaagctgctggtagtgcccatggatgggagtcactggttcaccatgcagtcggtggtggagaaactt

SEQ ID NO: 55032 - DNA, 201 bp, Homo sapiens
gttcatccaatggtttttttaacttatttttttcgcattgcaggagtttgtttaatgaccgaaaattagtagaatacttaaaggagagttcttttgatgcrgtgtttcttgatccttttgatgcctgtggcttaattgttgccaaatatttctccctcccctctgtggtcttcgccaggggaatagcttgccactatcttg

SEQ ID NO: 55033 - DNA, 201 bp, Homo sapiens
atggtttttttaacttatttttttcgcattgcaggagtttgtttaatgaccgaaaattagtagaatacttaaaggagagttcttttgatgcggtgtttctkgatccttttgatgcctgtggcttaattgttgccaaatatttctccctcccctctgtggtcttcgccaggggaatagcttgccactatcttgaagaaggtg

SEQ ID NO: 55034 - DNA, 201 bp, Homo sapiens; identical to SEQ ID NO: 54784

SEQ ID NO: 55035 - DNA, 201 bp, Homo sapiens; identical to SEQ ID NO: 54783

SEQ ID NO: 55036 - DNA, 201 bp, Homo sapiens; identical to SEQ ID NO: 54785

SEQ ID NO: 55037 - DNA, 201 bp, Homo sapiens; identical to SEQ ID NO: 54786

SEQ ID NO: 55038 - DNA, 201 bp, Homo sapiens; identical to SEQ ID NO: 54787

SEQ ID NO: 55039 - DNA, 201 bp, Homo sapiens; identical to SEQ ID NO: 54789

SEQ ID NO: 55040 - DNA, 201 bp, Homo sapiens; identical to SEQ ID NO: 54788

SEQ ID NO: 55041 - DNA, 201 bp, Homo sapiens; identical to SEQ ID NO: 54790

SEQ ID NO: 55042 - DNA, 201 bp, Homo sapiens; identical to SEQ ID NO: 54791

SEQ ID NO: 55043 - DNA, 201 bp, Homo sapiens; identical to SEQ ID NO: 54792

SEQ ID NO: 55044 - DNA, 201 bp, Homo sapiens; identical to SEQ ID NO: 54794

SEQ ID NO: 55045 - DNA, 201 bp, Homo sapiens
gcacagtgaagacttactcaacctcatacactctggaggatctggaccgggaattcatggatttcgccgatgctcaatggaaagcacaagtacgaagtttrttttctctatttctgagttcatccaatggtttttttaacttatttttttcgcattgcaggagtttgtttaatgaccgaaaattagtagaatacttaaagg

SEQ ID NO: 55046 - DNA, 201 bp, Homo sapiens
cttactcaacctcatacactctggaggatctggaccgggaattcatggatttcgccgatgctcaatggaaagcacaagtacgaagtttgttttctctattwctgagttcatccaatggtttttttaacttatttttttcgcattgcaggagtttgtttaatgaccgaaaattagtagaatacttaaaggagagttcttttg

SEQ ID NO: 55047 - DNA, 201 bp, Homo sapiens
ttactcaacctcatacactctggaggatctggaccgggaattcatggatttcgccgatgctcaatggaaagcacaagtacgaagtttgttttctctatttmtgagttcatccaatggtttttttaacttatttttttcgcattgcaggagtttgtttaatgaccgaaaattagtagaatacttaaaggagagttcttttga

SEQ ID NO: 55048 - DNA, 201 bp, Homo sapiens
ggatctggaccgggaattcatggatttcgccgatgctcaatggaaagcacaagtacgaagtttgttttctctatttctgagttcatccaatggtttttttracttatttttttcgcattgcaggagtttgtttaatgaccgaaaattagtagaatacttaaaggagagttcttttgatgcggtgtttcttgatccttttga

SEQ ID NO: 55049 - DNA, 201 bp, Homo sapiens
cttatttttttcgcattgcaggagtttgtttaatgaccgaaaattagtagaatacttaaaggagagttcttttgatgcggtgtttcttgatccttttgatrcctgtggcttaattgttgccaaatatttctccctcccctctgtggtcttcgccaggggaatagcttgccactatcttgaagaaggtgcacagtgccctgc

SEQ ID NO: 55050 - DNA, 201 bp, Homo sapiens; identical to SEQ ID NO: 54797

SEQ ID NO: 55051 - DNA, 201 bp, Homo sapiens; identical to SEQ ID NO: 54796

SEQ ID NO: 55052 - DNA, 201 bp, Homo sapiens; identical to SEQ ID NO: 54799

SEQ ID NO: 55053 - DNA, 201 bp, Homo sapiens; identical to SEQ ID NO: 54798

SEQ ID NO: 55054 - DNA, 201 bp, Homo sapiens
ggagtttgtttaatgaccgaaaattagtagaatacttaaaggagagttcttttgatgcggtgtttcttgatccttttgatgcctgtggcttaattgttgcyaaatatttctccctcccctctgtggtcttcgccaggggaatagcttgccactatcttgaagaaggtgcacagtgccctgctcctctttcctatgtcccca

SEQ ID NO: 55055 - DNA, 201 bp, Homo sapiens
atacttaaaggagagttcttttgatgcggtgtttcttgatccttttgatgcctgtggcttaattgttgccaaatatttctccctcccctctgtggtcttcrccaggggaatagcttgccactatcttgaagaaggtgcacagtgccctgctcctctttcctatgtccccagaattctcttagggttctcagatgccatgac

SEQ ID NO: 55056 - DNA, 201 bp, Homo sapiens
ccactatcttgaagaaggtgcacagtgccctgctcctctttcctatgtccccagaattctcttagggttctcagatgccatgactttcaaggagagagtayggaaccacatcatgcacttggaggaacatttattttgccagtatttttccaaaaatgccctagaaatagcctctgaaattctccaaacacctgtcacagc

SEQ ID NO: 55057 - DNA, 201 bp, Homo sapiens
agaaggtgcacagtgccctgctcctctttcctatgtccccagaattctcttagggttctcagatgccatgactttcaaggagagagtacggaaccacatcrtgcacttggaggaacatttattttgccagtatttttccaaaaatgccctagaaatagcctctgaaattctccaaacacctgtcacagcatatgatctcta

SEQ ID NO: 55058 - DNA, 201 bp, Homo sapiens
gccctgctcctctttcctatgtccccagaattctcttagggttctcagatgccatgactttcaaggagagagtacggaaccacatcatgcacttggaggamcatttattttgccagtatttttccaaaaatgccctagaaatagcctctgaaattctccaaacacctgtcacagcatatgatctctacagccacacatcaa

SEQ ID NO: 55059 - DNA, 201 bp, Homo sapiens
aggagagagtacggaaccacatcatgcacttggaggaacatttattttgccagtatttttccaaaaatgccctagaaatagcctctgaaattctccaaacmcctgtcacagcatatgatctctacagccacacatcaatttggttgttgcgaacagactttgttttggactatcccaaacccgtgatgcccaatatgatct

SEQ ID NO: 55060 - DNA, 201 bp, Homo sapiens; identical to SEQ ID NO: 54800

SEQ ID NO: 55061 - DNA, 201 bp, Homo sapiens
tacggaaccacatcatgcacttggaggaacatttattttgccagtatttttccaaaaatgccctagaaatagcctctgaaattctccaaacacctgtcacrgcatatgatctctacagccacacatcaatttggttgttgcgaacagactttgttttggactatcccaaacccgtgatgcccaatatgatcttcattggtg

SEQ ID NO: 55062 - DNA, 201 bp, Homo sapiens
attggtggtatcaactgccatcagggaaagccattgcctatggaatttgaagcctacattaatgcttctggagaacatggaattgtggttttctctttggratcaatggtctcagaaattccagagaagaaagctatggcaattgctgatgctttgggcaaaatccctcagacagtcctgtggcggtacactggaacccga

SEQ ID NO: 55063 - DNA, 201 bp, Homo sapiens; identical to SEQ ID NO: 54802

SEQ ID NO: 55064 - DNA, 201 bp, Homo sapiens
gccatatatatatatataagtaggagagggcgaacctctggcaggagcaaaggcgccatggctgtggagtcccagggcggacgcccacttgtcctgggcckgctgctgtgtgtgctgggcccagtggtgtcccatgctgggaagatactgttgatcccagtggatggcagccactggctgagcatgcttggggccatccag

SEQ ID NO: 55065 - DNA, 201 bp, Homo sapiens; identical to SEQ ID NO: 54765

SEQ ID NO: 55066 - DNA, 201 bp, Homo sapiens; identical to SEQ ID NO: 54766

SEQ ID NO: 55067 - DNA, 201 bp, Homo sapiens; identical to SEQ ID NO: 54767

SEQ ID NO: 55068 - DNA, 201 bp, Homo sapiens; identical to SEQ ID NO: 54769

SEQ ID NO: 55069 - DNA, 201 bp, Homo sapiens; identical to SEQ ID NO: 54772

SEQ ID NO: 55070 - DNA, 201 bp, Homo sapiens
gctgcagcagaggggacatgaaatagttgtcctagcacctgacgcctcgttgtacatcagagacggagcattttacaccttgaagacgtaccctgtgccaytccaaagggaggatgtgaaagagtcttttgttagtctcgggcataatgtttttgagaatgattctttcctgcagcgtgtgatcaaaacatacaagaaaat

SEQ ID NO: 55071 - DNA, 201 bp, Homo sapiens
tacgtgcccaggcctctctcctctcattcagatcacatgaccttcctgcagcgggtgaagaacatgctcattgccttttcacagaactttctgtgcgacgkggtttattccccgtatgcaacccttgcctcagaattccttcagagagaggtgactgtccaggacctattgagctctgcatctgtctggctgtttagaagt

SEQ ID NO: 55072 - DNA, 201 bp, Homo sapiens; identical to SEQ ID NO: 54774

SEQ ID NO: 55073 - DNA, 201 bp, Homo sapiens; identical to SEQ ID NO: 54775

SEQ ID NO: 55074 - DNA, 201 bp, Homo sapiens; identical to SEQ ID NO: 54778

SEQ ID NO: 55075 - DNA, 201 bp, Homo sapiens
cagccactggctgagcatgcttggggccatccagcagctgcagcagaggggacatgaaatagttgtcctagcacctgacgcctcgttgtacatcagagacrgagcattttacaccttgaagacgtaccctgtgccattccaaagggaggatgtgaaagagtcttttgttagtctcgggcataatgtttttgagaatgattc

SEQ ID NO: 55076 - DNA, 201 bp, Homo sapiens
gctgctgtgtgtgctgggcccagtggtgtcccatgctgggaagatactgttgatcccagtggatggcagccactggctgagcatgcttggggccatccagyagctgcagcagaggggacatgaaatagttgtcctagcacctgacgcctcgttgtacatcagagacggagcattttacaccttgaagacgtaccctgtgcc

SEQ ID NO: 55077 - DNA, 201 bp, Homo sapiens; identical to SEQ ID NO: 54780

SEQ ID NO: 55078 - DNA, 201 bp, Homo sapiens; identical to SEQ ID NO: 54781

SEQ ID NO: 55079 - DNA, 201 bp, Homo sapiens; identical to SEQ ID NO: 54782

SEQ ID NO: 55080 - DNA, 201 bp, Homo sapiens
tgagcatgcttggggccatccagcagctgcagcagaggggacatgaaatagttgtcctagcacctgacgcctcgttgtacatcagagacggagcattttamaccttgaagacgtaccctgtgccattccaaagggaggatgtgaaagagtcttttgttagtctcgggcataatgtttttgagaatgattctttcctgcagc

SEQ ID NO: 55081 - DNA, 201 bp, Homo sapiens; identical to SEQ ID NO: 54783

SEQ ID NO: 55082 - DNA, 201 bp, Homo sapiens; identical to SEQ ID NO: 54784

SEQ ID NO: 55083 - DNA, 201 bp, Homo sapiens; identical to SEQ ID NO: 54785

SEQ ID NO: 55084 - DNA, 201 bp, Homo sapiens; identical to SEQ ID NO: 54786

SEQ ID NO: 55085 - DNA, 201 bp, Homo sapiens; identical to SEQ ID NO: 54787

SEQ ID NO: 55086 - DNA, 201 bp, Homo sapiens; identical to SEQ ID NO: 54789

SEQ ID NO: 55087 - DNA, 201 bp, Homo sapiens; identical to SEQ ID NO: 54788

SEQ ID NO: 55088 - DNA, 201 bp, Homo sapiens
ccagggcggacgcccacttgtcctgggcctgctgctgtgtgtgctgggcccagtggtgtcccatgctgggaagatactgttgatcccagtggatggcagcsactggctgagcatgcttggggccatccagcagctgcagcagaggggacatgaaatagttgtcctagcacctgacgcctcgttgtacatcagagacggagc

SEQ ID NO: 55089 - DNA, 201 bp, Homo sapiens; identical to SEQ ID NO: 54790

SEQ ID NO: 55090 - DNA, 201 bp, Homo sapiens
gccatgcagcctggaatttgaggctacccagtgccccaacccattctcctacgtgcccaggcctctctcctctcattcagatcacatgaccttcctgcagygggtgaagaacatgctcattgccttttcacagaactttctgtgcgacgtggtttattccccgtatgcaacccttgcctcagaattccttcagagagaggt

SEQ ID NO: 55091 - DNA, 201 bp, Homo sapiens; identical to SEQ ID NO: 54791

SEQ ID NO: 55092 - DNA, 201 bp, Homo sapiens; identical to SEQ ID NO: 54792

SEQ ID NO: 55093 - DNA, 201 bp, Homo sapiens
cctctctcctctcattcagatcacatgaccttcctgcagcgggtgaagaacatgctcattgccttttcacagaactttctgtgcgacgtggtttattcccmgtatgcaacccttgcctcagaattccttcagagagaggtgactgtccaggacctattgagctctgcatctgtctggctgtttagaagtgactttgtgaag

SEQ ID NO: 55094 - DNA, 201 bp, Homo sapiens
cagctttgatgtcatgctgacggaccctttccttccttgcagccccatcgtggcccagtacctgtctctgcccactgtattcttcttgcatgcactgccaygcagcctggaatttgaggctacccagtgccccaacccattctcctacgtgcccaggcctctctcctctcattcagatcacatgaccttcctgcagcgggt

SEQ ID NO: 55095 - DNA, 201 bp, Homo sapiens; identical to SEQ ID NO: 54794

SEQ ID NO: 55096 - DNA, 201 bp, Homo sapiens; identical to SEQ ID NO: 54795

SEQ ID NO: 55097 - DNA, 201 bp, Homo sapiens; identical to SEQ ID NO: 54796

SEQ ID NO: 55098 - DNA, 201 bp, Homo sapiens; identical to SEQ ID NO: 54797

SEQ ID NO: 55099 - DNA, 201 bp, Homo sapiens
accttctttatctctgaaagtgaactccctgctacctttgtggactgacagctttttatagtcacgtgacacagtcaaacattaacttggtgtatcgattsgtttttgccatatatatatatataagtaggagagggcgaacctctggcaggagcaaaggcgccatggctgtggagtcccagggcggacgcccacttgtcc

SEQ ID NO: 55100 - DNA, 201 bp, Homo sapiens; identical to SEQ ID NO: 54798

SEQ ID NO: 55101 - DNA, 201 bp, Homo sapiens; identical to SEQ ID NO: 54799

SEQ ID NO: 55102 - DNA, 201 bp, Homo sapiens
gcctgctgctgtgtgtgctgggcccagtggtgtcccatgctgggaagatactgttgatcccagtggatggcagccactggctgagcatgcttggggccatycagcagctgcagcagaggggacatgaaatagttgtcctagcacctgacgcctcgttgtacatcagagacggagcattttacaccttgaagacgtaccctg

SEQ ID NO: 55103 - DNA, 201 bp, Homo sapiens
cttttcacagaactttctgtgcgacgtggtttattccccgtatgcaacccttgcctcagaattccttcagagagaggtgactgtccaggacctattgagcyctgcatctgtctggctgtttagaagtgactttgtgaaggattaccctaggcccatcatgcccaatatggtttttgttggtggaatcaactgccttcacca

SEQ ID NO: 55104 - DNA, 201 bp, Homo sapiens
gaaagcagctttgatgtcatgctgacggaccctttccttccttgcagccccatcgtggcccagtacctgtctctgcccactgtattcttcttgcatgcacwgccatgcagcctggaatttgaggctacccagtgccccaacccattctcctacgtgcccaggcctctctcctctcattcagatcacatgaccttcctgcag

SEQ ID NO: 55105 - DNA, 201 bp, Homo sapiens; identical to SEQ ID NO: 54800

SEQ ID NO: 55106 - DNA, 201 bp, Homo sapiens
gttggtggaatcaactgccttcaccaaaatccactatcccaggaatttgaagcctacattaatgcttctggagaacatggaattgtggttttctctttggratcaatggtctcagaaattccagagaagaaagctatggcaattgctgatgctttgggcaaaatccctcagacagtcctgtggcggtacactggaacccga

SEQ ID NO: 55107 - DNA, 201 bp, Homo sapiens; identical to SEQ ID NO: 54802

SEQ ID NO: 55108 - DNA, 201 bp, Homo sapiens; identical to SEQ ID NO: 54932

SEQ ID NO: 55109 - DNA, 201 bp, Homo sapiens; identical to SEQ ID NO: 54934

SEQ ID NO: 55110 - DNA, 201 bp, Homo sapiens; identical to SEQ ID NO: 54924

SEQ ID NO: 55111 - DNA, 201 bp, Homo sapiens; identical to SEQ ID NO: 54935

SEQ ID NO: 55112 - DNA, 186 bp, Homo sapiens
tctgctccttatgcaagccttgcctctgagctttttcagagggaggtgtcagtggtggatcttctcagccatgcatctgtgtggctgttccgaggggactytgtgatggattaccccaggccgatcatgcccaacatggtcttcattgggggcatcaactgtgccaacaggaagccactatctcag

SEQ ID NO: 55113 - DNA, 201 bp, Homo sapiens; identical to SEQ ID NO: 54942

SEQ ID NO: 55114 - DNA, 201 bp, Homo sapiens
atcaccatctatcatcccactgccaccatgctggcctcagggctgcttctggtgaccttgctggcctgcctgactgtgatggtcttgatgtcagtctggcrgcagaggaagagcagggggaagctgcctccgggacccaccccattgcccttcattggaaactacctgcagctgaacacagagcagatgtacaactccctc

SEQ ID NO: 55115 - DNA, 201 bp, Homo sapiens
ccccagccatcaccatctatcatcccactgccaccatgctggcctcagggctgcttctggtgaccttgctggcctgcctgactgtgatggtcttgatgtcwgtctggcggcagaggaagagcagggggaagctgcctccgggacccaccccattgcccttcattggaaactacctgcagctgaacacagagcagatgtaca

SEQ ID NO: 55116 - DNA, 201 bp, Homo sapiens
ggctttgccacgatcccacgaaactacaccatgagcttcctgccccgctgagcgagggctgtgctggtgcagggctggtgggcggggccagggaaacggcsggggcaggggcggggcttgtgggaggggcggggctaagaatgggggcagtgggggaaggaaggggagaggtggttagagggaacagaagaaacagaaggg

SEQ ID NO: 55117 - DNA, 201 bp, Homo sapiens
aagtccatatgcctggaatcccccgtcctgagacccttaaccctgcatcctccacaacagaagacccccagatgcacagccacacttccatctcaccctartaaaacccagacctttggattcctctcccgtggaatgcccaaatccacaactttggggtgcattctcactcccagatcccaaatccaaagtccaggtgct

SEQ ID NO: 55118 - DNA, 201 bp, Homo sapiens
gggtccctctcctcctcccttgctggctgtgtcctaagctgtgtgggattcagggttggggtgtagttgggaggtgaaatgaggtgattatataatcaacyaaagtccatccctctttttcaggcagtataaaggcaaaccaccccagccatcaccatctatcatcccactgccaccatgctggcctcagggctgcttctg

SEQ ID NO: 55119 - DNA, 201 bp, Homo sapiens
ctcttcggtgatgaaacacctgccaggaccacagcaacaggcctttaaggagctgcaagggctggaggacttcatcgccaagaaggtggagcacaaccagygcacgctggatcccaattccccacgggacttcatcgactcctttctcatccgcatgcaggaggaggagaagaaccccaacacagagttctacttgaagaa

SEQ ID NO: 55120 - DNA, 201 bp, Homo sapiens
ggggaagctgcctccgggacccaccccattgcccttcattggaaactacctgcagctgaacacagagcagatgtacaactccctcatgaagatcagtgagmgctatggccctgtgttcaccattcacttggggccccggcgggtcgtggtgctgtgcggacatgatgccgtcaaggaggctctggtggaccaggctgagga

SEQ ID NO: 55121 - DNA, 201 bp, Homo sapiens
ttgaagaacctggtgatgaccaccctgaacctcttctttgcgggcactgagaccgtgagcaccaccctgcgctacggtttcctgctgctcatgaagcaccyagaggtggaggccaaggtccatgaggagattgacagagtgatcggcaagaaccggcagcccaagtttgaggaccgggccaagatgccctacacagaggca

SEQ ID NO: 55122 - DNA, 201 bp, Homo sapiens
tacaattgaaagagttctgtccaaaaacctggccaacctggtgaaaccctgtctctactaaaaatgcaaaaactagccgggcatggtggcgcacacctgtratcctagctactcgggaggctgaggcaggagaattgcttgaacccaggaggcggaggtagtggtgagcaaagatcgtaccgctgcactccagcctgggtg

SEQ ID NO: 55123 - DNA, 201 bp, Homo sapiens
caccaacggagcagctcaccatcagagttttggcaagcagaaaagtggcccaatctcaccaggcatccacagctgtgatctcactgtagagggactggctmctgtcaccagaatagcccctggtagtgccaaagtgatagacgtttatagaactggagccaagtgtgtacctggagaagctggagactccggaaagccggg

SEQ ID NO: 55124 - DNA, 201 bp, Homo sapiens
tgtgtttttctccagccatacaccctgtggggatgcctccatcattccgatgcttgagtttgaagatcagccttgctgtcctgtcttcagaaattgggccmacaactcatcagtagaagccagtagtaacctggaagctcctggaaatgaaagaaaatgtgaagaccctgacagtcctgtaaccaaaaagatgaggcttga

SEQ ID NO: 55125 - DNA, 201 bp, Homo sapiens
tggatgttactgccaatggctttccacagggaacaacaaagaaaacaattggaagccttcaggcaagatcccaaatcagcaaagtggaactcttcagatcrttccagaagctgctaagcagaattgcaagggacaagtggccacactccctcagggtgcagaagctggatacctaccaggagtacaaggaggctgcgtcct

SEQ ID NO: 55126 - DNA, 201 bp, Homo sapiens
ctgctttaccaaaaggcttcggagttcaagaattaaaaatactgcagtcagatttactatttgaacagagccgcagtgcggtgcaggcaaaaagggctgayagcccaggtcgacttgttccttgtggggcagccatcagctggagtgcagttcctgagcagcctttggatgttactgccaatggctttccacagggaacaa

SEQ ID NO: 55127 - DNA, 201 bp, Homo sapiens
cagaaaagtggcccaatctcaccaggcatccacagctgtgatctcactgtagagggactggctactgtcaccagaatagcccctggtagtgccaaagtgayagacgtttatagaactggagccaagtgtgtacctggagaagctggagactccggaaagccgggtgctgcgtttcaccaggtggggctgctccgagtgaag

SEQ ID NO: 55128 - DNA, 201 bp, Homo sapiens
tcagtagaagccagtagtaacctggaagctcctggaaatgaaagaaaatgtgaagaccctgacagtcctgtaaccaaaaagatgaggcttgagcctgggamtgcagccagggaggtcaccaacggagcagctcaccatcagagttttggcaagcagaaaagtggcccaatctcaccaggcatccacagctgtgatctcact

SEQ ID NO: 55129 - DNA, 201 bp, Homo sapiens
tgtaaccaaaaagatgaggcttgagcctgggactgcagccagggaggtcaccaacggagcagctcaccatcagagttttggcaagcagaaaagtggcccartctcaccaggcatccacagctgtgatctcactgtagagggactggctactgtcaccagaatagcccctggtagtgccaaagtgatagacgtttatagaac

SEQ ID NO: 55130 - DNA, 201 bp, Homo sapiens
ctggctactgtcaccagaatagcccctggtagtgccaaagtgatagacgtttatagaactggagccaagtgtgtacctggagaagctggagactccggaawgccgggtgctgcgtttcaccaggtggggctgctccgagtgaagccaggccgtggagacagaacacgctccatgtcctgtagtgacaagatggcccgatgg

SEQ ID NO: 55131 - DNA, 201 bp, Homo sapiens
agcctgtttgtgttggttttctgacttacaattgaaagagttctgtccaaaaacctggccaacctggtgaaaccctgtctctactaaaaatgcaaaaactrgccgggcatggtggcgcacacctgtaatcctagctactcgggaggctgaggcaggagaattgcttgaacccaggaggcggaggtagtggtgagcaaagat

SEQ ID NO: 55132 - DNA, 201 bp, Homo sapiens
ggcttgagcctgggactgcagccagggaggtcaccaacggagcagctcaccatcagagttttggcaagcagaaaagtggcccaatctcaccaggcatccayagctgtgatctcactgtagagggactggctactgtcaccagaatagcccctggtagtgccaaagtgatagacgtttatagaactggagccaagtgtgtac

SEQ ID NO: 55133 - DNA, 201 bp, Homo sapiens
tccacagctgtgatctcactgtagagggactggctactgtcaccagaatagcccctggtagtgccaaagtgatagacgtttatagaactggagccaagtgygtacctggagaagctggagactccggaaagccgggtgctgcgtttcaccaggtggggctgctccgagtgaagccaggccgtggagacagaacacgctcca

SEQ ID NO: 55134 - DNA, 201 bp, Homo sapiens
cctggccaacctggtgaaaccctgtctctactaaaaatgcaaaaactagccgggcatggtggcgcacacctgtaatcctagctactcgggaggctgaggcrggagaattgcttgaacccaggaggcggaggtagtggtgagcaaagatcgtaccgctgcactccagcctgggtgatagagcaagaccctatctcaaaaaaa

SEQ ID NO: 55135 - DNA, 201 bp, Homo sapiens
ctgttgttattttgattaagcctgtttgtgttggttttctgacttacaattgaaagagttctgtccaaaaacctggccaacctggtgaaaccctgtctctrctaaaaatgcaaaaactagccgggcatggtggcgcacacctgtaatcctagctactcgggaggctgaggcaggagaattgcttgaacccaggaggcggag

SEQ ID NO: 55136 - DNA, 201 bp, Homo sapiens
acaattgaaagagttctgtccaaaaacctggccaacctggtgaaaccctgtctctactaaaaatgcaaaaactagccgggcatggtggcgcacacctgtartcctagctactcgggaggctgaggcaggagaattgcttgaacccaggaggcggaggtagtggtgagcaaagatcgtaccgctgcactccagcctgggtga

SEQ ID NO: 55137 - DNA, 201 bp, Homo sapiens
cacttgaggtcaggagttcaagaccagcctggccaacctggtgaaaccctgtctctactaaaaatgcaaaaactagccgggcatggtggcgcacacctgtratcctagctactcgggaggctgaggcaggagaattgcttgaacccaggaggcggaggtagtggtgagcaaagatcgtaccgctgcactccagcctgggtg

SEQ ID NO: 55138 - DNA, 201 bp, Homo sapiens; identical to SEQ ID NO: 55123

SEQ ID NO: 55139 - DNA, 201 bp, Homo sapiens; identical to SEQ ID NO: 55124

SEQ ID NO: 55140 - DNA, 201 bp, Homo sapiens; identical to SEQ ID NO: 55125

SEQ ID NO: 55141 - DNA, 201 bp, Homo sapiens; identical to SEQ ID NO: 55126

SEQ ID NO: 55142 - DNA, 201 bp, Homo sapiens; identical to SEQ ID NO: 55127

SEQ ID NO: 55143 - DNA, 201 bp, Homo sapiens; identical to SEQ ID NO: 55128

SEQ ID NO: 55144 - DNA, 201 bp, Homo sapiens; identical to SEQ ID NO: 55129

SEQ ID NO: 55145 - DNA, 201 bp, Homo sapiens; identical to SEQ ID NO: 55130

SEQ ID NO: 55146 - DNA, 201 bp, Homo sapiens
actttgggaagcccaggcaggcagatcacttgaggtcaggagttcaagaccagcctggccaacctggtgaaaccctgtctctactaaaaatgcaaaaactrgccgggcatggtggcgcacacctgtaatcctagctactcgggaggctgaggcaggagaattgcttgaacccaggaggcggaggtagtggtgagcaaagat

SEQ ID NO: 55147 - DNA, 201 bp, Homo sapiens; identical to SEQ ID NO: 55132

SEQ ID NO: 55148 - DNA, 201 bp, Homo sapiens; identical to SEQ ID NO: 55133

SEQ ID NO: 55149 - DNA, 194 bp, Homo sapiens
cctggccaacctggtgaaaccctgtctctactaaaaatgcaaaaactagccgggcatggtggcgcacacctgtaatcctagctactcgggaggctgaggcrggagaattgcttgaacccaggaggcggaggtagtggtgagcaaagatcgtaccgctgcactccagcctgggtgatagagcaagaccctatctc

SEQ ID NO: 55150 - DNA, 201 bp, Homo sapiens
ttacaattgaaagagttctgtccaaaaagccaaaaggtggccaggcttggtggctcaggcctgtaatcccagcactttgggaagcccaggcaggcagatcrcttgaggtcaggagttcaagaccagcctggccaacctggtgaaaccctgtctctactaaaaatgcaaaaactagccgggcatggtggcgcacacctgtaa

SEQ ID NO: 55151 - DNA, 201 bp, Homo sapiens
caggcctgtaatcccagcactttgggaagcccaggcaggcagatcacttgaggtcaggagttcaagaccagcctggccaacctggtgaaaccctgtctctrctaaaaatgcaaaaactagccgggcatggtggcgcacacctgtaatcctagctactcgggaggctgaggcaggagaattgcttgaacccaggaggcggag

SEQ ID NO: 55152 - DNA, 201 bp, Homo sapiens
acttgaggtcaggagttcaagaccagcctggccaacctggtgaaaccctgtctctactaaaaatgcaaaaactagccgggcatggtggcgcacacctgtartcctagctactcgggaggctgaggcaggagaattgcttgaacccaggaggcggaggtagtggtgagcaaagatcgtaccgctgcactccagcctgggtga

SEQ ID NO: 55153 - DNA, 201 bp, Homo sapiens
acaacctgggggtcaggtacattggcgggtgctgtggatttgagccctaccacatcagggcaattgcagaggagctggccccagaaaggggctttttgccrccagcttcagaaaaacatggcagctggggaagtggtttggacatgcacaccaaaccctgggttagagcaagggccaggaaggaatactgggagaatcttc

SEQ ID NO: 55154 - DNA, 201 bp, Homo sapiens
tgaaggagggcttggaggctgcccgactgaaagctcacctgatgagccagcccttggcttaccacactcctgactgcaacaagcagggattcatcgatctyccagaattcccatttggactggaacccagagttgccaccagatgggatattcaaaaatacgccagagaggcctacaacctgggggtcaggtacattggcg

SEQ ID NO: 55155 - DNA, 201 bp, Homo sapiens
accacactcctgactgcaacaagcagggattcatcgatctcccagaattcccatttggactggaacccagagttgccaccagatgggatattcaaaaataygccagagaggcctacaacctgggggtcaggtacattggcgggtgctgtggatttgagccctaccacatcagggcaattgcagaggagctggccccagaaa

SEQ ID NO: 55156 - DNA, 201 bp, Homo sapiens
caggaccctggactcctgaagctgctgtggagcacccagaagcagttcgccagcttcatcgagagttcctcagagctggctcaaacgtcatgcagaccttyaccttctatgcgagtgaagacaagctggagaacaggggagcatccatcattggtgtgaactgccactttgaccccaccattagtttaaaaacagtgaagc

SEQ ID NO: 55157 - DNA, 201 bp, Homo sapiens
tcagagctggctcaaacgtcatgcagaccttcaccttctatgcgagtgaagacaagctggagaacaggggagcatccatcattggtgtgaactgccacttkgaccccaccattagtttaaaaacagtgaagctcatgaaggagggcttggaggctgcccgactgaaagctcacctgatgagccagcccttggcttaccaca

SEQ ID NO: 55158 - DNA, 201 bp, Homo sapiens
ctcagagctggctcaaacgtcatgcagaccttcaccttctatgcgagtgaagacaagctggagaacaggggagcatccatcattggtgtgaactgccactktgaccccaccattagtttaaaaacagtgaagctcatgaaggagggcttggaggctgcccgactgaaagctcacctgatgagccagcccttggcttaccac

SEQ ID NO: 55159 - DNA, 201 bp, Homo sapiens
gagaacaggggagcatccatcattggtgtgaactgccactttgaccccaccattagtttaaaaacagtgaagctcatgaaggagggcttggaggctgcccractgaaagctcacctgatgagccagcccttggcttaccacactcctgactgcaacaagcagggattcatcgatctcccagaattcccatttggactggaa

SEQ ID NO: 55160 - DNA, 201 bp, Homo sapiens
caggaccctggactcctgaagctgctgtggagcacccagaagcagttcgccagcttcatcgagagttcctcagagctggctcaaacgtcatgcagaccttyaccttctatgcgagtgaagacaagctggagaacaggggcaactatgtcttagagaagatatctgggcaggaagtcaatgaagctgcttgcgacatcgccc

SEQ ID NO: 55161 - DNA, 144 bp, Homo sapiens
tgaagatacaagactattagaagaaacatgactaccctcagtgtattagaaaagaggtcatgcagctttctaaacattattgaattgtttgagctgttttkaaattgtaattcttttcagctattaaaaagaagagcaatgaga

SEQ ID NO: 55162 - DNA, 201 bp, Homo sapiens
gcattggcccagaaggagatttgcatggcgtgccccccggcgagtgtgcagtgcgcctggtgaaagcaggagcatccatcattggtgtgaactgccacttkgaccccaccattagtttaaaaacagtgaagctcatgaaggagggcttggaggctgcccgactgaaagctcacctgatgagccagcccttggcttaccaca

SEQ ID NO: 55163 - DNA, 201 bp, Homo sapiens
tgcattggcccagaaggagatttgcatggcgtgccccccggcgagtgtgcagtgcgcctggtgaaagcaggagcatccatcattggtgtgaactgccactktgaccccaccattagtttaaaaacagtgaagctcatgaaggagggcttggaggctgcccgactgaaagctcacctgatgagccagcccttggcttaccac

SEQ ID NO: 55164 - DNA, 201 bp, Homo sapiens
atgttttagaaattttcttaggagcaaaataagtacaaagtaaatcttgaacaggttcactaagcacccaccctgtgaaaagtattatggaaatcactgcwgcacaggaaaagtaattcagatgttaatgccacttgaagaagttggtaggctagcaaagaggatgagacatgaactgtcataaaggactcagcaaccagc

SEQ ID NO: 55165 - DNA, 201 bp, Homo sapiens
gtgaaagcaggagcatccatcattggtgtgaactgccactttgaccccaccattagtttaaaaacagtgaagctcatgaaggagggcttggaggctgcccractgaaagctcacctgatgagccagcccttggcttaccacactcctgactgcaacaagcagggattcatcgatctcccagaattcccatttggactggaa

SEQ ID NO: 55166 - DNA, 201 bp, Homo sapiens; identical to SEQ ID NO: 55153

SEQ ID NO: 55167 - DNA, 201 bp, Homo sapiens; identical to SEQ ID NO: 55154

SEQ ID NO: 55168 - DNA, 201 bp, Homo sapiens; identical to SEQ ID NO: 55155

SEQ ID NO: 55169 - DNA, 186 bp, Homo sapiens
ctctgataatttaatatctactctcctacaaaagctcaagcctgaagatacaagactattagaagaaacatgactaccctcagtgtattagaaaagaggtyatgcagctttctaaacattattgaattgtttgagctgttttgaaattgtaattcttttcagctattaaaaagaagagcaatgaga

SEQ ID NO: 55170 - DNA, 201 bp, Homo sapiens
ggtatccttatctagtgtttgattgtcaatgctggagaaaaatatctgtaagagtgtttatacagtacacttcagttatcttgatctccctttcctatatratgatttgcttaaatatccatattaagtaagtctcaaggtagggtaggcagcctgagagtctagaggcctttagttataaaggaatctagccagtgaaca

SEQ ID NO: 55171 - DNA, 201 bp, Homo sapiens
agcagctggtgcaccagatgactgaactttgttgggagaagtgcatggacaagcctgggccaaagttggacagtcgggctgaggcctgttttgtgaactgsgttgagcgcttcattgatacaagccagttcatcttgaatcgactggaacagacccagaaatccaagccagttttctcagaaagcctttctgactgatctc

SEQ ID NO: 55172 - DNA, 201 bp, Homo sapiens
aggggaagaataatttggtatccttatctagtgtttgattgtcaatgctggagaaaaatatctgtaagagtgtttatacagtacacttcagttatcttgadctccctttcctatatgatgatttgcttaaatatccatattaagtaagtctcaaggtagggtaggcagcctgagagtctagaggcctttagttataaagga

SEQ ID NO: 55173 - DNA, 201 bp, Homo sapiens
atctgagaatgaacaaagaccaattttttgtgtgtgaagcttaagggtcatatgtttgcttgtattttttaatgctaatcttgtgaaaataattgacaggygaaagaaaactctatttagatgcatattactgtacatgggactatgcttttctcaaagccccattaactgcttcctataattttgatagtgggaccacat

SEQ ID NO: 55174 - DNA, 156 bp, Homo sapiens
cgtcgcggagacacgtgaaggtcggtgcggagttcgtctctgcaagcttggtcgcyctgggatggattcctcctcctcttcctccgcggcgggtttgggtgcagtggacccgcagttgcagcatttcatcgaggtagagactcaaaagcagcgctt

SEQ ID NO: 55175 - DNA, 201 bp, Homo sapiens
ctgatctcagcattacctctttggaaaaggaaggtagttcaagaaatgaagagctgttgatgggatgattgaagaaacagctatgagaggattggctcccmtcttttgttactcttgggacatcctgtcatctgagaatgaacaaagaccaattttttgtgtgtgaagcttaagggtcatatgtttgcttgtattttttaa

SEQ ID NO: 55176 - DNA, 201 bp, Homo sapiens
aggcctgttttgtgaactgcgttgagcgcttcattgatacaagccagttcatcttgaatcgactggaacagacccagaaatccaagccagttttctcagamagcctttctgactgatctcagcattacctctttggaaaaggaaggtagttcaagaaatgaagagctgttgatgggatgattgaagaaacagctatgagag

SEQ ID NO: 55177 - DNA, 201 bp, Homo sapiens
gtgcatggacaagcctgggccaaagttggacagtcgggctgaggcctgttttgtgaactgcgttgagcgcttcattgatacaagccagttcatcttgaatygactggaacagacccagaaatccaagccagttttctcagaaagcctttctgactgatctcagcattacctctttggaaaaggaaggtagttcaagaaatg

SEQ ID NO: 55178 - DNA, 201 bp, Homo sapiens
agttcgtctctgcaagcttggtcgccctgggatggattcctcctcctcttcctccgcggcgggtttgggtgcagtggacccgcagttgcagcatttcatckaggtagagactcaaaagcagcgcttccagcagctggtgcaccagatgactgaactttgttgggagaagtgcatggacaagcctgggccaaagttggacag

SEQ ID NO: 55179 - DNA, 201 bp, Homo sapiens
gacttaatctgcactatagaaaaagtgaatctaatagatatttacagaacgtttcatccaacagctgcaaaatacacattcttctcctagcacatggatcwttctcaaggacaaccatatgttaggtcacaaagcaagtcttaaaacatttttaaacattgaaatagcatcaagcatcttctctgaccacagtggaataaa

SEQ ID NO: 55180 - DNA, 149 bp, Homo sapiens
gagacacgtgaaggtcggtgcggagttcgtctctgcaagcttggtcgcyctgggatggattcctcctcctcttcctccgcggcgggtttgggtgcagtggacccgcagttgcagcatttcatcgaggtagagactcaaaagcagcgctt

SEQ ID NO: 55181 - DNA, 201 bp, Homo sapiens
agaaaagcccaggacctaatggcttcattaacgacttctaccaaacattaaaagaagaagtaataccagttctactcaaaccattccaaaagaagaggagragggaatacttccagtctcattctacaaggctagtattaaccttgataccaaaattagacaaaacacataaaaaaaaaaagaaaactacaagccaatttc

SEQ ID NO: 55182 - DNA, 201 bp, Homo sapiens
agttcgtctctgcaagcttggtcgccctgggatggattcctcctcctcttcctccgcggcgggtttgggtgcagtggacccgcagttgcagcatttcatckaggtagagactcaaaagcagcgcttccagcagctggtgcaccagatgactgaactttgttggagatgggatcttgtgatgttgcccaggctagagtgcag

SEQ ID NO: 55183 - DNA, 201 bp, Homo sapiens
cctacatcatggccttcacgctggacgggcgcttcctgttgccggagaccaagatcggaagcgtgaaatacgaaggcatcgagttcatttaactcaaaacrgaaacactgagcaaggccatcaggactcagcttttataaaaacaagaggagtgcacttttgttttgttttgttctttttggaactgtgcctgggttggag

SEQ ID NO: 55184 - DNA, 201 bp, Homo sapiens
attgtggccctcaaatccgaggaggacagcggcagagtcgcctcctacatcatggccttcacgctggacgggcgcttcctgttgccggagaccaagatcgraagcgtgaaatacgaaggcatcgagttcatttaactcaaaacggaaacactgagcaaggccatcaggactcagcttttataaaaacaagaggagtgcact

SEQ ID NO: 55185 - DNA, 150 bp, Homo sapiens
gcagcctcttcgcataggcagtgatttgcgattactttaaagctcaccttttttcttcccctctctgttcgctgctgtcagcataatgattgtgttccttycctatgggatccatctgttttgtaaacaataaagcgtctgagggagtgt

SEQ ID NO: 55186 - DNA, 201 bp, Homo sapiens
aagaggaaaacacctggttcagttacctgaaaaagggctacctgaccctgtcagacagtggggacaaggtggccgtggaatgggacaaagaccatggggtyctggagtcccacctggcggagaaggggagaggcatggagctatccgacctgattgttttcaatgggaaactctactccgtggatgaccggacgggggtcg

SEQ ID NO: 55187 - DNA, 201 bp, Homo sapiens
tgctgctgagcgcctcccctgacttcggcgacatcgctgtgagccacgtcggggcggtggtccccactcacggcttctcgtccttcaagttcatccccaayaccgacgaccagatcattgtggccctcaaatccgaggaggacagcggcagagtcgcctcctacatcatggccttcacgctggacgggcgcttcctgttgc

SEQ ID NO: 55188 - DNA, 201 bp, Homo sapiens
acagctgcgaggagggcagcgaggagggacccctctctcatggttgtctctttcccccgctatgtcataggtagtggaggaagcgaaggaagtgaacgctraatgtgacgcatttctgaagagctcagctgtcaccgggcatagcctggaagccccaagtctgttctgactttgcctggctgtctccttgacccgcctcct

SEQ ID NO: 55189 - DNA, 201 bp, Homo sapiens
ccccctgtctcccccacaaaggacaccggctgggattcggtatcgaatcgcagttatcgcagacctggacacagagtcaagggcccaagaggaaaacaccyggttcagttacctgaaaaagggctacctgaccctgtcagacagtggggacaaggtggccgtggaatgggacaaagaccatggggtcctggagtcccacct

SEQ ID NO: 55190 - DNA, 201 bp, Homo sapiens
cgtccttcaagttcatccccaacaccgacgaccagatcattgtggccctcaaatccgaggaggacagcggcagagtcgcctcctacatcatggccttcacrctggacgggcgcttcctgttgccggagaccaagatcggaagcgtgaaatacgaaggcatcgagttcatttaactcaaaacggaaacactgagcaaggcca

SEQ ID NO: 55191 - DNA, 201 bp, Homo sapiens
atcacacagagcacagtcctgtagttacccagcccgctccagcagtgcgggagattgtaaggaagcggtggcggctggtgaagcaagtctcacatgtcggygttcttggccaatggatacaaagataaagaaaatgttgcctttttctaggaactgtcagaaatcctcatgcctttcaagacttctgtgaatgacttgaat

SEQ ID NO: 55192 - DNA, 201 bp, Homo sapiens
gcccagccaagccccgccgatcgcgggcaccggagccagccccgcagcggagggaccacagagcaccagcctgcatggaacttccttcctcactcagcttyccacgttgccagctgggacaggggagatggagtaattttgctgtggaaagacttcacgtcttgccgaatgaaagtcccgcctgtctgtcacgctgatgcc

SEQ ID NO: 55193 - DNA, 201 bp, Homo sapiens
tgacacgctgcagcgctggttcttcctgccgcgccgcgccagccaggagcgctacagcgagaaggacgacgagcgcaagggcgccaacctgctgctgagcrcctcccctgacttcggcgacatcgctgtgagccacgtcggggcggtggtccccactcacggcttctcgtccttcaagttcatccccaacaccgacgacca

SEQ ID NO: 55194 - DNA, 197 bp, Homo sapiens
ctgatgtattcatgtcagcacctgagtcacagcccaggtgcccggaagcagcctcttcgcataggcagtgatttgcgattactttaaagctcacctttttkcttcccctctctgttcgctgctgtcagcataatgattgtgttccttccctatgggatccatctgttttgtaaacaataaagcgtctgagggagtgt

SEQ ID NO: 55195 - DNA, 201 bp, Homo sapiens
gagacccaggttaggcacgacccaggctgagaagggacgtttccatcattcacagtgccctccccacagcactacctcaccccgacccccaccctcactcmtaccccaccccgcgatcgtcaggggtgccacggtgggccggagggtgccggctctggctgtccctgtgccggtccctcacaaacctctccccctttgaaa

SEQ ID NO: 55196 - DNA, 201 bp, Homo sapiens
atctgtggtcagtttgctcagaatgtttaaaagaaagaagattctatgatgggcagctagtacttacttctgatatttggttgtgcctcaagtgtggcttccagggatgtggtaaaaactcagaaagccaacattcattgaagcactttaagagttccagaacagagccccattgtattataattaatctgagcacatgga

SEQ ID NO: 55197 - DNA, 201 bp, Homo sapiens
tataaattaccaaattatatttgtaaatgatagagaattatattcttaacagaaaaatatatactttttctacttcttgtaaatactaaacacagttttgrggttttgaaatcactttgtcttcagcaagcatcattaataagttcaggtgaatttagcttttaatggggcattaagctggcatttttgattttcttttta

SEQ ID NO: 55198 - DNA, 201 bp, Homo sapiens
tgataatccatataggaccataggatagctttgaaatataaattaccaaattatatttgtaaatgatagagaattatattcttaacagaaaaatatatackttttctacttcttgtaaatactaaacacagttttggggttttgaaatcactttgtcttcagcaagcatcattaataagttcaggtgaatttagcttttaa

SEQ ID NO: 55199 - DNA, 201 bp, Homo sapiens
cttttctatgaaagagtattataactattaatggtaatgattatttaggtcatttgtttttgaatgccacagtgataactataatatataatgtgcctttstagtcttccctcttctgtaggaatagcatgttcctcaaatggtcctgaactttttcaccattttggtgaacccttttaaagtaaatttactcaatgcttt

SEQ ID NO: 55200 - DNA, 201 bp, Homo sapiens
ggtaggtttaacttgccaacatgtaagtcatgctatcagcgtgaatcatgtaaagagagcaatagctgagaatctgtggtcagtttgctcagaatgtttaraagaaagaagattctatgatgggcagctagtacttacttctgatatttggttgtgcctcaagtgtggcttccagggatgtggtaaaaactcagaaagcca

SEQ ID NO: 55201 - DNA, 201 bp, Homo sapiens; identical to SEQ ID NO: 23739

SEQ ID NO: 55202 - DNA, 201 bp, Homo sapiens
aacacagttttggggttttgaaatcactttgtcttcagcaagcatcattaataagttcaggtgaatttagcttttaatggggcattaagctggcatttttkattttctttttaaataatagcaaaaatatcatttttcccctctagaatacaaattattgagctgtcaaaacttggcatgaagaatatactattacttagg

SEQ ID NO: 55203 - DNA, 201 bp, Homo sapiens
tacaaaatgacatcctgattccttttaaaaattcacgtttgtaatttatttttctgcatgtattgatcaaataagcctaaaccaaatatgtgcaataaaaytgagcctttagatagtatctagtgcattgttaaaaaagattatttctagatatttatgatgtttttgtttacgtagaaatcatgaattcaaatctgttta

SEQ ID NO: 55204 - DNA, 201 bp, Homo sapiens
aagctatttctgaacttcgtttgagcagcactgtaactggggatcaagattttgacagagaaaatcagccactaaatatttcaaataatttatgttttttrgaggggaagcatttgaggtcttatagtccccaaaatgcttttcagaccctttctcagagctatataactacttctaaagaatgttcaattcagtcctgtc

SEQ ID NO: 55205 - DNA, 201 bp, Homo sapiens
aatgtaatgccaccttcctgaactctcacatattctatatcatggttattttaaaaaatatatttttagccttttgtaaccttagtcttgttttgagcaaycatattccatgttttatgtgcttttatatttttataataaatattaaagtaaaactattaaaaattgtttatccacgtaccacttaacttaaaatcatct

SEQ ID NO: 55206 - DNA, 201 bp, Homo sapiens
aactggtttaccccagcttcccgtttttttccaaatataaaatgataaaatattgattatgtgccaatattgtcatttaatgttcttaaaacttgtgaagrccacctttttaggtagctgagaagagtgatagttggtatcaatttgttagccaggcatggtggctcatgctgttgggaggctgagtggggaagatgcttg

SEQ ID NO: 55207 - DNA, 201 bp, Homo sapiens
ccatgatcacaccactgcattcctgcagagtgacggagtgagaccctgtctcaaaaataaataaaaagaagacagttggtatcaattcaaagaatagttgwtgcctgttctcttattttaaatgtaccaacagagctattttactgtatttaatagttcttagcttccatgtgtgatgattttaatcagtgattttatgca

SEQ ID NO: 55208 - DNA, 201 bp, Homo sapiens
gatgacagtgaaaaagaagccagccattctgaaagcaatgttgatgctgacagtgagccttcagaatctgaaagtgcttcaaagcagactgggctgttcasatccagtagtggatccggtgtgcagccagatggacccctttaccctctgtcagcaggtaaactgctgtacaccaaggagactgacagtggtgataaggaa

SEQ ID NO: 55209 - DNA, 164 bp, Homo sapiens
ctgtttaaaagatgaccatattttcaattttgagtaatacatattattcctactgttttttttcttttgccatgtttctagaaaacagctgtgtaacttaytgagcgttattttggtgttactgtataaaacatgcataataaatattcttatttatctcatgt

SEQ ID NO: 55210 - DNA, 201 bp, Homo sapiens; identical to SEQ ID NO: 23741

SEQ ID NO: 55211 - DNA, 201 bp, Homo sapiens
tgtcagcaggtaaactgctgtacaccaaggagactgacagtggtgataaggaaatggcagaagctatttctgaacttcgtttgagcagcactgtaactggrgatcaagattttgacagagaaaatcagccactaaatatttcaaataatttatgttttttagaggggaagcatttgaggtcttatagtccccaaaatgctt

SEQ ID NO: 55212 - DNA, 201 bp, Homo sapiens
atgaaatacagaagggaggaaaatgcagaaatttatctgtaagaggaattacaaatttaggaaatacttgcttttttaatgcagtcatgcagaacttggcrcagacttatactcttactgatctgatgaatgagatcaaagaaagtagtacaaaactcaagatttttccttcctcagactctcagctgggcacctcgattt

SEQ ID NO: 55213 - DNA, 201 bp, Homo sapiens
attttgacagagaaaatcagccactaaatatttcaaataatttatgttttttagaggggaagcatttgaggtcttatagtccccaaaatgcttttcagacyctttctcagagctatataactacttctaaagaatgttcaattcagtcctgtctctaccagtttacatctatggaattactaatggggaataataagcttc

SEQ ID NO: 55214 - DNA, 201 bp, Homo sapiens; identical to SEQ ID NO: 54691

SEQ ID NO: 55215 - DNA, 122 bp, Homo sapiens; identical to SEQ ID NO: 54692

SEQ ID NO: 55216 - DNA, 201 bp, Homo sapiens; identical to SEQ ID NO: 54695

SEQ ID NO: 55217 - DNA, 201 bp, Homo sapiens; identical to SEQ ID NO: 54698

SEQ ID NO: 55218 - DNA, 201 bp, Homo sapiens; identical to SEQ ID NO: 54700

SEQ ID NO: 55219 - DNA, 201 bp, Homo sapiens; identical to SEQ ID NO: 54701

SEQ ID NO: 55220 - DNA, 201 bp, Homo sapiens; identical to SEQ ID NO: 54702

SEQ ID NO: 55221 - DNA, 201 bp, Homo sapiens; identical to SEQ ID NO: 54703

SEQ ID NO: 55222 - DNA, 201 bp, Homo sapiens; identical to SEQ ID NO: 54704

SEQ ID NO: 55223 - DNA, 201 bp, Homo sapiens
atgggctgttctaacccccacccccactgccaggtatgggccagcagtttcctgccagatattgcccagcgtgaggagcgatctcagcaggcctataagastcagcatggagagcccctgctaatggagtacagccgccaggagctactcaggaaggaacgtctggtcctaaccagtgagcactggttagtactggtcccc

SEQ ID NO: 55224 - DNA, 201 bp, Homo sapiens
gatctttgaaaacaaaggtgccatgatgggctgttctaacccccacccccactgccaggtatgggccagcagtttcctgccagatattgcccagcgtgagragcgatctcagcaggcctataagagtcagcatggagagcccctgctaatggagtacagccgccaggagctactcaggaaggaacgtctggtcctaaccag

SEQ ID NO: 55225 - DNA, 201 bp, Homo sapiens
tgacccctgctgagcgtgatgatctagcctccatcatgaagaagctcttgaccaagtatgacaacctctttgagacgtcctttccctactccatgggctgkcatggggctcccacaggatcagaggctggggccaactggaaccattggcagctgcacgctcattactaccctccgctcctgcgctctgccactgtccgga

SEQ ID NO: 55226 - DNA, 201 bp, Homo sapiens
tctagcctccatcatgaagaagctcttgaccaagtatgacaacctctttgagacgtcctttccctactccatgggctggcatggggctcccacaggatcaraggctggggccaactggaaccattggcagctgcacgctcattactaccctccgctcctgcgctctgccactgtccggaaattcatggttggctacgaaat

SEQ ID NO: 55227 - DNA, 201 bp, Homo sapiens
gcagctgcacgctcattactaccctccgctcctgcgctctgccactgtccggaaattcatggttggctacgaaatgcttgctcaggctcagagggacctcrcccctgagcaggctgcagagagactaagggcacttcctgaggttcattaccacctggggcagaaggacagggagacagcaaccatcgcctgaccacgccg

SEQ ID NO: 55228 - DNA, 201 bp, Homo sapiens
ggcgtacagtctgcaggcctaccatcagcatatccgctacaacccgctgcaggatgagtgggtgctggtgtcagctcaccgcatgaagcggccctggcagkgtcaagtggagccccagcttctgaagacagtgccccgccatgaccctctcaaccctctgtgtcctggggccatccgagccaacggagaggtgaatcccca

SEQ ID NO: 55229 - DNA, 201 bp, Homo sapiens
tttgaaaacaaaggtgccatgatgggctgttctaacccccacccccactgccaggtatgggccagcagtttcctgccagatattgcccagcgtgaggagcsatctcagcaggcctataagagtcagcatggagagcccctgctaatggagtacagccgccaggagctactcaggaaggaacgtctggtcctaaccagtgag

SEQ ID NO: 55230 - DNA, 201 bp, Homo sapiens
gtcctttccctactccatgggctggcatggggctcccacaggatcagaggctggggccaactggaaccattggcagctgcacgctcattactaccctccgytcctgcgctctgccactgtccggaaattcatggttggctacgaaatgcttgctcaggctcagagggacctcacccctgagcaggctgcagagagactaag

SEQ ID NO: 55231 - DNA, 201 bp, Homo sapiens
gccatgatgggctgttctaacccccacccccactgccaggtatgggccagcagtttcctgccagatattgcccagcgtgaggagcgatctcagcaggcctvtaagagtcagcatggagagcccctgctaatggagtacagccgccaggagctactcaggaaggaacgtctggtcctaaccagtgagcactggttagtactg

SEQ ID NO: 55232 - DNA, 201 bp, Homo sapiens
gcccctgctaatggagtacagccgccaggagctactcaggaaggaacgtctggtcctaaccagtgagcactggttagtactggtccccttctgggcaacayggccctaccagacactgctgctgccccgtcggcatgtgcggcggctacctgagctgacccctgctgagcgtgatgatctagcctccatcatgaagaagct

SEQ ID NO: 55233 - DNA, 201 bp, Homo sapiens
ctaatggagtacagccgccaggagctactcaggaaggaacgtctggtcctaaccagtgagcactggttagtactggtccccttctgggcaacatggccctvccagacactgctgctgccccgtcggcatgtgcggcggctacctgagctgacccctgctgagcgtgatgatctagcctccatcatgaagaagctcttgacc

SEQ ID NO: 55234 - DNA, 201 bp, Homo sapiens
caaaggtgccatgatgggctgttctaacccccacccccactgccaggtatgggccagcagtttcctgccagatattgcccagcgtgaggagcgatctcagyaggcctataagagtcagcatggagagcccctgctaatggagtacagccgccaggagctactcaggaaggaacgtctggtcctaaccagtgagcactggtt

SEQ ID NO: 55235 - DNA, 201 bp, Homo sapiens
ttgaccaagtatgacaacctctttgagacgtcctttccctactccatgggctggcatggggctcccacaggatcagaggctggggccaactggaaccattrgcagctgcacgctcattactaccctccgctcctgcgctctgccactgtccggaaattcatggttggctacgaaatgcttgctcaggctcagagggacctc

SEQ ID NO: 55236 - DNA, 201 bp, Homo sapiens
tactccatgggctggcatggggctcccacaggatcagaggctggggccaactggaaccattggcagctgcacgctcattactaccctccgctcctgcgctytgccactgtccggaaattcatggttggctacgaaatgcttgctcaggctcagagggacctcacccctgagcaggctgcagagagactaagggcacttcct

SEQ ID NO: 55237 - DNA, 201 bp, Homo sapiens
tggcatggggctcccacaggatcagaggctggggccaactggaaccattggcagctgcacgctcattactaccctccgctcctgcgctctgccactgtccrgaaattcatggttggctacgaaatgcttgctcaggctcagagggacctcacccctgagcaggctgcagagagactaagggcacttcctgaggttcattac

SEQ ID NO: 55238 - DNA, 201 bp, Homo sapiens
ccaggacccagtgatcatccccttttccaagcaaagtctgctcgaggagtctgtaaggtcatgtgcttccacccctggtcggatgtaacgctgccactcawgtcggtccctgagatccgggctgttgttgatgcatgggcctcagtcacagaggagctgggtgcccagtacccttgggtgcagatctttgaaaacaaaggt

SEQ ID NO: 55239 - DNA, 201 bp, Homo sapiens
ggaacgctcatcccgagccagaccgacaaggcgtacagtctgcaggcctaccatcagcatatccgctacaacccgctgcaggatgagtgggtgctggtgtyagctcaccgcatgaagcggccctggcagggtcaagtggagccccagcttctgaagacagtgccccgccatgaccctctcaaccctctgtgtcctggggcc

SEQ ID NO: 55240 - DNA, 201 bp, Homo sapiens
tccaggacccagtgatcatccccttttccaagcaaagtctgctcgaggagtctgtaaggtcatgtgcttccacccctggtcggatgtaacgctgccactcrtgtcggtccctgagatccgggctgttgttgatgcatgggcctcagtcacagaggagctgggtgcccagtacccttgggtgcagatctttgaaaacaaagg

SEQ ID NO: 55241 - DNA, 201 bp, Homo sapiens
gtctgctcgaggagtctgtaaggtcatgtgcttccacccctggtcggatgtaacgctgccactcatgtcggtccctgagatccgggctgttgttgatgcakgggcctcagtcacagaggagctgggtgcccagtacccttgggtgcagatctttgaaaacaaaggtgccatgatgggctgttctaacccccacccccactg

SEQ ID NO: 55242 - DNA, 201 bp, Homo sapiens
tccatgggctggcatggggctcccacaggatcagaggctggggccaactggaaccattggcagctgcacgctcattactaccctccgctcctgcgctctgycactgtccggaaattcatggttggctacgaaatgcttgctcaggctcagagggacctcacccctgagcaggctgcagagagactaagggcacttcctgag

SEQ ID NO: 55243 - DNA, 201 bp, Homo sapiens
cgctcattactaccctccgctcctgcgctctgccactgtccggaaattcatggttggctacgaaatgcttgctcaggctcagagggacctcacccctgagyaggctgcagagagactaagggcacttcctgaggttcattaccacctggggcagaaggacagggagacagcaaccatcgcctgaccacgccgaccacaggg

SEQ ID NO: 55244 - DNA, 201 bp, Homo sapiens
gagggacctcacccctgagcaggctgcagagagactaagggcacttcctgaggttcattaccacctggggcagaaggacagggagacagcaaccatcgccygaccacgccgaccacagggccttgaatccttttttgttttcaacagtcttgctgaattaagcagaaagggccttgaatcctggcctggaatttgggcaga

SEQ ID NO: 55245 - DNA, 201 bp, Homo sapiens
ctttgagacgtcctttccctactccatgggctggcatggggctcccacaggatcagaggctggggccaactggaaccattggcagctgcacgctcattacbaccctccgctcctgcgctctgccactgtccggaaattcatggttggctacgaaatgcttgctcaggctcagagggacctcacccctgagcaggctgcaga

SEQ ID NO: 55246 - DNA, 201 bp, Homo sapiens
gctactcaggaaggaacgtctggtcctaaccagtgagcactggttagtactggtccccttctgggcaacatggccctaccagacactgctgctgccccgtyggcatgtgcggcggctacctgagctgacccctgctgagcgtgatgatctagcctccatcatgaagaagctcttgaccaagtatgacaacctctttgagac

SEQ ID NO: 55247 - DNA, 201 bp, Homo sapiens
ggcatgtgcggcggctacctgagctgacccctgctgagcgtgatgatctagcctccatcatgaagaagctcttgaccaagtatgacaacctctttgagacrtcctttccctactccatgggctggcatggggctcccacaggatcagaggctggggccaactggaaccattggcagctgcacgctcattactaccctccgc

SEQ ID NO: 55248 - DNA, 101 bp, Homo sapiens
tcaacagtcttgctgaattaagcagaaagggccttgaatcctggcctggaatttgggcagatatagcattaataaaactgtgcatctcaaacttttatcas

SEQ ID NO: 55249 - DNA, 201 bp, Homo sapiens
tcttgaccaagtatgacaacctctttgagacgtcctttccctactccatgggctggcatggggctcccacaggatcagaggctggggccaactggaaccaytggcagctgcacgctcattactaccctccgctcctgcgctctgccactgtccggaaattcatggttggctacgaaatgcttgctcaggctcagagggacc

SEQ ID NO: 55250 - DNA, 201 bp, Homo sapiens
tgatctagcctccatcatgaagaagctcttgaccaagtatgacaacctctttgagacgtcctttccctactccatgggctggcatggggctcccacaggawcagaggctggggccaactggaaccattggcagctgcacgctcattactaccctccgctcctgcgctctgccactgtccggaaattcatggttggctacga

SEQ ID NO: 55251 - DNA, 201 bp, Homo sapiens
accttcctgtttgacaacgacttcccagctctgcagcctgatgcccccagtccaggacccagtgatcatccccttttccaagcaaagtctgctcgaggagyctgtaaggtcatgtgcttccacccctggtcggatgtaacgctgccactcatgtcggtccctgagatccgggctgttgttgatgcatgggcctcagtcaca

SEQ ID NO: 55252 - DNA, 201 bp, Homo sapiens
ggttggaacgctcatcccgagccagaccgacaaggcgtacagtctgcaggcctaccatcagcatatccgctacaacccgctgcaggatgagtgggtgctgdtgtcagctcaccgcatgaagcggccctggcagggtcaagtggagccccagcttctgaagacagtgccccgccatgaccctctcaaccctctgtgtcctgg

SEQ ID NO: 55253 - DNA, 201 bp, Homo sapiens
taacgctgccactcatgtcggtccctgagatccgggctgttgttgatgcatgggcctcagtcacagaggagctgggtgcccagtacccttgggtgcagatmtttgaaaacaaaggtgccatgatgggctgttctaacccccacccccactgccaggtatgggccagcagtttcctgccagatattgcccagcgtgaggagc

SEQ ID NO: 55254 - DNA, 201 bp, Homo sapiens
ggctcccacaggatcagaggctggggccaactggaaccattggcagctgcacgctcattactaccctccgctcctgcgctctgccactgtccggaaattcwtggttggctacgaaatgcttgctcaggctcagagggacctcacccctgagcaggctgcagagagactaagggcacttcctgaggttcattaccacctggg

SEQ ID NO: 55255 - DNA, 201 bp, Homo sapiens
tccccttttccaagcaaagtctgctcgaggagtctgtaaggtcatgtgcttccacccctggtcggatgtaacgctgccactcatgtcggtccctgagatcbgggctgttgttgatgcatgggcctcagtcacagaggagctgggtgcccagtacccttgggtgcagatctttgaaaacaaaggtgccatgatgggctgttc

SEQ ID NO: 55256 - DNA, 201 bp, Homo sapiens
acgtcctttccctactccatgggctggcatggggctcccacaggatcagaggctggggccaactggaaccattggcagctgcacgctcattactaccctcygctcctgcgctctgccactgtccggaaattcatggttggctacgaaatgcttgctcaggctcagagggacctcacccctgagcaggctgcagagagacta

SEQ ID NO: 55257 - DNA, 201 bp, Homo sapiens
caaggcgtacagtctgcaggcctaccatcagcatatccgctacaacccgctgcaggatgagtgggtgctggtgtcagctcaccgcatgaagcggccctggyagggtcaagtggagccccagcttctgaagacagtgccccgccatgaccctctcaaccctctgtgtcctggggccatccgagccaacggagaggtgaatcc

SEQ ID NO: 55258 - DNA, 201 bp, Homo sapiens
ctccccttccttaggaagctttcgtcccctccgaaggttggaacgctcatcccgagccagaccgacaaggcgtacagtctgcaggcctaccatcagcatawccgctacaacccgctgcaggatgagtgggtgctggtgtcagctcaccgcatgaagcggccctggcagggtcaagtggagccccagcttctgaagacagtg

SEQ ID NO: 55259 - DNA, 201 bp, Homo sapiens
catggggctcccacaggatcagaggctggggccaactggaaccattggcagctgcacgctcattactaccctccgctcctgcgctctgccactgtccggarattcatggttggctacgaaatgcttgctcaggctcagagggacctcacccctgagcaggctgcagagagactaagggcacttcctgaggttcattaccac

SEQ ID NO: 55260 - DNA, 201 bp, Homo sapiens
tcaccgcatgaagcggccctggcagggtcaagtggagccccagcttctgaagacagtgccccgccatgaccctctcaaccctctgtgtcctggggccatcygagccaacggagaggtgaatccccagtacgatagcaccttcctgtttgacaacgacttcccagctctgcagcctgatgcccccagtccaggacccagtga

SEQ ID NO: 55261 - DNA, 201 bp, Homo sapiens
ccgcatgaagcggccctggcagggtcaagtggagccccagcttctgaagacagtgccccgccatgaccctctcaaccctctgtgtcctggggccatccgarccaacggagaggtgaatccccagtacgatagcaccttcctgtttgacaacgacttcccagctctgcagcctgatgcccccagtccaggacccagtgatca

SEQ ID NO: 55262 - DNA, 201 bp, Homo sapiens
ctggcagggtcaagtggagccccagcttctgaagacagtgccccgccatgaccctctcaaccctctgtgtcctggggccatccgagccaacggagaggtgratccccagtacgatagcaccttcctgtttgacaacgacttcccagctctgcagcctgatgcccccagtccaggacccagtgatcatccccttttccaagc

SEQ ID NO: 55263 - DNA, 201 bp, Homo sapiens
cgacaaggcgtacagtctgcaggcctaccatcagcatatccgctacaacccgctgcaggatgagtgggtgctggtgtcagctcaccgcatgaagcggcccwggcagggtcaagtggagccccagcttctgaagacagtgccccgccatgaccctctcaaccctctgtgtcctggggccatccgagccaacggagaggtgaa

SEQ ID NO: 55264 - DNA, 201 bp, Homo sapiens
ccgagccaacggagaggtgaatccccagtacgatagcaccttcctgtttgacaacgacttcccagctctgcagcctgatgcccccagtccaggacccagtratcatccccttttccaagcaaagtctgctcgaggagtctgtaaggtcatgtgcttccacccctggtcggatgtaacgctgccactcatgtcggtccctga

SEQ ID NO: 55265 - DNA, 201 bp, Homo sapiens
tacaacccgctgcaggatgagtgggtgctggtgtcagctcaccgcatgaagcggccctggcagggtcaagtggagccccagcttctgaagacagtgccccrccatgaccctctcaaccctctgtgtcctggggccatccgagccaacggagaggtgaatccccagtacgatagcaccttcctgtttgacaacgacttccca

SEQ ID NO: 55266 - DNA, 201 bp, Homo sapiens
cctgtttgacaacgacttcccagctctgcagcctgatgcccccagtccaggacccagtgatcatccccttttccaagcaaagtctgctcgaggagtctgtraggtcatgtgcttccacccctggtcggatgtaacgctgccactcatgtcggtccctgagatccgggctgttgttgatgcatgggcctcagtcacagagga

SEQ ID NO: 55267 - DNA, 201 bp, Homo sapiens
gacaacgacttcccagctctgcagcctgatgcccccagtccaggacccagtgatcatccccttttccaagcaaagtctgctcgaggagtctgtaaggtcaygtgcttccacccctggtcggatgtaacgctgccactcatgtcggtccctgagatccgggctgttgttgatgcatgggcctcagtcacagaggagctgggt

SEQ ID NO: 55268 - DNA, 201 bp, Homo sapiens
aacgacttcccagctctgcagcctgatgcccccagtccaggacccagtgatcatccccttttccaagcaaagtctgctcgaggagtctgtaaggtcatgtrcttccacccctggtcggatgtaacgctgccactcatgtcggtccctgagatccgggctgttgttgatgcatgggcctcagtcacagaggagctgggtgcc

SEQ ID NO: 55269 - DNA, 201 bp, Homo sapiens
cttcccagctctgcagcctgatgcccccagtccaggacccagtgatcatccccttttccaagcaaagtctgctcgaggagtctgtaaggtcatgtgcttcyacccctggtcggatgtaacgctgccactcatgtcggtccctgagatccgggctgttgttgatgcatgggcctcagtcacagaggagctgggtgcccagta

SEQ ID NO: 55270 - DNA, 201 bp, Homo sapiens
ccaagtatgacaacctctttgagacgtcctttccctactccatgggctggcatggggctcccacaggatcagaggctggggccaactggaaccattggcakctgcacgctcattactaccctccgctcctgcgctctgccactgtccggaaattcatggttggctacgaaatgcttgctcaggctcagagggacctcaccc

SEQ ID NO: 55271 - DNA, 201 bp, Homo sapiens
ggacccagtgatcatccccttttccaagcaaagtctgctcgaggagtctgtaaggtcatgtgcttccacccctggtcggatgtaacgctgccactcatgtyggtccctgagatccgggctgttgttgatgcatgggcctcagtcacagaggagctgggtgcccagtacccttgggtgcagatctttgaaaacaaaggtgcc

SEQ ID NO: 55272 - DNA, 201 bp, Homo sapiens
tgagacgtcctttccctactccatgggctggcatggggctcccacaggatcagaggctggggccaactggaaccattggcagctgcacgctcattactacyctccgctcctgcgctctgccactgtccggaaattcatggttggctacgaaatgcttgctcaggctcagagggacctcacccctgagcaggctgcagagag

SEQ ID NO: 55273 - DNA, 201 bp, Homo sapiens
tttccaagcaaagtctgctcgaggagtctgtaaggtcatgtgcttccacccctggtcggatgtaacgctgccactcatgtcggtccctgagatccgggctsttgttgatgcatgggcctcagtcacagaggagctgggtgcccagtacccttgggtgcagatctttgaaaacaaaggtgccatgatgggctgttctaaccc

SEQ ID NO: 55274 - DNA, 201 bp, Homo sapiens
cttccacccctggtcggatgtaacgctgccactcatgtcggtccctgagatccgggctgttgttgatgcatgggcctcagtcacagaggagctgggtgccyagtacccttgggtgcagatctttgaaaacaaaggtgccatgatgggctgttctaacccccacccccactgccaggtatgggccagcagtttcctgccaga

SEQ ID NO: 55275 - DNA, 201 bp, Homo sapiens
ggttggctacgaaatgcttgctcaggctcagagggacctcacccctgagcaggctgcagagagactaagggcacttcctgaggttcattaccacctggggyagaaggacagggagacagcaaccatcgcctgaccacgccgaccacagggccttgaatccttttttgttttcaacagtcttgctgaattaagcagaaaggg

SEQ ID NO: 55276 - DNA, 201 bp, Homo sapiens
ctggtcggatgtaacgctgccactcatgtcggtccctgagatccgggctgttgttgatgcatgggcctcagtcacagaggagctgggtgcccagtaccctygggtgcagatctttgaaaacaaaggtgccatgatgggctgttctaacccccacccccactgccaggtatgggccagcagtttcctgccagatattgccca

SEQ ID NO: 55277 - DNA, 201 bp, Homo sapiens
ctgctcgaggagtctgtaaggtcatgtgcttccacccctggtcggatgtaacgctgccactcatgtcggtccctgagatccgggctgttgttgatgcatgrgcctcagtcacagaggagctgggtgcccagtacccttgggtgcagatctttgaaaacaaaggtgccatgatgggctgttctaacccccacccccactgcc

SEQ ID NO: 55278 - DNA, 201 bp, Homo sapiens
ggatgtaacgctgccactcatgtcggtccctgagatccgggctgttgttgatgcatgggcctcagtcacagaggagctgggtgcccagtacccttgggtgmagatctttgaaaacaaaggtgccatgatgggctgttctaacccccacccccactgccaggtatgggccagcagtttcctgccagatattgcccagcgtga

SEQ ID NO: 55279 - DNA, 201 bp, Homo sapiens
ctttgaaaacaaaggtgccatgatgggctgttctaacccccacccccactgccaggtatgggccagcagtttcctgccagatattgcccagcgtgaggagygatctcagcaggcctataagagtcagcatggagagcccctgctaatggagtacagccgccaggagctactcaggaaggaacgtctggtcctaaccagtga

SEQ ID NO: 55280 - DNA, 201 bp, Homo sapiens
cccccactgccaggtatgggccagcagtttcctgccagatattgcccagcgtgaggagcgatctcagcaggcctataagagtcagcatggagagcccctgytaatggagtacagccgccaggagctactcaggaaggaacgtctggtcctaaccagtgagcactggttagtactggtccccttctgggcaacatggcccta

SEQ ID NO: 55281 - DNA, 201 bp, Homo sapiens
ccatcagcatatccgctacaacccgctgcaggatgagtgggtgctggtgtcagctcaccgcatgaagcggccctggcagggtcaagtggagccccagcttmtgaagacagtgccccgccatgaccctctcaaccctctgtgtcctggggccatccgagccaacggagaggtgaatccccagtacgatagcaccttcctgtt

SEQ ID NO: 55282 - DNA, 201 bp, Homo sapiens
acgctgccactcatgtcggtccctgagatccgggctgttgttgatgcatgggcctcagtcacagaggagctgggtgcccagtacccttgggtgcagatctytgaaaacaaaggtgccatgatgggctgttctaacccccacccccactgccaggtatgggccagcagtttcctgccagatattgcccagcgtgaggagcga

SEQ ID NO: 55283 - DNA, 201 bp, Homo sapiens
ccctgctaatggagtacagccgccaggagctactcaggaaggaacgtctggtcctaaccagtgagcactggttagtactggtccccttctgggcaacatgrccctaccagacactgctgctgccccgtcggcatgtgcggcggctacctgagctgacccctgctgagcgtgatgatctagcctccatcatgaagaagctct

SEQ ID NO: 55284 - DNA, 201 bp, Homo sapiens
gaagctcttgaccaagtatgacaacctctttgagacgtcctttccctactccatgggctggcatggggctcccacaggatcagaggctggggccaactggraccattggcagctgcacgctcattactaccctccgctcctgcgctctgccactgtccggaaattcatggttggctacgaaatgcttgctcaggctcagag

SEQ ID NO: 55285 - DNA, 201 bp, Homo sapiens
tgttgatgcatgggcctcagtcacagaggagctgggtgcccagtacccttgggtgcagatctttgaaaacaaaggtgccatgatgggctgttctaaccccsacccccactgccaggtatgggccagcagtttcctgccagatattgcccagcgtgaggagcgatctcagcaggcctataagagtcagcatggagagcccct

SEQ ID NO: 55286 - DNA, 201 bp, Homo sapiens
ttgatgcatgggcctcagtcacagaggagctgggtgcccagtacccttgggtgcagatctttgaaaacaaaggtgccatgatgggctgttctaacccccamccccactgccaggtatgggccagcagtttcctgccagatattgcccagcgtgaggagcgatctcagcaggcctataagagtcagcatggagagcccctgc

SEQ ID NO: 55287 - DNA, 201 bp, Homo sapiens
tgcatgggcctcagtcacagaggagctgggtgcccagtacccttgggtgcagatctttgaaaacaaaggtgccatgatgggctgttctaacccccaccccyactgccaggtatgggccagcagtttcctgccagatattgcccagcgtgaggagcgatctcagcaggcctataagagtcagcatggagagcccctgctaat

SEQ ID NO: 55288 - DNA, 201 bp, Homo sapiens
gcctcagtcacagaggagctgggtgcccagtacccttgggtgcagatctttgaaaacaaaggtgccatgatgggctgttctaacccccacccccactgccrggtatgggccagcagtttcctgccagatattgcccagcgtgaggagcgatctcagcaggcctataagagtcagcatggagagcccctgctaatggagtac

SEQ ID NO: 55289 - DNA, 201 bp, Homo sapiens
gaggagctgggtgcccagtacccttgggtgcagatctttgaaaacaaaggtgccatgatgggctgttctaacccccacccccactgccaggtatgggccarcagtttcctgccagatattgcccagcgtgaggagcgatctcagcaggcctataagagtcagcatggagagcccctgctaatggagtacagccgccaggag

SEQ ID NO: 55290 - DNA, 201 bp, Homo sapiens
ctggcatggggctcccacaggatcagaggctggggccaactggaaccattggcagctgcacgctcattactaccctccgctcctgcgctctgccactgtcbggaaattcatggttggctacgaaatgcttgctcaggctcagagggacctcacccctgagcaggctgcagagagactaagggcacttcctgaggttcatta

SEQ ID NO: 55291 - DNA, 201 bp, Homo sapiens
ctacaacccgctgcaggatgagtgggtgctggtgtcagctcaccgcatgaagcggccctggcagggtcaagtggagccccagcttctgaagacagtgcccygccatgaccctctcaaccctctgtgtcctggggccatccgagccaacggagaggtgaatccccagtacgatagcaccttcctgtttgacaacgacttccc

SEQ ID NO: 55292 - DNA, 201 bp, Homo sapiens
gctgggtgcccagtacccttgggtgcagatctttgaaaacaaaggtgccatgatgggctgttctaacccccacccccactgccaggtatgggccagcagtytcctgccagatattgcccagcgtgaggagcgatctcagcaggcctataagagtcagcatggagagcccctgctaatggagtacagccgccaggagctact

SEQ ID NO: 55293 - DNA, 201 bp, Homo sapiens
gggctgttctaacccccacccccactgccaggtatgggccagcagtttcctgccagatattgcccagcgtgaggagcgatctcagcaggcctataagagtyagcatggagagcccctgctaatggagtacagccgccaggagctactcaggaaggaacgtctggtcctaaccagtgagcactggttagtactggtcccctt

SEQ ID NO: 55294 - DNA, 201 bp, Homo sapiens
atcagaggctggggccaactggaaccattggcagctgcacgctcattactaccctccgctcctgcgctctgccactgtccggaaattcatggttggctacdaaatgcttgctcaggctcagagggacctcacccctgagcaggctgcagagagactaagggcacttcctgaggttcattaccacctggggcagaaggacag

SEQ ID NO: 55295 - DNA, 201 bp, Homo sapiens
ggagctactcaggaaggaacgtctggtcctaaccagtgagcactggttagtactggtccccttctgggcaacatggccctaccagacactgctgctgcccygtcggcatgtgcggcggctacctgagctgacccctgctgagcgtgatgatctagcctccatcatgaagaagctcttgaccaagtatgacaacctctttga

SEQ ID NO: 55296 - DNA, 201 bp, Homo sapiens
taagagtcagcatggagagcccctgctaatggagtacagccgccaggagctactcaggaaggaacgtctggtcctaaccagtgagcactggttagtactgktccccttctgggcaacatggccctaccagacactgctgctgccccgtcggcatgtgcggcggctacctgagctgacccctgctgagcgtgatgatctagc

SEQ ID NO: 55297 - DNA, 201 bp, Homo sapiens
caacctctttgagacgtcctttccctactccatgggctggcatggggctcccacaggatcagaggctggggccaactggaaccattggcagctgcacgctyattactaccctccgctcctgcgctctgccactgtccggaaattcatggttggctacgaaatgcttgctcaggctcagagggacctcacccctgagcaggc

SEQ ID NO: 55298 - DNA, 201 bp, Homo sapiens
ccccttttccaagcaaagtctgctcgaggagtctgtaaggtcatgtgcttccacccctggtcggatgtaacgctgccactcatgtcggtccctgagatccrggctgttgttgatgcatgggcctcagtcacagaggagctgggtgcccagtacccttgggtgcagatctttgaaaacaaaggtgccatgatgggctgttct

SEQ ID NO: 55299 - DNA, 201 bp, Homo sapiens
caagcaaagtctgctcgaggagtctgtaaggtcatgtgcttccacccctggtcggatgtaacgctgccactcatgtcggtccctgagatccgggctgttgytgatgcatgggcctcagtcacagaggagctgggtgcccagtacccttgggtgcagatctttgaaaacaaaggtgccatgatgggctgttctaacccccac

SEQ ID NO: 55300 - DNA, 201 bp, Homo sapiens
atgacaacctctttgagacgtcctttccctactccatgggctggcatggggctcccacaggatcagaggctggggccaactggaaccattggcagctgcasgctcattactaccctccgctcctgcgctctgccactgtccggaaattcatggttggctacgaaatgcttgctcaggctcagagggacctcacccctgagc

SEQ ID NO: 55301 - DNA, 201 bp, Homo sapiens
cgctacaacccgctgcaggatgagtgggtgctggtgtcagctcaccgcatgaagcggccctggcagggtcaagtggagccccagcttctgaagacagtgcyccgccatgaccctctcaaccctctgtgtcctggggccatccgagccaacggagaggtgaatccccagtacgatagcaccttcctgtttgacaacgacttc

SEQ ID NO: 55302 - DNA, 201 bp, Homo sapiens
cagaccgacaaggcgtacagtctgcaggcctaccatcagcatatccgctacaacccgctgcaggatgagtgggtgctggtgtcagctcaccgcatgaagckgccctggcagggtcaagtggagccccagcttctgaagacagtgccccgccatgaccctctcaaccctctgtgtcctggggccatccgagccaacggagag

SEQ ID NO: 55303 - DNA, 201 bp, Homo sapiens
aacccgctgcaggatgagtgggtgctggtgtcagctcaccgcatgaagcggccctggcagggtcaagtggagccccagcttctgaagacagtgccccgccmtgaccctctcaaccctctgtgtcctggggccatccgagccaacggagaggtgaatccccagtacgatagcaccttcctgtttgacaacgacttcccagct

SEQ ID NO: 55304 - DNA, 201 bp, Homo sapiens
tgacaacctctttgagacgtcctttccctactccatgggctggcatggggctcccacaggatcagaggctggggccaactggaaccattggcagctgcacvctcattactaccctccgctcctgcgctctgccactgtccggaaattcatggttggctacgaaatgcttgctcaggctcagagggacctcacccctgagca

SEQ ID NO: 55305 - DNA, 201 bp, Homo sapiens
accaagtatgacaacctctttgagacgtcctttccctactccatgggctggcatggggctcccacaggatcagaggctggggccaactggaaccattggcrgctgcacgctcattactaccctccgctcctgcgctctgccactgtccggaaattcatggttggctacgaaatgcttgctcaggctcagagggacctcacc

SEQ ID NO: 55306 - DNA, 201 bp, Homo sapiens
ccctactccatgggctggcatggggctcccacaggatcagaggctggggccaactggaaccattggcagctgcacgctcattactaccctccgctcctgcrctctgccactgtccggaaattcatggttggctacgaaatgcttgctcaggctcagagggacctcacccctgagcaggctgcagagagactaagggcactt

SEQ ID NO: 55307 - DNA, 201 bp, Homo sapiens
ggtgcccagtacccttgggtgcagatctttgaaaacaaaggtgccatgatgggctgttctaacccccacccccactgccaggtatgggccagcagtttccygccagatattgcccagcgtgaggagcgatctcagcaggcctataagagtcagcatggagagcccctgctaatggagtacagccgccaggagctactcagg

SEQ ID NO: 55308 - DNA, 201 bp, Homo sapiens
gtgcagatctttgaaaacaaaggtgccatgatgggctgttctaacccccacccccactgccaggtatgggccagcagtttcctgccagatattgcccagcrtgaggagcgatctcagcaggcctataagagtcagcatggagagcccctgctaatggagtacagccgccaggagctactcaggaaggaacgtctggtccta

SEQ ID NO: 55309 - DNA, 201 bp, Homo sapiens
agtttcctgccagatattgcccagcgtgaggagcgatctcagcaggcctataagagtcagcatggagagcccctgctaatggagtacagccgccaggagcyactcaggaaggaacgtctggtcctaaccagtgagcactggttagtactggtccccttctgggcaacatggccctaccagacactgctgctgccccgtcgg

SEQ ID NO: 55310 - DNA, 201 bp, Homo sapiens
tattgcccagcgtgaggagcgatctcagcaggcctataagagtcagcatggagagcccctgctaatggagtacagccgccaggagctactcaggaaggaaygtctggtcctaaccagtgagcactggttagtactggtccccttctgggcaacatggccctaccagacactgctgctgccccgtcggcatgtgcggcggct

SEQ ID NO: 55311 - DNA, 201 bp, Homo sapiens
attgcccagcgtgaggagcgatctcagcaggcctataagagtcagcatggagagcccctgctaatggagtacagccgccaggagctactcaggaaggaacrtctggtcctaaccagtgagcactggttagtactggtccccttctgggcaacatggccctaccagacactgctgctgccccgtcggcatgtgcggcggcta

SEQ ID NO: 55312 - DNA, 201 bp, Homo sapiens
ctggttagtactggtccccttctgggcaacatggccctaccagacactgctgctgccccgtcggcatgtgcggcggctacctgagctgacccctgctgagsgtgatgatctagcctccatcatgaagaagctcttgaccaagtatgacaacctctttgagacgtcctttccctactccatgggctggcatggggctcccac

SEQ ID NO: 55313 - DNA, 201 bp, Homo sapiens
actggtccccttctgggcaacatggccctaccagacactgctgctgccccgtcggcatgtgcggcggctacctgagctgacccctgctgagcgtgatgatstagcctccatcatgaagaagctcttgaccaagtatgacaacctctttgagacgtcctttccctactccatgggctggcatggggctcccacaggatcaga

SEQ ID NO: 55314 - DNA, 201 bp, Homo sapiens; identical to SEQ ID NO: 55223

SEQ ID NO: 55315 - DNA, 201 bp, Homo sapiens; identical to SEQ ID NO: 55224

SEQ ID NO: 55316 - DNA, 201 bp, Homo sapiens; identical to SEQ ID NO: 55225

SEQ ID NO: 55317 - DNA, 201 bp, Homo sapiens; identical to SEQ ID NO: 55226

SEQ ID NO: 55318 - DNA, 201 bp, Homo sapiens; identical to SEQ ID NO: 55227

SEQ ID NO: 55319 - DNA, 201 bp, Homo sapiens
agcaaccttccgggcaaacgaccatcagcatatccgctacaacccgctgcaggatgagtgggtgctggtgtcagctcaccgcatgaagcggccctggcagkgtcaagtggagccccagcttctgaagacagtgccccgccatgaccctctcaaccctctgtgtcctggggccatccgagccaacggagaggtgaatcccca

SEQ ID NO: 55320 - DNA, 201 bp, Homo sapiens; identical to SEQ ID NO: 55229

SEQ ID NO: 55321 - DNA, 201 bp, Homo sapiens; identical to SEQ ID NO: 55230

SEQ ID NO: 55322 - DNA, 201 bp, Homo sapiens; identical to SEQ ID NO: 55231

SEQ ID NO: 55323 - DNA, 201 bp, Homo sapiens; identical to SEQ ID NO: 55232

SEQ ID NO: 55324 - DNA, 201 bp, Homo sapiens; identical to SEQ ID NO: 55233

SEQ ID NO: 55325 - DNA, 201 bp, Homo sapiens; identical to SEQ ID NO: 55234

SEQ ID NO: 55326 - DNA, 201 bp, Homo sapiens; identical to SEQ ID NO: 55235

SEQ ID NO: 55327 - DNA, 201 bp, Homo sapiens; identical to SEQ ID NO: 55236

SEQ ID NO: 55328 - DNA, 201 bp, Homo sapiens; identical to SEQ ID NO: 55237

SEQ ID NO: 55329 - DNA, 201 bp, Homo sapiens; identical to SEQ ID NO: 55238

SEQ ID NO: 55330 - DNA, 201 bp, Homo sapiens
cagcaggcgtcagaggcggacgccgcagcagcaaccttccgggcaaacgaccatcagcatatccgctacaacccgctgcaggatgagtgggtgctggtgtyagctcaccgcatgaagcggccctggcagggtcaagtggagccccagcttctgaagacagtgccccgccatgaccctctcaaccctctgtgtcctggggcc

SEQ ID NO: 55331 - DNA, 201 bp, Homo sapiens
gggtggtgtggacggagaaagtgaaaggtgaggcacggccctgcagattttccagcggatcccccggtggcctcatgtcgcgcagtggaaccgatcctcascaacgccagcaggcgtcagaggcggacgccgcagcagcaaccttccgggcaaacgaccatcagcatatccgctacaacccgctgcaggatgagtgggtgc

SEQ ID NO: 55332 - DNA, 201 bp, Homo sapiens; identical to SEQ ID NO: 55240

SEQ ID NO: 55333 - DNA, 201 bp, Homo sapiens; identical to SEQ ID NO: 55241

SEQ ID NO: 55334 - DNA, 201 bp, Homo sapiens; identical to SEQ ID NO: 55242

SEQ ID NO: 55335 - DNA, 201 bp, Homo sapiens; identical to SEQ ID NO: 55243

SEQ ID NO: 55336 - DNA, 201 bp, Homo sapiens
ctgcagattttccagcggatcccccggtggcctcatgtcgcgcagtggaaccgatcctcagcaacgccagcaggcgtcagaggcggacgccgcagcagcarccttccgggcaaacgaccatcagcatatccgctacaacccgctgcaggatgagtgggtgctggtgtcagctcaccgcatgaagcggccctggcagggtca

SEQ ID NO: 55337 - DNA, 201 bp, Homo sapiens; identical to SEQ ID NO: 55244

SEQ ID NO: 55338 - DNA, 201 bp, Homo sapiens; identical to SEQ ID NO: 55245

SEQ ID NO: 55339 - DNA, 201 bp, Homo sapiens; identical to SEQ ID NO: 55246

SEQ ID NO: 55340 - DNA, 201 bp, Homo sapiens; identical to SEQ ID NO: 55247

SEQ ID NO: 55341 - DNA, 201 bp, Homo sapiens; identical to SEQ ID NO: 55249

SEQ ID NO: 55342 - DNA, 201 bp, Homo sapiens; identical to SEQ ID NO: 55250

SEQ ID NO: 55343 - DNA, 201 bp, Homo sapiens; identical to SEQ ID NO: 55251

SEQ ID NO: 55344 - DNA, 201 bp, Homo sapiens
acgccagcaggcgtcagaggcggacgccgcagcagcaaccttccgggcaaacgaccatcagcatatccgctacaacccgctgcaggatgagtgggtgctgdtgtcagctcaccgcatgaagcggccctggcagggtcaagtggagccccagcttctgaagacagtgccccgccatgaccctctcaaccctctgtgtcctgg

SEQ ID NO: 55345 - DNA, 201 bp, Homo sapiens; identical to SEQ ID NO: 55253

SEQ ID NO: 55346 - DNA, 201 bp, Homo sapiens; identical to SEQ ID NO: 55254

SEQ ID NO: 55347 - DNA, 201 bp, Homo sapiens; identical to SEQ ID NO: 55255

SEQ ID NO: 55348 - DNA, 201 bp, Homo sapiens; identical to SEQ ID NO: 55256

SEQ ID NO: 55349 - DNA, 201 bp, Homo sapiens
cggatcccccggtggcctcatgtcgcgcagtggaaccgatcctcagcaacgccagcaggcgtcagaggcggacgccgcagcagcaaccttccgggcaaacdaccatcagcatatccgctacaacccgctgcaggatgagtgggtgctggtgtcagctcaccgcatgaagcggccctggcagggtcaagtggagccccagct

SEQ ID NO: 55350 - DNA, 201 bp, Homo sapiens
agcagcaaccttccgggcaaacgaccatcagcatatccgctacaacccgctgcaggatgagtgggtgctggtgtcagctcaccgcatgaagcggccctggyagggtcaagtggagccccagcttctgaagacagtgccccgccatgaccctctcaaccctctgtgtcctggggccatccgagccaacggagaggtgaatcc

SEQ ID NO: 55351 - DNA, 201 bp, Homo sapiens
ggcctcatgtcgcgcagtggaaccgatcctcagcaacgccagcaggcgtcagaggcggacgccgcagcagcaaccttccgggcaaacgaccatcagcatawccgctacaacccgctgcaggatgagtgggtgctggtgtcagctcaccgcatgaagcggccctggcagggtcaagtggagccccagcttctgaagacagtg

SEQ ID NO: 55352 - DNA, 201 bp, Homo sapiens; identical to SEQ ID NO: 55259

SEQ ID NO: 55353 - DNA, 201 bp, Homo sapiens; identical to SEQ ID NO: 55260

SEQ ID NO: 55354 - DNA, 201 bp, Homo sapiens; identical to SEQ ID NO: 55261

SEQ ID NO: 55355 - DNA, 201 bp, Homo sapiens; identical to SEQ ID NO: 55262

SEQ ID NO: 55356 - DNA, 201 bp, Homo sapiens
cgcagcagcaaccttccgggcaaacgaccatcagcatatccgctacaacccgctgcaggatgagtgggtgctggtgtcagctcaccgcatgaagcggcccwggcagggtcaagtggagccccagcttctgaagacagtgccccgccatgaccctctcaaccctctgtgtcctggggccatccgagccaacggagaggtgaa

SEQ ID NO: 55357 - DNA, 201 bp, Homo sapiens; identical to SEQ ID NO: 55264

SEQ ID NO: 55358 - DNA, 201 bp, Homo sapiens; identical to SEQ ID NO: 55265

SEQ ID NO: 55359 - DNA, 201 bp, Homo sapiens; identical to SEQ ID NO: 55266

SEQ ID NO: 55360 - DNA, 201 bp, Homo sapiens; identical to SEQ ID NO: 55267

SEQ ID NO: 55361 - DNA, 201 bp, Homo sapiens; identical to SEQ ID NO: 55268

SEQ ID NO: 55362 - DNA, 201 bp, Homo sapiens; identical to SEQ ID NO: 55269

SEQ ID NO: 55363 - DNA, 201 bp, Homo sapiens; identical to SEQ ID NO: 55270

SEQ ID NO: 55364 - DNA, 201 bp, Homo sapiens; identical to SEQ ID NO: 55271

SEQ ID NO: 55365 - DNA, 201 bp, Homo sapiens; identical to SEQ ID NO: 55272

SEQ ID NO: 55366 - DNA, 201 bp, Homo sapiens; identical to SEQ ID NO: 55273

SEQ ID NO: 55367 - DNA, 201 bp, Homo sapiens; identical to SEQ ID NO: 55274

SEQ ID NO: 55368 - DNA, 201 bp, Homo sapiens; identical to SEQ ID NO: 55275

SEQ ID NO: 55369 - DNA, 201 bp, Homo sapiens; identical to SEQ ID NO: 55276

SEQ ID NO: 55370 - DNA, 201 bp, Homo sapiens; identical to SEQ ID NO: 55277

SEQ ID NO: 55371 - DNA, 201 bp, Homo sapiens; identical to SEQ ID NO: 55278

SEQ ID NO: 55372 - DNA, 201 bp, Homo sapiens; identical to SEQ ID NO: 55279

SEQ ID NO: 55373 - DNA, 201 bp, Homo sapiens; identical to SEQ ID NO: 55280

SEQ ID NO: 55374 - DNA, 201 bp, Homo sapiens; identical to SEQ ID NO: 55281

SEQ ID NO: 55375 - DNA, 201 bp, Homo sapiens; identical to SEQ ID NO: 55282

SEQ ID NO: 55376 - DNA, 201 bp, Homo sapiens; identical to SEQ ID NO: 55283

SEQ ID NO: 55377 - DNA, 201 bp, Homo sapiens; identical to SEQ ID NO: 55284

SEQ ID NO: 55378 - DNA, 201 bp, Homo sapiens; identical to SEQ ID NO: 55285

SEQ ID NO: 55379 - DNA, 201 bp, Homo sapiens; identical to SEQ ID NO: 55286

SEQ ID NO: 55380 - DNA, 201 bp, Homo sapiens; identical to SEQ ID NO: 55287

SEQ ID NO: 55381 - DNA, 201 bp, Homo sapiens; identical to SEQ ID NO: 55288

SEQ ID NO: 55382 - DNA, 201 bp, Homo sapiens; identical to SEQ ID NO: 55290

SEQ ID NO: 55383 - DNA, 201 bp, Homo sapiens; identical to SEQ ID NO: 55291

SEQ ID NO: 55384 - DNA, 201 bp, Homo sapiens; identical to SEQ ID NO: 55289

SEQ ID NO: 55385 - DNA, 201 bp, Homo sapiens; identical to SEQ ID NO: 55292

SEQ ID NO: 55386 - DNA, 201 bp, Homo sapiens; identical to SEQ ID NO: 55293

SEQ ID NO: 55387 - DNA, 201 bp, Homo sapiens; identical to SEQ ID NO: 55294

SEQ ID NO: 55388 - DNA, 201 bp, Homo sapiens; identical to SEQ ID NO: 55295

SEQ ID NO: 55389 - DNA, 201 bp, Homo sapiens; identical to SEQ ID NO: 55296

SEQ ID NO: 55390 - DNA, 201 bp, Homo sapiens; identical to SEQ ID NO: 55297

SEQ ID NO: 55391 - DNA, 201 bp, Homo sapiens; identical to SEQ ID NO: 55298

SEQ ID NO: 55392 - DNA, 201 bp, Homo sapiens; identical to SEQ ID NO: 55299

SEQ ID NO: 55393 - DNA, 201 bp, Homo sapiens; identical to SEQ ID NO: 55300

SEQ ID NO: 55394 - DNA, 201 bp, Homo sapiens; identical to SEQ ID NO: 55301

SEQ ID NO: 55395 - DNA, 201 bp, Homo sapiens
gacgccgcagcagcaaccttccgggcaaacgaccatcagcatatccgctacaacccgctgcaggatgagtgggtgctggtgtcagctcaccgcatgaagckgccctggcagggtcaagtggagccccagcttctgaagacagtgccccgccatgaccctctcaaccctctgtgtcctggggccatccgagccaacggagag

SEQ ID NO: 55396 - DNA, 201 bp, Homo sapiens; identical to SEQ ID NO: 55303

SEQ ID NO: 55397 - DNA, 201 bp, Homo sapiens; identical to SEQ ID NO: 55304

SEQ ID NO: 55398 - DNA, 201 bp, Homo sapiens; identical to SEQ ID NO: 55305

SEQ ID NO: 55399 - DNA, 201 bp, Homo sapiens; identical to SEQ ID NO: 55306

SEQ ID NO: 55400 - DNA, 201 bp, Homo sapiens; identical to SEQ ID NO: 55307

SEQ ID NO: 55401 - DNA, 201 bp, Homo sapiens; identical to SEQ ID NO: 55308

SEQ ID NO: 55402 - DNA, 201 bp, Homo sapiens; identical to SEQ ID NO: 55309

SEQ ID NO: 55403 - DNA, 201 bp, Homo sapiens; identical to SEQ ID NO: 55310

SEQ ID NO: 55404 - DNA, 201 bp, Homo sapiens; identical to SEQ ID NO: 55311

SEQ ID NO: 55405 - DNA, 201 bp, Homo sapiens; identical to SEQ ID NO: 55312

SEQ ID NO: 55406 - DNA, 201 bp, Homo sapiens; identical to SEQ ID NO: 55313

SEQ ID NO: 55407 - DNA, 201 bp, Homo sapiens; identical to SEQ ID NO: 55223

SEQ ID NO: 55408 - DNA, 201 bp, Homo sapiens; identical to SEQ ID NO: 55224

SEQ ID NO: 55409 - DNA, 201 bp, Homo sapiens; identical to SEQ ID NO: 55225

SEQ ID NO: 55410 - DNA, 201 bp, Homo sapiens; identical to SEQ ID NO: 55226

SEQ ID NO: 55411 - DNA, 201 bp, Homo sapiens; identical to SEQ ID NO: 55227

SEQ ID NO: 55412 - DNA, 201 bp, Homo sapiens; identical to SEQ ID NO: 55319

SEQ ID NO: 55413 - DNA, 201 bp, Homo sapiens; identical to SEQ ID NO: 55229

SEQ ID NO: 55414 - DNA, 201 bp, Homo sapiens; identical to SEQ ID NO: 55230

SEQ ID NO: 55415 - DNA, 201 bp, Homo sapiens; identical to SEQ ID NO: 55231

SEQ ID NO: 55416 - DNA, 201 bp, Homo sapiens; identical to SEQ ID NO: 55232

SEQ ID NO: 55417 - DNA, 201 bp, Homo sapiens; identical to SEQ ID NO: 55233

SEQ ID NO: 55418 - DNA, 201 bp, Homo sapiens; identical to SEQ ID NO: 55234

SEQ ID NO: 55419 - DNA, 201 bp, Homo sapiens; identical to SEQ ID NO: 55235

SEQ ID NO: 55420 - DNA, 201 bp, Homo sapiens; identical to SEQ ID NO: 55236

SEQ ID NO: 55421 - DNA, 201 bp, Homo sapiens; identical to SEQ ID NO: 55237

SEQ ID NO: 55422 - DNA, 201 bp, Homo sapiens; identical to SEQ ID NO: 55238

SEQ ID NO: 55423 - DNA, 201 bp, Homo sapiens; identical to SEQ ID NO: 55330

SEQ ID NO: 55424 - DNA, 201 bp, Homo sapiens
ggtcttcaggggcctacaattccttctctgttctgcggcacaaaatattttccagcggatcccccggtggcctcatgtcgcgcagtggaaccgatcctcascaacgccagcaggcgtcagaggcggacgccgcagcagcaaccttccgggcaaacgaccatcagcatatccgctacaacccgctgcaggatgagtgggtgc

SEQ ID NO: 55425 - DNA, 201 bp, Homo sapiens; identical to SEQ ID NO: 55240

SEQ ID NO: 55426 - DNA, 201 bp, Homo sapiens; identical to SEQ ID NO: 55241

SEQ ID NO: 55427 - DNA, 201 bp, Homo sapiens; identical to SEQ ID NO: 55242

SEQ ID NO: 55428 - DNA, 201 bp, Homo sapiens; identical to SEQ ID NO: 55243

SEQ ID NO: 55429 - DNA, 201 bp, Homo sapiens
caaaatattttccagcggatcccccggtggcctcatgtcgcgcagtggaaccgatcctcagcaacgccagcaggcgtcagaggcggacgccgcagcagcarccttccgggcaaacgaccatcagcatatccgctacaacccgctgcaggatgagtgggtgctggtgtcagctcaccgcatgaagcggccctggcagggtca

SEQ ID NO: 55430 - DNA, 201 bp, Homo sapiens; identical to SEQ ID NO: 55244

SEQ ID NO: 55431 - DNA, 201 bp, Homo sapiens; identical to SEQ ID NO: 55245

SEQ ID NO: 55432 - DNA, 201 bp, Homo sapiens; identical to SEQ ID NO: 55246

SEQ ID NO: 55433 - DNA, 201 bp, Homo sapiens; identical to SEQ ID NO: 55247

SEQ ID NO: 55434 - DNA, 201 bp, Homo sapiens; identical to SEQ ID NO: 55249

SEQ ID NO: 55435 - DNA, 201 bp, Homo sapiens; identical to SEQ ID NO: 55250

SEQ ID NO: 55436 - DNA, 201 bp, Homo sapiens; identical to SEQ ID NO: 55251

SEQ ID NO: 55437 - DNA, 201 bp, Homo sapiens; identical to SEQ ID NO: 55344

SEQ ID NO: 55438 - DNA, 201 bp, Homo sapiens; identical to SEQ ID NO: 55253

SEQ ID NO: 55439 - DNA, 201 bp, Homo sapiens; identical to SEQ ID NO: 55254

SEQ ID NO: 55440 - DNA, 201 bp, Homo sapiens; identical to SEQ ID NO: 55255

SEQ ID NO: 55441 - DNA, 201 bp, Homo sapiens; identical to SEQ ID NO: 55256

SEQ ID NO: 55442 - DNA, 201 bp, Homo sapiens; identical to SEQ ID NO: 55349

SEQ ID NO: 55443 - DNA, 201 bp, Homo sapiens; identical to SEQ ID NO: 55350

SEQ ID NO: 55444 - DNA, 201 bp, Homo sapiens; identical to SEQ ID NO: 55351

SEQ ID NO: 55445 - DNA, 201 bp, Homo sapiens; identical to SEQ ID NO: 55259

SEQ ID NO: 55446 - DNA, 201 bp, Homo sapiens; identical to SEQ ID NO: 55260

SEQ ID NO: 55447 - DNA, 201 bp, Homo sapiens; identical to SEQ ID NO: 55261

SEQ ID NO: 55448 - DNA, 201 bp, Homo sapiens; identical to SEQ ID NO: 55262

SEQ ID NO: 55449 - DNA, 201 bp, Homo sapiens; identical to SEQ ID NO: 55356

SEQ ID NO: 55450 - DNA, 201 bp, Homo sapiens; identical to SEQ ID NO: 55264

SEQ ID NO: 55451 - DNA, 201 bp, Homo sapiens; identical to SEQ ID NO: 55265

SEQ ID NO: 55452 - DNA, 201 bp, Homo sapiens; identical to SEQ ID NO: 55266

SEQ ID NO: 55453 - DNA, 201 bp, Homo sapiens; identical to SEQ ID NO: 55267

SEQ ID NO: 55454 - DNA, 201 bp, Homo sapiens; identical to SEQ ID NO: 55268

SEQ ID NO: 55455 - DNA, 201 bp, Homo sapiens; identical to SEQ ID NO: 55269

SEQ ID NO: 55456 - DNA, 201 bp, Homo sapiens; identical to SEQ ID NO: 55270

SEQ ID NO: 55457 - DNA, 201 bp, Homo sapiens; identical to SEQ ID NO: 55271

SEQ ID NO: 55458 - DNA, 201 bp, Homo sapiens; identical to SEQ ID NO: 55272

SEQ ID NO: 55459 - DNA, 201 bp, Homo sapiens; identical to SEQ ID NO: 55273

SEQ ID NO: 55460 - DNA, 201 bp, Homo sapiens; identical to SEQ ID NO: 55274

SEQ ID NO: 55461 - DNA, 201 bp, Homo sapiens; identical to SEQ ID NO: 55275

SEQ ID NO: 55462 - DNA, 201 bp, Homo sapiens; identical to SEQ ID NO: 55276

SEQ ID NO: 55463 - DNA, 201 bp, Homo sapiens; identical to SEQ ID NO: 55277

SEQ ID NO: 55464 - DNA, 201 bp, Homo sapiens; identical to SEQ ID NO: 55278

SEQ ID NO: 55465 - DNA, 201 bp, Homo sapiens; identical to SEQ ID NO: 55279

SEQ ID NO: 55466 - DNA, 201 bp, Homo sapiens; identical to SEQ ID NO: 55280

SEQ ID NO: 55467 - DNA, 201 bp, Homo sapiens; identical to SEQ ID NO: 55281

SEQ ID NO: 55468 - DNA, 201 bp, Homo sapiens; identical to SEQ ID NO: 55282

SEQ ID NO: 55469 - DNA, 201 bp, Homo sapiens; identical to SEQ ID NO: 55283

SEQ ID NO: 55470 - DNA, 201 bp, Homo sapiens; identical to SEQ ID NO: 55284

SEQ ID NO: 55471 - DNA, 201 bp, Homo sapiens; identical to SEQ ID NO: 55285

SEQ ID NO: 55472 - DNA, 201 bp, Homo sapiens; identical to SEQ ID NO: 55286

SEQ ID NO: 55473 - DNA, 201 bp, Homo sapiens; identical to SEQ ID NO: 55287

SEQ ID NO: 55474 - DNA, 201 bp, Homo sapiens; identical to SEQ ID NO: 55288

SEQ ID NO: 55475 - DNA, 201 bp, Homo sapiens; identical to SEQ ID NO: 55290

SEQ ID NO: 55476 - DNA, 201 bp, Homo sapiens; identical to SEQ ID NO: 55291

SEQ ID NO: 55477 - DNA, 201 bp, Homo sapiens; identical to SEQ ID NO: 55289

SEQ ID NO: 55478 - DNA, 201 bp, Homo sapiens; identical to SEQ ID NO: 55292

SEQ ID NO: 55479 - DNA, 201 bp, Homo sapiens; identical to SEQ ID NO: 55293

SEQ ID NO: 55480 - DNA, 201 bp, Homo sapiens; identical to SEQ ID NO: 55294

SEQ ID NO: 55481 - DNA, 201 bp, Homo sapiens; identical to SEQ ID NO: 55295

SEQ ID NO: 55482 - DNA, 201 bp, Homo sapiens; identical to SEQ ID NO: 55296

SEQ ID NO: 55483 - DNA, 201 bp, Homo sapiens; identical to SEQ ID NO: 55297

SEQ ID NO: 55484 - DNA, 201 bp, Homo sapiens; identical to SEQ ID NO: 55298

SEQ ID NO: 55485 - DNA, 201 bp, Homo sapiens; identical to SEQ ID NO: 55299

SEQ ID NO: 55486 - DNA, 201 bp, Homo sapiens; identical to SEQ ID NO: 55300

SEQ ID NO: 55487 - DNA, 201 bp, Homo sapiens; identical to SEQ ID NO: 55301

SEQ ID NO: 55488 - DNA, 201 bp, Homo sapiens; identical to SEQ ID NO: 55395

SEQ ID NO: 55489 - DNA, 201 bp, Homo sapiens; identical to SEQ ID NO: 55303

SEQ ID NO: 55490 - DNA, 201 bp, Homo sapiens; identical to SEQ ID NO: 55304

SEQ ID NO: 55491 - DNA, 201 bp, Homo sapiens; identical to SEQ ID NO: 55305

SEQ ID NO: 55492 - DNA, 201 bp, Homo sapiens; identical to SEQ ID NO: 55306

SEQ ID NO: 55493 - DNA, 201 bp, Homo sapiens; identical to SEQ ID NO: 55307

SEQ ID NO: 55494 - DNA, 201 bp, Homo sapiens; identical to SEQ ID NO: 55308

SEQ ID NO: 55495 - DNA, 201 bp, Homo sapiens; identical to SEQ ID NO: 55309

SEQ ID NO: 55496 - DNA, 201 bp, Homo sapiens; identical to SEQ ID NO: 55310

SEQ ID NO: 55497 - DNA, 201 bp, Homo sapiens; identical to SEQ ID NO: 55311

SEQ ID NO: 55498 - DNA, 201 bp, Homo sapiens; identical to SEQ ID NO: 55312

SEQ ID NO: 55499 - DNA, 201 bp, Homo sapiens; identical to SEQ ID NO: 55313

SEQ ID NO: 55500 - DNA, 201 bp, Homo sapiens; identical to SEQ ID NO: 55223

SEQ ID NO: 55501 - DNA, 201 bp, Homo sapiens; identical to SEQ ID NO: 55224

SEQ ID NO: 55502 - DNA, 201 bp, Homo sapiens; identical to SEQ ID NO: 55225

SEQ ID NO: 55503 - DNA, 201 bp, Homo sapiens; identical to SEQ ID NO: 55226

SEQ ID NO: 55504 - DNA, 201 bp, Homo sapiens; identical to SEQ ID NO: 55227

SEQ ID NO: 55505 - DNA, 201 bp, Homo sapiens
agctttcgtcccctccgaagaccatcagcatatccgctacaacccgctgcaggatgagtgggtgctggtgtcagctcaccgcatgaagcggccctggcagkgtcaagtggagccccagcttctgaagacagtgccccgccatgaccctctcaaccctctgtgtcctggggccatccgagccaacggagaggtgaatcccca

SEQ ID NO: 55506 - DNA, 201 bp, Homo sapiens; identical to SEQ ID NO: 55229

SEQ ID NO: 55507 - DNA, 201 bp, Homo sapiens; identical to SEQ ID NO: 55230

SEQ ID NO: 55508 - DNA, 201 bp, Homo sapiens; identical to SEQ ID NO: 55231

SEQ ID NO: 55509 - DNA, 201 bp, Homo sapiens; identical to SEQ ID NO: 55232

SEQ ID NO: 55510 - DNA, 201 bp, Homo sapiens; identical to SEQ ID NO: 55233

SEQ ID NO: 55511 - DNA, 201 bp, Homo sapiens; identical to SEQ ID NO: 55234

SEQ ID NO: 55512 - DNA, 201 bp, Homo sapiens; identical to SEQ ID NO: 55235

SEQ ID NO: 55513 - DNA, 201 bp, Homo sapiens; identical to SEQ ID NO: 55236

SEQ ID NO: 55514 - DNA, 201 bp, Homo sapiens; identical to SEQ ID NO: 55237

SEQ ID NO: 55515 - DNA, 201 bp, Homo sapiens; identical to SEQ ID NO: 55238

SEQ ID NO: 55516 - DNA, 201 bp, Homo sapiens
gcggagccgagccctccccttccttaggaagctttcgtcccctccgaagaccatcagcatatccgctacaacccgctgcaggatgagtgggtgctggtgtyagctcaccgcatgaagcggccctggcagggtcaagtggagccccagcttctgaagacagtgccccgccatgaccctctcaaccctctgtgtcctggggcc

SEQ ID NO: 55517 - DNA, 201 bp, Homo sapiens; identical to SEQ ID NO: 55240

SEQ ID NO: 55518 - DNA, 201 bp, Homo sapiens; identical to SEQ ID NO: 55241

SEQ ID NO: 55519 - DNA, 201 bp, Homo sapiens; identical to SEQ ID NO: 55242

SEQ ID NO: 55520 - DNA, 201 bp, Homo sapiens; identical to SEQ ID NO: 55243

SEQ ID NO: 55521 - DNA, 201 bp, Homo sapiens; identical to SEQ ID NO: 55244

SEQ ID NO: 55522 - DNA, 201 bp, Homo sapiens; identical to SEQ ID NO: 55245

SEQ ID NO: 55523 - DNA, 201 bp, Homo sapiens; identical to SEQ ID NO: 55246

SEQ ID NO: 55524 - DNA, 201 bp, Homo sapiens; identical to SEQ ID NO: 55247

SEQ ID NO: 55525 - DNA, 201 bp, Homo sapiens; identical to SEQ ID NO: 55249

SEQ ID NO: 55526 - DNA, 201 bp, Homo sapiens; identical to SEQ ID NO: 55250

SEQ ID NO: 55527 - DNA, 201 bp, Homo sapiens; identical to SEQ ID NO: 55251

SEQ ID NO: 55528 - DNA, 201 bp, Homo sapiens
gggcgcggagccgagccctccccttccttaggaagctttcgtcccctccgaagaccatcagcatatccgctacaacccgctgcaggatgagtgggtgctgdtgtcagctcaccgcatgaagcggccctggcagggtcaagtggagccccagcttctgaagacagtgccccgccatgaccctctcaaccctctgtgtcctgg

SEQ ID NO: 55529 - DNA, 201 bp, Homo sapiens; identical to SEQ ID NO: 55253

SEQ ID NO: 55530 - DNA, 201 bp, Homo sapiens; identical to SEQ ID NO: 55254

SEQ ID NO: 55531 - DNA, 201 bp, Homo sapiens; identical to SEQ ID NO: 55255

SEQ ID NO: 55532 - DNA, 201 bp, Homo sapiens; identical to SEQ ID NO: 55256

SEQ ID NO: 55533 - DNA, 201 bp, Homo sapiens
ggaagctttcgtcccctccgaagaccatcagcatatccgctacaacccgctgcaggatgagtgggtgctggtgtcagctcaccgcatgaagcggccctggyagggtcaagtggagccccagcttctgaagacagtgccccgccatgaccctctcaaccctctgtgtcctggggccatccgagccaacggagaggtgaatcc

SEQ ID NO: 55534 - DNA, 105 bp, Homo sapiens
aaacdgtaactgcaccgcggcagggactcgctggggcgcggagccgagccctccccttccttaggaagctttcgtcccctccgaagaccatcagcatatccgcta

SEQ ID NO: 55535 - DNA, 199 bp, Homo sapiens
aaacggtaactgcaccgcggcagggactcgctggggcgcggagccgagccctccccttccttaggaagctttcgtcccctccgaagaccatcagcatawccgctacaacccgctgcaggatgagtgggtgctggtgtcagctcaccgcatgaagcggccctggcagggtcaagtggagccccagcttctgaagacagtg

SEQ ID NO: 55536 - DNA, 201 bp, Homo sapiens; identical to SEQ ID NO: 55259

SEQ ID NO: 55537 - DNA, 201 bp, Homo sapiens; identical to SEQ ID NO: 55260

SEQ ID NO: 55538 - DNA, 201 bp, Homo sapiens; identical to SEQ ID NO: 55261

SEQ ID NO: 55539 - DNA, 201 bp, Homo sapiens; identical to SEQ ID NO: 55262

SEQ ID NO: 55540 - DNA, 201 bp, Homo sapiens
ttaggaagctttcgtcccctccgaagaccatcagcatatccgctacaacccgctgcaggatgagtgggtgctggtgtcagctcaccgcatgaagcggcccwggcagggtcaagtggagccccagcttctgaagacagtgccccgccatgaccctctcaaccctctgtgtcctggggccatccgagccaacggagaggtgaa

SEQ ID NO: 55541 - DNA, 201 bp, Homo sapiens; identical to SEQ ID NO: 55264

SEQ ID NO: 55542 - DNA, 201 bp, Homo sapiens; identical to SEQ ID NO: 55265

SEQ ID NO: 55543 - DNA, 201 bp, Homo sapiens; identical to SEQ ID NO: 55266

SEQ ID NO: 55544 - DNA, 201 bp, Homo sapiens; identical to SEQ ID NO: 55267

SEQ ID NO: 55545 - DNA, 201 bp, Homo sapiens; identical to SEQ ID NO: 55268

SEQ ID NO: 55546 - DNA, 201 bp, Homo sapiens; identical to SEQ ID NO: 55269

SEQ ID NO: 55547 - DNA, 201 bp, Homo sapiens; identical to SEQ ID NO: 55270

SEQ ID NO: 55548 - DNA, 201 bp, Homo sapiens; identical to SEQ ID NO: 55271

SEQ ID NO: 55549 - DNA, 201 bp, Homo sapiens; identical to SEQ ID NO: 55272

SEQ ID NO: 55550 - DNA, 201 bp, Homo sapiens; identical to SEQ ID NO: 55273

SEQ ID NO: 55551 - DNA, 201 bp, Homo sapiens; identical to SEQ ID NO: 55274

SEQ ID NO: 55552 - DNA, 201 bp, Homo sapiens; identical to SEQ ID NO: 55275

SEQ ID NO: 55553 - DNA, 201 bp, Homo sapiens; identical to SEQ ID NO: 55276

SEQ ID NO: 55554 - DNA, 201 bp, Homo sapiens; identical to SEQ ID NO: 55277

SEQ ID NO: 55555 - DNA, 201 bp, Homo sapiens; identical to SEQ ID NO: 55278

SEQ ID NO: 55556 - DNA, 201 bp, Homo sapiens; identical to SEQ ID NO: 55279

SEQ ID NO: 55557 - DNA, 201 bp, Homo sapiens; identical to SEQ ID NO: 55280

SEQ ID NO: 55558 - DNA, 201 bp, Homo sapiens; identical to SEQ ID NO: 55281

SEQ ID NO: 55559 - DNA, 201 bp, Homo sapiens; identical to SEQ ID NO: 55282

SEQ ID NO: 55560 - DNA, 201 bp, Homo sapiens; identical to SEQ ID NO: 55283

SEQ ID NO: 55561 - DNA, 201 bp, Homo sapiens; identical to SEQ ID NO: 55284

SEQ ID NO: 55562 - DNA, 201 bp, Homo sapiens; identical to SEQ ID NO: 55285

SEQ ID NO: 55563 - DNA, 201 bp, Homo sapiens; identical to SEQ ID NO: 55286

SEQ ID NO: 55564 - DNA, 201 bp, Homo sapiens; identical to SEQ ID NO: 55287

SEQ ID NO: 55565 - DNA, 201 bp, Homo sapiens; identical to SEQ ID NO: 55288

SEQ ID NO: 55566 - DNA, 201 bp, Homo sapiens; identical to SEQ ID NO: 55289

SEQ ID NO: 55567 - DNA, 201 bp, Homo sapiens; identical to SEQ ID NO: 55290

SEQ ID NO: 55568 - DNA, 201 bp, Homo sapiens; identical to SEQ ID NO: 55291

SEQ ID NO: 55569 - DNA, 201 bp, Homo sapiens; identical to SEQ ID NO: 55292

SEQ ID NO: 55570 - DNA, 201 bp, Homo sapiens; identical to SEQ ID NO: 55293

SEQ ID NO: 55571 - DNA, 201 bp, Homo sapiens; identical to SEQ ID NO: 55294

SEQ ID NO: 55572 - DNA, 201 bp, Homo sapiens; identical to SEQ ID NO: 55295

SEQ ID NO: 55573 - DNA, 201 bp, Homo sapiens; identical to SEQ ID NO: 55296

SEQ ID NO: 55574 - DNA, 201 bp, Homo sapiens; identical to SEQ ID NO: 55297

SEQ ID NO: 55575 - DNA, 201 bp, Homo sapiens; identical to SEQ ID NO: 55298

SEQ ID NO: 55576 - DNA, 201 bp, Homo sapiens; identical to SEQ ID NO: 55299

SEQ ID NO: 55577 - DNA, 201 bp, Homo sapiens; identical to SEQ ID NO: 55300

SEQ ID NO: 55578 - DNA, 201 bp, Homo sapiens; identical to SEQ ID NO: 55301

SEQ ID NO: 55579 - DNA, 201 bp, Homo sapiens
cttccttaggaagctttcgtcccctccgaagaccatcagcatatccgctacaacccgctgcaggatgagtgggtgctggtgtcagctcaccgcatgaagckgccctggcagggtcaagtggagccccagcttctgaagacagtgccccgccatgaccctctcaaccctctgtgtcctggggccatccgagccaacggagag

SEQ ID NO: 55580 - DNA, 201 bp, Homo sapiens; identical to SEQ ID NO: 55303

SEQ ID NO: 55581 - DNA, 201 bp, Homo sapiens; identical to SEQ ID NO: 55304

SEQ ID NO: 55582 - DNA, 201 bp, Homo sapiens; identical to SEQ ID NO: 55305

SEQ ID NO: 55583 - DNA, 201 bp, Homo sapiens; identical to SEQ ID NO: 55306

SEQ ID NO: 55584 - DNA, 201 bp, Homo sapiens; identical to SEQ ID NO: 55307

SEQ ID NO: 55585 - DNA, 201 bp, Homo sapiens; identical to SEQ ID NO: 55308

SEQ ID NO: 55586 - DNA, 201 bp, Homo sapiens; identical to SEQ ID NO: 55309

SEQ ID NO: 55587 - DNA, 201 bp, Homo sapiens; identical to SEQ ID NO: 55310

SEQ ID NO: 55588 - DNA, 201 bp, Homo sapiens; identical to SEQ ID NO: 55311

SEQ ID NO: 55589 - DNA, 201 bp, Homo sapiens; identical to SEQ ID NO: 55312

SEQ ID NO: 55590 - DNA, 201 bp, Homo sapiens; identical to SEQ ID NO: 55313

SEQ ID NO: 55591 - DNA, 201 bp, Homo sapiens; identical to SEQ ID NO: 55223

SEQ ID NO: 55592 - DNA, 201 bp, Homo sapiens; identical to SEQ ID NO: 55224

SEQ ID NO: 55593 - DNA, 201 bp, Homo sapiens; identical to SEQ ID NO: 55225

SEQ ID NO: 55594 - DNA, 201 bp, Homo sapiens; identical to SEQ ID NO: 55226

SEQ ID NO: 55595 - DNA, 201 bp, Homo sapiens
gcagctgcacgctcattactaccctccgctcctgcgctctgccactgtccggaaattcatggttggctacgaaatgcttgctcaggctcagagggacctcrcccctgagcagatgagcagcagctgctcagggctgagcagggtcctggtggccgtggctacagccctggtgtctgcctcctccccctgcccccaggcctg

SEQ ID NO: 55596 - DNA, 201 bp, Homo sapiens; identical to SEQ ID NO: 55319

SEQ ID NO: 55597 - DNA, 201 bp, Homo sapiens; identical to SEQ ID NO: 55229

SEQ ID NO: 55598 - DNA, 201 bp, Homo sapiens
gtcctttccctactccatgggctggcatggggctcccacaggatcagaggctggggccaactggaaccattggcagctgcacgctcattactaccctccgytcctgcgctctgccactgtccggaaattcatggttggctacgaaatgcttgctcaggctcagagggacctcacccctgagcagatgagcagcagctgctc

SEQ ID NO: 55599 - DNA, 201 bp, Homo sapiens; identical to SEQ ID NO: 55231

SEQ ID NO: 55600 - DNA, 201 bp, Homo sapiens; identical to SEQ ID NO: 55232

SEQ ID NO: 55601 - DNA, 201 bp, Homo sapiens; identical to SEQ ID NO: 55233

SEQ ID NO: 55602 - DNA, 201 bp, Homo sapiens; identical to SEQ ID NO: 55234

SEQ ID NO: 55603 - DNA, 201 bp, Homo sapiens; identical to SEQ ID NO: 55235

SEQ ID NO: 55604 - DNA, 201 bp, Homo sapiens
tactccatgggctggcatggggctcccacaggatcagaggctggggccaactggaaccattggcagctgcacgctcattactaccctccgctcctgcgctytgccactgtccggaaattcatggttggctacgaaatgcttgctcaggctcagagggacctcacccctgagcagatgagcagcagctgctcagggctgagc

SEQ ID NO: 55605 - DNA, 201 bp, Homo sapiens
tggcatggggctcccacaggatcagaggctggggccaactggaaccattggcagctgcacgctcattactaccctccgctcctgcgctctgccactgtccrgaaattcatggttggctacgaaatgcttgctcaggctcagagggacctcacccctgagcagatgagcagcagctgctcagggctgagcagggtcctggtg

SEQ ID NO: 55606 - DNA, 201 bp, Homo sapiens; identical to SEQ ID NO: 55238

SEQ ID NO: 55607 - DNA, 201 bp, Homo sapiens; identical to SEQ ID NO: 55330

SEQ ID NO: 55608 - DNA, 201 bp, Homo sapiens; identical to SEQ ID NO: 55331

SEQ ID NO: 55609 - DNA, 201 bp, Homo sapiens; identical to SEQ ID NO: 55240

SEQ ID NO: 55610 - DNA, 201 bp, Homo sapiens; identical to SEQ ID NO: 55241

SEQ ID NO: 55611 - DNA, 201 bp, Homo sapiens
tccatgggctggcatggggctcccacaggatcagaggctggggccaactggaaccattggcagctgcacgctcattactaccctccgctcctgcgctctgycactgtccggaaattcatggttggctacgaaatgcttgctcaggctcagagggacctcacccctgagcagatgagcagcagctgctcagggctgagcagg

SEQ ID NO: 55612 - DNA, 201 bp, Homo sapiens
cgctcattactaccctccgctcctgcgctctgccactgtccggaaattcatggttggctacgaaatgcttgctcaggctcagagggacctcacccctgagyagatgagcagcagctgctcagggctgagcagggtcctggtggccgtggctacagccctggtgtctgcctcctccccctgcccccaggcctggggcccccc

SEQ ID NO: 55613 - DNA, 201 bp, Homo sapiens; identical to SEQ ID NO: 55336

SEQ ID NO: 55614 - DNA, 201 bp, Homo sapiens; identical to SEQ ID NO: 55246

SEQ ID NO: 55615 - DNA, 201 bp, Homo sapiens
ctttgagacgtcctttccctactccatgggctggcatggggctcccacaggatcagaggctggggccaactggaaccattggcagctgcacgctcattacbaccctccgctcctgcgctctgccactgtccggaaattcatggttggctacgaaatgcttgctcaggctcagagggacctcacccctgagcagatgagcag

SEQ ID NO: 55616 - DNA, 201 bp, Homo sapiens; identical to SEQ ID NO: 55247

SEQ ID NO: 55617 - DNA, 201 bp, Homo sapiens; identical to SEQ ID NO: 55249

SEQ ID NO: 55618 - DNA, 201 bp, Homo sapiens; identical to SEQ ID NO: 55250

SEQ ID NO: 55619 - DNA, 201 bp, Homo sapiens
ctctgtggagcaggtagctgtgctggcgtctttgggaatcctttctttcctgggactggtggctggggccctggcactggggctctggctgaggctgagayggggtgggaaggatggatccccaaagcctgggttcttggcctcagtgattccagtggacaggcgtccaggagctccaaacctgtagaggacccaggaggg

SEQ ID NO: 55620 - DNA, 201 bp, Homo sapiens; identical to SEQ ID NO: 55251

SEQ ID NO: 55621 - DNA, 201 bp, Homo sapiens; identical to SEQ ID NO: 55344

SEQ ID NO: 55622 - DNA, 201 bp, Homo sapiens; identical to SEQ ID NO: 55253

SEQ ID NO: 55623 - DNA, 201 bp, Homo sapiens
ggctcccacaggatcagaggctggggccaactggaaccattggcagctgcacgctcattactaccctccgctcctgcgctctgccactgtccggaaattcwtggttggctacgaaatgcttgctcaggctcagagggacctcacccctgagcagatgagcagcagctgctcagggctgagcagggtcctggtggccgtggc

SEQ ID NO: 55624 - DNA, 201 bp, Homo sapiens; identical to SEQ ID NO: 55255

SEQ ID NO: 55625 - DNA, 201 bp, Homo sapiens
acgtcctttccctactccatgggctggcatggggctcccacaggatcagaggctggggccaactggaaccattggcagctgcacgctcattactaccctcygctcctgcgctctgccactgtccggaaattcatggttggctacgaaatgcttgctcaggctcagagggacctcacccctgagcagatgagcagcagctgc

SEQ ID NO: 55626 - DNA, 201 bp, Homo sapiens; identical to SEQ ID NO: 55349

SEQ ID NO: 55627 - DNA, 201 bp, Homo sapiens; identical to SEQ ID NO: 55350

SEQ ID NO: 55628 - DNA, 201 bp, Homo sapiens; identical to SEQ ID NO: 55351

SEQ ID NO: 55629 - DNA, 201 bp, Homo sapiens
catggggctcccacaggatcagaggctggggccaactggaaccattggcagctgcacgctcattactaccctccgctcctgcgctctgccactgtccggarattcatggttggctacgaaatgcttgctcaggctcagagggacctcacccctgagcagatgagcagcagctgctcagggctgagcagggtcctggtggcc

SEQ ID NO: 55630 - DNA, 201 bp, Homo sapiens; identical to SEQ ID NO: 55260

SEQ ID NO: 55631 - DNA, 201 bp, Homo sapiens; identical to SEQ ID NO: 55261

SEQ ID NO: 55632 - DNA, 201 bp, Homo sapiens
ctatggttggatctcagctggaagttctgtttggagcccatttctgtgagaccctgtatttcaaatttgcagctgaaaggtgcttgtacctctgatttcaycccagagttggagttctgctcaaggaacgtgtgtaatgtgtacatctgtgtccatgtgtgaccatgtgtctgtgaggcagggaacatgtattctctgcat

SEQ ID NO: 55633 - DNA, 201 bp, Homo sapiens; identical to SEQ ID NO: 55262

SEQ ID NO: 55634 - DNA, 201 bp, Homo sapiens; identical to SEQ ID NO: 55356

SEQ ID NO: 55635 - DNA, 201 bp, Homo sapiens; identical to SEQ ID NO: 55264

SEQ ID NO: 55636 - DNA, 201 bp, Homo sapiens; identical to SEQ ID NO: 55265

SEQ ID NO: 55637 - DNA, 201 bp, Homo sapiens; identical to SEQ ID NO: 55266

SEQ ID NO: 55638 - DNA, 201 bp, Homo sapiens; identical to SEQ ID NO: 55267

SEQ ID NO: 55639 - DNA, 201 bp, Homo sapiens; identical to SEQ ID NO: 55268

SEQ ID NO: 55640 - DNA, 201 bp, Homo sapiens; identical to SEQ ID NO: 55269

SEQ ID NO: 55641 - DNA, 201 bp, Homo sapiens
ccccccaggggtccagtatgggcagccaggcaggtccgtgaagctgtgttgtcctggagtgactgccggggacccagtgtcctggtttcgggatggggagmcaaagctgctccagggacctgactctgggctagggcatgaactggtcctggcccaggcagacagcactgatgagggcacctacatctgccagaccctgga

SEQ ID NO: 55642 - DNA, 201 bp, Homo sapiens; identical to SEQ ID NO: 55270

SEQ ID NO: 55643 - DNA, 201 bp, Homo sapiens; identical to SEQ ID NO: 55271

SEQ ID NO: 55644 - DNA, 201 bp, Homo sapiens
tgagacgtcctttccctactccatgggctggcatggggctcccacaggatcagaggctggggccaactggaaccattggcagctgcacgctcattactacyctccgctcctgcgctctgccactgtccggaaattcatggttggctacgaaatgcttgctcaggctcagagggacctcacccctgagcagatgagcagcag

SEQ ID NO: 55645 - DNA, 201 bp, Homo sapiens; identical to SEQ ID NO: 55273

SEQ ID NO: 55646 - DNA, 201 bp, Homo sapiens; identical to SEQ ID NO: 55274

SEQ ID NO: 55647 - DNA, 201 bp, Homo sapiens; identical to SEQ ID NO: 55276

SEQ ID NO: 55648 - DNA, 201 bp, Homo sapiens; identical to SEQ ID NO: 55277

SEQ ID NO: 55649 - DNA, 201 bp, Homo sapiens; identical to SEQ ID NO: 55278

SEQ ID NO: 55650 - DNA, 201 bp, Homo sapiens; identical to SEQ ID NO: 55279

SEQ ID NO: 55651 - DNA, 201 bp, Homo sapiens; identical to SEQ ID NO: 55282

SEQ ID NO: 55652 - DNA, 201 bp, Homo sapiens; identical to SEQ ID NO: 55280

SEQ ID NO: 55653 - DNA, 201 bp, Homo sapiens; identical to SEQ ID NO: 55281

SEQ ID NO: 55654 - DNA, 201 bp, Homo sapiens; identical to SEQ ID NO: 55283

SEQ ID NO: 55655 - DNA, 201 bp, Homo sapiens; identical to SEQ ID NO: 55285

SEQ ID NO: 55656 - DNA, 201 bp, Homo sapiens; identical to SEQ ID NO: 55284

SEQ ID NO: 55657 - DNA, 201 bp, Homo sapiens; identical to SEQ ID NO: 55286

SEQ ID NO: 55658 - DNA, 201 bp, Homo sapiens; identical to SEQ ID NO: 55287

SEQ ID NO: 55659 - DNA, 201 bp, Homo sapiens; identical to SEQ ID NO: 55288

SEQ ID NO: 55660 - DNA, 201 bp, Homo sapiens
ctggcatggggctcccacaggatcagaggctggggccaactggaaccattggcagctgcacgctcattactaccctccgctcctgcgctctgccactgtcbggaaattcatggttggctacgaaatgcttgctcaggctcagagggacctcacccctgagcagatgagcagcagctgctcagggctgagcagggtcctggt

SEQ ID NO: 55661 - DNA, 201 bp, Homo sapiens; identical to SEQ ID NO: 55291

SEQ ID NO: 55662 - DNA, 201 bp, Homo sapiens; identical to SEQ ID NO: 55289

SEQ ID NO: 55663 - DNA, 201 bp, Homo sapiens; identical to SEQ ID NO: 55292

SEQ ID NO: 55664 - DNA, 201 bp, Homo sapiens; identical to SEQ ID NO: 55293

SEQ ID NO: 55665 - DNA, 201 bp, Homo sapiens
aggctcagagggacctcacccctgagcagatgagcagcagctgctcagggctgagcagggtcctggtggccgtggctacagccctggtgtctgcctcctcyccctgcccccaggcctggggccccccaggggtccagtatgggcagccaggcaggtccgtgaagctgtgttgtcctggagtgactgccggggacccagtgt

SEQ ID NO: 55666 - DNA, 201 bp, Homo sapiens
atcagaggctggggccaactggaaccattggcagctgcacgctcattactaccctccgctcctgcgctctgccactgtccggaaattcatggttggctacdaaatgcttgctcaggctcagagggacctcacccctgagcagatgagcagcagctgctcagggctgagcagggtcctggtggccgtggctacagccctggt

SEQ ID NO: 55667 - DNA, 201 bp, Homo sapiens; identical to SEQ ID NO: 55295

SEQ ID NO: 55668 - DNA, 201 bp, Homo sapiens; identical to SEQ ID NO: 55296

SEQ ID NO: 55669 - DNA, 201 bp, Homo sapiens
gagcctcaggtggacagccctgctcctccaaggccctccctccaaccacaccctcggctacttgatcacagggactctgtggagcaggtagctgtgctggygtctttgggaatcctttctttcctgggactggtggctggggccctggcactggggctctggctgaggctgagacggggtgggaaggatggatccccaaag

SEQ ID NO: 55670 - DNA, 201 bp, Homo sapiens
caacctctttgagacgtcctttccctactccatgggctggcatggggctcccacaggatcagaggctggggccaactggaaccattggcagctgcacgctyattactaccctccgctcctgcgctctgccactgtccggaaattcatggttggctacgaaatgcttgctcaggctcagagggacctcacccctgagcagat

SEQ ID NO: 55671 - DNA, 201 bp, Homo sapiens; identical to SEQ ID NO: 55298

SEQ ID NO: 55672 - DNA, 201 bp, Homo sapiens; identical to SEQ ID NO: 55299

SEQ ID NO: 55673 - DNA, 201 bp, Homo sapiens; identical to SEQ ID NO: 55300

SEQ ID NO: 55674 - DNA, 201 bp, Homo sapiens; identical to SEQ ID NO: 55301

SEQ ID NO: 55675 - DNA, 201 bp, Homo sapiens
tgagcagggtcctggtggccgtggctacagccctggtgtctgcctcctccccctgcccccaggcctggggccccccaggggtccagtatgggcagccaggsaggtccgtgaagctgtgttgtcctggagtgactgccggggacccagtgtcctggtttcgggatggggagccaaagctgctccagggacctgactctgggc

SEQ ID NO: 55676 - DNA, 201 bp, Homo sapiens; identical to SEQ ID NO: 55395

SEQ ID NO: 55677 - DNA, 201 bp, Homo sapiens; identical to SEQ ID NO: 55303

SEQ ID NO: 55678 - DNA, 201 bp, Homo sapiens; identical to SEQ ID NO: 55304

SEQ ID NO: 55679 - DNA, 201 bp, Homo sapiens; identical to SEQ ID NO: 55305

SEQ ID NO: 55680 - DNA, 201 bp, Homo sapiens
ccctactccatgggctggcatggggctcccacaggatcagaggctggggccaactggaaccattggcagctgcacgctcattactaccctccgctcctgcrctctgccactgtccggaaattcatggttggctacgaaatgcttgctcaggctcagagggacctcacccctgagcagatgagcagcagctgctcagggctg

SEQ ID NO: 55681 - DNA, 201 bp, Homo sapiens; identical to SEQ ID NO: 55307

SEQ ID NO: 55682 - DNA, 201 bp, Homo sapiens; identical to SEQ ID NO: 55308

SEQ ID NO: 55683 - DNA, 201 bp, Homo sapiens; identical to SEQ ID NO: 55309

SEQ ID NO: 55684 - DNA, 201 bp, Homo sapiens; identical to SEQ ID NO: 55310

SEQ ID NO: 55685 - DNA, 201 bp, Homo sapiens; identical to SEQ ID NO: 55311

SEQ ID NO: 55686 - DNA, 201 bp, Homo sapiens; identical to SEQ ID NO: 55312

SEQ ID NO: 55687 - DNA, 201 bp, Homo sapiens; identical to SEQ ID NO: 55313

SEQ ID NO: 55688 - DNA, 201 bp, Homo sapiens
tgagcatgtctgaactggaaaaggtggatgggctgctcacctgctgctcagttttaattaacaagaaagtagactcctgagctgcagagtcccccccggtwgccggcaagaccgcacaggcaaggccgatgactctgtgcccactcctgttgttttccttgacaatctactgtgccactgtgctactaactcttgtttaca

SEQ ID NO: 55689 - DNA, 201 bp, Homo sapiens
gagatctaaattccagaaggagggcaccacacctaggaaggtaaatccagtatcagaaggttgctaaaagattaaagatcaagaagcttggaaacatcccwtgggtacaatgtcttagaaagtctttaagtcacataccatgaatttttgcttcattactgaccatatatgaccttggaggaactcttttttttttttcct

SEQ ID NO: 55690 - DNA, 201 bp, Homo sapiens; identical to SEQ ID NO: 52740

SEQ ID NO: 55691 - DNA, 201 bp, Homo sapiens
atggcggagatgttttattcacaggcagagaattttttgtgggcctttccaaaaggacaaatcaacgaggtgctgaaatcttggctgatacttttaaggaytatgcagtctccacagtgccagtggcagatgggttgcatttgaagagtttctgcagcatggctgggcctaacctgatcgcaattgggtctagtgaatctg

SEQ ID NO: 55692 - DNA, 201 bp, Homo sapiens
gcggctcctcaagtcctgcccaaagaccgtccagaaaccccagcctcccgtcgccttctcgccgcctccgctgggagccgcagatcagtccaagttgacgkacaggaggcgaaatgtgcaaatgtttatgggttgacatgatgaaagaagcattagaaaaacttcagctcaatatagtagagatgaaagatgaaaatgcaa

SEQ ID NO: 55693 - DNA, 201 bp, Homo sapiens
cccgtgagcatgtctgaactggaaaaggtggatgggctgctcacctgctgctcagttttaattaacaagaaagtagactcctgagctgcagagtccccccsggtagccggcaagaccgcacaggcaaggccgatgactctgtgcccactcctgttgttttccttgacaatctactgtgccactgtgctactaactcttgtt

SEQ ID NO: 55694 - DNA, 201 bp, Homo sapiens
attatttacactttaactttctccagaactcagacatgatttcaacatggtgttagatttgtgcattttattttcctgaccacctcattccagccaatgtwtggttatccactctgtgtgccaaaaccaatcatgcctttcacggccctttagttcagagaagttctgcactgatttttagtctcttgatgtctcaatctt

SEQ ID NO: 55695 - DNA, 200 bp, Homo sapiens
tggtgttagatttgtgcattttattttcctgaccacctcattccagccaatgtatggttatccactctgtgtgccaaaaccaatcatgcctttcacggccmtttagttcagagaagttctgcactgatttttagtctcttgatgtctcaatcttacatgtataccaatcacaatggaataaagtgttgagttgtactgtg

SEQ ID NO: 55696 - DNA, 201 bp, Homo sapiens
tcccagtaaggaaacactcatttagtgtctgtatttttggtgtgaaaattatttagttgccagtatattctgaagaatgtcttcttgatcagtcagataarcttgctttttttttttttttttttcatgaatcatgtttggttcctgtgaaagtccctggtccagggatcctcctcctttctcttttacttctgaattctg

SEQ ID NO: 55697 - DNA, 201 bp, Homo sapiens
gcacgttatcacacttcctagtcatctccacctttcctgtattgcctgtggcttgttgtttaagattaagaatcaaagagattaagaagtatcacttcaartcttgctctgctcacttctatgtttgcagtcaaattattccttatgttggtgacctaaagagaattactttcattcatttcatttcccccgtagcagatg

SEQ ID NO: 55698 - DNA, 201 bp, Homo sapiens
tccctgtgagagctcaacatctcaaatacaaccacaggaaaaatggcccaatctgccagtttaggcttaccagcatataatttttaatatctttacttctrtcatcccaaatcaaagaactcttctctattatgtttaatcaattgcaagcaaatagatttttctttgtaacaatttgttctgcagaaggctgtttttcac

SEQ ID NO: 55699 - DNA, 201 bp, Homo sapiens
tggctgatacttttaaggactatgcagtctccacagtgccagtggcagatgggttgcatttgaagagtttctgcagcatggctgggcctaacctgatcgcrattgggtctagtgaatctgcacagaaggcccttaagatcatgcaacagatgagtgaccaccgctacgacaaactcactgtgcctgatgacatagcagcaa

SEQ ID NO: 55700 - DNA, 201 bp, Homo sapiens
tgaaggaagagatgattcctttactcaaacctgcaggaatcagcctattaacaggcaggggaaacggtactttccaatgaatggtaactgatccaggcacrttatcacacttcctagtcatctccacctttcctgtattgcctgtggcttgttgtttaagattaagaatcaaagagattaagaagtatcacttcaagtctt

SEQ ID NO: 55701 - DNA, 201 bp, Homo sapiens
cttgacaatctactgtgccactgtgctactaactcttgtttacaaaatttgattctaagttgaattgcttcattcaacactcccaccctccctcccctcgmggtggtacctaagctgtggatttgctaaatgaattaagcaacctagaagatacagagctaatgaattatcaaaatgtgattaatcccagtaaggaaacac

SEQ ID NO: 55702 - DNA, 201 bp, Homo sapiens
tgcccactcctgttgttttccttgacaatctactgtgccactgtgctactaactcttgtttacaaaatttgattctaagttgaattgcttcattcaacacycccaccctccctcccctcgcggtggtacctaagctgtggatttgctaaatgaattaagcaacctagaagatacagagctaatgaattatcaaaatgtgat

SEQ ID NO: 55703 - DNA, 201 bp, Homo sapiens
agcacagcaagcctgtaggagaaggacgtgagccggatggggtaggagtgggcactgcggattatggattcacagagagagcatctgagccgagacctgckggaggagaaggaatttgccaggcagcacagctggtgactcagcgacgggggaaggcatctagatacaggatttcatctgtatggaaaaggagctctggta

SEQ ID NO: 55704 - DNA, 201 bp, Homo sapiens; identical to SEQ ID NO: 55688

SEQ ID NO: 55705 - DNA, 201 bp, Homo sapiens; identical to SEQ ID NO: 55689

SEQ ID NO: 55706 - DNA, 201 bp, Homo sapiens; identical to SEQ ID NO: 55691

SEQ ID NO: 55707 - DNA, 201 bp, Homo sapiens; identical to SEQ ID NO: 55693

SEQ ID NO: 55708 - DNA, 201 bp, Homo sapiens; identical to SEQ ID NO: 55694

SEQ ID NO: 55709 - DNA, 200 bp, Homo sapiens; identical to SEQ ID NO: 55695

SEQ ID NO: 55710 - DNA, 201 bp, Homo sapiens; identical to SEQ ID NO: 55696

SEQ ID NO: 55711 - DNA, 201 bp, Homo sapiens; identical to SEQ ID NO: 55697

SEQ ID NO: 55712 - DNA, 201 bp, Homo sapiens; identical to SEQ ID NO: 55698

SEQ ID NO: 55713 - DNA, 201 bp, Homo sapiens; identical to SEQ ID NO: 55699

SEQ ID NO: 55714 - DNA, 201 bp, Homo sapiens; identical to SEQ ID NO: 55700

SEQ ID NO: 55715 - DNA, 201 bp, Homo sapiens; identical to SEQ ID NO: 55701

SEQ ID NO: 55716 - DNA, 201 bp, Homo sapiens; identical to SEQ ID NO: 55702

SEQ ID NO: 55717 - DNA, 188 bp, Homo sapiens
aagacaattcttaaatggaagtctatacaaagcacagcaagcctgtaggagaaggacgtgagccggatggggtaggagtgggcactgmggattatggattcacagagagagcatctgagccgagacctgctggaggagaaggaatttgccaggcagcacagctggtgactcagcgacgggggaaggca

SEQ ID NO: 55718 - DNA, 201 bp, Homo sapiens; identical to SEQ ID NO: 55688

SEQ ID NO: 55719 - DNA, 201 bp, Homo sapiens; identical to SEQ ID NO: 55689

SEQ ID NO: 55720 - DNA, 201 bp, Homo sapiens; identical to SEQ ID NO: 55691

SEQ ID NO: 55721 - DNA, 201 bp, Homo sapiens; identical to SEQ ID NO: 55693

SEQ ID NO: 55722 - DNA, 201 bp, Homo sapiens; identical to SEQ ID NO: 55694

SEQ ID NO: 55723 - DNA, 200 bp, Homo sapiens; identical to SEQ ID NO: 55695

SEQ ID NO: 55724 - DNA, 201 bp, Homo sapiens; identical to SEQ ID NO: 55696

SEQ ID NO: 55725 - DNA, 201 bp, Homo sapiens; identical to SEQ ID NO: 55697

SEQ ID NO: 55726 - DNA, 201 bp, Homo sapiens; identical to SEQ ID NO: 55698

SEQ ID NO: 55727 - DNA, 201 bp, Homo sapiens; identical to SEQ ID NO: 55699

SEQ ID NO: 55728 - DNA, 201 bp, Homo sapiens; identical to SEQ ID NO: 55700

SEQ ID NO: 55729 - DNA, 201 bp, Homo sapiens; identical to SEQ ID NO: 55701

SEQ ID NO: 55730 - DNA, 201 bp, Homo sapiens; identical to SEQ ID NO: 55702

SEQ ID NO: 55731 - DNA, 201 bp, Homo sapiens
gacattgatgattcctggaaaagtataaagagtatcttggactggacatcttttaaccaggagagaattgttgatgttgctggaccagggggttggaatgwcccagatatgttagtgattggcaactttggcctcagctggaatcagcaagtaactcagatggccctctgggctatcatggctgctcctttattcatgtct

SEQ ID NO: 55732 - DNA, 201 bp, Homo sapiens
attgatgattcctggaaaagtataaagagtatcttggactggacatcttttaaccaggagagaattgttgatgttgctggaccagggggttggaatgaccsagatatgttagtgattggcaactttggcctcagctggaatcagcaagtaactcagatggccctctgggctatcatggctgctcctttattcatgtctaat

SEQ ID NO: 55733 - DNA, 201 bp, Homo sapiens
tgatgattcctggaaaagtataaagagtatcttggactggacatcttttaaccaggagagaattgttgatgttgctggaccagggggttggaatgacccavatatgttagtgattggcaactttggcctcagctggaatcagcaagtaactcagatggccctctgggctatcatggctgctcctttattcatgtctaatga

SEQ ID NO: 55734 - DNA, 201 bp, Homo sapiens
gatttatgcagatgttggaaataaaacctgcgcaggcttccctgggagttttggatactacgacattgatgcccagacctttgctgactggggagtagatstgctaaaatttgatggttgttactgtgacagtttggaaaatttggcagatggttataagcacatgtccttggccctgaataggactggcagaagcattgt

SEQ ID NO: 55735 - DNA, 201 bp, Homo sapiens
gatgattcctggaaaagtataaagagtatcttggactggacatcttttaaccaggagagaattgttgatgttgctggaccagggggttggaatgacccagwtatgttagtgattggcaactttggcctcagctggaatcagcaagtaactcagatggccctctgggctatcatggctgctcctttattcatgtctaatgac

SEQ ID NO: 55736 - DNA, 201 bp, Homo sapiens
gggatttatgcagatgttggaaataaaacctgcgcaggcttccctgggagttttggatactacgacattgatgcccagacctttgctgactggggagtagwtctgctaaaatttgatggttgttactgtgacagtttggaaaatttggcagatggttataagcacatgtccttggccctgaataggactggcagaagcatt

SEQ ID NO: 55737 - DNA, 201 bp, Homo sapiens
tggaaaagtataaagagtatcttggactggacatcttttaaccaggagagaattgttgatgttgctggaccagggggttggaatgacccagatatgttagygattggcaactttggcctcagctggaatcagcaagtaactcagatggccctctgggctatcatggctgctcctttattcatgtctaatgacctccgacac

SEQ ID NO: 55738 - DNA, 201 bp, Homo sapiens
taaagagtatcttggactggacatcttttaaccaggagagaattgttgatgttgctggaccagggggttggaatgacccagatatgttagtgattggcaamtttggcctcagctggaatcagcaagtaactcagatggccctctgggctatcatggctgctcctttattcatgtctaatgacctccgacacatcagccctc

SEQ ID NO: 55739 - DNA, 201 bp, Homo sapiens
tgaagctagggatttatgcagatgttggaaataaaacctgcgcaggcttccctgggagttttggatactacgacattgatgcccagacctttgctgactgsggagtagatctgctaaaatttgatggttgttactgtgacagtttggaaaatttggcagatggttataagcacatgtccttggccctgaataggactggca

SEQ ID NO: 55740 - DNA, 201 bp, Homo sapiens
tttattcatgtctaatgacctccgacacatcagccctcaagccaaagctctccttcaggataaggacgtaattgccatcaatcaggaccccttgggcaagmaagggtaccagcttagacagggagacaactttgaagtgtgggaacgacctctctcaggcttagcctgggctgtagctatgataaaccggcaggagattgg

SEQ ID NO: 55741 - DNA, 201 bp, Homo sapiens
ttcatgtctaatgacctccgacacatcagccctcaagccaaagctctccttcaggataaggacgtaattgccatcaatcaggaccccttgggcaagcaagsgtaccagcttagacagggagacaactttgaagtgtgggaacgacctctctcaggcttagcctgggctgtagctatgataaaccggcaggagattggtgga

SEQ ID NO: 55742 - DNA, 201 bp, Homo sapiens
ctgaagctagggatttatgcagatgttggaaataaaacctgcgcaggcttccctgggagttttggatactacgacattgatgcccagacctttgctgactrgggagtagatctgctaaaatttgatggttgttactgtgacagtttggaaaatttggcagatggttataagcacatgtccttggccctgaataggactggc

SEQ ID NO: 55743 - DNA, 201 bp, Homo sapiens
actgaagctagggatttatgcagatgttggaaataaaacctgcgcaggcttccctgggagttttggatactacgacattgatgcccagacctttgctgacyggggagtagatctgctaaaatttgatggttgttactgtgacagtttggaaaatttggcagatggttataagcacatgtccttggccctgaataggactgg

SEQ ID NO: 55744 - DNA, 201 bp, Homo sapiens
tgttcacagcaaaggactgaagctagggatttatgcagatgttggaaataaaacctgcgcaggcttccctgggagttttggatactacgacattgatgccyagacctttgctgactggggagtagatctgctaaaatttgatggttgttactgtgacagtttggaaaatttggcagatggttataagcacatgtccttggc

SEQ ID NO: 55745 - DNA, 201 bp, Homo sapiens
tatgttcacagcaaaggactgaagctagggatttatgcagatgttggaaataaaacctgcgcaggcttccctgggagttttggatactacgacattgatgyccagacctttgctgactggggagtagatctgctaaaatttgatggttgttactgtgacagtttggaaaatttggcagatggttataagcacatgtccttg

SEQ ID NO: 55746 - DNA, 201 bp, Homo sapiens
ggttggaatgacccagatatgttagtgattggcaactttggcctcagctggaatcagcaagtaactcagatggccctctgggctatcatggctgctccttkattcatgtctaatgacctccgacacatcagccctcaagccaaagctctccttcaggataaggacgtaattgccatcaatcaggaccccttgggcaagcaa

SEQ ID NO: 55747 - DNA, 201 bp, Homo sapiens
aaccaggagagaattgttgatgttgctggaccagggggttggaatgacccagatatgttagtgattggcaactttggcctcagctggaatcagcaagtaamtcagatggccctctgggctatcatggctgctcctttattcatgtctaatgacctccgacacatcagccctcaagccaaagctctccttcaggataaggac

SEQ ID NO: 55748 - DNA, 201 bp, Homo sapiens
tacagaaatccgacagtactgcaatcactggcgaaattttgctgacattgatgattcctggaaaagtataaagagtatcttggactggacatcttttaacyaggagagaattgttgatgttgctggaccagggggttggaatgacccagatatgttagtgattggcaactttggcctcagctggaatcagcaagtaactca

SEQ ID NO: 55749 - DNA, 201 bp, Homo sapiens
aagcattgtgtactcctgtgagtggcctctttatatgtggccctttcaaaagcccaattatacagaaatccgacagtactgcaatcactggcgaaattttrctgacattgatgattcctggaaaagtataaagagtatcttggactggacatcttttaaccaggagagaattgttgatgttgctggaccagggggttggaa

SEQ ID NO: 55750 - DNA, 201 bp, Homo sapiens
ctgcactgggagcgcttcatgtgcaaccttgactgccaggaagagccagattcctgcatcagtgagaagctcttcatggagatggcagagctcatggtctsagaaggctggaaggatgcaggttatgagtacctctgcattgatgactgttggatggctccccaaagagattcagaaggcagacttcaggcagaccctcag

SEQ ID NO: 55751 - DNA, 201 bp, Homo sapiens
catgggattcgccagctagctaattatgttcacagcaaaggactgaagctagggatttatgcagatgttggaaataaaacctgcgcaggcttccctgggarttttggatactacgacattgatgcccagacctttgctgactggggagtagatctgctaaaatttgatggttgttactgtgacagtttggaaaatttggca

SEQ ID NO: 55752 - DNA, 201 bp, Homo sapiens
tcctgcatcagtgagaagctcttcatggagatggcagagctcatggtctcagaaggctggaaggatgcaggttatgagtacctctgcattgatgactgttsgatggctccccaaagagattcagaaggcagacttcaggcagaccctcagcgctttcctcatgggattcgccagctagctaattatgttcacagcaaagga

SEQ ID NO: 55753 - DNA, 201 bp, Homo sapiens
gggcaagcaagggtaccagcttagacagggagacaactttgaagtgtgggaacgacctctctcaggcttagcctgggctgtagctatgataaaccggcagragattggtggacctcgctcttataccatcgcagttgcttccctgggtaaaggagtggcctgtaatcctgcctgcttcatcacacagctcctccctgtgaa

SEQ ID NO: 55754 - DNA, 201 bp, Homo sapiens
attcatgtctaatgacctccgacacatcagccctcaagccaaagctctccttcaggataaggacgtaattgccatcaatcaggaccccttgggcaagcaarggtaccagcttagacagggagacaactttgaagtgtgggaacgacctctctcaggcttagcctgggctgtagctatgataaaccggcaggagattggtgg

SEQ ID NO: 55755 - DNA, 201 bp, Homo sapiens
agccaaagctctccttcaggataaggacgtaattgccatcaatcaggaccccttgggcaagcaagggtaccagcttagacagggagacaactttgaagtgygggaacgacctctctcaggcttagcctgggctgtagctatgataaaccggcaggagattggtggacctcgctcttataccatcgcagttgcttccctggg

SEQ ID NO: 55756 - DNA, 201 bp, Homo sapiens
ccaaagctctccttcaggataaggacgtaattgccatcaatcaggaccccttgggcaagcaagggtaccagcttagacagggagacaactttgaagtgtgrgaacgacctctctcaggcttagcctgggctgtagctatgataaaccggcaggagattggtggacctcgctcttataccatcgcagttgcttccctgggta

SEQ ID NO: 55757 - DNA, 201 bp, Homo sapiens
caaagctctccttcaggataaggacgtaattgccatcaatcaggaccccttgggcaagcaagggtaccagcttagacagggagacaactttgaagtgtggraacgacctctctcaggcttagcctgggctgtagctatgataaaccggcaggagattggtggacctcgctcttataccatcgcagttgcttccctgggtaa

SEQ ID NO: 55758 - DNA, 201 bp, Homo sapiens
ttatgttcacagcaaaggactgaagctagggatttatgcagatgttggaaataaaacctgcgcaggcttccctgggagttttggatactacgacattgatrcccagacctttgctgactggggagtagatctgctaaaatttgatggttgttactgtgacagtttggaaaatttggcagatggttataagcacatgtcctt

SEQ ID NO: 55759 - DNA, 201 bp, Homo sapiens
ctttcctcatgggattcgccagctagctaattatgttcacagcaaaggactgaagctagggatttatgcagatgttggaaataaaacctgcgcaggcttcyctgggagttttggatactacgacattgatgcccagacctttgctgactggggagtagatctgctaaaatttgatggttgttactgtgacagtttggaaaa

SEQ ID NO: 55760 - DNA, 201 bp, Homo sapiens
cagcgctttcctcatgggattcgccagctagctaattatgttcacagcaaaggactgaagctagggatttatgcagatgttggaaataaaacctgcgcagkcttccctgggagttttggatactacgacattgatgcccagacctttgctgactggggagtagatctgctaaaatttgatggttgttactgtgacagtttg

SEQ ID NO: 55761 - DNA, 201 bp, Homo sapiens
ccctcagcgctttcctcatgggattcgccagctagctaattatgttcacagcaaaggactgaagctagggatttatgcagatgttggaaataaaacctgcscaggcttccctgggagttttggatactacgacattgatgcccagacctttgctgactggggagtagatctgctaaaatttgatggttgttactgtgacag

SEQ ID NO: 55762 - DNA, 201 bp, Homo sapiens
tgttgctggaccagggggttggaatgacccagatatgttagtgattggcaactttggcctcagctggaatcagcaagtaactcagatggccctctgggctwtcatggctgctcctttattcatgtctaatgacctccgacacatcagccctcaagccaaagctctccttcaggataaggacgtaattgccatcaatcagga

SEQ ID NO: 55763 - DNA, 201 bp, Homo sapiens
gaccctcagcgctttcctcatgggattcgccagctagctaattatgttcacagcaaaggactgaagctagggatttatgcagatgttggaaataaaacctrcgcaggcttccctgggagttttggatactacgacattgatgcccagacctttgctgactggggagtagatctgctaaaatttgatggttgttactgtgac

SEQ ID NO: 55764 - DNA, 201 bp, Homo sapiens
gattcctgcatcagtgagaagctcttcatggagatggcagagctcatggtctcagaaggctggaaggatgcaggttatgagtacctctgcattgatgactvttggatggctccccaaagagattcagaaggcagacttcaggcagaccctcagcgctttcctcatgggattcgccagctagctaattatgttcacagcaaa

SEQ ID NO: 55765 - DNA, 201 bp, Homo sapiens
ttcctggccctcgtttcctgggacatccctggggctagagcactggacaatggattggcaaggacgcctaccatgggctggctgcactgggagcgcttcawgtgcaaccttgactgccaggaagagccagattcctgcatcagtgagaagctcttcatggagatggcagagctcatggtctcagaaggctggaaggatgca

SEQ ID NO: 55766 - DNA, 201 bp, Homo sapiens
gcttgcgcttcgcttcctggccctcgtttcctgggacatccctggggctagagcactggacaatggattggcaaggacgcctaccatgggctggctgcackgggagcgcttcatgtgcaaccttgactgccaggaagagccagattcctgcatcagtgagaagctcttcatggagatggcagagctcatggtctcagaagg

SEQ ID NO: 55767 - DNA, 201 bp, Homo sapiens
cgcgcttgcgcttcgcttcctggccctcgtttcctgggacatccctggggctagagcactggacaatggattggcaaggacgcctaccatgggctggctgyactgggagcgcttcatgtgcaaccttgactgccaggaagagccagattcctgcatcagtgagaagctcttcatggagatggcagagctcatggtctcaga

SEQ ID NO: 55768 - DNA, 201 bp, Homo sapiens
gaactacatctgggctgcgcgcttgcgcttcgcttcctggccctcgtttcctgggacatccctggggctagagcactggacaatggattggcaaggacgcytaccatgggctggctgcactgggagcgcttcatgtgcaaccttgactgccaggaagagccagattcctgcatcagtgagaagctcttcatggagatggca

SEQ ID NO: 55769 - DNA, 201 bp, Homo sapiens
accgtgacaatgcagctgaggaacccagaactacatctgggctgcgcgcttgcgcttcgcttcctggccctcgtttcctgggacatccctggggctagagyactggacaatggattggcaaggacgcctaccatgggctggctgcactgggagcgcttcatgtgcaaccttgactgccaggaagagccagattcctgcatc

SEQ ID NO: 55770 - DNA, 201 bp, Homo sapiens
ggctgcgcgcttgcgcttcgcttcctggccctcgtttcctgggacatccctggggctagagcactggacaatggattggcaaggacgcctaccatgggctrgctgcactgggagcgcttcatgtgcaaccttgactgccaggaagagccagattcctgcatcagtgagaagctcttcatggagatggcagagctcatggtc

SEQ ID NO: 55771 - DNA, 201 bp, Homo sapiens
gaagagccagattcctgcatcagtgagaagctcttcatggagatggcagagctcatggtctcagaaggctggaaggatgcaggttatgagtacctctgcaytgatgactgttggatggctccccaaagagattcagaaggcagacttcaggcagaccctcagcgctttcctcatgggattcgccagctagctaattatgtt

SEQ ID NO: 55772 - DNA, 201 bp, Homo sapiens
aagctagggatttatgcagatgttggaaataaaacctgcgcaggcttccctgggagttttggatactacgacattgatgcccagacctttgctgactgggkagtagatctgctaaaatttgatggttgttactgtgacagtttggaaaatttggcagatggttataagcacatgtccttggccctgaataggactggcaga

SEQ ID NO: 55773 - DNA, 201 bp, Homo sapiens
cagcttagacagggagacaactttgaagtgtgggaacgacctctctcaggcttagcctgggctgtagctatgataaaccggcaggagattggtggacctcrctcttataccatcgcagttgcttccctgggtaaaggagtggcctgtaatcctgcctgcttcatcacacagctcctccctgtgaaaaggaagctagggttc

SEQ ID NO: 55774 - DNA, 201 bp, Homo sapiens
agggggttggaatgacccagatatgttagtgattggcaactttggcctcagctggaatcagcaagtaactcagatggccctctgggctatcatggctgctyctttattcatgtctaatgacctccgacacatcagccctcaagccaaagctctccttcaggataaggacgtaattgccatcaatcaggaccccttgggcaa

SEQ ID NO: 55775 - DNA, 201 bp, Homo sapiens
ccccttgggcaagcaagggtaccagcttagacagggagacaactttgaagtgtgggaacgacctctctcaggcttagcctgggctgtagctatgataaacyggcaggagattggtggacctcgctcttataccatcgcagttgcttccctgggtaaaggagtggcctgtaatcctgcctgcttcatcacacagctcctccc

SEQ ID NO: 55776 - DNA, 201 bp, Homo sapiens
agagctcatggtctcagaaggctggaaggatgcaggttatgagtacctctgcattgatgactgttggatggctccccaaagagattcagaaggcagacttyaggcagaccctcagcgctttcctcatgggattcgccagctagctaattatgttcacagcaaaggactgaagctagggatttatgcagatgttggaaataa

SEQ ID NO: 55777 - DNA, 201 bp, Homo sapiens
aagctcttcatggagatggcagagctcatggtctcagaaggctggaaggatgcaggttatgagtacctctgcattgatgactgttggatggctccccaaavagattcagaaggcagacttcaggcagaccctcagcgctttcctcatgggattcgccagctagctaattatgttcacagcaaaggactgaagctagggatt

SEQ ID NO: 55778 - DNA, 201 bp, Homo sapiens
tgagaagctcttcatggagatggcagagctcatggtctcagaaggctggaaggatgcaggttatgagtacctctgcattgatgactgttggatggctcccyaaagagattcagaaggcagacttcaggcagaccctcagcgctttcctcatgggattcgccagctagctaattatgttcacagcaaaggactgaagctagg

SEQ ID NO: 55779 - DNA, 201 bp, Homo sapiens
ttataccatcgcagttgcttccctgggtaaaggagtggcctgtaatcctgcctgcttcatcacacagctcctccctgtgaaaaggaagctagggttctatkaatggacttcaaggttaagaagtcacataaatcccacaggcactgttttgcttcagctagaaaatacaatgcagatgtcattaaaagacttactttaaaa

SEQ ID NO: 55780 - DNA, 201 bp, Homo sapiens
ccagatatgttagtgattggcaactttggcctcagctggaatcagcaagtaactcagatggccctctgggctatcatggctgctcctttattcatgtctartgacctccgacacatcagccctcaagccaaagctctccttcaggataaggacgtaattgccatcaatcaggaccccttgggcaagcaagggtaccagctt

SEQ ID NO: 55781 - DNA, 201 bp, Homo sapiens
tatgataaaccggcaggagattggtggacctcgctcttataccatcgcagttgcttccctgggtaaaggagtggcctgtaatcctgcctgcttcatcacayagctcctccctgtgaaaaggaagctagggttctatgaatggacttcaaggttaagaagtcacataaatcccacaggcactgttttgcttcagctagaaaa

SEQ ID NO: 55782 - DNA, 201 bp, Homo sapiens
accatcgcagttgcttccctgggtaaaggagtggcctgtaatcctgcctgcttcatcacacagctcctccctgtgaaaaggaagctagggttctatgaatrgacttcaaggttaagaagtcacataaatcccacaggcactgttttgcttcagctagaaaatacaatgcagatgtcattaaaagacttactttaaaatgtt

SEQ ID NO: 55783 - DNA, 201 bp, Homo sapiens
gacagggagacaactttgaagtgtgggaacgacctctctcaggcttagcctgggctgtagctatgataaaccggcaggagattggtggacctcgctcttawaccatcgcagttgcttccctgggtaaaggagtggcctgtaatcctgcctgcttcatcacacagctcctccctgtgaaaaggaagctagggttctatgaat

SEQ ID NO: 55784 - DNA, 201 bp, Homo sapiens
agggtaccagcttagacagggagacaactttgaagtgtgggaacgacctctctcaggcttagcctgggctgtagctatgataaaccggcaggagattggtrgacctcgctcttataccatcgcagttgcttccctgggtaaaggagtggcctgtaatcctgcctgcttcatcacacagctcctccctgtgaaaaggaagct

SEQ ID NO: 55785 - DNA, 201 bp, Homo sapiens
atcagtgagaagctcttcatggagatggcagagctcatggtctcagaaggctggaaggatgcaggttatgagtacctctgcattgatgactgttggatggytccccaaagagattcagaaggcagacttcaggcagaccctcagcgctttcctcatgggattcgccagctagctaattatgttcacagcaaaggactgaag

SEQ ID NO: 55786 - DNA, 201 bp, Homo sapiens
cagacttcaggcagaccctcagcgctttcctcatgggattcgccagctagctaattatgttcacagcaaaggactgaagctagggatttatgcagatgttrgaaataaaacctgcgcaggcttccctgggagttttggatactacgacattgatgcccagacctttgctgactggggagtagatctgctaaaatttgatgg

SEQ ID NO: 55787 - DNA, 201 bp, Homo sapiens
atgggattcgccagctagctaattatgttcacagcaaaggactgaagctagggatttatgcagatgttggaaataaaacctgcgcaggcttccctgggagktttggatactacgacattgatgcccagacctttgctgactggggagtagatctgctaaaatttgatggttgttactgtgacagtttggaaaatttggcag

SEQ ID NO: 55788 - DNA, 201 bp, Homo sapiens
ccagattcctgcatcagtgagaagctcttcatggagatggcagagctcatggtctcagaaggctggaaggatgcaggttatgagtacctctgcattgatgrctgttggatggctccccaaagagattcagaaggcagacttcaggcagaccctcagcgctttcctcatgggattcgccagctagctaattatgttcacagc

SEQ ID NO: 55789 - DNA, 201 bp, Homo sapiens
  misc_feature (1)...(201): n = A,T,C or G
agagccagattcctgcatcagtgagaagctcttcatggagatggcagagctcatggtctcagaaggctggaaggatgcaggttatgagtacctctgcattnatgactgttggatggctccccaaagagattcagaaggcagacttcaggcagaccctcagcgctttcctcatgggattcgccagctagctaattatgttca

SEQ ID NO: 55790 - DNA, 201 bp, Homo sapiens
tgccaggaagagccagattcctgcatcagtgagaagctcttcatggagatggcagagctcatggtctcagaaggctggaaggatgcaggttatgagtaccbctgcattgatgactgttggatggctccccaaagagattcagaaggcagacttcaggcagaccctcagcgctttcctcatgggattcgccagctagctaat

SEQ ID NO: 55791 - DNA, 201 bp, Homo sapiens
tgcaaccttgactgccaggaagagccagattcctgcatcagtgagaagctcttcatggagatggcagagctcatggtctcagaaggctggaaggatgcagrttatgagtacctctgcattgatgactgttggatggctccccaaagagattcagaaggcagacttcaggcagaccctcagcgctttcctcatgggattcgc

SEQ ID NO: 55792 - DNA, 201 bp, Homo sapiens
gagcgcttcatgtgcaaccttgactgccaggaagagccagattcctgcatcagtgagaagctcttcatggagatggcagagctcatggtctcagaaggctrgaaggatgcaggttatgagtacctctgcattgatgactgttggatggctccccaaagagattcagaaggcagacttcaggcagaccctcagcgctttcct

SEQ ID NO: 55793 - DNA, 201 bp, Homo sapiens
agaactacatctgggctgcgcgcttgcgcttcgcttcctggccctcgtttcctgggacatccctggggctagagcactggacaatggattggcaaggacgyctaccatgggctggctgcactgggagcgcttcatgtgcaaccttgactgccaggaagagccagattcctgcatcagtgagaagctcttcatggagatggc

SEQ ID NO: 55794 - DNA, 201 bp, Homo sapiens
gtgggaacgacctctctcaggcttagcctgggctgtagctatgataaaccggcaggagattggtggacctcgctcttataccatcgcagttgcttccctgrgtaaaggagtggcctgtaatcctgcctgcttcatcacacagctcctccctgtgaaaaggaagctagggttctatgaatggacttcaaggttaagaagtca

SEQ ID NO: 55795 - DNA, 201 bp, Homo sapiens
tcaggcttagcctgggctgtagctatgataaaccggcaggagattggtggacctcgctcttataccatcgcagttgcttccctgggtaaaggagtggcctrtaatcctgcctgcttcatcacacagctcctccctgtgaaaaggaagctagggttctatgaatggacttcaaggttaagaagtcacataaatcccacaggc

SEQ ID NO: 55796 - DNA, 201 bp, Homo sapiens
cagatggccctctgggctatcatggctgctcctttattcatgtctaatgacctccgacacatcagccctcaagccaaagctctccttcaggataaggacgwaattgccatcaatcaggaccccttgggcaagcaagggtaccagcttagacagggagacaactttgaagtgtgggaacgacctctctcaggcttagcctgg

SEQ ID NO: 55797 - DNA, 201 bp, Homo sapiens
gcaagtaactcagatggccctctgggctatcatggctgctcctttattcatgtctaatgacctccgacacatcagccctcaagccaaagctctccttcagkataaggacgtaattgccatcaatcaggaccccttgggcaagcaagggtaccagcttagacagggagacaactttgaagtgtgggaacgacctctctcagg

SEQ ID NO: 55798 - DNA, 201 bp, Homo sapiens
gttagtgattggcaactttggcctcagctggaatcagcaagtaactcagatggccctctgggctatcatggctgctcctttattcatgtctaatgacctcbgacacatcagccctcaagccaaagctctccttcaggataaggacgtaattgccatcaatcaggaccccttgggcaagcaagggtaccagcttagacaggg

SEQ ID NO: 55799 - DNA, 201 bp, Homo sapiens
cagatatgttagtgattggcaactttggcctcagctggaatcagcaagtaactcagatggccctctgggctatcatggctgctcctttattcatgtctaakgacctccgacacatcagccctcaagccaaagctctccttcaggataaggacgtaattgccatcaatcaggaccccttgggcaagcaagggtaccagctta

SEQ ID NO: 55800 - DNA, 201 bp, Homo sapiens
accttgactgccaggaagagccagattcctgcatcagtgagaagctcttcatggagatggcagagctcatggtctcagaaggctggaaggatgcaggttakgagtacctctgcattgatgactgttggatggctccccaaagagattcagaaggcagacttcaggcagaccctcagcgctttcctcatgggattcgccagc

SEQ ID NO: 55801 - DNA, 201 bp, Homo sapiens
agaccctcagcgctttcctcatgggattcgccagctagctaattatgttcacagcaaaggactgaagctagggatttatgcagatgttggaaataaaaccygcgcaggcttccctgggagttttggatactacgacattgatgcccagacctttgctgactggggagtagatctgctaaaatttgatggttgttactgtga

SEQ ID NO: 55802 - DNA, 201 bp, Homo sapiens
gttggaaataaaacctgcgcaggcttccctgggagttttggatactacgacattgatgcccagacctttgctgactggggagtagatctgctaaaatttgwtggttgttactgtgacagtttggaaaatttggcagatggttataagcacatgtccttggccctgaataggactggcagaagcattgtgtactcctgtgag

SEQ ID NO: 55803 - DNA, 201 bp, Homo sapiens
aatatcaagaaaggaagagggtgattggttagcggaacgtcttacgtgactgattattggtctacctctggggataaccgtcccagttgccagagaaacartaacgtcattatttaataagtcatcggtgattggtccgcccctgaggttaatcttaaaagcccaggttacccgcggaaatttatgctgtccggtcaccgt

SEQ ID NO: 55804 - DNA, 201 bp, Homo sapiens
aaccgtcccagttgccagagaaacaataacgtcattatttaataagtcatcggtgattggtccgcccctgaggttaatcttaaaagcccaggttacccgcrgaaatttatgctgtccggtcaccgtgacaatgcagctgaggaacccagaactacatctgggctgcgcgcttgcgcttcgcttcctggccctcgtttcctg

SEQ ID NO: 55805 - DNA, 201 bp, Homo sapiens
gcactgggagcgcttcatgtgcaaccttgactgccaggaagagccagattcctgcatcagtgagaagctcttcatggagatggcagagctcatggtctcakaaggctggaaggatgcaggttatgagtacctctgcattgatgactgttggatggctccccaaagagattcagaaggcagacttcaggcagaccctcagcg

SEQ ID NO: 55806 - DNA, 201 bp, Homo sapiens
tggccctttcaaaagcccaattatacagaaatccgacagtactgcaatcactggcgaaattttgctgacattgatgattcctggaaaagtataaagagtawcttggactggacatcttttaaccaggagagaattgttgatgttgctggaccagggggttggaatgacccagatatgttagtgattggcaactttggcctc

SEQ ID NO: 55807 - DNA, 201 bp, Homo sapiens
cccagatatgttagtgattggcaactttggcctcagctggaatcagcaagtaactcagatggccctctgggctatcatggctgctcctttattcatgtctmatgacctccgacacatcagccctcaagccaaagctctccttcaggataaggacgtaattgccatcaatcaggaccccttgggcaagcaagggtaccagct

SEQ ID NO: 55808 - DNA, 201 bp, Homo sapiens
gacccagatatgttagtgattggcaactttggcctcagctggaatcagcaagtaactcagatggccctctgggctatcatggctgctcctttattcatgtytaatgacctccgacacatcagccctcaagccaaagctctccttcaggataaggacgtaattgccatcaatcaggaccccttgggcaagcaagggtaccag

SEQ ID NO: 55809 - DNA, 201 bp, Homo sapiens
cttcgcttcctggccctcgtttcctgggacatccctggggctagagcactggacaatggattggcaaggacgcctaccatgggctggctgcactgggagcbcttcatgtgcaaccttgactgccaggaagagccagattcctgcatcagtgagaagctcttcatggagatggcagagctcatggtctcagaaggctggaag

SEQ ID NO: 55810 - DNA, 201 bp, Homo sapiens
atgacccagatatgttagtgattggcaactttggcctcagctggaatcagcaagtaactcagatggccctctgggctatcatggctgctcctttattcatrtctaatgacctccgacacatcagccctcaagccaaagctctccttcaggataaggacgtaattgccatcaatcaggaccccttgggcaagcaagggtacc

SEQ ID NO: 55811 - DNA, 201 bp, Homo sapiens
gcttcgcttcctggccctcgtttcctgggacatccctggggctagagcactggacaatggattggcaaggacgcctaccatgggctggctgcactgggagmgcttcatgtgcaaccttgactgccaggaagagccagattcctgcatcagtgagaagctcttcatggagatggcagagctcatggtctcagaaggctggaa

SEQ ID NO: 55812 - DNA, 201 bp, Homo sapiens
ctgggctgcgcgcttgcgcttcgcttcctggccctcgtttcctgggacatccctggggctagagcactggacaatggattggcaaggacgcctaccatggrctggctgcactgggagcgcttcatgtgcaaccttgactgccaggaagagccagattcctgcatcagtgagaagctcttcatggagatggcagagctcatg

SEQ ID NO: 55813 - DNA, 201 bp, Homo sapiens
gatgttgctggaccagggggttggaatgacccagatatgttagtgattggcaactttggcctcagctggaatcagcaagtaactcagatggccctctgggmtatcatggctgctcctttattcatgtctaatgacctccgacacatcagccctcaagccaaagctctccttcaggataaggacgtaattgccatcaatcag

SEQ ID NO: 55814 - DNA, 201 bp, Homo sapiens
accctcagcgctttcctcatgggattcgccagctagctaattatgttcacagcaaaggactgaagctagggatttatgcagatgttggaaataaaacctgmgcaggcttccctgggagttttggatactacgacattgatgcccagacctttgctgactggggagtagatctgctaaaatttgatggttgttactgtgaca

SEQ ID NO: 55815 - DNA, 201 bp, Homo sapiens
acatctgggctgcgcgcttgcgcttcgcttcctggccctcgtttcctgggacatccctggggctagagcactggacaatggattggcaaggacgcctaccrtgggctggctgcactgggagcgcttcatgtgcaaccttgactgccaggaagagccagattcctgcatcagtgagaagctcttcatggagatggcagagct

SEQ ID NO: 55816 - DNA, 201 bp, Homo sapiens
ttgatgttgctggaccagggggttggaatgacccagatatgttagtgattggcaactttggcctcagctggaatcagcaagtaactcagatggccctctgdgctatcatggctgctcctttattcatgtctaatgacctccgacacatcagccctcaagccaaagctctccttcaggataaggacgtaattgccatcaatc

SEQ ID NO: 55817 - DNA, 201 bp, Homo sapiens
tgttgatgttgctggaccagggggttggaatgacccagatatgttagtgattggcaactttggcctcagctggaatcagcaagtaactcagatggccctckgggctatcatggctgctcctttattcatgtctaatgacctccgacacatcagccctcaagccaaagctctccttcaggataaggacgtaattgccatcaa

SEQ ID NO: 55818 - DNA, 201 bp, Homo sapiens
gagagaattgttgatgttgctggaccagggggttggaatgacccagatatgttagtgattggcaactttggcctcagctggaatcagcaagtaactcagayggccctctgggctatcatggctgctcctttattcatgtctaatgacctccgacacatcagccctcaagccaaagctctccttcaggataaggacgtaatt

SEQ ID NO: 55819 - DNA, 201 bp, Homo sapiens
gcgcttgcgcttcgcttcctggccctcgtttcctgggacatccctggggctagagcactggacaatggattggcaaggacgcctaccatgggctggctgcrctgggagcgcttcatgtgcaaccttgactgccaggaagagccagattcctgcatcagtgagaagctcttcatggagatggcagagctcatggtctcagaa

SEQ ID NO: 55820 - DNA, 201 bp, Homo sapiens
aaccttgactgccaggaagagccagattcctgcatcagtgagaagctcttcatggagatggcagagctcatggtctcagaaggctggaaggatgcaggttrtgagtacctctgcattgatgactgttggatggctccccaaagagattcagaaggcagacttcaggcagaccctcagcgctttcctcatgggattcgccag

SEQ ID NO: 55821 - DNA, 201 bp, Homo sapiens
gatgttggaaataaaacctgcgcaggcttccctgggagttttggatactacgacattgatgcccagacctttgctgactggggagtagatctgctaaaatytgatggttgttactgtgacagtttggaaaatttggcagatggttataagcacatgtccttggccctgaataggactggcagaagcattgtgtactcctgt

SEQ ID NO: 55822 - DNA, 201 bp, Homo sapiens
cttgcgcttcgcttcctggccctcgtttcctgggacatccctggggctagagcactggacaatggattggcaaggacgcctaccatgggctggctgcactkggagcgcttcatgtgcaaccttgactgccaggaagagccagattcctgcatcagtgagaagctcttcatggagatggcagagctcatggtctcagaaggc

SEQ ID NO: 55823 - DNA, 201 bp, Homo sapiens
gaatgacccagatatgttagtgattggcaactttggcctcagctggaatcagcaagtaactcagatggccctctgggctatcatggctgctcctttattcrtgtctaatgacctccgacacatcagccctcaagccaaagctctccttcaggataaggacgtaattgccatcaatcaggaccccttgggcaagcaagggta

SEQ ID NO: 55824 - DNA, 201 bp, Homo sapiens
agaaacaataacgtcattatttaataagtcatcggtgattggtccgcccctgaggttaatcttaaaagcccaggttacccgcggaaatttatgctgtccgrtcaccgtgacaatgcagctgaggaacccagaactacatctgggctgcgcgcttgcgcttcgcttcctggccctcgtttcctgggacatccctggggctag

SEQ ID NO: 55825 - DNA, 201 bp, Homo sapiens
aaacaataacgtcattatttaataagtcatcggtgattggtccgcccctgaggttaatcttaaaagcccaggttacccgcggaaatttatgctgtccggtyaccgtgacaatgcagctgaggaacccagaactacatctgggctgcgcgcttgcgcttcgcttcctggccctcgtttcctgggacatccctggggctagag

SEQ ID NO: 55826 - DNA, 201 bp, Homo sapiens
gcagctgaggaacccagaactacatctgggctgcgcgcttgcgcttcgcttcctggccctcgtttcctgggacatccctggggctagagcactggacaatrgattggcaaggacgcctaccatgggctggctgcactgggagcgcttcatgtgcaaccttgactgccaggaagagccagattcctgcatcagtgagaagct

SEQ ID NO: 55827 - DNA, 201 bp, Homo sapiens
atgcagctgaggaacccagaactacatctgggctgcgcgcttgcgcttcgcttcctggccctcgtttcctgggacatccctggggctagagcactggacartggattggcaaggacgcctaccatgggctggctgcactgggagcgcttcatgtgcaaccttgactgccaggaagagccagattcctgcatcagtgagaag

SEQ ID NO: 55828 - DNA, 201 bp, Homo sapiens
gtgacaatgcagctgaggaacccagaactacatctgggctgcgcgcttgcgcttcgcttcctggccctcgtttcctgggacatccctggggctagagcacyggacaatggattggcaaggacgcctaccatgggctggctgcactgggagcgcttcatgtgcaaccttgactgccaggaagagccagattcctgcatcagt

SEQ ID NO: 55829 - DNA, 201 bp, Homo sapiens
ccaggttacccgcggaaatttatgctgtccggtcaccgtgacaatgcagctgaggaacccagaactacatctgggctgcgcgcttgcgcttcgcttcctgsccctcgtttcctgggacatccctggggctagagcactggacaatggattggcaaggacgcctaccatgggctggctgcactgggagcgcttcatgtgcaa

SEQ ID NO: 55830 - DNA, 201 bp, Homo sapiens
cattatttaataagtcatcggtgattggtccgcccctgaggttaatcttaaaagcccaggttacccgcggaaatttatgctgtccggtcaccgtgacaatrcagctgaggaacccagaactacatctgggctgcgcgcttgcgcttcgcttcctggccctcgtttcctgggacatccctggggctagagcactggacaatg

SEQ ID NO: 55831 - DNA, 201 bp, Homo sapiens
tcattatttaataagtcatcggtgattggtccgcccctgaggttaatcttaaaagcccaggttacccgcggaaatttatgctgtccggtcaccgtgacaaygcagctgaggaacccagaactacatctgggctgcgcgcttgcgcttcgcttcctggccctcgtttcctgggacatccctggggctagagcactggacaat

SEQ ID NO: 55832 - DNA, 201 bp, Homo sapiens
catccctggggctagagcactggacaatggattggcaaggacgcctaccatgggctggctgcactgggagcgcttcatgtgcaaccttgactgccaggaaragccagattcctgcatcagtgagaagctcttcatggagatggcagagctcatggtctcagaaggctggaaggatgcaggttatgagtacctctgcattga

SEQ ID NO: 55833 - DNA, 201 bp, Homo sapiens
ctttcaaaagcccaattatacagaaatccgacagtactgcaatcactggcgaaattttgctgacattgatgattcctggaaaagtataaagagtatcttgvactggacatcttttaaccaggagagaattgttgatgttgctggaccagggggttggaatgacccagatatgttagtgattggcaactttggcctcagctg

SEQ ID NO: 55834 - DNA, 201 bp, Homo sapiens
ggacaatggattggcaaggacgcctaccatgggctggctgcactgggagcgcttcatgtgcaaccttgactgccaggaagagccagattcctgcatcagtsagaagctcttcatggagatggcagagctcatggtctcagaaggctggaaggatgcaggttatgagtacctctgcattgatgactgttggatggctcccca

SEQ ID NO: 55835 - DNA, 201 bp, Homo sapiens
agtggcctctttatatgtggccctttcaaaagcccaattatacagaaatccgacagtactgcaatcactggcgaaattttgctgacattgatgattcctgsaaaagtataaagagtatcttggactggacatcttttaaccaggagagaattgttgatgttgctggaccagggggttggaatgacccagatatgttagtga

SEQ ID NO: 55836 - DNA, 201 bp, Homo sapiens
cattgtgtactcctgtgagtggcctctttatatgtggccctttcaaaagcccaattatacagaaatccgacagtactgcaatcactggcgaaattttgctracattgatgattcctggaaaagtataaagagtatcttggactggacatcttttaaccaggagagaattgttgatgttgctggaccagggggttggaatga

SEQ ID NO: 55837 - DNA, 201 bp, Homo sapiens
actggcagaagcattgtgtactcctgtgagtggcctctttatatgtggccctttcaaaagcccaattatacagaaatccgacagtactgcaatcactggcraaattttgctgacattgatgattcctggaaaagtataaagagtatcttggactggacatcttttaaccaggagagaattgttgatgttgctggaccaggg

SEQ ID NO: 55838 - DNA, 201 bp, Homo sapiens
tgactgccaggaagagccagattcctgcatcagtgagaagctcttcatggagatggcagagctcatggtctcagaaggctggaaggatgcaggttatgagkacctctgcattgatgactgttggatggctccccaaagagattcagaaggcagacttcaggcagaccctcagcgctttcctcatgggattcgccagctagc

SEQ ID NO: 55839 - DNA, 201 bp, Homo sapiens
cttgggcaagcaagggtaccagcttagacagggagacaactttgaagtgtgggaacgacctctctcaggcttagcctgggctgtagctatgataaaccggyaggagattggtggacctcgctcttataccatcgcagttgcttccctgggtaaaggagtggcctgtaatcctgcctgcttcatcacacagctcctccctgt

SEQ ID NO: 55840 - DNA, 201 bp, Homo sapiens
gacgcctaccatgggctggctgcactgggagcgcttcatgtgcaaccttgactgccaggaagagccagattcctgcatcagtgagaagctcttcatggagrtggcagagctcatggtctcagaaggctggaaggatgcaggttatgagtacctctgcattgatgactgttggatggctccccaaagagattcagaaggcag

SEQ ID NO: 55841 - DNA, 201 bp, Homo sapiens
ttatgagtacctctgcattgatgactgttggatggctccccaaagagattcagaaggcagacttcaggcagaccctcagcgctttcctcatgggattcgcyagctagctaattatgttcacagcaaaggactgaagctagggatttatgcagatgttggaaataaaacctgcgcaggcttccctgggagttttggatacta

SEQ ID NO: 55842 - DNA, 201 bp, Homo sapiens
tggatggctccccaaagagattcagaaggcagacttcaggcagaccctcagcgctttcctcatgggattcgccagctagctaattatgttcacagcaaagractgaagctagggatttatgcagatgttggaaataaaacctgcgcaggcttccctgggagttttggatactacgacattgatgcccagacctttgctgac

SEQ ID NO: 55843 - DNA, 201 bp, Homo sapiens
atggctccccaaagagattcagaaggcagacttcaggcagaccctcagcgctttcctcatgggattcgccagctagctaattatgttcacagcaaaggacygaagctagggatttatgcagatgttggaaataaaacctgcgcaggcttccctgggagttttggatactacgacattgatgcccagacctttgctgactgg

SEQ ID NO: 55844 - DNA, 201 bp, Homo sapiens
gactggcagaagcattgtgtactcctgtgagtggcctctttatatgtggccctttcaaaagcccaattatacagaaatccgacagtactgcaatcactggygaaattttgctgacattgatgattcctggaaaagtataaagagtatcttggactggacatcttttaaccaggagagaattgttgatgttgctggaccagg

SEQ ID NO: 55845 - DNA, 201 bp, Homo sapiens
ccccaaagagattcagaaggcagacttcaggcagaccctcagcgctttcctcatgggattcgccagctagctaattatgttcacagcaaaggactgaagcyagggatttatgcagatgttggaaataaaacctgcgcaggcttccctgggagttttggatactacgacattgatgcccagacctttgctgactggggagta

SEQ ID NO: 55846 - DNA, 201 bp, Homo sapiens
ggatactacgacattgatgcccagacctttgctgactggggagtagatctgctaaaatttgatggttgttactgtgacagtttggaaaatttggcagatgrttataagcacatgtccttggccctgaataggactggcagaagcattgtgtactcctgtgagtggcctctttatatgtggccctttcaaaagcccaattat

SEQ ID NO: 55847 - DNA, 201 bp, Homo sapiens
cattgatgcccagacctttgctgactggggagtagatctgctaaaatttgatggttgttactgtgacagtttggaaaatttggcagatggttataagcacrtgtccttggccctgaataggactggcagaagcattgtgtactcctgtgagtggcctctttatatgtggccctttcaaaagcccaattatacagaaatccg

SEQ ID NO: 55848 - DNA, 201 bp, Homo sapiens
gatggttataagcacatgtccttggccctgaataggactggcagaagcattgtgtactcctgtgagtggcctctttatatgtggccctttcaaaagcccarttatacagaaatccgacagtactgcaatcactggcgaaattttgctgacattgatgattcctggaaaagtataaagagtatcttggactggacatctttt

SEQ ID NO: 55849 - DNA, 201 bp, Homo sapiens
tggttataagcacatgtccttggccctgaataggactggcagaagcattgtgtactcctgtgagtggcctctttatatgtggccctttcaaaagcccaatkatacagaaatccgacagtactgcaatcactggcgaaattttgctgacattgatgattcctggaaaagtataaagagtatcttggactggacatcttttaa

SEQ ID NO: 55850 - DNA, 201 bp, Homo sapiens
catgtccttggccctgaataggactggcagaagcattgtgtactcctgtgagtggcctctttatatgtggccctttcaaaagcccaattatacagaaatcygacagtactgcaatcactggcgaaattttgctgacattgatgattcctggaaaagtataaagagtatcttggactggacatcttttaaccaggagagaat

SEQ ID NO: 55851 - DNA, 172 bp, Homo sapiens
gcctgtaatcctgcctgcttcatcacacagctcctccctgtgaaaaggaagctagggttctatgaatggacttcaaggttaagaagtcacataaatcccamaggcactgttttgcttcagctagaaaatacaatgcagatgtcattaaaagacttactttaaaatgtttatt

SEQ ID NO: 55852 - DNA, 201 bp, Homo sapiens
tgtgagtggcctctttatatgtggccctttcaaaagcccaattatacagaaatccgacagtactgcaatcactggcgaaattttgctgacattgatgattsctggaaaagtataaagagtatcttggactggacatcttttaaccaggagagaattgttgatgttgctggaccagggggttggaatgacccagatatgtta

SEQ ID NO: 55853 - DNA, 176 bp, Homo sapiens
agtggcctgtaatcctgcctgcttcatcacacagctcctccctgtgaaaaggaagctagggttctatgaatggacttcaaggttaagaagtcacataaatvccacaggcactgttttgcttcagctagaaaatacaatgcagatgtcattaaaagacttactttaaaatgtttatt

SEQ ID NO: 55854 - DNA, 201 bp, Homo sapiens
gagtggcctctttatatgtggccctttcaaaagcccaattatacagaaatccgacagtactgcaatcactggcgaaattttgctgacattgatgattcctkgaaaagtataaagagtatcttggactggacatcttttaaccaggagagaattgttgatgttgctggaccagggggttggaatgacccagatatgttagtg

SEQ ID NO: 55855 - DNA, 201 bp, Homo sapiens
ctctcaggcttagcctgggctgtagctatgataaaccggcaggagattggtggacctcgctcttataccatcgcagttgcttccctgggtaaaggagtggmctgtaatcctgcctgcttcatcacacagctcctccctgtgaaaaggaagctagggttctatgaatggacttcaaggttaagaagtcacataaatcccaca

SEQ ID NO: 55856 - DNA, 201 bp, Homo sapiens
tgggaacgacctctctcaggcttagcctgggctgtagctatgataaaccggcaggagattggtggacctcgctcttataccatcgcagttgcttccctggrtaaaggagtggcctgtaatcctgcctgcttcatcacacagctcctccctgtgaaaaggaagctagggttctatgaatggacttcaaggttaagaagtcac

SEQ ID NO: 55857 - DNA, 201 bp, Homo sapiens
gtaattgccatcaatcaggaccccttgggcaagcaagggtaccagcttagacagggagacaactttgaagtgtgggaacgacctctctcaggcttagcctrggctgtagctatgataaaccggcaggagattggtggacctcgctcttataccatcgcagttgcttccctgggtaaaggagtggcctgtaatcctgcctgc

SEQ ID NO: 55858 - DNA, 201 bp, Homo sapiens
ctgggctatcatggctgctcctttattcatgtctaatgacctccgacacatcagccctcaagccaaagctctccttcaggataaggacgtaattgccatcwatcaggaccccttgggcaagcaagggtaccagcttagacagggagacaactttgaagtgtgggaacgacctctctcaggcttagcctgggctgtagctat

SEQ ID NO: 55859 - DNA, 201 bp, Homo sapiens
ttagtgattggcaactttggcctcagctggaatcagcaagtaactcagatggccctctgggctatcatggctgctcctttattcatgtctaatgacctccvacacatcagccctcaagccaaagctctccttcaggataaggacgtaattgccatcaatcaggaccccttgggcaagcaagggtaccagcttagacaggga

SEQ ID NO: 55860 - DNA, 201 bp, Homo sapiens
aattttgctgacattgatgattcctggaaaagtataaagagtatcttggactggacatcttttaaccaggagagaattgttgatgttgctggaccaggggrttggaatgacccagatatgttagtgattggcaactttggcctcagctggaatcagcaagtaactcagatggccctctgggctatcatggctgctccttta

SEQ ID NO: 55861 - DNA, 201 bp, Homo sapiens
gctgacattgatgattcctggaaaagtataaagagtatcttggactggacatcttttaaccaggagagaattgttgatgttgctggaccagggggttggartgacccagatatgttagtgattggcaactttggcctcagctggaatcagcaagtaactcagatggccctctgggctatcatggctgctcctttattcatg

SEQ ID NO: 55862 - DNA, 201 bp, Homo sapiens
gacattgatgattcctggaaaagtataaagagtatcttggactggacatcttttaaccaggagagaattgttgatgttgctggaccagggggttggaatgwcccagatatggtaaaaacttgagccctccttgttcaagaccctgcggtaggcttgtttcctattttgacattcaaggtaaatacaggtaaagttcctggg

SEQ ID NO: 55863 - DNA, 201 bp, Homo sapiens; identical to SEQ ID NO: 55798

SEQ ID NO: 55864 - DNA, 201 bp, Homo sapiens
attgatgattcctggaaaagtataaagagtatcttggactggacatcttttaaccaggagagaattgttgatgttgctggaccagggggttggaatgaccsagatatggtaaaaacttgagccctccttgttcaagaccctgcggtaggcttgtttcctattttgacattcaaggtaaatacaggtaaagttcctgggagg

SEQ ID NO: 55865 - DNA, 201 bp, Homo sapiens
tttctcagttagtgattggcaactttggcctcagctggaatcagcaagtaactcagatggccctctgggctatcatggctgctcctttattcatgtctaakgacctccgacacatcagccctcaagccaaagctctccttcaggataaggacgtaattgccatcaatcaggaccccttgggcaagcaagggtaccagctta

SEQ ID NO: 55866 - DNA, 201 bp, Homo sapiens
tgatgattcctggaaaagtataaagagtatcttggactggacatcttttaaccaggagagaattgttgatgttgctggaccagggggttggaatgacccavatatggtaaaaacttgagccctccttgttcaagaccctgcggtaggcttgtttcctattttgacattcaaggtaaatacaggtaaagttcctgggaggag

SEQ ID NO: 55867 - DNA, 201 bp, Homo sapiens
gatgattcctggaaaagtataaagagtatcttggactggacatcttttaaccaggagagaattgttgatgttgctggaccagggggttggaatgacccagwtatggtaaaaacttgagccctccttgttcaagaccctgcggtaggcttgtttcctattttgacattcaaggtaaatacaggtaaagttcctgggaggagg

SEQ ID NO: 55868 - DNA, 201 bp, Homo sapiens
gatgctgtggaaagtggtttctccatatgggtcatctaggtaactttaagaatgtttcctcctctcttgtttgaattatttcattctttttctcagttagygattggcaactttggcctcagctggaatcagcaagtaactcagatggccctctgggctatcatggctgctcctttattcatgtctaatgacctccgacac

SEQ ID NO: 55869 - DNA, 201 bp, Homo sapiens
aaagtggtttctccatatgggtcatctaggtaactttaagaatgtttcctcctctcttgtttgaattatttcattctttttctcagttagtgattggcaamtttggcctcagctggaatcagcaagtaactcagatggccctctgggctatcatggctgctcctttattcatgtctaatgacctccgacacatcagccctc

SEQ ID NO: 55870 - DNA, 201 bp, Homo sapiens; identical to SEQ ID NO: 55800

SEQ ID NO: 55871 - DNA, 201 bp, Homo sapiens; identical to SEQ ID NO: 55740

SEQ ID NO: 55872 - DNA, 201 bp, Homo sapiens
tgaagctagggatttatgcagatgttggaaataaaacctgcgcaggcttccctgggagttttggatactacgacattgatgcccagacctttgctgactgsggagttataagcacatgtccttggccctgaataggactggcagaagcattgtgtactcctgtgagtggcctctttatatgtggccctttcaaaagcccaa

SEQ ID NO: 55873 - DNA, 201 bp, Homo sapiens; identical to SEQ ID NO: 55741

SEQ ID NO: 55874 - DNA, 201 bp, Homo sapiens
ctgaagctagggatttatgcagatgttggaaataaaacctgcgcaggcttccctgggagttttggatactacgacattgatgcccagacctttgctgactrgggagttataagcacatgtccttggccctgaataggactggcagaagcattgtgtactcctgtgagtggcctctttatatgtggccctttcaaaagccca

SEQ ID NO: 55875 - DNA, 201 bp, Homo sapiens
agaccctcagcgctttcctcatgggattcgccagctagctaattatgttcacagcaaaggactgaagctagggatttatgcagatgttggaaataaaaccygcgcaggcttccctgggagttttggatactacgacattgatgcccagacctttgctgactggggagttataagcacatgtccttggccctgaataggact

SEQ ID NO: 55876 - DNA, 201 bp, Homo sapiens
actgaagctagggatttatgcagatgttggaaataaaacctgcgcaggcttccctgggagttttggatactacgacattgatgcccagacctttgctgacyggggagttataagcacatgtccttggccctgaataggactggcagaagcattgtgtactcctgtgagtggcctctttatatgtggccctttcaaaagccc

SEQ ID NO: 55877 - DNA, 201 bp, Homo sapiens
tgttcacagcaaaggactgaagctagggatttatgcagatgttggaaataaaacctgcgcaggcttccctgggagttttggatactacgacattgatgccyagacctttgctgactggggagttataagcacatgtccttggccctgaataggactggcagaagcattgtgtactcctgtgagtggcctctttatatgtgg

SEQ ID NO: 55878 - DNA, 201 bp, Homo sapiens
ttatttcattctttttctcagttagtgattggcaactttggcctcagctggaatcagcaagtaactcagatggccctctgggctatcatggctgctccttkattcatgtctaatgacctccgacacatcagccctcaagccaaagctctccttcaggataaggacgtaattgccatcaatcaggaccccttgggcaagcaa

SEQ ID NO: 55879 - DNA, 201 bp, Homo sapiens
tatgttcacagcaaaggactgaagctagggatttatgcagatgttggaaataaaacctgcgcaggcttccctgggagttttggatactacgacattgatgyccagacctttgctgactggggagttataagcacatgtccttggccctgaataggactggcagaagcattgtgtactcctgtgagtggcctctttatatgt

SEQ ID NO: 55880 - DNA, 201 bp, Homo sapiens
gtaactttaagaatgtttcctcctctcttgtttgaattatttcattctttttctcagttagtgattggcaactttggcctcagctggaatcagcaagtaamtcagatggccctctgggctatcatggctgctcctttattcatgtctaatgacctccgacacatcagccctcaagccaaagctctccttcaggataaggac

SEQ ID NO: 55881 - DNA, 201 bp, Homo sapiens
tacagaaatccgacagtactgcaatcactggcgaaattttgctgacattgatgattcctggaaaagtataaagagtatcttggactggacatcttttaacyaggagagaattgttgatgttgctggaccagggggttggaatgacccagatatggtaaaaacttgagccctccttgttcaagaccctgcggtaggcttgtt

SEQ ID NO: 55882 - DNA, 201 bp, Homo sapiens; identical to SEQ ID NO: 55749

SEQ ID NO: 55883 - DNA, 201 bp, Homo sapiens; identical to SEQ ID NO: 55750

SEQ ID NO: 55884 - DNA, 201 bp, Homo sapiens
catgggattcgccagctagctaattatgttcacagcaaaggactgaagctagggatttatgcagatgttggaaataaaacctgcgcaggcttccctgggarttttggatactacgacattgatgcccagacctttgctgactggggagttataagcacatgtccttggccctgaataggactggcagaagcattgtgtact

SEQ ID NO: 55885 - DNA, 201 bp, Homo sapiens; identical to SEQ ID NO: 55752

SEQ ID NO: 55886 - DNA, 201 bp, Homo sapiens; identical to SEQ ID NO: 55803

SEQ ID NO: 55887 - DNA, 201 bp, Homo sapiens; identical to SEQ ID NO: 55804

SEQ ID NO: 55888 - DNA, 201 bp, Homo sapiens; identical to SEQ ID NO: 55805

SEQ ID NO: 55889 - DNA, 201 bp, Homo sapiens
tggccctttcaaaagcccaattatacagaaatccgacagtactgcaatcactggcgaaattttgctgacattgatgattcctggaaaagtataaagagtawcttggactggacatcttttaaccaggagagaattgttgatgttgctggaccagggggttggaatgacccagatatggtaaaaacttgagccctccttgtt

SEQ ID NO: 55890 - DNA, 201 bp, Homo sapiens
tttttctcagttagtgattggcaactttggcctcagctggaatcagcaagtaactcagatggccctctgggctatcatggctgctcctttattcatgtctmatgacctccgacacatcagccctcaagccaaagctctccttcaggataaggacgtaattgccatcaatcaggaccccttgggcaagcaagggtaccagct

SEQ ID NO: 55891 - DNA, 201 bp, Homo sapiens; identical to SEQ ID NO: 55753

SEQ ID NO: 55892 - DNA, 201 bp, Homo sapiens
tctttttctcagttagtgattggcaactttggcctcagctggaatcagcaagtaactcagatggccctctgggctatcatggctgctcctttattcatgtytaatgacctccgacacatcagccctcaagccaaagctctccttcaggataaggacgtaattgccatcaatcaggaccccttgggcaagcaagggtaccag

SEQ ID NO: 55893 - DNA, 201 bp, Homo sapiens; identical to SEQ ID NO: 55809

SEQ ID NO: 55894 - DNA, 201 bp, Homo sapiens
attctttttctcagttagtgattggcaactttggcctcagctggaatcagcaagtaactcagatggccctctgggctatcatggctgctcctttattcatrtctaatgacctccgacacatcagccctcaagccaaagctctccttcaggataaggacgtaattgccatcaatcaggaccccttgggcaagcaagggtacc

SEQ ID NO: 55895 - DNA, 201 bp, Homo sapiens; identical to SEQ ID NO: 55811

SEQ ID NO: 55896 - DNA, 201 bp, Homo sapiens; identical to SEQ ID NO: 55812

SEQ ID NO: 55897 - DNA, 201 bp, Homo sapiens; identical to SEQ ID NO: 55754

SEQ ID NO: 55898 - DNA, 201 bp, Homo sapiens
cctcctctcttgtttgaattatttcattctttttctcagttagtgattggcaactttggcctcagctggaatcagcaagtaactcagatggccctctgggmtatcatggctgctcctttattcatgtctaatgacctccgacacatcagccctcaagccaaagctctccttcaggataaggacgtaattgccatcaatcag

SEQ ID NO: 55899 - DNA, 201 bp, Homo sapiens
accctcagcgctttcctcatgggattcgccagctagctaattatgttcacagcaaaggactgaagctagggatttatgcagatgttggaaataaaacctgmgcaggcttccctgggagttttggatactacgacattgatgcccagacctttgctgactggggagttataagcacatgtccttggccctgaataggactgg

SEQ ID NO: 55900 - DNA, 201 bp, Homo sapiens; identical to SEQ ID NO: 55755

SEQ ID NO: 55901 - DNA, 201 bp, Homo sapiens
ttcctcctctcttgtttgaattatttcattctttttctcagttagtgattggcaactttggcctcagctggaatcagcaagtaactcagatggccctctgdgctatcatggctgctcctttattcatgtctaatgacctccgacacatcagccctcaagccaaagctctccttcaggataaggacgtaattgccatcaatc

SEQ ID NO: 55902 - DNA, 201 bp, Homo sapiens; identical to SEQ ID NO: 55815

SEQ ID NO: 55903 - DNA, 201 bp, Homo sapiens
gtttcctcctctcttgtttgaattatttcattctttttctcagttagtgattggcaactttggcctcagctggaatcagcaagtaactcagatggccctckgggctatcatggctgctcctttattcatgtctaatgacctccgacacatcagccctcaagccaaagctctccttcaggataaggacgtaattgccatcaa

SEQ ID NO: 55904 - DNA, 201 bp, Homo sapiens; identical to SEQ ID NO: 55756

SEQ ID NO: 55905 - DNA, 201 bp, Homo sapiens
ttaagaatgtttcctcctctcttgtttgaattatttcattctttttctcagttagtgattggcaactttggcctcagctggaatcagcaagtaactcagayggccctctgggctatcatggctgctcctttattcatgtctaatgacctccgacacatcagccctcaagccaaagctctccttcaggataaggacgtaatt

SEQ ID NO: 55906 - DNA, 201 bp, Homo sapiens; identical to SEQ ID NO: 55757

SEQ ID NO: 55907 - DNA, 201 bp, Homo sapiens
ttatgttcacagcaaaggactgaagctagggatttatgcagatgttggaaataaaacctgcgcaggcttccctgggagttttggatactacgacattgatrcccagacctttgctgactggggagttataagcacatgtccttggccctgaataggactggcagaagcattgtgtactcctgtgagtggcctctttatatg

SEQ ID NO: 55908 - DNA, 201 bp, Homo sapiens
ctttcctcatgggattcgccagctagctaattatgttcacagcaaaggactgaagctagggatttatgcagatgttggaaataaaacctgcgcaggcttcyctgggagttttggatactacgacattgatgcccagacctttgctgactggggagttataagcacatgtccttggccctgaataggactggcagaagcatt

SEQ ID NO: 55909 - DNA, 201 bp, Homo sapiens
cagcgctttcctcatgggattcgccagctagctaattatgttcacagcaaaggactgaagctagggatttatgcagatgttggaaataaaacctgcgcagkcttccctgggagttttggatactacgacattgatgcccagacctttgctgactggggagttataagcacatgtccttggccctgaataggactggcagaa

SEQ ID NO: 55910 - DNA, 201 bp, Homo sapiens; identical to SEQ ID NO: 55819

SEQ ID NO: 55911 - DNA, 201 bp, Homo sapiens; identical to SEQ ID NO: 55820

SEQ ID NO: 55912 - DNA, 201 bp, Homo sapiens
tcctctcttgtttgaattatttcattctttttctcagttagtgattggcaactttggcctcagctggaatcagcaagtaactcagatggccctctgggctwtcatggctgctcctttattcatgtctaatgacctccgacacatcagccctcaagccaaagctctccttcaggataaggacgtaattgccatcaatcagga

SEQ ID NO: 55913 - DNA, 201 bp, Homo sapiens
ccctcagcgctttcctcatgggattcgccagctagctaattatgttcacagcaaaggactgaagctagggatttatgcagatgttggaaataaaacctgcscaggcttccctgggagttttggatactacgacattgatgcccagacctttgctgactggggagttataagcacatgtccttggccctgaataggactggc

SEQ ID NO: 55914 - DNA, 201 bp, Homo sapiens; identical to SEQ ID NO: 55822

SEQ ID NO: 55915 - DNA, 201 bp, Homo sapiens
gaccctcagcgctttcctcatgggattcgccagctagctaattatgttcacagcaaaggactgaagctagggatttatgcagatgttggaaataaaacctrcgcaggcttccctgggagttttggatactacgacattgatgcccagacctttgctgactggggagttataagcacatgtccttggccctgaataggactg

SEQ ID NO: 55916 - DNA, 201 bp, Homo sapiens
tcattctttttctcagttagtgattggcaactttggcctcagctggaatcagcaagtaactcagatggccctctgggctatcatggctgctcctttattcrtgtctaatgacctccgacacatcagccctcaagccaaagctctccttcaggataaggacgtaattgccatcaatcaggaccccttgggcaagcaagggta

SEQ ID NO: 55917 - DNA, 201 bp, Homo sapiens; identical to SEQ ID NO: 55764

SEQ ID NO: 55918 - DNA, 201 bp, Homo sapiens; identical to SEQ ID NO: 55765

SEQ ID NO: 55919 - DNA, 201 bp, Homo sapiens; identical to SEQ ID NO: 55766

SEQ ID NO: 55920 - DNA, 201 bp, Homo sapiens; identical to SEQ ID NO: 55767

SEQ ID NO: 55921 - DNA, 201 bp, Homo sapiens; identical to SEQ ID NO: 55768

SEQ ID NO: 55922 - DNA, 201 bp, Homo sapiens; identical to SEQ ID NO: 55824

SEQ ID NO: 55923 - DNA, 201 bp, Homo sapiens; identical to SEQ ID NO: 55825

SEQ ID NO: 55924 - DNA, 201 bp, Homo sapiens; identical to SEQ ID NO: 55826

SEQ ID NO: 55925 - DNA, 201 bp, Homo sapiens; identical to SEQ ID NO: 55827

SEQ ID NO: 55926 - DNA, 201 bp, Homo sapiens; identical to SEQ ID NO: 55828

SEQ ID NO: 55927 - DNA, 201 bp, Homo sapiens; identical to SEQ ID NO: 55770

SEQ ID NO: 55928 - DNA, 201 bp, Homo sapiens; identical to SEQ ID NO: 55769

SEQ ID NO: 55929 - DNA, 201 bp, Homo sapiens; identical to SEQ ID NO: 55829

SEQ ID NO: 55930 - DNA, 201 bp, Homo sapiens; identical to SEQ ID NO: 55771

SEQ ID NO: 55931 - DNA, 201 bp, Homo sapiens
aagctagggatttatgcagatgttggaaataaaacctgcgcaggcttccctgggagttttggatactacgacattgatgcccagacctttgctgactgggkagttataagcacatgtccttggccctgaataggactggcagaagcattgtgtactcctgtgagtggcctctttatatgtggccctttcaaaagcccaatt

SEQ ID NO: 55932 - DNA, 201 bp, Homo sapiens; identical to SEQ ID NO: 55830

SEQ ID NO: 55933 - DNA, 201 bp, Homo sapiens; identical to SEQ ID NO: 55831

SEQ ID NO: 55934 - DNA, 201 bp, Homo sapiens; identical to SEQ ID NO: 55832

SEQ ID NO: 55935 - DNA, 201 bp, Homo sapiens
ctttcaaaagcccaattatacagaaatccgacagtactgcaatcactggcgaaattttgctgacattgatgattcctggaaaagtataaagagtatcttgvactggacatcttttaaccaggagagaattgttgatgttgctggaccagggggttggaatgacccagatatggtaaaaacttgagccctccttgttcaaga

SEQ ID NO: 55936 - DNA, 201 bp, Homo sapiens; identical to SEQ ID NO: 55834

SEQ ID NO: 55937 - DNA, 201 bp, Homo sapiens
agtggcctctttatatgtggccctttcaaaagcccaattatacagaaatccgacagtactgcaatcactggcgaaattttgctgacattgatgattcctgsaaaagtataaagagtatcttggactggacatcttttaaccaggagagaattgttgatgttgctggaccagggggttggaatgacccagatatggtaaaaa

SEQ ID NO: 55938 - DNA, 201 bp, Homo sapiens; identical to SEQ ID NO: 55836

SEQ ID NO: 55939 - DNA, 201 bp, Homo sapiens; identical to SEQ ID NO: 55773

SEQ ID NO: 55940 - DNA, 201 bp, Homo sapiens; identical to SEQ ID NO: 55837

SEQ ID NO: 55941 - DNA, 201 bp, Homo sapiens
tgaattatttcattctttttctcagttagtgattggcaactttggcctcagctggaatcagcaagtaactcagatggccctctgggctatcatggctgctyctttattcatgtctaatgacctccgacacatcagccctcaagccaaagctctccttcaggataaggacgtaattgccatcaatcaggaccccttgggcaa

SEQ ID NO: 55942 - DNA, 201 bp, Homo sapiens; identical to SEQ ID NO: 55775

SEQ ID NO: 55943 - DNA, 201 bp, Homo sapiens; identical to SEQ ID NO: 55776

SEQ ID NO: 55944 - DNA, 201 bp, Homo sapiens; identical to SEQ ID NO: 55777

SEQ ID NO: 55945 - DNA, 201 bp, Homo sapiens; identical to SEQ ID NO: 55778

SEQ ID NO: 55946 - DNA, 201 bp, Homo sapiens; identical to SEQ ID NO: 55838

SEQ ID NO: 55947 - DNA, 201 bp, Homo sapiens; identical to SEQ ID NO: 55839

SEQ ID NO: 55948 - DNA, 201 bp, Homo sapiens; identical to SEQ ID NO: 55779

SEQ ID NO: 55949 - DNA, 201 bp, Homo sapiens
ttttctcagttagtgattggcaactttggcctcagctggaatcagcaagtaactcagatggccctctgggctatcatggctgctcctttattcatgtctartgacctccgacacatcagccctcaagccaaagctctccttcaggataaggacgtaattgccatcaatcaggaccccttgggcaagcaagggtaccagctt

SEQ ID NO: 55950 - DNA, 201 bp, Homo sapiens; identical to SEQ ID NO: 55781

SEQ ID NO: 55951 - DNA, 201 bp, Homo sapiens; identical to SEQ ID NO: 55782

SEQ ID NO: 55952 - DNA, 201 bp, Homo sapiens; identical to SEQ ID NO: 55783

SEQ ID NO: 55953 - DNA, 201 bp, Homo sapiens; identical to SEQ ID NO: 55784

SEQ ID NO: 55954 - DNA, 201 bp, Homo sapiens; identical to SEQ ID NO: 55840

SEQ ID NO: 55955 - DNA, 201 bp, Homo sapiens; identical to SEQ ID NO: 55841

SEQ ID NO: 55956 - DNA, 201 bp, Homo sapiens; identical to SEQ ID NO: 55842

SEQ ID NO: 55957 - DNA, 201 bp, Homo sapiens; identical to SEQ ID NO: 55844

SEQ ID NO: 55958 - DNA, 201 bp, Homo sapiens; identical to SEQ ID NO: 55843

SEQ ID NO: 55959 - DNA, 201 bp, Homo sapiens
ccccaaagagattcagaaggcagacttcaggcagaccctcagcgctttcctcatgggattcgccagctagctaattatgttcacagcaaaggactgaagcyagggatttatgcagatgttggaaataaaacctgcgcaggcttccctgggagttttggatactacgacattgatgcccagacctttgctgactggggagtt

SEQ ID NO: 55960 - DNA, 201 bp, Homo sapiens
gctagggatttatgcagatgttggaaataaaacctgcgcaggcttccctgggagttttggatactacgacattgatgcccagacctttgctgactggggarttataagcacatgtccttggccctgaataggactggcagaagcattgtgtactcctgtgagtggcctctttatatgtggccctttcaaaagcccaattat

SEQ ID NO: 55961 - DNA, 201 bp, Homo sapiens
atgcagatgttggaaataaaacctgcgcaggcttccctgggagttttggatactacgacattgatgcccagacctttgctgactggggagttataagcacrtgtccttggccctgaataggactggcagaagcattgtgtactcctgtgagtggcctctttatatgtggccctttcaaaagcccaattatacagaaatccg

SEQ ID NO: 55962 - DNA, 201 bp, Homo sapiens
gggagttataagcacatgtccttggccctgaataggactggcagaagcattgtgtactcctgtgagtggcctctttatatgtggccctttcaaaagcccarttatacagaaatccgacagtactgcaatcactggcgaaattttgctgacattgatgattcctggaaaagtataaagagtatcttggactggacatctttt

SEQ ID NO: 55963 - DNA, 201 bp, Homo sapiens; identical to SEQ ID NO: 55785

SEQ ID NO: 55964 - DNA, 201 bp, Homo sapiens
gagttataagcacatgtccttggccctgaataggactggcagaagcattgtgtactcctgtgagtggcctctttatatgtggccctttcaaaagcccaatkatacagaaatccgacagtactgcaatcactggcgaaattttgctgacattgatgattcctggaaaagtataaagagtatcttggactggacatcttttaa

SEQ ID NO: 55965 - DNA, 201 bp, Homo sapiens
cagacttcaggcagaccctcagcgctttcctcatgggattcgccagctagctaattatgttcacagcaaaggactgaagctagggatttatgcagatgttrgaaataaaacctgcgcaggcttccctgggagttttggatactacgacattgatgcccagacctttgctgactggggagttataagcacatgtccttggcc

SEQ ID NO: 55966 - DNA, 201 bp, Homo sapiens; identical to SEQ ID NO: 55850

SEQ ID NO: 55967 - DNA, 201 bp, Homo sapiens
atgggattcgccagctagctaattatgttcacagcaaaggactgaagctagggatttatgcagatgttggaaataaaacctgcgcaggcttccctgggagktttggatactacgacattgatgcccagacctttgctgactggggagttataagcacatgtccttggccctgaataggactggcagaagcattgtgtactc

SEQ ID NO: 55968 - DNA, 201 bp, Homo sapiens; identical to SEQ ID NO: 55788

SEQ ID NO: 55969 - DNA, 201 bp, Homo sapiens; identical to SEQ ID NO: 55789
  misc_feature (1)...(201): n = A,T,C or G

SEQ ID NO: 55970 - DNA, 201 bp, Homo sapiens; identical to SEQ ID NO: 55790

SEQ ID NO: 55971 - DNA, 201 bp, Homo sapiens
tgtgagtggcctctttatatgtggccctttcaaaagcccaattatacagaaatccgacagtactgcaatcactggcgaaattttgctgacattgatgattsctggaaaagtataaagagtatcttggactggacatcttttaaccaggagagaattgttgatgttgctggaccagggggttggaatgacccagatatggta

SEQ ID NO: 55972 - DNA, 168 bp, Homo sapiens
gcctgtaatcctgcctgcttcatcacacagctcctccctgtgaaaaggaagctagggttctatgaatggacttcaaggttaagaagtcacataaatcccamaggcactgttttgcttcagctagaaaatacaatgcagatgtcattaaaagacttactttaaaatgtt

SEQ ID NO: 55973 - DNA, 201 bp, Homo sapiens
gagtggcctctttatatgtggccctttcaaaagcccaattatacagaaatccgacagtactgcaatcactggcgaaattttgctgacattgatgattcctkgaaaagtataaagagtatcttggactggacatcttttaaccaggagagaattgttgatgttgctggaccagggggttggaatgacccagatatggtaaaa

SEQ ID NO: 55974 - DNA, 172 bp, Homo sapiens
agtggcctgtaatcctgcctgcttcatcacacagctcctccctgtgaaaaggaagctagggttctatgaatggacttcaaggttaagaagtcacataaatvccacaggcactgttttgcttcagctagaaaatacaatgcagatgtcattaaaagacttactttaaaatgtt

SEQ ID NO: 55975 - DNA, 201 bp, Homo sapiens; identical to SEQ ID NO: 55791

SEQ ID NO: 55976 - DNA, 201 bp, Homo sapiens; identical to SEQ ID NO: 55855

SEQ ID NO: 55977 - DNA, 201 bp, Homo sapiens; identical to SEQ ID NO: 55792

SEQ ID NO: 55978 - DNA, 201 bp, Homo sapiens; identical to SEQ ID NO: 55793

SEQ ID NO: 55979 - DNA, 201 bp, Homo sapiens; identical to SEQ ID NO: 55856

SEQ ID NO: 55980 - DNA, 201 bp, Homo sapiens; identical to SEQ ID NO: 55857

SEQ ID NO: 55981 - DNA, 201 bp, Homo sapiens; identical to SEQ ID NO: 55858

SEQ ID NO: 55982 - DNA, 201 bp, Homo sapiens; identical to SEQ ID NO: 55859

SEQ ID NO: 55983 - DNA, 201 bp, Homo sapiens; identical to SEQ ID NO: 55794

SEQ ID NO: 55984 - DNA, 201 bp, Homo sapiens; identical to SEQ ID NO: 55795

SEQ ID NO: 55985 - DNA, 201 bp, Homo sapiens; identical to SEQ ID NO: 55796

SEQ ID NO: 55986 - DNA, 201 bp, Homo sapiens
aattttgctgacattgatgattcctggaaaagtataaagagtatcttggactggacatcttttaaccaggagagaattgttgatgttgctggaccaggggrttggaatgacccagatatggtaaaaacttgagccctccttgttcaagaccctgcggtaggcttgtttcctattttgacattcaaggtaaatacaggtaaa

SEQ ID NO: 55987 - DNA, 201 bp, Homo sapiens; identical to SEQ ID NO: 55797

SEQ ID NO: 55988 - DNA, 201 bp, Homo sapiens
gctgacattgatgattcctggaaaagtataaagagtatcttggactggacatcttttaaccaggagagaattgttgatgttgctggaccagggggttggartgacccagatatggtaaaaacttgagccctccttgttcaagaccctgcggtaggcttgtttcctattttgacattcaaggtaaatacaggtaaagttcct

SEQ ID NO: 55989 - DNA, 201 bp, Homo sapiens
gcttctcattgtcacatagctatggggactggtggccttctaaaatcactgtccagctgctgcaagtgtgagaagcggtaagctagaggagacagacggcrttgccattaaaaacaattcaacttcattttaatgttgctatgtaagttcacaataaaatccctggaagttcaaattggaaagagcagtttggggtcatgg

SEQ ID NO: 55990 - DNA, 201 bp, Homo sapiens
ttttgcaaatgctgattcaaaacgtaccaatccccatctatcatgcctatgccaatacaatctgtcacaaaaaagtttgcttctcattgtcacatagctayggggactggtggccttctaaaatcactgtccagctgctgcaagtgtgagaagcggtaagctagaggagacagacggcgttgccattaaaaacaattcaac

SEQ ID NO: 55991 - DNA, 201 bp, Homo sapiens
acgaggccatgtcctgatgcagaaggctgagcccaggctctctgtggcgccgctgagagcagagggctgtcttggggtcttcgagctctggagccaaggayggcctggtcctacttctctgcccccaccaatgggggacttgaatgtggccagagaatacagtcacttcagcatcagtgattgatgagaaaaggaagggca

SEQ ID NO: 55992 - DNA, 201 bp, Homo sapiens
catgccctcaattccaagaagatcagctggctggctggctggcaactggaggcctttctgtcctggctgagggccctggccccttggtggcctttgggaarcagcatctcatcgggccgttttttcgttctggcgggcggccggcttggcccgcggggtcgggctctccgcgcagtgcagagacgtctccaccctcaggga

SEQ ID NO: 55993 - DNA, 201 bp, Homo sapiens
ttggaaatctggacaaagagaaggctgagaggaggcctggtccagtgtctaagggtctctgagtgagtctgtgtcagcatgtgggccccagctgggcctgyccatgggttgggcacagcagtttcctgactggacacctggaaccgtgttgaacttgtgcttcttgaagtaggcctcctggagtgggtatgagagtgaaaa

SEQ ID NO: 55994 - DNA, 201 bp, Homo sapiens
tgggcctgtccatgggttgggcacagcagtttcctgactggacacctggaaccgtgttgaacttgtgcttcttgaagtaggcctcctggagtgggtatgaragtgaaaatcagcacctcacattgtctggcccacacccacttgctgaccagccagacatctataagacacacaaatgaagtcctagacctgtaaagagcc

SEQ ID NO: 55995 - DNA, 201 bp, Homo sapiens
ctgtgttgatgcagagctgggaagatcacagatccatggagggagaaggcacttgtcttccaggagatcacttcgggacagggcaggcctgaccctgcgayggcaccttcaactcttgagccagaagctggtacctacaaggaactcatctcatgaccttcatttgccagcagtgccacacgttacctacagcaccacaaa

SEQ ID NO: 55996 - DNA, 201 bp, Homo sapiens
tcccttaaaaaagattttcaaagcaccagttaattacaaaaagcatgcatatttatcctcacagtgagttaagtggtgagagagctagcaaatcatacatygcattccccaaagcatctgaacgtacttctagaaaacaaaccaaccaaaagggaaaataatgcaagagaagccgtattttctttgcttaggttggcaaag

SEQ ID NO: 55997 - DNA, 201 bp, Homo sapiens
caatttgggcttacattcattgtaatcccagaaatattttctccatttaccctcatgactttgtgaaatttaacagattccagaaggaagactcgaagccrtctcagttaacagttctacacatttcccactagtttttgcctttgtttttcatgcattttcagagtgcacaacttccctcctctcttctgaatcacttag

SEQ ID NO: 55998 - DNA, 201 bp, Homo sapiens
aacaggtttacagcccatagtaagtcttagaaacctcaacgataggtcctgtcatgtctaaacactacaactatctgtggataaaaatctgcattcaaacrtacaatactttcttctagatctgaattaaaaccttatttaccccaattcatccatgtattctgatacgttcagtgaaaaagccaggatcattggggctgt

SEQ ID NO: 55999 - DNA, 201 bp, Homo sapiens
tgttttcatgaagatctgtctgcccgtagcagataaagagttgttgccccactcctcctggggtcttctattttcctgggaggaatttctggattaactgaacacacacacacacacacacacccttttgaagcatcaacagtaattctgagttcttagggacaatgcagattaaatccacaataagaaagacaactatgg

SEQ ID NO: 56000 - DNA, 201 bp, Homo sapiens
accagggccaccttatttgcgagcgggtcccggcgggtcatcccggagctggccatccgcaccgaattccaagcccgggcacagaggcctagcagccccgycttgtgcatggatcagaccagcaagtgccacttcggataaaccctttggactcctaactccaatcaggtgtctgctttgttgaggactcacagacacagt

SEQ ID NO: 56001 - DNA, 201 bp, Homo sapiens
ttttcatgaagatctgtctgcccgtagcagataaagagttgttgccccactcctcctggggtcttctattttcctgggaggaatttctggattaactgaacacacacacacacacacacacccttttgaagcatcaacagtaattctgagttcttagggacaatgcagattaaatccacaataagaaagacaactatggcc

SEQ ID NO: 56002 - DNA, 201 bp, Homo sapiens
tatgcctttttctctaaggcatgatgttgcagtagcatccttgtacatgtagctaggagaacttgtactaagcccagataaatagttgaagtacaagggcraggagtgtgtctttgatattttaatagaaatcacctattgccctctagaaaagctgtacccttttccagtggcagagaaccttcctgaaaggcagtcctg

SEQ ID NO: 56003 - DNA, 201 bp, Homo sapiens
acttcggataaaccctttggactcctaactccaatcaggtgtctgctttgttgaggactcacagacacagtctcctttcttcaagatctttacaatgcaasacctcactaacacacagggatggtctcccagagggtctgtgctgttccttcactcagaacatcaagatgcactgaagtaaggatcctctattctacagtt

SEQ ID NO: 56004 - DNA, 201 bp, Homo sapiens
ccggccggagcactcacccgtcggtggaggccgttaccagggccaccttatttgcgagcgggtcccggcgggtcatcccggagctggccatccgcaccgamttccaagcccgggcacagaggcctagcagccccgccttgtgcatggatcagaccagcaagtgccacttcggataaaccctttggactcctaactccaatc

SEQ ID NO: 56005 - DNA, 201 bp, Homo sapiens
ttatttgcgagcgggtcccggcgggtcatcccggagctggccatccgcaccgaattccaagcccgggcacagaggcctagcagccccgccttgtgcatggmtcagaccagcaagtgccacttcggataaaccctttggactcctaactccaatcaggtgtctgctttgttgaggactcacagacacagtctcctttcttca

SEQ ID NO: 56006 - DNA, 201 bp, Homo sapiens
gttaccagggccaccttatttgcgagcgggtcccggcgggtcatcccggagctggccatccgcaccgaattccaagcccgggcacagaggcctagcagccycgccttgtgcatggatcagaccagcaagtgccacttcggataaaccctttggactcctaactccaatcaggtgtctgctttgttgaggactcacagacac

SEQ ID NO: 56007 - DNA, 201 bp, Homo sapiens
cctgtttccaggcagccagggcctcagaaactccggccggagcactcacccgtcggtggaggccgttaccagggccaccttatttgcgagcgggtcccggygggtcatcccggagctggccatccgcaccgaattccaagcccgggcacagaggcctagcagccccgccttgtgcatggatcagaccagcaagtgccactt

SEQ ID NO: 56008 - DNA, 201 bp, Homo sapiens
ggatgagaggccagtgcctgtttccaggcagccagggcctcagaaactccggccggagcactcacccgtcggtggaggccgttaccagggccaccttattygcgagcgggtcccggcgggtcatcccggagctggccatccgcaccgaattccaagcccgggcacagaggcctagcagccccgccttgtgcatggatcaga

SEQ ID NO: 56009 - DNA, 201 bp, Homo sapiens
ggcagccagggcctcagaaactccggccggagcactcacccgtcggtggaggccgttaccagggccaccttatttgcgagcgggtcccggcgggtcatccyggagctggccatccgcaccgaattccaagcccgggcacagaggcctagcagccccgccttgtgcatggatcagaccagcaagtgccacttcggataaacc

SEQ ID NO: 56010 - DNA, 201 bp, Homo sapiens
atcaatcgaccttgtgacagtcttcttctggacaatgggtcttatcatctccccaccatgtaccttgtgaccccctcctctgctaacaatagataaccacyttttactgtaattttccattacctacccaactcctataaagcaaccccttccccatctcccttcactgactctgttttcagactcagcccacttgcactc

SEQ ID NO: 56011 - DNA, 201 bp, Homo sapiens
actcacccgtcggtggaggccgttaccagggccaccttatttgcgagcgggtcccggcgggtcatcccggagctggccatccgcaccgaattccaagcccdggcacagaggcctagcagccccgccttgtgcatggatcagaccagcaagtgccacttcggataaaccctttggactcctaactccaatcaggtgtctgct

SEQ ID NO: 56012 - DNA, 201 bp, Homo sapiens
atagataaccactttttactgtaattttccattacctacccaactcctataaagcaaccccttccccatctcccttcactgactctgttttcagactcagyccacttgcactcaagtgaataaacagccttgttgctcacacaaagcctgttggtggtctcttcacacagatgtgcttgacaaaagggaagggtggatttg

SEQ ID NO: 56013 - DNA, 201 bp, Homo sapiens
cactgaagtaaggatcctctattctacagttcctgctagctgagctattccatgggggcttcagcaggaaattccaaggttggctttgacaagctaaggcyggctggtggagcacatcgagttctggaggttcatgtgtgttttcatgaagatctgtctgcccgtagcagataaagagttgttgccccactcctcctgggg

SEQ ID NO: 56014 - DNA, 201 bp, Homo sapiens
ttaggagctctatcactctgaaagccaaaagatagaatgctcatttgagcatttgcaaaatgttctctatttatatttttaaaaatctgatacatgtaagkttttctggcagattctttttgtatgttacaaaacaaaacatcaaaagctcagagtaagataagaatccctttttcttagaaaggtcaagcagatacttct

SEQ ID NO: 56015 - DNA, 201 bp, Homo sapiens
gataaccttatccaacttcagtattattttagtagtaatgtgtataaaatccaaccactgcttgggtgaccttaggagacagcaagcctaagagatgaaamcatttacaccttttaattaaattacactgtcaccacataaaagtgtgaggttcaacatttgttttcttaaaaacagagcactaaacagtttaacacagga

SEQ ID NO: 56016 - DNA, 201 bp, Homo sapiens
atatcagttgatagtccacgttatacctatacttgcttctaaataacaaagatctgaaaattccgtctacagtcataccaccctgaacgcgccccatctcmtctgaaaattccactgagttcatgatttatctcatagtcatctttaaaatttatattttctgaagtaattgaagctaaaacaaagtcttcatttgagaaa

SEQ ID NO: 56017 - DNA, 201 bp, Homo sapiens
cttaaggcaatactttaaaatttaattcctgttcataggacaaggtgaggcaagaaacaatttttcagtattggtattcatattagtctgttctcacactrctataaagaattgcctgagactgggtaatttataaagtaaacacgtttaattgactcacagtcccacaggctggggaggcctcatgaaacttacaatcat

SEQ ID NO: 56018 - DNA, 201 bp, Homo sapiens
gaagaagtgccaagcaaagggggaaaattcccttacaaaaccatcagatcttgggccaggagcagtggctcacgcctgtaatcccagcactttgggaggcycaggcgggcggatcacctgaggtcgggagtttgaggccagcctaaccaacatggaaaataaacatcaaggtctgccattctaaaaaagcattaatggatt

SEQ ID NO: 56019 - DNA, 201 bp, Homo sapiens
ctgtttcaggccacccaagatatttctaaaaatatagaaatgtttacaatgatatttgacatttataatcctacagcaacaaatactacaatcaaatttcwttttaaccaaattatttgcagatatcagttgatagtccacgttatacctatacttgcttctaaataacaaagatctgaaaattccgtctacagtcatacc

SEQ ID NO: 56020 - DNA, 201 bp, Homo sapiens
cggctagctgtgatgtgtccgccaagatctcttctcttgtctgtaaacaacttcactctcaaggaggcagctctggcctctcagcaggtgcggcctacagygatgtccgtccgggttttacatccttccccgacctcgacatgagtcccagccccctcgggcctctgactctcaggtgtcccctacgatcgccgtcctctc

SEQ ID NO: 56021 - DNA, 201 bp, Homo sapiens
tcaccccaatatcattctctccctcctcctccaactcctccgagcccaggtccgacatggtctcgccccagcctggatcacagccgcagcgcctctagcargctctgctgacccttcgggattcgcggctagctgtgatgtgtccgccaagatctcttctcttgtctgtaaacaacttcactctcaaggaggcagctctgg

SEQ ID NO: 56022 - DNA, 201 bp, Homo sapiens
cttctcttgtctgtaaacaacttcactctcaaggaggcagctctggcctctcagcaggtgcggcctacagtgatgtccgtccgggttttacatccttcccmgacctcgacatgagtcccagccccctcgggcctctgactctcaggtgtcccctacgatcgccgtcctctcctctcgctcctggctcccctacactgtcac

SEQ ID NO: 56023 - DNA, 201 bp, Homo sapiens
gtgagtggattcacccccaaggtcagaatggcaactcctggaacagcacaacaagtggcaaaggacacagctagcaacgggctggaaaaaggcagagaacstggagtgatcatctccaactcaactcaatcacactacctaaaatcggcactgacaaagtacaaataatccacctatccagtagaggcagcactgatctgg

SEQ ID NO: 56024 - DNA, 201 bp, Homo sapiens
tccttttcagtggtgtgtagcagcaggtatacaggaaaatgttgaagagccccagggctcctgtgagtggattcacccccaaggtcagaatggcaactcchggaacagcacaacaagtggcaaaggacacagctagcaacgggctggaaaaaggcagagaacgtggagtgatcatctccaactcaactcaatcacactacc

SEQ ID NO: 56025 - DNA, 201 bp, Homo sapiens
cctggaacagcacaacaagtggcaaaggacacagctagcaacgggctggaaaaaggcagagaacgtggagtgatcatctccaactcaactcaatcacactrcctaaaatcggcactgacaaagtacaaataatccacctatccagtagaggcagcactgatctggctgattcctggatatggggaatcctctttatgaaac

SEQ ID NO: 56026 - DNA, 201 bp, Homo sapiens
aaccacagctccgacccatgtgttggcaatgctgatccttttcagtggtgtgtagcagcaggtatacaggaaaatgttgaagagccccagggctcctgtgwgtggattcacccccaaggtcagaatggcaactcctggaacagcacaacaagtggcaaaggacacagctagcaacgggctggaaaaaggcagagaacgtgg

SEQ ID NO: 56027 - DNA, 180 bp, Homo sapiens
ggcagagaacgtggagtgatcatctccaactcaactcaatcacactacctaaaatcggcactgacaaagtacaaataatccacctatccagtagaggcagyactgatctggctgattcctggatatggggaatcctctttatgaaacaaacttacaataagaaagaatatgtttgtggga

SEQ ID NO: 56028 - DNA, 201 bp, Homo sapiens
catcagcacatttgctaaaagaattaacgtgggatggaatggaatcgaaccaagtgctacagctcagggaggaaatgcctccttgaccgagtgtgctcatrtgagactccacatcgcgggacacttaccagcatcgaggctgcccgtggccgctgtccagcccatgacaggcgggatggccccaaccacagctccgaccca

SEQ ID NO: 56029 - DNA, 143 bp, Homo sapiens
aatttcagtctgccacatcagcacatttgctaaaagaattaaygtgggatggaatggaatcgaaccaagtgctacagctcagggaggaaatgcctccttgaccgagtgtgctcatatgagactccacatcgcgggacacttac

SEQ ID NO: 56030 - DNA, 201 bp, Homo sapiens
aaagaattaacgtgggatggaatggaatcgaaccaagtgctacagctcagggaggaaatgcctccttgaccgagtgtgctcatatgagactccacatcgcrggacacttaccagcatcgaggctgcccgtggccgctgtccagcccatgacaggcgggatggccccaaccacagctccgacccatgtgttggcaatgctga

SEQ ID NO: 56031 - DNA, 126 bp, Homo sapiens
tcggcactgacaaagtacaaataatccacctatccagtagaggcagcactgatctggctgattcctggatatggggaatcctctttatgaaacaaacttayaataagaaagaatatgtttgtggga

SEQ ID NO: 56032 - DNA, 201 bp, Homo sapiens
aactcctggaacagcacaacaagtggcaaaggacacagctagcaacgggctggaaaaaggcagagaacgtggagtgatcatctccaactcaactcaatcayactacctaaaatcggcactgacaaagtacaaataatccacctatccagtagaggcagcactgatctggctgattcctggatatggggaatcctctttatg

SEQ ID NO: 56033 - DNA, 201 bp, Homo sapiens
aaaagaattaacgtgggatggaatggaatcgaaccaagtgctacagctcagggaggaaatgcctccttgaccgagtgtgctcatatgagactccacatcgygggacacttaccagcatcgaggctgcccgtggccgctgtccagcccatgacaggcgggatggccccaaccacagctccgacccatgtgttggcaatgctg

SEQ ID NO: 56034 - DNA, 201 bp, Homo sapiens
tgttgaagagccccagggctcctgtgagtggattcacccccaaggtcagaatggcaactcctggaacagcacaacaagtggcaaaggacacagctagcaaygggctggaaaaaggcagagaacgtggagtgatcatctccaactcaactcaatcacactacctaaaatcggcactgacaaagtacaaataatccacctatc

SEQ ID NO: 56035 - DNA, 147 bp, Homo sapiens
cacagggcattcatgaagacaaagtaaaaccagaagtagagagggtggcccagctctccgtgctgaggccagtatgggtgcaaggggcccgcgttggtagycatgtctttgtgggctgatggctgcgtgtgtataggcaggaagtta

SEQ ID NO: 56036 - DNA, 101 bp, Homo sapiens
ggcccagctctccgtgctgaggccagtatgggtgcaaggggcccgcgttggtagtcatgtctttgtgggctgatggctgcgtgtgtataggcaggaagtta

SEQ ID NO: 56037 - DNA, 158 bp, Homo sapiens
gcagcaccagccacagggcattcatgaagacaaagtaaaaccagaagtagagagggtggcccagctctccgtgctgaggccagtatgggtgcaaggggccmgcgttggtagtcatgtctttgtgggctgatggctgcgtgtgtataggcaggaagtta

SEQ ID NO: 56038 - DNA, 201 bp, Homo sapiens
catccagcgtgctctgggcatgagtgaggtgcttcacagcatcaagcacaaggactccaggcagcaccagccacagggcattcatgaagacaaagtaaaaycagaagtagagagggtggcccagctctccgtgctgaggccagtatgggtgcaaggggcccgcgttggtagtcatgtctttgtgggctgatggctgcgtgt

SEQ ID NO: 56039 - DNA, 201 bp, Homo sapiens
cttcttgctcttggcttttgtggccttggcatccagcgtgctctgggcatgagtgaggtgcttcacagcatcaagcacaaggactccaggcagcaccagcyacagggcattcatgaagacaaagtaaaaccagaagtagagagggtggcccagctctccgtgctgaggccagtatgggtgcaaggggcccgcgttggtagt

SEQ ID NO: 56040 - DNA, 201 bp, Homo sapiens
ctggtccaccactcctcagttcttcttgctcttggcttttgtggccttggcatccagcgtgctctgggcatgagtgaggtgcttcacagcatcaagcacarggactccaggcagcaccagccacagggcattcatgaagacaaagtaaaaccagaagtagagagggtggcccagctctccgtgctgaggccagtatgggtg

SEQ ID NO: 56041 - DNA, 176 bp, Homo sapiens
caagcacaaggactccaggcagcaccagccacagggcattcatgaagacaaagtaaaaccagaagtagagagggtggcccagctctccgtgctgaggccastatgggtgcaaggggcccgcgttggtagtcatgtctttgtgggctgatggctgcgtgtgtataggcaggaagtta

SEQ ID NO: 56042 - DNA, 201 bp, Homo sapiens
ttttactggaaactgctgtctaggaccacctgccctaaccaggaataaaggcaagacagcctggagaccagtttgtttcttcagctgcaaacagctgcctrggcaggcaggtgacacaaggcctctgtccccagggatgggacctgcagggtctgttcacccagggcacccacagtcctgaagtgcaggcccagggtctgt

SEQ ID NO: 56043 - DNA, 201 bp, Homo sapiens
cgccatgcaggaagccgcccagcacctcctcggcacacacgacttcagcgccttccagtccgctggcagcccggtgccgagccccgtgcgaacgctgcgcygggtctccgtttccccaggccaagccagccccttggtcacccccgaggagagcaggaagctgcggttctggaacctggagtttgagagccagtctttcct

SEQ ID NO: 56044 - DNA, 201 bp, Homo sapiens
tcacgggcggctctgggtcacaggtacggaggatgacggctgtgctggtgggtcacgggcggctctgggtcacaggtggctctgggtcacaggtacggagratgacggctgtgctggtggccgtggggctgggggctttggcacctgcccaggtgaagacgattctggagagccaagatcccctgggcaagcaccagacac

SEQ ID NO: 56045 - DNA, 201 bp, Homo sapiens
agcctccctgcccgggtcccagcaccctggatgcccgtctctgtcccaggcgggatggggcacagtgcaggacacagccatgtacaccaagaagagagtaycaagtagtcttttgttcagcttttactggaaactgctgtctaggaccacctgccctaaccaggaataaaggcaagacagcctggagaccagtttgtttct

SEQ ID NO: 56046 - DNA, 201 bp, Homo sapiens
cacgccctgagcaacgcggcgcacctggacgtccagcgccgctcaggccggccgcccttcccgcccgaggtcctggccgaggccctcaacacacacctgcrgcacccggccatcagggtcctgcgggccttccgagtgcccagcgacttccacgctcgtcacgcagccacgtcccggacctacctgtaccgcctggccact

SEQ ID NO: 56047 - DNA, 201 bp, Homo sapiens
gcggctctgggtcacaggtacggaggatgacggctgtgctggtgggtcacgggcggctctgggtcacaggtggctctgggtcacaggtacggaggatgacrgctgtgctggtggccgtggggctgggggctttggcacctgcccaggtgaagacgattctggagagccaagatcccctgggcaagcaccagacacgtgtag

SEQ ID NO: 56048 - DNA, 201 bp, Homo sapiens
gctggtcaagccagggcagtcacagctgcttggggcccacagcactgctgcctggtctccacagtagcctccctgcccgggtcccagcaccctggatgccygtctctgtcccaggcgggatggggcacagtgcaggacacagccatgtacaccaagaagagagtaccaagtagtcttttgttcagcttttactggaaactg

SEQ ID NO: 56049 - DNA, 201 bp, Homo sapiens
accaggctcgtctttaggcccaccctgtcactctcccgtccaaggccacatagtaggctgaggatggcaaacactgccccacagacacctacaggtacgtrtttttccaggaagctgcggttctggaacctggagtttgagagccagtctttcctgtatagacaggtaggctctgttctggggccgtccccagggggtggg

SEQ ID NO: 56050 - DNA, 201 bp, Homo sapiens; identical to SEQ ID NO: 56042

SEQ ID NO: 56051 - DNA, 201 bp, Homo sapiens
cgccatgcaggaagccgcccagcacctcctcggcacacacgacttcagcgccttccagtccgctggcagcccggtgccgagccccgtgcgaacgctgcgcygggtctccgtttccccaggccaagccagccccttggtcacccccgaggagagcaggtgaggaagggcccctgggctgtggccctgccctcaagtcacgtg

SEQ ID NO: 56052 - DNA, 201 bp, Homo sapiens
agtcacgtgctgattttagctccagcacctcccccagttttaaggcaaggtgaggcgggaggcaggcagccgggagtcctcaggacctggacagctggagrggattcgcccggacgccccccagcctccagctgtgccctccccccaggctggggagcggagaacagggaaggctgcttgtctctgaaaaacccctgccat

SEQ ID NO: 56053 - DNA, 201 bp, Homo sapiens; identical to SEQ ID NO: 56044

SEQ ID NO: 56054 - DNA, 201 bp, Homo sapiens; identical to SEQ ID NO: 56045

SEQ ID NO: 56055 - DNA, 201 bp, Homo sapiens; identical to SEQ ID NO: 56047

SEQ ID NO: 56056 - DNA, 201 bp, Homo sapiens; identical to SEQ ID NO: 56048

SEQ ID NO: 56057 - DNA, 201 bp, Homo sapiens; identical to SEQ ID NO: 56046

SEQ ID NO: 56058 - DNA, 201 bp, Homo sapiens
gcattttgggttcctacattggccttccttccttccgctggtacatgtagttggggaaagggtcggttttcttctttagttctgttgaggccccagagaascaaaggatccccaaaggacaacagctctgcgcgcagagaagctctggggccaggcccaagcggaggcgtgaagccaccagtcccgccagggcagcaccag

SEQ ID NO: 56059 - DNA, 201 bp, Homo sapiens
tgcaacgcgacctccttcccacagcaacgaaagactgcgactccccggactatcaggccgggagagtccacttccagctcacctcggagctccgggagccyttcagcacctgcttggatgcagccatcgtgggctacaaggacttgccttccatccaggccaccatccctgggaaaaccttcatcaacgtcaagccagctg

SEQ ID NO: 56060 - DNA, 201 bp, Homo sapiens
tgttccagattaaagtgggctcagagtctgtggtctacacgggtgattataacatgaccccagaccgacacttaggagctgcctggattgacaagtgccgycccaacctgctcatcacagagtccacgtacgccacgaccatccgtgactccaagcgctgccgggagcgagacttcctgaagaaagtccacgagaccgtgg

SEQ ID NO: 56061 - DNA, 201 bp, Homo sapiens
agatgatcaaagactgcatgaagaaggtggtggctgtccacctccaccagacggtccaggtagatgatgagctggagatcaaggcctactatgcaggccaygtgctgggggcagccatgttccagattaaagtgggctcagagtctgtggtctacacgggtgattataacatgaccccagaccgacacttaggagctgcct

SEQ ID NO: 56062 - DNA, 201 bp, Homo sapiens
catggcgaggccaagaagatggagttcctgaagcagaagatcgagcaggagctccgggtcaactgctacatgccggccaatggcgagacggtgacgctgcmcacaagccccagcatccccgtaggcatctcgctggggctgctgaagcgggagatggcgcaggggctgctccctgaggccaagaagcctcggctcctgcac

SEQ ID NO: 56063 - DNA, 201 bp, Homo sapiens
tgaaggtgcccatctacttctccacggggctgaccgagaaggccaaccactactacaagctgttcatcccctggaccaaccagaagatccgcaagactttygtgcagaggaacatgtttgagttcaagcacatcaaggccttcgaccgggcttttgctgacaacccaggaccgatggttgtgtttgccacgccaggaatgc

SEQ ID NO: 56064 - DNA, 201 bp, Homo sapiens
ataacatgaccccagaccgacacttaggagctgcctggattgacaagtgccgccccaacctgctcatcacagagtccacgtacgccacgaccatccgtgaytccaagcgctgccgggagcgagacttcctgaagaaagtccacgagaccgtggagcgtggtgggaaggtgctgatacctgtgttcgcgctgggccgcgccc

SEQ ID NO: 56065 - DNA, 201 bp, Homo sapiens
agaaacaaactggtctccaggctgtcttgcctttattcctggttagggcaggtggtcctagacagcagtttccagtaaaagctgaacaaaagactacttgrtactctcttcttggtgtacatggctgtgtcctgcactgtgccccatcccgcctgggacagagacgggcatccagggtgctgggacccgggcagggaggct

SEQ ID NO: 56066 - DNA, 201 bp, Homo sapiens
gatcgagcaggagctccgggtcaactgctacatgccggccaatggcgagacggtgacgctgcccacaagccccagcatccccgtaggcatctcgctggggytgctgaagcgggagatggcgcaggggctgctccctgaggccaagaagcctcggctcctgcacggcaccctgatcatgaaggacagcaacttccggctggt

SEQ ID NO: 56067 - DNA, 201 bp, Homo sapiens
cagtttccagtaaaagctgaacaaaagactacttggtactctcttcttggtgtacatggctgtgtcctgcactgtgccccatcccgcctgggacagagacrggcatccagggtgctgggacccgggcagggaggctactgtggagaccaggcagcagtgctgtgggccccaagcagctgtgactgccctggcttgaccagc

SEQ ID NO: 56068 - DNA, 201 bp, Homo sapiens
ggcctcccccaggcccccagctgaggccggcaactcacccagccgccacctctgccctgtcccatccctggggacagaggccttgtgtcacctgcctgccyaggcagctgtttgcagctgaagaaacaaactggtctccaggctgtcttgcctttattcctggttagggcaggtggtcctagacagcagtttccagtaaaa

SEQ ID NO: 56069 - DNA, 115 bp, Homo sapiens
accggaagttgcagmgaggtggttgcgcctgcgcagtgcatcaccgcaggcgggcctcgcgggtccgggagcgcggcggagacgatgcctgagatcagagtcacgcccttggggg

SEQ ID NO: 56070 - DNA, 201 bp, Homo sapiens
gccgcctaacagacttcctggactgtgtgatcattagccacttccacctggaccactgcggggcactcccctacttcagcgagatggtgggctacgacggscccatctacatgactcaccccacccaggccatctgccccatcttgctggaggactaccgcaagatcgccgtagacaagaagggcgaggccaacttcttca

SEQ ID NO: 56071 - DNA, 201 bp, Homo sapiens
acaagtgccgccccaacctgctcatcacagagtccacgtacgccacgaccatccgtgactccaagcgctgccgggagcgagacttcctgaagaaagtccaygagaccgtggagcgtggtgggaaggtgctgatacctgtgttcgcgctgggccgcgcccaggagctctgcatcctcctggagaccttctgggagcgcatga

SEQ ID NO: 56072 - DNA, 201 bp, Homo sapiens
gcgtgcacctgcatgacacacgcaaggagcaggagacggcattgcgcgtctacagccacctcaagagcgtcctgaaggaccactgtgtgcagcacctcccrgacggctctgtgactgtggagtccgtcctcctccaggccgccgccccttctgaggacccaggcaccaaggtgctgctggtctcctggacctaccaggacg

SEQ ID NO: 56073 - DNA, 201 bp, Homo sapiens
cggtccagattaaagtgggctcagagtctgtggtctacacgggtgattataacatgaccccagaccgacacttaggagctgcctggattgacaagtgccgycccaacctgctcatcacagagtccacgtacgccacgaccatccgtgactccaagcgctgccgggagcgagacttcctgaagaaagtccacgagaccgtgg

SEQ ID NO: 56074 - DNA, 201 bp, Homo sapiens; identical to SEQ ID NO: 56062

SEQ ID NO: 56075 - DNA, 201 bp, Homo sapiens; identical to SEQ ID NO: 56063

SEQ ID NO: 56076 - DNA, 201 bp, Homo sapiens
ataacatgaccccagaccgacacttaggagctgcctggattgacaagtgccgccccaacctgctcatcacagagtccacgtacgccacgaccatccgtgaytccaagcgctgccgggagcgagacttcctgaagaaagtccacgagaccgtggagcgtggtgctgatacctgtgttcgcgctgggccgcgcccaggagctc

SEQ ID NO: 56077 - DNA, 201 bp, Homo sapiens; identical to SEQ ID NO: 56065

SEQ ID NO: 56078 - DNA, 201 bp, Homo sapiens; identical to SEQ ID NO: 56066

SEQ ID NO: 56079 - DNA, 201 bp, Homo sapiens; identical to SEQ ID NO: 56067

SEQ ID NO: 56080 - DNA, 201 bp, Homo sapiens; identical to SEQ ID NO: 56068

SEQ ID NO: 56081 - DNA, 115 bp, Homo sapiens; identical to SEQ ID NO: 56069

SEQ ID NO: 56082 - DNA, 201 bp, Homo sapiens; identical to SEQ ID NO: 56070

SEQ ID NO: 56083 - DNA, 201 bp, Homo sapiens
acaagtgccgccccaacctgctcatcacagagtccacgtacgccacgaccatccgtgactccaagcgctgccgggagcgagacttcctgaagaaagtccaygagaccgtggagcgtggtgctgatacctgtgttcgcgctgggccgcgcccaggagctctgcatcctcctggagaccttctgggagcgcatgaacctgaag

SEQ ID NO: 56084 - DNA, 201 bp, Homo sapiens; identical to SEQ ID NO: 56072

SEQ ID NO: 56085 - DNA, 201 bp, Homo sapiens; identical to SEQ ID NO: 56073

SEQ ID NO: 56086 - DNA, 201 bp, Homo sapiens; identical to SEQ ID NO: 56062

SEQ ID NO: 56087 - DNA, 201 bp, Homo sapiens
agcgggcagcggaagctcgagatggaggggcggcaggtggtgagtctcgaccccgcactgggctggcagggccgaggggcacctcctggtggtaaccactrtccacgccccgtggcctctgtagctggaggtcaagatgcaggtggagtacatgtcattcagcgcacacgcggacgccaagggcatcatgcagctggtggg

SEQ ID NO: 56088 - DNA, 201 bp, Homo sapiens; identical to SEQ ID NO: 56063

SEQ ID NO: 56089 - DNA, 201 bp, Homo sapiens; identical to SEQ ID NO: 56064

SEQ ID NO: 56090 - DNA, 201 bp, Homo sapiens; identical to SEQ ID NO: 56065

SEQ ID NO: 56091 - DNA, 201 bp, Homo sapiens; identical to SEQ ID NO: 56067

SEQ ID NO: 56092 - DNA, 201 bp, Homo sapiens; identical to SEQ ID NO: 56066

SEQ ID NO: 56093 - DNA, 201 bp, Homo sapiens
tgacacagcttgtccacctcgggcagaacagccccagcccagccctggacagtcttgtgccaaaacctgagccctttggagtctgcagctaggcttggtcrggcgccgctggcaggtggaaacagcttccaggggttcaggcgggggcatcccgggcaaggccttgaggtgccaaggctggagttccctggctgtgagctc

SEQ ID NO: 56094 - DNA, 201 bp, Homo sapiens; identical to SEQ ID NO: 56068

SEQ ID NO: 56095 - DNA, 115 bp, Homo sapiens; identical to SEQ ID NO: 56069

SEQ ID NO: 56096 - DNA, 201 bp, Homo sapiens; identical to SEQ ID NO: 56071

SEQ ID NO: 56097 - DNA, 201 bp, Homo sapiens; identical to SEQ ID NO: 56070

SEQ ID NO: 56098 - DNA, 201 bp, Homo sapiens; identical to SEQ ID NO: 56072

SEQ ID NO: 56099 - DNA, 201 bp, Homo sapiens; identical to SEQ ID NO: 56060

SEQ ID NO: 56100 - DNA, 201 bp, Homo sapiens; identical to SEQ ID NO: 56061

SEQ ID NO: 56101 - DNA, 201 bp, Homo sapiens; identical to SEQ ID NO: 56062

SEQ ID NO: 56102 - DNA, 201 bp, Homo sapiens; identical to SEQ ID NO: 56063

SEQ ID NO: 56103 - DNA, 201 bp, Homo sapiens; identical to SEQ ID NO: 56064

SEQ ID NO: 56104 - DNA, 201 bp, Homo sapiens; identical to SEQ ID NO: 56065

SEQ ID NO: 56105 - DNA, 201 bp, Homo sapiens; identical to SEQ ID NO: 56066

SEQ ID NO: 56106 - DNA, 201 bp, Homo sapiens; identical to SEQ ID NO: 56067

SEQ ID NO: 56107 - DNA, 201 bp, Homo sapiens
acagaccctgggcctgcacttcaggactgtgggtgccctgggtgaacagaccctgcaggtcccatccctggggacagaggccttgtgtcacctgcctgccyaggcagctgtttgcagctgaagaaacaaactggtctccaggctgtcttgcctttattcctggttagggcaggtggtcctagacagcagtttccagtaaaa

SEQ ID NO: 56108 - DNA, 115 bp, Homo sapiens; identical to SEQ ID NO: 56069

SEQ ID NO: 56109 - DNA, 201 bp, Homo sapiens; identical to SEQ ID NO: 56070

SEQ ID NO: 56110 - DNA, 201 bp, Homo sapiens; identical to SEQ ID NO: 56071

SEQ ID NO: 56111 - DNA, 201 bp, Homo sapiens; identical to SEQ ID NO: 56072

SEQ ID NO: 56112 - DNA, 201 bp, Homo sapiens; identical to SEQ ID NO: 56073

SEQ ID NO: 56113 - DNA, 201 bp, Homo sapiens; identical to SEQ ID NO: 56062

SEQ ID NO: 56114 - DNA, 201 bp, Homo sapiens; identical to SEQ ID NO: 56063

SEQ ID NO: 56115 - DNA, 201 bp, Homo sapiens; identical to SEQ ID NO: 56064

SEQ ID NO: 56116 - DNA, 201 bp, Homo sapiens; identical to SEQ ID NO: 56065

SEQ ID NO: 56117 - DNA, 201 bp, Homo sapiens; identical to SEQ ID NO: 56066

SEQ ID NO: 56118 - DNA, 201 bp, Homo sapiens; identical to SEQ ID NO: 56067

SEQ ID NO: 56119 - DNA, 201 bp, Homo sapiens; identical to SEQ ID NO: 56068

SEQ ID NO: 56120 - DNA, 115 bp, Homo sapiens; identical to SEQ ID NO: 56069

SEQ ID NO: 56121 - DNA, 201 bp, Homo sapiens; identical to SEQ ID NO: 56070

SEQ ID NO: 56122 - DNA, 201 bp, Homo sapiens; identical to SEQ ID NO: 56071

SEQ ID NO: 56123 - DNA, 201 bp, Homo sapiens; identical to SEQ ID NO: 56072

SEQ ID NO: 56124 - DNA, 201 bp, Homo sapiens; identical to SEQ ID NO: 56060

SEQ ID NO: 56125 - DNA, 201 bp, Homo sapiens
ccattgcgggcaagaatgtcatgctggactgtggaatgcacatgggcttcaatgacgacgtagatgatgagctggagatcaaggcctactatgcaggccaygtgctgggggcagccatgttccagattaaagtgggctcagagtctgtggtctacacgggtgattataacatgaccccagaccgacacttaggagctgcct

SEQ ID NO: 56126 - DNA, 201 bp, Homo sapiens; identical to SEQ ID NO: 56062

SEQ ID NO: 56127 - DNA, 201 bp, Homo sapiens; identical to SEQ ID NO: 56063

SEQ ID NO: 56128 - DNA, 201 bp, Homo sapiens; identical to SEQ ID NO: 56064

SEQ ID NO: 56129 - DNA, 201 bp, Homo sapiens; identical to SEQ ID NO: 56065

SEQ ID NO: 56130 - DNA, 201 bp, Homo sapiens; identical to SEQ ID NO: 56066

SEQ ID NO: 56131 - DNA, 201 bp, Homo sapiens; identical to SEQ ID NO: 56067

SEQ ID NO: 56132 - DNA, 201 bp, Homo sapiens; identical to SEQ ID NO: 56068

SEQ ID NO: 56133 - DNA, 115 bp, Homo sapiens; identical to SEQ ID NO: 56069

SEQ ID NO: 56134 - DNA, 201 bp, Homo sapiens; identical to SEQ ID NO: 56071

SEQ ID NO: 56135 - DNA, 201 bp, Homo sapiens; identical to SEQ ID NO: 56072

SEQ ID NO: 56136 - DNA, 201 bp, Homo sapiens
accgcggcctgtgacgcgcacctcggcgcccaaggcccgtagccgcgcagtttcctcgggcgtcaggccgccgcgcagcccggccgtatacacgggccccrcgggctcgcagagcaggagcgcgcccgcctcagtccccgacggggcctcaatgcctggctcggcctgcagccgccgcagccagcggtcctgcagccccag

SEQ ID NO: 56137 - DNA, 201 bp, Homo sapiens
cccgacggggcctcaatgcctggctcggcctgcagccgccgcagccagcggtcctgcagccccagtagctcggcgtacggcacccgacccaggcgcaccarccgaacggcgggttgccgcatcgtgcccaccgttgcgtccgcggggccccgccctctccgtgggcctgggggcgtggcctgaggggcggggactcggggg

SEQ ID NO: 56138 - DNA, 161 bp, Homo sapiens
ataaaatacagtgtacagtaaccttttagtcaaaacagcatcatacttggaaactgaaagcctactgttatttgttattgttgcttaacagctgatacagrtattctggtgacactactgtgctggcttacttaacctgaatacactatttttttcgttgt

SEQ ID NO: 56139 - DNA, 201 bp, Homo sapiens
aaaaagtaattaaatggcatgcgtgcaggctggacacgccaacaacaggtttcccacaatgccccacatggggccaagacctgtgtgcattactcactgcrtttttttgcttattctctgctgtgtggtataaatatattgttgaaaatgtcaaaaagacctaaagatacccctgtgaatatcagtgataagaaaaagagg

SEQ ID NO: 56140 - DNA, 201 bp, Homo sapiens
gtgctgacattatgccacaaatggaaaatttcatacctgaccttatgtgagttgcagtcaaaacacaggtgcacaacacccagttcatgcaacatccccartgggaaaaaagacccccccagctctcttctgctgcagtttttctgctcacacctggatttccccatgcattcccacaaaaagtaattaaatggcatgcgt

SEQ ID NO: 56141 - DNA, 201 bp, Homo sapiens
ggttgcagaaatttaagaaaagacatggcattaaatttttaaagacttgtggcaataaagcatctgctggtcatgaagcaacagagaagtttactggcaakttcagtaatgatgatgaacaagatggtaactttgaaggattcagtatgtcaagtgagaaaaaaataatgtctgacctccttacatatacaaaaaatatac

SEQ ID NO: 56142 - DNA, 201 bp, Homo sapiens
caatgggaaaaaagacccccccagctctcttctgctgcagtttttctgctcacacctggatttccccatgcattcccacaaaaagtaattaaatggcatgygtgcaggctggacacgccaacaacaggtttcccacaatgccccacatggggccaagacctgtgtgcattactcactgcatttttttgcttattctctgct

SEQ ID NO: 56143 - DNA, 201 bp, Homo sapiens
gggccagactcatcggttcattcaacaaccagtatttagtgcctgctgtgttctgcaggccctgccataggcgcttgatacagcggtgcatagcgtatgaraaagatctgtcctggctgagcatccgtaatataaaaatctgaaatctgaaatgctccaaaatcctaaactttttgagtgctgacattatgccacaaatgg

SEQ ID NO: 56144 - DNA, 201 bp, Homo sapiens
ccacaaaaagtaattaaatggcatgcgtgcaggctggacacgccaacaacaggtttcccacaatgccccacatggggccaagacctgtgtgcattactcaytgcatttttttgcttattctctgctgtgtggtataaatatattgttgaaaatgtcaaaaagacctaaagatacccctgtgaatatcagtgataagaaaaa

SEQ ID NO: 56145 - DNA, 201 bp, Homo sapiens
tcagtgataagaaaaagaggaagcatttatgtttatctatagcacagaaagtcaagttgttggagaaactggacagtggtgtaagtgtgaaacatcttacrgaagagtatggtgttggaatgaccaccatatatgacctgaagaaacagaaggataaactgttgaagttttatgctgaaagtgatgagcagatattaatga

SEQ ID NO: 56146 - DNA, 201 bp, Homo sapiens
tatagctcaggcaatgccaggagtgtttctgcagagatgtctttgtcaaggactccaaagacaagaggaggcaaggaggtaaagaagagattgaagaataycatctgccagtaatcaatcatggtggagctggagaaaccacagaagaactgataccagaagagcaggttgacgtagcacacgttcttgtagaggtagtac

SEQ ID NO: 56147 - DNA, 201 bp, Homo sapiens
agaggcacacagcatggcagaaaaccgagagccccgcggtgctgtggaggctgaactggatccagtggaatacacccttaggaaaaggcttcccagccgcytgccccggagacccaatgacatttatgtcaacatgaagacggactttaaggcccagctggcccgctgccagaagctgctggacggaggggcccggggtca

SEQ ID NO: 56148 - DNA, 200 bp, Homo sapiens
ggggcgaacggaagccgggaaggcgattcatagctcgcggggtacgggcgcgcgtgcgcactccgcagcccgttcaggaccccggcgcgggcagggcgcscacgagctggctggctgcttgcacccacatccttctttctctgggacctggggtcgcggttacttgggctggccggcgaacccttgagtggcctggcggg

SEQ ID NO: 56149 - DNA, 184 bp, Homo sapiens
cctcggaccagagccatgtaagaaaaggcctgttccctggaagcccaaaggactctgcattgagggtgggggtaattgtctcttggtgggcccagttagtkggccttcctgagtgtgtgtatgcggtctgtaactattgccatataaataaaaaatcctgttgcactagtgtcctgccatccca

SEQ ID NO: 56150 - DNA, 201 bp, Homo sapiens
ccgtggagcttgttgatgagctggagccagagaccgacacacgggagccactgactcggatccgcaacaactcagccatccacatccgagtcttcagggtmacacccaagtaattgaaaagacactcctccacttatcccctccgtgatatggctcttcgcatgctgagtactggacctcggaccagagccatgtaagaaa

SEQ ID NO: 56151 - DNA, 201 bp, Homo sapiens
acctccaccgtggagcttgttgatgagctggagccagagaccgacacacgggagccactgactcggatccgcaacaactcagccatccacatccgagtctwcagggtcacacccaagtaattgaaaagacactcctccacttatcccctccgtgatatggctcttcgcatgctgagtactggacctcggaccagagccatg

SEQ ID NO: 56152 - DNA, 201 bp, Homo sapiens
atcgcgctgcagctgcaggcgggcagcttcgggtccttgcaggtggctgccaatacctccaccgtggagcttgttgatgagctggagccagagaccgacasacgggagccactgactcggatccgcaacaactcagccatccacatccgagtcttcagggtcacacccaagtaattgaaaagacactcctccacttatccc

SEQ ID NO: 56153 - DNA, 201 bp, Homo sapiens
cctgttcctcctgacccccgaaagcttcccacccatctcccttcggcctgaagccagcccccctcctctctcccttctgtttacctcccaggtttgggctstattttctactccttccacctcttcctgagtaacaaggacactcccttcatccacaccccatgcctcctgccttgcttcctgtaccttcaagtagttgga

SEQ ID NO: 56154 - DNA, 201 bp, Homo sapiens
agcctgggggccagagcaccccaggaccccggggggatggcccaggcctgcgaggagtacctcagccagatccacagttgccaaacgttgcaggaccgcayggagaagatgaaggagatcgtagggtggatgcccctgatggccgcacagaaggacttcttctgggaggccctggacatgctgcagagggctgaaggaggc

SEQ ID NO: 56155 - DNA, 123 bp, Homo sapiens
gggctctattttctactccttccacctcttcctgagtaacaaggacactcccttcatccacaccccatgcctcctgccttgcttcctgtaccttcaagtasttggaagaggtcatgggtgaga

SEQ ID NO: 56156 - DNA, 201 bp, Homo sapiens
gaagagaagagggggaaaggaaatccgatttccatccagttgttccccccagagctggtggagcatatcatctcattcctcccagtcagagaccttgttgycctcggccagacctgccgctacttccacgaagtgtgcgatggggaaggcgtgtggagacgcatctgtcgcagactcagtccgcgcctccaagatcaggac

SEQ ID NO: 56157 - DNA, 201 bp, Homo sapiens
atgaatttggccgaatcttcatgcaaggaaataacagatacgggcagctaggaacaggggacaaaatggaccgaggggaacccacacagggaccctggccrtgtgtccccaggtttgttacctgcagcggcccatcaccctgtggtgcggcctcaaccactccctggtgctgagccagagctcagagttcagcaaggagct

SEQ ID NO: 56158 - DNA, 201 bp, Homo sapiens; identical to SEQ ID NO: 56154

SEQ ID NO: 56159 - DNA, 201 bp, Homo sapiens; identical to SEQ ID NO: 56153

SEQ ID NO: 56160 - DNA, 123 bp, Homo sapiens; identical to SEQ ID NO: 56155

SEQ ID NO: 56161 - DNA, 201 bp, Homo sapiens
gaagagaagagggggaaaggaaatccgatttccatccagttgttccccccagagctggtggagcatatcatctcattcctcccagtcagagaccttgttgycctcggccagacctgccgctacttccacgaagtgtgcgatggggaaggcgtgtggagacgcatctgtcgcagactcagtccgcgcctccaagatcagggt

SEQ ID NO: 56162 - DNA, 201 bp, Homo sapiens
acagggaattgggccttgggcctatgccatttctgttgtagtttggggcagtgcaggggacctgtgtggggtgtgaaccaaggcactactgccacctgccmcagtaaagcatctgcacttgactcaatgctgcccgagccctcccttccccctatccaacctgggtaggtgggtaggggccacagttgctggatgtttata

SEQ ID NO: 56163 - DNA, 201 bp, Homo sapiens
ttgacgtggcgttactaggcgtgtcgcatcactgaggcgggagccaggccgcaagcgaatttcctgattggctgtgatctgcgggttgctggggagaggcscggagaggcgggcgagagtccgcagggcaggcgctgattggctgaggtgggagcagcttcccttccgatgattcggctcttctcggctcagtctcagcga

SEQ ID NO: 56164 - DNA, 201 bp, Homo sapiens
gcaaattggctggtgagtctgagagcaaccttcgtaaagcctttgaggaggctgagaagaatgctcctgccatcatcttcattgatgagctagatgccatygctcccaaaagagagaaaactcatggcgaggtggagcggcgcattgtatcacagttgttgaccctcatggatggcctaaagcagagggcacatgtgattg

SEQ ID NO: 56165 - DNA, 201 bp, Homo sapiens
ggcactactgccacctgccacagtaaagcatctgcacttgactcaatgctgcccgagccctcccttccccctatccaacctgggtaggtgggtaggggccmcagttgctggatgtttatatagagagtaggttgatttattttacatgcttttgagttaatgttggaaaactaatcacaagcagtttctaaaccaaaaaat

SEQ ID NO: 56166 - DNA, 201 bp, Homo sapiens
gtaaagcatctgcacttgactcaatgctgcccgagccctcccttccccctatccaacctgggtaggtgggtaggggccacagttgctggatgtttatataragagtaggttgatttattttacatgcttttgagttaatgttggaaaactaatcacaagcagtttctaaaccaaaaaatgacatgttgtaaaaggacaata

SEQ ID NO: 56167 - DNA, 201 bp, Homo sapiens
tgcagtgagctggcctgcctggaccttgttccctgggggtgggggcgcttgcccaggagagggaccaggggtgcgcccacagcctgctccattctccagtytgaacagttcagctacagtctgactctggacagggggtttctgttgcaaaaatacaaaacaaaagcgataaaataaaagcgattttcatttggtaggcgg

SEQ ID NO: 56168 - DNA, 201 bp, Homo sapiens
gtgggtaggggccacagttgctggatgtttatatagagagtaggttgatttattttacatgcttttgagttaatgttggaaaactaatcacaagcagtttytaaaccaaaaaatgacatgttgtaaaaggacaataaacgttgggtcaaaatggagcctgagtcctgggccctgtgcctgcttcttttcctgggaacagcc

SEQ ID NO: 56169 - DNA, 201 bp, Homo sapiens
gggtgggggcgcttgcccaggagagggaccaggggtgcgcccacagcctgctccattctccagtctgaacagttcagctacagtctgactctggacagggkgtttctgttgcaaaaatacaaaacaaaagcgataaaataaaagcgattttcatttggtaggcggagagtgaattaccaacagggaattgggccttgggcc

SEQ ID NO: 56170 - DNA, 201 bp, Homo sapiens
gtgggagcagcttcccttccgatgattcggctcttctcggctcagtctcagcgaagcgtctgcgaccgtcgtttgagtcgtcgctgccgctgccgctgccrctgccactgccacctcgcggatcaggagccagcgttgttcgcccgacgcctcgctgccggtgggaggaagcgagagggaagccgcttgcgggtttgtcgc

SEQ ID NO: 56171 - DNA, 201 bp, Homo sapiens
gccttgggcctatgccatttctgttgtagtttggggcagtgcaggggacctgtgtggggtgtgaaccaaggcactactgccacctgccacagtaaagcatytgcacttgactcaatgctgcccgagccctcccttccccctatccaacctgggtaggtgggtaggggccacagttgctggatgtttatatagagagtaggt

SEQ ID NO: 56172 - DNA, 201 bp, Homo sapiens; identical to SEQ ID NO: 56162

SEQ ID NO: 56173 - DNA, 201 bp, Homo sapiens; identical to SEQ ID NO: 56163

SEQ ID NO: 56174 - DNA, 201 bp, Homo sapiens; identical to SEQ ID NO: 56164

SEQ ID NO: 56175 - DNA, 201 bp, Homo sapiens; identical to SEQ ID NO: 56165

SEQ ID NO: 56176 - DNA, 201 bp, Homo sapiens; identical to SEQ ID NO: 56166

SEQ ID NO: 56177 - DNA, 201 bp, Homo sapiens; identical to SEQ ID NO: 56167

SEQ ID NO: 56178 - DNA, 201 bp, Homo sapiens; identical to SEQ ID NO: 56168

SEQ ID NO: 56179 - DNA, 201 bp, Homo sapiens; identical to SEQ ID NO: 56169

SEQ ID NO: 56180 - DNA, 201 bp, Homo sapiens; identical to SEQ ID NO: 56170

SEQ ID NO: 56181 - DNA, 201 bp, Homo sapiens; identical to SEQ ID NO: 56171

SEQ ID NO: 56182 - DNA, 201 bp, Homo sapiens
tggaatggtgcaggctgccataccaactttagcaccaaggccatgtgggaggagaatggtctgaaatacactggggaggccatcaagaaattaagcaagcracaccagtaccacatctgtgcctgtgatcccaaaggaggcctggacaaggcccgacacctaactggattccatgaaacctccaacatcaacaacttttct

SEQ ID NO: 56183 - DNA, 201 bp, Homo sapiens
tttgatcctaagcccattcctgggaactggaatggtgcaggctgccataccaactttagcaccaaggccatgtgggaggagaatggtctgaaatacactgsggaggccatcaagaaattaagcaagcgacaccagtaccacatctgtgcctgtgatcccaaaggaggcctggacaaggcccgacacctaactggattccat

SEQ ID NO: 56184 - DNA, 201 bp, Homo sapiens
ccccagtgagaatttcaaattggaccctgtgaaggaatcagcatgggagatcatctctgggtggctcgtttcatcttgcatcatgtgtgtgaagactttgragtgatagcaacctttgatcctaagcccattcctgggaactggaatggtgcaggctgccataccaactttagcaccaaggccatgtgggaggagaatggt

SEQ ID NO: 56185 - DNA, 201 bp, Homo sapiens
ctaatgccaatcatgcctccccagtgagaatttcaaattggaccctgtgaaggaatcagcatgggagatcatctctgggtggctcgtttcatcttgcatcrtgtgtgtgaagactttgaagtgatagcaacctttgatcctaagcccattcctgggaactggaatggtgcaggctgccataccaactttagcaccaaggcc

SEQ ID NO: 56186 - DNA, 201 bp, Homo sapiens
caacttttctgctggtgtagccaatcgtagcgccagcatatgcattccctggactgtcggccaggagaagaagggttactttgaagaccatcacccctctrccaactgtgaccccttttcggtgacagaagccctcatccgcacgtgtcttctcaatgaaactggtgatgagcccttccagtacaaaaactaagtggacta

SEQ ID NO: 56187 - DNA, 201 bp, Homo sapiens
tctcgcagactccgcgacctactgacccggcgactgacaggctccaactacccgggactcagtattagccttcgcctcactggctcctctgcacaagaggmggcttccggagtagccctcggtgaagccccagaccacagctatgagtcccttcgtgtgacgtctgcgcagaaacatgttctgcatgtccagctcaaccgg

SEQ ID NO: 56188 - DNA, 201 bp, Homo sapiens
ggccacgactgagaacaaggaactgaaaaccgtcaccttctccaagctctgagagccctcgcgtcccaggccccagccagggggccggccttgtcccgcckcatccacagaaagggaggatgggcgatgacagttgtttctatgccttctgacccagtttcccagtttataactttatgacaatgagtttctcaagcccaa

SEQ ID NO: 56189 - DNA, 201 bp, Homo sapiens
catccggtactgtgcccaggatgctttcttccaggtgaaggaggtggacgtgggtttggctgccgatgtaggaacactgcagcgcctgcccaaggtcatcrggaaccagagcctggtcaacgagctggccttcaccgcccgcaagatgatggctgacgaggccctgggcagtgggctggtcagccgggtgttcccagacaa

SEQ ID NO: 56190 - DNA, 201 bp, Homo sapiens
ccgatgtaggaacactgcagcgcctgcccaaggtcatcgggaaccagagcctggtcaacgagctggccttcaccgcccgcaagatgatggctgacgaggcyctgggcagtgggctggtcagccgggtgttcccagacaaagaggtcatgctggatgctgccttagcgctggcggccgagatttccagcaagagccccgtgg

SEQ ID NO: 56191 - DNA, 201 bp, Homo sapiens
atggcggccttctgtgcccgccccctccgctaacgggcacgttactccgtccgaacgcagtagacgaaggcggcggcgatggcggcggggatagtggcttstcgcagactccgcgacctactgacccggcgactgacaggctccaactacccgggactcagtattagccttcgcctcactggctcctctgcacaagaggcg

SEQ ID NO: 56192 - DNA, 179 bp, Homo sapiens
acatggcggccttctgtgcccgccccctccgctaacgggcacgttactccgtccgaacgcagtagacgaaggcggcggmgatggcggcggggatagtggcttctcgcagactccgcgacctactgacccggcgactgacaggctccaactacccgggactcagtattagccttcgcctc

SEQ ID NO: 56193 - DNA, 137 bp, Homo sapiens
acatggcggccttctgtgcccgccccctccgctaacsggcacgttactccgtccgaacgcagtagacgaaggcggcggcgatggcggcggggatagtggcttctcgcagactccgcgacctactgacccggcgactg

SEQ ID NO: 56194 - DNA, 201 bp, Homo sapiens
tccaactacccgggactcagtattagccttcgcctcactggctcctctgcacaagaggcggcttccggagtagccctcggtgaagccccagaccacagctrtgagtcccttcgtgtgacgtctgcgcagaaacatgttctgcatgtccagctcaaccggcccaacaagaggaatgccatgaacaaggtcttctggagagag

SEQ ID NO: 56195 - DNA, 201 bp, Homo sapiens
ctgggcagtgggctggtcagccgggtgttcccagacaaagaggtcatgctggatgctgccttagcgctggcggccgagatttccagcaagagccccgtggyggtgcagagcaccaaggtcaacctgctgtattcccgcgaccattcggtggccgagagcctcaactacgtggcgtcctggaacatgagcatgctgcagacc

SEQ ID NO: 56196 - DNA, 201 bp, Homo sapiens
gcttcaacaagatttcgagagacgctgactgtcgggcggtggtgatctctggtgcaggaaaaatgttcactgcaggtattgacctgatggacatggcttcrgacatcctgcagcccaaaggagatgatgtggcccggatcagctggtacctccgtgacatcatcactcgataccaggagaccttcaacgtcatcgagaggt

SEQ ID NO: 56197 - DNA, 201 bp, Homo sapiens
aagaacccacccacagcagccctcgggggtgtcactgcttcctggagttcaggagaccccggacacctgggacctgtgttgctgagcccgtcctgacatckgtgttcttcctgtcagctccacgcccgggcccctggaccacggggtccacctctcctctgtccttgctgcctcagagtcagtcactgaccctgttatcat

SEQ ID NO: 56198 - DNA, 201 bp, Homo sapiens
gagggctacagcgcactccctcagctggacatagagcggttctgcgcatgcccagaagaggccgcacacgccctggagctccgcaagggggagctgcgctyggcggacctgcccgcgatcatctcgacatggcaggagctgaggcagctgcaggagcagatccggagcctggaggaagagaaggcagctgtgactgaggca

SEQ ID NO: 56199 - DNA, 201 bp, Homo sapiens
cggtcaactttcctcaggatctgattggctcgtcacggtcaggttcgctgccttgcaattggtctaaacgcggagtgggcgggacgaagtgccgccttgtycccggtccaagatggctgcgtccatggcgcggcgcttgtggcctttgctgactcgtcgggggttccggccccggggaggctgcatctccaacgatagtcc

SEQ ID NO: 56200 - DNA, 201 bp, Homo sapiens
ggctgcgtccatggcgcggcgcttgtggcctttgctgactcgtcgggggttccggccccggggaggctgcatctccaacgatagtccaaggagaagtttcrctacagagaaacgaaaccggaacctcctgtacgagtatgcgcgcgagggctacagcgcactccctcagctggacatagagcggttctgcgcatgcccaga

SEQ ID NO: 56201 - DNA, 201 bp, Homo sapiens
tggccagcctgctgtaagctaagaacccacccacagcagccctcgggggtgtcactgcttcctggagttcaggagaccccggacacctgggacctgtgttsctgagcccgtcctgacatctgtgttcttcctgtcagctccacgcccgggcccctggaccacggggtccacctctcctctgtccttgctgcctcagagtca

SEQ ID NO: 56202 - DNA, 201 bp, Homo sapiens
ccttccaacctcggggccacctggaaattggcgagaaactcgacatcatccgtcagaagcgcctgtcccacgtgtctggccaccggtcctattacctgcgyggggctggagccctcctgcagcacggcctggtcaacttcacattcaacaagcttctccgccggggcttcacccccatgacggtgccagaccttctccgcg

SEQ ID NO: 56203 - DNA, 201 bp, Homo sapiens
tggagctccgcaagggggagctgcgctcggcggacctgcccgcgatcatctcgacatggcaggagctgaggcagctgcaggagcagatccggagcctggargaagagaaggcagctgtgactgaggcagtgcgggccctgctggcaaaccaggacagtggtgaagtgcagcaggaccccaagtaccagggtctgcgggcac

SEQ ID NO: 56204 - DNA, 201 bp, Homo sapiens
ggcagctgcaggagcagatccggagcctggaggaagagaaggcagctgtgactgaggcagtgcgggccctgctggcaaaccaggacagtggtgaagtgcarcaggaccccaagtaccagggtctgcgggcacgtggccgggagatccggaaggagcttgttcacctgtaccccagggaggcccagcttgaggagcagttct

SEQ ID NO: 56205 - DNA, 201 bp, Homo sapiens; identical to SEQ ID NO: 56197

SEQ ID NO: 56206 - DNA, 201 bp, Homo sapiens; identical to SEQ ID NO: 56198

SEQ ID NO: 56207 - DNA, 201 bp, Homo sapiens; identical to SEQ ID NO: 56199

SEQ ID NO: 56208 - DNA, 201 bp, Homo sapiens; identical to SEQ ID NO: 56200

SEQ ID NO: 56209 - DNA, 201 bp, Homo sapiens; identical to SEQ ID NO: 56201

SEQ ID NO: 56210 - DNA, 201 bp, Homo sapiens; identical to SEQ ID NO: 56202

SEQ ID NO: 56211 - DNA, 201 bp, Homo sapiens
tggagctccgcaagggggagctgcgctcggcggacctgcccgcgatcatctcgacatggcaggagctgaggcagctgcaggagcagatccggagcctggargaagagaaggcagctgtgactgaggcagtgcgggccctgctggcaaaccaggacagtggtgaagtgcagcagggaggcccagcttgaggagcagttctac

SEQ ID NO: 56212 - DNA, 201 bp, Homo sapiens
ggcagctgcaggagcagatccggagcctggaggaagagaaggcagctgtgactgaggcagtgcgggccctgctggcaaaccaggacagtggtgaagtgcarcagggaggcccagcttgaggagcagttctacctgcaggcgctgaagctgcccaaccagacccacccagacgtgcccgtcggggatgagagccaggctcga

SEQ ID NO: 56213 - DNA, 201 bp, Homo sapiens; identical to SEQ ID NO: 56198

SEQ ID NO: 56214 - DNA, 201 bp, Homo sapiens; identical to SEQ ID NO: 56200

SEQ ID NO: 56215 - DNA, 201 bp, Homo sapiens; identical to SEQ ID NO: 56199

SEQ ID NO: 56216 - DNA, 201 bp, Homo sapiens; identical to SEQ ID NO: 56202

SEQ ID NO: 56217 - DNA, 201 bp, Homo sapiens; identical to SEQ ID NO: 56203

SEQ ID NO: 56218 - DNA, 201 bp, Homo sapiens; identical to SEQ ID NO: 56204

SEQ ID NO: 56219 - DNA, 201 bp, Homo sapiens
gtgcagtgcaagctgcgctatggaatgtggcatttcctacttggggataaagcaagcaaaagactgacagaacgcagcagagtgataactgtagatggcartatatgtactggaaaaggcaaacttgcaaaagaaatagcagagaaactaggcttcaagcactttcctgaagcggggattcattatccagacagtaccaca

SEQ ID NO: 56220 - DNA, 201 bp, Homo sapiens
ccctttagctttgttttggaatggcccaccattctcactggaaaacagtggtctgctgtgaaaggccagctctcggcagcccctgtggtttcagcgctgcygctctgtgtcattcaggttgtgcacattgtttttcttctgacttccagaaataaaagtgtttccatgggaatttccccatcgtacgtctatgtgcgtgcg

SEQ ID NO: 56221 - DNA, 201 bp, Homo sapiens
ccttgcggctcctgaagctggcagcgacgtccgcgtccgcccgggtcgtggcggcgggcgcccagcgcgtgagaggaattcatagcagtgtgcagtgcaarctgcgctatggaatgtggcatttcctacttggggataaagcaagcaaaagactgacagaacgcagcagagtgataactgtagatggcaatatatgtactg

SEQ ID NO: 56222 - DNA, 201 bp, Homo sapiens
tgggagacaagtggatctggctgaagtgaacgggccgccttctgctccagctgcatcacagtgatggccaagctgcatcagccgcactctcctggacgccrtatagctttaagatcgggggagggtaaataatgcaaaaattgcacagtggaagaaggggtctcacaaaaagcaatccatcctgtagtataggtaatggag

SEQ ID NO: 56223 - DNA, 201 bp, Homo sapiens
taatgtgctacattagagtagaaaaaataagaacgtgaagaagaaatagcaaaaggagaaaattaccacagatttacagaacaatatgttttaagagagaygttgagaaagattcacgtggccgtcctcagcgtctcaaactcctttgaagggagatttgagcttaggctgttgatgacataagatgcaaaagcaaaataa

SEQ ID NO: 56224 - DNA, 201 bp, Homo sapiens
gtgtcattcaggttgtgcacattgtttttcttctgacttccagaaataaaagtgtttccatgggaatttccccatcgtacgtctatgtgcgtgcgggcacrtcgaaactgcacacgtgcacacacgctgctctgggccctgtttggtgtggtgtggtttaattgaggcttacattatgctgaagagtttttctaaaggcct

SEQ ID NO: 56225 - DNA, 201 bp, Homo sapiens
cacatgaaatgaagatcacctctgcctatctacaggacattgagaatgcctataagaaaacctttctccctgagatgagtgaaaaatgtgaggttttacartattctgcaagggaagctcaagattcaaaaaaggtggtagaggacattgaatacctgaagttcgataaagggccgtggctcaagcaggacaatcgcactt

SEQ ID NO: 56226 - DNA, 201 bp, Homo sapiens
gatttacatcgatgtgcccgttccagaggtccagaggcggattcagaagaaaggagatccacatgaaatgaagatcacctctgcctatctacaggacattragaatgcctataagaaaacctttctccctgagatgagtgaaaaatgtgaggttttacaatattctgcaagggaagctcaagattcaaaaaaggtggtaga

SEQ ID NO: 56227 - DNA, 167 bp, Homo sapiens
caaccatgcagggctccgtgtcggcatggtgtggactcgggtgctctgatcatcccctgtgtttgcgtctgaccctgtgtggttgcattcccttgatggartgggaagtatgtaatttgtagtgctgaggacattcgtctgtttgattttctggtgttttcaatgac

SEQ ID NO: 56228 - DNA, 201 bp, Homo sapiens; identical to SEQ ID NO: 56219

SEQ ID NO: 56229 - DNA, 201 bp, Homo sapiens; identical to SEQ ID NO: 56221

SEQ ID NO: 56230 - DNA, 201 bp, Homo sapiens; identical to SEQ ID NO: 56219

SEQ ID NO: 56231 - DNA, 201 bp, Homo sapiens
acatcagttcagagagcgattagattggactgtgtgttttggggaggaatccacagaggtgaagcatcaggggcacttgctgtcagtgcagcctggcaccrtggccctgaccgtgggctcctggctgaggtcgtgcttgctgggtctccactggaagctgctcttcctctttccagaaagccccatgcacaccacagcctt

SEQ ID NO: 56232 - DNA, 201 bp, Homo sapiens; identical to SEQ ID NO: 56225

SEQ ID NO: 56233 - DNA, 201 bp, Homo sapiens; identical to SEQ ID NO: 56221

SEQ ID NO: 56234 - DNA, 201 bp, Homo sapiens
catctgcgattacctgcccccccacctggtgatttacatcgatgtgcccgttccagagccacatgaaatgaagatcacctctgcctatctacaggacattragaatgcctataagaaaacctttctccctgagatgagtgaaaaatgtgaggttttacaatattctgcaagggaagctcaagattcaaaaaaggtggtaga

SEQ ID NO: 56235 - DNA, 201 bp, Homo sapiens; identical to SEQ ID NO: 56219

SEQ ID NO: 56236 - DNA, 201 bp, Homo sapiens
tgtagtataggtaatggagaatggcccaccattctcactggaaaacagtggtctgctgtgaaaggccagctctcggcagcccctgtggtttcagcgctgcygctctgtgtcattcaggttgtgcacattgtttttcttctgacttccagaaataaaagtgtttccatgggaatttccccatcgtacgtctatgtgcgtgcg

SEQ ID NO: 56237 - DNA, 201 bp, Homo sapiens; identical to SEQ ID NO: 56221

SEQ ID NO: 56238 - DNA, 201 bp, Homo sapiens; identical to SEQ ID NO: 56222

SEQ ID NO: 56239 - DNA, 201 bp, Homo sapiens; identical to SEQ ID NO: 56223

SEQ ID NO: 56240 - DNA, 201 bp, Homo sapiens; identical to SEQ ID NO: 56224

SEQ ID NO: 56241 - DNA, 201 bp, Homo sapiens; identical to SEQ ID NO: 56225

SEQ ID NO: 56242 - DNA, 201 bp, Homo sapiens; identical to SEQ ID NO: 56226

SEQ ID NO: 56243 - DNA, 167 bp, Homo sapiens; identical to SEQ ID NO: 56227

SEQ ID NO: 56244 - DNA, 201 bp, Homo sapiens
taccacagagcaaccaaagaaaaacagaattacttactcacaaattattaaagaaggcaggagatttaatattgatttagtatcaaagctgctgtattctygaggattactaattgatcttctaatcaaatctaatgttagtcgatatgcagagtttaaaaatattaccaggattcttgcatttcgagaaggacgagtgga

SEQ ID NO: 56245 - DNA, 201 bp, Homo sapiens
aaagctgctgtattctcgaggattactaattgatcttctaatcaaatctaatgttagtcgatatgcagagtttaaaaatattaccaggattcttgcatttygagaaggacgagtggaacaggttccgtgttccagagcagatgtctttaatagcaaacaacttactatggtagaaaagcgaatgctaatgaaatttcttac

SEQ ID NO: 56246 - DNA, 201 bp, Homo sapiens
gtattctcgaggattactaattgatcttctaatcaaatctaatgttagtcgatatgcagagtttaaaaatattaccaggattcttgcatttcgagaaggaygagtggaacaggttccgtgttccagagcagatgtctttaatagcaaacaacttactatggtagaaaagcgaatgctaatgaaatttcttacattttgtat

SEQ ID NO: 56247 - DNA, 201 bp, Homo sapiens
aggggaaaaagaaaaccattgtgatgataaaacttgtgtgccatcaacttcagcagaagacatgagtgaaaatgtgcctatagcagaagataccacagagyaaccaaagaaaaacagaattacttactcacaaattattaaagaaggcaggagatttaatattgatttagtatcaaagctgctgtattctcgaggattact

SEQ ID NO: 56248 - DNA, 201 bp, Homo sapiens
tgagtcattaagcactatgagctgtgaaatgctcacagaacaaactccaagcagcgatccagagaatgcgctagaagtaaatggtgctgaagtgacagggkaaaaagaaaaccattgtgatgataaaacttgtgtgccatcaacttcagcagaagacatgagtgaaaatgtgcctatagcagaagataccacagagcaacc

SEQ ID NO: 56249 - DNA, 201 bp, Homo sapiens
aaatatcctgatgaatataaaggatatgaagagatcacattttatgaatatttaaagactcaaaaattaacccccaacctccaatatattgtcatgcattmaattgcaatgacatcagagacagccagcagcaccatagatggtctcaaagctaccaaaaactttcttcactgtcttgggcggtatggcaacactccattt

SEQ ID NO: 56250 - DNA, 201 bp, Homo sapiens
aattattaaagaaggcaggagatttaatattgatttagtatcaaagctgctgtattctcgaggattactaattgatcttctaatcaaatctaatgttagtygatatgcagagtttaaaaatattaccaggattcttgcatttcgagaaggacgagtggaacaggttccgtgttccagagcagatgtctttaatagcaaaca

SEQ ID NO: 56251 - DNA, 201 bp, Homo sapiens
ttaaagaaggcaggagatttaatattgatttagtatcaaagctgctgtattctcgaggattactaattgatcttctaatcaaatctaatgttagtcgatakgcagagtttaaaaatattaccaggattcttgcatttcgagaaggacgagtggaacaggttccgtgttccagagcagatgtctttaatagcaaacaactta

SEQ ID NO: 56252 - DNA, 201 bp, Homo sapiens
atcagttgtgcagaaattgtttgttccatatactgaaatggagatagaaaatgaacaagtagaaaagccaagaattctgtgggctctttacttcaatatgwgagattcgtcagacatcagcaggagctgttataatgatttaccatccaacgtttatgtctgctctggcccagattgtggtttaggaaatgataatgcagt

SEQ ID NO: 56253 - DNA, 201 bp, Homo sapiens
attttgtatggaatatgagaaatatcctgatgaatataaaggatatgaagagatcacattttatgaatatttaaagactcaaaaattaacccccaacctcyaatatattgtcatgcattcaattgcaatgacatcagagacagccagcagcaccatagatggtctcaaagctaccaaaaactttcttcactgtcttgggcg

SEQ ID NO: 56254 - DNA, 201 bp, Homo sapiens
tataaaggatatgaagagatcacattttatgaatatttaaagactcaaaaattaacccccaacctccaatatattgtcatgcattcaattgcaatgacatsagagacagccagcagcaccatagatggtctcaaagctaccaaaaactttcttcactgtcttgggcggtatggcaacactccatttttgtttcctttatat

SEQ ID NO: 56255 - DNA, 201 bp, Homo sapiens
caaactccaagcagcgatccagagaatgcgctagaagtaaatggtgctgaagtgacaggggaaaaagaaaaccattgtgatgataaaacttgtgtgccatsaacttcagcagaagacatgagtgaaaatgtgcctatagcagaagataccacagagcaaccaaagaaaaacagaattacttactcacaaattattaaagaa

SEQ ID NO: 56256 - DNA, 201 bp, Homo sapiens
cagaaattgtttgttccatatactgaaatggagatagaaaatgaacaagtagaaaagccaagaattctgtgggctctttacttcaatatgagagattcgtsagacatcagcaggagctgttataatgatttaccatccaacgtttatgtctgctctggcccagattgtggtttaggaaatgataatgcagtcaaacaggct

SEQ ID NO: 56257 - DNA, 201 bp, Homo sapiens
tattaccaggattcttgcatttcgagaaggacgagtggaacaggttccgtgttccagagcagatgtctttaatagcaaacaacttactatggtagaaaagygaatgctaatgaaatttcttacattttgtatggaatatgagaaatatcctgatgaatataaaggatatgaagagatcacattttatgaatatttaaagac

SEQ ID NO: 56258 - DNA, 201 bp, Homo sapiens
ctgaacaaggatctgacgacacagaatggaataagctacgtcctcaatgccagcaactcctgccccaagcctgacttcatctgcgagagccgcttcatgcrggtccccatcaacgacaactactgtgaaaagctgctgccctggctggacaagtctatggagttcatctgtaaaggcaagctgtccagctgccaagtcatc

SEQ ID NO: 56259 - DNA, 201 bp, Homo sapiens
caagcctgacttcatctgcgagagccgcttcatgcgggtccccatcaacgacaactactgtgaaaagctgctgccctggctggacaagtctatggagttcrtctgtaaaggcaagctgtccagctgccaagtcatcgtccactgtctggtcggtatctcccactctgccaccatcgccatcgcctacatcatgaagaccat

SEQ ID NO: 56260 - DNA, 201 bp, Homo sapiens
ctgcgagagccgcttcatgcgggtccccatcaacgacaactactgtgaaaagctgctgccctggctggacaagtctatggagttcatctgtaaaggcaagstgtccagctgccaagtcatcgtccactgtctggtcggtatctcccactctgccaccatcgccatcgcctacatcatgaagaccatgggcatatcctccga

SEQ ID NO: 56261 - DNA, 201 bp, Homo sapiens
atcaacgacaactactgtgaaaagctgctgccctggctggacaagtctatggagttcatctgtaaaggcaagctgtccagctgccaagtcatcgtccactrtctggtcggtatctcccactctgccaccatcgccatcgcctacatcatgaagaccatgggcatatcctccgacgacacctacaggttcatgaaggatagg

SEQ ID NO: 56262 - DNA, 201 bp, Homo sapiens
ttgacatttgaatttggacttggatcttcccttggtcccattagctgaggtttagtaatctaaagtccctatagtatatgattataatgctattttaaaawatatatatataaaatatttttttctttttaaaatagacactatagttttacccataagtaatatttaaagattatagctcccaaaagaatggaccaacca

SEQ ID NO: 56263 - DNA, 201 bp, Homo sapiens
tctctgccacagtctcataggtgcttggaaatgaaagtagaactgcctgtctttaacggactctgacagaggtaactggattagggacgagtacgccagcytttttttttttttttttttttttttttaacatcttaaatcctgaaaaaaaaaaaaaaaaaaaaaaaaaggcagcagctccgaattgaatgaattgatggg

SEQ ID NO: 56264 - DNA, 188 bp, Homo sapiens
tcctgggtaaatgtggtgagaatgcacgcgtgcatatgctacacatatgtgcttctcagttgcagaaaatgaactgctttgggagattatcagtagaaagrgtgttatcatattggtgctgagtgctatgtgtgcttatacaatttgttcttgtattttaataaactttgaataaaagaataaagcta

SEQ ID NO: 56265 - DNA, 201 bp, Homo sapiens
gagacaatgaaaggctaaagaaaattttaaaatctctgccacagtctcataggtgcttggaaatgaaagtagaactgcctgtctttaacggactctgacaraggtaactggattagggacgagtacgccagcttttttttttttttttttttttttttttaacatcttaaatcctgaaaaaaaaaaaaaaaaaaaaaaaaa

SEQ ID NO: 56266 - DNA, 201 bp, Homo sapiens
gagataattctgatcaatcattttggaggctttgttataaggcaacccccggtatatcatggaatttccattgacatttgaatttggacttggatcttccyttggtcccattagctgaggtttagtaatctaaagtccctatagtatatgattataatgctattttaaaaaatatatatataaaatatttttttcttttta

SEQ ID NO: 56267 - DNA, 201 bp, Homo sapiens
agcacatttaaaaaaaaaaaaaactctggcaattcaagaaagaaacaggctacgtttaaagagcatagagacaatgaaaggctaaagaaaattttaaaatytctgccacagtctcataggtgcttggaaatgaaagtagaactgcctgtctttaacggactctgacagaggtaactggattagggacgagtacgccagctt

SEQ ID NO: 56268 - DNA, 201 bp, Homo sapiens
aagcacagaaagtgtgtgtaaaacggagtaaagaaagaaaaaaaaaaaactacccttaaagcacatttaaaaaaaaaaaaaactctggcaattcaagaaaraaacaggctacgtttaaagagcatagagacaatgaaaggctaaagaaaattttaaaatctctgccacagtctcataggtgcttggaaatgaaagtagaac

SEQ ID NO: 56269 - DNA, 201 bp, Homo sapiens
tccactcgcggagagtggcggcgcatgctgacctcagagggactgcgctgcgtctggaagagcttcctcctcgatgcctacaaacaggtgaaattgggtgmggatgcccccaattccagtgtggtgcatgtctccagtacagaaggaggtgacaacagtggcaatggtacccaggagaagatagctgagggagccacatgc

SEQ ID NO: 56270 - DNA, 201 bp, Homo sapiens
catttagagcttttcagaacatccccactgtcatgtgtctcagcagtggagactgcaagtaaggcttttaattttaggaggtttttttttttttttttttytccctaaatggtatggccaaaagtcagagttaaaatatatatagttagattccaacttcctccttcactctaaaaatagaatccaaacccactcttcata

SEQ ID NO: 56271 - DNA, 201 bp, Homo sapiens
cgcggagagtggcggcgcatgctgacctcagagggactgcgctgcgtctggaagagcttcctcctcgatgcctacaaacaggtgaaattgggtgaggatgmccccaattccagtgtggtgcatgtctccagtacagaaggaggtgacaacagtggcaatggtacccaggagaagatagctgagggagccacatgccacctt

SEQ ID NO: 56272 - DNA, 201 bp, Homo sapiens
atccaaacccactcttcatatatgcttccagaatggggcttaagtaccaatctctgctttgcaatgggcacaatcttggtcatgtcctgaggctctctaaraaaagagaggatctaggatgggagagctagaaagttgctaactgggaagaacaaggccctgagggcttggtctaccaatctgggaagatttgaaaacaaa

SEQ ID NO: 56273 - DNA, 201 bp, Homo sapiens
ggcacaatcttggtcatgtcctgaggctctctaagaaaagagaggatctaggatgggagagctagaaagttgctaactgggaagaacaaggccctgagggsttggtctaccaatctgggaagatttgaaaacaaacttctcgcaactgaaggaaggctgaaggctgctgcaagtcattgagtgactttaggatgagcaaaa

SEQ ID NO: 56274 - DNA, 201 bp, Homo sapiens
cgaagagggagacagagatgtgcagagttgaccagtgtgcggatgataactactgacgaaagagtcatcgactcagttagtggttggatgtagtcacattrgtttgcctctccccatctttgtctccctggcaaggagaatatgcgggacatgatgctaagagtcctgggtaaatgtggtgagaatgcacgcgtgcatatg

SEQ ID NO: 56275 - DNA, 201 bp, Homo sapiens
gtcatcgactcagttagtggttggatgtagtcacattagtttgcctctccccatctttgtctccctggcaaggagaatatgcgggacatgatgctaagagycctgggtaaatgtggtgagaatgcacgcgtgcatatgctacacatatgtgcttctcagttgcagaaaatgaactgctttgggagattatcagtagaaaga

SEQ ID NO: 56276 - DNA, 201 bp, Homo sapiens
ctttgtctccctggcaaggagaatatgcgggacatgatgctaagagtcctgggtaaatgtggtgagaatgcacgcgtgcatatgctacacatatgtgcttytcagttgcagaaaatgaactgctttgggagattatcagtagaaagagtgttatcatattggtgctgagtgctatgtgtgcttatacaatttgttcttgta

SEQ ID NO: 56277 - DNA, 201 bp, Homo sapiens
gtatggccaaaagtcagagttaaaatatatatagttagattccaacttcctccttcactctaaaaatagaatccaaacccactcttcatatatgcttccaraatggggcttaagtaccaatctctgctttgcaatgggcacaatcttggtcatgtcctgaggctctctaagaaaagagaggatctaggatgggagagctag

SEQ ID NO: 56278 - DNA, 201 bp, Homo sapiens
gggactgcgctgcgtctggaagagcttcctcctcgatgcctacaaacaggtgaaattgggtgaggatgcccccaattccagtgtggtgcatgtctccagtrcagaaggaggtgacaacagtggcaatggtacccaggagaagatagctgagggagccacatgccaccttcttgactttgccagccctgagcgcccactagt

SEQ ID NO: 56279 - DNA, 201 bp, Homo sapiens
ggtttttttttttttttttttttccctaaatggtatggccaaaagtcagagttaaaatatatatagttagattccaacttcctccttcactctaaaaataraatccaaacccactcttcatatatgcttccagaatggggcttaagtaccaatctctgctttgcaatgggcacaatcttggtcatgtcctgaggctctcta

SEQ ID NO: 56280 - DNA, 201 bp, Homo sapiens
tttagagcttttcagaacatccccactgtcatgtgtctcagcagtggagactgcaagtaaggcttttaattttaggaggtttttttttttttttttttttycctaaatggtatggccaaaagtcagagttaaaatatatatagttagattccaacttcctccttcactctaaaaatagaatccaaacccactcttcatata

SEQ ID NO: 56281 - DNA, 201 bp, Homo sapiens
atttagagcttttcagaacatccccactgtcatgtgtctcagcagtggagactgcaagtaaggcttttaattttaggaggttttttttttttttttttttyccctaaatggtatggccaaaagtcagagttaaaatatatatagttagattccaacttcctccttcactctaaaaatagaatccaaacccactcttcatat

SEQ ID NO: 56282 - DNA, 201 bp, Homo sapiens
aggatcttttgtccattccattaataactgaataaaaaataaataaaatggatagaaaaaaactaaagttgaaaatacattcttaaactagttgtctgaawtgagaaaagagtgagaactaggtgtgcaagaaccaaacgtattttattttattttttaaatgggagcaacatatcagtcgtgtcaccagctggtatattg

SEQ ID NO: 56283 - DNA, 201 bp, Homo sapiens
agagaagcacagaaagtgtgtgtaaaacggagtaaagaaagaaaaaaaaaaaactacccttaaagcacatttaaaaaaaaaaaaaactctggcaattcaaraaagaaacaggctacgtttaaagagcatagagacaatgaaaggctaaagaaaattttaaaatctctgccacagtctcataggtgcttggaaatgaaagta

SEQ ID NO: 56284 - DNA, 201 bp, Homo sapiens; identical to SEQ ID NO: 56262

SEQ ID NO: 56285 - DNA, 188 bp, Homo sapiens; identical to SEQ ID NO: 56264

SEQ ID NO: 56286 - DNA, 201 bp, Homo sapiens
gagacaatgaaaggctaaagaaaattttaaaatctctgccacagtctcataggtgcttggaaatgaaagtagaactgcctgtctttaacggactctgacaragagggtgaaggggaaccagagcgcacaagggaactgactcaggaggcagagaagatgggcatcctcagcgtagacttgctgatcacactgcaaattctg

SEQ ID NO: 56287 - DNA, 201 bp, Homo sapiens; identical to SEQ ID NO: 56266

SEQ ID NO: 56288 - DNA, 201 bp, Homo sapiens
agcacatttaaaaaaaaaaaaaactctggcaattcaagaaagaaacaggctacgtttaaagagcatagagacaatgaaaggctaaagaaaattttaaaatytctgccacagtctcataggtgcttggaaatgaaagtagaactgcctgtctttaacggactctgacagagagggtgaaggggaaccagagcgcacaaggga

SEQ ID NO: 56289 - DNA, 201 bp, Homo sapiens; identical to SEQ ID NO: 56268

SEQ ID NO: 56290 - DNA, 201 bp, Homo sapiens; identical to SEQ ID NO: 56269

SEQ ID NO: 56291 - DNA, 201 bp, Homo sapiens
ttactatttgggctctgaaataaaaattatgaaatatggtgaggtcacatgttggtgctgccttgctgcataaaattctagtttttttttttttttttttytccctaaatggtatggccaaaagtcagagttaaaatatatatagttagattccaacttcctccttcactctaaaaatagaatccaaacccactcttcata

SEQ ID NO: 56292 - DNA, 201 bp, Homo sapiens; identical to SEQ ID NO: 56271

SEQ ID NO: 56293 - DNA, 201 bp, Homo sapiens; identical to SEQ ID NO: 56272

SEQ ID NO: 56294 - DNA, 201 bp, Homo sapiens; identical to SEQ ID NO: 56273

SEQ ID NO: 56295 - DNA, 201 bp, Homo sapiens; identical to SEQ ID NO: 56274

SEQ ID NO: 56296 - DNA, 201 bp, Homo sapiens; identical to SEQ ID NO: 56275

SEQ ID NO: 56297 - DNA, 201 bp, Homo sapiens; identical to SEQ ID NO: 56276

SEQ ID NO: 56298 - DNA, 201 bp, Homo sapiens; identical to SEQ ID NO: 56277

SEQ ID NO: 56299 - DNA, 201 bp, Homo sapiens; identical to SEQ ID NO: 56278

SEQ ID NO: 56300 - DNA, 201 bp, Homo sapiens
agtttttttttttttttttttttccctaaatggtatggccaaaagtcagagttaaaatatatatagttagattccaacttcctccttcactctaaaaataraatccaaacccactcttcatatatgcttccagaatggggcttaagtaccaatctctgctttgcaatgggcacaatcttggtcatgtcctgaggctctcta

SEQ ID NO: 56301 - DNA, 201 bp, Homo sapiens
actatttgggctctgaaataaaaattatgaaatatggtgaggtcacatgttggtgctgccttgctgcataaaattctagtttttttttttttttttttttycctaaatggtatggccaaaagtcagagttaaaatatatatagttagattccaacttcctccttcactctaaaaatagaatccaaacccactcttcatata

SEQ ID NO: 56302 - DNA, 201 bp, Homo sapiens
tactatttgggctctgaaataaaaattatgaaatatggtgaggtcacatgttggtgctgccttgctgcataaaattctagttttttttttttttttttttyccctaaatggtatggccaaaagtcagagttaaaatatatatagttagattccaacttcctccttcactctaaaaatagaatccaaacccactcttcatat

SEQ ID NO: 56303 - DNA, 201 bp, Homo sapiens; identical to SEQ ID NO: 56282

SEQ ID NO: 56304 - DNA, 201 bp, Homo sapiens; identical to SEQ ID NO: 56283

SEQ ID NO: 56305 - DNA, 201 bp, Homo sapiens; identical to SEQ ID NO: 56262

SEQ ID NO: 56306 - DNA, 201 bp, Homo sapiens; identical to SEQ ID NO: 56263

SEQ ID NO: 56307 - DNA, 188 bp, Homo sapiens; identical to SEQ ID NO: 56264

SEQ ID NO: 56308 - DNA, 201 bp, Homo sapiens; identical to SEQ ID NO: 56265

SEQ ID NO: 56309 - DNA, 201 bp, Homo sapiens; identical to SEQ ID NO: 56266

SEQ ID NO: 56310 - DNA, 201 bp, Homo sapiens; identical to SEQ ID NO: 56267

SEQ ID NO: 56311 - DNA, 201 bp, Homo sapiens; identical to SEQ ID NO: 56268

SEQ ID NO: 56312 - DNA, 201 bp, Homo sapiens; identical to SEQ ID NO: 56269

SEQ ID NO: 56313 - DNA, 201 bp, Homo sapiens; identical to SEQ ID NO: 56291

SEQ ID NO: 56314 - DNA, 201 bp, Homo sapiens; identical to SEQ ID NO: 56271

SEQ ID NO: 56315 - DNA, 201 bp, Homo sapiens; identical to SEQ ID NO: 56272

SEQ ID NO: 56316 - DNA, 201 bp, Homo sapiens; identical to SEQ ID NO: 56273

SEQ ID NO: 56317 - DNA, 201 bp, Homo sapiens; identical to SEQ ID NO: 56274

SEQ ID NO: 56318 - DNA, 201 bp, Homo sapiens; identical to SEQ ID NO: 56275

SEQ ID NO: 56319 - DNA, 201 bp, Homo sapiens; identical to SEQ ID NO: 56276

SEQ ID NO: 56320 - DNA, 201 bp, Homo sapiens; identical to SEQ ID NO: 56277

SEQ ID NO: 56321 - DNA, 201 bp, Homo sapiens; identical to SEQ ID NO: 56278

SEQ ID NO: 56322 - DNA, 201 bp, Homo sapiens; identical to SEQ ID NO: 56300

SEQ ID NO: 56323 - DNA, 201 bp, Homo sapiens; identical to SEQ ID NO: 56301

SEQ ID NO: 56324 - DNA, 201 bp, Homo sapiens; identical to SEQ ID NO: 56302

SEQ ID NO: 56325 - DNA, 201 bp, Homo sapiens; identical to SEQ ID NO: 56282

SEQ ID NO: 56326 - DNA, 201 bp, Homo sapiens; identical to SEQ ID NO: 56283

SEQ ID NO: 56327 - DNA, 201 bp, Homo sapiens
gtgttttggaaagaattctgcagctgaactatacattgtttctaagaaggagaaggtgccttaactttccaagaaaatttactgcaggtgaaattgggtgmggatgcccccaattccagtgtggtgcatgtctccagtacagaaggaggtgacaacagtggcaatggtacccaggagaagatagctgagggagccacatgc

SEQ ID NO: 56328 - DNA, 201 bp, Homo sapiens
tggaaagaattctgcagctgaactatacattgtttctaagaaggagaaggtgccttaactttccaagaaaatttactgcaggtgaaattgggtgaggatgmccccaattccagtgtggtgcatgtctccagtacagaaggaggtgacaacagtggcaatggtacccaggagaagatagctgagggagccacatgccacctt

SEQ ID NO: 56329 - DNA, 201 bp, Homo sapiens
tttctaagaaggagaaggtgccttaactttccaagaaaatttactgcaggtgaaattgggtgaggatgcccccaattccagtgtggtgcatgtctccagtrcagaaggaggtgacaacagtggcaatggtacccaggagaagatagctgagggagccacatgccaccttcttgactttgccagccctgagcgcccactagt

SEQ ID NO: 56330 - DNA, 201 bp, Homo sapiens
tttagcaaagatggacacattttatgactagtatatgaagcttataaaagcagactactggtctactcacatttggatttatggatggtgaaattgggtgmggatgcccccaattccagtgtggtgcatgtctccagtacagaaggaggtgacaacagtggcaatggtacccaggagaagatagctgagggagccacatgc

SEQ ID NO: 56331 - DNA, 201 bp, Homo sapiens
aaagatggacacattttatgactagtatatgaagcttataaaagcagactactggtctactcacatttggatttatggatggtgaaattgggtgaggatgmccccaattccagtgtggtgcatgtctccagtacagaaggaggtgacaacagtggcaatggtacccaggagaagatagctgagggagccacatgccacctt

SEQ ID NO: 56332 - DNA, 201 bp, Homo sapiens
agcttataaaagcagactactggtctactcacatttggatttatggatggtgaaattgggtgaggatgcccccaattccagtgtggtgcatgtctccagtrcagaaggaggtgacaacagtggcaatggtacccaggagaagatagctgagggagccacatgccaccttcttgactttgccagccctgagcgcccactagt

SEQ ID NO: 56333 - DNA, 201 bp, Homo sapiens; identical to SEQ ID NO: 56262

SEQ ID NO: 56334 - DNA, 188 bp, Homo sapiens; identical to SEQ ID NO: 56264

SEQ ID NO: 56335 - DNA, 201 bp, Homo sapiens; identical to SEQ ID NO: 56286

SEQ ID NO: 56336 - DNA, 201 bp, Homo sapiens; identical to SEQ ID NO: 56266

SEQ ID NO: 56337 - DNA, 201 bp, Homo sapiens; identical to SEQ ID NO: 56288

SEQ ID NO: 56338 - DNA, 201 bp, Homo sapiens; identical to SEQ ID NO: 56268

SEQ ID NO: 56339 - DNA, 201 bp, Homo sapiens; identical to SEQ ID NO: 56269

SEQ ID NO: 56340 - DNA, 201 bp, Homo sapiens; identical to SEQ ID NO: 56270

SEQ ID NO: 56341 - DNA, 201 bp, Homo sapiens; identical to SEQ ID NO: 56271

SEQ ID NO: 56342 - DNA, 201 bp, Homo sapiens; identical to SEQ ID NO: 56272

SEQ ID NO: 56343 - DNA, 201 bp, Homo sapiens; identical to SEQ ID NO: 56273

SEQ ID NO: 56344 - DNA, 201 bp, Homo sapiens; identical to SEQ ID NO: 56274

SEQ ID NO: 56345 - DNA, 201 bp, Homo sapiens; identical to SEQ ID NO: 56275

SEQ ID NO: 56346 - DNA, 201 bp, Homo sapiens; identical to SEQ ID NO: 56276

SEQ ID NO: 56347 - DNA, 201 bp, Homo sapiens; identical to SEQ ID NO: 56277

SEQ ID NO: 56348 - DNA, 201 bp, Homo sapiens; identical to SEQ ID NO: 56278

SEQ ID NO: 56349 - DNA, 201 bp, Homo sapiens; identical to SEQ ID NO: 56279

SEQ ID NO: 56350 - DNA, 201 bp, Homo sapiens; identical to SEQ ID NO: 56280

SEQ ID NO: 56351 - DNA, 201 bp, Homo sapiens; identical to SEQ ID NO: 56281

SEQ ID NO: 56352 - DNA, 201 bp, Homo sapiens; identical to SEQ ID NO: 56282

SEQ ID NO: 56353 - DNA, 201 bp, Homo sapiens; identical to SEQ ID NO: 56283

SEQ ID NO: 56354 - DNA, 201 bp, Homo sapiens
actaccgcctggactccacactgggaatccacgtagacagatctgagctagatcactccaaacccttgctgtcattcagctttggacagtccgccatcttyctcctgggtggtcttcaaagggatgaggcccccacggccatgtttatgcacagtggtgacatcatgataatgtcgggtttcagccgcctcttgaaccacg

SEQ ID NO: 56355 - DNA, 201 bp, Homo sapiens
aaggcctgcctcactgcctagaggcacctctccctgctgtcctcccgagagattcaatggtagagccttgttctatggaggactggcaggtgtgtgccagytacttgaagaccgctcgtgttaacatgactgtccgacaggtcctggccacagaccagaatttccctctagaacccatcgaggatgaaaaaagagacatca

SEQ ID NO: 56356 - DNA, 201 bp, Homo sapiens
agaggcacctctccctgctgtcctcccgagagattcaatggtagagccttgttctatggaggactggcaggtgtgtgccagctacttgaagaccgctcgtrttaacatgactgtccgacaggtcctggccacagaccagaatttccctctagaacccatcgaggatgaaaaaagagacatcagtacagaaggtttctgcca

SEQ ID NO: 56357 - DNA, 201 bp, Homo sapiens
tatggaggactggcaggtgtgtgccagctacttgaagaccgctcgtgttaacatgactgtccgacaggtcctggccacagaccagaatttccctctagaayccatcgaggatgaaaaaagagacatcagtacagaaggtttctgccatctggatgaccagaatagcgaagtaaaacgggccaggataaaccctgacagctg

SEQ ID NO: 56358 - DNA, 201 bp, Homo sapiens
tgccgtggacttcagcacccagacaagccaaaaacagagacagggaagaactcattgttgatcacactgttgccttggaacccacgcagaagtaaactcakccactttgctcagagaagtgtttgacatggtctgttcctagttacatgttggctgtaatgtatgttgagaagtcagtccaaggaggtatgttcttccaca

SEQ ID NO: 56359 - DNA, 201 bp, Homo sapiens
tcgtgtccttccaaatccagaaggggaaggcctgcctcactgcctagaggcacctctccctgctgtcctcccgagagattcaatggtagagccttgttctwtggaggactggcaggtgtgtgccagctacttgaagaccgctcgtgttaacatgactgtccgacaggtcctggccacagaccagaatttccctctagaacc

SEQ ID NO: 56360 - DNA, 201 bp, Homo sapiens
atttgactgactatatcatggtccaggttactttacatttctctggacctcggtttcctcatcataaaatgaagatactgtagactaccatcttcctaaarggatattggtatttgaaagagaattaagtgctcctttctacaaacatgatgtgccaaaattgttttattataagggctctttgaaacatcctaacttcct

SEQ ID NO: 56361 - DNA, 201 bp, Homo sapiens
ttccaggctcagtattgtgaccgcggagccacaggggaccccacgcacattccgttgccttacccgatggcttgtgacgcggagagaaccgattaaaaccktttgagaaactcctcccttgtctagccctgtgttcgctgtggacgctgtagaggcaggttggccagtctgtacctggacttcgaataaatcttctgtatc

SEQ ID NO: 56362 - DNA, 201 bp, Homo sapiens
accaggcccagctggccatgagccacctgaacgggcacaagctgcacgggaagcccatccgcatcacgctctcgaagcaccagaacgtgcagctgccccgygagggccaggaggaccagggcctgaccaaggactacggcaactcacccctgcaccgcttcaagaagccgggctccaagaacttccagaacatattcccgc

SEQ ID NO: 56363 - DNA, 201 bp, Homo sapiens
gcgggcgtgtcgccgcctctggcatcgcctccggttgccttacaccacgccttcacctgcagtcgcctagaaaacttgctctcaaacttcagggttttttyttccttcaaattttggaccaaagtctcatttctgtgttttgcctgcctctgatgctgggacccggaaggcgggcgctcctcctgtcttctctgtgctctt

SEQ ID NO: 56364 - DNA, 201 bp, Homo sapiens
cggccctgcaggcggtgaactcggtccagtcggggaacctggccttggctgcctcggcggcggccgtggacgcagggatggcgatggccgggcagagcccygtgctcaggatcatcgtggagaacctcttctaccctgtgaccctggatgtgctgcaccagattttctccaagttcggcacagtgttgaagatcatcacct

SEQ ID NO: 56365 - DNA, 201 bp, Homo sapiens
gccccgaccacgacttggcttccttgtgccttaaaaaacctgccttcctgcagccacacacccacccggggtgtcctggggacccaaggggtgggggggtyacaccagagagaggcagggggcctggccggctcctgcaggatcatgcagctggggcgcggcggccgcggctgcgacaccccaaccccagccctctaatca

SEQ ID NO: 56366 - DNA, 201 bp, Homo sapiens
gtcgctggacgggcagaacatctacaacgcctgctgcacgctgcgcatcgacttttccaagctcaccagcctcaacgtcaagtacaacaatgacaagagcygtgactacacacgcccagacctgccttccggggacagccagccctcgctggaccagaccatggccgcggccttcggtgcacctggtataatctcagcctc

SEQ ID NO: 56367 - DNA, 201 bp, Homo sapiens
agaaaacttgctctcaaacttcagggttttttcttccttcaaattttggaccaaagtctcatttctgtgttttgcctgcctctgatgctgggacccggaargcgggcgctcctcctgtcttctctgtgctctttctaccgcccccgcgtcctgtcccgggggctctcctaggatcccctttccgtaaaagcgtgtaacaag

SEQ ID NO: 56368 - DNA, 201 bp, Homo sapiens
tcatctccctggggctgccctttgggaaggtcaccaacctcctgatgctgaaggggaaaaaccaggccttcatcgagatgaacacggaggaggctgccaayaccatggtgaactactacacctcggtgacccctgtgctgcgcggccagcccatctacatccagttctccaaccacaaggagctgaagaccgacagctctc

SEQ ID NO: 56369 - DNA, 201 bp, Homo sapiens
tcatcgagatgaacacggaggaggctgccaacaccatggtgaactactacacctcggtgacccctgtgctgcgcggccagcccatctacatccagttctcyaaccacaaggagctgaagaccgacagctctcccaaccaggcgcgggcccaggcggccctgcaggcggtgaactcggtccagtcggggaacctggccttgg

SEQ ID NO: 56370 - DNA, 201 bp, Homo sapiens
tctctacttgtgtcactaacggaccgtttatcatgagcagcaactcggcttctgcagcaaacggaaatgacagcaagaagttcaaaggtgacagccgaagygcaggcgtcccctctagagtgatccacatccggaagctccccatcgacgtcacggagggggaagtcatctccctggggctgccctttgggaaggtcacca

SEQ ID NO: 56371 - DNA, 201 bp, Homo sapiens
ggtgggcgccccgaccacgacttggcttccttgtgccttaaaaaacctgccttcctgcagccacacacccacccggggtgtcctggggacccaaggggtgrgggggtcacaccagagagaggcagggggcctggccggctcctgcaggatcatgcagctggggcgcggcggccgcggctgcgacaccccaaccccagccct

SEQ ID NO: 56372 - DNA, 201 bp, Homo sapiens
cccacggccgggccccctggcgacaacttccatcattccagagaaaagccactttaaaaacagctgaagtgaccttagcagaccagagattttattttttwaaagagaaatcagtttacctgtttttaaaaaaattaaatctagttcaccttgctcaccctgcggtgacagggacagctcaggctcttggtgactgtggca

SEQ ID NO: 56373 - DNA, 201 bp, Homo sapiens
tttatggtgacacaaatgtatattttgctaacagcaattccaggctcagtattgtgaccgcggagccacaggggaccccacgcacattccgttgccttacycgatggcttgtgacgcggagagaaccgattaaaaccgtttgagaaactcctcccttgtctagccctgtgttcgctgtggacgctgtagaggcaggttggc

SEQ ID NO: 56374 - DNA, 201 bp, Homo sapiens
acagctctcccaaccaggcgcgggcccaggcggccctgcaggcggtgaactcggtccagtcggggaacctggccttggctgcctcggcggcggccgtggaygcagggatggcgatggccgggcagagccccgtgctcaggatcatcgtggagaacctcttctaccctgtgaccctggatgtgctgcaccagattttctcca

SEQ ID NO: 56375 - DNA, 201 bp, Homo sapiens
aggaccagggcctgaccaaggactacggcaactcacccctgcaccgcttcaagaagccgggctccaagaacttccagaacatattcccgccctcggccackctgcacctctccaacatcccgccctcagtctccgaggaggatctcaaggtcctgttttccagcaatgggggcgtcgtcaaaggattcaagttcttccaga

SEQ ID NO: 56376 - DNA, 201 bp, Homo sapiens
agaagccgggctccaagaacttccagaacatattcccgccctcggccacgctgcacctctccaacatcccgccctcagtctccgaggaggatctcaaggtmctgttttccagcaatgggggcgtcgtcaaaggattcaagttcttccagaaggaccgcaagatggcactgatccagatgggctccgtggaggaggcggtcc

SEQ ID NO: 56377 - DNA, 201 bp, Homo sapiens
tgttcaataagaaggagaacgccctagtgcagatggcggacggcaaccaggcccagctggccatgagccacctgaacgggcacaagctgcacgggaagccsatccgcatcacgctctcgaagcaccagaacgtgcagctgccccgcgagggccaggaggaccagggcctgaccaaggactacggcaactcacccctgcacc

SEQ ID NO: 56378 - DNA, 201 bp, Homo sapiens; identical to SEQ ID NO: 56361

SEQ ID NO: 56379 - DNA, 201 bp, Homo sapiens; identical to SEQ ID NO: 56362

SEQ ID NO: 56380 - DNA, 201 bp, Homo sapiens; identical to SEQ ID NO: 56363

SEQ ID NO: 56381 - DNA, 201 bp, Homo sapiens; identical to SEQ ID NO: 56364

SEQ ID NO: 56382 - DNA, 201 bp, Homo sapiens; identical to SEQ ID NO: 56365

SEQ ID NO: 56383 - DNA, 201 bp, Homo sapiens
gtcgctggacgggcagaacatctacaacgcctgctgcacgctgcgcatcgacttttccaagctcaccagcctcaacgtcaagtacaacaatgacaagagcygtgactacacacgcccagacctgccttccggggacagccagccctcgctggaccagaccatggccgcggccttcgcctctccgtatgcaggagctggttt

SEQ ID NO: 56384 - DNA, 201 bp, Homo sapiens; identical to SEQ ID NO: 56367

SEQ ID NO: 56385 - DNA, 201 bp, Homo sapiens; identical to SEQ ID NO: 56368

SEQ ID NO: 56386 - DNA, 201 bp, Homo sapiens; identical to SEQ ID NO: 56369

SEQ ID NO: 56387 - DNA, 201 bp, Homo sapiens; identical to SEQ ID NO: 56370

SEQ ID NO: 56388 - DNA, 201 bp, Homo sapiens; identical to SEQ ID NO: 56371

SEQ ID NO: 56389 - DNA, 201 bp, Homo sapiens; identical to SEQ ID NO: 56372

SEQ ID NO: 56390 - DNA, 201 bp, Homo sapiens; identical to SEQ ID NO: 56373

SEQ ID NO: 56391 - DNA, 201 bp, Homo sapiens; identical to SEQ ID NO: 56374

SEQ ID NO: 56392 - DNA, 201 bp, Homo sapiens; identical to SEQ ID NO: 56375

SEQ ID NO: 56393 - DNA, 201 bp, Homo sapiens; identical to SEQ ID NO: 56376

SEQ ID NO: 56394 - DNA, 201 bp, Homo sapiens; identical to SEQ ID NO: 56377

SEQ ID NO: 56395 - DNA, 201 bp, Homo sapiens; identical to SEQ ID NO: 56361

SEQ ID NO: 56396 - DNA, 201 bp, Homo sapiens; identical to SEQ ID NO: 56362

SEQ ID NO: 56397 - DNA, 201 bp, Homo sapiens; identical to SEQ ID NO: 56363

SEQ ID NO: 56398 - DNA, 201 bp, Homo sapiens; identical to SEQ ID NO: 56364

SEQ ID NO: 56399 - DNA, 201 bp, Homo sapiens; identical to SEQ ID NO: 56365

SEQ ID NO: 56400 - DNA, 201 bp, Homo sapiens
gtcgctggacgggcagaacatctacaacgcctgctgcacgctgcgcatcgacttttccaagctcaccagcctcaacgtcaagtacaacaatgacaagagcygtgactacacacgcccagacctgccttccggggacagccagccctcgctggaccagaccatggccgcggccttcggcctttccgttccgaacgtccacgg

SEQ ID NO: 56401 - DNA, 201 bp, Homo sapiens; identical to SEQ ID NO: 56367

SEQ ID NO: 56402 - DNA, 201 bp, Homo sapiens; identical to SEQ ID NO: 56368

SEQ ID NO: 56403 - DNA, 201 bp, Homo sapiens; identical to SEQ ID NO: 56369

SEQ ID NO: 56404 - DNA, 201 bp, Homo sapiens; identical to SEQ ID NO: 56370

SEQ ID NO: 56405 - DNA, 201 bp, Homo sapiens; identical to SEQ ID NO: 56371

SEQ ID NO: 56406 - DNA, 201 bp, Homo sapiens; identical to SEQ ID NO: 56372

SEQ ID NO: 56407 - DNA, 201 bp, Homo sapiens; identical to SEQ ID NO: 56373

SEQ ID NO: 56408 - DNA, 201 bp, Homo sapiens; identical to SEQ ID NO: 56374

SEQ ID NO: 56409 - DNA, 201 bp, Homo sapiens; identical to SEQ ID NO: 56375

SEQ ID NO: 56410 - DNA, 201 bp, Homo sapiens; identical to SEQ ID NO: 56376

SEQ ID NO: 56411 - DNA, 201 bp, Homo sapiens; identical to SEQ ID NO: 56377

SEQ ID NO: 56412 - DNA, 201 bp, Homo sapiens
gggccatccagcactggctgaccgagagtgcccgcctcatctcccacatgggctctgtggtggagtgggtcacacccctgggcgtccccgtcatccagccstatcgcctggactccaaggtcaagcaaataggaggtggaattcagagcatcacctacacccacaacggagacatcagccgaaagcccaacacacgtaagc

SEQ ID NO: 56413 - DNA, 201 bp, Homo sapiens
ggttgaaggcgaagctgcagatgccattccagagcggggagttcaaggcgctgaccaggcgcctgcaggtggagccccggctcctgagcaagcagatggcygggtgcctggaggactgcacgcgccaggcccccgagagcccctgggaggagcagctggcccggctgctgcaggaggcccctgggaagctgagcctcgatg

SEQ ID NO: 56414 - DNA, 201 bp, Homo sapiens
cgctggacatgtacaacgccgtgatgcttggctgggcgcggcagggtgccttcaaggagctggtatatgtgttattcatggtgaaggatgccggcttgacyccggacctgctgtcctatgcggctgccctccagtgcatggggaggcaggaccaggacgccgggaccatcgaaaggtgtctggaacagatgagccaggagg

SEQ ID NO: 56415 - DNA, 201 bp, Homo sapiens
cagccctggcccctgccagtgcagatggagctgggcaagctgctggcggagatgctggtgcaggctacgcagatgccatgcagcctggacaagccgcatcrttcctctcggcttgtccccgtgctctaccacgtgtattccttccgcaacgtccagcagatcggcatcctgaagccgcacccggcctacgtgcagctgctg

SEQ ID NO: 56416 - DNA, 201 bp, Homo sapiens
caggtgcaggcgctgcagaaccactacaggaagtacctctgcttgctggcctccgacgccgaggtgcccgagccctgcctgccgcggcagtactgggaggmgctgggggcgcccgaggccctgcgggagcagccctggcccctgccagtgcagatggagctgggcaagctgctggcggagatgctggtgcaggctacgcag

SEQ ID NO: 56417 - DNA, 201 bp, Homo sapiens
tgcccccagctaggcgtgccggccccgccctccgaggcgccccagccgcccgaggcccacctgccgcacagcgccgcgcccgcccgcaaggccgagctgcrccgtgagctggcgcactgccagaaggtggcccgggagatgcacagcctgcgggcggaggcgctgtaccgcctctcgctggcgcagcacctgcgggaccgc

SEQ ID NO: 56418 - DNA, 201 bp, Homo sapiens
ttgctggggccgcggagcggcggggctcaaacgagccctacggccttgcggccgcccgggactccccggcaaagaagggaccgccggtggcgtctgcggcyccaggaggagctcgtccgccagcccccaggagcaagaccaagaccgcaggaaggactggggccacgtggagctgctggaggtgctccaggcgcgggtgcg

SEQ ID NO: 56419 - DNA, 201 bp, Homo sapiens
agcggggcatgcgggtggcacaggtgctggaaggtttcatcacccgcaaggtggtgaagcagacggtgatgacggtggtgtacggggtcacgcgctatggygggcgcctgcagattgagaagcgcctccgggagctgagcgactttccccaggagttcgtgtgggaggcctctcactatctcgtacgccaggtcttcaaga

SEQ ID NO: 56420 - DNA, 201 bp, Homo sapiens
aggccccgtcggggcagcactcgcaggcccagctctcaggtcagcagcagaggctcctggccttcttcaagtgctgcctgctcactgaccagctgcccctygcccaccacctgctggtcgtccaccacggccagcggcagaagcggaagctgctcacgctggacatgtacaacgccgtgatgcttggctgggcgcggcagg

SEQ ID NO: 56421 - DNA, 201 bp, Homo sapiens
gggtcacacccctgggcgtccccgtcatccagccctatcgcctggactccaaggtcaagcaaataggaggtggaattcagagcatcacctacacccacaayggagacatcagccgaaagcccaacacacgtaagcagaagaacggcttcccgcccaacttcatccactcgctggactcctcccacatgatgctcaccgccc

SEQ ID NO: 56422 - DNA, 201 bp, Homo sapiens
tggacgagcgcgaggtggtgcggatgctcctgcaggtcctgcaggcgctgcccgcccaaggtgagtccttcaccaccctggcccgggagctgagtgcgcgyactttcagccggcacgtggtgcagaggcagcgggtcagtggccaggtgcaggcgctgcagaaccactacaggaagtacctctgcttgctggcctccgacg

SEQ ID NO: 56423 - DNA, 201 bp, Homo sapiens
agctcttccaggccaagggctgcccccagctaggcgtgccggccccgccctccgaggcgccccagccgcccgaggcccacctgccgcacagcgccgcgccygcccgcaaggccgagctgcgccgtgagctggcgcactgccagaaggtggcccgggagatgcacagcctgcgggcggaggcgctgtaccgcctctcgctgg

SEQ ID NO: 56424 - DNA, 201 bp, Homo sapiens
cccggtcaacacctccaagctgctcagggacgtgtatgccaaggatgggcgtgtgtcctacccgaagctgcacctgcccttgaagaccctgcagtgcctcyttgagaagcagctccacatggagctggccagcagggtgtgcgtggtgtccgtggagaagcccacgttgccaagcaaggaggtcaagcacgcgcggaagac

SEQ ID NO: 56425 - DNA, 201 bp, Homo sapiens
tccccgtgctctaccacgtgtattccttccgcaacgtccagcagatcggcatcctgaagccgcacccggcctacgtgcagctgctggagaaggccgcggarcccacgctgaccttcgaggcggtggatgtacccatgctttgccccccgctgccctggacatcgccgcactctggtgctttcctgctcagccccaccaagc

SEQ ID NO: 56426 - DNA, 201 bp, Homo sapiens
cgctgcagaaccactacaggaagtacctctgcttgctggcctccgacgccgaggtgcccgagccctgcctgccgcggcagtactgggaggagctgggggcscccgaggccctgcgggagcagccctggcccctgccagtgcagatggagctgggcaagctgctggcggagatgctggtgcaggctacgcagatgccatgca

SEQ ID NO: 56427 - DNA, 201 bp, Homo sapiens
agctgctggagaaggccgcggagcccacgctgaccttcgaggcggtggatgtacccatgctttgccccccgctgccctggacatcgccgcactctggtgcyttcctgctcagccccaccaagctgatgcgcacggtggaaggcgccacgcagcaccaggagctgctggaaacctgcccgcccaccgcgctgcatggcgcac

SEQ ID NO: 56428 - DNA, 201 bp, Homo sapiens
gggccatccagcactggctgaccgagagtgcccgcctcatctcccacatgggctctgtggtggagtgggtcacacccctgggcgtccccgtcatccagccstatcgcctggactccaaggtcaaggaggtggaattcagagcatcacctacacccacaacggagacatcagccgaaagcccaacacacgtaagcagaagaa

SEQ ID NO: 56429 - DNA, 201 bp, Homo sapiens; identical to SEQ ID NO: 56413

SEQ ID NO: 56430 - DNA, 201 bp, Homo sapiens; identical to SEQ ID NO: 56414

SEQ ID NO: 56431 - DNA, 201 bp, Homo sapiens; identical to SEQ ID NO: 56415

SEQ ID NO: 56432 - DNA, 201 bp, Homo sapiens; identical to SEQ ID NO: 56416

SEQ ID NO: 56433 - DNA, 201 bp, Homo sapiens
gcccgcttttcgactgaggctcctccgtgcagtctgacctttgactcgtggtttcttatgcagcctcctgaccccagggaccgccggtggcgtctgcggcyccaggaggagctcgtccgccagcccccaggagcaagaccaagaccgcaggaaggactggggccacgtggagctgctggaggtgctccaggcgcgggtgcg

SEQ ID NO: 56434 - DNA, 201 bp, Homo sapiens; identical to SEQ ID NO: 56417

SEQ ID NO: 56435 - DNA, 201 bp, Homo sapiens; identical to SEQ ID NO: 56419

SEQ ID NO: 56436 - DNA, 201 bp, Homo sapiens; identical to SEQ ID NO: 56420

SEQ ID NO: 56437 - DNA, 201 bp, Homo sapiens
gtggagtgggtcacacccctgggcgtccccgtcatccagccctatcgcctggactccaaggtcaaggaggtggaattcagagcatcacctacacccacaayggagacatcagccgaaagcccaacacacgtaagcagaagaacggcttcccgcccaacttcatccactcgctggactcctcccacatgatgctcaccgccc

SEQ ID NO: 56438 - DNA, 201 bp, Homo sapiens; identical to SEQ ID NO: 56422

SEQ ID NO: 56439 - DNA, 201 bp, Homo sapiens; identical to SEQ ID NO: 56423

SEQ ID NO: 56440 - DNA, 201 bp, Homo sapiens; identical to SEQ ID NO: 56424

SEQ ID NO: 56441 - DNA, 201 bp, Homo sapiens; identical to SEQ ID NO: 56425

SEQ ID NO: 56442 - DNA, 201 bp, Homo sapiens; identical to SEQ ID NO: 56426

SEQ ID NO: 56443 - DNA, 201 bp, Homo sapiens; identical to SEQ ID NO: 56427

SEQ ID NO: 56444 - DNA, 201 bp, Homo sapiens
gatacagaagatttattcgaagtccaggtacagactggccaacctgcctctacagcgtccacagcgaacacagggctagacaagggaggagtttctcaaamggttttaatcggttctctccgcgtcacaagccatcgggtaaggcaacggaatgtgcgtggggtcccctgtggctccgcggtcacaatactgagcctggaa

SEQ ID NO: 56445 - DNA, 201 bp, Homo sapiens
tcttcgcctttgccatcgccgcgggcgtatgcgggctcacgcagatcacgcagtaccgcagccaccctgtggacgtgtatgccggcttcctcatcggggcrggcatcgctgcctacctggcctgccacgcggtgggcaacttccaggccccacctgcagagaagcccgcggccccggcccccgccaaggacgcgctgcggg

SEQ ID NO: 56446 - DNA, 201 bp, Homo sapiens
gcactctctccatgccctacgtggagaccaacgaggagctcatcccgctgctgatgctgctcagcttggccttcgcggcccctgccgcctcgatcatggtrgccgagggcatgttgtactgtctgcagtcccggctgtggggccgtgccggggggcccgccggggcggagggcagcatcaacgccggcggctgcaacttca

SEQ ID NO: 56447 - DNA, 201 bp, Homo sapiens
cccttcttcctcaccgtctgcaagcccaactacactctcctgggcacgtcctgcgaggtcaacccctacatcacgcaggacatctgctccggccacgacayccacgccatcctgtctgcacggaagaccttcccgtcccagcacgccacgctgtcagccttcgccgcggtctatgtgtcgatgtacttcaactcggtcatc

SEQ ID NO: 56448 - DNA, 201 bp, Homo sapiens
ccccaccgtgcaggcgcggccggggctggggcctcgggtcatcctcccaccgcgcgcggggccgccgccgctggtgcacatcccggaggagggcgcgcagrcgggggccggcctgtcccccaaaagcggcgccggggtgcgcgccaagtggctcatgatggccgagaagagcggggcggcagtggccaaccctccgcggct

SEQ ID NO: 56449 - DNA, 201 bp, Homo sapiens
cgtgtatgccggcttcctcatcggggcgggcatcgctgcctacctggcctgccacgcggtgggcaacttccaggccccacctgcagagaagcccgcggccycggcccccgccaaggacgcgctgcgggccctgacgcagcggggccacgactcggtttatcagcagaataagtcggtgagcaccgacgagctggggccccc

SEQ ID NO: 56450 - DNA, 201 bp, Homo sapiens
gccaacctgcctctacagcgtccacagcgaacacagggctagacaagggaggagtttctcaaacggttttaatcggttctctccgcgtcacaagccatcgrgtaaggcaacggaatgtgcgtggggtcccctgtggctccgcggtcacaatactgagcctggaattgctgttagcaaaatatacatttgtgtcaccataaa

SEQ ID NO: 56451 - DNA, 201 bp, Homo sapiens
gccaccgtcaacctggccacgggcgaggggctgcccccgctgggcgcggccgatggggcgctgggcccgggcagccgggagtccacgctgcggcgccacgygggcggcctggggctggcggagcgcgaggcggaggcggaggccgagggctacttccgcaagatgcaggcgcgccgcttccccgactagcgcggcggggcc

SEQ ID NO: 56452 - DNA, 201 bp, Homo sapiens
gcggggccaaggcggaggccgacggcggctacgagctgggggacctggcgcgcggcttccgcggcggggccaagcccccgggcgtgtcccccggctcgtcsgtcagcgacgtggaccaggaggagccgcggttcggggccgtggccaccgtcaacctggccacgggcgaggggctgcccccgctgggcgcggccgatgggg

SEQ ID NO: 56453 - DNA, 201 bp, Homo sapiens
agccttcgccgcggtctatgtgtcgatgtacttcaactcggtcatctcggacaccaccaagctgctgaagcccatcctggtcttcgcctttgccatcgccrcgggcgtatgcgggctcacgcagatcacgcagtaccgcagccaccctgtggacgtgtatgccggcttcctcatcggggcgggcatcgctgcctacctggc

SEQ ID NO: 56454 - DNA, 186 bp, Homo sapiens
aagtggctcatgatggccgagaagagcggggcggcagtggccaaccctccgcggctgctgcaggtcatcgccatccgggagtccacgctgcggcgccacgygggcggcctggggctggcggagcgcgaggcggaggcggaggccgagggctacttccgcaagatgcaggcgcgccgcttccccgac

SEQ ID NO: 56455 - DNA, 201 bp, Homo sapiens; identical to SEQ ID NO: 56445

SEQ ID NO: 56456 - DNA, 201 bp, Homo sapiens; identical to SEQ ID NO: 56446

SEQ ID NO: 56457 - DNA, 201 bp, Homo sapiens; identical to SEQ ID NO: 56447

SEQ ID NO: 56458 - DNA, 201 bp, Homo sapiens; identical to SEQ ID NO: 56453

SEQ ID NO: 56459 - DNA, 201 bp, Homo sapiens; identical to SEQ ID NO: 56448

SEQ ID NO: 56460 - DNA, 201 bp, Homo sapiens; identical to SEQ ID NO: 56449

SEQ ID NO: 56461 - DNA, 201 bp, Homo sapiens; identical to SEQ ID NO: 56444

SEQ ID NO: 56462 - DNA, 201 bp, Homo sapiens; identical to SEQ ID NO: 56445

SEQ ID NO: 56463 - DNA, 201 bp, Homo sapiens; identical to SEQ ID NO: 56446

SEQ ID NO: 56464 - DNA, 201 bp, Homo sapiens
cccttcttcctcaccgtctgcaagcccaactacactctcctgggcacgtcctgcgaggtcaacccctacatcacgcaggacatctgctccggccacgacayccacgccatcctgtctgcacggaagaccttcccgtcccagcacgccacgctgtcagccttcgccgcggtctatgtgtcggtgagtccggcccctcactgc

SEQ ID NO: 56465 - DNA, 201 bp, Homo sapiens; identical to SEQ ID NO: 56448

SEQ ID NO: 56466 - DNA, 201 bp, Homo sapiens; identical to SEQ ID NO: 56449

SEQ ID NO: 56467 - DNA, 201 bp, Homo sapiens; identical to SEQ ID NO: 56450

SEQ ID NO: 56468 - DNA, 201 bp, Homo sapiens
gccacgacatccacgccatcctgtctgcacggaagaccttcccgtcccagcacgccacgctgtcagccttcgccgcggtctatgtgtcggtgagtccggcmcctcactgcccttcccaggccctcttgctgacccgtggggagccctccctgaccccaacccccatgccccagatgtacttcaactcggtcatctcggaca

SEQ ID NO: 56469 - DNA, 201 bp, Homo sapiens; identical to SEQ ID NO: 56451

SEQ ID NO: 56470 - DNA, 201 bp, Homo sapiens; identical to SEQ ID NO: 56452

SEQ ID NO: 56471 - DNA, 201 bp, Homo sapiens
cctgaccccaacccccatgccccagatgtacttcaactcggtcatctcggacaccaccaagctgctgaagcccatcctggtcttcgcctttgccatcgccrcgggcgtatgcgggctcacgcagatcacgcagtaccgcagccaccctgtggacgtgtatgccggcttcctcatcggggcgggcatcgctgcctacctggc

SEQ ID NO: 56472 - DNA, 201 bp, Homo sapiens; identical to SEQ ID NO: 56444

SEQ ID NO: 56473 - DNA, 201 bp, Homo sapiens; identical to SEQ ID NO: 56445

SEQ ID NO: 56474 - DNA, 201 bp, Homo sapiens; identical to SEQ ID NO: 56446

SEQ ID NO: 56475 - DNA, 201 bp, Homo sapiens; identical to SEQ ID NO: 56464

SEQ ID NO: 56476 - DNA, 201 bp, Homo sapiens; identical to SEQ ID NO: 56448

SEQ ID NO: 56477 - DNA, 201 bp, Homo sapiens; identical to SEQ ID NO: 56449

SEQ ID NO: 56478 - DNA, 201 bp, Homo sapiens; identical to SEQ ID NO: 56450

SEQ ID NO: 56479 - DNA, 201 bp, Homo sapiens; identical to SEQ ID NO: 56468

SEQ ID NO: 56480 - DNA, 201 bp, Homo sapiens; identical to SEQ ID NO: 56451

SEQ ID NO: 56481 - DNA, 201 bp, Homo sapiens; identical to SEQ ID NO: 56452

SEQ ID NO: 56482 - DNA, 201 bp, Homo sapiens; identical to SEQ ID NO: 56471

SEQ ID NO: 56483 - DNA, 201 bp, Homo sapiens
cgctgctgctggagctcaaggggctgcaggaagagccggtcgagggattccgcgtgacactggtggacgagggcgatctatacaactgggaggtggccatyttcgggccccccaacacctactacgagggcggctacttcaaggcgcgcctcaagttccccatcgactacccatactctccaccagcctttcggttcctga

SEQ ID NO: 56484 - DNA, 189 bp, Homo sapiens
ggccgtttcctgacactaccagcctgggaggcccaggtgtagcggtccgaggggcccggtcctgcctgtcagctccaggtcctggagccacgtccagcacwgagtggacggattcaccgtggccgactcttttccctgctttggtttgtttgaaatctaaataaaactactttatgagaggccagagaa

SEQ ID NO: 56485 - DNA, 201 bp, Homo sapiens
gccgacagctgcttcggggacgatgaggatgactctggcacggaggagtcctgacaccaccagaataaacttgccgagtttacctcactagggccggaccmgtggctccttagacgacagactacctcacggaggttttgtgctggtccccgtctcctctggttgtttcgttttggctttttctccctccccatgtctgtt

SEQ ID NO: 56486 - DNA, 201 bp, Homo sapiens
actagggccggacccgtggctccttagacgacagactacctcacggaggttttgtgctggtccccgtctcctctggttgtttcgttttggctttttctccytccccatgtctgttctgggttttcacgtgcttcagagaagaggggctgccccaccgccactcacgtcactcggggctcggtggacgggcccagggtggga

SEQ ID NO: 56487 - DNA, 201 bp, Homo sapiens
agtggaaagagagcaaggggaaggatcgggagtacacagacatcatccggaagcaggtcctggggaccaaggtggacgcggagcgtgacggcgtgaaggtscccaccacgctggccgagtactgcgtgaagaccaaggcgccggcgcccgacgagggctcagacctcttctacgacgactactacgaggacggcgaggtgg

SEQ ID NO: 56488 - DNA, 201 bp, Homo sapiens
cggccggcccacctgtcccctcgggaggggagctgagcccgacttctaccggggtcccccagcttccggactggccgcaccccggaggagccacgggggcrctgctgggaacgtgggcggggggccgtttcctgacactaccagcctgggaggcccaggtgtagcggtccgaggggcccggtcctgcctgtcagctccagg

SEQ ID NO: 56489 - DNA, 201 bp, Homo sapiens
agctgagcccgacttctaccggggtcccccagcttccggactggccgcaccccggaggagccacgggggcgctgctgggaacgtgggcggggggccgtttyctgacactaccagcctgggaggcccaggtgtagcggtccgaggggcccggtcctgcctgtcagctccaggtcctggagccacgtccagcacagagtggac

SEQ ID NO: 56490 - DNA, 201 bp, Homo sapiens; identical to SEQ ID NO: 56483

SEQ ID NO: 56491 - DNA, 183 bp, Homo sapiens
ggccgtttcctgacactaccagcctgggaggcccaggtgtagcggtccgaggggcccggtcctgcctgtcagctccaggtcctggagccacgtccagcacwgagtggacggattcaccgtggccgactcttttccctgctttggtttgtttgaaatctaaataaaactactttatgagaggcc

SEQ ID NO: 56492 - DNA, 201 bp, Homo sapiens; identical to SEQ ID NO: 56487

SEQ ID NO: 56493 - DNA, 201 bp, Homo sapiens
ggaggaggccgacagctgcttcggggacgatgaggatgactctggcacggaggagtcctgacaccaccagaataaacttgccgagtttacctcagggggcrctgctgggaacgtgggcggggggccgtttcctgacactaccagcctgggaggcccaggtgtagcggtccgaggggcccggtcctgcctgtcagctccagg

SEQ ID NO: 56494 - DNA, 201 bp, Homo sapiens
tgaggatgactctggcacggaggagtcctgacaccaccagaataaacttgccgagtttacctcagggggcgctgctgggaacgtgggcggggggccgtttyctgacactaccagcctgggaggcccaggtgtagcggtccgaggggcccggtcctgcctgtcagctccaggtcctggagccacgtccagcacagagtggac

SEQ ID NO: 56495 - DNA, 201 bp, Homo sapiens
ggaaccattacctcaaagacattgaacgaatgtatgggggcaaataaaatgttgttgtcttattgacagttgtgcaggaggtagcctggtggttttcaacytctagaattttaagcctttgttgaactgttagaatgtaaggtatatcattctaaagatagagtaaaaagaaaacaaaaccaaaagttattaaaattgttg

SEQ ID NO: 56496 - DNA, 201 bp, Homo sapiens
atgtattaaattacatttgtaatttaaggtctgtttgctgttgctgattttattcttgatcagtagtttgcatttcagaaagcctttcattttgctttaaktttagcaaagcgggttataatgaatgacttccccaatatcttgcttgaacttacaggtgattaacttggatgagttttgggaagttaaagggaagaaaac

SEQ ID NO: 56497 - DNA, 201 bp, Homo sapiens
aacagcagaagattattctgtggatgaaaatggacaaaggtggttttgcactggtgatattggagaattccatcccgatggatgtttacagattatagatmgtaagaaagatctagtgaagttacaagcaggagagtatgtatctcttgggaaagtagaagctgcactgaagaattgtccacttattgacaacatctgtgc

SEQ ID NO: 56498 - DNA, 201 bp, Homo sapiens
cttgcctttggctcatgtgctagaactgacagcagagatatcttgctttacctatggctgcaggattggatattcttctccgcttacactctctgaccagkccagcaaaattaaaaaaggaagcaaaggagactgtactgtactgaagcccacacttatggctgctgttccggaaatcatggatagaatttataagaatgt

SEQ ID NO: 56499 - DNA, 201 bp, Homo sapiens
agaattttaagcctttgttgaactgttagaatgtaaggtatatcattctaaagatagagtaaaaagaaaacaaaaccaaaagttattaaaattgttgtccrgtttactttaacttagttttgcatagttctagtgcagctgaaattgaaaagttatttccctttagctgtgttattatagagcagaaattctgtttttaaa

SEQ ID NO: 56500 - DNA, 201 bp, Homo sapiens; identical to SEQ ID NO: 56495

SEQ ID NO: 56501 - DNA, 201 bp, Homo sapiens; identical to SEQ ID NO: 56496

SEQ ID NO: 56502 - DNA, 201 bp, Homo sapiens; identical to SEQ ID NO: 56497

SEQ ID NO: 56503 - DNA, 201 bp, Homo sapiens
ataagcaccattttagaagcctttccactatgaaacttaagctaaatgtgctcaccattattttgctgcctgtccacttgttaataacaatatacagtgcycttatatttattccatggtattttcttaccaatgccaagaagaaaaacgctatggcaaagagaataaaagctaagcccacttcagacaaacctggaagtc

SEQ ID NO: 56504 - DNA, 201 bp, Homo sapiens; identical to SEQ ID NO: 56498

SEQ ID NO: 56505 - DNA, 201 bp, Homo sapiens; identical to SEQ ID NO: 56499

SEQ ID NO: 56506 - DNA, 201 bp, Homo sapiens; identical to SEQ ID NO: 56495

SEQ ID NO: 56507 - DNA, 201 bp, Homo sapiens; identical to SEQ ID NO: 56496

SEQ ID NO: 56508 - DNA, 201 bp, Homo sapiens; identical to SEQ ID NO: 56497

SEQ ID NO: 56509 - DNA, 201 bp, Homo sapiens; identical to SEQ ID NO: 56503

SEQ ID NO: 56510 - DNA, 201 bp, Homo sapiens; identical to SEQ ID NO: 56498

SEQ ID NO: 56511 - DNA, 201 bp, Homo sapiens; identical to SEQ ID NO: 56499

SEQ ID NO: 56512 - DNA, 201 bp, Homo sapiens
cgttgtttggaaccatctacaattcaatttactttatcgcacaagccatgaataatgctatgaaagaaaatggacaggctggtgctgccagcctggttcakcattccagaaacatgcagttccatggattcaaccagttgatgaggacagattcaaatggaaatggaatttcagaatatgtaatcctggacaccaacttga

SEQ ID NO: 56513 - DNA, 201 bp, Homo sapiens
cgcttttctcgccttgttctctggtttgcggctttcaggaaactgctgggacaccatggccttgcatctgccaagttcctgtggtgcttgtgccttctgtstgtcatgtcccttccgcagcaggtgtggacactcccctacaagataggggtggtgggcccttgggcttgtgattcgctgttttcaaaggccctgcctgag

SEQ ID NO: 56514 - DNA, 201 bp, Homo sapiens
tgtcatgtcccttccgcagcaggtgtggacactcccctacaagataggggtggtgggcccttgggcttgtgattcgctgttttcaaaggccctgcctgagsttgctgcgcgattagccattgagcgaatcaaccgggacccatcttttgacctgagttattcttttgaatacgtgattctcaatgaagactgccagacttc

SEQ ID NO: 56515 - DNA, 201 bp, Homo sapiens
tggaatttgtcaacagactggagtccttgacaggattgtgaatgcatagaggatgcaaagaaatggacacactgaggtagctatgccagtggtctgcatgygcaggcagtaaactgaagacatttgagcggtgaattacttggcatttggaaacaccaccgtctgtgtcgggaaagcagaataactctccagtatctcgtc

SEQ ID NO: 56516 - DNA, 201 bp, Homo sapiens
accaaccctggctactgcgaggcagcctcgctcctgggaaacagctgggacaaaggaattttctcttgggcttgtgtgaattatgaattagacaataaaawtagctacccgaccttttctcggacactcccttctcccatccgggtgcttgtaactgtcatgaaatatttccagtgggctcatgctggagtcatttcctca

SEQ ID NO: 56517 - DNA, 201 bp, Homo sapiens
catttgggtgcatacagccaatcgagtcgcaagtgctcttcggagccacggcttacctgtaggggtcgtcctgaccacaggacaagacagccaaagcatgyggaaagccctccagaggattcaccaggcagacagaattcgcataatcatcatgtgtatgcattcagctttgattgggggagagactcagatgcatctctt

SEQ ID NO: 56518 - DNA, 201 bp, Homo sapiens
ttggaatgtgctcatgatctgaaaatgactgatggaacctacgtctttgttccttatgatgccctgctctacagtttaccttataagcacaccccctaccrggtcctaaggaacaacccaaagctccgggaagcctatgatgcagtgttgaccattacagtggagtcccaagaaaagaccttctatcaagccttcacagag

SEQ ID NO: 56519 - DNA, 201 bp, Homo sapiens
tcagctttgattgggggagagactcagatgcatctcttggaatgtgctcatgatctgaaaatgactgatggaacctacgtctttgttccttatgatgcccygctctacagtttaccttataagcacaccccctaccaggtcctaaggaacaacccaaagctccgggaagcctatgatgcagtgttgaccattacagtggag

SEQ ID NO: 56520 - DNA, 201 bp, Homo sapiens
aggaggtgcaggctctcctggaaggcacggggcggcaggcggtactcaagggcatgggcagcggccagttgcagaatctgggggcagcagtggccatcctkggggggcctggcaccgtgcagggggtggtgcgcttcctacagctgacccctgagcgctgcctcatcgagggaactattgacggcctggagcctgggctgc

SEQ ID NO: 56521 - DNA, 201 bp, Homo sapiens
cagggaactccggggagaggttggcctgtggcatcattgcacgctccgctggccttttccagaaccccaagcagatctgctcttgcgatggcctcaccatytgggaggagcgaggccggcccatcgctggcaagggccgaaaggagtcagcgcagccccctgcccacctttgagcaggacctcaccttggctctgttgctg

SEQ ID NO: 56522 - DNA, 201 bp, Homo sapiens
gccaggtgtccaggatgtggaggtgcacttggaggaccagatggtcttggtacacaccactctacccagccaggaggtgcaggctctcctggaaggcacgrggcggcaggcggtactcaagggcatgggcagcggccagttgcagaatctgggggcagcagtggccatcctgggggggcctggcaccgtgcagggggtggt

SEQ ID NO: 56523 - DNA, 201 bp, Homo sapiens
tgatgagggagaagatgacctgggccggggaggccatcccttatccaagatcacagggaactccggggagaggttggcctgtggcatcattgcacgctccsctggccttttccagaaccccaagcagatctgctcttgcgatggcctcaccatctgggaggagcgaggccggcccatcgctggcaagggccgaaaggagtc

SEQ ID NO: 56524 - DNA, 153 bp, Homo sapiens
gaattgctgtctgtttttctgttccctgctgccagcactgggtgccagcctcwgttgccctcttccctctctttcttgccaggtgtccaggatgtggaggtgcacttggaggaccagatggtcttggtacacaccactctacccagccaggag

SEQ ID NO: 56525 - DNA, 201 bp, Homo sapiens
gccttttccagaaccccaagcagatctgctcttgcgatggcctcaccatctgggaggagcgaggccggcccatcgctggcaagggccgaaaggagtcagcrcagccccctgcccacctttgagcaggacctcaccttggctctgttgctgtcctccagggcgagcactttccacttccagagggggccagagggactttgc

SEQ ID NO: 56526 - DNA, 201 bp, Homo sapiens
gcccttcccgagctgctgaagaggtgtgctgggtgaggtggcaagccagcccaagtgtctaataccttgcagagaatctgggggcagcagtggccatcctkggggggcctggcaccgtgcagggggtggtgcgcttcctacagctgacccctgagcgctgcctcatcgagggaactattgacggcctggagcctgggctgc

SEQ ID NO: 56527 - DNA, 201 bp, Homo sapiens; identical to SEQ ID NO: 56521

SEQ ID NO: 56528 - DNA, 201 bp, Homo sapiens
gccaggtgtccaggatgtggaggtgcacttggaggaccagatggtcttggtacacaccactctacccagccaggaggtgcaggctctcctggaaggcacgrggcggcaggcggtactcaagggcatgggcagcggccagttgcgtgagtgaccactgtggccttggcccctctcggagggaggtggctcagagctggtaca

SEQ ID NO: 56529 - DNA, 201 bp, Homo sapiens; identical to SEQ ID NO: 56523

SEQ ID NO: 56530 - DNA, 201 bp, Homo sapiens; identical to SEQ ID NO: 56525

SEQ ID NO: 56531 - DNA, 201 bp, Homo sapiens; identical to SEQ ID NO: 56521

SEQ ID NO: 56532 - DNA, 201 bp, Homo sapiens
gccaggtgtccaggatgtggaggtgcacttggaggaccagatggtcttggtacacaccactctacccagccaggaggtgcaggctctcctggaaggcacgrggcggcaggcggtactcaagggcatgcctgattattgatgagggagaagatgacctgggccggggaggccatcccttatccaagatcacagggaactccg

SEQ ID NO: 56533 - DNA, 201 bp, Homo sapiens; identical to SEQ ID NO: 56523

SEQ ID NO: 56534 - DNA, 201 bp, Homo sapiens; identical to SEQ ID NO: 56525

SEQ ID NO: 56535 - DNA, 201 bp, Homo sapiens
atggagctgctggcgcacctgctgggagagaagtggatgggccctatacctccagccgtgaatgccagactttaagattgcccggaggaagcaaactcttsgtataaaaaaagcaggccatctgcttaacccttggctccaccataaggcactgggactcggatttctctatctgatagaggtattttctgtggccctggg

SEQ ID NO: 56536 - DNA, 201 bp, Homo sapiens
tggagctgctggcgcacctgctgggagagaagtggatgggccctatacctccagccgtgaatgccagactttaagattgcccggaggaagcaaactcttcktataaaaaaagcaggccatctgcttaacccttggctccaccataaggcactgggactcggatttctctatctgatagaggtattttctgtggccctggga

SEQ ID NO: 56537 - DNA, 201 bp, Homo sapiens; identical to SEQ ID NO: 56535

SEQ ID NO: 56538 - DNA, 201 bp, Homo sapiens; identical to SEQ ID NO: 56536

SEQ ID NO: 56539 - DNA, 201 bp, Homo sapiens; identical to SEQ ID NO: 56535

SEQ ID NO: 56540 - DNA, 201 bp, Homo sapiens; identical to SEQ ID NO: 56536

SEQ ID NO: 56541 - DNA, 201 bp, Homo sapiens
agagctccagcagatcattgattgtctggataccagcattcctgagacaatccctggcagcaaccactctgtggctgaagcactgctcattttcttggaasccctgccagagccagtcatctgttacgagctgtatcagcgatgtcttgactctgcttatgatccccggatctgccgacaggtgatctcccagcttccgag

SEQ ID NO: 56542 - DNA, 201 bp, Homo sapiens
cttcttatatttgccagaaaggatcagtgtcgatacattcgtgatattgctacagaaacagttggaactggaatcatggggaaaatgggaaacaaaggtgrggtagctgtgagatttgtatttcacaacaccaccttttgcattgtcaattcccatctggctgcacacgtggaggactttgagagaaggaatcaagattat

SEQ ID NO: 56543 - DNA, 201 bp, Homo sapiens
agtggacatttctcttgatgtgtatgtcagcaaagactctgtaaccatcctgaactcgggagaagataagattgaagatattctcgtccttcacctggatygaggcaaagattacttcttgactatcagtggaaattacctcccaagttgttttggcacatccttagaggctctgtgccgtatgaaaagaccaatccgaga

SEQ ID NO: 56544 - DNA, 201 bp, Homo sapiens
cccacttataagtatgactctaaaacagaccggtgggattccagtgggaaatgccgggttccagcctggtgtgaccgaattctttggagaggaacaaatgwtaatcagcttaattatcggagtcacatggaactgaaaaccagcgaccacaagcctgttagcgccctcttccatattggggtgaaggttgtggatgaacga

SEQ ID NO: 56545 - DNA, 201 bp, Homo sapiens
atttggttgggagatttgaattatagactttgcatgcctgatgccaatgaggtgaaaagtcttattaataagaaagaccttcagagactcttgaaattcgrccagctaaatattcagcgcacacagaaaaaagcttttgttgacttcaatgaaggggaaatcaagttcatccccacttataagtatgactctaaaacagac

SEQ ID NO: 56546 - DNA, 201 bp, Homo sapiens
tgaagtttcggcaactacaaaaggagaagttccagatcagcaacaatggacaggttccctgccatttttctttcatccctaaacttaatgacagccagtastgcaagccatggcttcgggctgaaccttttgagggctacttggagccaaatgagacagtggacatttctcttgatgtgtatgtcagcaaagactctgtaa

SEQ ID NO: 56547 - DNA, 201 bp, Homo sapiens
ggatgtgtttgttgccctcctacccaattgtcatgattgtccttagtaccctaggcctagattctgagatcttcccattctaggcctacaagcactacttkctgtagctgagacttgtctagagtcctttgttttgcacttttgacccaccccttcctggatcactcctttgcactccactcccctcgttctgtcactttg

SEQ ID NO: 56548 - DNA, 201 bp, Homo sapiens
agcactgctcattttcttggaagccctgccagagccagtcatctgttacgagctgtatcagcgatgtcttgactctgcttatgatccccggatctgccgayaggtgatctcccagcttccgagatgccatagaaatgttttccgttacttgatggcattccttcgagaactcttaaaattctctgaatacaatagcgtcaa

SEQ ID NO: 56549 - DNA, 201 bp, Homo sapiens
cttttagacttatattgccaagccaaagttaccatattttggtgtttttgtgttttctctttataaggcaaaaagatctgtatttacactccttcacctarggatgtgtttgttgccctcctacccaattgtcatgattgtccttagtaccctaggcctagattctgagatcttcccattctaggcctacaagcactactt

SEQ ID NO: 56550 - DNA, 185 bp, Homo sapiens
ggtgacattgcattagtctccctttcactgttttcttattctgtaattgtttgttatatttcccaaaaacgtcttgatcactaagcaaagctgctagtggsattctatatttcgtgtcatcttttttattataatttattgcaaatttttttctgaataaatatatgttgtgtgaaaaagcaaag

SEQ ID NO: 56551 - DNA, 201 bp, Homo sapiens
caagattataaggacatttgtgcgagaatgagttttgtggtcccaaatcagaccctcccgcagttgaacatcatgaaacatgaggttgtcatttggttggragatttgaattatagactttgcatgcctgatgccaatgaggtgaaaagtcttattaataagaaagaccttcagagactcttgaaattcgaccagctaaat

SEQ ID NO: 56552 - DNA, 201 bp, Homo sapiens
gtagagagaggtttgcattccaaagccaagtataagaaagttcaactggtgcgccttgttgggatgatgcttcttatatttgccagaaaggatcagtgtcsatacattcgtgatattgctacagaaacagttggaactggaatcatggggaaaatgggaaacaaaggtggggtagctgtgagatttgtatttcacaacacc

SEQ ID NO: 56553 - DNA, 201 bp, Homo sapiens
tggataccagcattcctgagacaatccctggcagcaaccactctgtggctgaagcactgctcattttcttggaagccctgccagagccagtcatctgttasgagctgtatcagcgatgtcttgactctgcttatgatccccggatctgccgacaggtgatctcccagcttccgagatgccatagaaatgttttccgttact

SEQ ID NO: 56554 - DNA, 201 bp, Homo sapiens
attgctacagaaacagttggaactggaatcatggggaaaatgggaaacaaaggtggggtagctgtgagatttgtatttcacaacaccaccttttgcattgkcaattcccatctggctgcacacgtggaggactttgagagaaggaatcaagattataaggacatttgtgcgagaatgagttttgtggtcccaaatcagacc

SEQ ID NO: 56555 - DNA, 201 bp, Homo sapiens
tcttgactctgcttatgatccccggatctgccgacaggtgatctcccagcttccgagatgccatagaaatgttttccgttacttgatggcattccttcgakaactcttaaaattctctgaatacaatagcgtcaatgccaacatgatcgctactctcttcactagtcttctcctgaggcctccacccaaccttatggcaag

SEQ ID NO: 56556 - DNA, 201 bp, Homo sapiens
aaggtaccggaaagtctttgaagatagtgtacgcatcatggacagaatggaaaatgacttccttccttccttagaactcagcaggagggagtttgtgtttkaaaatgtgaagtttcggcaactacaaaaggagaagttccagatcagcaacaatggacaggttccctgccatttttctttcatccctaaacttaatgacag

SEQ ID NO: 56557 - DNA, 201 bp, Homo sapiens
ggatgaaggtgccagtgagagaccccttcaggttcccaaggagatctggcttctagtagatcacctattcaaatacgcctgtcaccaggaggacctgttcyagacccctggaatgcaggaagagctccagcagatcattgattgtctggataccagcattcctgagacaatccctggcagcaaccactctgtggctgaagc

SEQ ID NO: 56558 - DNA, 201 bp, Homo sapiens
gctgaactgtgatcccaatcctcctgatatctactgcattggattccaagaactggacttgagcacagaagccttcttctactttgaatctgtgaaggaayaagaatggtccatggctgtagagagaggtttgcattccaaagccaagtataagaaagttcaactggtgcgccttgttgggatgatgcttcttatatttgc

SEQ ID NO: 56559 - DNA, 201 bp, Homo sapiens
agaaacagttggaactggaatcatggggaaaatgggaaacaaaggtggggtagctgtgagatttgtatttcacaacaccaccttttgcattgtcaattccyatctggctgcacacgtggaggactttgagagaaggaatcaagattataaggacatttgtgcgagaatgagttttgtggtcccaaatcagaccctcccgca

SEQ ID NO: 56560 - DNA, 201 bp, Homo sapiens
gggctaggtgttgaacttagttaatggaagactgagagcagaacaggtttgtcatctccgcaaggccagaaagtgatcacaaaaagaggcagatgatagayactggggtagggtcataccacagggaaatacctttcctgggcttgttttctagcatatcactgacctgggatctttgggtgatcaagggtgtggttagtg

SEQ ID NO: 56561 - DNA, 201 bp, Homo sapiens
tgtgatcccaatcctcctgatatctactgcattggattccaagaactggacttgagcacagaagccttcttctactttgaatctgtgaaggaacaagaatrgtccatggctgtagagagaggtttgcattccaaagccaagtataagaaagttcaactggtgcgccttgttgggatgatgcttcttatatttgccagaaag

SEQ ID NO: 56562 - DNA, 201 bp, Homo sapiens
gactctaaaacagaccggtgggattccagtgggaaatgccgggttccagcctggtgtgaccgaattctttggagaggaacaaatgttaatcagcttaattrtcggagtcacatggaactgaaaaccagcgaccacaagcctgttagcgccctcttccatattggggtgaaggttgtggatgaacgaaggtaccggaaagtc

SEQ ID NO: 56563 - DNA, 201 bp, Homo sapiens
atgtcttgactctgcttatgatccccggatctgccgacaggtgatctcccagcttccgagatgccatagaaatgttttccgttacttgatggcattccttygagaactcttaaaattctctgaatacaatagcgtcaatgccaacatgatcgctactctcttcactagtcttctcctgaggcctccacccaaccttatggc

SEQ ID NO: 56564 - DNA, 201 bp, Homo sapiens
tcctgagacaatccctggcagcaaccactctgtggctgaagcactgctcattttcttggaagccctgccagagccagtcatctgttacgagctgtatcagygatgtcttgactctgcttatgatccccggatctgccgacaggtgatctcccagcttccgagatgccatagaaatgttttccgttacttgatggcattcct

SEQ ID NO: 56565 - DNA, 201 bp, Homo sapiens
caaaggtggggtagctgtgagatttgtatttcacaacaccaccttttgcattgtcaattcccatctggctgcacacgtggaggactttgagagaaggaatyaagattataaggacatttgtgcgagaatgagttttgtggtcccaaatcagaccctcccgcagttgaacatcatgaaacatgaggttgtcatttggttggg

SEQ ID NO: 56566 - DNA, 201 bp, Homo sapiens
tgtagagagaggtttgcattccaaagccaagtataagaaagttcaactggtgcgccttgttgggatgatgcttcttatatttgccagaaaggatcagtgtygatacattcgtgatattgctacagaaacagttggaactggaatcatggggaaaatgggaaacaaaggtggggtagctgtgagatttgtatttcacaacac

SEQ ID NO: 56567 - DNA, 201 bp, Homo sapiens; identical to SEQ ID NO: 56541

SEQ ID NO: 56568 - DNA, 201 bp, Homo sapiens; identical to SEQ ID NO: 56542

SEQ ID NO: 56569 - DNA, 201 bp, Homo sapiens; identical to SEQ ID NO: 56543

SEQ ID NO: 56570 - DNA, 201 bp, Homo sapiens; identical to SEQ ID NO: 56544

SEQ ID NO: 56571 - DNA, 201 bp, Homo sapiens; identical to SEQ ID NO: 56545

SEQ ID NO: 56572 - DNA, 201 bp, Homo sapiens; identical to SEQ ID NO: 56546

SEQ ID NO: 56573 - DNA, 201 bp, Homo sapiens; identical to SEQ ID NO: 56547

SEQ ID NO: 56574 - DNA, 201 bp, Homo sapiens; identical to SEQ ID NO: 56548

SEQ ID NO: 56575 - DNA, 201 bp, Homo sapiens; identical to SEQ ID NO: 56549

SEQ ID NO: 56576 - DNA, 185 bp, Homo sapiens; identical to SEQ ID NO: 56550

SEQ ID NO: 56577 - DNA, 201 bp, Homo sapiens; identical to SEQ ID NO: 56551

SEQ ID NO: 56578 - DNA, 201 bp, Homo sapiens; identical to SEQ ID NO: 56552

SEQ ID NO: 56579 - DNA, 201 bp, Homo sapiens; identical to SEQ ID NO: 56553

SEQ ID NO: 56580 - DNA, 201 bp, Homo sapiens; identical to SEQ ID NO: 56554

SEQ ID NO: 56581 - DNA, 201 bp, Homo sapiens; identical to SEQ ID NO: 56555

SEQ ID NO: 56582 - DNA, 201 bp, Homo sapiens; identical to SEQ ID NO: 56556

SEQ ID NO: 56583 - DNA, 201 bp, Homo sapiens; identical to SEQ ID NO: 56557

SEQ ID NO: 56584 - DNA, 201 bp, Homo sapiens; identical to SEQ ID NO: 56558

SEQ ID NO: 56585 - DNA, 201 bp, Homo sapiens; identical to SEQ ID NO: 56559

SEQ ID NO: 56586 - DNA, 201 bp, Homo sapiens; identical to SEQ ID NO: 56560

SEQ ID NO: 56587 - DNA, 201 bp, Homo sapiens; identical to SEQ ID NO: 56561

SEQ ID NO: 56588 - DNA, 201 bp, Homo sapiens; identical to SEQ ID NO: 56562

SEQ ID NO: 56589 - DNA, 201 bp, Homo sapiens; identical to SEQ ID NO: 56563

SEQ ID NO: 56590 - DNA, 201 bp, Homo sapiens; identical to SEQ ID NO: 56564

SEQ ID NO: 56591 - DNA, 201 bp, Homo sapiens; identical to SEQ ID NO: 56565

SEQ ID NO: 56592 - DNA, 201 bp, Homo sapiens; identical to SEQ ID NO: 56566

SEQ ID NO: 56593 - DNA, 201 bp, Homo sapiens; identical to SEQ ID NO: 56541

SEQ ID NO: 56594 - DNA, 201 bp, Homo sapiens; identical to SEQ ID NO: 56542

SEQ ID NO: 56595 - DNA, 201 bp, Homo sapiens; identical to SEQ ID NO: 56543

SEQ ID NO: 56596 - DNA, 201 bp, Homo sapiens; identical to SEQ ID NO: 56544

SEQ ID NO: 56597 - DNA, 201 bp, Homo sapiens; identical to SEQ ID NO: 56545

SEQ ID NO: 56598 - DNA, 201 bp, Homo sapiens; identical to SEQ ID NO: 56546

SEQ ID NO: 56599 - DNA, 201 bp, Homo sapiens; identical to SEQ ID NO: 56547

SEQ ID NO: 56600 - DNA, 201 bp, Homo sapiens; identical to SEQ ID NO: 56548

SEQ ID NO: 56601 - DNA, 201 bp, Homo sapiens; identical to SEQ ID NO: 56549

SEQ ID NO: 56602 - DNA, 185 bp, Homo sapiens; identical to SEQ ID NO: 56550

SEQ ID NO: 56603 - DNA, 201 bp, Homo sapiens; identical to SEQ ID NO: 56551

SEQ ID NO: 56604 - DNA, 201 bp, Homo sapiens; identical to SEQ ID NO: 56552

SEQ ID NO: 56605 - DNA, 201 bp, Homo sapiens; identical to SEQ ID NO: 56553

SEQ ID NO: 56606 - DNA, 201 bp, Homo sapiens; identical to SEQ ID NO: 56554

SEQ ID NO: 56607 - DNA, 201 bp, Homo sapiens; identical to SEQ ID NO: 56555

SEQ ID NO: 56608 - DNA, 201 bp, Homo sapiens; identical to SEQ ID NO: 56556

SEQ ID NO: 56609 - DNA, 201 bp, Homo sapiens; identical to SEQ ID NO: 56557

SEQ ID NO: 56610 - DNA, 201 bp, Homo sapiens; identical to SEQ ID NO: 56558

SEQ ID NO: 56611 - DNA, 201 bp, Homo sapiens; identical to SEQ ID NO: 56559

SEQ ID NO: 56612 - DNA, 201 bp, Homo sapiens; identical to SEQ ID NO: 56560

SEQ ID NO: 56613 - DNA, 201 bp, Homo sapiens; identical to SEQ ID NO: 56561

SEQ ID NO: 56614 - DNA, 201 bp, Homo sapiens; identical to SEQ ID NO: 56562

SEQ ID NO: 56615 - DNA, 201 bp, Homo sapiens; identical to SEQ ID NO: 56563

SEQ ID NO: 56616 - DNA, 201 bp, Homo sapiens; identical to SEQ ID NO: 56564

SEQ ID NO: 56617 - DNA, 201 bp, Homo sapiens; identical to SEQ ID NO: 56565

SEQ ID NO: 56618 - DNA, 201 bp, Homo sapiens; identical to SEQ ID NO: 56566

SEQ ID NO: 56619 - DNA, 201 bp, Homo sapiens
tcacctcaaaggccttgaagaatatattttcttggtgaatttttgtatgtctgtcatatgacacttgggttttttaattaattctattttatatatataaatatatgtttcttttcctgtgaaaagctgtttttctcacatgtgaacagcttgcacctcattttaccatgcgtgagggaatggcaaataagaatgtttgag

SEQ ID NO: 56620 - DNA, 201 bp, Homo sapiens
aaattatcaagcactgtaatactataaattaatgtaatactgtgtgaattcagactataaaaaacatcattcagaaaactttataatcgtcattgttcaaycaagattttgaatgtaataagatgaatatattccttacaaattacttggaaattcaatgtttgtgcagagttgagacaactttattgtttctatcataaa

SEQ ID NO: 56621 - DNA, 201 bp, Homo sapiens
gtcacctcaaaggccttgaagaatatattttcttggtgaatttttgtatgtctgtcatatgacacttgggttttttaattaattctattttatatatataaatatatgtttcttttcctgtgaaaagctgtttttctcacatgtgaacagcttgcacctcattttaccatgcgtgagggaatggcaaataagaatgtttga

SEQ ID NO: 56622 - DNA, 201 bp, Homo sapiens
caactggcaaaagtgtatggcttttcaacatcacagccgacccatatgagagggtggacctatctaacaggtatccaggaatcgtgaagaagctcctacgraggctctcacagttcaacaaaactgcagtgccggtcaggtatccccccaaagaccccagaagtaaccctaggctcaatggaggggtctggggaccatggt

SEQ ID NO: 56623 - DNA, 201 bp, Homo sapiens
agaaaaatattttgttgtttttataaaaagttatgcaaatgacttttatttttatttcctgcataccattagaagaattttatttcatttcttcaaattaycaagcactgtaatactataaattaatgtaatactgtgtgaattcagactataaaaaacatcattcagaaaactttataatcgtcattgttcaaccaagat

SEQ ID NO: 56624 - DNA, 201 bp, Homo sapiens
gcacaatgaacggatcaccttgtcaactggcaaaagtgtatggcttttcaacatcacagccgacccatatgagagggtggacctatctaacaggtatccakgaatcgtgaagaagctcctacggaggctctcacagttcaacaaaactgcagtgccggtcaggtatccccccaaagaccccagaagtaaccctaggctcaa

SEQ ID NO: 56625 - DNA, 201 bp, Homo sapiens
gtataaaaaacctaatttatttttacagaaaaatattttgttgtttttataaaaagttatgcaaatgacttttatttttatttcctgcataccattagaakaattttatttcatttcttcaaattatcaagcactgtaatactataaattaatgtaatactgtgtgaattcagactataaaaaacatcattcagaaaactt

SEQ ID NO: 56626 - DNA, 201 bp, Homo sapiens
ccaaacactgctttgaattataggaggagaacaataacctaccatccgcaagcatgctaatttgatggaagttacagggtagcatgattaaaactacctttgataaattacagtcaaagattgtgtcacctcaaaggccttgaagaatatattttcttggtgaatttttgtatgtctgtcatatgacacttgggtttttta

SEQ ID NO: 56627 - DNA, 201 bp, Homo sapiens
tcagtcaactgaccaaacactgctttgaattataggaggagaacaataacctaccatccgcaagcatgctaatttgatggaagttacagggtagcatgatkaaaactacctttgataaattacagtcaaagattgtgtcacctcaaaggccttgaagaatatattttcttggtgaatttttgtatgtctgtcatatgacac

SEQ ID NO: 56628 - DNA, 201 bp, Homo sapiens
cttcagtcaactgaccaaacactgctttgaattataggaggagaacaataacctaccatccgcaagcatgctaatttgatggaagttacagggtagcatgattaaaactacctttgataaattacagtcaaagattgtgtcacctcaaaggccttgaagaatatattttcttggtgaatttttgtatgtctgtcatatgac

SEQ ID NO: 56629 - DNA, 201 bp, Homo sapiens
cttctgccacctggccgccacactgaaaactgtcctgctcagtgccaaggtgctactcttgcaagccacacttagagagagtggagatgtttatttctctygctcctttagaaaacgtggtgagtcctgagttccactgctgtgcttcagtcaactgaccaaacactgctttgaattataggaggagaacaataacctacc

SEQ ID NO: 56630 - DNA, 201 bp, Homo sapiens
caggaaatcctggctacagcgactgggtcccccctcagtctttcagcaacctgggaccgaaccggtggcacaatgaacggatcaccttgtcaactggcaaragtgtatggcttttcaacatcacagccgacccatatgagagggtggacctatctaacaggtatccaggaatcgtgaagaagctcctacggaggctctcac

SEQ ID NO: 56631 - DNA, 201 bp, Homo sapiens
cggtcaggtatccccccaaagaccccagaagtaaccctaggctcaatggaggggtctggggaccatggtataaagaggaaaccaagaaaaagaagccaagsaaaaatcaggctgagaaaaagcaaaagaaaagcaaaaaaaagaagaagaaacagcagaaagcagtctcaggttcaacttgccattcaggtgttacttgtg

SEQ ID NO: 56632 - DNA, 201 bp, Homo sapiens
gtgcttcagtcaactgaccaaacactgctttgaattataggaggagaacaataacctaccatccgcaagcatgctaatttgatggaagttacagggtagcvtgattaaaactacctttgataaattacagtcaaagattgtgtcacctcaaaggccttgaagaatatattttcttggtgaatttttgtatgtctgtcatat

SEQ ID NO: 56633 - DNA, 201 bp, Homo sapiens; identical to SEQ ID NO: 56619

SEQ ID NO: 56634 - DNA, 201 bp, Homo sapiens; identical to SEQ ID NO: 56620

SEQ ID NO: 56635 - DNA, 201 bp, Homo sapiens; identical to SEQ ID NO: 56621

SEQ ID NO: 56636 - DNA, 201 bp, Homo sapiens; identical to SEQ ID NO: 56622

SEQ ID NO: 56637 - DNA, 201 bp, Homo sapiens; identical to SEQ ID NO: 56623

SEQ ID NO: 56638 - DNA, 201 bp, Homo sapiens; identical to SEQ ID NO: 56624

SEQ ID NO: 56639 - DNA, 201 bp, Homo sapiens; identical to SEQ ID NO: 56625

SEQ ID NO: 56640 - DNA, 201 bp, Homo sapiens; identical to SEQ ID NO: 56626

SEQ ID NO: 56641 - DNA, 201 bp, Homo sapiens; identical to SEQ ID NO: 56627

SEQ ID NO: 56642 - DNA, 201 bp, Homo sapiens; identical to SEQ ID NO: 56628

SEQ ID NO: 56643 - DNA, 201 bp, Homo sapiens; identical to SEQ ID NO: 56629

SEQ ID NO: 56644 - DNA, 201 bp, Homo sapiens; identical to SEQ ID NO: 56630

SEQ ID NO: 56645 - DNA, 201 bp, Homo sapiens; identical to SEQ ID NO: 56631

SEQ ID NO: 56646 - DNA, 201 bp, Homo sapiens; identical to SEQ ID NO: 56632

SEQ ID NO: 56647 - DNA, 201 bp, Homo sapiens
tattttcccctataccctcaagcatttatccattgagttacaaacaatccagttacaatctttttaagttattattattattattattttttttttttttgagatggagtctcgctctgtcgcccaggttggagtgcagtggcgcaatctcggctcactgcaagctccgcctcccgggttcacgccattctcctgcctcag

SEQ ID NO: 56648 - DNA, 201 bp, Homo sapiens
agacgaagaaagaaaaacagcaagatgccacagtggagccagagacagaggtggtggggcctgagctgccggatgaccttgagcctcaggcagctcccacmtccaccaagaagaagaagaagaagaaagagagaggtcacacagtgactgagccaattcagccactagagcctgaactgccaggggagggacagcctgaag

SEQ ID NO: 56649 - DNA, 201 bp, Homo sapiens
gcagcagggcctgtggggacagagcccacagtggagacactggagcctctgggagtgctgttcccgtccaccaccaagaagaggaagaagcccaaagggamagaaaccttcgagccagaagacaagacagtgaagcaggaacagattaacactgagcctctagaagacacagtcctgtccccgaccaaaaagagaaagagg

SEQ ID NO: 56650 - DNA, 201 bp, Homo sapiens
gatggagccagggacggaggcgatggagccagtggagccggagatgaagcctctggagtccccaggggggaccatggcgcctcaacagccagaaggagcgragcctcaggcccaggcagctctggcagctcccaaaaagaagacgaagaaagaaaaacagcaagatgccacagtggagccagagacagaggtggtggggcc

SEQ ID NO: 56651 - DNA, 201 bp, Homo sapiens
cctacccccgcgctcccgcaccagttgggcgctcccggatgatgccctacccctttggatccacgtggtctgcaacctggtgcgagcagcccgggctacarggttgcctgaggtgtgggtcccaggatggaggagccccaggccggcgatgctgctcggttctcttgtccccccaactttaccgcgaagcccccagcctca

SEQ ID NO: 56652 - DNA, 201 bp, Homo sapiens
ctgcccccgggaaactgaggaactaaagaaagctgaaggtgcccacctgggccaccagaaggtgacacccccagaatccctccccagagactgcaccagcscagccagcaggagcctggcctgggaggacgatttattattacactgggggtttccttggcagctggggtcatcagggtactttcaagaagggctcgtgca

SEQ ID NO: 56653 - DNA, 201 bp, Homo sapiens
caccaccaagaagaggaagaagcccaaagggaaagaaaccttcgagccagaagacaagacagtgaagcaggaacagattaacactgagcctctagaagacrcagtcctgtccccgaccaaaaagagaaagaggcaaaaggggacggaagggatggagccagaggagggggtgacagttgagtctcagccacaggtgaaggt

SEQ ID NO: 56654 - DNA, 201 bp, Homo sapiens
ccccgcgctcccgcaccagttgggcgctcccggatgatgccctacccctttggatccacgtggtctgcaacctggtgcgagcagcccgggctacagggttrcctgaggtgtgggtcccaggatggaggagccccaggccggcgatgctgctcggttctcttgtccccccaactttaccgcgaagcccccagcctcagagtc

SEQ ID NO: 56655 - DNA, 201 bp, Homo sapiens
aggggggaccatggcgcctcaacagccagaaggagcgaagcctcaggcccaggcagctctggcagctcccaaaaagaagacgaagaaagaaaaacagcaaratgccacagtggagccagagacagaggtggtggggcctgagctgccggatgaccttgagcctcaggcagctcccacatccaccaagaagaagaagaagaa

SEQ ID NO: 56656 - DNA, 201 bp, Homo sapiens
gctaatttttgtatttttagtagagacaggggtttcaccatattggccaggctggtctcgaactcctgacctcgtgatccacctgccttgacctcccaaastgctaggataacaggtgtgagccaccgcaccctgccaagttattttaaaatgtaccattattattgactatagtcacctggttgtgttatcaaatagtat

SEQ ID NO: 56657 - DNA, 201 bp, Homo sapiens
agggagaaaaaaatgaggaaccagtcattaaaggagctgtttcctgggtaaatctagagtggggttttggttctttattttcccctataccctcaagcatytatccattgagttacaaacaatccagttacaatctttttaagttattattattattattattttttttttttttgagatggagtctcgctctgtcgccca

SEQ ID NO: 56658 - DNA, 201 bp, Homo sapiens
ggggttttggttctttattttcccctataccctcaagcatttatccattgagttacaaacaatccagttacaatctttttaagttattattattattattwttttttttttttttgagatggagtctcgctctgtcgcccaggttggagtgcagtggcgcaatctcggctcactgcaagctccgcctcccgggttcacgcc

SEQ ID NO: 56659 - DNA, 201 bp, Homo sapiens
gcgcaatctcggctcactgcaagctccgcctcccgggttcacgccattctcctgcctcagcctcctgagtagctgggactacaggcccctgcccagctaaytttttgtatttttttttagtagagatggggtttcaccacgttagccaggatggtctcgatctcctgacctcctgatgcgcctgcctcagcctcccagtgc

SEQ ID NO: 56660 - DNA, 201 bp, Homo sapiens
aggatggtctcgatctcctgacctcctgatgcgcctgcctcagcctcccagtgctgggattataggtgtgagccactgcgcctggctaagttattattatwtttttgagacagtctcctggtgtcacccaggctggagtgcagtggtgtgatcttggctcactgcaacctccgcctcctgggttccaacgattctcctgcc

SEQ ID NO: 56661 - DNA, 201 bp, Homo sapiens
tggtctcgatctcctgacctcctgatgcgcctgcctcagcctcccagtgctgggattataggtgtgagccactgcgcctggctaagttattattatttttytgagacagtctcctggtgtcacccaggctggagtgcagtggtgtgatcttggctcactgcaacctccgcctcctgggttccaacgattctcctgcctcag

SEQ ID NO: 56662 - DNA, 201 bp, Homo sapiens
ccggatgccagagacagtgccccaagaggagatgccagggccgccactgaattcagagtctggggaggaggctcccacaggccgggacaagaagcggaagmagcagcagcagcagcctgtgtagtctgcccccgggaaactgaggaactaaagaaagctgaaggtgcccacctgggccaccagaaggtgacacccccagaa

SEQ ID NO: 56663 - DNA, 201 bp, Homo sapiens
ggatgggagggagaaaaaaatgaggaaccagtcattaaaggagctgtttcctgggtaaatctagagtggggttttggttctttattttcccctataccctsaagcatttatccattgagttacaaacaatccagttacaatctttttaagttattattattattattattttttttttttttgagatggagtctcgctctg

SEQ ID NO: 56664 - DNA, 201 bp, Homo sapiens
cctgaagccagggcaactccgggatccaccaagaagaggaagaagcagagtcaggaaagccggatgccagagacagtgccccaagaggagatgccagggcygccactgaattcagagtctggggaggaggctcccacaggccgggacaagaagcggaagcagcagcagcagcagcctgtgtagtctgcccccgggaaactg

SEQ ID NO: 56665 - DNA, 201 bp, Homo sapiens; identical to SEQ ID NO: 56647

SEQ ID NO: 56666 - DNA, 201 bp, Homo sapiens; identical to SEQ ID NO: 56648

SEQ ID NO: 56667 - DNA, 201 bp, Homo sapiens; identical to SEQ ID NO: 56649

SEQ ID NO: 56668 - DNA, 201 bp, Homo sapiens; identical to SEQ ID NO: 56650

SEQ ID NO: 56669 - DNA, 201 bp, Homo sapiens; identical to SEQ ID NO: 56652

SEQ ID NO: 56670 - DNA, 201 bp, Homo sapiens; identical to SEQ ID NO: 56653

SEQ ID NO: 56671 - DNA, 102 bp, Homo sapiens
trcctgaggtgtgggtcccaggatggaggagccccaggccggcggtgaggatgctgctcggttctcttgtccccccaactttaccgcgaagcccccagcctc

SEQ ID NO: 56672 - DNA, 201 bp, Homo sapiens; identical to SEQ ID NO: 56655

SEQ ID NO: 56673 - DNA, 201 bp, Homo sapiens; identical to SEQ ID NO: 56656

SEQ ID NO: 56674 - DNA, 201 bp, Homo sapiens; identical to SEQ ID NO: 56657

SEQ ID NO: 56675 - DNA, 201 bp, Homo sapiens; identical to SEQ ID NO: 56658

SEQ ID NO: 56676 - DNA, 201 bp, Homo sapiens; identical to SEQ ID NO: 56659

SEQ ID NO: 56677 - DNA, 201 bp, Homo sapiens; identical to SEQ ID NO: 56660

SEQ ID NO: 56678 - DNA, 201 bp, Homo sapiens; identical to SEQ ID NO: 56661

SEQ ID NO: 56679 - DNA, 201 bp, Homo sapiens; identical to SEQ ID NO: 56662

SEQ ID NO: 56680 - DNA, 201 bp, Homo sapiens; identical to SEQ ID NO: 56663

SEQ ID NO: 56681 - DNA, 201 bp, Homo sapiens; identical to SEQ ID NO: 56664

SEQ ID NO: 56682 - DNA, 201 bp, Homo sapiens
tgcacgagcccttcttgaaagtaccctgatgaccccagctgccaaggaaacccccagtgtaataataaatcgtcctcccaggccaggctcctgctggctgsgctggtgcagtctctggggagggattctgggggtgtcaccttctggtggcccaggtgggcaccttcagctttctttagttcctcagtttcccgggggcag

SEQ ID NO: 56683 - DNA, 201 bp, Homo sapiens
cagagccttcccactgtggacacctcggcccaggcggcccctcagacctacgccgaatatgccatctcacagcctctggaaggggctggggccacgtgccmcacagggtcagagcccctggcaggagagacgcccaaccaggccctgaaacccggggcaaaatccaacagcatcattgtgagccctcggcagaggggcaat

SEQ ID NO: 56684 - DNA, 201 bp, Homo sapiens
ttcttcttcttcttcttggtggatgtgggagctgcctgaggctcaaggtcatccggcagctcaggccccaccacctctgtctctggctccactgtggcatyttgctgtttttctttcttcgtcttctttttgggagctgccagagctgcctgggcctgaggcttcgctccttctggctgttgaggcgccatggtcccccct

SEQ ID NO: 56685 - DNA, 201 bp, Homo sapiens
cttcaggctgtccctcccctggcagttcaggctctagtggctgaattggctcagtcactgtgtgacctctctctttcttcttcttcttcttcttggtggakgtgggagctgcctgaggctcaaggtcatccggcagctcaggccccaccacctctgtctctggctccactgtggcatcttgctgtttttctttcttcgtct

SEQ ID NO: 56686 - DNA, 201 bp, Homo sapiens
ttctgggggtgtcaccttctggtggcccaggtgggcaccttcagctttctttagttcctcagtttcccgggggcagactacacaggctgctgctgctgctkcttccgcttcttgtcccggcctgtgggagcctcctccccagactctgaattcagtggcggccctggcatctcctcttggggcactgtctctggcatccgg

SEQ ID NO: 56687 - DNA, 201 bp, Homo sapiens
cagtttcccgggggcagactacacaggctgctgctgctgctgcttccgcttcttgtcccggcctgtgggagcctcctccccagactctgaattcagtggcrgccctggcatctcctcttggggcactgtctctggcatccggctttcctgactctgcttcttcctcttcttggtggatcccggagttgccctggcttcagg

SEQ ID NO: 56688 - DNA, 201 bp, Homo sapiens
gagagacgcccaaccaggccctgaaacccggggcaaaatccaacagcatcattgtgagccctcggcagaggggcaatcccgtactgaagttcgtgcgcaaygtgccctgggaatttggcgacgtaattcccgactatgtgctgggccagagcacctgtgccctgttcctcagcctccgctaccacaacctgcacccagact

SEQ ID NO: 56689 - DNA, 201 bp, Homo sapiens
ggccccaccacctctgtctctggctccactgtggcatcttgctgtttttctttcttcgtcttctttttgggagctgccagagctgcctgggcctgaggctycgctccttctggctgttgaggcgccatggtcccccctggggactccagaggcttcatctccggctccactggctccatcgcctccgtccctggctccatc

SEQ ID NO: 56690 - DNA, 201 bp, Homo sapiens; identical to SEQ ID NO: 56682

SEQ ID NO: 56691 - DNA, 201 bp, Homo sapiens; identical to SEQ ID NO: 56683

SEQ ID NO: 56692 - DNA, 201 bp, Homo sapiens; identical to SEQ ID NO: 56684

SEQ ID NO: 56693 - DNA, 201 bp, Homo sapiens; identical to SEQ ID NO: 56685

SEQ ID NO: 56694 - DNA, 201 bp, Homo sapiens; identical to SEQ ID NO: 56686

SEQ ID NO: 56695 - DNA, 201 bp, Homo sapiens; identical to SEQ ID NO: 56687

SEQ ID NO: 56696 - DNA, 201 bp, Homo sapiens; identical to SEQ ID NO: 56688

SEQ ID NO: 56697 - DNA, 201 bp, Homo sapiens; identical to SEQ ID NO: 56689

SEQ ID NO: 56698 - DNA, 201 bp, Homo sapiens; identical to SEQ ID NO: 56683

SEQ ID NO: 56699 - DNA, 201 bp, Homo sapiens; identical to SEQ ID NO: 56684

SEQ ID NO: 56700 - DNA, 201 bp, Homo sapiens; identical to SEQ ID NO: 56685

SEQ ID NO: 56701 - DNA, 201 bp, Homo sapiens; identical to SEQ ID NO: 56689

SEQ ID NO: 56702 - DNA, 201 bp, Homo sapiens; identical to SEQ ID NO: 56682

SEQ ID NO: 56703 - DNA, 201 bp, Homo sapiens
gggctgagtcaggcgctccccctgacccccatcccacggctctcccgggatctcccatcccagacctgcccattctgggtcagcactgggaacgtgtctgygtcccttactgaaccgtaagctccgggaggacaacacggggctgtcgttggtcactgctgtgtcaccagcacggactcgcacaggaccgggaagagagga

SEQ ID NO: 56704 - DNA, 201 bp, Homo sapiens; identical to SEQ ID NO: 56686

SEQ ID NO: 56705 - DNA, 201 bp, Homo sapiens; identical to SEQ ID NO: 56687

SEQ ID NO: 56706 - DNA, 201 bp, Homo sapiens; identical to SEQ ID NO: 56688

SEQ ID NO: 56707 - DNA, 201 bp, Homo sapiens
aagagcaggtaaacatcagagcgggcggagctttagggaaaaggcattgttctctcaattgggagcgcctaggaccgggtttggtcccagtaagagaggaytggcaggtgggtgggacgcgaaagaaatgggcataagtagaatgaagtgggggacttgaacctggggattgttgggaagctctgccttggactctccccc

SEQ ID NO: 56708 - DNA, 201 bp, Homo sapiens
agagaaggggcaggatggggctgggaagtccaaccccacgcatttgggctcagccttggacatggaggcctgacagctgttgtcctttggggatcctttgsttctctggggcctcaacagaactaaagaagaaaaccgaccctttccccaactacatgtaccagcggaaggaaggaaggccaatgtaggaacccaaaatgc

SEQ ID NO: 56709 - DNA, 201 bp, Homo sapiens
ccccaccgggctcctttttctccaccggcttcagggcagcctggacaacatgacctgcatcctggtctgcttccctggggcccctaggccttctgaggagrcgatcaggagggagctagcactggacgcagccctgggctgcagaatcgctgaactgtgtgcctctgctcagaagccccccagcctgaacacagttttcag

SEQ ID NO: 56710 - DNA, 201 bp, Homo sapiens
agcgcatccacgccgctggcggcaccatccgccgccgccgcgtcgagggctctctggccgtgtcgcgagcgttgggcgactttacctacaaggaggctcckgggaggccccccgagctacagctcgtttctgcggagccagaggtggccgcactggcacgccaggctgaggacgagttcatgctcctggcctctgatggcg

SEQ ID NO: 56711 - DNA, 201 bp, Homo sapiens
tggaaggtggaagagcaggtaaacatcagagcgggcggagctttagggaaaaggcattgttctctcaattgggagcgcctaggaccgggtttggtcccagkaagagaggattggcaggtgggtgggacgcgaaagaaatgggcataagtagaatgaagtgggggacttgaacctggggattgttgggaagctctgccttgg

SEQ ID NO: 56712 - DNA, 201 bp, Homo sapiens
gaaggtggaagagcaggtaaacatcagagcgggcggagctttagggaaaaggcattgttctctcaattgggagcgcctaggaccgggtttggtcccagtargagaggattggcaggtgggtgggacgcgaaagaaatgggcataagtagaatgaagtgggggacttgaacctggggattgttgggaagctctgccttggac

SEQ ID NO: 56713 - DNA, 201 bp, Homo sapiens
gtggtacctttggggcttggtgcagcagagggagagagcctcggggttttggggaggagggctttgatagagaggcaagagtaaagctagcaaaggagggrataggactcaagcgaagggcgtggcctgaagtgggcagggccaaaatacaggggcggagcctgagggatgctttgaggcacgggagagttagtggaaggg

SEQ ID NO: 56714 - DNA, 201 bp, Homo sapiens
caaggtcctgggggcgtggcgtggtacctttggggcttggtgcagcagagggagagagcctcggggttttggggaggagggctttgatagagaggcaagaktaaagctagcaaaggaggggataggactcaagcgaagggcgtggcctgaagtgggcagggccaaaatacaggggcggagcctgagggatgctttgaggca

SEQ ID NO: 56715 - DNA, 201 bp, Homo sapiens
gatactcaatcctgcatgccaatgtggtggtttatagctaccactacctcctggaccccaagattgcagacctggtgtccaaggaactggcccgcaaggcygtcgtggtcttcgacgaggcccacaacattgacaacgtctgcatcgactccatgagcgtcaacctcacccgccggacccttgaccggtgccagggcaacc

SEQ ID NO: 56716 - DNA, 201 bp, Homo sapiens
gcagcgcctgcgggacgagtaccggcgtctggtggaggggctgcgggaggccagcgccgcccgggagacggacgcccacctggccaaccccgtgctgcccracgaagtgctgcaggaggcagtgcctggctccatccgcacggccgagcatttcctgggcttcctgaggcggctgctggagtacgtgaagtggcggctgcg

SEQ ID NO: 56717 - DNA, 201 bp, Homo sapiens
gccctcaggcaccgggaagacagtatccctgttggccctgatcatggcataccagagagcatatccgctggaggtgaccaaactcatctactgctcaagarctgtgccagagattgagaaggtgattgaagagcttcgaaagttgctcaacttctatgagaagcaggagggcgagaagctgccgtttctgggactggctct

SEQ ID NO: 56718 - DNA, 201 bp, Homo sapiens
ccctgcgctttgggaaggacgtcgatgggaaatgccacagcctcacagcctcctatgtgcgggcgcagtaccagcatgacaccagcctgccccactgccgmttctatgaggaatttgatgcccatgggcgtgaggtgcccctccccgctggcatctacaacctggatgacctgaaggccctggggcggcgccagggctggt

SEQ ID NO: 56719 - DNA, 201 bp, Homo sapiens
gtgaggtgcccctccccgctggcatctacaacctggatgacctgaaggccctggggcggcgccagggctggtgcccatacttccttgctcgatactcaatsctgcatgccaatgtggtggtttatagctaccactacctcctggaccccaagattgcagacctggtgtccaaggaactggcccgcaaggccgtcgtggtct

SEQ ID NO: 56720 - DNA, 201 bp, Homo sapiens
gcatgccaatgtggtggtttatagctaccactacctcctggaccccaagattgcagacctggtgtccaaggaactggcccgcaaggccgtcgtggtcttcracgaggcccacaacattgacaacgtctgcatcgactccatgagcgtcaacctcacccgccggacccttgaccggtgccagggcaacctggagaccctgca

SEQ ID NO: 56721 - DNA, 201 bp, Homo sapiens
ggtgcccctccccgctggcatctacaacctggatgacctgaaggccctggggcggcgccagggctggtgcccatacttccttgctcgatactcaatcctgyatgccaatgtggtggtttatagctaccactacctcctggaccccaagattgcagacctggtgtccaaggaactggcccgcaaggccgtcgtggtcttcga

SEQ ID NO: 56722 - DNA, 201 bp, Homo sapiens; identical to SEQ ID NO: 56715

SEQ ID NO: 56723 - DNA, 201 bp, Homo sapiens
ggcaaagtgtccgagggaatcgactttgtgcaccactacgggcgggccgtcatcatgtttggcgtcccctacgtctacacacagagccgcattctcaaggygcggctggaatacctgcgggaccagttccagattcgtgagaatgactttcttaccttcgatgccatgcgccacgcggcccagtgtgtgggtcgggccatc

SEQ ID NO: 56724 - DNA, 201 bp, Homo sapiens
atggcaaccttcaccatgacgctggcacgggtctgcctctgccctatgatcatcggccgtggcaatgaccaggtggccatcagctccaaatttgagacccrggaggatattgctgtgatccggaactatgggaacctcctgctggagatgtccgctgtggtccctgatggcatcgtggccttcttcaccagctaccagtac

SEQ ID NO: 56725 - DNA, 201 bp, Homo sapiens
gagacccgggaggatattgctgtgatccggaactatgggaacctcctgctggagatgtccgctgtggtccctgatggcatcgtggccttcttcaccagctrccagtacatggagagcaccgtggcctcctggtatgagcaggggatccttgagaacatccagaggaacaagctgctctttattgagacccaggatggtgcc

SEQ ID NO: 56726 - DNA, 201 bp, Homo sapiens
gagaacatccagaggaacaagctgctctttattgagacccaggatggtgccgaaaccagtgtcgccctggagaagtaccaggaggcctgcgagaatggccscggggccatcctgctgtcagtggcccggggcaaagtgtccgagggaatcgactttgtgcaccactacgggcgggccgtcatcatgtttggcgtcccctac

SEQ ID NO: 56727 - DNA, 201 bp, Homo sapiens
catccagaggaacaagctgctctttattgagacccaggatggtgccgaaaccagtgtcgccctggagaagtaccaggaggcctgcgagaatggccgcgggsccatcctgctgtcagtggcccggggcaaagtgtccgagggaatcgactttgtgcaccactacgggcgggccgtcatcatgtttggcgtcccctacgtcta

SEQ ID NO: 56728 - DNA, 201 bp, Homo sapiens
aagtaccaggaggcctgcgagaatggccgcggggccatcctgctgtcagtggcccggggcaaagtgtccgagggaatcgactttgtgcaccactacgggcsggccgtcatcatgtttggcgtcccctacgtctacacacagagccgcattctcaaggcgcggctggaatacctgcgggaccagttccagattcgtgagaat

SEQ ID NO: 56729 - DNA, 201 bp, Homo sapiens
ctacgtctacacacagagccgcattctcaaggcgcggctggaatacctgcgggaccagttccagattcgtgagaatgactttcttaccttcgatgccatgbgccacgcggcccagtgtgtgggtcgggccatcaggggcaagacggactacggcctcatggtctttgccgacaagcggtttgcccgtggggacaagcgggg

SEQ ID NO: 56730 - DNA, 201 bp, Homo sapiens; identical to SEQ ID NO: 56717

SEQ ID NO: 56731 - DNA, 201 bp, Homo sapiens
gaagtaccaggaggcctgcgagaatggccgcggggccatcctgctgtcagtggcccggggcaaagtgtccgagggaatcgactttgtgcaccactacgggygggccgtcatcatgtttggcgtcccctacgtctacacacagagccgcattctcaaggcgcggctggaatacctgcgggaccagttccagattcgtgagaa

SEQ ID NO: 56732 - DNA, 201 bp, Homo sapiens; identical to SEQ ID NO: 56720

SEQ ID NO: 56733 - DNA, 201 bp, Homo sapiens
tgagaatgactttcttaccttcgatgccatgcgccacgcggcccagtgtgtgggtcgggccatcaggggcaagacggactacggcctcatggtctttgccracaagcggtttgcccgtggggacaagcgggggaagctgccccgctggatccaggagcacctcacagatgccaacctcaacctgaccgtggatgagggtgt

SEQ ID NO: 56734 - DNA, 201 bp, Homo sapiens
cattgccaaccccatcctgcacttcagctgcatggacgcctcgctggccatcaaacccgtatttgagcgtttccagtctgtcatcatcacatctgggacastgtccccgctggacatctaccccaagatcctggacttccaccccgtcaccatggcaaccttcaccatgacgctggcacgggtctgcctctgccctatgat

SEQ ID NO: 56735 - DNA, 201 bp, Homo sapiens
gactttcttaccttcgatgccatgcgccacgcggcccagtgtgtgggtcgggccatcaggggcaagacggactacggcctcatggtctttgccgacaagcrgtttgcccgtggggacaagcgggggaagctgccccgctggatccaggagcacctcacagatgccaacctcaacctgaccgtggatgagggtgtccaggtg

SEQ ID NO: 56736 - DNA, 201 bp, Homo sapiens
tgtcatcatcacatctgggacactgtccccgctggacatctaccccaagatcctggacttccaccccgtcaccatggcaaccttcaccatgacgctggcasgggtctgcctctgccctatgatcatcggccgtggcaatgaccaggtggccatcagctccaaatttgagacccgggaggatattgctgtgatccggaacta

SEQ ID NO: 56737 - DNA, 201 bp, Homo sapiens
tgactttcttaccttcgatgccatgcgccacgcggcccagtgtgtgggtcgggccatcaggggcaagacggactacggcctcatggtctttgccgacaagyggtttgcccgtggggacaagcgggggaagctgccccgctggatccaggagcacctcacagatgccaacctcaacctgaccgtggatgagggtgtccaggt

SEQ ID NO: 56738 - DNA, 201 bp, Homo sapiens
gaagctgccccgctggatccaggagcacctcacagatgccaacctcaacctgaccgtggatgagggtgtccaggtggccaagtacttcctgcggcagatgscacagcccttccaccgggaggatcagctgggcctgtccctgctcagcctggagcagctagaatcagaggagacgctgcagaggatagagcagattgctca

SEQ ID NO: 56739 - DNA, 201 bp, Homo sapiens
gctgccccgctggatccaggagcacctcacagatgccaacctcaacctgaccgtggatgagggtgtccaggtggccaagtacttcctgcggcagatggcayagcccttccaccgggaggatcagctgggcctgtccctgctcagcctggagcagctagaatcagaggagacgctgcagaggatagagcagattgctcagca

SEQ ID NO: 56740 - DNA, 201 bp, Homo sapiens
gagccgcattctcaaggcgcggctggaatacctgcgggaccagttccagattcgtgagaatgactttcttaccttcgatgccatgcgccacgcggcccagygtgtgggtcgggccatcaggggcaagacggactacggcctcatggtctttgccgacaagcggtttgcccgtggggacaagcgggggaagctgccccgctg

SEQ ID NO: 56741 - DNA, 201 bp, Homo sapiens; identical to SEQ ID NO: 56718

SEQ ID NO: 56742 - DNA, 201 bp, Homo sapiens; identical to SEQ ID NO: 56719

SEQ ID NO: 56743 - DNA, 201 bp, Homo sapiens; identical to SEQ ID NO: 56721

SEQ ID NO: 56744 - DNA, 201 bp, Homo sapiens
tgccgacaagcggtttgcccgtggggacaagcgggggaagctgccccgctggatccaggagcacctcacagatgccaacctcaacctgaccgtggatgagsgtgtccaggtggccaagtacttcctgcggcagatggcacagcccttccaccgggaggatcagctgggcctgtccctgctcagcctggagcagctagaatc

SEQ ID NO: 56745 - DNA, 201 bp, Homo sapiens
ggtggtgctagaaggtcttatgaagtcaggtgacatttctcactgtcacgtccacagcctttaatcgcaggagaaggcagctatccaccaggtacccagasgcaagggggggccaggagatgatagaccccctctcaccccaccagcccatccctcctgcactgttcccaagaagctgcggccagcgcagttcactggacg

SEQ ID NO: 56746 - DNA, 201 bp, Homo sapiens
tctcaaggcgcggctggaatacctgcgggaccagttccagattcgtgagaatgactttcttaccttcgatgccatgcgccacgcggcccagtgtgtgggtygggccatcaggggcaagacggactacggcctcatggtctttgccgacaagcggtttgcccgtggggacaagcgggggaagctgccccgctggatccagga

SEQ ID NO: 56747 - DNA, 201 bp, Homo sapiens
atttgagacccgggaggatattgctgtgatccggaactatgggaacctcctgctggagatgtccgctgtggtccctgatggcatcgtggccttcttcaccmgctaccagtacatggagagcaccgtggcctcctggtatgagcaggggatccttgagaacatccagaggaacaagctgctctttattgagacccaggatgg

SEQ ID NO: 56748 - DNA, 201 bp, Homo sapiens
tgggggctcaggtcctgggtgctggcgctgagggtccgaggggccttgtccaggtgccagctgggaaactggagacaggcacaggggatggttggaggggdggggcaagtgttacatccaccctccagctccaggtccagcctggcagccaactatccaaccccctcgcctctaccccaagtaaaacccatctttgctcct

SEQ ID NO: 56749 - DNA, 201 bp, Homo sapiens
caagtacttcctgcggcagatggcacagcccttccaccgggaggatcagctgggcctgtccctgctcagcctggagcagctagaatcagaggagacgctgmagaggatagagcagattgctcagcagctctgagtggggcgggtggggccataaacggttcctggtgactcctgagtcttgcctggccctggttcccagcg

SEQ ID NO: 56750 - DNA, 201 bp, Homo sapiens
tctttgccgacaagcggtttgcccgtggggacaagcgggggaagctgccccgctggatccaggagcacctcacagatgccaacctcaacctgaccgtggaygagggtgtccaggtggccaagtacttcctgcggcagatggcacagcccttccaccgggaggatcagctgggcctgtccctgctcagcctggagcagctag

SEQ ID NO: 56751 - DNA, 201 bp, Homo sapiens; identical to SEQ ID NO: 56716

SEQ ID NO: 56752 - DNA, 201 bp, Homo sapiens
tacgtctacacacagagccgcattctcaaggcgcggctggaatacctgcgggaccagttccagattcgtgagaatgactttcttaccttcgatgccatgcrccacgcggcccagtgtgtgggtcgggccatcaggggcaagacggactacggcctcatggtctttgccgacaagcggtttgcccgtggggacaagcggggg

SEQ ID NO: 56753 - DNA, 201 bp, Homo sapiens; identical to SEQ ID NO: 56715

SEQ ID NO: 56754 - DNA, 201 bp, Homo sapiens; identical to SEQ ID NO: 56723

SEQ ID NO: 56755 - DNA, 201 bp, Homo sapiens; identical to SEQ ID NO: 56724

SEQ ID NO: 56756 - DNA, 201 bp, Homo sapiens; identical to SEQ ID NO: 56725

SEQ ID NO: 56757 - DNA, 201 bp, Homo sapiens; identical to SEQ ID NO: 56726

SEQ ID NO: 56758 - DNA, 201 bp, Homo sapiens; identical to SEQ ID NO: 56727

SEQ ID NO: 56759 - DNA, 201 bp, Homo sapiens; identical to SEQ ID NO: 56728

SEQ ID NO: 56760 - DNA, 201 bp, Homo sapiens; identical to SEQ ID NO: 56729

SEQ ID NO: 56761 - DNA, 201 bp, Homo sapiens; identical to SEQ ID NO: 56717

SEQ ID NO: 56762 - DNA, 201 bp, Homo sapiens; identical to SEQ ID NO: 56731

SEQ ID NO: 56763 - DNA, 201 bp, Homo sapiens; identical to SEQ ID NO: 56720

SEQ ID NO: 56764 - DNA, 201 bp, Homo sapiens; identical to SEQ ID NO: 56733

SEQ ID NO: 56765 - DNA, 201 bp, Homo sapiens; identical to SEQ ID NO: 56734

SEQ ID NO: 56766 - DNA, 201 bp, Homo sapiens; identical to SEQ ID NO: 56735

SEQ ID NO: 56767 - DNA, 201 bp, Homo sapiens; identical to SEQ ID NO: 56736

SEQ ID NO: 56768 - DNA, 201 bp, Homo sapiens; identical to SEQ ID NO: 56737

SEQ ID NO: 56769 - DNA, 201 bp, Homo sapiens; identical to SEQ ID NO: 56738

SEQ ID NO: 56770 - DNA, 201 bp, Homo sapiens; identical to SEQ ID NO: 56739

SEQ ID NO: 56771 - DNA, 201 bp, Homo sapiens; identical to SEQ ID NO: 56740

SEQ ID NO: 56772 - DNA, 201 bp, Homo sapiens; identical to SEQ ID NO: 56718

SEQ ID NO: 56773 - DNA, 201 bp, Homo sapiens; identical to SEQ ID NO: 56719

SEQ ID NO: 56774 - DNA, 201 bp, Homo sapiens; identical to SEQ ID NO: 56721

SEQ ID NO: 56775 - DNA, 201 bp, Homo sapiens; identical to SEQ ID NO: 56744

SEQ ID NO: 56776 - DNA, 201 bp, Homo sapiens; identical to SEQ ID NO: 56745

SEQ ID NO: 56777 - DNA, 201 bp, Homo sapiens; identical to SEQ ID NO: 56746

SEQ ID NO: 56778 - DNA, 201 bp, Homo sapiens; identical to SEQ ID NO: 56747

SEQ ID NO: 56779 - DNA, 201 bp, Homo sapiens; identical to SEQ ID NO: 56748

SEQ ID NO: 56780 - DNA, 201 bp, Homo sapiens; identical to SEQ ID NO: 56749

SEQ ID NO: 56781 - DNA, 201 bp, Homo sapiens; identical to SEQ ID NO: 56750

SEQ ID NO: 56782 - DNA, 201 bp, Homo sapiens; identical to SEQ ID NO: 56716

SEQ ID NO: 56783 - DNA, 201 bp, Homo sapiens; identical to SEQ ID NO: 56752

SEQ ID NO: 56784 - DNA, 201 bp, Homo sapiens
tgtggagaggactgtgagagagaaggtcccagcgggggccagtgaagctcaggcaggatctgcctagggtgtgctggtttgtccttttcatacctttgtcycctaattgtgctacaattggaagaccttctttcttttgattgtctcaagctgccacccttcaaggacagggaagagaccactgtgggatgacagccagag

SEQ ID NO: 56785 - DNA, 201 bp, Homo sapiens
caactggatccacagcgtctctggagcacttatctgcgccccctgctggttgtgcgaaccccgggcagcccgggaaatctccaagtcagaaaggcagcccyggtgaccctgcaactgctcttcttggatggtgaagaggcgctgaaggagtggggacccaaggactccctttacggttcccggcacctggcccagctcatg

SEQ ID NO: 56786 - DNA, 130 bp, Homo sapiens
ctccccagaggtaaacacttggtccaaaggtttgcagggaccaaatactgttctttttttttttgagacggacctgggcaacagagcgagactccatctcwataaataaataaataaataaatatttttt

SEQ ID NO: 56787 - DNA, 201 bp, Homo sapiens; identical to SEQ ID NO: 56784

SEQ ID NO: 56788 - DNA, 201 bp, Homo sapiens
tttgtaggggccacggattcggctgtgccctgtgccctgctgctggagctggcccaagcacttgacctggagctgagcagggccaaaaaacaggcagcccyggtgaccctgcaactgctcttcttggatggtgaagaggcgctgaaggagtggggacccaaggactccctttacggttcccggcacctggcccagctcatg

SEQ ID NO: 56789 - DNA, 137 bp, Homo sapiens
aataagaacttgctccctccccagaggtaaacacttggtccaaaggtttgcaatcacaccactgcactccagcctgggcaacagagcgagactccatctcwataaataaataaataaataaatattttttaaaaaga

SEQ ID NO: 56790 - DNA, 201 bp, Homo sapiens
gcctggcagccaatggtgggggctactgtgtctccaaatttggcctggaggccttctctgacagcctgaggcgggatgtagctcattttgggatacgagtstccatcgtggagcctggcttcttccgaacccctgtgaccaacctggagagtctggagaaaaccctgcaggcctgctgggcacggctgcctcctgccacac

SEQ ID NO: 56791 - DNA, 201 bp, Homo sapiens
acccttgccctgctgcctctgctgcagcaagcccggggccgggtgatcaacatcaccagcgtcctgggtcgcctggcagccaatggtgggggctactgtgkctccaaatttggcctggaggccttctctgacagcctgaggcgggatgtagctcattttgggatacgagtctccatcgtggagcctggcttcttccgaacc

SEQ ID NO: 56792 - DNA, 201 bp, Homo sapiens
cccgccagcaatgcctttgtcttcatcaccggctgtgactcaggctttgggcgccttctggcactgcagctggaccagagaggcttccgagtcctggccarctgcctgaccccctccggggccgaggacctgcagcgggtggcctcctcccgcctccacaccaccctgttggatatcactgatccccagagcgtccagcag

SEQ ID NO: 56793 - DNA, 201 bp, Homo sapiens
cctggaggccttctctgacagcctgaggcgggatgtagctcattttgggatacgagtctccatcgtggagcctggcttcttccgaacccctgtgaccaacytggagagtctggagaaaaccctgcaggcctgctgggcacggctgcctcctgccacacaggcccactatgggggggccttcctcaccaagtacctgaaaat

SEQ ID NO: 56794 - DNA, 201 bp, Homo sapiens
cgatttccagcgggtgctgaatgtgaacacaatgggtcccatcggggtcacccttgccctgctgcctctgctgcagcaagcccggggccgggtgatcaacrtcaccagcgtcctgggtcgcctggcagccaatggtgggggctactgtgtctccaaatttggcctggaggccttctctgacagcctgaggcgggatgtagc

SEQ ID NO: 56795 - DNA, 201 bp, Homo sapiens
cctaaccaaggtgagccgatgcctggagcatgccctgactgctcgacacccccgaacccgctacagcccaggttgggatgccaagctgctctggctgcctscctcctacctgccagccagcctggtggatgctgtgctcacctgggtccttcccaagcctgcccaagcagtctactgaatccagccttccagcaagagatt

SEQ ID NO: 56796 - DNA, 201 bp, Homo sapiens
tccagcaggcagccaagtgggtggagatgcacgttaaggaagcagggctttttggtctggtgaataatgctggtgtggctggtatcatcggacccacaccrtggctgacccgggacgatttccagcgggtgctgaatgtgaacacaatgggtcccatcggggtcacccttgccctgctgcctctgctgcagcaagcccggg

SEQ ID NO: 56797 - DNA, 201 bp, Homo sapiens
tcatcaccggctgtgactcaggctttgggcgccttctggcactgcagctggaccagagaggcttccgagtcctggccagctgcctgaccccctccggggcsgaggacctgcagcgggtggcctcctcccgcctccacaccaccctgttggatatcactgatccccagagcgtccagcaggcagccaagtgggtggagatgc

SEQ ID NO: 56798 - DNA, 201 bp, Homo sapiens
aggcccactatgggggggccttcctcaccaagtacctgaaaatgcaacagcgcatcatgaacctgatctgtgacccggacctaaccaaggtgagccgatgsctggagcatgccctgactgctcgacacccccgaacccgctacagcccaggttgggatgccaagctgctctggctgcctgcctcctacctgccagccagcc

SEQ ID NO: 56799 - DNA, 201 bp, Homo sapiens
tgactcaggctttgggcgccttctggcactgcagctggaccagagaggcttccgagtcctggccagctgcctgaccccctccggggccgaggacctgcagsgggtggcctcctcccgcctccacaccaccctgttggatatcactgatccccagagcgtccagcaggcagccaagtgggtggagatgcacgttaaggaagc

SEQ ID NO: 56800 - DNA, 201 bp, Homo sapiens
gtggctgcctcttctgctgggtgccttactctgggcagtgctgtggttgctcagggaccggcagagcctgcccgccagcaatgcctttgtcttcatcaccrgctgtgactcaggctttgggcgccttctggcactgcagctggaccagagaggcttccgagtcctggccagctgcctgaccccctccggggccgaggacct

SEQ ID NO: 56801 - DNA, 201 bp, Homo sapiens
aaaatgcaacagcgcatcatgaacctgatctgtgacccggacctaaccaaggtgagccgatgcctggagcatgccctgactgctcgacacccccgaacccrctacagcccaggttgggatgccaagctgctctggctgcctgcctcctacctgccagccagcctggtggatgctgtgctcacctgggtccttcccaagcct

SEQ ID NO: 56802 - DNA, 201 bp, Homo sapiens
ctcccgcctccacaccaccctgttggatatcactgatccccagagcgtccagcaggcagccaagtgggtggagatgcacgttaaggaagcagggctttttsgtctggtgaataatgctggtgtggctggtatcatcggacccacaccatggctgacccgggacgatttccagcgggtgctgaatgtgaacacaatgggtcc

SEQ ID NO: 56803 - DNA, 201 bp, Homo sapiens
gcacgttaaggaagcagggctttttggtctggtgaataatgctggtgtggctggtatcatcggacccacaccatggctgacccgggacgatttccagcggrtgctgaatgtgaacacaatgggtcccatcggggtcacccttgccctgctgcctctgctgcagcaagcccggggccgggtgatcaacatcaccagcgtcct

SEQ ID NO: 56804 - DNA, 201 bp, Homo sapiens
cctgccacacaggcccactatgggggggccttcctcaccaagtacctgaaaatgcaacagcgcatcatgaacctgatctgtgacccggacctaaccaaggkgagccgatgcctggagcatgccctgactgctcgacacccccgaacccgctacagcccaggttgggatgccaagctgctctggctgcctgcctcctacctg

SEQ ID NO: 56805 - DNA, 201 bp, Homo sapiens
tttgggcgccttctggcactgcagctggaccagagaggcttccgagtcctggccagctgcctgaccccctccggggccgaggacctgcagcgggtggcctyctcccgcctccacaccaccctgttggatatcactgatccccagagcgtccagcaggcagccaagtgggtggagatgcacgttaaggaagcagggcttttt

SEQ ID NO: 56806 - DNA, 201 bp, Homo sapiens
aatgcaacagcgcatcatgaacctgatctgtgacccggacctaaccaaggtgagccgatgcctggagcatgccctgactgctcgacacccccgaacccgcyacagcccaggttgggatgccaagctgctctggctgcctgcctcctacctgccagccagcctggtggatgctgtgctcacctgggtccttcccaagcctgc

SEQ ID NO: 56807 - DNA, 201 bp, Homo sapiens
tggtgaataatgctggtgtggctggtatcatcggacccacaccatggctgacccgggacgatttccagcgggtgctgaatgtgaacacaatgggtcccatyggggtcacccttgccctgctgcctctgctgcagcaagcccggggccgggtgatcaacatcaccagcgtcctgggtcgcctggcagccaatggtgggggct

SEQ ID NO: 56808 - DNA, 201 bp, Homo sapiens; identical to SEQ ID NO: 56790

SEQ ID NO: 56809 - DNA, 201 bp, Homo sapiens; identical to SEQ ID NO: 56791

SEQ ID NO: 56810 - DNA, 201 bp, Homo sapiens; identical to SEQ ID NO: 56792

SEQ ID NO: 56811 - DNA, 201 bp, Homo sapiens; identical to SEQ ID NO: 56793

SEQ ID NO: 56812 - DNA, 201 bp, Homo sapiens; identical to SEQ ID NO: 56794

SEQ ID NO: 56813 - DNA, 201 bp, Homo sapiens; identical to SEQ ID NO: 56795

SEQ ID NO: 56814 - DNA, 201 bp, Homo sapiens; identical to SEQ ID NO: 56796

SEQ ID NO: 56815 - DNA, 201 bp, Homo sapiens; identical to SEQ ID NO: 56797

SEQ ID NO: 56816 - DNA, 201 bp, Homo sapiens; identical to SEQ ID NO: 56798

SEQ ID NO: 56817 - DNA, 201 bp, Homo sapiens; identical to SEQ ID NO: 56799

SEQ ID NO: 56818 - DNA, 201 bp, Homo sapiens; identical to SEQ ID NO: 56800

SEQ ID NO: 56819 - DNA, 201 bp, Homo sapiens; identical to SEQ ID NO: 56801

SEQ ID NO: 56820 - DNA, 201 bp, Homo sapiens; identical to SEQ ID NO: 56802

SEQ ID NO: 56821 - DNA, 201 bp, Homo sapiens; identical to SEQ ID NO: 56803

SEQ ID NO: 56822 - DNA, 201 bp, Homo sapiens; identical to SEQ ID NO: 56804

SEQ ID NO: 56823 - DNA, 201 bp, Homo sapiens; identical to SEQ ID NO: 56805

SEQ ID NO: 56824 - DNA, 201 bp, Homo sapiens; identical to SEQ ID NO: 56806

SEQ ID NO: 56825 - DNA, 201 bp, Homo sapiens; identical to SEQ ID NO: 56807

SEQ ID NO: 56826 - DNA, 201 bp, Homo sapiens
tatccacatccctaacatcatgcattcacaaggtcaaagttctggtccacaaacccttccctatagaagttcaatggctgcgaaagaatttgtagtaaacyaggcctcccaggatggcgagctccagtaagatgataatggaaagcagcagcttgttggttgtcactctacaaagagaagcaaagtggggagtagtcagaa

SEQ ID NO: 56827 - DNA, 157 bp, Homo sapiens
ggttagacctgggaccacggctggatactctgaggctgtatgtttgatcacacagccacttagcaggaagtactcataaggttctttagctgtcacttagkgataacactgtctacctcacagaaatgttaaactgagacaataaaaaccaaagcat

SEQ ID NO: 56828 - DNA, 201 bp, Homo sapiens
gagggcatattgtctatgaccaacttcctactcccagttcaccagatgaatcagaaaatcaagcacgtgtgagaatttaggagacactgtgcactgacatrtttcacaacaggcattccagaattatgaggcattgaggggatagatgaatactaaatggttgtctgggtcaatactgccttaatgagaacatttacacat

SEQ ID NO: 56829 - DNA, 201 bp, Homo sapiens
actgtgcactgacatgtttcacaacaggcattccagaattatgaggcattgaggggatagatgaatactaaatggttgtctgggtcaatactgccttaatkagaacatttacacattctcacaattgtaaagtttcccctctattttggtgaccaatactactgtaaatgtatttggttttttgcagttcacagggtatta

SEQ ID NO: 56830 - DNA, 201 bp, Homo sapiens
aggtcaaagttctggtccacaaacccttccctatagaagttcaatggctgcgaaagaatttgtagtaaaccaggcctcccaggatggcgagctccagtaaratgataatggaaagcagcagcttgttggttgtcactctacaaagagaagcaaagtggggagtagtcagaagtttggataaccttccttctaaacattttg

SEQ ID NO: 56831 - DNA, 201 bp, Homo sapiens
tatccacatccctaacatcatgcattcacaaggtcaaagttctggtccacaaacccttccctatagaagttcaatggctgcgaaagaatttgtagtaaacyaggcctcccaggatggcgagctccagtaagatgataatggaaagcagcagcttgttggttacttactttctggacattgaacggagaatcttccgacttt

SEQ ID NO: 56832 - DNA, 201 bp, Homo sapiens; identical to SEQ ID NO: 56828

SEQ ID NO: 56833 - DNA, 201 bp, Homo sapiens; identical to SEQ ID NO: 56829

SEQ ID NO: 56834 - DNA, 201 bp, Homo sapiens
aggtcaaagttctggtccacaaacccttccctatagaagttcaatggctgcgaaagaatttgtagtaaaccaggcctcccaggatggcgagctccagtaaratgataatggaaagcagcagcttgttggttacttactttctggacattgaacggagaatcttccgacttttgctcaagttttcacttgtgtttaccaact

SEQ ID NO: 56835 - DNA, 201 bp, Homo sapiens
acacactgatccaagtgagcatcgagagtggtcggatgacccaccaccacccaacaggctacctgggggcccttgcgtctgctctttttacagcctatgcwgtgaatagcagaccacccttgcagtggggaaaaggactgatggagctgctaccagaagctaaaaagtacattgtccaatcaggctactttgtagaggaaa

SEQ ID NO: 56836 - DNA, 201 bp, Homo sapiens
tggtcaccctcagtccagccagtgggcttgctctcatttggcctgttctcaggggtgggaaggaagagcgtcccttccttctccttttgagaaaaccacakaactatgactctcatgatttttcctttgtgaaatccctggttttcagctggaagcggtgggtaaatgaggtctgatgatagcagtcctgccaccttctag

SEQ ID NO: 56837 - DNA, 201 bp, Homo sapiens
tgtattacctccttgctaagcattaccaagactgcatggaagacatggatgggcgggcaccaggtggtgcctcggtgcacaacgccatgcagctgaagccrggcaagcccaatggctggaggattcccttcaacagccatgagggcggctgtggggctgccatgcgggccatgtgcatcggtctcaggttcccacaccata

SEQ ID NO: 56838 - DNA, 201 bp, Homo sapiens
tggtgctgagtgcagctggagatgccctggggtactacaatgggaagtgggagttcctccaggatggggagaagatacaccggcagttggcccagctgggyggcttggatgccctagacgtgggaaggtggagagttagtgacgacacagtgatgcacttggccacagcagaagctcttgtggaagctgggaaagccccta

SEQ ID NO: 56839 - DNA, 102 bp, Homo sapiens
agagagagagagagagaagggaggatgagaacgaatggggggaagagataaactttatgcataacattagggtaaatcaataaagatggtctgacacatcrt

SEQ ID NO: 56840 - DNA, 201 bp, Homo sapiens
tggaggagggttgtgtgtgccccagggggtcgggggtaggggatgcagggaggatcttagcatttgttgttttctagtgcagggctttagccacaattgtraacaacaggaaaaggctctttagagatcctattagatttgctttgccgattgtcactcttcatcacaggcacatttcaaaaagaggttagactttcagac

SEQ ID NO: 56841 - DNA, 201 bp, Homo sapiens
tcatgatttttcctttgtgaaatccctggttttcagctggaagcggtgggtaaatgaggtctgatgatagcagtcctgccaccttctagttcatcccatargaatgtttttccaagtccttccagtctttttagaacgtggtggaggagggttgtgtgtgccccagggggtcgggggtaggggatgcagggaggatcttag

SEQ ID NO: 56842 - DNA, 103 bp, Homo sapiens
gagagagagagagagagaagggaggatgagaacgaatggggggaagagataaactttatgcataacattagggtaaatcaataaagatggtctgacacatmgt

SEQ ID NO: 56843 - DNA, 201 bp, Homo sapiens; identical to SEQ ID NO: 56835

SEQ ID NO: 56844 - DNA, 201 bp, Homo sapiens; identical to SEQ ID NO: 56836

SEQ ID NO: 56845 - DNA, 201 bp, Homo sapiens; identical to SEQ ID NO: 56837

SEQ ID NO: 56846 - DNA, 201 bp, Homo sapiens; identical to SEQ ID NO: 56838

SEQ ID NO: 56847 - DNA, 201 bp, Homo sapiens
ctgaccacagccaggcgagagccggctttccggtgccgccacattccgggcaccaggctccgggctcttcagagcatttggggcgggcgacggaggtcccktccactctcgcttgggtgcagaagggcgcggcggtgccaggaagccgccttggaggctccaagattagctcactcagcgcggccaagcgcaggtgcgggg

SEQ ID NO: 56848 - DNA, 102 bp, Homo sapiens; identical to SEQ ID NO: 56839

SEQ ID NO: 56849 - DNA, 201 bp, Homo sapiens; identical to SEQ ID NO: 56840

SEQ ID NO: 56850 - DNA, 201 bp, Homo sapiens; identical to SEQ ID NO: 56841

SEQ ID NO: 56851 - DNA, 103 bp, Homo sapiens; identical to SEQ ID NO: 56842

SEQ ID NO: 56852 - DNA, 139 bp, Homo sapiens
atggtgaaggtgaaggtggaagtcaacggatttggccayactgggcgcctggtcaccagggctgcttttaactctggtaaagtagatattgtcaccatcaatgaccccttcattgacctcaactaccccttcattgacc

SEQ ID NO: 56853 - DNA, 201 bp, Homo sapiens
agcacctctggccaaggtcatccatgacaattttggtatcatggaaggactcatgaccacagtccatgccatcgctgcaacccagaagactgtggatagcmcctctgggaaactgtggtgtgatggatgcagggctctccagaacatcatccctgcctctactggtgctgccaaggctgtggacaagccaaggtgctgcca

SEQ ID NO: 56854 - DNA, 201 bp, Homo sapiens
ggtcatccatgacaattttggtatcatggaaggactcatgaccacagtccatgccatcgctgcaacccagaagactgtggatagcccctctgggaaactgkggtgtgatggatgcagggctctccagaacatcatccctgcctctactggtgctgccaaggctgtggacaagccaaggtgctgccaaggctgtgtcatccc

SEQ ID NO: 56855 - DNA, 201 bp, Homo sapiens
ccctccaaaatcaaatggggtgacactggggctgagtacatggtgaagtccaccagcatcttcaccaccatggaaaaggctggggcttacttgcagggagragccaaaaggatcataatctctgctccctctgctgacgcccccatgttcatgatgggcataaaccgtgagaagtatgacaacagcctcgagatcatcagc

SEQ ID NO: 56856 - DNA, 136 bp, Homo sapiens
tgctgcactcagttccccaccacactgagaatctcccctcctcacagtttccatgcagaccccctgaagagggagatgcctagggagcccctccttgtcaygaaccatcaataaagtcccctgtgctcagccaaaa

SEQ ID NO: 56857 - DNA, 190 bp, Homo sapiens
atgaaatacttaatgatctttccattggaaataactggaagtgaagaggttttgttgcttgtacagtgtcagatgaggaacaccactatcttaattttgcratacactgcatttgctggtgctatttttatacagtgaagcaacagctttgcagcaaaataataaaatacttctttgttaaaaaaaaaaa

SEQ ID NO: 56858 - DNA, 201 bp, Homo sapiens
ctaaataaactagtatgaaataacgcaagccagcagagttgtcttaaattagtggtggatagaagacttagaatagaaacttttaatattaccgatggggraaaaaaactactgttaacactgctaatgaaagaaaatgcctttaactttctaatgattatagataaatataatatgcatctttttcacaatatcctatga

SEQ ID NO: 56859 - DNA, 201 bp, Homo sapiens
tccatacctggatttgggatgaaatacttaatgatctttccattggaaataactggaagtgaagaggttttgttgcttgtacagtgtcagatgaggaacamcactatcttaattttgcgatacactgcatttgctggtgctatttttatacagtgaagcaacagctttgcagcaaaataataaaatacttctttgttaaaa

SEQ ID NO: 56860 - DNA, 201 bp, Homo sapiens
cccgcacccctgctaacatggcgctgcgagtggtgcggagcgtgcgggctctgctctgcaccctgcgcgcggtcccgtcacccgccgcgccctgcccgccraggccctggcagctgggggtgggcgccgtccgtacgctgcgcactggacccgctctgctctcggtgcgtaaattcacagagaaacacgaatgggtaacaa

SEQ ID NO: 56861 - DNA, 201 bp, Homo sapiens; identical to SEQ ID NO: 56858

SEQ ID NO: 56862 - DNA, 201 bp, Homo sapiens; identical to SEQ ID NO: 56860

SEQ ID NO: 56863 - DNA, 137 bp, Homo sapiens
acctttgaggcccaagggggagcgagccggtgctgcygcaggctgaggctgcggcagaggcggcgaggcgcgggcggtgaggacggacagtcaccgacttagtccagttccctgtgatctcaaaacaattgttgcag

SEQ ID NO: 56864 - DNA, 201 bp, Homo sapiens
aacagctatgacaagacatttttatcatggccgtacagagactatgcgatcatgcacagttgaagcagtgaggtggtgccagtccatgcaggatccttctstcaatcttcgtgagcggcagcaaaagatgttacaagcttttgcaaagcataataaaatgatgaaagattgttcagctggaaaaggatttgatcgtcacct

SEQ ID NO: 56865 - DNA, 201 bp, Homo sapiens
aacgaacatttcagtaccaggattctcttccatcactgcctgttccttcacttgaagaatcattaaaaaaataccttgaatcagtgaaaccatttgcaaakcaagaagaatataagaaaactgaagaaatagttcaaaaatttcaaagtgggattggagaaaaattgcaccagaaattgcttgaaagagcaaaaggaaaaa

SEQ ID NO: 56866 - DNA, 201 bp, Homo sapiens
aaaagagaaaaataactcttttgaacaaacagacaaattagctagtagtatggagatgtataccctctattacacacataaaaccgtaacaaaattcattktggtgtattataattagttttgtgaatagaaaaataaagcacttatgtttaaatttgttacagtgacttttaaaggattaatgttgaatcacattgtcag

SEQ ID NO: 56867 - DNA, 201 bp, Homo sapiens
gggattggagaaaaattgcaccagaaattgcttgaaagagcaaaaggaaaaagaaattggctggaagagtggtggctgaatgttgcctatctggatgttcrtataccatcacaattgaatgtcaactttgcgggtcctgcagctcattttgaacactactggcctccaaaggaagggactcaattagaaagaggaagtata

SEQ ID NO: 56868 - DNA, 201 bp, Homo sapiens; identical to SEQ ID NO: 56864

SEQ ID NO: 56869 - DNA, 201 bp, Homo sapiens; identical to SEQ ID NO: 56865

SEQ ID NO: 56870 - DNA, 201 bp, Homo sapiens; identical to SEQ ID NO: 56866

SEQ ID NO: 56871 - DNA, 201 bp, Homo sapiens; identical to SEQ ID NO: 56867

SEQ ID NO: 56872 - DNA, 201 bp, Homo sapiens
ttcggccgcctgcggcaccggggaccaaggcgcgctctttgggaacctgtccacggccaacccgcggcagcagatgaacgggttgacctcgttcctggacrcgtccaccgtgtatggcagctccccggccctagagaggcagctgcggaactggaccagtgccgaagggctgctccgcgtccacgcgcgcctccgggactc

SEQ ID NO: 56873 - DNA, 201 bp, Homo sapiens
agcaggagcgtggccgacaagatcctggacttgtacaagcatcctgacaacatcgatgtctggctgggaggcttagctgaaaacttcctccccagggctcrgacagggcccctgtttgcctgtctcattgggaagcagatgaaggctctgcgggacggtgactggttttggtgggagaacagccacgtcttcacggatgca

SEQ ID NO: 56874 - DNA, 201 bp, Homo sapiens
atgtctggctgggaggcttagctgaaaacttcctccccagggctcggacagggcccctgtttgcctgtctcattgggaagcagatgaaggctctgcgggayggtgactggttttggtgggagaacagccacgtcttcacggatgcacagaggcgtgagctggagaagcactccctgtctcgggtcatctgtgacaacactg

SEQ ID NO: 56875 - DNA, 201 bp, Homo sapiens
cccttcgtgccgccacgcgcgcctgcggcctgtgcgcccgagcccggcatccccggagagacccgcgggccctgcttcctggccggagacggccgcgccascgaggtcccctccctgacggcactgcacacgctgtggctgcgcgagcacaaccgcctggccgcggcgctcaaggccctcaatgcgcactggagcgcggac

SEQ ID NO: 56876 - DNA, 201 bp, Homo sapiens
ggctgccgagagccctctgagggcaaagtggcaggacactgcagaacagcttcatgttcccaaaatcaccgtacgactcttttccaaacacaggcaaatcsgaaatcagcaggacgactgttttcccaacacgggtaaatctagtaccatgtcgtagttactctcaggcatggatgaataaatgttatagctgcatttgtc

SEQ ID NO: 56877 - DNA, 201 bp, Homo sapiens
acccgaggccttccagcagtacgtgggtccctatgaaggctatgactccaccgccaaccccactgtgtccaacgtgttctccacagccgccttccgcttcrgccatgccacgatccacccgctggtgaggaggctggacgccagcttccaggagcaccccgacctgcccgggctgtggctgcaccaggctttcttcagccc

SEQ ID NO: 56878 - DNA, 201 bp, Homo sapiens
catcgatgtctggctgggaggcttagctgaaaacttcctccccagggctcggacagggcccctgtttgcctgtctcattgggaagcagatgaaggctctgygggacggtgactggttttggtgggagaacagccacgtcttcacggatgcacagaggcgtgagctggagaagcactccctgtctcgggtcatctgtgacaa

SEQ ID NO: 56879 - DNA, 201 bp, Homo sapiens
tgtctgcccttctaccgctcttcggccgcctgcggcaccggggaccaaggcgcgctctttgggaacctgtccacggccaacccgcggcagcagatgaacgkgttgacctcgttcctggacgcgtccaccgtgtatggcagctccccggccctagagaggcagctgcggaactggaccagtgccgaagggctgctccgcgtc

SEQ ID NO: 56880 - DNA, 201 bp, Homo sapiens
tcaagacgacaagtgtggcttcccagagagcgtggagaatggggactttgtgcactgtgaggagtctgggaggcgcgtgctggtgtattcctgccggcacrggtatgagctccaaggccgggagcagctcacttgcacccaggaaggatgggatttccagcctcccctctgcaaagatgtgaacgagtgtgcagacggtgc

SEQ ID NO: 56881 - DNA, 201 bp, Homo sapiens
ccaacccgcggcagcagatgaacgggttgacctcgttcctggacgcgtccaccgtgtatggcagctccccggccctagagaggcagctgcggaactggacsagtgccgaagggctgctccgcgtccacgcgcgcctccgggactccggccgcgcctacctgcccttcgtgccgccacgcgcgcctgcggcctgtgcgcccg

SEQ ID NO: 56882 - DNA, 201 bp, Homo sapiens
gctgcggaactggaccagtgccgaagggctgctccgcgtccacgcgcgcctccgggactccggccgcgcctacctgcccttcgtgccgccacgcgcgcctkcggcctgtgcgcccgagcccggcatccccggagagacccgcgggccctgcttcctggccggagacggccgcgccagcgaggtcccctccctgacggcact

SEQ ID NO: 56883 - DNA, 201 bp, Homo sapiens
ggaggtgacaagacatgtcattcaagtttcaaatgaggttgtcacagatgatgaccgctattctgacctcctgatggcatggggacaatacatcgaccacracatcgcgttcacaccacagagcaccagcaaagctgccttcgggggaggggctgactgccagatgacttgtgagaaccaaaacccatgttttcccataca

SEQ ID NO: 56884 - DNA, 201 bp, Homo sapiens
atgccacgatccacccgctggtgaggaggctggacgccagcttccaggagcaccccgacctgcccgggctgtggctgcaccaggctttcttcagcccatgkacattactccgtggaggtggtttggacccactaatacgaggccttcttgcaagaccagccaaactgcaggtgcaggatcagctgatgaacgaggagctga

SEQ ID NO: 56885 - DNA, 201 bp, Homo sapiens
cggccctggcacgatggctccctccagtctatgaggacggcttcagtcagccccgaggctggaaccccggcttcttgtacaacgggttcccactgcccccrgtccgggaggtgacaagacatgtcattcaagtttcaaatgaggttgtcacagatgatgaccgctattctgacctcctgatggcatggggacaatacatcg

SEQ ID NO: 56886 - DNA, 179 bp, Homo sapiens
catttcagaagagttacagccgtgaaaattactcagcagtgcagttggctgagaagaggaaaaaagaatgagagcgctsgctgtgctgtctgtcacgctggttatggcctgcacagaagccttcttccccttcatctcgagagggaaagaactcctttggggaaagcctgaggagtctc

SEQ ID NO: 56887 - DNA, 201 bp, Homo sapiens
cagcttccaggagcaccccgacctgcccgggctgtggctgcaccaggctttcttcagcccatggacattactccgtggaggtggtttggacccactaataygaggccttcttgcaagaccagccaaactgcaggtgcaggatcagctgatgaacgaggagctgacggaaaggctctttgtgctgtccaattccagcacctt

SEQ ID NO: 56888 - DNA, 201 bp, Homo sapiens
caccttggatctggcgtccatcaacctgcagaggggccgggaccacgggctgccaggttacaatgagtggagggagttctgcggcctgcctcgcctggagwcccccgctgacctgagcacagccatcgccagcaggagcgtggccgacaagatcctggacttgtacaagcatcctgacaacatcgatgtctggctgggagg

SEQ ID NO: 56889 - DNA, 144 bp, Homo sapiens
acacgggtaaatctagtaccatgtcgtagttactctcaggcatggatgaataaatgttatagctgcatttgtctggccttttcttgtaaacattgcctgayttgttccttctggggctttgccattaaaatgtatttacagatt

SEQ ID NO: 56890 - DNA, 201 bp, Homo sapiens
gtctcgtgtctctagcgtcttggaggaaagcaagcgcctggtggacaccgccatgtacgccacgatgcagagaaacctcaagaaaagaggaatcctttctscagctcagcttctgtctttttccaaacttcctgagccaacaagcggagtgattgcccgagcagcagagataatggaaacatcaatacaagcgatgaaaag

SEQ ID NO: 56891 - DNA, 201 bp, Homo sapiens
ctgggacccgaggccttccagcagtacgtgggtccctatgaaggctatgactccaccgccaaccccactgtgtccaacgtgttctccacagccgccttccrcttcggccatgccacgatccacccgctggtgaggaggctggacgccagcttccaggagcaccccgacctgcccgggctgtggctgcaccaggctttcttc

SEQ ID NO: 56892 - DNA, 201 bp, Homo sapiens
ggagaacagccacgtcttcacggatgcacagaggcgtgagctggagaagcactccctgtctcgggtcatctgtgacaacactggcctcaccagggtgcccrtggatgccttccaagtcggcaaattccccgaagactttgagtcttgtgacagcatcactggcatgaacctggaggcctggagggaaacctttcctcaaga

SEQ ID NO: 56893 - DNA, 201 bp, Homo sapiens
tgcagaaacaccaaaggcggcttccagtgtctctgcgcggacccctacgagttaggagacgatgggagaacctgcgtagactccgggaggctccctcgggygacttggatctccatgtcgctggctgctctgctgatcggaggcttcgcaggtctcacctcgacggtgatttgcaggtggacacgcactggcactaaatcc

SEQ ID NO: 56894 - DNA, 201 bp, Homo sapiens
tgaccgctattctgacctcctgatggcatggggacaatacatcgaccacgacatcgcgttcacaccacagagcaccagcaaagctgccttcgggggagggkctgactgccagatgacttgtgagaaccaaaacccatgttttcccatacaactcccggaggaggcccggccggccgcgggcaccgcctgtctgcccttcta

SEQ ID NO: 56895 - DNA, 201 bp, Homo sapiens
gcagatgaaggctctgcgggacggtgactggttttggtgggagaacagccacgtcttcacggatgcacagaggcgtgagctggagaagcactccctgtctygggtcatctgtgacaacactggcctcaccagggtgcccatggatgccttccaagtcggcaaattccccgaagactttgagtcttgtgacagcatcactgg

SEQ ID NO: 56896 - DNA, 201 bp, Homo sapiens
gacactgcagaacagcttcatgttcccaaaatcaccgtacgactcttttccaaacacaggcaaatcggaaatcagcaggacgactgttttcccaacacggktaaatctagtaccatgtcgtagttactctcaggcatggatgaataaatgttatagctgcatttgtctggccttttcttgtaaacattgcctgatttgttc

SEQ ID NO: 56897 - DNA, 201 bp, Homo sapiens
gcagaaacaccaaaggcggcttccagtgtctctgcgcggacccctacgagttaggagacgatgggagaacctgcgtagactccgggaggctccctcgggtracttggatctccatgtcgctggctgctctgctgatcggaggcttcgcaggtctcacctcgacggtgatttgcaggtggacacgcactggcactaaatcca

SEQ ID NO: 56898 - DNA, 201 bp, Homo sapiens
tggaggcctggagggaaacctttcctcaagacgacaagtgtggcttcccagagagcgtggagaatggggactttgtgcactgtgaggagtctgggaggcgygtgctggtgtattcctgccggcacgggtatgagctccaaggccgggagcagctcacttgcacccaggaaggatgggatttccagcctcccctctgcaaag

SEQ ID NO: 56899 - DNA, 201 bp, Homo sapiens
gtctcgggtcatctgtgacaacactggcctcaccagggtgcccatggatgccttccaagtcggcaaattccccgaagactttgagtcttgtgacagcatcmctggcatgaacctggaggcctggagggaaacctttcctcaagacgacaagtgtggcttcccagagagcgtggagaatggggactttgtgcactgtgagga

SEQ ID NO: 56900 - DNA, 201 bp, Homo sapiens
ggaccacgggctgccaggttacaatgagtggagggagttctgcggcctgcctcgcctggagacccccgctgacctgagcacagccatcgccagcaggagcrtggccgacaagatcctggacttgtacaagcatcctgacaacatcgatgtctggctgggaggcttagctgaaaacttcctccccagggctcggacagggcc

SEQ ID NO: 56901 - DNA, 201 bp, Homo sapiens
agaggcgtgagctggagaagcactccctgtctcgggtcatctgtgacaacactggcctcaccagggtgcccatggatgccttccaagtcggcaaattcccygaagactttgagtcttgtgacagcatcactggcatgaacctggaggcctggagggaaacctttcctcaagacgacaagtgtggcttcccagagagcgtgg

SEQ ID NO: 56902 - DNA, 201 bp, Homo sapiens; identical to SEQ ID NO: 56872

SEQ ID NO: 56903 - DNA, 201 bp, Homo sapiens; identical to SEQ ID NO: 56873

SEQ ID NO: 56904 - DNA, 201 bp, Homo sapiens; identical to SEQ ID NO: 56874

SEQ ID NO: 56905 - DNA, 201 bp, Homo sapiens; identical to SEQ ID NO: 56875

SEQ ID NO: 56906 - DNA, 201 bp, Homo sapiens; identical to SEQ ID NO: 56876

SEQ ID NO: 56907 - DNA, 201 bp, Homo sapiens; identical to SEQ ID NO: 56877

SEQ ID NO: 56908 - DNA, 201 bp, Homo sapiens; identical to SEQ ID NO: 56878

SEQ ID NO: 56909 - DNA, 201 bp, Homo sapiens; identical to SEQ ID NO: 56879

SEQ ID NO: 56910 - DNA, 201 bp, Homo sapiens; identical to SEQ ID NO: 56880

SEQ ID NO: 56911 - DNA, 201 bp, Homo sapiens; identical to SEQ ID NO: 56881

SEQ ID NO: 56912 - DNA, 201 bp, Homo sapiens; identical to SEQ ID NO: 56882

SEQ ID NO: 56913 - DNA, 201 bp, Homo sapiens; identical to SEQ ID NO: 56883

SEQ ID NO: 56914 - DNA, 201 bp, Homo sapiens
atgccacgatccacccgctggtgaggaggctggacgccagcttccaggagcaccccgacctgcccgggctgtggctgcaccaggctttcttcagcccatgkacattactccgtggaggttacaatgagtggagggagttctgcggcctgcctcgcctggagacccccgctgacctgagcacagccatcgccagcaggagcg

SEQ ID NO: 56915 - DNA, 201 bp, Homo sapiens; identical to SEQ ID NO: 56885

SEQ ID NO: 56916 - DNA, 179 bp, Homo sapiens; identical to SEQ ID NO: 56886

SEQ ID NO: 56917 - DNA, 201 bp, Homo sapiens
gcccgggctgtggctgcaccaggctttcttcagcccatggacattactccgtggaggttacaatgagtggagggagttctgcggcctgcctcgcctggagwcccccgctgacctgagcacagccatcgccagcaggagcgtggccgacaagatcctggacttgtacaagcatcctgacaacatcgatgtctggctgggagg

SEQ ID NO: 56918 - DNA, 201 bp, Homo sapiens; identical to SEQ ID NO: 56890

SEQ ID NO: 56919 - DNA, 201 bp, Homo sapiens; identical to SEQ ID NO: 56892

SEQ ID NO: 56920 - DNA, 201 bp, Homo sapiens; identical to SEQ ID NO: 56891

SEQ ID NO: 56921 - DNA, 201 bp, Homo sapiens; identical to SEQ ID NO: 56894

SEQ ID NO: 56922 - DNA, 201 bp, Homo sapiens
tgcagaaacaccaaaggcggcttccagtgtctctgcgcggacccctacgagttaggagacgatgggagaacctgcgtagactccgggaggctccctcgggygacttggatctccatgtcgctggctgctctgctgatcggaggcttcgcaggtctcacctcgacggtgatttgcaggtggagagtgctgggatggaaggcc

SEQ ID NO: 56923 - DNA, 201 bp, Homo sapiens; identical to SEQ ID NO: 56895

SEQ ID NO: 56924 - DNA, 173 bp, Homo sapiens
gacactgcagaacagcttcatgttcccaaaatcaccgtacgactcttttccaaacacaggcaaatcggaaatcagcaggacgactgttttcccaacacggktaaatctagtaccatgtcgtagttactctcaggcatggatgaataaatgttatagctgcatttgtctggcct

SEQ ID NO: 56925 - DNA, 201 bp, Homo sapiens
gcagaaacaccaaaggcggcttccagtgtctctgcgcggacccctacgagttaggagacgatgggagaacctgcgtagactccgggaggctccctcgggtracttggatctccatgtcgctggctgctctgctgatcggaggcttcgcaggtctcacctcgacggtgatttgcaggtggagagtgctgggatggaaggccg

SEQ ID NO: 56926 - DNA, 201 bp, Homo sapiens; identical to SEQ ID NO: 56898

SEQ ID NO: 56927 - DNA, 201 bp, Homo sapiens; identical to SEQ ID NO: 56899

SEQ ID NO: 56928 - DNA, 201 bp, Homo sapiens
gacattactccgtggaggttacaatgagtggagggagttctgcggcctgcctcgcctggagacccccgctgacctgagcacagccatcgccagcaggagcrtggccgacaagatcctggacttgtacaagcatcctgacaacatcgatgtctggctgggaggcttagctgaaaacttcctccccagggctcggacagggcc

SEQ ID NO: 56929 - DNA, 201 bp, Homo sapiens; identical to SEQ ID NO: 56901

SEQ ID NO: 56930 - DNA, 201 bp, Homo sapiens; identical to SEQ ID NO: 56872

SEQ ID NO: 56931 - DNA, 201 bp, Homo sapiens; identical to SEQ ID NO: 56873

SEQ ID NO: 56932 - DNA, 201 bp, Homo sapiens; identical to SEQ ID NO: 56874

SEQ ID NO: 56933 - DNA, 201 bp, Homo sapiens; identical to SEQ ID NO: 56875

SEQ ID NO: 56934 - DNA, 201 bp, Homo sapiens; identical to SEQ ID NO: 56876

SEQ ID NO: 56935 - DNA, 201 bp, Homo sapiens; identical to SEQ ID NO: 56877

SEQ ID NO: 56936 - DNA, 201 bp, Homo sapiens; identical to SEQ ID NO: 56878

SEQ ID NO: 56937 - DNA, 201 bp, Homo sapiens; identical to SEQ ID NO: 56879

SEQ ID NO: 56938 - DNA, 201 bp, Homo sapiens; identical to SEQ ID NO: 56880

SEQ ID NO: 56939 - DNA, 201 bp, Homo sapiens; identical to SEQ ID NO: 56881

SEQ ID NO: 56940 - DNA, 201 bp, Homo sapiens; identical to SEQ ID NO: 56882

SEQ ID NO: 56941 - DNA, 201 bp, Homo sapiens; identical to SEQ ID NO: 56883

SEQ ID NO: 56942 - DNA, 201 bp, Homo sapiens; identical to SEQ ID NO: 56914

SEQ ID NO: 56943 - DNA, 201 bp, Homo sapiens; identical to SEQ ID NO: 56885

SEQ ID NO: 56944 - DNA, 179 bp, Homo sapiens; identical to SEQ ID NO: 56886

SEQ ID NO: 56945 - DNA, 201 bp, Homo sapiens; identical to SEQ ID NO: 56917

SEQ ID NO: 56946 - DNA, 144 bp, Homo sapiens; identical to SEQ ID NO: 56889

SEQ ID NO: 56947 - DNA, 201 bp, Homo sapiens; identical to SEQ ID NO: 56890

SEQ ID NO: 56948 - DNA, 201 bp, Homo sapiens; identical to SEQ ID NO: 56891

SEQ ID NO: 56949 - DNA, 201 bp, Homo sapiens; identical to SEQ ID NO: 56892

SEQ ID NO: 56950 - DNA, 201 bp, Homo sapiens; identical to SEQ ID NO: 56893

SEQ ID NO: 56951 - DNA, 201 bp, Homo sapiens; identical to SEQ ID NO: 56894

SEQ ID NO: 56952 - DNA, 201 bp, Homo sapiens; identical to SEQ ID NO: 56895

SEQ ID NO: 56953 - DNA, 201 bp, Homo sapiens; identical to SEQ ID NO: 56896

SEQ ID NO: 56954 - DNA, 201 bp, Homo sapiens; identical to SEQ ID NO: 56897

SEQ ID NO: 56955 - DNA, 201 bp, Homo sapiens; identical to SEQ ID NO: 56898

SEQ ID NO: 56956 - DNA, 201 bp, Homo sapiens; identical to SEQ ID NO: 56899

SEQ ID NO: 56957 - DNA, 201 bp, Homo sapiens; identical to SEQ ID NO: 56928

SEQ ID NO: 56958 - DNA, 201 bp, Homo sapiens; identical to SEQ ID NO: 56901

SEQ ID NO: 56959 - DNA, 201 bp, Homo sapiens; identical to SEQ ID NO: 56875

SEQ ID NO: 56960 - DNA, 179 bp, Homo sapiens
gaagggctgctccgcgtccacgcgcgcctccgggactccggccgcgcctacctgcccttcgtgccgccacgcgcgcctkcggcctgtgcgcccgagcccggcatccccggagagacccgcgggccctgcttcctggccggagacggccgcgccagcgaggtcccctccctgacggcact

SEQ ID NO: 56961 - DNA, 147 bp, Homo sapiens
cctggccgcggcgctcaaggccctcaatgcgcactggagcgcggacgccgtgtaccaggaggcgcgcaaggtcgtgggcgctctgcaccagccgccttccrcttcggccatgccacgatccacccgctggtgaggaggctggacgcc

SEQ ID NO: 56962 - DNA, 142 bp, Homo sapiens
ccgcggcgctcaaggccctcaatgcgcactggagcgcggacgccgtgtaccaggaggcgcgcaaggtcgtgggcgctctgcaccagccgccttccgcttcrgccatgccacgatccacccgctggtgaggaggctggacgcc

SEQ ID NO: 56963 - DNA, 201 bp, Homo sapiens; identical to SEQ ID NO: 56873

SEQ ID NO: 56964 - DNA, 201 bp, Homo sapiens; identical to SEQ ID NO: 56874

SEQ ID NO: 56965 - DNA, 201 bp, Homo sapiens; identical to SEQ ID NO: 56876

SEQ ID NO: 56966 - DNA, 201 bp, Homo sapiens; identical to SEQ ID NO: 56877

SEQ ID NO: 56967 - DNA, 201 bp, Homo sapiens; identical to SEQ ID NO: 56878

SEQ ID NO: 56968 - DNA, 201 bp, Homo sapiens; identical to SEQ ID NO: 56880

SEQ ID NO: 56969 - DNA, 201 bp, Homo sapiens; identical to SEQ ID NO: 56883

SEQ ID NO: 56970 - DNA, 201 bp, Homo sapiens; identical to SEQ ID NO: 56884

SEQ ID NO: 56971 - DNA, 201 bp, Homo sapiens; identical to SEQ ID NO: 56885

SEQ ID NO: 56972 - DNA, 179 bp, Homo sapiens; identical to SEQ ID NO: 56886

SEQ ID NO: 56973 - DNA, 201 bp, Homo sapiens; identical to SEQ ID NO: 56887

SEQ ID NO: 56974 - DNA, 201 bp, Homo sapiens; identical to SEQ ID NO: 56888

SEQ ID NO: 56975 - DNA, 144 bp, Homo sapiens; identical to SEQ ID NO: 56889

SEQ ID NO: 56976 - DNA, 201 bp, Homo sapiens; identical to SEQ ID NO: 56890

SEQ ID NO: 56977 - DNA, 201 bp, Homo sapiens; identical to SEQ ID NO: 56891

SEQ ID NO: 56978 - DNA, 201 bp, Homo sapiens; identical to SEQ ID NO: 56892

SEQ ID NO: 56979 - DNA, 201 bp, Homo sapiens
tgaccgctattctgacctcctgatggcatggggacaatacatcgaccacgacatcgcgttcacaccacagagcaccagcaaagctgccttcgggggagggkctgactgccagatgacttgtgagaaccaaaacccatgttttcccatacaaatcatcaccctgagggattacatccccaggatcctgggacccgaggcctt

SEQ ID NO: 56980 - DNA, 201 bp, Homo sapiens; identical to SEQ ID NO: 56893

SEQ ID NO: 56981 - DNA, 201 bp, Homo sapiens; identical to SEQ ID NO: 56895

SEQ ID NO: 56982 - DNA, 201 bp, Homo sapiens; identical to SEQ ID NO: 56896

SEQ ID NO: 56983 - DNA, 201 bp, Homo sapiens; identical to SEQ ID NO: 56897

SEQ ID NO: 56984 - DNA, 201 bp, Homo sapiens; identical to SEQ ID NO: 56898

SEQ ID NO: 56985 - DNA, 201 bp, Homo sapiens; identical to SEQ ID NO: 56900

SEQ ID NO: 56986 - DNA, 201 bp, Homo sapiens; identical to SEQ ID NO: 56899

SEQ ID NO: 56987 - DNA, 201 bp, Homo sapiens; identical to SEQ ID NO: 56901

SEQ ID NO: 56988 - DNA, 201 bp, Homo sapiens; identical to SEQ ID NO: 56872

SEQ ID NO: 56989 - DNA, 201 bp, Homo sapiens; identical to SEQ ID NO: 56873

SEQ ID NO: 56990 - DNA, 201 bp, Homo sapiens; identical to SEQ ID NO: 56874

SEQ ID NO: 56991 - DNA, 201 bp, Homo sapiens; identical to SEQ ID NO: 56875

SEQ ID NO: 56992 - DNA, 201 bp, Homo sapiens; identical to SEQ ID NO: 56876

SEQ ID NO: 56993 - DNA, 201 bp, Homo sapiens; identical to SEQ ID NO: 56877

SEQ ID NO: 56994 - DNA, 201 bp, Homo sapiens; identical to SEQ ID NO: 56878

SEQ ID NO: 56995 - DNA, 201 bp, Homo sapiens; identical to SEQ ID NO: 56879

SEQ ID NO: 56996 - DNA, 201 bp, Homo sapiens; identical to SEQ ID NO: 56880

SEQ ID NO: 56997 - DNA, 201 bp, Homo sapiens; identical to SEQ ID NO: 56881

SEQ ID NO: 56998 - DNA, 201 bp, Homo sapiens; identical to SEQ ID NO: 56882

SEQ ID NO: 56999 - DNA, 201 bp, Homo sapiens; identical to SEQ ID NO: 56883

SEQ ID NO: 57000 - DNA, 201 bp, Homo sapiens; identical to SEQ ID NO: 56884

SEQ ID NO: 57001 - DNA, 201 bp, Homo sapiens; identical to SEQ ID NO: 56885

SEQ ID NO: 57002 - DNA, 113 bp, Homo sapiens
aatgagagcgctsgctgtgctgtctgtcacgctggttatggcctgcacagaagccttcttccccttcatctcgagagggaaagaactcctttggggaaagcctgaggagtctc

SEQ ID NO: 57003 - DNA, 201 bp, Homo sapiens; identical to SEQ ID NO: 56887

SEQ ID NO: 57004 - DNA, 201 bp, Homo sapiens; identical to SEQ ID NO: 56888

SEQ ID NO: 57005 - DNA, 144 bp, Homo sapiens; identical to SEQ ID NO: 56889

SEQ ID NO: 57006 - DNA, 201 bp, Homo sapiens; identical to SEQ ID NO: 56890

SEQ ID NO: 57007 - DNA, 201 bp, Homo sapiens; identical to SEQ ID NO: 56891

SEQ ID NO: 57008 - DNA, 201 bp, Homo sapiens; identical to SEQ ID NO: 56892

SEQ ID NO: 57009 - DNA, 201 bp, Homo sapiens; identical to SEQ ID NO: 56893

SEQ ID NO: 57010 - DNA, 201 bp, Homo sapiens; identical to SEQ ID NO: 56894

SEQ ID NO: 57011 - DNA, 201 bp, Homo sapiens; identical to SEQ ID NO: 56895

SEQ ID NO: 57012 - DNA, 201 bp, Homo sapiens; identical to SEQ ID NO: 56896

SEQ ID NO: 57013 - DNA, 201 bp, Homo sapiens; identical to SEQ ID NO: 56897

SEQ ID NO: 57014 - DNA, 201 bp, Homo sapiens; identical to SEQ ID NO: 56898

SEQ ID NO: 57015 - DNA, 201 bp, Homo sapiens; identical to SEQ ID NO: 56899

SEQ ID NO: 57016 - DNA, 201 bp, Homo sapiens; identical to SEQ ID NO: 56900

SEQ ID NO: 57017 - DNA, 201 bp, Homo sapiens; identical to SEQ ID NO: 56901

SEQ ID NO: 57018 - DNA, 201 bp, Homo sapiens
aagctgtgggccatgaagccatcaagctgctggtaaatgtagacgaggaggactatgagctgggccgacagaaactcctgaggaacttgatgctgcaagcwttgccctgacctattccctcttctcactttggggactgttcccatcacccacctctggagcttacactgttctggggtttgttctctacccttccaacca

SEQ ID NO: 57019 - DNA, 199 bp, Homo sapiens
agaagtcaagtcttaagacagtgggtgacccagattgccatagaggtcaggcctgcggtgctggaacacaggcaggtgtcggcgcaactgtcgcagatagytgaggtctattcgggcaaggcagaggcctggcccctcagagcagcgggccaccactgttccccaggggtctaccaccatgctgtggccataacttgct

SEQ ID NO: 57020 - DNA, 201 bp, Homo sapiens
tccctcttctcactttggggactgttcccatcacccacctctggagcttacactgttctggggtttgttctctacccttccaaccaatcacacccctgcctttttttttttttttttaaagaaaaagacaaaagaaagtggaagtggtattccccacccctccctgcacccatgtgcctgggcttcccctttatttccctt

SEQ ID NO: 57021 - DNA, 201 bp, Homo sapiens
tgagcactagctcatagtggcagggtgggggtgggaggggcaggtctaaactcacagaagtcaagtcttaagacagtgggtgacccagattgccatagagstcaggcctgcggtgctggaacacaggcaggtgtcggcgcaactgtcgcagatagttgaggtctattcgggcaaggcagaggcctggcccctcagagcagc

SEQ ID NO: 57022 - DNA, 201 bp, Homo sapiens
agggattctggaaagcattgcgtacctgagcccccagcatggcgggcctaaagcggcgggcaagccaggtgtggccagaagagcatggtgagcaggaacaygggctgtacagcctgcaccgcatgtttgacatcgtgggcactcatctgacacacagagatgtgcgcgtgctttctttcctctttgttgatgtcattgatg

SEQ ID NO: 57023 - DNA, 201 bp, Homo sapiens; identical to SEQ ID NO: 57018

SEQ ID NO: 57024 - DNA, 199 bp, Homo sapiens; identical to SEQ ID NO: 57019

SEQ ID NO: 57025 - DNA, 201 bp, Homo sapiens; identical to SEQ ID NO: 57020

SEQ ID NO: 57026 - DNA, 201 bp, Homo sapiens; identical to SEQ ID NO: 57021

SEQ ID NO: 57027 - DNA, 201 bp, Homo sapiens; identical to SEQ ID NO: 57022

SEQ ID NO: 57028 - DNA, 201 bp, Homo sapiens; identical to SEQ ID NO: 57018

SEQ ID NO: 57029 - DNA, 199 bp, Homo sapiens; identical to SEQ ID NO: 57019

SEQ ID NO: 57030 - DNA, 201 bp, Homo sapiens; identical to SEQ ID NO: 57020

SEQ ID NO: 57031 - DNA, 201 bp, Homo sapiens; identical to SEQ ID NO: 57021

SEQ ID NO: 57032 - DNA, 201 bp, Homo sapiens; identical to SEQ ID NO: 57022

SEQ ID NO: 57033 - DNA, 201 bp, Homo sapiens; identical to SEQ ID NO: 57018

SEQ ID NO: 57034 - DNA, 201 bp, Homo sapiens; identical to SEQ ID NO: 57020

SEQ ID NO: 57035 - DNA, 201 bp, Homo sapiens; identical to SEQ ID NO: 57022

SEQ ID NO: 57036 - DNA, 201 bp, Homo sapiens
gtggatggagtcaaatattctgccgagcttcacgtagctcactggaattctgcaaagtactccagccttgctgaagctgcctcaaaggctgatggtttggyagttattggtgttttgatgaaggttggtgaggccaacccaaagctgcagaaagtacttgatgccctccaagcaattaaaaccaagggcaaacgagcccca

SEQ ID NO: 57037 - DNA, 201 bp, Homo sapiens
tcaatgtggggcattccttccatgtaaattttgaggacaacgataaccgatcagtgctgaaaggtggtcctttctctgacagctacaggctctttcagttycattttcactggggcagtacaaatgagcatggttcagaacatacagtggatggagtcaaatattctgccgagcttcacgtagctcactggaattctgcaa

SEQ ID NO: 57038 - DNA, 201 bp, Homo sapiens
ctcagtagaagataatggcaagtccagactggggatatgatgacaaaaatggtcctgaacaatggagcaagctgtatcccattgccaatggaaataaccartcccctgttgatattaaaaccagtgaaaccaaacatgacacctctctgaaacctattagtgtctcctacaacccagccacagccaaagaaattatcaatg

SEQ ID NO: 57039 - DNA, 201 bp, Homo sapiens
gatgccctccaagcaattaaaaccaagggcaaacgagccccattcacaaattttgacccctctactctccttccttcatccctggatttctggacctaccytggctctctgactcatcctcctctttatgagagtgtaacttggatcatctgtaaggagagcatcagtgtcagctcagagcagctggcacaattccgcagc

SEQ ID NO: 57040 - DNA, 201 bp, Homo sapiens
gaagctgcctcaaaggctgatggtttggcagttattggtgttttgatgaaggttggtgaggccaacccaaagctgcagaaagtacttgatgccctccaagyaattaaaaccaagggcaaacgagccccattcacaaattttgacccctctactctccttccttcatccctggatttctggacctaccctggctctctgact

SEQ ID NO: 57041 - DNA, 201 bp, Homo sapiens; identical to SEQ ID NO: 57036

SEQ ID NO: 57042 - DNA, 201 bp, Homo sapiens; identical to SEQ ID NO: 57037

SEQ ID NO: 57043 - DNA, 201 bp, Homo sapiens; identical to SEQ ID NO: 57038

SEQ ID NO: 57044 - DNA, 201 bp, Homo sapiens; identical to SEQ ID NO: 57039

SEQ ID NO: 57045 - DNA, 201 bp, Homo sapiens; identical to SEQ ID NO: 57040

SEQ ID NO: 57046 - DNA, 201 bp, Homo sapiens; identical to SEQ ID NO: 57036

SEQ ID NO: 57047 - DNA, 201 bp, Homo sapiens; identical to SEQ ID NO: 57037

SEQ ID NO: 57048 - DNA, 201 bp, Homo sapiens; identical to SEQ ID NO: 57038

SEQ ID NO: 57049 - DNA, 201 bp, Homo sapiens; identical to SEQ ID NO: 57039

SEQ ID NO: 57050 - DNA, 201 bp, Homo sapiens; identical to SEQ ID NO: 57040

SEQ ID NO: 57051 - DNA, 201 bp, Homo sapiens
tccatgttgttcactggaattcagacaaataccccagctttgttgaggcagctcatgaaccagatggactggctgtcttgggagtgtttttacagattggygaacctaattcccaactgcaaaagattactgacactttggattccattaaagaaaagggtaaacaaactcgattcacaaattttgacctattgtctctgc

SEQ ID NO: 57052 - DNA, 107 bp, Homo sapiens
ttggattccattaaagaaaagggtaaacaaactcgattcacaaattttgacctattgtctctgcttccaccatcctgggactactggacatatcctggttytcttac

SEQ ID NO: 57053 - DNA, 201 bp, Homo sapiens
ccttccatgtgaatgcacaggaagctgagatgaaccctggcatttggcctcttgtagtcttggctaaggaaattctaacgcaaaaatagctcttgctttgrcttaggtgtgaagacccagacaggactgcagagggccccagagtggagatcccacatatttcaaaaacatgcttttccaaacccaggctattcggcaagg

SEQ ID NO: 57054 - DNA, 201 bp, Homo sapiens
gctgagatgaaccctggcatttggcctcttgtagtcttggctaaggaaattctaacgcaaaaatagctcttgctttgacttaggtgtgaagacccagacakgactgcagagggccccagagtggagatcccacatatttcaaaaacatgcttttccaaacccaggctattcggcaaggaagttagtttttaatctctccac

SEQ ID NO: 57055 - DNA, 201 bp, Homo sapiens
gaccgcctttggaggcagaagagcagttccacccaataactctaatgcagcggaagatgacctgcccacagtggagcttcagggcgtggtgccccggggcrtcaacctgcaagagtttcttaatgtcacgagcgttcacctgttcaaggagagatgggacactaacaaggtggaccaccacactgacaagtatgaaaacaa

SEQ ID NO: 57056 - DNA, 201 bp, Homo sapiens
cagaaggtgtcatgaaatcaaggtccaacgttgacatggactttgaagtggaaaatgctgtgctgggaaaagacttcaagctctccatcaccttccggaavaacagccacaaccgttacaccatcacagcttatctctcagccaacatcaccttctacaccggggtcccgaaggcagaattcaagaaggagacgttcgacg

SEQ ID NO: 57057 - DNA, 201 bp, Homo sapiens
cgaaccagtcgaaacccagaaacagacacgtacattctcttcaatccttggtgtgaagatgatgctgtgtatctggacaatgagaaagaaagagaagagtwtgtcctgaatgacatcggggtaattttttatggagaggtcaatgacatcaagaccagaagctggagctatggtcagtttgaagatggcatcctggacact

SEQ ID NO: 57058 - DNA, 201 bp, Homo sapiens
agaggacaggtctgtgcggctgtccatccagtcttcccccaaatgtattgtggggaaattccgcatgtatgttgctgtctggactccctatggcgtacttygaaccagtcgaaacccagaaacagacacgtacattctcttcaatccttggtgtgaagatgatgctgtgtatctggacaatgagaaagaaagagaagagta

SEQ ID NO: 57059 - DNA, 201 bp, Homo sapiens
gtttcttaatgtcacgagcgttcacctgttcaaggagagatgggacactaacaaggtggaccaccacactgacaagtatgaaaacaacaagctgattgtcygcagagggcagtctttctatgtgcagattgacttcagtcgtccatatgaccccagaagggatctcttcagggtggaatacgtcattggtcgctacccaca

SEQ ID NO: 57060 - DNA, 201 bp, Homo sapiens
aggctgatttatggtcagaatttccctctgatatgtctagggtgtgatttaggtcagtagactgtgattcttagcaaaaaatgaacagtgataagtatacwgggggcaaaatcagaatggaatgctctggtctatataaccacatttctaagcctttgagactgttcctgagccttcagcactaacctatgagggtgagct

SEQ ID NO: 57061 - DNA, 201 bp, Homo sapiens
tgcagtgggaagaagtgtgccggccctgggtctctgggcatcggaagctgatagccagcatgagcagtgactccctgagacatgtgtatggcgagctggaygtgcagattcaaagacgaccttccatgtgaatgcacaggaagctgagatgaaccctggcatttggcctcttgtagtcttggctaaggaaattctaacgca

SEQ ID NO: 57062 - DNA, 201 bp, Homo sapiens
gtcagaaacttccaggaccgcctttggaggcagaagagcagttccacccaataactctaatgcagcggaagatgacctgcccacagtggagcttcagggcktggtgccccggggcgtcaacctgcaagagtttcttaatgtcacgagcgttcacctgttcaaggagagatgggacactaacaaggtggaccaccacactga

SEQ ID NO: 57063 - DNA, 201 bp, Homo sapiens
aaccatccctgagatcatcatcaaggtccgtggcactcaggtagttggttctgacatgactgtgacaattcagtttaccaatcctttaaaagaaaccctgygaaatgtctgggtacacctggatggtcctggagtaacaagaccaatgaagaagatgttccgtgaaatccggcccaactccaccgtgcagtgggaagaagt

SEQ ID NO: 57064 - DNA, 201 bp, Homo sapiens
ctaaccatccctgagatcatcatcaaggtccgtggcactcaggtagttggttctgacatgactgtgacaattcagtttaccaatcctttaaaagaaacccygcgaaatgtctgggtacacctggatggtcctggagtaacaagaccaatgaagaagatgttccgtgaaatccggcccaactccaccgtgcagtgggaagaa

SEQ ID NO: 57065 - DNA, 201 bp, Homo sapiens
aatacctggcctcatttaaaacaagacttcagattccccactcagccttttgggaataatagcacatgatttgggctctagaattccagtcccctttctcrgggtcaggttctaccctccatgtgagaatatttttcccaggactagagcacaacataatttttatttttggcaaagccagaaaaagatctttcattttgc

SEQ ID NO: 57066 - DNA, 201 bp, Homo sapiens
acaaattggaggagatggcatgatggatattactgatacttacaaattccaagaaggtcaagaagaagagagattggccctagaaactgccctgatgtacrgagctaaaaagcccctcaacacagaaggtgtcatgaaatcaaggtccaacgttgacatggactttgaagtggaaaatgctgtgctgggaaaagacttcaa

SEQ ID NO: 57067 - DNA, 201 bp, Homo sapiens
tcatttacattacagctaagaaagatggcactcatgtggtggaaaatgtggatgccacccacattgggaaattaattgtgaccaaacaaattggaggagayggcatgatggatattactgatacttacaaattccaagaaggtcaagaagaagagagattggccctagaaactgccctgatgtacggagctaaaaagcccc

SEQ ID NO: 57068 - DNA, 201 bp, Homo sapiens
tatagaaggactgcagccactgattctctcttgtccttcacatcacccatgttgagacctcagcttggcactcaggtgctgaagggtaatatggactcagscttgcaaatagccagtgctagttctgacccaaccacagaggatgctgacatcatttgtattatgttccaaggctactacagagaaggctgcctgctatgt

SEQ ID NO: 57069 - DNA, 201 bp, Homo sapiens
agctctccatcaccttccggaacaacagccacaaccgttacaccatcacagcttatctctcagccaacatcaccttctacaccggggtcccgaaggcagarttcaagaaggagacgttcgacgtgacgctggagcccttgtccttcaagaaagaggcggtgctgatccaagccggcgagtacatgggtcagctgctggaac

SEQ ID NO: 57070 - DNA, 201 bp, Homo sapiens
agggccccagagtggagatcccacatatttcaaaaacatgcttttccaaacccaggctattcggcaaggaagttagtttttaatctctccaccttccaaaragtgctaagcattagctttaattaagctctcatagctcataagagtaacagtcatcatttatcatcacaaatggctacatctccaaatatcagtgggctc

SEQ ID NO: 57071 - DNA, 201 bp, Homo sapiens
gctgggaaaagacttcaagctctccatcaccttccggaacaacagccacaaccgttacaccatcacagcttatctctcagccaacatcaccttctacaccrgggtcccgaaggcagaattcaagaaggagacgttcgacgtgacgctggagcccttgtccttcaagaaagaggcggtgctgatccaagccggcgagtacat

SEQ ID NO: 57072 - DNA, 201 bp, Homo sapiens
gacatcaagaccagaagctggagctatggtcagtttgaagatggcatcctggacacttgcctgtatgtgatggacagagcacaaatggacctctctggaakagggaatcccatcaaagtcagccgtgtggggtctgcaatggtgaatgccaaagatgacgaaggtgtcctcgttggatcctgggacaatatctatgcctat

SEQ ID NO: 57073 - DNA, 201 bp, Homo sapiens
actagagcacaacataatttttatttttggcaaagccagaaaaagatctttcattttgcacctgcagccaagcaaatgcctgccaaattttagatttaccwtgttagaagaggtggccccatattaacaaattgcatttgtgggaaacttaaccacctacaaggagataagaaagcaggtgcaacactcaagtctattgaa

SEQ ID NO: 57074 - DNA, 201 bp, Homo sapiens
tataataagcccaacaagttgaagaagctggcggatctagtgaccagatatatagaaggactgcagccactgattctctcttgtccttcacatcacccatkttgagacctcagcttggcactcaggtgctgaagggtaatatggactcagccttgcaaatagccagtgctagttctgacccaaccacagaggatgctgaca

SEQ ID NO: 57075 - DNA, 201 bp, Homo sapiens
tctggaagagggaatcccatcaaagtcagccgtgtggggtctgcaatggtgaatgccaaagatgacgaaggtgtcctcgttggatcctgggacaatatctrtgcctatggcgtccccccatcggcctggactggaagcgttgacattctattggaataccggagctctgagaatccagtccggtatggccaatgctgggtt

SEQ ID NO: 57076 - DNA, 201 bp, Homo sapiens
aaagacttcaagctctccatcaccttccggaacaacagccacaaccgttacaccatcacagcttatctctcagccaacatcaccttctacaccggggtccygaaggcagaattcaagaaggagacgttcgacgtgacgctggagcccttgtccttcaagaaagaggcggtgctgatccaagccggcgagtacatgggtcag

SEQ ID NO: 57077 - DNA, 201 bp, Homo sapiens
actggaagcgttgacattctattggaataccggagctctgagaatccagtccggtatggccaatgctgggtttttgctggtgtctttaacacatttttacratgccttggaataccagcaagaattgttaccaattatttctctgcccatgataatgatgccaatttgcaaatggacatcttcctggaagaagatgggaac

SEQ ID NO: 57078 - DNA, 201 bp, Homo sapiens
ggattcagtgtggaactaccactgctggaatgaagcatggatgacaaggcctgaccttcctgttggatttggaggctggcaagctgtggacagcacccccyaggaaaatagcgatggcatgtatcggtgtggccccgcctcggttcaagccatcaagcacggccatgtctgcttccaatttgatgcaccttttgtttttgc

SEQ ID NO: 57079 - DNA, 201 bp, Homo sapiens
ccacagtggagcttcagggcgtggtgccccggggcgtcaacctgcaagagtttcttaatgtcacgagcgttcacctgttcaaggagagatgggacactaamaaggtggaccaccacactgacaagtatgaaaacaacaagctgattgtccgcagagggcagtctttctatgtgcagattgacttcagtcgtccatatgacc

SEQ ID NO: 57080 - DNA, 201 bp, Homo sapiens
tggaatgaagcatggatgacaaggcctgaccttcctgttggatttggaggctggcaagctgtggacagcaccccccaggaaaatagcgatggcatgtatcrgtgtggccccgcctcggttcaagccatcaagcacggccatgtctgcttccaatttgatgcaccttttgtttttgcagaggtcaacagcgacctcatttac

SEQ ID NO: 57081 - DNA, 201 bp, Homo sapiens
atcaaggtccgtggcactcaggtagttggttctgacatgactgtgacaattcagtttaccaatcctttaaaagaaaccctgcgaaatgtctgggtacaccyggatggtcctggagtaacaagaccaatgaagaagatgttccgtgaaatccggcccaactccaccgtgcagtgggaagaagtgtgccggccctgggtctct

SEQ ID NO: 57082 - DNA, 201 bp, Homo sapiens
acaaggagataagaaagcaggtgcaacactcaagtctattgaataatgtagttttgtgatgcattttatagaatgtgtcacactgtggcctgatcagcagragccaatatcccttactttaaccctttctgggatgcaatactaggaagtaaagtgaagaatttatctctttagttagtgattatatttcacccatctctc

SEQ ID NO: 57083 - DNA, 201 bp, Homo sapiens
attctaacgcaaaaatagctcttgctttgacttaggtgtgaagacccagacaggactgcagagggccccagagtggagatcccacatatttcaaaaacatrcttttccaaacccaggctattcggcaaggaagttagtttttaatctctccaccttccaaagagtgctaagcattagctttaattaagctctcatagctca

SEQ ID NO: 57084 - DNA, 169 bp, Homo sapiens
ctttcccgagtccgtttgaggaagtccccgaggcgcacagagcaagcccacgcgagggcacctctggasgggagcgcctgcaggaccttgtaaagtcaaaaatgtcagaaacttccaggaccgcctttggaggcagaagagcagttccacccaataactctaatgcagc

SEQ ID NO: 57085 - DNA, 201 bp, Homo sapiens
ggatgttctggccaagcaaaagtccaccgtgctaaccatccctgagatcatcatcaaggtccgtggcactcaggtagttggttctgacatgactgtgacarttcagtttaccaatcctttaaaagaaaccctgcgaaatgtctgggtacacctggatggtcctggagtaacaagaccaatgaagaagatgttccgtgaaat

SEQ ID NO: 57086 - DNA, 201 bp, Homo sapiens
gccaacatcaccttctacaccggggtcccgaaggcagaattcaagaaggagacgttcgacgtgacgctggagcccttgtccttcaagaaagaggcggtgcwgatccaagccggcgagtacatgggtcagctgctggaacaagcgtccctgcacttctttgtcacagctcgcatcaatgagaccagggatgttctggccaag

SEQ ID NO: 57087 - DNA, 201 bp, Homo sapiens
attctctcttgtccttcacatcacccatgttgagacctcagcttggcactcaggtgctgaagggtaatatggactcagccttgcaaatagccagtgctagytctgacccaaccacagaggatgctgacatcatttgtattatgttccaaggctactacagagaaggctgcctgctatgtatttgcaaggctgatttatggt

SEQ ID NO: 57088 - DNA, 201 bp, Homo sapiens
tgttctggccaagcaaaagtccaccgtgctaaccatccctgagatcatcatcaaggtccgtggcactcaggtagttggttctgacatgactgtgacaattsagtttaccaatcctttaaaagaaaccctgcgaaatgtctgggtacacctggatggtcctggagtaacaagaccaatgaagaagatgttccgtgaaatccg

SEQ ID NO: 57089 - DNA, 201 bp, Homo sapiens
tgttggatttggaggctggcaagctgtggacagcaccccccaggaaaatagcgatggcatgtatcggtgtggccccgcctcggttcaagccatcaagcacrgccatgtctgcttccaatttgatgcaccttttgtttttgcagaggtcaacagcgacctcatttacattacagctaagaaagatggcactcatgtggtgga

SEQ ID NO: 57090 - DNA, 201 bp, Homo sapiens
ataaccacatttctaagcctttgagactgttcctgagccttcagcactaacctatgagggtgagctggtcccctctatatatacatcatacttaactttaytaagtaatctcacagcatttgccaagtctcccaatatccaattttaaaatgaaatgcattttgctagacagttaaactggcttaacttagtatattatta

SEQ ID NO: 57091 - DNA, 201 bp, Homo sapiens
ggagagatgggacactaacaaggtggaccaccacactgacaagtatgaaaacaacaagctgattgtccgcagagggcagtctttctatgtgcagattgacytcagtcgtccatatgaccccagaagggatctcttcagggtggaatacgtcattggtcgctacccacaggagaacaagggaacctacatcccagtgcctat

SEQ ID NO: 57092 - DNA, 201 bp, Homo sapiens
ggtctgcaatggtgaatgccaaagatgacgaaggtgtcctcgttggatcctgggacaatatctatgcctatggcgtccccccatcggcctggactggaagsgttgacattctattggaataccggagctctgagaatccagtccggtatggccaatgctgggtttttgctggtgtctttaacacatttttacgatgccttg

SEQ ID NO: 57093 - DNA, 201 bp, Homo sapiens
tggcatttggcctcttgtagtcttggctaaggaaattctaacgcaaaaatagctcttgctttgacttaggtgtgaagacccagacaggactgcagagggcyccagagtggagatcccacatatttcaaaaacatgcttttccaaacccaggctattcggcaaggaagttagtttttaatctctccaccttccaaagagtgc

SEQ ID NO: 57094 - DNA, 201 bp, Homo sapiens
ttctattggaataccggagctctgagaatccagtccggtatggccaatgctgggtttttgctggtgtctttaacacatttttacgatgccttggaataccmgcaagaattgttaccaattatttctctgcccatgataatgatgccaatttgcaaatggacatcttcctggaagaagatgggaacgtgaattccaaactca

SEQ ID NO: 57095 - DNA, 201 bp, Homo sapiens
aacgttgacatggactttgaagtggaaaatgctgtgctgggaaaagacttcaagctctccatcaccttccggaacaacagccacaaccgttacaccatcayagcttatctctcagccaacatcaccttctacaccggggtcccgaaggcagaattcaagaaggagacgttcgacgtgacgctggagcccttgtccttcaag

SEQ ID NO: 57096 - DNA, 201 bp, Homo sapiens
caacagccacaaccgttacaccatcacagcttatctctcagccaacatcaccttctacaccggggtcccgaaggcagaattcaagaaggagacgttcgacrtgacgctggagcccttgtccttcaagaaagaggcggtgctgatccaagccggcgagtacatgggtcagctgctggaacaagcgtccctgcacttctttgt

SEQ ID NO: 57097 - DNA, 201 bp, Homo sapiens
tttaacacatttttacgatgccttggaataccagcaagaattgttaccaattatttctctgcccatgataatgatgccaatttgcaaatggacatcttccyggaagaagatgggaacgtgaattccaaactcaccaaggattcagtgtggaactaccactgctggaatgaagcatggatgacaaggcctgaccttcctgtt

SEQ ID NO: 57098 - DNA, 201 bp, Homo sapiens
gacatcaagaccagaagctggagctatggtcagtttgaagatggcatcctggacacttgcctgtatgtgatggacagagcacaaatggacctctctggaakagggaatcccatcaaagtcagccgtgtggggtctgcaatgggctttctcacttacgaagtgggtattgattctttgcaggatcctgtgtgcctggtcata

SEQ ID NO: 57099 - DNA, 201 bp, Homo sapiens; identical to SEQ ID NO: 57094

SEQ ID NO: 57100 - DNA, 201 bp, Homo sapiens; identical to SEQ ID NO: 57077

SEQ ID NO: 57101 - DNA, 141 bp, Homo sapiens
ggagcctcacctcaggggggctacagttttgcacagagcggccccactgttgacgccaacagaggccatggtctgagctccttagctgttcaggagagggmtggggactcaggaacctcagaagggcagagcagggcagag

SEQ ID NO: 57102 - DNA, 201 bp, Homo sapiens
ttaactgcagtttgggatggaggtggtgctcagcttttatataaagggggaagcaagtatgatgctgtgtatctggacaatgagaaagaaagagaagagtwtgtcctgaatgacatcggggtaattttttatggagaggtcaatgacatcaagaccagaagctggagctatggtcagtttgaagatggcatcctggacact

SEQ ID NO: 57103 - DNA, 201 bp, Homo sapiens
agaggacaggtctgtgcggctgtccatccagtcttcccccaaatgtattgtggggaaattccgcatgtatgttgctgtctggactccctatggcgtacttygaaccagtcgaaacccagaaacagacacgtacattctcttcaatccttggtgtgaagggatttctgacttcatggctgcctctgcctctaggagtcctac

SEQ ID NO: 57104 - DNA, 201 bp, Homo sapiens
ttcactgtgacacacctacatgtaccacctccatccatatttgctccagtgaatgccaaagatgacgaaggtgtcctcgttggatcctgggacaatatctrtgcctatggcgtccccccatcggcctggactggaagcgttgacattctattggaataccggagctctgagaatccagtccggtatggccaatgctgggtt

SEQ ID NO: 57105 - DNA, 201 bp, Homo sapiens
tttaacacatttttacgatgccttggaataccagcaagaattgttaccaattatttctctgcccatgataatgatgccaatttgcaaatggacatcttccyggaagaagatgggaacgtgaattccaaactcaccaaggattcagtgtgcaaggatctcaggagctattggcctcatacttacctccctccacaggctctg

SEQ ID NO: 57106 - DNA, 201 bp, Homo sapiens
taggagtcctactcacacttgtgctgctgcaagtgagaaacttgaccgtcaccttcaatttcaatgttggcaacaacaacaaaagcagccacacacaacayctgtgaatgcccagaccttaactgcagtttgggatggaggtggtgctcagcttttatataaagggggaagcaagtatgatgctgtgtatctggacaatga

SEQ ID NO: 57107 - DNA, 201 bp, Homo sapiens
gaaatagcacatagatctcagttcatccccaggatctggcagcaactatgggcagagaatttcccccaaggagatgcagctgcttctgcaaaggctgccgytactgcagataaaggctcgttattcactgtgacacacctacatgtaccacctccatccatatttgctccagtgaatgccaaagatgacgaaggtgtcctc

SEQ ID NO: 57108 - DNA, 201 bp, Homo sapiens
tatttgctccagtgaatgccaaagatgacgaaggtgtcctcgttggatcctgggacaatatctatgcctatggcgtccccccatcggcctggactggaagsgttgacattctattggaataccggagctctgagaatccagtccggtatggccaatgctgggtttttgctggtgtctttaacacatttttacgatgccttg

SEQ ID NO: 57109 - DNA, 201 bp, Homo sapiens
gcctgtgcaagaaagtcaagctgagcaataacgcgcagaactggggaatgcagagagcaaccaatgtcacctaccaagcccatcatgtcagcaggaacaaragaggtcaggtggtggggaccagaggtggctttcgtggttgcacagtttggctaacaggcttgtctggagcgggaaagactactgtgagcatggccttgg

SEQ ID NO: 57110 - DNA, 201 bp, Homo sapiens
gctttcgtggttgcacagtttggctaacaggcttgtctggagcgggaaagactactgtgagcatggccttggaggagtacctggtttgtcatggtattccrtgctacactctggatggtgacaatattcgtcaaggtctcaataaaaatcttggctttagtcctgaagacagagaagagaatgttcgacgcatcgcagaag

SEQ ID NO: 57111 - DNA, 102 bp, Homo sapiens
akgccacgagcacgggcgcgtgcgcaagtcagcgcgcgcccgctccgacgcgaggaggccccgccctccagccccgccccgctcgctggcctgccctcctct

SEQ ID NO: 57112 - DNA, 201 bp, Homo sapiens
tgcagtgccttcattttgattgtcttctggatggaggtgtcattaacttgtcagtacctatagttctgactgcgactcatgaagataaagagaggctggayggctgtacagcatttgctctgatgtatgagggccgccgtgtggccattcttcgcaatccagagttttttgagcacaggaaagaggagcgctgtgccagac

SEQ ID NO: 57113 - DNA, 125 bp, Homo sapiens
aggccacgagcacgggcgcgtgcgyaagtcagcgcgcgcccgctccgacgcgaggaggccccgccctccagccccgccccgctcgctggcctgccctcctcttgctaccctcccggcgcagagaa

SEQ ID NO: 57114 - DNA, 201 bp, Homo sapiens
aattgtctttttatattatatttatgcttctgtgtcatgattttttcaagctgttatattagttgtaaccagtagtattcacattaaatcttgcttttttyccccttaaaaaaagaaaaaaattaccaaacaataaacttggctagaccttgttttgaggattttacaagacctttgtagcgattagattttttttctaca

SEQ ID NO: 57115 - DNA, 201 bp, Homo sapiens
gtatcttttccacttattatagttatattcctacaatacaattttaaaattgtctttttatattatatttatgcttctgtgtcatgattttttcaagctgytatattagttgtaaccagtagtattcacattaaatcttgctttttttccccttaaaaaaagaaaaaaattaccaaacaataaacttggctagaccttgtt

SEQ ID NO: 57116 - DNA, 124 bp, Homo sapiens
aggccacgagcacgggcgcgtgckcaagtcagcgcgcgcccgctccgacgcgaggaggccccgccctccagccccgccccgctcgctggcctgccctcctcttgctaccctcccggcgcagaga

SEQ ID NO: 57117 - DNA, 201 bp, Homo sapiens
agaatactacaaatccttggagaaagcttaggctgttaacccagtcactccacctttgacacattactagtaacaagaggggaccacatagtctctgttgrcatttctttgtggtgtctgtctggacatgcttcctaaaaacagaccattttccttaacttgcatcagttttggtctgccttatgagttctgttttgaaca

SEQ ID NO: 57118 - DNA, 201 bp, Homo sapiens
ccccgccccgctcgctggcctgccctcctcttgctaccctcccggcgcagagaaccccggctgctcagcgcgctccgcggtcatggagatccccgggagcytgtgcaagaaagtcaagctgagcaataacgcgcagaactggggaatgcagagagcaaccaatgtcacctaccaagcccatcatgtcagcaggaacaagag

SEQ ID NO: 57119 - DNA, 201 bp, Homo sapiens
tttattggaatgatggtcttgatcagtatcgtcttactcctactgagctaaagcagaaatttaaagatatgaatgctgatgctgtctttgcatttcaactrcgcaacccagtgcacaatggacatgccctgttaatgcaggatacccataagcaacttctagagaggggctaccggcgccctgtcctcctcctccaccctc

SEQ ID NO: 57120 - DNA, 201 bp, Homo sapiens
atgaaaagccagaggcccctgagttggtgctgaaaacagactcctgtgatgtaaatgactgtgtccagcaagttgtggaacttctacaggaacgggatatygtacctgtggatgcatcttatgaagtaaaagaactatatgtgccagaaaataaacttcatttggcaaaaacagatgcggaaacattaccagcactgaaaa

SEQ ID NO: 57121 - DNA, 152 bp, Homo sapiens
aggccacgagcacgggcgcgtgcgcaagtcagcgcgcgcccgctccgacgcsaggaggccccgccctccagccccgccccgctcgctggcctgccctcctcttgctaccctcccggcgcagagaaccccggctgctcagcgcgctccgcggt

SEQ ID NO: 57122 - DNA, 201 bp, Homo sapiens
gcctgccctcctcttgctaccctcccggcgcagagaaccccggctgctcagcgcgctccgcggtcatggagatccccgggagcctgtgcaagaaagtcaarctgagcaataacgcgcagaactggggaatgcagagagcaaccaatgtcacctaccaagcccatcatgtcagcaggaacaagagaggtcaggtggtgggga

SEQ ID NO: 57123 - DNA, 201 bp, Homo sapiens
gcacgggcgcgtgcgcaagtcagcgcgcgcccgctccgacgcgaggaggccccgccctccagccccgccccgctcgctggcctgccctcctcttgctaccytcccggcgcagagaaccccggctgctcagcgcgctccgcggtcatggagatccccgggagcctgtgcaagaaagtcaagctgagcaataacgcgcagaac

SEQ ID NO: 57124 - DNA, 201 bp, Homo sapiens
ggctgtacagcatttgctctgatgtatgagggccgccgtgtggccattcttcgcaatccagagttttttgagcacaggaaagaggagcgctgtgccagacrgtggggaacgacatgcaagaaccacccctatattaagatggtgatggaacaaggagattggctgattggaggagatcttcaagtcttggatcgagtttat

SEQ ID NO: 57125 - DNA, 201 bp, Homo sapiens
tcagtgttcatgcgaattcttgcttgaggaaacttcggttgcagattgaagcatttcaggttgtgcattttgtgtgatgcatgtagtagcctttcctgatracagaacacagatctcttgttcgcacaatctacactgccttaccttcacttaaaccacacacacaaggtgctcagacatgaaatgtacatggcgtaccgt

SEQ ID NO: 57126 - DNA, 201 bp, Homo sapiens
gagatggctgctgctcaccctcctagcctgctctgccactgggacggctcctgcttttggggctcttgatcagtgtgctaacctcactgcctcatggcatyatccattctctctgcccaagttgctctgtatgtgttcgtcagtgttcatgcgaattcttgcttgaggaaacttcggttgcagattgaagcatttcaggtt

SEQ ID NO: 57127 - DNA, 201 bp, Homo sapiens
gtgcattttgtgtgatgcatgtagtagcctttcctgatgacagaacacagatctcttgttcgcacaatctacactgccttaccttcacttaaaccacacayacaaggtgctcagacatgaaatgtacatggcgtaccgtacacagagggacttgagccagttacctttgctgtcactttctctcttataaattctgttagc

SEQ ID NO: 57128 - DNA, 201 bp, Homo sapiens; identical to SEQ ID NO: 57125

SEQ ID NO: 57129 - DNA, 201 bp, Homo sapiens; identical to SEQ ID NO: 57126

SEQ ID NO: 57130 - DNA, 201 bp, Homo sapiens; identical to SEQ ID NO: 57127

SEQ ID NO: 57131 - DNA, 201 bp, Homo sapiens
tcttcctcagtgcggctggcaagttcggaggtgacttcctggtctatcctggtgaccccctccgcttccacgcccattatatcgctcagtgctgggccccygaggacaccatcccactccaagacctggttgctgctgggcgccttggaaccagcgtcagaaagaccctgctcctctgttctccgcagcctgatggtaagg

SEQ ID NO: 57132 - DNA, 201 bp, Homo sapiens
tttatgttcttccttgtttcaaagcacttattggctgtgtttttgtagttacctattttcacactgtgagcttcccgagaatggggcctgggtttgattcmtctgttttctacagggtttaagtctcaggaggtctcaataaacttggtatataaatgttcatgatttgaatgtttgcgacagtcctggaacccgtggatg

SEQ ID NO: 57133 - DNA, 201 bp, Homo sapiens
aaacttggtatataaatgttcatgatttgaatgtttgcgacagtcctggaacccgtggatggtctcatctgcatgtacaggtgagaaaaaggcctggaggrgggggactgacttgcccaaagtcacacacttagtaaatagcaggcctggcctttcaaaattggtttttctgactcctaaatctgcactctttctacctca

SEQ ID NO: 57134 - DNA, 201 bp, Homo sapiens
ctgctcctctgttctccgcagcctgatggtaaggtggtctacacctccctgcaatgggccagcctgcagtgaactccagagacctaggggatgtggctgtrtcggcagcaagagcctttctggatgttccccagctcttctctgggagtctagaacatcctcctacctttctccgcggttagtttttgattccaggttttc

SEQ ID NO: 57135 - DNA, 151 bp, Homo sapiens
ttgcccaaagtcacacacttagtaaatagcaggcctggcctttcaaaattggtttttctgactcctaaatctgcactctttctacctcactaaacttcctyttgaaaagatttctatgaaatttcccagatgcatacaaacgttataaata

SEQ ID NO: 57136 - DNA, 201 bp, Homo sapiens
cggctggcaagttcggaggtgacttcctggtctatcctggtgaccccctccgcttccacgcccattatatcgctcagtgctgggcccctgaggacaccatmccactccaagacctggttgctgctgggcgccttggaaccagcgtcagaaagaccctgctcctctgttctccgcagcctgatggtaaggtggtctacacct

SEQ ID NO: 57137 - DNA, 201 bp, Homo sapiens; identical to SEQ ID NO: 57131

SEQ ID NO: 57138 - DNA, 201 bp, Homo sapiens; identical to SEQ ID NO: 57132

SEQ ID NO: 57139 - DNA, 201 bp, Homo sapiens
atgaaaggaaatgagtattgtaattttaggagttcagagcctggggagaaaggaaggactctggaaggcgttctgctttttcatggcctgggtagtggtgragaatttttttgatactgtatatttatattttagactcttttttggatgtgttatattctgcaatttttataaaagctaaaacacatgtatttgtaaaaa

SEQ ID NO: 57140 - DNA, 201 bp, Homo sapiens
aagttcccaagtagaggagaggaagcggcagagggaggaggatgctggtggtggaggtggcgaacggccgctccctggtgtggggagccgaggcggtgcargccctccgggagcgcctgggtgtggggggccgcacggtaggcgccctgccccgcgggccccgccagaactcgcgcctgggcctcccgctgctgctgatgc

SEQ ID NO: 57141 - DNA, 201 bp, Homo sapiens
gagcctgggaagttgaggctgctgtgagctgtgattgcaccactgccctccagcctgggagacagagcaagaacctgtctcaaaaaatatatatatgtgtrtgtgtatatatgtaaatatacacacatgtatgtatatatatgtgtgtgtatatatatatatattatgaaaggaaatgagtattgtaattttaggagttca

SEQ ID NO: 57142 - DNA, 201 bp, Homo sapiens; identical to SEQ ID NO: 57133

SEQ ID NO: 57143 - DNA, 201 bp, Homo sapiens; identical to SEQ ID NO: 57134

SEQ ID NO: 57144 - DNA, 201 bp, Homo sapiens
agatacccatgagtatttacaagggggcggggcgaaagcgacttgccctcaaaggggcggaaccccgagggccggcgtgcgcctacgggaccgggccaggrtgacgatcctcaagttcccaagtagaggagaggaagcggcagagggaggaggatgctggtggtggaggtggcgaacggccgctccctggtgtggggagcc

SEQ ID NO: 57145 - DNA, 201 bp, Homo sapiens
ttgcccaaagtcacacacttagtaaatagcaggcctggcctttcaaaattggtttttctgactcctaaatctgcactctttctacctcactaaacttcctyttgaaaagatttctatgaaatttcccagatgcatacaaacgttataaataaaaatataggctgggcacgatgacccacacctgtaatcccacagaacttt

SEQ ID NO: 57146 - DNA, 201 bp, Homo sapiens; identical to SEQ ID NO: 57136

SEQ ID NO: 57147 - DNA, 152 bp, Homo sapiens
ttgggtacaagtgacgctaggatgataggcggagtcaacaggttcgccagayacccatgagtatttacaagggggcggggcgaaagcgacttgccctcaaaggggcggaaccccgagggccggcgtgcgcctacgggaccgggccagggtga

SEQ ID NO: 57148 - DNA, 201 bp, Homo sapiens; identical to SEQ ID NO: 57131

SEQ ID NO: 57149 - DNA, 201 bp, Homo sapiens; identical to SEQ ID NO: 57132

SEQ ID NO: 57150 - DNA, 201 bp, Homo sapiens; identical to SEQ ID NO: 57140

SEQ ID NO: 57151 - DNA, 201 bp, Homo sapiens; identical to SEQ ID NO: 57133

SEQ ID NO: 57152 - DNA, 201 bp, Homo sapiens; identical to SEQ ID NO: 57134

SEQ ID NO: 57153 - DNA, 201 bp, Homo sapiens; identical to SEQ ID NO: 57144

SEQ ID NO: 57154 - DNA, 151 bp, Homo sapiens; identical to SEQ ID NO: 57135

SEQ ID NO: 57155 - DNA, 201 bp, Homo sapiens; identical to SEQ ID NO: 57136

SEQ ID NO: 57156 - DNA, 152 bp, Homo sapiens; identical to SEQ ID NO: 57147

SEQ ID NO: 57157 - DNA, 201 bp, Homo sapiens; identical to SEQ ID NO: 57131

SEQ ID NO: 57158 - DNA, 201 bp, Homo sapiens; identical to SEQ ID NO: 57132

SEQ ID NO: 57159 - DNA, 201 bp, Homo sapiens
ttgcggaggtttgtttttcacgctccaaggcgcaatggaggatgctggtggtggaggtggcgaacggccgctccctggtgtggggagccgaggcggtgcargccctccgggagcgcctgggtgtggggggccgcacggtaggcgccctgccccgcgggccccgccagaactcgcgcctgggcctcccgctgctgctgatgc

SEQ ID NO: 57160 - DNA, 201 bp, Homo sapiens; identical to SEQ ID NO: 57133

SEQ ID NO: 57161 - DNA, 201 bp, Homo sapiens; identical to SEQ ID NO: 57134

SEQ ID NO: 57162 - DNA, 151 bp, Homo sapiens; identical to SEQ ID NO: 57135

SEQ ID NO: 57163 - DNA, 201 bp, Homo sapiens; identical to SEQ ID NO: 57136

SEQ ID NO: 57164 - DNA, 201 bp, Homo sapiens; identical to SEQ ID NO: 57131

SEQ ID NO: 57165 - DNA, 201 bp, Homo sapiens; identical to SEQ ID NO: 57132

SEQ ID NO: 57166 - DNA, 201 bp, Homo sapiens
ggtggctccacctcgactgcgaattactgtttatgaggaggatgctggtggtggaggtggcgaacggccgctccctggtgtggggagccgaggcggtgcargccctccgggagcgcctgggtgtggggggccgcacggtaggcgccctgccccgcgggccccgccagaactcgcgcctgggcctcccgctgctgctgatgc

SEQ ID NO: 57167 - DNA, 201 bp, Homo sapiens; identical to SEQ ID NO: 57133

SEQ ID NO: 57168 - DNA, 201 bp, Homo sapiens; identical to SEQ ID NO: 57134

SEQ ID NO: 57169 - DNA, 151 bp, Homo sapiens; identical to SEQ ID NO: 57135

SEQ ID NO: 57170 - DNA, 201 bp, Homo sapiens; identical to SEQ ID NO: 57136

SEQ ID NO: 57171 - DNA, 201 bp, Homo sapiens; identical to SEQ ID NO: 57131

SEQ ID NO: 57172 - DNA, 201 bp, Homo sapiens; identical to SEQ ID NO: 57132

SEQ ID NO: 57173 - DNA, 201 bp, Homo sapiens
gggaggcaaggaggcggactgagcgctcccaattggggaggatgctggtggtggaggtggcgaacggccgctccctggtgtggggagccgaggcggtgcargccctccgggagcgcctgggtgtggggggccgcacggtaggcgccctgccccgcgggccccgccagaactcgcgcctgggcctcccgctgctgctgatgc

SEQ ID NO: 57174 - DNA, 201 bp, Homo sapiens; identical to SEQ ID NO: 57133

SEQ ID NO: 57175 - DNA, 201 bp, Homo sapiens; identical to SEQ ID NO: 57134

SEQ ID NO: 57176 - DNA, 151 bp, Homo sapiens; identical to SEQ ID NO: 57135

SEQ ID NO: 57177 - DNA, 201 bp, Homo sapiens; identical to SEQ ID NO: 57136

SEQ ID NO: 57178 - DNA, 201 bp, Homo sapiens
gcaaaatcatgtttctgtgtacctagcaatgtgttcccattttattaagaaaagctttaacacgtgtaatctgcagtccttaacagtggcgtaattgtacktacctgttgtgtttcagtttgtttttcacctataatgaattgtaaaaacaaacatacttgtggggtctgatagcaaacatagaaatgatgtatattgttt

SEQ ID NO: 57179 - DNA, 201 bp, Homo sapiens
catgtcccggtgccctcggggctcgaacatgagccgtcgccgcacgtggtcaaggtgctggcgcatgtagcgccgcttggccagcagggtgggcccagacrcctccggacaccccgccagcacgatacgcaagggctcgccgcccgtgtgcatgtccaccaccgacagcaccggcgtccctggatcatgcgggggcagccg

SEQ ID NO: 57180 - DNA, 201 bp, Homo sapiens
cttggaaaatgcaaaactctgtaatactctgttacacagggtaatattatctgctacactggaaggccgctaggaagcccttgcttctctcaacagttcakctgttctttagggcaaaatcatgtttctgtgtacctagcaatgtgttcccattttattaagaaaagctttaacacgtgtaatctgcagtccttaacagtg

SEQ ID NO: 57181 - DNA, 201 bp, Homo sapiens
ccatggtctgcgtcgggggagacgagtacggtcccgcagctatggcttcaagcccgaccctcacccactgactccgcgggaggagggcgggacgctaaccwgccacgtccggggggcggggtctcggagcctaaacccggaagcgagggaggaacttcggagctgtcgcccgggttaccgggaggcggagccgccgagctc

SEQ ID NO: 57182 - DNA, 201 bp, Homo sapiens
taaatcaatcttaacagtgtatgagaactattctatcatatatgggaacaagattgtcagtatatcttaatgtttgggtttgtctttgttttgtttatggytagacttacagacttggaaaatgcaaaactctgtaatactctgttacacagggtaatattatctgctacactggaaggccgctaggaagcccttgcttct

SEQ ID NO: 57183 - DNA, 201 bp, Homo sapiens
ggtatgcccaagaggacagagaacgaatgcacagaaatattgtcagccttgcacagaatctcctgaactttatgattggctctatcttggatttatggcartgcttcctctggttttacattggttcttcattgaatggtactcggggaaaaagagttccagcgcacttttccaacacatcactgcattatttgaatgcag

SEQ ID NO: 57184 - DNA, 201 bp, Homo sapiens
gatcatgcgggggcagccggggcaccgccagcgcgctctccatggtctgcgtcgggggagacgagtacggtcccgcagctatggcttcaagcccgaccctyacccactgactccgcgggaggagggcgggacgctaaccagccacgtccggggggcggggtctcggagcctaaacccggaagcgagggaggaacttcggag

SEQ ID NO: 57185 - DNA, 201 bp, Homo sapiens
ggaggaacttcggagctgtcgcccgggttaccgggaggcggagccgccgagctcgctgtggcccggatgttcggtgcagctgccagatccgctgatctagygcttctcgaaaaaaaccttcaggcggcccatggctgtcgatattcaaccagcatgccttggactttattgtgggaagaccctattatttaaaaatggctc

SEQ ID NO: 57186 - DNA, 201 bp, Homo sapiens
tggttagacttacagacttggaaaatgcaaaactctgtaatactctgttacacagggtaatattatctgctacactggaaggccgctaggaagcccttgcktctctcaacagttcagctgttctttagggcaaaatcatgtttctgtgtacctagcaatgtgttcccattttattaagaaaagctttaacacgtgtaatct

SEQ ID NO: 57187 - DNA, 201 bp, Homo sapiens
gtcgccgcacgtggtcaaggtgctggcgcatgtagcgccgcttggccagcagggtgggcccagacacctccggacaccccgccagcacgatacgcaagggytcgccgcccgtgtgcatgtccaccaccgacagcaccggcgtccctggatcatgcgggggcagccggggcaccgccagcgcgctctccatggtctgcgtcg

SEQ ID NO: 57188 - DNA, 201 bp, Homo sapiens
ctaacatttgcccaggacctgtgcaatcaaatattgtggagaattccctagctggagaagtcacaaagactataggcaataatggagaccagtcccacaaratgacaaccagtcgttgtgtgcggctgatgttaatcagcatggccaatgatttgaaagaagtttggatctcagaacaacctttcttgttagtaacatatt

SEQ ID NO: 57189 - DNA, 201 bp, Homo sapiens
acaagatggggaagaaaaggattgagaactttaagagtggtgtggatgcagactcttcttattttaaaatctttaagacaaaacatgactgaaaagagcayctgtacttttcaagccactggagggagaaatggaaaacatgaaaacagcaatcttcttatgcttctgaataatcaaagactaatttgtgattttactttt

SEQ ID NO: 57190 - DNA, 201 bp, Homo sapiens
actttaagagtggtgtggatgcagactcttcttattttaaaatctttaagacaaaacatgactgaaaagagcacctgtacttttcaagccactggagggaraaatggaaaacatgaaaacagcaatcttcttatgcttctgaataatcaaagactaatttgtgattttactttttaatagatatgactttgcttccaacat

SEQ ID NO: 57191 - DNA, 178 bp, Homo sapiens
acacagggtttcctcatgttgcccaggctggtctcggacacttgaattcaagcaatctgccggccccgccgggtgtgscgcatgagggcgcgggccgcccaaggaccgcgagtggggccgcgagtgctgagcccggcgcgcccgagccgctcctcctcccggcctgctccctgggcgg

SEQ ID NO: 57192 - DNA, 201 bp, Homo sapiens
gaaaagagcacctgtacttttcaagccactggagggagaaatggaaaacatgaaaacagcaatcttcttatgcttctgaataatcaaagactaatttgtgrttttactttttaatagatatgactttgcttccaacatggaatgaaataaaaaataaataataaaagattgccatgaatcttgcaaaaaaggtattaactc

SEQ ID NO: 57193 - DNA, 201 bp, Homo sapiens
aggagtttggtagaatcgacattctggtcaacaatggtggaatgtcccagcgttctctgtgcatggataccagcttggatgtctacagaaagctaatagakcttaactacttagggacggtgtccttgacaaaatgtgttctgcctcacatgatcgagaggaagcaaggaaagattgttactgtgaatagcatcctgggta

SEQ ID NO: 57194 - DNA, 201 bp, Homo sapiens
agcaatcttcttatgcttctgaataatcaaagactaatttgtgattttactttttaatagatatgactttgcttccaacatggaatgaaataaaaaataartaataaaagattgccatgaatcttgcaaaaaaggtattaactcatactatattcttggataaaataaccttttaaaatactttagcacatatgcttaaaa

SEQ ID NO: 57195 - DNA, 201 bp, Homo sapiens
aagcggctaccaaagctgttctccaggagtttggtagaatcgacattctggtcaacaatggtggaatgtcccagcgttctctgtgcatggataccagcttkgatgtctacagaaagctaatagagcttaactacttagggacggtgtccttgacaaaatgtgttctgcctcacatgatcgagaggaagcaaggaaagattg

SEQ ID NO: 57196 - DNA, 201 bp, Homo sapiens
ctggaaagggtgaaaagaagatgcctagagaatggcaatttaaaagaaaaagatatacttgttttgccccttgacctgaccgacactggttcccatgaagyggctaccaaagctgttctccaggagtttggtagaatcgacattctggtcaacaatggtggaatgtcccagcgttctctgtgcatggataccagcttggat

SEQ ID NO: 57197 - DNA, 201 bp, Homo sapiens
tcttgtgctgtcagccagaagagtgcatgagctggaaagggtgaaaagaagatgcctagagaatggcaatttaaaagaaaaagatatacttgttttgcccyttgacctgaccgacactggttcccatgaagcggctaccaaagctgttctccaggagtttggtagaatcgacattctggtcaacaatggtggaatgtccca

SEQ ID NO: 57198 - DNA, 201 bp, Homo sapiens
atatggtggtgtgggtgactggagcctcgagtggaattggtgaggagctggcttaccagttgtctaaactaggagtttctcttgtgctgtcagccagaagrgtgcatgagctggaaagggtgaaaagaagatgcctagagaatggcaatttaaaagaaaaagatatacttgttttgccccttgacctgaccgacactggtt

SEQ ID NO: 57199 - DNA, 201 bp, Homo sapiens
tattaactcatactatattcttggataaaataaccttttaaaatactttagcacatatgcttaaaatctaagttaacagatttgtcttagtccatttgtgytgctataacaaaataccacagatttggtaatttataaacaacagaaatctgtttttcctggctcttgaggctgggaattccaagaccaatgcaccagcag

SEQ ID NO: 57200 - DNA, 201 bp, Homo sapiens
acagcaatcttcttatgcttctgaataatcaaagactaatttgtgattttactttttaatagatatgactttgcttccaacatggaatgaaataaaaaatwaataataaaagattgccatgaatcttgcaaaaaaggtattaactcatactatattcttggataaaataaccttttaaaatactttagcacatatgcttaa

SEQ ID NO: 57201 - DNA, 201 bp, Homo sapiens
attgttactgtgaatagcatcctgggtatcatatctgtacctctttccattggatactgtgctagcaagcatgctctccggggtttttttaatggccttcraacagaacttgccacatacccaggtataatagtttctaacatttgcccaggacctgtgcaatcaaatattgtggagaattccctagctggagaagtcaca

SEQ ID NO: 57202 - DNA, 201 bp, Homo sapiens; identical to SEQ ID NO: 57188

SEQ ID NO: 57203 - DNA, 201 bp, Homo sapiens; identical to SEQ ID NO: 57189

SEQ ID NO: 57204 - DNA, 201 bp, Homo sapiens; identical to SEQ ID NO: 57190

SEQ ID NO: 57205 - DNA, 201 bp, Homo sapiens
tttacatcccacagaggaaacagacacagggtttcctcatgttgcccaggctggtctcggacacttgaattcaagcaatctgccggccccgccgggtgtgscgcatgagggcgcgggccgcccaaggaccgcgagtggggccgcgagtgctgagcccggcgcgcccgagccgctcctcctcccggcctgctccctgggcgg

SEQ ID NO: 57206 - DNA, 201 bp, Homo sapiens; identical to SEQ ID NO: 57192

SEQ ID NO: 57207 - DNA, 201 bp, Homo sapiens; identical to SEQ ID NO: 57194

SEQ ID NO: 57208 - DNA, 201 bp, Homo sapiens
ctggaaagggtgaaaagaagatgcctagagaatggcaatttaaaagaaaaagatatacttgttttgccccttgacctgaccgacactggttcccatgaagyggctaccaaagctgttctccaggagtttggtagaggtttttttaatggccttcgaacagaacttgccacatacccaggtataatagtttctaacatttgc

SEQ ID NO: 57209 - DNA, 201 bp, Homo sapiens
tcttgtgctgtcagccagaagagtgcatgagctggaaagggtgaaaagaagatgcctagagaatggcaatttaaaagaaaaagatatacttgttttgcccyttgacctgaccgacactggttcccatgaagcggctaccaaagctgttctccaggagtttggtagaggtttttttaatggccttcgaacagaacttgccac

SEQ ID NO: 57210 - DNA, 137 bp, Homo sapiens
gcaatccaagactgcttagggttcggaattacaaaamcaaattccctgctaaggctaaagttgatctgaacaaaagtaagggcaaggcaaagagaatagacattagacagggacctgaaaggatccagaaatgggac

SEQ ID NO: 57211 - DNA, 201 bp, Homo sapiens; identical to SEQ ID NO: 57199

SEQ ID NO: 57212 - DNA, 201 bp, Homo sapiens; identical to SEQ ID NO: 57198

SEQ ID NO: 57213 - DNA, 201 bp, Homo sapiens; identical to SEQ ID NO: 57200

SEQ ID NO: 57214 - DNA, 201 bp, Homo sapiens
atacttgttttgccccttgacctgaccgacactggttcccatgaagcggctaccaaagctgttctccaggagtttggtagaggtttttttaatggccttcraacagaacttgccacatacccaggtataatagtttctaacatttgcccaggacctgtgcaatcaaatattgtggagaattccctagctggagaagtcaca

SEQ ID NO: 57215 - DNA, 201 bp, Homo sapiens; identical to SEQ ID NO: 57188

SEQ ID NO: 57216 - DNA, 201 bp, Homo sapiens; identical to SEQ ID NO: 57189

SEQ ID NO: 57217 - DNA, 201 bp, Homo sapiens; identical to SEQ ID NO: 57190

SEQ ID NO: 57218 - DNA, 201 bp, Homo sapiens; identical to SEQ ID NO: 57205

SEQ ID NO: 57219 - DNA, 201 bp, Homo sapiens; identical to SEQ ID NO: 57192

SEQ ID NO: 57220 - DNA, 201 bp, Homo sapiens; identical to SEQ ID NO: 57193

SEQ ID NO: 57221 - DNA, 201 bp, Homo sapiens; identical to SEQ ID NO: 57194

SEQ ID NO: 57222 - DNA, 201 bp, Homo sapiens; identical to SEQ ID NO: 57195

SEQ ID NO: 57223 - DNA, 201 bp, Homo sapiens; identical to SEQ ID NO: 57196

SEQ ID NO: 57224 - DNA, 201 bp, Homo sapiens; identical to SEQ ID NO: 57197

SEQ ID NO: 57225 - DNA, 137 bp, Homo sapiens; identical to SEQ ID NO: 57210

SEQ ID NO: 57226 - DNA, 201 bp, Homo sapiens; identical to SEQ ID NO: 57198

SEQ ID NO: 57227 - DNA, 201 bp, Homo sapiens; identical to SEQ ID NO: 57199

SEQ ID NO: 57228 - DNA, 201 bp, Homo sapiens; identical to SEQ ID NO: 57200

SEQ ID NO: 57229 - DNA, 201 bp, Homo sapiens; identical to SEQ ID NO: 57201

SEQ ID NO: 57230 - DNA, 201 bp, Homo sapiens
gtggcaagttacttatcaagctgaaagacggcaggaaggtagaaactgaccacatagtggcagctgtgggcctggagcccaatgttgagttggccaagackggtggcctggaaatagactcagattttggtggcttccgggtaaatgcagagctacaagcacgctctaacatctgggtggcaggagatgctgcatgcttct

SEQ ID NO: 57231 - DNA, 201 bp, Homo sapiens
tgaagcagaagctggtgcccttggtgcggaccgtgtgcgtccgaagcccgaggcagaggaaccggctcccagctcgagccttgggcacagaagtgattcarctcttccccgagaaaggaaatatgggaaagatcctccccgaatacctcagcaactggaccatggaaaaagtcagacgagagggggttaaggtgatgccca

SEQ ID NO: 57232 - DNA, 201 bp, Homo sapiens
gttccggtgtggaggcctggcggcgggtgctttgaagcagaagctggtgcccttggtgcggaccgtgtgcgtccgaagcccgaggcagaggaaccggctcycagctcgagccttgggcacagaagtgattcaactcttccccgagaaaggaaatatgggaaagatcctccccgaatacctcagcaactggaccatggaaaa

SEQ ID NO: 57233 - DNA, 201 bp, Homo sapiens
ccgaggcctcagaaattactattcctcccagcaccccggcagttccacaggctcccgtccagggggaggactacggcaaaggtgtcatcttctacctcagrgacaaagtggtcgtggggattgtgctatggaacatctttaaccgaatgccaatagcaaggaagatcattaaggacggtgagcagcatgaagatctcaatg

SEQ ID NO: 57234 - DNA, 201 bp, Homo sapiens; identical to SEQ ID NO: 57230

SEQ ID NO: 57235 - DNA, 201 bp, Homo sapiens
gtgcatcagggggcaaaatcgataattctgtgttagtccttattgtgggcttatcaacagtaggagctggtgcctatgcctacaagactatgaaagaggaygaaaaaagatacaatgaaagaatttcagggttagggctgacaccagaacagaaacagaaaaaggccgcgttatctgcttcagaaggagaggaagttcctc

SEQ ID NO: 57236 - DNA, 201 bp, Homo sapiens
caagactatgaaagaggatgaaaaaagatacaatgaaagaatttcagggttagggctgacaccagaacagaaacagaaaaaggccgcgttatctgcttcaraaggagaggaagttcctcaagacaaggcgccaagtcatgttcctttcctgctaattggtggaggcacagctgcttttgctgcagccagatccatccgggc

SEQ ID NO: 57237 - DNA, 201 bp, Homo sapiens
aagtcaaatcaattacgattatcggtgggggcttccttggtagcgaactggcctgtgctcttggcagaaaggctcgagccttgggcacagaagtgattcarctcttccccgagaaaggaaatatgggaaagatcctccccgaatacctcagcaactggaccatggaaaaagtcagacgagagggggttaaggtgatgccca

SEQ ID NO: 57238 - DNA, 201 bp, Homo sapiens
gttccggtgtggaggcctggcggcgggtgctttgaagcagaagctggtgcccttggtgcggaccgtgtgcgtccgaagcccgaggcagaggaaccggctcycaggcaacttgttccagcgatggcatgttcctctagaactccagatgacaagacaaatggctagctctggtgcatcagggggcaaaatcgataattctgt

SEQ ID NO: 57239 - DNA, 201 bp, Homo sapiens
ctggagcagaggtgaagagtagaacaacgcttttcagaaagattggagactttagaagcttggagaagatttcacgggaagtcaaatcaattacgattatyggtgggggcttccttggtagcgaactggcctgtgctcttggcagaaaggctcgagccttgggcacagaagtgattcaactcttccccgagaaaggaaata

SEQ ID NO: 57240 - DNA, 201 bp, Homo sapiens; identical to SEQ ID NO: 57233

SEQ ID NO: 57241 - DNA, 201 bp, Homo sapiens; identical to SEQ ID NO: 57230

SEQ ID NO: 57242 - DNA, 201 bp, Homo sapiens
cttctgggaaagatggcagcaacctagtgtacttcttaattgtaggagcaacagtcactggggcaggagtttattatgcctacaagactatgaaagaggaygaaaaaagatacaatgaaagaatttcagggttagggctgacaccagaacagaaacagaaaaaggccgcgttatctgcttcagaaggagaggaagttcctc

SEQ ID NO: 57243 - DNA, 201 bp, Homo sapiens; identical to SEQ ID NO: 57236

SEQ ID NO: 57244 - DNA, 201 bp, Homo sapiens; identical to SEQ ID NO: 57237

SEQ ID NO: 57245 - DNA, 201 bp, Homo sapiens
gttccggtgtggaggcctggcggcgggtgctttgaagcagaagctggtgcccttggtgcggaccgtgtgcgtccgaagcccgaggcagaggaaccggctcycagttgtgcagtctcatcacctaggatccccttctagatcactagcatctacaggtgcttctgggaaagatggcagcaacctagtgtacttcttaattgt

SEQ ID NO: 57246 - DNA, 201 bp, Homo sapiens; identical to SEQ ID NO: 57239

SEQ ID NO: 57247 - DNA, 201 bp, Homo sapiens; identical to SEQ ID NO: 57233

SEQ ID NO: 57248 - DNA, 201 bp, Homo sapiens
accagcggatgagatacgagtacgagttttaccactacgtcaaagagcagttccacctgctgaagcgcaagtttggacttaagtctcacgtcagcaagccycccctgaggccacacttctttatcccaactccactggaaaccgaggagccaatcgacgatgaagaacaggatgatgaaaagtggctggaagatatttata

SEQ ID NO: 57249 - DNA, 201 bp, Homo sapiens
actgtcccctctcctgaggctgtgcagatcctctaccagcggatgagatacgagtacgagttttaccactacgtcaaagagcagttccacctgctgaagcrcaagtttggacttaagtctcacgtcagcaagccccccctgaggccacacttctttatcccaactccactggaaaccgaggagccaatcgacgatgaagaa

SEQ ID NO: 57250 - DNA, 201 bp, Homo sapiens
atctggaagtggaatccttactgcatgttttgcacgtatggttggatgtactggaaaagtcataggaattgatcacattaaagagctagtagatgactcartaaataatgtcaggaaggacgatccaacacttctgtcttcagggagagtacagcttgttgtgggggatggaagaatgggatatgctgaagaagcccctta

SEQ ID NO: 57251 - DNA, 201 bp, Homo sapiens
attcttcaaagaggcacagagccaaattggtagaggaaggatgcaaagtataaatttgtgtaatattactttaacatgcccatattttacttggaaatatwaaaagaaagggttctgtaaaatggaaaacttagtttgtgaattgattttgaggagtggtttttcttttcttggacacttaattctgttctgatattaatt

SEQ ID NO: 57252 - DNA, 123 bp, Homo sapiens
accccgccatcccgccgtcccgytcggtgaccggagacacagccgggaacgcgactgatcaggctaccgagccgggccgcagggcgaaagcggtgcggtccgaggcctcagaaagggacacgc

SEQ ID NO: 57253 - DNA, 201 bp, Homo sapiens
gaagtggcgctgactcagcccggcctccctgcagtcccctggcagcggtagcagccacaggggcgggcggctgggccacacgcctcccccgccctcggccycacccggccgcaccctaagccgcgcggcgtcacagagcgcatgcgtgccgcgggggatgccgggagcgcgcagtggcggcagcggcggcgacggcagtaa

SEQ ID NO: 57254 - DNA, 201 bp, Homo sapiens
cggagacacagccgggaacgcgactgatcaggctaccgagccgggccgcagggcgaaagcggtgcggtccgaggcctcagaaagggacacgcagcagcggmagtggcgctgactcagcccggcctccctgcagtcccctggcagcggtagcagccacaggggcgggcggctgggccacacgcctcccccgccctcggcccc

SEQ ID NO: 57255 - DNA, 201 bp, Homo sapiens
ttctttttaaagcttttgatgtggtgtcatagaatagcatgttgtagatacaatcagctgctttgttaccttaaaactaggcatttgtaaatattaaaccwtaagatggcaggtgatgtcctgtaaacactcagctgttcagattggacataactgacttagttcttcccttctctctctctcaaaattataggagacttg

SEQ ID NO: 57256 - DNA, 201 bp, Homo sapiens
acacgcagcagcggaagtggcgctgactcagcccggcctccctgcagtcccctggcagcggtagcagccacaggggcgggcggctgggccacacgcctccyccgccctcggccccacccggccgcaccctaagccgcgcggcgtcacagagcgcatgcgtgccgcgggggatgccgggagcgcgcagtggcggcagcggcg

SEQ ID NO: 57257 - DNA, 201 bp, Homo sapiens
tgcccatattttacttggaaatattaaaagaaagggttctgtaaaatggaaaacttagtttgtgaattgattttgaggagtggtttttcttttcttggacrcttaattctgttctgatattaatttatcagattgcttttgtgcattggataacaccaccattcacaagttaagattcttggtatttggatatctgttaga

SEQ ID NO: 57258 - DNA, 201 bp, Homo sapiens
aaacactcagctgttcagattggacataactgacttagttcttcccttctctctctctcaaaattataggagacttgtagtttagtgtggttttctgtttytaatttgctgctgataatgtatatgaacttaacatgctgtgtaagctgtgtcctagttcttgaacagtttatgcagtgctgctttgccaaataaagttaa

SEQ ID NO: 57259 - DNA, 201 bp, Homo sapiens
atcaataggtttccaagcaacaatcagtgctccacacatggttggatgtactggaaaagtcataggaattgatcacattaaagagctagtagatgactcartaaataatgtcaggaaggacgatccaacacttctgtcttcagggagagtacagcttgttgtgggggatggaagaatgggatatgctgaagaagcccctta

SEQ ID NO: 57260 - DNA, 201 bp, Homo sapiens; identical to SEQ ID NO: 57251

SEQ ID NO: 57261 - DNA, 196 bp, Homo sapiens
ggagcagatccgccgctcgaaacagctgacccagcgacgactgcggaaccactagcagcgtctgcacagatcgaccccgccatcccgccgtcccgytcggtgaccggagacacagccgggaacgcgactgatcaggctaccgagccgggccgcagggcgaaagcggtgcggtccgaggcctcagaaagggacacgc

SEQ ID NO: 57262 - DNA, 201 bp, Homo sapiens; identical to SEQ ID NO: 57255

SEQ ID NO: 57263 - DNA, 201 bp, Homo sapiens; identical to SEQ ID NO: 57257

SEQ ID NO: 57264 - DNA, 201 bp, Homo sapiens; identical to SEQ ID NO: 57258

SEQ ID NO: 57265 - DNA, 126 bp, Homo sapiens
ggagcagatccgccgctcgaaacagstgacccagcgacgactgcggaaccactagcagcgtctgcacagatcgaccccgccatcccgccgtcccgctcggtgaccggagacacagccgggaacgcg

SEQ ID NO: 57266 - DNA, 201 bp, Homo sapiens; identical to SEQ ID NO: 57253

SEQ ID NO: 57267 - DNA, 201 bp, Homo sapiens; identical to SEQ ID NO: 57254

SEQ ID NO: 57268 - DNA, 201 bp, Homo sapiens; identical to SEQ ID NO: 57256

SEQ ID NO: 57269 - DNA, 201 bp, Homo sapiens; identical to SEQ ID NO: 57250

SEQ ID NO: 57270 - DNA, 201 bp, Homo sapiens; identical to SEQ ID NO: 57251

SEQ ID NO: 57271 - DNA, 196 bp, Homo sapiens; identical to SEQ ID NO: 57261

SEQ ID NO: 57272 - DNA, 201 bp, Homo sapiens; identical to SEQ ID NO: 57255

SEQ ID NO: 57273 - DNA, 201 bp, Homo sapiens; identical to SEQ ID NO: 57257

SEQ ID NO: 57274 - DNA, 201 bp, Homo sapiens; identical to SEQ ID NO: 57258

SEQ ID NO: 57275 - DNA, 126 bp, Homo sapiens; identical to SEQ ID NO: 57265

SEQ ID NO: 57276 - DNA, 201 bp, Homo sapiens; identical to SEQ ID NO: 57253

SEQ ID NO: 57277 - DNA, 201 bp, Homo sapiens; identical to SEQ ID NO: 57254

SEQ ID NO: 57278 - DNA, 201 bp, Homo sapiens; identical to SEQ ID NO: 57256

SEQ ID NO: 57279 - DNA, 201 bp, Homo sapiens; identical to SEQ ID NO: 57250

SEQ ID NO: 57280 - DNA, 201 bp, Homo sapiens; identical to SEQ ID NO: 57251

SEQ ID NO: 57281 - DNA, 196 bp, Homo sapiens; identical to SEQ ID NO: 57261

SEQ ID NO: 57282 - DNA, 201 bp, Homo sapiens; identical to SEQ ID NO: 57255

SEQ ID NO: 57283 - DNA, 201 bp, Homo sapiens; identical to SEQ ID NO: 57257

SEQ ID NO: 57284 - DNA, 201 bp, Homo sapiens; identical to SEQ ID NO: 57258

SEQ ID NO: 57285 - DNA, 126 bp, Homo sapiens; identical to SEQ ID NO: 57265

SEQ ID NO: 57286 - DNA, 201 bp, Homo sapiens; identical to SEQ ID NO: 57253

SEQ ID NO: 57287 - DNA, 201 bp, Homo sapiens; identical to SEQ ID NO: 57254

SEQ ID NO: 57288 - DNA, 201 bp, Homo sapiens; identical to SEQ ID NO: 57256

SEQ ID NO: 57289 - DNA, 201 bp, Homo sapiens
tcccaggttcaagcaattctcctgcctcagtctcctgagtagctggaactacaggtgtgcgccaccacgcccagctaatttttgtaattttagtagagacrgagtttcaccatgttggccaggatggtctcgatctcttgacctcatgatccacccgcctcgacctcccaaagtgctgtgattacaggtgtgagccactgc

SEQ ID NO: 57290 - DNA, 201 bp, Homo sapiens
gcgtgtccctttctgaggcctcggaccgcaccgctttcgccctgcggcccggctcggtagcctgatcagtcgcgttcccggctgtgtctccggtcaccgarcgggacggcgggatggcggggtcgatctgtgcagacgctgctagtggttccgcagtcgtcgctgggtcagctgtttcgagcggcggatctgctcctatag

SEQ ID NO: 57291 - DNA, 201 bp, Homo sapiens
agataaaagtgtgattaatcaaatgatatgatcagagtaaagaattttgccattttgatccttttactttgttttagccacctatagtgttaccaaccatmtttatccttgtctgcagggataataatgaactaatgtagtgttttaagataatttaatgatactatctttccaaactttgttagattttaaatgtattat

SEQ ID NO: 57292 - DNA, 201 bp, Homo sapiens
agaattgctcaaacccgggaggcagaggttgcagtgacccaagatcgtgccacttcactccagcctgggcaaaagagcaaaacgccatctcaaaaaatatrcatatataaggagataaagtttcccattttccaatacagtttcacatttgaacagccctaattgatacaactttatggcagggttttagtgtgtgagtgg

SEQ ID NO: 57293 - DNA, 201 bp, Homo sapiens
cgcgttcccggctgtgtctccggtcaccgagcgggacggcgggatggcggggtcgatctgtgcagacgctgctagtggttccgcagtcgtcgctgggtcasctgtttcgagcggcggatctgctcctatagatgtccagattgttagacggaaaattatatttcactgtggtctattggagattttggaaacttggactct

SEQ ID NO: 57294 - DNA, 201 bp, Homo sapiens
gctcttgttgctgaggcaggagaattgctcaaacccgggaggcagaggttgcagtgacccaagatcgtgccacttcactccagcctgggcaaaagagcaaracgccatctcaaaaaatatacatatataaggagataaagtttcccattttccaatacagtttcacatttgaacagccctaattgatacaactttatggca

SEQ ID NO: 57295 - DNA, 108 bp, Homo sapiens
agggcggrggaggcgtgtggcccagccgcccgcccctgtggctgctaccgctgccaggggactgcagggaggccgggctgagtcagcgccacttccgctgctgcgtgt

SEQ ID NO: 57296 - DNA, 201 bp, Homo sapiens
ttcctatgatccttccacactttatttccttaataataataaactttttcagaaagaattgagtagagcaaaaatgacaaagatgtgtagctgtgttcaatttttttttttttttttttttgaggcagagtcttgctctgctggagtgcggtggtgcaatctcggctcactgcaacctccacctcccaggttcaagcaatt

SEQ ID NO: 57297 - DNA, 201 bp, Homo sapiens
tcctatgatccttccacactttatttccttaataataataaactttttcagaaagaattgagtagagcaaaaatgacaaagatgtgtagctgtgttcaatttttttttttttttttttttgaggcagagtcttgctctgctggagtgcggtggtgcaatctcggctcactgcaacctccacctcccaggttcaagcaattc

SEQ ID NO: 57298 - DNA, 201 bp, Homo sapiens
ggcagagtcttgctctgctggagtgcggtggtgcaatctcggctcactgcaacctccacctcccaggttcaagcaattctcctgcctcagtctcctgagtrgctggaactacaggtgtgcgccaccacgcccagctaatttttgtaattttagtagagacagagtttcaccatgttggccaggatggtctcgatctcttga

SEQ ID NO: 57299 - DNA, 201 bp, Homo sapiens
catttgaacagccctaattgatacaactttatggcagggttttagtgtgtgagtgggatccaaaacactcaatcctgtaaaagggtacagtcctattgtakgttaacacactgatgatgtgagcctgtgagatgagccaatcaccagttgttatgttcgaatctgctttgtgttgggacgctttaatgtcagggtttcact

SEQ ID NO: 57300 - DNA, 141 bp, Homo sapiens
gtcctattgtatgttaacacactgatgatgtgagcctgtgagatgagccaatcaccagttgttatgttcgaatctgctttgtgttgggacgctttaatgtcagggtttcactaaataaatgaattttcatatactgaactg

SEQ ID NO: 57301 - DNA, 201 bp, Homo sapiens
acatcagtaaactaccattaatgtcaatgcccagttttgacttttgttagcctgacactcccaaacagttgtagaatccgatagatgactgatggcaaaasattgtgaacatgtggaagaaaatcagtgggattctggtgctgatgaataggttgccttcagagtattattgacagacagcttgtggaactaattctttat

SEQ ID NO: 57302 - DNA, 201 bp, Homo sapiens
ggagttttgctcttgttgctgaggcaggagaattgctcaaacccgggaggcagaggttgcagtgacccaagatcgtgccacttcactccagcctgggcaaragagcaaaacgccatctcaaaaaatatacatatataaggagataaagtttcccattttccaatacagtttcacatttgaacagccctaattgatacaact

SEQ ID NO: 57303 - DNA, 201 bp, Homo sapiens
gagttttgctcttgttgctgaggcaggagaattgctcaaacccgggaggcagaggttgcagtgacccaagatcgtgccacttcactccagcctgggcaaargagcaaaacgccatctcaaaaaatatacatatataaggagataaagtttcccattttccaatacagtttcacatttgaacagccctaattgatacaactt

SEQ ID NO: 57304 - DNA, 201 bp, Homo sapiens
tgctcttgttgctgaggcaggagaattgctcaaacccgggaggcagaggttgcagtgacccaagatcgtgccacttcactccagcctgggcaaaagagcaraacgccatctcaaaaaatatacatatataaggagataaagtttcccattttccaatacagtttcacatttgaacagccctaattgatacaactttatggc

SEQ ID NO: 57305 - DNA, 201 bp, Homo sapiens
gttatggaattatggtaaggttttgcttttctgtcctaataaatatatatattttttgagatggagttttgctcttgttgctgaggcaggagaattgctcraacccgggaggcagaggttgcagtgacccaagatcgtgccacttcactccagcctgggcaaaagagcaaaacgccatctcaaaaaatatacatatataag

SEQ ID NO: 57306 - DNA, 194 bp, Homo sapiens
agggcgggggaggcgtgtggcccagccgcccgcccctgtggctgctaccgctgccaggggactgcagggaggccgggctgagtcagcgccactkccgctgctgcgtgtccctttctgaggcctcggaccgcaccgctttcgccctgcggcccggctcggtagcctgatcagtcgcgttcccggctgtgtctccg

SEQ ID NO: 57307 - DNA, 201 bp, Homo sapiens
ttgcttttctgtcctaataaatatatatattttttgagatggagttttgctcttgttgctgaggcaggagaattgctcaaacccgggaggcagaggttgcrgtgacccaagatcgtgccacttcactccagcctgggcaaaagagcaaaacgccatctcaaaaaatatacatatataaggagataaagtttcccattttcc

SEQ ID NO: 57308 - DNA, 201 bp, Homo sapiens; identical to SEQ ID NO: 57289

SEQ ID NO: 57309 - DNA, 201 bp, Homo sapiens; identical to SEQ ID NO: 57296

SEQ ID NO: 57310 - DNA, 201 bp, Homo sapiens; identical to SEQ ID NO: 57297

SEQ ID NO: 57311 - DNA, 201 bp, Homo sapiens; identical to SEQ ID NO: 57290

SEQ ID NO: 57312 - DNA, 201 bp, Homo sapiens; identical to SEQ ID NO: 57298

SEQ ID NO: 57313 - DNA, 201 bp, Homo sapiens; identical to SEQ ID NO: 57301

SEQ ID NO: 57314 - DNA, 201 bp, Homo sapiens; identical to SEQ ID NO: 57291

SEQ ID NO: 57315 - DNA, 201 bp, Homo sapiens; identical to SEQ ID NO: 57293

SEQ ID NO: 57316 - DNA, 194 bp, Homo sapiens; identical to SEQ ID NO: 57306

SEQ ID NO: 57317 - DNA, 108 bp, Homo sapiens; identical to SEQ ID NO: 57295

SEQ ID NO: 57318 - DNA, 201 bp, Homo sapiens
aatactgataagccacaccccaggggtgaaattcttattgggggccaaagtgtgacaatggggtactacaaaaatgaagcaaaaacaaaagctgatttctytgaagatgaaaatggacaaaggtggctctgtactggggatattggagagtttgaacccgatggatgcttaaagattattgatcgtaaaaaggaccttgta

SEQ ID NO: 57319 - DNA, 201 bp, Homo sapiens
acccggactccggcgtagcggttttgacacaagggcgcatatcttcaaagcacctagtacctcctaccattgtcaactgattctcgctgaagtctgttaaytctactttttgagtacttatgaataaccacgtgtcttcaaaaccatctaccatgaagctaaaacataccatcaaccctattcttttatattttatacatt

SEQ ID NO: 57320 - DNA, 201 bp, Homo sapiens
tcataggcaccacatttttcatgtcagactagttactttgttgattctcagttactgtaggcatcaaaaggcaaaaatcaaaaaaaaaaaaacaaaaaaamcaaaaaaaaagatgaacctaggtctgtgtaaagtaaggggagtgttaggagcagccaggactgtgtagtgtgtgtttggttgcatcacaaacatcgtatg

SEQ ID NO: 57321 - DNA, 201 bp, Homo sapiens
aggacttaaatcataggcaccacatttttcatgtcagactagttactttgttgattctcagttactgtaggcatcaaaaggcaaaaatcaaaaaaaaaaamacaaaaaaaacaaaaaaaaagatgaacctaggtctgtgtaaagtaaggggagtgttaggagcagccaggactgtgtagtgtgtgtttggttgcatcacaa

SEQ ID NO: 57322 - DNA, 201 bp, Homo sapiens
aacaagagtatataaagttattctttgaatatttcgttgactatatgtacattgagttatctatatttgtaaacaaattagtcatggaaaattattctatyccaaagtctccttttagtctagataatcattatttcattttaaaattagtgtttttcatagtttgcactgatgcgtgtatggatgtgtgtgagtcagtgg

SEQ ID NO: 57323 - DNA, 201 bp, Homo sapiens
acttaaatcataggcaccacatttttcatgtcagactagttactttgttgattctcagttactgtaggcatcaaaaggcaaaaatcaaaaaaaaaaaaacaaaaaaaacaaaaaaaaagatgaacctaggtctgtgtaaagtaaggggagtgttaggagcagccaggactgtgtagtgtgtgtttggttgcatcacaaaca

SEQ ID NO: 57324 - DNA, 201 bp, Homo sapiens
cttaaatcataggcaccacatttttcatgtcagactagttactttgttgattctcagttactgtaggcatcaaaaggcaaaaatcaaaaaaaaaaaaacaaaaaaaacaaaaaaaaagatgaacctaggtctgtgtaaagtaaggggagtgttaggagcagccaggactgtgtagtgtgtgtttggttgcatcacaaacat

SEQ ID NO: 57325 - DNA, 201 bp, Homo sapiens
ttaaatcataggcaccacatttttcatgtcagactagttactttgttgattctcagttactgtaggcatcaaaaggcaaaaatcaaaaaaaaaaaaacaaaaaaaacaaaaaaaaagatgaacctaggtctgtgtaaagtaaggggagtgttaggagcagccaggactgtgtagtgtgtgtttggttgcatcacaaacatc

SEQ ID NO: 57326 - DNA, 201 bp, Homo sapiens
atcataggcaccacatttttcatgtcagactagttactttgttgattctcagttactgtaggcatcaaaaggcaaaaatcaaaaaaaaaaaaacaaaaaamacaaaaaaaaagatgaacctaggtctgtgtaaagtaaggggagtgttaggagcagccaggactgtgtagtgtgtgtttggttgcatcacaaacatcgtat

SEQ ID NO: 57327 - DNA, 201 bp, Homo sapiens
gtttgagtcctgaaccgtggacccctgaaactggtctggtgacagatgccttcaagctgaaacgcaaagagcttaaaacacattaccaggcggacattgarcgaatgtatggaagaaaataattattctcttctggcatcagtttgctacagtgagctcagatcaaataggaaaatacttgaaatgcatgtctcaagctgc

SEQ ID NO: 57328 - DNA, 201 bp, Homo sapiens
taaagtcagtgaaatgagtagttttcaacgtaatctgtttattctggcctataattacaaaatggaacagatttcaaaaggacgtaatactccactgtgcracagctttgttttccggaaagttcgaagcttgctagggggaaatattcgtctcctgttgtgtggtggcgctccactttctgcaaccacgcagcgattcat

SEQ ID NO: 57329 - DNA, 201 bp, Homo sapiens
atctatatttgtaaacaaattagtcatggaaaattattctatcccaaagtctccttttagtctagataatcattatttcattttaaaattagtgtttttcmtagtttgcactgatgcgtgtatggatgtgtgtgagtcagtggtagcttatttaaaaagcaccttatcctttctcccataacctttgtacactaaaaaatg

SEQ ID NO: 57330 - DNA, 201 bp, Homo sapiens
acatcattactagtaaagaactcttacaaacaaagttgaaggatatagtttctttggtcccacgcctgcggcacatcatcactgttgatggaaagccaccracctggtccgagttccccaagggcatcattgtgcataccatggctgcagtggaggccctgggagccaaggccagcatggaaaaccaacctcatagcaaac

SEQ ID NO: 57331 - DNA, 201 bp, Homo sapiens
aacttacttgtttgctgctaaaatactcaagattttgccatttttaaacaaccagtccctgtgatacaactttgaaaaaacttttaaaaatctctgatgtrtgggctctttttttcccataagaattatgtacatctgtgatgttttacagggggatccgcttttaaacagtgtacatattggaccacactgaaatgtcat

SEQ ID NO: 57332 - DNA, 201 bp, Homo sapiens
gttgaaactaggaaaatacccaaacttaaatggaagaattctgaaagagaggatagaatttaaagaacaagagtatataaagttattctttgaatatttcrttgactatatgtacattgagttatctatatttgtaaacaaattagtcatggaaaattattctatcccaaagtctccttttagtctagataatcattattt

SEQ ID NO: 57333 - DNA, 201 bp, Homo sapiens
acaagagtatataaagttattctttgaatatttcgttgactatatgtacattgagttatctatatttgtaaacaaattagtcatggaaaattattctatcycaaagtctccttttagtctagataatcattatttcattttaaaattagtgtttttcatagtttgcactgatgcgtgtatggatgtgtgtgagtcagtggt

SEQ ID NO: 57334 - DNA, 201 bp, Homo sapiens
gcatatgcaaacagttatcattcttatgtcattggatttgttgtgccaaatcaaaaggaactaactgaactagctcgaaagaaaggacttaaagggacttsggaggagctgtgtaacagttgtgaaatggaaaatgaggtacttaaagtgctttccgaagctgctatttcagcaagtctggaaaagtttgaaattccagta

SEQ ID NO: 57335 - DNA, 201 bp, Homo sapiens; identical to SEQ ID NO: 57318

SEQ ID NO: 57336 - DNA, 201 bp, Homo sapiens
gggaaacagctgtaacatttgccaccctcagaagctgctggtcctgtgtcacaccaccttagcctcttgatcgaggaagattctcgctgaagtctgttaaytctactttttgagtacttatgaataaccacgtgtcttcaaaaccatctaccatgaagctaaaacataccatcaaccctattcttttatattttatacatt

SEQ ID NO: 57337 - DNA, 201 bp, Homo sapiens; identical to SEQ ID NO: 57320

SEQ ID NO: 57338 - DNA, 201 bp, Homo sapiens; identical to SEQ ID NO: 57321

SEQ ID NO: 57339 - DNA, 201 bp, Homo sapiens; identical to SEQ ID NO: 57322

SEQ ID NO: 57340 - DNA, 201 bp, Homo sapiens; identical to SEQ ID NO: 57323

SEQ ID NO: 57341 - DNA, 201 bp, Homo sapiens; identical to SEQ ID NO: 57324

SEQ ID NO: 57342 - DNA, 201 bp, Homo sapiens; identical to SEQ ID NO: 57325

SEQ ID NO: 57343 - DNA, 201 bp, Homo sapiens; identical to SEQ ID NO: 57326

SEQ ID NO: 57344 - DNA, 201 bp, Homo sapiens; identical to SEQ ID NO: 57327

SEQ ID NO: 57345 - DNA, 201 bp, Homo sapiens; identical to SEQ ID NO: 57328

SEQ ID NO: 57346 - DNA, 201 bp, Homo sapiens; identical to SEQ ID NO: 57329

SEQ ID NO: 57347 - DNA, 200 bp, Homo sapiens
atacagaattcgttgttgggaaggactggggaaacagctgtaacatttgccaccctcagaagctgctggtcctgtgtcacaccaccttagcctcttgatygaggaagattctcgctgaagtctgttaattctactttttgagtacttatgaataaccacgtgtcttcaaaaccatctaccatgaagctaaaacataccat

SEQ ID NO: 57348 - DNA, 201 bp, Homo sapiens; identical to SEQ ID NO: 57330

SEQ ID NO: 57349 - DNA, 201 bp, Homo sapiens; identical to SEQ ID NO: 57331

SEQ ID NO: 57350 - DNA, 201 bp, Homo sapiens; identical to SEQ ID NO: 57332

SEQ ID NO: 57351 - DNA, 201 bp, Homo sapiens; identical to SEQ ID NO: 57334

SEQ ID NO: 57352 - DNA, 201 bp, Homo sapiens; identical to SEQ ID NO: 57333

SEQ ID NO: 57353 - DNA, 201 bp, Homo sapiens; identical to SEQ ID NO: 57318

SEQ ID NO: 57354 - DNA, 201 bp, Homo sapiens; identical to SEQ ID NO: 57336

SEQ ID NO: 57355 - DNA, 201 bp, Homo sapiens; identical to SEQ ID NO: 57320

SEQ ID NO: 57356 - DNA, 201 bp, Homo sapiens; identical to SEQ ID NO: 57321

SEQ ID NO: 57357 - DNA, 201 bp, Homo sapiens; identical to SEQ ID NO: 57322

SEQ ID NO: 57358 - DNA, 201 bp, Homo sapiens; identical to SEQ ID NO: 57323

SEQ ID NO: 57359 - DNA, 201 bp, Homo sapiens; identical to SEQ ID NO: 57324

SEQ ID NO: 57360 - DNA, 201 bp, Homo sapiens; identical to SEQ ID NO: 57325

SEQ ID NO: 57361 - DNA, 201 bp, Homo sapiens; identical to SEQ ID NO: 57326

SEQ ID NO: 57362 - DNA, 201 bp, Homo sapiens; identical to SEQ ID NO: 57327

SEQ ID NO: 57363 - DNA, 201 bp, Homo sapiens; identical to SEQ ID NO: 57328

SEQ ID NO: 57364 - DNA, 201 bp, Homo sapiens; identical to SEQ ID NO: 57329

SEQ ID NO: 57365 - DNA, 201 bp, Homo sapiens
gatacagaattcgttgttgggaaggactggggaaacagctgtaacatttgccaccctcagaagctgctggtcctgtgtcacaccaccttagcctcttgatygaggaagattctcgctgaagtctgttaattctactttttgagtacttatgaataaccacgtgtcttcaaaaccatctaccatgaagctaaaacataccat

SEQ ID NO: 57366 - DNA, 201 bp, Homo sapiens; identical to SEQ ID NO: 57330

SEQ ID NO: 57367 - DNA, 201 bp, Homo sapiens; identical to SEQ ID NO: 57331

SEQ ID NO: 57368 - DNA, 201 bp, Homo sapiens; identical to SEQ ID NO: 57332

SEQ ID NO: 57369 - DNA, 201 bp, Homo sapiens; identical to SEQ ID NO: 57334

SEQ ID NO: 57370 - DNA, 201 bp, Homo sapiens; identical to SEQ ID NO: 57333

SEQ ID NO: 57371 - DNA, 201 bp, Homo sapiens; identical to SEQ ID NO: 57318

SEQ ID NO: 57372 - DNA, 201 bp, Homo sapiens
gcgcggggcgtgaacgctctggggctcagccaggcctgcgcgggcccgaggccggaggaacccggactccggcgtagcgattctcgctgaagtctgttaaytctactttttgagtacttatgaataaccacgtgtcttcaaaaccatctaccatgaagctaaaacataccatcaaccctattcttttatattttatacatt

SEQ ID NO: 57373 - DNA, 201 bp, Homo sapiens; identical to SEQ ID NO: 57320

SEQ ID NO: 57374 - DNA, 201 bp, Homo sapiens; identical to SEQ ID NO: 57321

SEQ ID NO: 57375 - DNA, 201 bp, Homo sapiens; identical to SEQ ID NO: 57322

SEQ ID NO: 57376 - DNA, 201 bp, Homo sapiens; identical to SEQ ID NO: 57323

SEQ ID NO: 57377 - DNA, 201 bp, Homo sapiens; identical to SEQ ID NO: 57324

SEQ ID NO: 57378 - DNA, 201 bp, Homo sapiens; identical to SEQ ID NO: 57325

SEQ ID NO: 57379 - DNA, 201 bp, Homo sapiens; identical to SEQ ID NO: 57326

SEQ ID NO: 57380 - DNA, 201 bp, Homo sapiens; identical to SEQ ID NO: 57327

SEQ ID NO: 57381 - DNA, 201 bp, Homo sapiens; identical to SEQ ID NO: 57328

SEQ ID NO: 57382 - DNA, 201 bp, Homo sapiens; identical to SEQ ID NO: 57329

SEQ ID NO: 57383 - DNA, 201 bp, Homo sapiens; identical to SEQ ID NO: 57330

SEQ ID NO: 57384 - DNA, 201 bp, Homo sapiens; identical to SEQ ID NO: 57331

SEQ ID NO: 57385 - DNA, 201 bp, Homo sapiens; identical to SEQ ID NO: 57332

SEQ ID NO: 57386 - DNA, 201 bp, Homo sapiens; identical to SEQ ID NO: 57333

SEQ ID NO: 57387 - DNA, 201 bp, Homo sapiens; identical to SEQ ID NO: 57334

SEQ ID NO: 57388 - DNA, 201 bp, Homo sapiens
ctggtgctgggcggagaccacagtttggcaattggaagcatctctggccatgccagggtccaccctgatcttggagtcatctgggtggatgctcacactgrtatcaacactccactgacaaccacaagtggaaacttgcatggacaacctgtatctttcctcctgaaggaactaaaaggaaagattcccgatgtgccagga

SEQ ID NO: 57389 - DNA, 201 bp, Homo sapiens
ggtctctacatcacagaagaaatctacaaaacagggctactctcaggattagatataatggaagtgaacccatccctggggaagacaccagaagaagtaastcgaacagtgaacacagcagttgcaataaccttggcttgtttcggacttgctcgggagggtaatcacaagcctattgactaccttaacccacctaagtaa

SEQ ID NO: 57390 - DNA, 201 bp, Homo sapiens
aagaacggaagaatcagcctggtgctgggcggagaccacagtttggcaattggaagcatctctggccatgccagggtccaccctgatcttggagtcatctrggtggatgctcacactgatatcaacactccactgacaaccacaagtggaaacttgcatggacaacctgtatctttcctcctgaaggaactaaaaggaaag

SEQ ID NO: 57391 - DNA, 201 bp, Homo sapiens
tctaacttttttgaaatttaaaagcttatattttctaacttggcaaaagacttatccttagaaagagaagtgtacattgatttccaattaaaaatttgctrgcattaaaaataagcacacttacataagcccccatacatagagtgggactcttggaatcaggagacaaagctaccacatgtggaaaggtactatgtgtcc

SEQ ID NO: 57392 - DNA, 201 bp, Homo sapiens
atctctggccatgccagggtccaccctgatcttggagtcatctgggtggatgctcacactgatatcaacactccactgacaaccacaagtggaaacttgcwtggacaacctgtatctttcctcctgaaggaactaaaaggaaagattcccgatgtgccaggattctcctgggtgactccctgtatatctgccaaggatatt

SEQ ID NO: 57393 - DNA, 201 bp, Homo sapiens
tctctacatcacagaagaaatctacaaaacagggctactctcaggattagatataatggaagtgaacccatccctggggaagacaccagaagaagtaactygaacagtgaacacagcagttgcaataaccttggcttgtttcggacttgctcgggagggtaatcacaagcctattgactaccttaacccacctaagtaaat

SEQ ID NO: 57394 - DNA, 201 bp, Homo sapiens
acatccctaatgacagtccctttcaaattgtgaagaatccaaggtctgtgggaaaagcaagcgagcagctggctggcaaggtggcagaagtcaagaagaayggaagaatcagcctggtgctgggcggagaccacagtttggcaattggaagcatctctggccatgccagggtccaccctgatcttggagtcatctgggtgg

SEQ ID NO: 57395 - DNA, 201 bp, Homo sapiens
gacagtccctttcaaattgtgaagaatccaaggtctgtgggaaaagcaagcgagcagctggctggcaaggtggcagaagtcaagaagaacggaagaatcascctggtgctgggcggagaccacagtttggcaattggaagcatctctggccatgccagggtccaccctgatcttggagtcatctgggtggatgctcacact

SEQ ID NO: 57396 - DNA, 176 bp, Homo sapiens
tagtgggtggagccagctgtcctcattagataaaggttgtttattcaacccaagtataaatggaaaaaaaagatgygccctctgtcactgagggttgactgactggagagctcaagtgcagcaaagagaagtgtcagagcatgagcgccaagtccagaaccatagggattattgga

SEQ ID NO: 57397 - DNA, 201 bp, Homo sapiens
atctcatagttaatggcataattagaaagctaatcattttcttaagcatagagttatccttctaaagacttgttctttcagaaaaatgtttttccaattaktataaactctacaaattccctcttggtgtaaaattcaagatgtggaaattctaacttttttgaaatttaaaagcttatattttctaacttggcaaaagac

SEQ ID NO: 57398 - DNA, 201 bp, Homo sapiens
cctgccctttgctgacatccctaatgacagtccctttcaaattgtgaagaatccaaggtctgtgggaaaagcaagcgagcagctggctggcaaggtggcasaagtcaagaagaacggaagaatcagcctggtgctgggcggagaccacagtttggcaattggaagcatctctggccatgccagggtccaccctgatcttgg

SEQ ID NO: 57399 - DNA, 201 bp, Homo sapiens
attggaagcatctctggccatgccagggtccaccctgatcttggagtcatctgggtggatgctcacactgatatcaacactccactgacaaccacaagtgkaaacttgcatggacaacctgtatctttcctcctgaaggaactaaaaggaaagattcccgatgtgccaggattctcctgggtgactccctgtatatctgcc

SEQ ID NO: 57400 - DNA, 201 bp, Homo sapiens
aattttagagtgtgatgtgaaggattatggggacctgccctttgctgacatccctaatgacagtccctttcaaattgtgaagaatccaaggtctgtgggawaagcaagcgagcagctggctggcaaggtggcagaagtcaagaagaacggaagaatcagcctggtgctgggcggagaccacagtttggcaattggaagcat

SEQ ID NO: 57401 - DNA, 201 bp, Homo sapiens
gactggagagctcaagtgcagcaaagagaagtgtcagagcatgagcgccaagtccagaaccatagggattattggagctcctttctcaaagggacagccaygaggaggggtggaagaaggccctacagtattgagaaaggctggtctgcttgagaaacttaaagaacaagtaactcaaaactttttaattttagagtgtga

SEQ ID NO: 57402 - DNA, 201 bp, Homo sapiens; identical to SEQ ID NO: 57388

SEQ ID NO: 57403 - DNA, 201 bp, Homo sapiens; identical to SEQ ID NO: 57389

SEQ ID NO: 57404 - DNA, 201 bp, Homo sapiens; identical to SEQ ID NO: 57390

SEQ ID NO: 57405 - DNA, 201 bp, Homo sapiens; identical to SEQ ID NO: 57391

SEQ ID NO: 57406 - DNA, 201 bp, Homo sapiens; identical to SEQ ID NO: 57392

SEQ ID NO: 57407 - DNA, 201 bp, Homo sapiens; identical to SEQ ID NO: 57393

SEQ ID NO: 57408 - DNA, 201 bp, Homo sapiens; identical to SEQ ID NO: 57394

SEQ ID NO: 57409 - DNA, 201 bp, Homo sapiens; identical to SEQ ID NO: 57395

SEQ ID NO: 57410 - DNA, 176 bp, Homo sapiens; identical to SEQ ID NO: 57396

SEQ ID NO: 57411 - DNA, 201 bp, Homo sapiens; identical to SEQ ID NO: 57397

SEQ ID NO: 57412 - DNA, 201 bp, Homo sapiens; identical to SEQ ID NO: 57398

SEQ ID NO: 57413 - DNA, 201 bp, Homo sapiens; identical to SEQ ID NO: 57399

SEQ ID NO: 57414 - DNA, 201 bp, Homo sapiens
agaacaagagtgtgatgtgaaggattatggggacctgccctttgctgacatccctaatgacagtccctttcaaattgtgaagaatccaaggtctgtgggawaagcaagcgagcagctggctggcaaggtggcagaagtcaagaagaacggaagaatcagcctggtgctgggcggagaccacagtttggcaattggaagcat

SEQ ID NO: 57415 - DNA, 201 bp, Homo sapiens
gactggagagctcaagtgcagcaaagagaagtgtcagagcatgagcgccaagtccagaaccatagggattattggagctcctttctcaaagggacagccaygaggaggggtggaagaaggccctacagtattgagaaaggctggtctgcttgagaaacttaaagaacaagagtgtgatgtgaaggattatggggacctgcc

SEQ ID NO: 57416 - DNA, 201 bp, Homo sapiens; identical to SEQ ID NO: 57388

SEQ ID NO: 57417 - DNA, 201 bp, Homo sapiens
aaggatattgtgtatattggcttgagagacgtggaccctggggaacactacattttgaaaactctaggcattaaatacttttcaatgactgaagaagtaastcgaacagtgaacacagcagttgcaataaccttggcttgtttcggacttgctcgggagggtaatcacaagcctattgactaccttaacccacctaagtaa

SEQ ID NO: 57418 - DNA, 201 bp, Homo sapiens; identical to SEQ ID NO: 57390

SEQ ID NO: 57419 - DNA, 201 bp, Homo sapiens; identical to SEQ ID NO: 57391

SEQ ID NO: 57420 - DNA, 201 bp, Homo sapiens; identical to SEQ ID NO: 57392

SEQ ID NO: 57421 - DNA, 201 bp, Homo sapiens
ggatattgtgtatattggcttgagagacgtggaccctggggaacactacattttgaaaactctaggcattaaatacttttcaatgactgaagaagtaactygaacagtgaacacagcagttgcaataaccttggcttgtttcggacttgctcgggagggtaatcacaagcctattgactaccttaacccacctaagtaaat

SEQ ID NO: 57422 - DNA, 201 bp, Homo sapiens; identical to SEQ ID NO: 57394

SEQ ID NO: 57423 - DNA, 201 bp, Homo sapiens; identical to SEQ ID NO: 57395

SEQ ID NO: 57424 - DNA, 176 bp, Homo sapiens; identical to SEQ ID NO: 57396

SEQ ID NO: 57425 - DNA, 201 bp, Homo sapiens; identical to SEQ ID NO: 57397

SEQ ID NO: 57426 - DNA, 201 bp, Homo sapiens; identical to SEQ ID NO: 57398

SEQ ID NO: 57427 - DNA, 201 bp, Homo sapiens; identical to SEQ ID NO: 57399

SEQ ID NO: 57428 - DNA, 201 bp, Homo sapiens; identical to SEQ ID NO: 57414

SEQ ID NO: 57429 - DNA, 201 bp, Homo sapiens; identical to SEQ ID NO: 57415

SEQ ID NO: 57430 - DNA, 201 bp, Homo sapiens; identical to SEQ ID NO: 57388

SEQ ID NO: 57431 - DNA, 201 bp, Homo sapiens; identical to SEQ ID NO: 57389

SEQ ID NO: 57432 - DNA, 201 bp, Homo sapiens; identical to SEQ ID NO: 57390

SEQ ID NO: 57433 - DNA, 201 bp, Homo sapiens; identical to SEQ ID NO: 57391

SEQ ID NO: 57434 - DNA, 201 bp, Homo sapiens; identical to SEQ ID NO: 57392

SEQ ID NO: 57435 - DNA, 201 bp, Homo sapiens; identical to SEQ ID NO: 57393

SEQ ID NO: 57436 - DNA, 201 bp, Homo sapiens; identical to SEQ ID NO: 57394

SEQ ID NO: 57437 - DNA, 201 bp, Homo sapiens; identical to SEQ ID NO: 57395

SEQ ID NO: 57438 - DNA, 125 bp, Homo sapiens
aagtataaatggaaaaaaaagatgygccctctgtcactgagggttgactgactggagagctcaagtgcagcaaagagaagtgtcagagcatgagcgccaagtccagaaccatagggattattgga

SEQ ID NO: 57439 - DNA, 201 bp, Homo sapiens; identical to SEQ ID NO: 57397

SEQ ID NO: 57440 - DNA, 201 bp, Homo sapiens; identical to SEQ ID NO: 57398

SEQ ID NO: 57441 - DNA, 201 bp, Homo sapiens; identical to SEQ ID NO: 57399

SEQ ID NO: 57442 - DNA, 201 bp, Homo sapiens
agggacagagtgtgatgtgaaggattatggggacctgccctttgctgacatccctaatgacagtccctttcaaattgtgaagaatccaaggtctgtgggawaagcaagcgagcagctggctggcaaggtggcagaagtcaagaagaacggaagaatcagcctggtgctgggcggagaccacagtttggcaattggaagcat

SEQ ID NO: 57443 - DNA, 201 bp, Homo sapiens
gttgagcatatgagtaagtcacatttctattaggactacttacaaggacaaggtttccatttttccagttgtaaaattggaaccatcagctgataacctcrtagggagcaaccccaggatagctaagtgttatgtaatatgcctagaaggtgatgtgaatgcgattcagaagcatagccactcccattttatgagctactc

SEQ ID NO: 57444 - DNA, 201 bp, Homo sapiens
gggaggcgaggacggtctctgccagtataaatgcagtgacgcttaacattggtatcccttccctgacaaagtgttgcaaccaacacgacaggtgctatgaracctgtggcaaaagcaagaatgactgtgatgaagaattccagtattgcctctccaagatctgccgagatgtacagaaaacactaggactaactcagcatg

SEQ ID NO: 57445 - DNA, 201 bp, Homo sapiens
tggacagccaacgagccgcatgcaggtgtcattatgaagaaaaaactgatctttaaaggagatgccgacagctagtgacagatgaagatggaagaacatamcctttgacaaataactaatgtttttacaacataaaactgtcttatttttgtgaaaggattattttgagaccttaaaataatttatatcttgatgttaaaa

SEQ ID NO: 57446 - DNA, 201 bp, Homo sapiens
ggagctggctgctgccaagtccggggcccgcgccgctgcctagcgcgtcctggggactctgtggggacgcgccccgcgccgcggctcggggacccgtagascccggcgctgcgcgcatggccctgctctcgcgccccgcgctcaccctcctgctcctcctcatggccgctgttgtcaggtgccaggagcaggcccagacca

SEQ ID NO: 57447 - DNA, 201 bp, Homo sapiens
ccccaccgaatggatgtggctctccactgtttggtgttcatcttaacattggtatcccttccctgacaaagtgttgcaaccaacacgacaggtgctatgaracctgtggcaaaagcaagaatgactgtgatgaagaattccagtattgcctctccaagatctgccgagatgtacagaaaacactaggactaactcagcatg

SEQ ID NO: 57448 - DNA, 201 bp, Homo sapiens; identical to SEQ ID NO: 57443

SEQ ID NO: 57449 - DNA, 201 bp, Homo sapiens; identical to SEQ ID NO: 57445

SEQ ID NO: 57450 - DNA, 201 bp, Homo sapiens; identical to SEQ ID NO: 57446

SEQ ID NO: 57451 - DNA, 201 bp, Homo sapiens
aaccctccccaccgaatggatgtggctctccactgtttggtcttaacattggtatcccttccctgacaaagtgttgcaaccaacacgacaggtgctatgaracctgtggcaaaagcaagaatgactgtgatgaagaattccagtattgcctctccaagatctgccgagatgtacagaaaacactaggactaactcagcatg

SEQ ID NO: 57452 - DNA, 201 bp, Homo sapiens; identical to SEQ ID NO: 57443

SEQ ID NO: 57453 - DNA, 201 bp, Homo sapiens; identical to SEQ ID NO: 57445

SEQ ID NO: 57454 - DNA, 201 bp, Homo sapiens; identical to SEQ ID NO: 57446

SEQ ID NO: 57455 - DNA, 201 bp, Homo sapiens; identical to SEQ ID NO: 57443

SEQ ID NO: 57456 - DNA, 201 bp, Homo sapiens
taaatgcagtgacggatctaagcctttcccacgttatggttataaaccctccccaccgaatggatgtggctctccactgtttggtgttcatgtgctatgaracctgtggcaaaagcaagaatgactgtgatgaagaattccagtattgcctctccaagatctgccgagatgtacagaaaacactaggactaactcagcatg

SEQ ID NO: 57457 - DNA, 201 bp, Homo sapiens; identical to SEQ ID NO: 57445

SEQ ID NO: 57458 - DNA, 201 bp, Homo sapiens; identical to SEQ ID NO: 57446

SEQ ID NO: 57459 - DNA, 201 bp, Homo sapiens
gagccccggtccccactccgaggaggaagatgaggctgagcccagtacagtgcctgggactcccccacccaagaagttccgctcactgttcttcggctccwtcctggcccctgtacgctccccccagggccccagccctgtgctggcggaagacagtgagggtgaaggctgaaccaagaacctgaagcctgtacccagagg

SEQ ID NO: 57460 - DNA, 201 bp, Homo sapiens
gcattggccgtggccgcagggtcatcctgcgcagctaccacgaggaggaggcagacagcactgccaaagccatggtgactgagatgtgccttggagaggargatttccagcagctgcaggcccaggaaggggtggccatcactttctgcctcaaggaattccgggggctcctgagctttgcagagtcagcaaacttgaatc

SEQ ID NO: 57461 - DNA, 201 bp, Homo sapiens
ctccggacggtgaactcctcccgctctgcctatgcctgctttctctttgccccgctcttcttccagcaataccaggcagccacccctggtcaggacctgcwgcgctgtaagatcctgatgaagtctttcctgtctgtcttccgctcactggcgatgctggagaagacggtggaaaaatgctgcatctccctgaatggccgg

SEQ ID NO: 57462 - DNA, 201 bp, Homo sapiens
ggctcctgagctttgcagagtcagcaaacttgaatcttagcattcattttgatgctccaggcaggcccgccatcttcaccatcaaggactctttgctggayggccactttgtcttggccacactctcagacaccgactcgcactcccaggacctgggctccccagagcgtcaccagccagtgcctcagctccaggctcaca

SEQ ID NO: 57463 - DNA, 201 bp, Homo sapiens
tggtcaggacctgctgcgctgtaagatcctgatgaagtctttcctgtctgtcttccgctcactggcgatgctggagaagacggtggaaaaatgctgcatckccctgaatggccggagcagccgcctggtggtccagctgcattgcaagttcgggttctgggggaggctgttctgcccttctctcctgcactggctgaagtg

SEQ ID NO: 57464 - DNA, 201 bp, Homo sapiens
ccagctttgacctttattcaagagaccagatgggttgccccaggatccggctgccagccctgaggccaagcacggctggagacccacgacctggcctgccrttgccctgagctgcagcctcggccccaggatcctgctcacagtcaccgcaggtgcaggcaggaagcagccctgggggactggacgctgctattgattcat

SEQ ID NO: 57465 - DNA, 201 bp, Homo sapiens
ggactcccccacccaagaagttccgctcactgttcttcggctccatcctggcccctgtacgctccccccagggccccagccctgtgctggcggaagacagygagggtgaaggctgaaccaagaacctgaagcctgtacccagaggccttggactagacgaagccccagccagtggcagaactgggtctctcagccctgggg

SEQ ID NO: 57466 - DNA, 201 bp, Homo sapiens
cagctgcaggcccaggaaggggtggccatcactttctgcctcaaggaattccgggggctcctgagctttgcagagtcagcaaacttgaatcttagcattcrttttgatgctccaggcaggcccgccatcttcaccatcaaggactctttgctggacggccactttgtcttggccacactctcagacaccgactcgcactcc

SEQ ID NO: 57467 - DNA, 201 bp, Homo sapiens
ccttctctcctgcactggctgaagtgacgctgggcattggccgtggccgcagggtcatcctgcgcagctaccacgaggaggaggcagacagcactgccaargccatggtgactgagatgtgccttggagaggaggatttccagcagctgcaggcccaggaaggggtggccatcactttctgcctcaaggaattccgggggc

SEQ ID NO: 57468 - DNA, 201 bp, Homo sapiens
cttacatgatcgccatggaaaccactataggcaatgagggctcgcgggtgctgccctccatttccctttcacctggcccccagccccccaagagccccggyccccactccgaggaggaagatgaggctgagcccagtacagtgcctgggactcccccacccaagaagttccgctcactgttcttcggctccatcctggccc

SEQ ID NO: 57469 - DNA, 201 bp, Homo sapiens
acgctccccccagggccccagccctgtgctggcggaagacagtgagggtgaaggctgaaccaagaacctgaagcctgtacccagaggccttggactagacraagccccagccagtggcagaactgggtctctcagccctggggatcagaaaggtgggcttgctggagctgagctgtttcactgcctctcgcaggccccagc

SEQ ID NO: 57470 - DNA, 201 bp, Homo sapiens; identical to SEQ ID NO: 57459

SEQ ID NO: 57471 - DNA, 201 bp, Homo sapiens; identical to SEQ ID NO: 57460

SEQ ID NO: 57472 - DNA, 201 bp, Homo sapiens; identical to SEQ ID NO: 57461

SEQ ID NO: 57473 - DNA, 201 bp, Homo sapiens; identical to SEQ ID NO: 57462

SEQ ID NO: 57474 - DNA, 201 bp, Homo sapiens
tggtcaggacctgctgcgctgtaagatcctgatgaagtctttcctgtctgtcttccgctcactggcgatgctggagaagacggtggaaaaatgctgcatckccctgaatggccggagcagccgcctggtggtccagctgcattgcaagttcggggtgcggaagactcacaacctgtccttccaggactgtgagtccctgca

SEQ ID NO: 57475 - DNA, 201 bp, Homo sapiens; identical to SEQ ID NO: 57464

SEQ ID NO: 57476 - DNA, 201 bp, Homo sapiens; identical to SEQ ID NO: 57465

SEQ ID NO: 57477 - DNA, 201 bp, Homo sapiens; identical to SEQ ID NO: 57466

SEQ ID NO: 57478 - DNA, 201 bp, Homo sapiens; identical to SEQ ID NO: 57467

SEQ ID NO: 57479 - DNA, 201 bp, Homo sapiens; identical to SEQ ID NO: 57468

SEQ ID NO: 57480 - DNA, 201 bp, Homo sapiens; identical to SEQ ID NO: 57469

SEQ ID NO: 57481 - DNA, 201 bp, Homo sapiens; identical to SEQ ID NO: 57459

SEQ ID NO: 57482 - DNA, 201 bp, Homo sapiens; identical to SEQ ID NO: 57460

SEQ ID NO: 57483 - DNA, 201 bp, Homo sapiens; identical to SEQ ID NO: 57461

SEQ ID NO: 57484 - DNA, 201 bp, Homo sapiens; identical to SEQ ID NO: 57462

SEQ ID NO: 57485 - DNA, 201 bp, Homo sapiens
tggtcaggacctgctgcgctgtaagatcctgatgaagtctttcctgtctgtcttccgctcactggcgatgctggagaagacggtggaaaaatgctgcatckccctgaatggccggagcagccgcctggtggtccagctgcattgcaagttcggactgtgagtccctgcaggccgtcttcgacccagcctcgtgcccccaca

SEQ ID NO: 57486 - DNA, 201 bp, Homo sapiens; identical to SEQ ID NO: 57464

SEQ ID NO: 57487 - DNA, 201 bp, Homo sapiens; identical to SEQ ID NO: 57465

SEQ ID NO: 57488 - DNA, 201 bp, Homo sapiens; identical to SEQ ID NO: 57466

SEQ ID NO: 57489 - DNA, 201 bp, Homo sapiens; identical to SEQ ID NO: 57467

SEQ ID NO: 57490 - DNA, 201 bp, Homo sapiens; identical to SEQ ID NO: 57468

SEQ ID NO: 57491 - DNA, 201 bp, Homo sapiens; identical to SEQ ID NO: 57469

SEQ ID NO: 57492 - DNA, 201 bp, Homo sapiens
ccctgcgcatgctgctggcagatcagggccagagctggaaggaggaggtggtgaccgtggagacgtggcaggagggctcactcaaagcctcctgcctatabgggcagctccccaagttccaggacggagacctcaccctgtaccagtccaataccatcctgcgtcacctgggccgcacccttgggctctatgggaaggacc

SEQ ID NO: 57493 - DNA, 168 bp, Homo sapiens
gcctcagtgcccggcccaagctcaaggccttcctggcctcccctgagtacgtgaacctccccatcaatggcaacgggaaacagtgagggttggggggactytgagcgggaggcagagtttgccttcctttctccaggaccaataaaatttctaagagagctactatga

SEQ ID NO: 57494 - DNA, 201 bp, Homo sapiens
ctgactacaacctgctggacttgctgctgatccatgaggtcctagcccctggctgcctggatgcgttccccctgctctcagcatatgtggggcgcctcagygcccggcccaagctcaaggccttcctggcctcccctgagtacgtgaacctccccatcaatggcaacgggaaacagtgagggttggggggactctgagcgg

SEQ ID NO: 57495 - DNA, 201 bp, Homo sapiens
gggaaggaccagcaggaggcagccctggtggacatggtgaatgacggcgtggaggacctccgctgcaaatacatctccctcatctacaccaactatgaggygggcaaggatgactatgtgaaggcactgcccgggcaactgaagccttttgagaccctgctgtcccagaaccagggaggcaagaccttcattgtgggagac

SEQ ID NO: 57496 - DNA, 201 bp, Homo sapiens
tcacctgggccgcacccttgggctctatgggaaggaccagcaggaggcagccctggtggacatggtgaatgacggcgtggaggacctccgctgcaaatacrtctccctcatctacaccaactatgaggcgggcaaggatgactatgtgaaggcactgcccgggcaactgaagccttttgagaccctgctgtcccagaacca

SEQ ID NO: 57497 - DNA, 201 bp, Homo sapiens; identical to SEQ ID NO: 57492

SEQ ID NO: 57498 - DNA, 168 bp, Homo sapiens; identical to SEQ ID NO: 57493

SEQ ID NO: 57499 - DNA, 201 bp, Homo sapiens; identical to SEQ ID NO: 57494

SEQ ID NO: 57500 - DNA, 201 bp, Homo sapiens; identical to SEQ ID NO: 57495

SEQ ID NO: 57501 - DNA, 201 bp, Homo sapiens; identical to SEQ ID NO: 57496

SEQ ID NO: 57502 - DNA, 201 bp, Homo sapiens
cacctgtcacggggaacatggagccttggtgtatttttcttttctttttttaatgaatcaatagcagcgtccagtcccccagggctgcttcctggggcaayggcaggccaggtcgtgggtctccagccgtgcttggcctcagggctggcagccggatcctggggcaacccatctggtctcttgaataaaggtcaaagctgg

SEQ ID NO: 57503 - DNA, 201 bp, Homo sapiens
agccaagaaatagcccccgcacaccaccctgtgccccagatgatggattgattgtacagaaatcatgctgccatgctgggggggggtcaccccgacccctmaggcccacctgtcacggggaacatggagccttggtgtatttttcttttctttttttaatgaatcaatagcagcgtccagtcccccagggctgcttcctgg

SEQ ID NO: 57504 - DNA, 201 bp, Homo sapiens
gcgtctcttttacctttggagccgaggtggtggccaagttcctccacaagcacgacttggacctcatctgccgagcacaccaggtggtagaagacggctaygagttctttgccaagcggcagctggtgacacttttctcagctcccaactactgtggcgagtttgacaatgctggcgccatgatgagtgtggacgagaccc

SEQ ID NO: 57505 - DNA, 201 bp, Homo sapiens
atgaatcaatagcagcgtccagtcccccagggctgcttcctgcctgcacctgcggtgactgtgagcaggatcctggggccgaggctgcagctcagggcaayggcaggccaggtcgtgggtctccagccgtgcttggcctcagggctggcagccggatcctggggcaacccatctggtctcttgaataaaggtcaaagctgg

SEQ ID NO: 57506 - DNA, 201 bp, Homo sapiens
agccaagaaatagcccccgcacaccaccctgtgccccagatgatggattgattgtacagaaatcatgctgccatgctgggggggggtcaccccgacccctmaggcccacctgtcacggggaacatggagccttggtgtatttttcttttctttttttaatgaatcaatagcagcgtccagtcccccagggctgcttcctgc

SEQ ID NO: 57507 - DNA, 201 bp, Homo sapiens; identical to SEQ ID NO: 57504

SEQ ID NO: 57508 - DNA, 143 bp, Homo sapiens
gctggggcctgcgagaggcagtgaaacagctcagctccagcaagcccacctttctgatccccagggctgagagacccagttctgccactggctggggcttygtctagtccaaggcctctgggtacaggcttcaggttcttggt

SEQ ID NO: 57509 - DNA, 201 bp, Homo sapiens; identical to SEQ ID NO: 57505

SEQ ID NO: 57510 - DNA, 201 bp, Homo sapiens; identical to SEQ ID NO: 57506

SEQ ID NO: 57511 - DNA, 201 bp, Homo sapiens; identical to SEQ ID NO: 57504

SEQ ID NO: 57512 - DNA, 143 bp, Homo sapiens; identical to SEQ ID NO: 57508

SEQ ID NO: 57513 - DNA, 201 bp, Homo sapiens
tttcgtgaggggggatgcccggccggccgagatcgactccctgtgggagatcagcaagcagatagaaggccatacgatttgtgctctgggtgacggggccscctggcctgtgcagggtctgatccgccactttcggccggagctcgaggagcggatgcagcggtttgcccagcagcatcaggcccggcaggctgcctctta

SEQ ID NO: 57514 - DNA, 180 bp, Homo sapiens
gcctgtgcagggtctgatccgccactttcggccggagctcgaggagcggatgcagcggtttgcccagcagcatcaggcccggcaggctgcctcttagcccmccaccctggcctgctgtcctgcgtctatccatgtggaatgctggacaataaagcgagtgctgcccaccctccagctgcc

SEQ ID NO: 57515 - DNA, 201 bp, Homo sapiens
tctgattggcaagaatgcttgtggctctggctatgattttgacgtgtttgtggtgcgcggggctggggcctacatctgtggagaggagacagcgctcatcragtccattgagggcaagcagggcaagccccgcctgaagccccccttccccgcagacgtgggagtgtttggctgccccacaactgtggccaacgtggagac

SEQ ID NO: 57516 - DNA, 201 bp, Homo sapiens
gaaggatgaagaccggattttcaccaacctgtacggccgccatgactggaggctgaaaggttccctgagtcgaggtgactggtacaagacaaaggagatcytgctgaaggggcccgactggatcctgggcgagatcaagacatcgggtttgaggggccgtggaggcgctggcttccccactggcctcaagtggagcttcat

SEQ ID NO: 57517 - DNA, 201 bp, Homo sapiens
acgggcggctgggacaacctccttgctgtgatccctggcggctcgtctaccccactgatccccaagtctgtgtgtgagacggtgctgatggacttcgatgygctggtgcaggcacagacaggcctgggcacagctgcggtgatcgtcatggaccgctcgacggacatcgtgaaagccatcgcccgcctcattgagttctat

SEQ ID NO: 57518 - DNA, 151 bp, Homo sapiens
ggccggagctcgaggagcggatgcagcggtttgcccagcagcatcaggcccggcaggctgcctcttagcccaccaccctggcctgctgtcctgcgtctatmcatgtggaatgctggacaataaagcgagtgctgcccaccctccagctgcc

SEQ ID NO: 57519 - DNA, 201 bp, Homo sapiens
catccgagaggcctatgaggcaggtctgattggcaagaatgcttgtggctctggctatgattttgacgtgtttgtggtgcgcggggctggggcctacatckgtggagaggagacagcgctcatcgagtccattgagggcaagcagggcaagccccgcctgaagccccccttccccgcagacgtgggagtgtttggctgccc

SEQ ID NO: 57520 - DNA, 201 bp, Homo sapiens
gactggatgaacaaggtgatggcacgtttcgtgaggggggatgcccggccggccgagatcgactccctgtgggagatcagcaagcagatagaaggccataygatttgtgctctgggtgacggggccgcctggcctgtgcagggtctgatccgccactttcggccggagctcgaggagcggatgcagcggtttgcccagcag

SEQ ID NO: 57521 - DNA, 201 bp, Homo sapiens
gtggccatccgagaggcctatgaggcaggtctgattggcaagaatgcttgtggctctggctatgattttgacgtgtttgtggtgcgcggggctggggcctrcatctgtggagaggagacagcgctcatcgagtccattgagggcaagcagggcaagccccgcctgaagccccccttccccgcagacgtgggagtgtttggc

SEQ ID NO: 57522 - DNA, 201 bp, Homo sapiens
caacgtggagacagtggcagtgtcccccacaatctgccgccgtggaggtacctggtttgctggctttggcagagaacgcaactcaggcaccaaactattcwacatctctggccatgtcaaccacccttgcactgtggaggaggagatgtctgtgcccttgaaagaactgattgagaagcatgctgggggtgtcacgggcgg

SEQ ID NO: 57523 - DNA, 201 bp, Homo sapiens
gaggcaggtctgattggcaagaatgcttgtggctctggctatgattttgacgtgtttgtggtgcgcggggctggggcctacatctgtggagaggagacagygctcatcgagtccattgagggcaagcagggcaagccccgcctgaagccccccttccccgcagacgtgggagtgtttggctgccccacaactgtggccaac

SEQ ID NO: 57524 - DNA, 188 bp, Homo sapiens
gccgcctggcctgtgcagggtctgatccgccactttcggccggagctcgaggagcggatgcagcggtttgcccagcagcatcaggcccggcaggctgcctyttagcccaccaccctggcctgctgtcctgcgtctatccatgtggaatgctggacaataaagcgagtgctgcccaccctccagctgcc

SEQ ID NO: 57525 - DNA, 201 bp, Homo sapiens
caccaacctgtacggccgccatgactggaggctgaaaggttccctgagtcgaggtgactggtacaagacaaaggagatcctgctgaaggggcccgactggwtcctgggcgagatcaagacatcgggtttgaggggccgtggaggcgctggcttccccactggcctcaagtggagcttcatgaataagccctcagatggcag

SEQ ID NO: 57526 - DNA, 201 bp, Homo sapiens
agcacccaagaaaacctcatttggctcgctgaaggatgaagaccggattttcaccaacctgtacggccgccatgactggaggctgaaaggttccctgagtygaggtgactggtacaagacaaaggagatcctgctgaaggggcccgactggatcctgggcgagatcaagacatcgggtttgaggggccgtggaggcgctgg

SEQ ID NO: 57527 - DNA, 188 bp, Homo sapiens
gaagttgaaggggcgcagcgataccggtgcgcggcgctggcgtcgggcgcgtgacgtctttcctgcgcgccacctagcgtctctatcrcgccagttcctcagcctcagtgctatgaaggtgacagcgtgaggtgacccatctggcccgccgcgatgctggcaacacggcggctgctcggctggtcgct

SEQ ID NO: 57528 - DNA, 177 bp, Homo sapiens
tgtgcagggtctgatccgccactttcggccggagctcgaggagcggatgcagcggtttgcccagcagcatcaggcccggcaggctgcctcttagcccaccmccctggcctgctgtcctgcgtctatccatgtggaatgctggacaataaagcgagtgctgcccaccctccagctgcc

SEQ ID NO: 57529 - DNA, 201 bp, Homo sapiens; identical to SEQ ID NO: 57513

SEQ ID NO: 57530 - DNA, 180 bp, Homo sapiens; identical to SEQ ID NO: 57514

SEQ ID NO: 57531 - DNA, 201 bp, Homo sapiens; identical to SEQ ID NO: 57515

SEQ ID NO: 57532 - DNA, 201 bp, Homo sapiens; identical to SEQ ID NO: 57516

SEQ ID NO: 57533 - DNA, 201 bp, Homo sapiens; identical to SEQ ID NO: 57517

SEQ ID NO: 57534 - DNA, 151 bp, Homo sapiens; identical to SEQ ID NO: 57518

SEQ ID NO: 57535 - DNA, 201 bp, Homo sapiens; identical to SEQ ID NO: 57519

SEQ ID NO: 57536 - DNA, 201 bp, Homo sapiens; identical to SEQ ID NO: 57520

SEQ ID NO: 57537 - DNA, 201 bp, Homo sapiens; identical to SEQ ID NO: 57521

SEQ ID NO: 57538 - DNA, 201 bp, Homo sapiens; identical to SEQ ID NO: 57522

SEQ ID NO: 57539 - DNA, 201 bp, Homo sapiens; identical to SEQ ID NO: 57523

SEQ ID NO: 57540 - DNA, 188 bp, Homo sapiens; identical to SEQ ID NO: 57524

SEQ ID NO: 57541 - DNA, 201 bp, Homo sapiens; identical to SEQ ID NO: 57525

SEQ ID NO: 57542 - DNA, 201 bp, Homo sapiens; identical to SEQ ID NO: 57526

SEQ ID NO: 57543 - DNA, 102 bp, Homo sapiens
crcgccagttcctcagcctcagtgctatgaaggtgacccatctggcccgccgcgatgctggcaacacggcggctgctcggctggtcgcttcccgcgcgggta

SEQ ID NO: 57544 - DNA, 177 bp, Homo sapiens; identical to SEQ ID NO: 57528

SEQ ID NO: 57545 - DNA, 201 bp, Homo sapiens; identical to SEQ ID NO: 57513

SEQ ID NO: 57546 - DNA, 180 bp, Homo sapiens; identical to SEQ ID NO: 57514

SEQ ID NO: 57547 - DNA, 201 bp, Homo sapiens; identical to SEQ ID NO: 57515

SEQ ID NO: 57548 - DNA, 201 bp, Homo sapiens; identical to SEQ ID NO: 57516

SEQ ID NO: 57549 - DNA, 201 bp, Homo sapiens; identical to SEQ ID NO: 57517

SEQ ID NO: 57550 - DNA, 151 bp, Homo sapiens; identical to SEQ ID NO: 57518

SEQ ID NO: 57551 - DNA, 201 bp, Homo sapiens; identical to SEQ ID NO: 57519

SEQ ID NO: 57552 - DNA, 201 bp, Homo sapiens; identical to SEQ ID NO: 57520

SEQ ID NO: 57553 - DNA, 201 bp, Homo sapiens; identical to SEQ ID NO: 57521

SEQ ID NO: 57554 - DNA, 201 bp, Homo sapiens; identical to SEQ ID NO: 57522

SEQ ID NO: 57555 - DNA, 201 bp, Homo sapiens; identical to SEQ ID NO: 57523

SEQ ID NO: 57556 - DNA, 188 bp, Homo sapiens; identical to SEQ ID NO: 57524

SEQ ID NO: 57557 - DNA, 201 bp, Homo sapiens; identical to SEQ ID NO: 57525

SEQ ID NO: 57558 - DNA, 201 bp, Homo sapiens; identical to SEQ ID NO: 57526

SEQ ID NO: 57559 - DNA, 188 bp, Homo sapiens; identical to SEQ ID NO: 57527

SEQ ID NO: 57560 - DNA, 177 bp, Homo sapiens; identical to SEQ ID NO: 57528

SEQ ID NO: 57561 - DNA, 201 bp, Homo sapiens; identical to SEQ ID NO: 57513

SEQ ID NO: 57562 - DNA, 180 bp, Homo sapiens; identical to SEQ ID NO: 57514

SEQ ID NO: 57563 - DNA, 201 bp, Homo sapiens; identical to SEQ ID NO: 57515

SEQ ID NO: 57564 - DNA, 201 bp, Homo sapiens; identical to SEQ ID NO: 57516

SEQ ID NO: 57565 - DNA, 151 bp, Homo sapiens; identical to SEQ ID NO: 57518

SEQ ID NO: 57566 - DNA, 201 bp, Homo sapiens; identical to SEQ ID NO: 57520

SEQ ID NO: 57567 - DNA, 201 bp, Homo sapiens; identical to SEQ ID NO: 57519

SEQ ID NO: 57568 - DNA, 201 bp, Homo sapiens; identical to SEQ ID NO: 57521

SEQ ID NO: 57569 - DNA, 201 bp, Homo sapiens; identical to SEQ ID NO: 57523

SEQ ID NO: 57570 - DNA, 201 bp, Homo sapiens
caacgtggagacagtggcagtgtcccccacaatctgccgccgtggaggtacctggtttgctggctttggcagagaacgcaactcaggcaccaaactattcwacatctctggccatgtcaaccacccttgcactgtggaggaggagatgtctgtgcccttgaaagaactgattgagaagcatgctggcacagacaggcctgg

SEQ ID NO: 57571 - DNA, 188 bp, Homo sapiens; identical to SEQ ID NO: 57524

SEQ ID NO: 57572 - DNA, 201 bp, Homo sapiens; identical to SEQ ID NO: 57525

SEQ ID NO: 57573 - DNA, 201 bp, Homo sapiens; identical to SEQ ID NO: 57526

SEQ ID NO: 57574 - DNA, 177 bp, Homo sapiens; identical to SEQ ID NO: 57528

SEQ ID NO: 57575 - DNA, 201 bp, Homo sapiens; identical to SEQ ID NO: 57513

SEQ ID NO: 57576 - DNA, 180 bp, Homo sapiens; identical to SEQ ID NO: 57514

SEQ ID NO: 57577 - DNA, 201 bp, Homo sapiens; identical to SEQ ID NO: 57515

SEQ ID NO: 57578 - DNA, 201 bp, Homo sapiens; identical to SEQ ID NO: 57516

SEQ ID NO: 57579 - DNA, 201 bp, Homo sapiens; identical to SEQ ID NO: 57517

SEQ ID NO: 57580 - DNA, 151 bp, Homo sapiens; identical to SEQ ID NO: 57518

SEQ ID NO: 57581 - DNA, 201 bp, Homo sapiens; identical to SEQ ID NO: 57519

SEQ ID NO: 57582 - DNA, 201 bp, Homo sapiens; identical to SEQ ID NO: 57520

SEQ ID NO: 57583 - DNA, 201 bp, Homo sapiens; identical to SEQ ID NO: 57521

SEQ ID NO: 57584 - DNA, 201 bp, Homo sapiens; identical to SEQ ID NO: 57522

SEQ ID NO: 57585 - DNA, 201 bp, Homo sapiens; identical to SEQ ID NO: 57523

SEQ ID NO: 57586 - DNA, 188 bp, Homo sapiens; identical to SEQ ID NO: 57524

SEQ ID NO: 57587 - DNA, 201 bp, Homo sapiens; identical to SEQ ID NO: 57525

SEQ ID NO: 57588 - DNA, 201 bp, Homo sapiens; identical to SEQ ID NO: 57526

SEQ ID NO: 57589 - DNA, 188 bp, Homo sapiens; identical to SEQ ID NO: 57527

SEQ ID NO: 57590 - DNA, 177 bp, Homo sapiens; identical to SEQ ID NO: 57528

SEQ ID NO: 57591 - DNA, 201 bp, Homo sapiens
tgaaccacggtccacgaacctgttcatgaagctggactcggtcttcatctggaaggaaccctttggcctggtcctcatcatcgcaccctggaactacccaytgaacctgaccctggtgctcctggtgggcgccctcgccgcagggaattgcgtggtgctgaagccgtcagaaatcagccagggcacagagaaggtcctggc

SEQ ID NO: 57592 - DNA, 201 bp, Homo sapiens
tcccaccaccgcacctgcctgctcgccccctccggcctggagaaattaaaggagatccactacccaccctataccgactggaaccagcagctgttacgctkgggcatgggctcccagagctgcaccctcctgtgagcgtcccacccgcctccaacgggtcacacagagaaacctgagtctagccatgaggggcttatgctc

SEQ ID NO: 57593 - DNA, 201 bp, Homo sapiens
atctggaaggaaccctttggcctggtcctcatcatcgcaccctggaactacccactgaacctgaccctggtgctcctggtgggcgccctcgccgcagggarttgcgtggtgctgaagccgtcagaaatcagccagggcacagagaaggtcctggctgaggtgctgccccagtacctggaccagagctgctttgccgtggtg

SEQ ID NO: 57594 - DNA, 144 bp, Homo sapiens
cattgccaggcgtgggcacgggagttggtttgggagctgccagkctcctgggaggatcgcagtcagcagagcagggctgaggcctgggggtaggagcagagcctgcgcatctggaggcagcatgtccaagaaagggagtggagg

SEQ ID NO: 57595 - DNA, 201 bp, Homo sapiens
gggatgggccggtaccacggcaagttcaccttcgacaccttctcccaccaccgcacctgcctgctcgccccctccggcctggagaaattaaaggagatccrctacccaccctataccgactggaaccagcagctgttacgctggggcatgggctcccagagctgcaccctcctgtgagcgtcccacccgcctccaacgggt

SEQ ID NO: 57596 - DNA, 201 bp, Homo sapiens
ggggcatgggctcccagagctgcaccctcctgtgagcgtcccacccgcctccaacgggtcacacagagaaacctgagtctagccatgaggggcttatgctyccaactcacattgttcctccagaccgcaggctcccccagcctcaggttgctggagctgtcacatgactgcatcctgcctgccagggctgcaaagcaaggt

SEQ ID NO: 57597 - DNA, 201 bp, Homo sapiens
ctgtgcagccccgagatgcaggagaggctgctgcccgccctgcagagcaccatcacccgtttctatggcgacgacccccagagctccccaaacctgggccrcatcatcaaccagaaacagttccagcggctgcgggcattgctgggctgcggccgcgtggccattgggggccagagcaacgagagcgatcgctacatcgcc

SEQ ID NO: 57598 - DNA, 201 bp, Homo sapiens
ctgctgcccgccctgcagagcaccatcacccgtttctatggcgacgacccccagagctccccaaacctgggccacatcatcaaccagaaacagttccagcrgctgcgggcattgctgggctgcggccgcgtggccattgggggccagagcaacgagagcgatcgctacatcgcccccacggtgctggtggacgtgcaggag

SEQ ID NO: 57599 - DNA, 201 bp, Homo sapiens
gtgagcgtcccacccgcctccaacgggtcacacagagaaacctgagtctagccatgaggggcttatgctcccaactcacattgttcctccagaccgcaggytcccccagcctcaggttgctggagctgtcacatgactgcatcctgcctgccagggctgcaaagcaaggtcttgcttctatctgggggacgctgctcgaga

SEQ ID NO: 57600 - DNA, 201 bp, Homo sapiens
ggtcttcatctggaaggaaccctttggcctggtcctcatcatcgcaccctggaactacccactgaacctgaccctggtgctcctggtgggcgccctcgccrcagggaattgcgtggtgctgaagccgtcagaaatcagccagggcacagagaaggtcctggctgaggtgctgccccagtacctggaccagagctgctttgc

SEQ ID NO: 57601 - DNA, 201 bp, Homo sapiens
gcgacgtgctggcccaggacctgcataagccagctttcgaggcagacatatctgagctcatcctttgccagaacgaggttgactacgctctcaagaacctkcaggcctggatgaaggatgaaccacggtccacgaacctgttcatgaagctggactcggtcttcatctggaaggaaccctttggcctggtcctcatcatcg

SEQ ID NO: 57602 - DNA, 201 bp, Homo sapiens
catcacccgtttctatggcgacgacccccagagctccccaaacctgggccacatcatcaaccagaaacagttccagcggctgcgggcattgctgggctgcrgccgcgtggccattgggggccagagcaacgagagcgatcgctacatcgcccccacggtgctggtggacgtgcaggagacggagcctgtgatgcaggagga

SEQ ID NO: 57603 - DNA, 201 bp, Homo sapiens
aggccatcaagttcatcaaccggcaggagaagcccctggccctgtacgccttctccaacagcagccaggttgtgaaccagatgctggagcggaccagcagmggcagctttggaggcaatgagggcttcacctacatatctctgctgtccgtgccattcgggggagtcggccacagtgggatgggccggtaccacggcaagt

SEQ ID NO: 57604 - DNA, 201 bp, Homo sapiens
agcctcaggttgctggagctgtcacatgactgcatcctgcctgccagggctgcaaagcaaggtcttgcttctatctgggggacgctgctcgagagaggccragaggccgcagaacatgccaggtgtcctcactcaccccaccctccccaattccagccctttgccctctcggtcagggttggccaggcccagtcacagggg

SEQ ID NO: 57605 - DNA, 201 bp, Homo sapiens
gcccgccctgcagagcaccatcacccgtttctatggcgacgacccccagagctccccaaacctgggccacatcatcaaccagaaacagttccagcggctgmgggcattgctgggctgcggccgcgtggccattgggggccagagcaacgagagcgatcgctacatcgcccccacggtgctggtggacgtgcaggagacgga

SEQ ID NO: 57606 - DNA, 201 bp, Homo sapiens
gcccctgactacgtcctgtgcagccccgagatgcaggagaggctgctgcccgccctgcagagcaccatcacccgtttctatggcgacgacccccagagctycccaaacctgggccacatcatcaaccagaaacagttccagcggctgcgggcattgctgggctgcggccgcgtggccattgggggccagagcaacgagagc

SEQ ID NO: 57607 - DNA, 201 bp, Homo sapiens
ccacggcaagttcaccttcgacaccttctcccaccaccgcacctgcctgctcgccccctccggcctggagaaattaaaggagatccactacccaccctatrccgactggaaccagcagctgttacgctggggcatgggctcccagagctgcaccctcctgtgagcgtcccacccgcctccaacgggtcacacagagaaacc

SEQ ID NO: 57608 - DNA, 201 bp, Homo sapiens
gctcgagagaggccgagaggccgcagaacatgccaggtgtcctcactcaccccaccctccccaattccagccctttgccctctcggtcagggttggccagrcccagtcacaggggcagtgtcaccctggaaaatacagtgccctgccttcttaggggcatcagccctgaacggttgagagcgtggagccctccaggccttt

SEQ ID NO: 57609 - DNA, 201 bp, Homo sapiens
ctcccaccaccgcacctgcctgctcgccccctccggcctggagaaattaaaggagatccactacccaccctataccgactggaaccagcagctgttacgckggggcatgggctcccagagctgcaccctcctgtgagcgtcccacccgcctccaacgggtcacacagagaaacctgagtctagccatgaggggcttatgct

SEQ ID NO: 57610 - DNA, 201 bp, Homo sapiens
atacagtgccctgccttcttaggggcatcagccctgaacggttgagagcgtggagccctccaggcctttgctctcccctctaggcacacgcgcacttccayctctgccccatcccaactgcaccagcactgcctcccccagggatcctctcacatcccacactggtctctgcaccacccctctggttcacaccgcaccctg

SEQ ID NO: 57611 - DNA, 201 bp, Homo sapiens
gaggtgcagcgaaggacccaggggcagagcccacgctggggatggaccccttcgaggacacgctgcggcggctgcgtgaggccttcaactgagggcgcacrcggccggccgagttccgggctgcgcagctccagggcctgggccacttccttcaagaaaacaagcagcttctgcgcgacgtgctggcccaggacctgcata

SEQ ID NO: 57612 - DNA, 201 bp, Homo sapiens
tcgccccctccggcctggagaaattaaaggagatccactacccaccctataccgactggaaccagcagctgttacgctggggcatgggctcccagagctgyaccctcctgtgagcgtcccacccgcctccaacgggtcacacagagaaacctgagtctagccatgaggggcttatgctcccaactcacattgttcctccag

SEQ ID NO: 57613 - DNA, 201 bp, Homo sapiens
atataagtttcagaaaggaaaagatgtcaaaaaagaatttgtacatgtggcaccaactccagatacttacagaggaaaatatagagaagaccatgcagacycagccagtgcttatgcagatgaagtgaagaaaatcattgaagatgctcataacagtggaaggaagattgctgcctttattgctgaatccatgcagagttg

SEQ ID NO: 57614 - DNA, 201 bp, Homo sapiens
gacgccccgggcaagagaacgccaggagggataacgggaggaaggccggccggggccgccaaggcagtcccaggctcgcgtaggaggcgcgcagaccttgyaccttgcaccttcgcagcgccctgcaccccgccaccatgtgcgagctgtacagtaagcgggacactctggggctgaggaagaagcacatcgggccctcat

SEQ ID NO: 57615 - DNA, 201 bp, Homo sapiens
gaaaatcccagcagaaagagaaatggaatgtgcacggatacacattcactgctcagtaagaggctcaagacatgactgatttgcattttaaagcaagatgygatgtccagagttacagagaatgagtagatgtgtctcatcggttaatagctctattatacctctaaaggtggaattgtcagtttagattcataaatgaaa

SEQ ID NO: 57616 - DNA, 201 bp, Homo sapiens; identical to SEQ ID NO: 57613

SEQ ID NO: 57617 - DNA, 144 bp, Homo sapiens
gccaaggcagtcccaggctcgcgtaggaggcgcgcagaccttgyaccttgcaccttcgcagcgccctgcaccccgccaccatgtgcgagctgtacagtaagcgggacactctggggctgaggaagaagcacatcggtgggacac

SEQ ID NO: 57618 - DNA, 201 bp, Homo sapiens; identical to SEQ ID NO: 57615

SEQ ID NO: 57619 - DNA, 201 bp, Homo sapiens; identical to SEQ ID NO: 57613

SEQ ID NO: 57620 - DNA, 201 bp, Homo sapiens; identical to SEQ ID NO: 57614

SEQ ID NO: 57621 - DNA, 201 bp, Homo sapiens; identical to SEQ ID NO: 57615

SEQ ID NO: 57622 - DNA, 201 bp, Homo sapiens
ctccctgggcgccggagtcatgtgacccacacaatggctgagtggctactctcggcttcctggcaacgccgagcgaaagctatgactgcggccgcgggttmggcgggccgcgccgcggtgcccttgctgctgtgtgcgctgctggcgcccggcggcgcgtacgtgctcgacgactccgacgggctgggccgggagttcgac

SEQ ID NO: 57623 - DNA, 201 bp, Homo sapiens
agccaatgctgttgtagtcgtttcctcagcctcatctcactgtgctgtggtctgtcctcacatgtgcactggtaacagactcacacagctgatgaatgctkttctctccttatgtgtggaaggaggggagcacttagacatttgctaactcccagaattggatcatctcctaagatgtacttactttttaaagtccaaata

SEQ ID NO: 57624 - DNA, 201 bp, Homo sapiens
ccgcgccgcggtgcccttgctgctgtgtgcgctgctggcgcccggcggcgcgtacgtgctcgacgactccgacgggctgggccgggagttcgacggcatcsgcgcggtcagcggcggcggggcaacctcccgacttctagtaaattacccagagccctatcgttctcagatattggattatctctttaagccgaattttgg

SEQ ID NO: 57625 - DNA, 201 bp, Homo sapiens
ggcgggccgcgccgcggtgcccttgctgctgtgtgcgctgctggcgcccggcggcgcgtacgtgctcgacgactccgacgggctgggccgggagttcgackgcatcggcgcggtcagcggcggcggggcaacctcccgacttctagtaaattacccagagccctatcgttctcagatattggattatctctttaagccgaa

SEQ ID NO: 57626 - DNA, 201 bp, Homo sapiens
gcgctgctggcgcccggcggcgcgtacgtgctcgacgactccgacgggctgggccgggagttcgacggcatcggcgcggtcagcggcggcggggcaacctyccgacttctagtaaattacccagagccctatcgttctcagatattggattatctctttaagccgaattttggtgcctctttgcatattttaaaagtggaa

SEQ ID NO: 57627 - DNA, 201 bp, Homo sapiens
gaaagatttctttttaagcagctggattctctatggctccttgacagcgatggcagtttcacactgagcctgcatgaagatgagctgttcacactcaccastctcaccactggtcgcaaaggcagctacccgcttcctccaaaatcccagcccttcccaagtacctataaggatgatttcaatgttggaccaatctgacta

SEQ ID NO: 57628 - DNA, 201 bp, Homo sapiens
acgggctgggccgggagttcgacggcatcggcgcggtcagcggcggcggggcaacctcccgacttctagtaaattacccagagccctatcgttctcagatrttggattatctctttaagccgaattttggtgcctctttgcatattttaaaagtggaaataggtggtgatgggcagacaacagacggcactgagccctccc

SEQ ID NO: 57629 - DNA, 201 bp, Homo sapiens
tatcgttctcagatattggattatctctttaagccgaattttggtgcctctttgcatattttaaaagtggaaataggtggtgatgggcagacaacagacgrcactgagccctcccacatgcattatgcactagatgagaattatttccgaggatacgagtggtggttgatgaaagaagctaagaagaggaatcccaatatt

SEQ ID NO: 57630 - DNA, 201 bp, Homo sapiens
gttatgctttatgctctaaaaagtatttttttattttcctttttaagatgatacttttgaaatgcaggatatgatgagtgggatgattttaaaaatgcctstttaataaactacctctaacactatttctgcggtaatagatattagcagattaattgggttatttgcattatttaatttttttgattccaagttttggtc

SEQ ID NO: 57631 - DNA, 201 bp, Homo sapiens
tgagaggtcatataatgccaattatattaagatattaagaaaaatgctgaattatcaaggtctccagcgagtgaaaatcatagcaagtgataatctctggragtccatctctgcatccatgctccttgatgccgaactcttcaaggtggttgatgttataggggctcattatcctggaacccattcagcaaaagatgcaaa

SEQ ID NO: 57632 - DNA, 201 bp, Homo sapiens
ctatcgttctcagatattggattatctctttaagccgaattttggtgcctctttgcatattttaaaagtggaaataggtggtgatgggcagacaacagacrgcactgagccctcccacatgcattatgcactagatgagaattatttccgaggatacgagtggtggttgatgaaagaagctaagaagaggaatcccaatat

SEQ ID NO: 57633 - DNA, 201 bp, Homo sapiens
ttgctgctaacactgaggtagctctcttcatcttatttgcaagcggtcctgtagatggcagtaacttgatcatcactgagatgtatttatgcatgctgacygtgtgtccaagtgagccagtgtcttcatcacaagatgatgctgccataatagaaagctgaagaacactagaagtagctttttgaaaaccacttcaacctg

SEQ ID NO: 57634 - DNA, 201 bp, Homo sapiens
tacagggttacaggtgatttagctggatggattatatatgctttaggacgtgttgaagttacagcaaaaaaatggtatacactcacgttaaggtcatttcrcctctggcatgctgaatgacaagtctctgtggacagacatccctgtgaattttccaaagaatggctgggctgcaattggaactcactcctttgaatttgc

SEQ ID NO: 57635 - DNA, 201 bp, Homo sapiens
cttcccaagtacctataaggatgatttcaatgttggaccaatctgactataaagtgtgatgtttacatagagacccctgacacaggaggtgtgttcattgmaggaagagtaaataaaggtggtattttgattagaagtgccagaggaattttcttctggatttttgcaaatggatcttacagggttacaggtgatttagct

SEQ ID NO: 57636 - DNA, 201 bp, Homo sapiens
tgcaggctgctggggtcgcattttaaatcagaattatatcaatggctatatgacttccacaatcgcatggaatttagtggctagttactatgaacagttgscttatgggagatgcgggttgatgacggcccaagagccatggagtgggcactacgtggtagaatctcctgtctgggtatcagctcataccactcagtttac

SEQ ID NO: 57637 - DNA, 201 bp, Homo sapiens
cctatcgttctcagatattggattatctctttaagccgaattttggtgcctctttgcatattttaaaagtggaaataggtggtgatgggcagacaacagayggcactgagccctcccacatgcattatgcactagatgagaattatttccgaggatacgagtggtggttgatgaaagaagctaagaagaggaatcccaata

SEQ ID NO: 57638 - DNA, 201 bp, Homo sapiens
aggggctcattatcctggaacccattcagcaaaagatgcaaagttgactgggaagaagctttggtcttctgaagactttagcactttaaatagtgacatgrgtgcaggctgctggggtcgcattttaaatcagaattatatcaatggctatatgacttccacaatcgcatggaatttagtggctagttactatgaacagtt

SEQ ID NO: 57639 - DNA, 201 bp, Homo sapiens
atggtcattccctggatggctgggaaaaggtttcgactggccttatgtcaatcttcagctgactgcctattatgtcgtgacctggattgtgggcgccaagygttaccatgatttggacattgattatattggaatttggaatgagaggtcatataatgccaattatattaagatattaagaaaaatgctgaattatcaagg

SEQ ID NO: 57640 - DNA, 201 bp, Homo sapiens
ataggttagttttctttgttccagaacatcatgaaagcggcgtcatgtactgtgtattcttatgaatggtttctttccatcagcataatgatttgagattkgtccatgttgtgtgattcagtggtttgttccttcttatttctgaagagttttccattgtatgaatataccacaatttgtttcctccccaccagtttctga

SEQ ID NO: 57641 - DNA, 201 bp, Homo sapiens
attttcctttttaagatgatacttttgaaatgcaggatatgatgagtgggatgattttaaaaatgcctctttaataaactacctctaacactatttctgcrgtaatagatattagcagattaattgggttatttgcattatttaatttttttgattccaagttttggtcttgtaaccactataactctctgtgaacgtttt

SEQ ID NO: 57642 - DNA, 201 bp, Homo sapiens
aaggtggttgatgttataggggctcattatcctggaacccattcagcaaaagatgcaaagttgactgggaagaagctttggtcttctgaagactttagcaytttaaatagtgacatgggtgcaggctgctggggtcgcattttaaatcagaattatatcaatggctatatgacttccacaatcgcatggaatttagtggct

SEQ ID NO: 57643 - DNA, 201 bp, Homo sapiens
gaagacaagaagataagtgctagaataaataagattacagagaaaattttttgttaaaaccaagtgatttccagctgatgtatctaatattttttaaaacraacattatagaggtgtaatttatttacaataaaatgttcctactttaaatatacaattcagtgagttttgataaattgatatacccatgtaaccaacact

SEQ ID NO: 57644 - DNA, 201 bp, Homo sapiens
tcgttctcagatattggattatctctttaagccgaattttggtgcctctttgcatattttaaaagtggaaataggtggtgatgggcagacaacagacggcrctgagccctcccacatgcattatgcactagatgagaattatttccgaggatacgagtggtggttgatgaaagaagctaagaagaggaatcccaatattac

SEQ ID NO: 57645 - DNA, 201 bp, Homo sapiens
ttatcaaggtctccagcgagtgaaaatcatagcaagtgataatctctgggagtccatctctgcatccatgctccttgatgccgaactcttcaaggtggttratgttataggggctcattatcctggaacccattcagcaaaagatgcaaagttgactgggaagaagctttggtcttctgaagactttagcactttaaatag

SEQ ID NO: 57646 - DNA, 201 bp, Homo sapiens
ggattatctctttaagccgaattttggtgcctctttgcatattttaaaagtggaaataggtggtgatgggcagacaacagacggcactgagccctcccacwtgcattatgcactagatgagaattatttccgaggatacgagtggtggttgatgaaagaagctaagaagaggaatcccaatattacactcattgggttgcc

SEQ ID NO: 57647 - DNA, 201 bp, Homo sapiens
ctgcggtaatagatattagcagattaattgggttatttgcattatttaatttttttgattccaagttttggtcttgtaaccactataactctctgtgaacrtttttccaggtggctggaagaaggaagaaaacctgatatagccaatgctgttgtagtcgtttcctcagcctcatctcactgtgctgtggtctgtcctcac

SEQ ID NO: 57648 - DNA, 201 bp, Homo sapiens
cgcaaaggcagctacccgcttcctccaaaatcccagcccttcccaagtacctataaggatgatttcaatgttggaccaatctgactataaagtgtgatgtwtacatagagacccctgacacaggaggtgtgttcattgcaggaagagtaaataaaggtggtattttgattagaagtgccagaggaattttcttctggattt

SEQ ID NO: 57649 - DNA, 201 bp, Homo sapiens
tctcaccactggtcgcaaaggcagctacccgcttcctccaaaatcccagcccttcccaagtacctataaggatgatttcaatgttggaccaatctgactayaaagtgtgatgtttacatagagacccctgacacaggaggtgtgttcattgcaggaagagtaaataaaggtggtattttgattagaagtgccagaggaatt

SEQ ID NO: 57650 - DNA, 201 bp, Homo sapiens
ctttggtcttctgaagactttagcactttaaatagtgacatgggtgcaggctgctggggtcgcattttaaatcagaattatatcaatggctatatgacttycacaatcgcatggaatttagtggctagttactatgaacagttgccttatgggagatgcgggttgatgacggcccaagagccatggagtgggcactacgtg

SEQ ID NO: 57651 - DNA, 201 bp, Homo sapiens
tttgcaaatggatcttacagggttacaggtgatttagctggatggattatatatgctttaggacgtgttgaagttacagcaaaaaaatggtatacactcaygttaaggtcatttcgcctctggcatgctgaatgacaagtctctgtggacagacatccctgtgaattttccaaagaatggctgggctgcaattggaactca

SEQ ID NO: 57652 - DNA, 201 bp, Homo sapiens
gcaaatggatcttacagggttacaggtgatttagctggatggattatatatgctttaggacgtgttgaagttacagcaaaaaaatggtatacactcacgtyaaggtcatttcgcctctggcatgctgaatgacaagtctctgtggacagacatccctgtgaattttccaaagaatggctgggctgcaattggaactcactc

SEQ ID NO: 57653 - DNA, 201 bp, Homo sapiens
cattctaagtgcatacggccatttcttccttatttcaatgtgtcacaacaatttgccacctttgttcttaagggatcttttgtaaacttggaaaaacatcygaaagatttctttttaagcagctggattctctatggctccttgacagcgatggcagtttcacactgagcctgcatgaagatgagctgttcacactcacca

SEQ ID NO: 57654 - DNA, 201 bp, Homo sapiens
caatttgccacctttgttcttaagggatcttttgtaaacttggaaaaacatccgaaagatttctttttaagcagctggattctctatggctccttgacagygatggcagtttcacactgagcctgcatgaagatgagctgttcacactcaccactctcaccactggtcgcaaaggcagctacccgcttcctccaaaatccc

SEQ ID NO: 57655 - DNA, 201 bp, Homo sapiens
ctcacgttaaggtcatttcgcctctggcatgctgaatgacaagtctctgtggacagacatccctgtgaattttccaaagaatggctgggctgcaattggamctcactcctttgaatttgcacagtttgacaactttcttgtggaagccacacgctaatacttaacagggcatcatagaatactctggattttcttcccttc

SEQ ID NO: 57656 - DNA, 201 bp, Homo sapiens
tattttcctttttaagatgatacttttgaaatgcaggatatgatgagtgggatgattttaaaaatgcctctttaataaactacctctaacactatttctgyggtaatagatattagcagattaattgggttatttgcattatttaatttttttgattccaagttttggtcttgtaaccactataactctctgtgaacgttt

SEQ ID NO: 57657 - DNA, 201 bp, Homo sapiens
aacctgttatgctttatgctctaaaaagtatttttttattttcctttttaagatgatacttttgaaatgcaggatatgatgagtgggatgattttaaaaaygcctctttaataaactacctctaacactatttctgcggtaatagatattagcagattaattgggttatttgcattatttaatttttttgattccaagttt

SEQ ID NO: 57658 - DNA, 201 bp, Homo sapiens
gatatacccatgtaaccaacactccagtcaagcttcagaatatttccatcaccccagaaggttctcttgtatacctgctcagtcagttcctttcactcccrattgttggcagccattgataggaattctatcactataggttagttttctttgttccagaacatcatgaaagcggcgtcatgtactgtgtattcttatgaa

SEQ ID NO: 57659 - DNA, 201 bp, Homo sapiens
ggagcacttagacatttgctaactcccagaattggatcatctcctaagatgtacttactttttaaagtccaaatatgtttatatttaaatatacgtgagcrtgttcatcatgttgtatgatttatactaagcattaatgtggctctatgtagcaaatcagttattcatgtaggtaaagtaaatctagaattatttataaga

SEQ ID NO: 57660 - DNA, 201 bp, Homo sapiens
cattatcctggaacccattcagcaaaagatgcaaagttgactgggaagaagctttggtcttctgaagactttagcactttaaatagtgacatgggtgcagrctgctggggtcgcattttaaatcagaattatatcaatggctatatgacttccacaatcgcatggaatttagtggctagttactatgaacagttgccttat

SEQ ID NO: 57661 - DNA, 149 bp, Homo sapiens
atgctggggaagagccatggtagggccactcatggccctcttcctttgrcggaccttggaatccaccttccctgcgttaaagtgctccaccaggtgacgccggaagagaagccagcaggcggcggcggcgtcagcatcagcggcctcct

SEQ ID NO: 57662 - DNA, 201 bp, Homo sapiens
caatctgactataaagtgtgatgtttacatagagacccctgacacaggaggtgtgttcattgcaggaagagtaaataaaggtggtattttgattagaagtkccagaggaattttcttctggatttttgcaaatggatcttacagggttacaggtgatttagctggatggattatatatgctttaggacgtgttgaagttac

SEQ ID NO: 57663 - DNA, 201 bp, Homo sapiens
cactataggttagttttctttgttccagaacatcatgaaagcggcgtcatgtactgtgtattcttatgaatggtttctttccatcagcataatgatttgakattggtccatgttgtgtgattcagtggtttgttccttcttatttctgaagagttttccattgtatgaatataccacaatttgtttcctccccaccagttt

SEQ ID NO: 57664 - DNA, 201 bp, Homo sapiens
tgtggctctatgtagcaaatcagttattcatgtaggtaaagtaaatctagaattatttataagaattactcattgaactaattctactatttaggaatttrtaagagtctaacataggcttagctacagtgaagttttgcattgcttttgaagacaagaagataagtgctagaataaataagattacagagaaaatttttt

SEQ ID NO: 57665 - DNA, 201 bp, Homo sapiens
gttgattacccattttttagtgaagctccaaactttgctgatcaaactggtgtatttgaatattttacaaatattgaagaccctggcgagcatcacttcaygctacgccaagttctcaaccagagacccattacgtgggctgccgatgcatccaacacaatcagtattataggagactacaactggaccaatctgactata

SEQ ID NO: 57666 - DNA, 201 bp, Homo sapiens; identical to SEQ ID NO: 57622

SEQ ID NO: 57667 - DNA, 201 bp, Homo sapiens; identical to SEQ ID NO: 57623

SEQ ID NO: 57668 - DNA, 201 bp, Homo sapiens
ccaaaatcccagcccttcccaagtacctataaggatgatttcaatgttgattacccattttttagtgaagctccaaactttgctgatcaaactggtgtatytgaatattttacaaatattgaagaccctggcgagcatcacttcacgctacgccaagttctcaaccagagacccattacgtgggctgccgatgcatccaac

SEQ ID NO: 57669 - DNA, 201 bp, Homo sapiens; identical to SEQ ID NO: 57624

SEQ ID NO: 57670 - DNA, 201 bp, Homo sapiens
gaaagatttctttttaagcagctggattctctatggctccttgacagcgatggcagtttcacactgagcctgcatgaagatgagctgttcacactcaccastctcaccactggtcgcaaaggcagctacccgcttcctccaaaatcccagcccttcccaagtacctataaggatgatttcaatgttgattacccatttttt

SEQ ID NO: 57671 - DNA, 201 bp, Homo sapiens; identical to SEQ ID NO: 57625

SEQ ID NO: 57672 - DNA, 201 bp, Homo sapiens; identical to SEQ ID NO: 57626

SEQ ID NO: 57673 - DNA, 201 bp, Homo sapiens; identical to SEQ ID NO: 57628

SEQ ID NO: 57674 - DNA, 201 bp, Homo sapiens; identical to SEQ ID NO: 57629

SEQ ID NO: 57675 - DNA, 201 bp, Homo sapiens; identical to SEQ ID NO: 57630

SEQ ID NO: 57676 - DNA, 201 bp, Homo sapiens
tacaggtgatttagctggatggattatatatgctttaggacgtgttgaagttacagcaaaaaaatggtatacactcacgttaactattaagggtcatttcrcctctggcatgctgaatgacaagtctctgtggacagacatccctgtgaattttccaaagaatggctgggctgcaattggaactcactcctttgaatttgc

SEQ ID NO: 57677 - DNA, 201 bp, Homo sapiens
tccaacacaatcagtattataggagactacaactggaccaatctgactataaagtgtgatgtttacatagagacccctgacacaggaggtgtgttcattgmaggaagagtaaataaaggtggtattttgattagaagtgccagaggaattttcttctggatttttgcaaatggatcttacagggttacaggtgatttagct

SEQ ID NO: 57678 - DNA, 201 bp, Homo sapiens; identical to SEQ ID NO: 57631

SEQ ID NO: 57679 - DNA, 201 bp, Homo sapiens; identical to SEQ ID NO: 57632

SEQ ID NO: 57680 - DNA, 201 bp, Homo sapiens; identical to SEQ ID NO: 57633

SEQ ID NO: 57681 - DNA, 201 bp, Homo sapiens; identical to SEQ ID NO: 57636

SEQ ID NO: 57682 - DNA, 201 bp, Homo sapiens
aactggtgtatttgaatattttacaaatattgaagaccctggcgagcatcacttcacgctacgccaagttctcaaccagagacccattacgtgggctgccratgcatccaacacaatcagtattataggagactacaactggaccaatctgactataaagtgtgatgtttacatagagacccctgacacaggaggtgtgtt

SEQ ID NO: 57683 - DNA, 201 bp, Homo sapiens; identical to SEQ ID NO: 57637

SEQ ID NO: 57684 - DNA, 201 bp, Homo sapiens; identical to SEQ ID NO: 57639

SEQ ID NO: 57685 - DNA, 201 bp, Homo sapiens; identical to SEQ ID NO: 57638

SEQ ID NO: 57686 - DNA, 201 bp, Homo sapiens; identical to SEQ ID NO: 57640

SEQ ID NO: 57687 - DNA, 201 bp, Homo sapiens; identical to SEQ ID NO: 57641

SEQ ID NO: 57688 - DNA, 201 bp, Homo sapiens; identical to SEQ ID NO: 57642

SEQ ID NO: 57689 - DNA, 201 bp, Homo sapiens; identical to SEQ ID NO: 57643

SEQ ID NO: 57690 - DNA, 201 bp, Homo sapiens
tacccattttttagtgaagctccaaactttgctgatcaaactggtgtatttgaatattttacaaatattgaagaccctggcgagcatcacttcacgctacrccaagttctcaaccagagacccattacgtgggctgccgatgcatccaacacaatcagtattataggagactacaactggaccaatctgactataaagtgt

SEQ ID NO: 57691 - DNA, 201 bp, Homo sapiens; identical to SEQ ID NO: 57644

SEQ ID NO: 57692 - DNA, 201 bp, Homo sapiens
ttctcaaccagagacccattacgtgggctgccgatgcatccaacacaatcagtattataggagactacaactggaccaatctgactataaagtgtgatgtwtacatagagacccctgacacaggaggtgtgttcattgcaggaagagtaaataaaggtggtattttgattagaagtgccagaggaattttcttctggattt

SEQ ID NO: 57693 - DNA, 201 bp, Homo sapiens; identical to SEQ ID NO: 57645

SEQ ID NO: 57694 - DNA, 201 bp, Homo sapiens; identical to SEQ ID NO: 57646

SEQ ID NO: 57695 - DNA, 201 bp, Homo sapiens; identical to SEQ ID NO: 57647

SEQ ID NO: 57696 - DNA, 201 bp, Homo sapiens
acgctacgccaagttctcaaccagagacccattacgtgggctgccgatgcatccaacacaatcagtattataggagactacaactggaccaatctgactayaaagtgtgatgtttacatagagacccctgacacaggaggtgtgttcattgcaggaagagtaaataaaggtggtattttgattagaagtgccagaggaatt

SEQ ID NO: 57697 - DNA, 201 bp, Homo sapiens; identical to SEQ ID NO: 57650

SEQ ID NO: 57698 - DNA, 201 bp, Homo sapiens
tattgaagaccctggcgagcatcacttcacgctacgccaagttctcaaccagagacccattacgtgggctgccgatgcatccaacacaatcagtattatargagactacaactggaccaatctgactataaagtgtgatgtttacatagagacccctgacacaggaggtgtgttcattgcaggaagagtaaataaaggtgg

SEQ ID NO: 57699 - DNA, 201 bp, Homo sapiens
tttgcaaatggatcttacagggttacaggtgatttagctggatggattatatatgctttaggacgtgttgaagttacagcaaaaaaatggtatacactcaygttaactattaagggtcatttcgcctctggcatgctgaatgacaagtctctgtggacagacatccctgtgaattttccaaagaatggctgggctgcaatt

SEQ ID NO: 57700 - DNA, 201 bp, Homo sapiens
gcaaatggatcttacagggttacaggtgatttagctggatggattatatatgctttaggacgtgttgaagttacagcaaaaaaatggtatacactcacgtyaactattaagggtcatttcgcctctggcatgctgaatgacaagtctctgtggacagacatccctgtgaattttccaaagaatggctgggctgcaattgga

SEQ ID NO: 57701 - DNA, 201 bp, Homo sapiens
atttcaatgtgtcacaacaatttgccacctttgttcttaagggatcttttagtgaaataccagagctacaggtatggtataccaaacttggaaaaacatcygaaagatttctttttaagcagctggattctctatggctccttgacagcgatggcagtttcacactgagcctgcatgaagatgagctgttcacactcacca

SEQ ID NO: 57702 - DNA, 201 bp, Homo sapiens
ttgctgatcaaactggtgtatttgaatattttacaaatattgaagaccctggcgagcatcacttcacgctacgccaagttctcaaccagagacccattacrtgggctgccgatgcatccaacacaatcagtattataggagactacaactggaccaatctgactataaagtgtgatgtttacatagagacccctgacacag

SEQ ID NO: 57703 - DNA, 201 bp, Homo sapiens
ttagtgaaataccagagctacaggtatggtataccaaacttggaaaaacatccgaaagatttctttttaagcagctggattctctatggctccttgacagygatggcagtttcacactgagcctgcatgaagatgagctgttcacactcaccactctcaccactggtcgcaaaggcagctacccgcttcctccaaaatccc

SEQ ID NO: 57704 - DNA, 201 bp, Homo sapiens
aactattaagggtcatttcgcctctggcatgctgaatgacaagtctctgtggacagacatccctgtgaattttccaaagaatggctgggctgcaattggamctcactcctttgaatttgcacagtttgacaactttcttgtggaagccacacgctaatacttaacagggcatcatagaatactctggattttcttcccttc

SEQ ID NO: 57705 - DNA, 201 bp, Homo sapiens; identical to SEQ ID NO: 57656

SEQ ID NO: 57706 - DNA, 201 bp, Homo sapiens; identical to SEQ ID NO: 57658

SEQ ID NO: 57707 - DNA, 201 bp, Homo sapiens; identical to SEQ ID NO: 57657

SEQ ID NO: 57708 - DNA, 201 bp, Homo sapiens; identical to SEQ ID NO: 57660

SEQ ID NO: 57709 - DNA, 201 bp, Homo sapiens; identical to SEQ ID NO: 57659

SEQ ID NO: 57710 - DNA, 149 bp, Homo sapiens; identical to SEQ ID NO: 57661

SEQ ID NO: 57711 - DNA, 201 bp, Homo sapiens; identical to SEQ ID NO: 57662

SEQ ID NO: 57712 - DNA, 201 bp, Homo sapiens; identical to SEQ ID NO: 57663

SEQ ID NO: 57713 - DNA, 201 bp, Homo sapiens
ttacccattttttagtgaagctccaaactttgctgatcaaactggtgtatttgaatattttacaaatattgaagaccctggcgagcatcacttcacgctaygccaagttctcaaccagagacccattacgtgggctgccgatgcatccaacacaatcagtattataggagactacaactggaccaatctgactataaagtg

SEQ ID NO: 57714 - DNA, 201 bp, Homo sapiens; identical to SEQ ID NO: 57664

SEQ ID NO: 57715 - DNA, 201 bp, Homo sapiens; identical to SEQ ID NO: 57665

SEQ ID NO: 57716 - DNA, 201 bp, Homo sapiens; identical to SEQ ID NO: 57622

SEQ ID NO: 57717 - DNA, 191 bp, Homo sapiens
agccaatgctgttgtagtcgtttcctcagcctcatctcactgtgctgtggtctgtcctcacatgtgcactggtaacagactcacacagctgatgaatgctkttctctccttatgtgtggaaggaggggagcacttagacatttgctaactcccagaattggatcatctcctaagatgtacttactttttaa

SEQ ID NO: 57718 - DNA, 201 bp, Homo sapiens; identical to SEQ ID NO: 57668

SEQ ID NO: 57719 - DNA, 201 bp, Homo sapiens; identical to SEQ ID NO: 57624

SEQ ID NO: 57720 - DNA, 201 bp, Homo sapiens; identical to SEQ ID NO: 57670

SEQ ID NO: 57721 - DNA, 201 bp, Homo sapiens; identical to SEQ ID NO: 57625

SEQ ID NO: 57722 - DNA, 201 bp, Homo sapiens; identical to SEQ ID NO: 57626

SEQ ID NO: 57723 - DNA, 201 bp, Homo sapiens; identical to SEQ ID NO: 57628

SEQ ID NO: 57724 - DNA, 201 bp, Homo sapiens; identical to SEQ ID NO: 57629

SEQ ID NO: 57725 - DNA, 201 bp, Homo sapiens; identical to SEQ ID NO: 57630

SEQ ID NO: 57726 - DNA, 201 bp, Homo sapiens; identical to SEQ ID NO: 57676

SEQ ID NO: 57727 - DNA, 201 bp, Homo sapiens; identical to SEQ ID NO: 57677

SEQ ID NO: 57728 - DNA, 201 bp, Homo sapiens; identical to SEQ ID NO: 57631

SEQ ID NO: 57729 - DNA, 201 bp, Homo sapiens; identical to SEQ ID NO: 57632

SEQ ID NO: 57730 - DNA, 201 bp, Homo sapiens; identical to SEQ ID NO: 57633

SEQ ID NO: 57731 - DNA, 201 bp, Homo sapiens; identical to SEQ ID NO: 57636

SEQ ID NO: 57732 - DNA, 201 bp, Homo sapiens; identical to SEQ ID NO: 57682

SEQ ID NO: 57733 - DNA, 201 bp, Homo sapiens; identical to SEQ ID NO: 57637

SEQ ID NO: 57734 - DNA, 201 bp, Homo sapiens; identical to SEQ ID NO: 57639

SEQ ID NO: 57735 - DNA, 201 bp, Homo sapiens; identical to SEQ ID NO: 57638

SEQ ID NO: 57736 - DNA, 201 bp, Homo sapiens; identical to SEQ ID NO: 57641

SEQ ID NO: 57737 - DNA, 201 bp, Homo sapiens; identical to SEQ ID NO: 57642

SEQ ID NO: 57738 - DNA, 201 bp, Homo sapiens; identical to SEQ ID NO: 57690

SEQ ID NO: 57739 - DNA, 201 bp, Homo sapiens; identical to SEQ ID NO: 57644

SEQ ID NO: 57740 - DNA, 201 bp, Homo sapiens; identical to SEQ ID NO: 57692

SEQ ID NO: 57741 - DNA, 201 bp, Homo sapiens; identical to SEQ ID NO: 57645

SEQ ID NO: 57742 - DNA, 201 bp, Homo sapiens; identical to SEQ ID NO: 57646

SEQ ID NO: 57743 - DNA, 201 bp, Homo sapiens; identical to SEQ ID NO: 57647

SEQ ID NO: 57744 - DNA, 201 bp, Homo sapiens; identical to SEQ ID NO: 57696

SEQ ID NO: 57745 - DNA, 201 bp, Homo sapiens; identical to SEQ ID NO: 57650

SEQ ID NO: 57746 - DNA, 201 bp, Homo sapiens; identical to SEQ ID NO: 57698

SEQ ID NO: 57747 - DNA, 201 bp, Homo sapiens; identical to SEQ ID NO: 57699

SEQ ID NO: 57748 - DNA, 201 bp, Homo sapiens; identical to SEQ ID NO: 57700

SEQ ID NO: 57749 - DNA, 201 bp, Homo sapiens; identical to SEQ ID NO: 57701

SEQ ID NO: 57750 - DNA, 201 bp, Homo sapiens; identical to SEQ ID NO: 57702

SEQ ID NO: 57751 - DNA, 201 bp, Homo sapiens; identical to SEQ ID NO: 57703

SEQ ID NO: 57752 - DNA, 201 bp, Homo sapiens; identical to SEQ ID NO: 57704

SEQ ID NO: 57753 - DNA, 201 bp, Homo sapiens; identical to SEQ ID NO: 57656

SEQ ID NO: 57754 - DNA, 201 bp, Homo sapiens; identical to SEQ ID NO: 57657

SEQ ID NO: 57755 - DNA, 201 bp, Homo sapiens; identical to SEQ ID NO: 57660

SEQ ID NO: 57756 - DNA, 149 bp, Homo sapiens; identical to SEQ ID NO: 57661

SEQ ID NO: 57757 - DNA, 201 bp, Homo sapiens; identical to SEQ ID NO: 57662

SEQ ID NO: 57758 - DNA, 201 bp, Homo sapiens; identical to SEQ ID NO: 57713

SEQ ID NO: 57759 - DNA, 201 bp, Homo sapiens; identical to SEQ ID NO: 57650

SEQ ID NO: 57760 - DNA, 201 bp, Homo sapiens; identical to SEQ ID NO: 57622

SEQ ID NO: 57761 - DNA, 201 bp, Homo sapiens; identical to SEQ ID NO: 57624

SEQ ID NO: 57762 - DNA, 201 bp, Homo sapiens; identical to SEQ ID NO: 57625

SEQ ID NO: 57763 - DNA, 201 bp, Homo sapiens; identical to SEQ ID NO: 57626

SEQ ID NO: 57764 - DNA, 201 bp, Homo sapiens; identical to SEQ ID NO: 57628

SEQ ID NO: 57765 - DNA, 201 bp, Homo sapiens; identical to SEQ ID NO: 57629

SEQ ID NO: 57766 - DNA, 201 bp, Homo sapiens; identical to SEQ ID NO: 57631

SEQ ID NO: 57767 - DNA, 201 bp, Homo sapiens; identical to SEQ ID NO: 57632

SEQ ID NO: 57768 - DNA, 201 bp, Homo sapiens; identical to SEQ ID NO: 57636

SEQ ID NO: 57769 - DNA, 201 bp, Homo sapiens; identical to SEQ ID NO: 57637

SEQ ID NO: 57770 - DNA, 201 bp, Homo sapiens; identical to SEQ ID NO: 57639

SEQ ID NO: 57771 - DNA, 201 bp, Homo sapiens; identical to SEQ ID NO: 57638

SEQ ID NO: 57772 - DNA, 201 bp, Homo sapiens; identical to SEQ ID NO: 57642

SEQ ID NO: 57773 - DNA, 201 bp, Homo sapiens; identical to SEQ ID NO: 57660

SEQ ID NO: 57774 - DNA, 149 bp, Homo sapiens; identical to SEQ ID NO: 57661

SEQ ID NO: 57775 - DNA, 201 bp, Homo sapiens; identical to SEQ ID NO: 57644

SEQ ID NO: 57776 - DNA, 201 bp, Homo sapiens; identical to SEQ ID NO: 57646

SEQ ID NO: 57777 - DNA, 201 bp, Homo sapiens; identical to SEQ ID NO: 57645

SEQ ID NO: 57778 - DNA, 201 bp, Homo sapiens
cccaaccacaaagggacagtgtgaccctgagcaagtcactacctctgtccactttctgatctacaaaatgaaatgacggagatactgagtcagctgtggcrttctactcactaccaaatcataatttataaacctcgttaaccctccccaaaacacttgtattctttatgttaaaacaagtccgaagcttatatgagataa

SEQ ID NO: 57779 - DNA, 201 bp, Homo sapiens
gaggatgacatgttaaaagaagaaatgaatggattttcatcctttgcaaggtcactagtaccctcttcagagagactacacctaagtctacataaatccartaaagtcatcacaaatggtcctgagaagaactccagttcctccccgtccagtgtggattatgcagcctccgggccccggaaactgagctctggagccctg

SEQ ID NO: 57780 - DNA, 124 bp, Homo sapiens
ccagcccttagcaacggcctggcracggtttccctgctgctgcagcccccgtcggctcctcttttccagtcctccactgccggggctgggcccggccgcgggaaggaccgaaggggatacagcg

SEQ ID NO: 57781 - DNA, 201 bp, Homo sapiens
acagaaccacaaccctaccctgcctttttctccacaggtcaggattccagatgattaacattaactgttcttcagaggctgagaaaatcacttaagagaartaagtacctacctcttctgctgtcaccattgctataattgcaattccctgttcccataccatctgccaaaaatcttgacaggtattctgtaatggtccct

SEQ ID NO: 57782 - DNA, 201 bp, Homo sapiens
aaagttaaagtcactcacataaaaatcccttgaggtcttctggacagccatgttcaggccagtctgtgtattggaggtgccagacggtcctctcttgcccrgtaaggaggtgcttcatcttcaggcctgtggtggcatagcagccagagtctgtgcggaaccgggtcgtgatcttaaaccttccataggtgacagtgttgt

SEQ ID NO: 57783 - DNA, 201 bp, Homo sapiens
cactagtaccctcttcagagagactacacctaagtctacataaatccagtaaagtcatcacaaatggtcctgagaagaactccagttcctccccgtccagygtggattatgcagcctccgggccccggaaactgagctctggagccctgtatggcagaaggcccagaagcacattcccaaattcccaccggtttcagttag

SEQ ID NO: 57784 - DNA, 201 bp, Homo sapiens
agtaatgctgcagtagactgctcggttccagtaagcgtgagtaccagcataaagtatgcagaccaacaacgaagagagaaactcaaaaaggaattagcacratgtgaaaaagagttcaaattaactaaaactgcaatgcgagccaattataaaaataattccaagtcactttttaataccttacaaaagccctcaggcgaa

SEQ ID NO: 57785 - DNA, 201 bp, Homo sapiens
acgactgttcgagcgacatataaaacaaaataaacatttggaggaggaaaaaatgcgccacctgctgcatgtcctgaaagtagacttaggctgcacatcgraggaaaactcggcaggcgatcatgatctccgacaaaatcaccacgccagtccttcctaccccagcactgcagtggaccaacaacggagggttggggcttt

SEQ ID NO: 57786 - DNA, 201 bp, Homo sapiens
gagagaaactcaaaaaggaattagcacaatgtgaaaaagagttcaaattaactaaaactgcaatgcgagccaattataaaaataattccaagtcacttttkaataccttacaaaagccctcaggcgaaccgcaaattgaggatgacatgttaaaagaagaaatgaatggattttcatcctttgcaaggtcactagtaccct

SEQ ID NO: 57787 - DNA, 201 bp, Homo sapiens
tataaaacaaaataaacatttggaggaggaaaaaatgcgccacctgctgcatgtcctgaaagtagacttaggctgcacatcggaggaaaactcggcaggcratcatgatctccgacaaaatcaccacgccagtccttcctaccccagcactgcagtggaccaacaacggagggttggggctttggggatcacttgtgctat

SEQ ID NO: 57788 - DNA, 201 bp, Homo sapiens
ctcttttccagtcctccactgccggggctgggcccggccgcgggaaggaccgaaggggatacagcgtgtccctgcggcggctgcaagaggactaagcatgratggcagccggagagtcagagcaacctctgtccttcccagatatggtccaccgtgcctatttaaaggacacttgagcaccaaaagtaatgctgcagtaga

SEQ ID NO: 57789 - DNA, 161 bp, Homo sapiens
ccagcccttagcaacggcctggcgacggtttccctgctgctgcagcccccgtcggctcctyttttccagtcctccactgccggggctgggcccggccgcgggaaggaccgaaggggatacagcgtgtccctgcggcggctgcaagaggactaagcatggat

SEQ ID NO: 57790 - DNA, 201 bp, Homo sapiens
ccattcactcctcgcactttaaaaacagaagcaaaatctttcctgtcacagtatcgctattatacacctgccaaaagaaaaaaggattttacagatcaacrgatagaagctgaaacccagactgaattaagctttaaatctgagttggggacagctgagactaaaaacatgacagattcagaaatgaacataaagcaggca

SEQ ID NO: 57791 - DNA, 201 bp, Homo sapiens
tgctgctgcagcccccgtcggctcctcttttccagtcctccactgccggggctgggcccggccgcgggaaggaccgaaggggatacagcgtgtccctgcgrcggctgcaagaggactaagcatggatggcagccggagagtcagagcaacctctgtccttcccagatatggtccaccgtgcctatttaaaggacacttgag

SEQ ID NO: 57792 - DNA, 201 bp, Homo sapiens
agcaacctctgtccttcccagatatggtccaccgtgcctatttaaaggacacttgagcaccaaaagtaatgctgcagtagactgctcggttccagtaagcrtgagtaccagcataaagtatgcagaccaacaacgaagagagaaactcaaaaaggaattagcacaatgtgaaaaagagttcaaattaactaaaactgcaat

SEQ ID NO: 57793 - DNA, 201 bp, Homo sapiens
tcggaggaaaactcggcaggcgatcatgatctccgacaaaatcaccacgccagtccttcctaccccagcactgcagtggaccaacaacggagggttggggytttggggatcacttgtgctatttgtatggcgtcgaacagactggatctcttcaagatatgctgtggaaaatcaatgaaatagaaaagtactcaaggatca

SEQ ID NO: 57794 - DNA, 201 bp, Homo sapiens
gtgctgagcccccccgggacgaacccccggctgatggagctctgaagcgggcagaggagctcaagactcaggccaatgactacttcaaagccaaggactaygagaacgccatcaagttctacagccaggccatcgagctgaaccccagcaatgccatctactatggcaaccgcagcctggcctacctgcgcactgagtgct

SEQ ID NO: 57795 - DNA, 201 bp, Homo sapiens
tatgtctgtaattaaatatgttaaaataaagtcattatcggaagtcagcttgtctctggatggtggagccgaaggagctgcccgggttgggttacgcctgmtcaggagatccggagggtggggaggccgcaaagtcccgctggccgggcccacccagctctgggctgaccgcccaagtggcctctgcctctgcccagcacc

SEQ ID NO: 57796 - DNA, 201 bp, Homo sapiens
acctccagggctctgacctacggcctcagttccaccagttcacagcagtgcctcatcccaacgtcaagcccatggcctatgccaacacgctgctgcagctrggaatgatgtgaggtgacgggcggggcggcctgcatcccagggcccctccaatcccaccggacccaggccctgggctaggggcagagcaggccccgcccc

SEQ ID NO: 57797 - DNA, 201 bp, Homo sapiens
atgccaaaatgaaataccaggagtgcaacaagatcgtgaagcagaaggcctttgagcgggccatcgcgggcgacgagcacaagcgctccgtggtggactcrctggacatcgagagcatgaccattgaggatgagtacagcggacccaagcttgaagacggcaaagtgacaatcagtttcatgaaggagctcatgcagtggt

SEQ ID NO: 57798 - DNA, 201 bp, Homo sapiens
cttttactttgtaaagtttgtatttattcccctttaggtttgcagagggggtaggggcagagtcaggggctggccagagggtctgctccctggacagagargaaggaggtggagcagctggggctgggggcacagcctgggcattctgtggggaggccgtcctcggggtggggtggggccgagtggctgccctgcccccct

SEQ ID NO: 57799 - DNA, 143 bp, Homo sapiens
cagcggcggcggccacccggcgctccttcgcgacggttcggcygggtgccgctggcggccgttgccagggtaggggtcgctttgcggcatggcgatggcggagggcgagaggactgagtgtgctgagcccccccgggacgaac

SEQ ID NO: 57800 - DNA, 168 bp, Homo sapiens
cagcggcggcggccacccggcgctccttcgcgacggttcggccgggtgccgctggcggccgttgccarggtaggggtcgctttgcggcatggcgatggcggagggcgagaggactgagtgtgctgagcccccccgggacgaacccccggctgatggagctctgaagcg

SEQ ID NO: 57801 - DNA, 201 bp, Homo sapiens; identical to SEQ ID NO: 57794

SEQ ID NO: 57802 - DNA, 201 bp, Homo sapiens; identical to SEQ ID NO: 57796

SEQ ID NO: 57803 - DNA, 201 bp, Homo sapiens; identical to SEQ ID NO: 57797

SEQ ID NO: 57804 - DNA, 201 bp, Homo sapiens
cttttactttgtaaagtttgtatttattcccctttaggtttgcagagggggtaggggcagagtcaggggctggccagagggtctgctccctggacagagargaaggaggtggagcagctggggctgggggcacagcctgcgcctcccctcctatagccccatggtggggctaggctggggctcacccccctccccagctat

SEQ ID NO: 57805 - DNA, 143 bp, Homo sapiens; identical to SEQ ID NO: 57799

SEQ ID NO: 57806 - DNA, 168 bp, Homo sapiens; identical to SEQ ID NO: 57800

SEQ ID NO: 57807 - DNA, 201 bp, Homo sapiens; identical to SEQ ID NO: 57794

SEQ ID NO: 57808 - DNA, 201 bp, Homo sapiens; identical to SEQ ID NO: 57797

SEQ ID NO: 57809 - DNA, 143 bp, Homo sapiens; identical to SEQ ID NO: 57799

SEQ ID NO: 57810 - DNA, 168 bp, Homo sapiens; identical to SEQ ID NO: 57800

SEQ ID NO: 57811 - DNA, 201 bp, Homo sapiens
ctgaatttattattgcttataaaacacatttgatggaataggagtactggtttttcataatggttaaaaatgaaaccagctgtggatttcaaaacacagtktattctagatcatctaagatccatgctgatttttattgcacaagaattaggtttgaactcttgagctggaacctcagcaaactagagtatatattgttca

SEQ ID NO: 57812 - DNA, 201 bp, Homo sapiens
gtattaattttaaagacccacagtttgctgaagattacatttttaaagctgtaatgcttccaggagcaagaaagccagcagcagtactgaaacctagtgaytgggaaaaatccagcaatggacggcagtggaagcctcagcttggctttaaccgtgaccggaggcctgtgcacctggatcaggcagccttcaggactttgg

SEQ ID NO: 57813 - DNA, 201 bp, Homo sapiens; identical to SEQ ID NO: 57811

SEQ ID NO: 57814 - DNA, 201 bp, Homo sapiens; identical to SEQ ID NO: 57812

SEQ ID NO: 57815 - DNA, 201 bp, Homo sapiens; identical to SEQ ID NO: 57811

SEQ ID NO: 57816 - DNA, 201 bp, Homo sapiens; identical to SEQ ID NO: 57812

SEQ ID NO: 57817 - DNA, 201 bp, Homo sapiens
atcattttaggtcttaaagacttcaagaaaatacaggttatcaatttattttaaatctcattgtttccagttagcaatatcatacctattaaagctgttcrttgtaacaaaattcaatcaaaaaggcagctaggtcagaaggaaacataccactctcatggttcatagtattcactgtatgtatgctagggaaaagacttg

SEQ ID NO: 57818 - DNA, 201 bp, Homo sapiens
gcgacgacctgttccgcttcaacaacattaacttggatccacttacagaaacttatgggattcctttctacctacaatacctcgcccactggccagagtayttcattgttgcagaggcacctggtggagaattaatgggttatattatgggtaaagcagaaggctcagtagctagggaagaatggcacgggcacgtcacag

SEQ ID NO: 57819 - DNA, 174 bp, Homo sapiens
atcattttaggtcttaaagacttcaagaaaatacaggttatcaatttattttaaatctcattgtttccagttagcaatatcatacctattaaagctgttcrttgtaacaaaagcagctaggtcagaaggaaacataccactctcatggttcatagtattcactgtatgtatgct

SEQ ID NO: 57820 - DNA, 201 bp, Homo sapiens; identical to SEQ ID NO: 57818

SEQ ID NO: 57821 - DNA, 201 bp, Homo sapiens
ctgggagaacttggagaagttgctagtgttcaccgcagctggggtgaaaccccagggcaaggtggctggctttgatctggacgggacgctcatcaccacamgctctgggaaggtctttcccactggccccagtgactggaggatcttgtacccagagattccccgtaagctccgagagctggaagccgagggctacaagct

SEQ ID NO: 57822 - DNA, 201 bp, Homo sapiens
tgggaagagacccgcacaccagaatcccagccagatactccgcctggcacccctctggtgtcccaagatgagaagagagatgctgagctgccgaagaagcrtatgcggaagtcaaaccccggctgggagaacttggagaagttgctagtgttcaccgcagctggggtgaaaccccagggcaaggtggctggctttgatctg

SEQ ID NO: 57823 - DNA, 201 bp, Homo sapiens
ctgggagaacttggagaagttgctagtgttcaccgcagctggggtgaaaccccagggcaaggtggctggctttgatctggacgggacgctcatcaccacamgctctgggaaggtctttcccactggccccagtgactggaggtgataagaggcaaaacaagggagtgagtgaggcctggagtccacctctggccccgggtc

SEQ ID NO: 57824 - DNA, 201 bp, Homo sapiens; identical to SEQ ID NO: 57822

SEQ ID NO: 57825 - DNA, 201 bp, Homo sapiens; identical to SEQ ID NO: 57821

SEQ ID NO: 57826 - DNA, 201 bp, Homo sapiens; identical to SEQ ID NO: 57822

SEQ ID NO: 57827 - DNA, 201 bp, Homo sapiens; identical to SEQ ID NO: 57821

SEQ ID NO: 57828 - DNA, 201 bp, Homo sapiens; identical to SEQ ID NO: 57822

SEQ ID NO: 57829 - DNA, 201 bp, Homo sapiens; identical to SEQ ID NO: 57823

SEQ ID NO: 57830 - DNA, 201 bp, Homo sapiens
agccgcggtcccgggtgagtacggggcggggcggaggcatgtgcgaggctctctgcctgtacgctggaaagtggggattgcaactcggggagggatggagyacgcgtcgtcgcctgggaaacgggtcgacccgcggaaggcgagcgggtgggacttccggagcagttaatggtggggaaactttctagtggatgtgggagg

SEQ ID NO: 57831 - DNA, 201 bp, Homo sapiens; identical to SEQ ID NO: 57822

SEQ ID NO: 57832 - DNA, 201 bp, Homo sapiens
tccatgtttcataaccggcacctcttcaaggacaaggtggtgctggacgtcggctcgggcaccggcatcctctgcatgtttgctgccaaggccggggcccrcaaggtcatcgggatcgagtgttccagtatctctgattatgcggtgaagatcgtcaaagccaacaagttagaccacgtggtgaccatcatcaaggggaag

SEQ ID NO: 57833 - DNA, 201 bp, Homo sapiens
cacctcttcaaggacaaggtggtgctggacgtcggctcgggcaccggcatcctctgcatgtttgctgccaaggccggggcccgcaaggtcatcgggatcgwgtgttccagtatctctgattatgcggtgaagatcgtcaaagccaacaagttagaccacgtggtgaccatcatcaaggggaaggtggaggaggtggagctc

SEQ ID NO: 57834 - DNA, 201 bp, Homo sapiens
gactcctacgcacactttggcatccacgaggagatgctgaaggacgaggtgcgcaccctcacttaccgcaactccatgtttcataaccggcacctcttcawggacaaggtggtgctggacgtcggctcgggcaccggcatcctctgcatgtttgctgccaaggccggggcccgcaaggtcatcgggatcgagtgttccagt

SEQ ID NO: 57835 - DNA, 201 bp, Homo sapiens; identical to SEQ ID NO: 57832

SEQ ID NO: 57836 - DNA, 201 bp, Homo sapiens; identical to SEQ ID NO: 57833

SEQ ID NO: 57837 - DNA, 201 bp, Homo sapiens; identical to SEQ ID NO: 57834

SEQ ID NO: 57838 - DNA, 201 bp, Homo sapiens; identical to SEQ ID NO: 57832

SEQ ID NO: 57839 - DNA, 201 bp, Homo sapiens; identical to SEQ ID NO: 57833

SEQ ID NO: 57840 - DNA, 201 bp, Homo sapiens; identical to SEQ ID NO: 57834

SEQ ID NO: 57841 - DNA, 201 bp, Homo sapiens; identical to SEQ ID NO: 57832

SEQ ID NO: 57842 - DNA, 201 bp, Homo sapiens; identical to SEQ ID NO: 57833

SEQ ID NO: 57843 - DNA, 201 bp, Homo sapiens; identical to SEQ ID NO: 57834

SEQ ID NO: 57844 - DNA, 201 bp, Homo sapiens; identical to SEQ ID NO: 57832

SEQ ID NO: 57845 - DNA, 201 bp, Homo sapiens; identical to SEQ ID NO: 57833

SEQ ID NO: 57846 - DNA, 201 bp, Homo sapiens; identical to SEQ ID NO: 57834

SEQ ID NO: 57847 - DNA, 201 bp, Homo sapiens
tgactggacggtcccttatggccgcatctactttgccggcgagcacaccgcctacccgcacggctgggtggagacggcggtcaagtcggcgctgcgcgcckccatcaagatcaacagccggaaggggcctgcatcggacacggccagccccgaggggcacgcatctgacatggaggggcaggggcatgtgcatggggtggc

SEQ ID NO: 57848 - DNA, 201 bp, Homo sapiens
gccttgcgtccccaggaaaagggccactcgcccgaagacatctaccagatggctctcaaccaggccctcaaagacctcaaggcactgggctgcagaaaggygatgaagaagtttgaaaggcacacgctcttggaatatcttctcggggaggggaacctgagccggccggccgtgcagcttctgggagacgtgatgtccgag

SEQ ID NO: 57849 - DNA, 201 bp, Homo sapiens
tgggtggctgggacctgctgccgcgcgcgctgctgagctcgctgtccgggcttgtgctgttgaacgcgcccgtggtggcgatgacccagggaccgcacgaygtgcacgtgcagatcgagacctctcccccggcgcggaatctgaaggtgctgaaggccgacgtggtgctgctgacggcgagcggaccggcggtgaagcgca

SEQ ID NO: 57850 - DNA, 201 bp, Homo sapiens
aagtggagatgacgattattgctgcaaaagaaggcacagttggcagtgtagatggacacatgaaactgtacagggcagtcaatccaatcatccctcccacrggtttggtccgggcaccctgtggactctgcccggtttttgatgactgccacgaaggtggtgagatttcaccatctaactgtatttacatgacagagtggc

SEQ ID NO: 57851 - DNA, 201 bp, Homo sapiens
acagtgaccaggattttgaatctgaatttgtagaggtgcttaaccaacagtgttttaaattcctacagtccaaggcagaaacagcacgagaaagcaaacaraacccaatgatacaaagaaatagttcatttgcctcatcacatgaagtgtggaaatatatctgcgaattgggaatcagtaaggtagagttatccatggaag

SEQ ID NO: 57852 - DNA, 201 bp, Homo sapiens
gcgacacgaggaagaaggcccctcggcctcagcagagcgctatcctccactggttacccgggttccccggcttgctaccgggctgctccgtgcatctttcmccccaggcgtcaggaactgcgccctcatggcggaggtgaaggtgaaggtgcagccgcctgacgcggatccggtcgaaatagaaaacaggattatagaatt

SEQ ID NO: 57853 - DNA, 141 bp, Homo sapiens
accccttctgccatgtgaaagggagaagacaaacatccacgaaccaggaagtgggtcctcaccagaaaacaaatctgtaagcaccttgatcttggacttcycagcctccagaattgtgagaaataaatttctgttgttgat

SEQ ID NO: 57854 - DNA, 201 bp, Homo sapiens
tgaaaacatattttttttatttatgaagactaaatttatattggtaaaatagccagtagaatatgaaagaaataaggttagtagtgaaattcattaataawaaaacactttgaaactccggaggaccacatctttcaagacttctgatgggtcaaggaaaaagatgccaacatacccgtatttaccaagtactatgataat

SEQ ID NO: 57855 - DNA, 201 bp, Homo sapiens
atgaaaacatattttttttatttatgaagactaaatttatattggtaaaatagccagtagaatatgaaagaaataaggttagtagtgaaattcattaataaaaaaacactttgaaactccggaggaccacatctttcaagacttctgatgggtcaaggaaaaagatgccaacatacccgtatttaccaagtactatgataa

SEQ ID NO: 57856 - DNA, 201 bp, Homo sapiens
tatgaaaacatattttttttatttatgaagactaaatttatattggtaaaatagccagtagaatatgaaagaaataaggttagtagtgaaattcattaataaaaaaacactttgaaactccggaggaccacatctttcaagacttctgatgggtcaaggaaaaagatgccaacatacccgtatttaccaagtactatgata

SEQ ID NO: 57857 - DNA, 201 bp, Homo sapiens
ttgctgctatgaaaacatattttttttatttatgaagactaaatttatattggtaaaatagccagtagaatatgaaagaaataaggttagtagtgaaattcattaataaaaaaacactttgaaactccggaggaccacatctttcaagacttctgatgggtcaaggaaaaagatgccaacatacccgtatttaccaagtac

SEQ ID NO: 57858 - DNA, 201 bp, Homo sapiens
ataatggacgtagacttgctgctatgaaaacatattttttttatttatgaagactaaatttatattggtaaaatagccagtagaatatgaaagaaataaggttagtagtgaaattcattaataaaaaaacactttgaaactccggaggaccacatctttcaagacttctgatgggtcaaggaaaaagatgccaacataccc

SEQ ID NO: 57859 - DNA, 201 bp, Homo sapiens
cttgctgctatgaaaacatattttttttatttatgaagactaaatttatattggtaaaatagccagtagaatatgaaagaaataaggttagtagtgaaattcattaataaaaaaacactttgaaactccggaggaccacatctttcaagacttctgatgggtcaaggaaaaagatgccaacatacccgtatttaccaagta

SEQ ID NO: 57860 - DNA, 201 bp, Homo sapiens
gacttgctgctatgaaaacatattttttttatttatgaagactaaatttatattggtaaaatagccagtagaatatgaaagaaataaggttagtagtgaaattcattaataaaaaaacactttgaaactccggaggaccacatctttcaagacttctgatgggtcaaggaaaaagatgccaacatacccgtatttaccaag

SEQ ID NO: 57861 - DNA, 201 bp, Homo sapiens
cgccgaaaggcaaggaaggaccggctgcgacacgaggaagaaggcccctcggcctcagcagagcgctatcctccactggttacccgggttccccggcttgstaccgggctgctccgtgcatctttccccccaggcgtcaggaactgcgccctcatggcggaggtgaaggtgaaggtgcagccgcctgacgcggatccggtc

SEQ ID NO: 57862 - DNA, 201 bp, Homo sapiens
ataggttgttgtctatgggtcagttggatctcttaaggagcaatacgggccttttatatagaataaaggactctcagaatgctggtaaaatgaagggatcygataaccaagaaaaactagtatatcaaatcatagaggatgcaggaaataaaggaatatggagcagagatatccgctataaaagtaatttgccattaacag

SEQ ID NO: 57863 - DNA, 201 bp, Homo sapiens
tgatggaaaagtggagatgacgattattgctgcaaaagaaggcacagttggcagtgtagatggacacatgaaactgtacagggcagtcaatccaatcatcyctcccacaggtttggtccgggcaccctgtggactctgcccggtttttgatgactgccacgaaggtggtgagatttcaccatctaactgtatttacatgac

SEQ ID NO: 57864 - DNA, 201 bp, Homo sapiens
ccagaattctaatgttgaaatctcatttccaatgtgatggtatttggaggtggggcttttggtaagtgataggtcaggagagtaacagcgctcatgaatgkgattagtgcccttatataaagagacccagagagctccatcaccccttctgccatgtgaaagggagaagacaaacatccacgaaccaggaagtgggtcctc

SEQ ID NO: 57865 - DNA, 201 bp, Homo sapiens
aagtcttatgtttcactctttaactcaaatgtattctttgttagaatttaccctagattcttatttaatgtctgcagtagactgaatgtttgtgtgccccsagaattctaatgttgaaatctcatttccaatgtgatggtatttggaggtggggcttttggtaagtgataggtcaggagagtaacagcgctcatgaatggg

SEQ ID NO: 57866 - DNA, 201 bp, Homo sapiens
ttaaagtcttatgtttcactctttaactcaaatgtattctttgttagaatttaccctagattcttatttaatgtctgcagtagactgaatgtttgtgtgcmcccagaattctaatgttgaaatctcatttccaatgtgatggtatttggaggtggggcttttggtaagtgataggtcaggagagtaacagcgctcatgaat

SEQ ID NO: 57867 - DNA, 201 bp, Homo sapiens
tgccttttccgcacaatattaattcctttttgtatcagaaatgttcttttaggagattatgctaccatacttacttcaaacccaatgactactgtcaaggwcatattttcagtacataaatactatcattttcattctaaagaatattttcactgttccttctttcttaaagtcttatgtttcactctttaactcaaatgt

SEQ ID NO: 57868 - DNA, 201 bp, Homo sapiens
tattaagttcttcattggaagtttttttttatatctggttcactaccaccattttctgtttcctactttctcagtggtttcattgaaaagaaattagaagkggttaaaggcaggaatagcaaagagtgcaaacttggggtatgactgggggagagtggaacatgccttttccgcacaatattaattcctttttgtatcaga

SEQ ID NO: 57869 - DNA, 201 bp, Homo sapiens
gcgcagcttggccacctcccgccgaaaggcaaggaaggaccggctgcgacacgaggaagaaggcccctcggcctcagcagagcgctatcctccactggttmcccgggttccccggcttgctaccgggctgctccgtgcatctttccccccaggcgtcaggaactgcgccctcatggcggaggtgaaggtgaaggtgcagcc

SEQ ID NO: 57870 - DNA, 201 bp, Homo sapiens
agaatatgaaagaaataaggttagtagtgaaattcattaataaaaaaacactttgaaactccggaggaccacatctttcaagacttctgatgggtcaaggmaaaagatgccaacatacccgtatttaccaagtactatgataatggctagagtataaaaatgttctttttaaagttatttattaagttcttcattggaagt

SEQ ID NO: 57871 - DNA, 201 bp, Homo sapiens
ggagcaggcgcagcttggccacctcccgccgaaaggcaaggaaggaccggctgcgacacgaggaagaaggcccctcggcctcagcagagcgctatcctccmctggttacccgggttccccggcttgctaccgggctgctccgtgcatctttccccccaggcgtcaggaactgcgccctcatggcggaggtgaaggtgaagg

SEQ ID NO: 57872 - DNA, 201 bp, Homo sapiens
ccctgtgcgggagcgggacgcccactccgtcctcttatcccatatcttccatggccggaagaatttcttcatcaccacagagaacttgctggcctcctggracttctggacccctctgctggagagcctggcccataaggccccacgcctctaccctggaggagctgagaatggccgtctgttggactttgagttcagtag

SEQ ID NO: 57873 - DNA, 201 bp, Homo sapiens
cagctggccacagaactcgggacctttttccaggaggaggagatgtaccgggtggaccattacttaggcaagcaggctgtggcgcagatcctgcctttccragaccagaaccgcaaggctttggacggcctctggaaccggcaccatgtggagcgggtggagatcatcatgaaagagaccgtggatgctgaaggccgcacc

SEQ ID NO: 57874 - DNA, 201 bp, Homo sapiens
caggccctgaacaaggacatcgaggcacagctccagcacgcaggcctccgggaggctggcaggatcttctacttctcagtgccacccttcgcctatgaagmcattgcccgcaacatcaacagtagctgccggccaggcccgggcgcctggctgcgggttgtccttgagaaaccctttggccatgaccacttctcagcccag

SEQ ID NO: 57875 - DNA, 201 bp, Homo sapiens
atgccagggagatctcagccctggtggccaacagcagcttcgacctggtgctgctgggcatgggtgccgacgggcacacagcctccctcttcccacagtcrcccactggcctggatggcgagcagctggtcgtgctgaccacgagcccctcccagccacaccgccgcatgagccttagcctgcctctcatcaaccgcgcca

SEQ ID NO: 57876 - DNA, 201 bp, Homo sapiens
gagatgtaccgggtggaccattacttaggcaagcaggctgtggcgcagatcctgcctttccgagaccagaaccgcaaggctttggacggcctctggaaccrgcaccatgtggagcgggtggagatcatcatgaaagagaccgtggatgctgaaggccgcaccagcttctatgaggagtacggtgtcattcgcgacgtcctc

SEQ ID NO: 57877 - DNA, 201 bp, Homo sapiens
cctgggcagccctgccgtgctggtcagcaggaacctgttcaggccctccctgccctccagctggaaggaaatggagggaccacctgggctccgccttttcrgcagccctctgtccgattactacgcctacagccctgtgcgggagcgggacgcccactccgtcctcttatcccatatcttccatggccggaagaatttctt

SEQ ID NO: 57878 - DNA, 201 bp, Homo sapiens
cacctgggctccgccttttcggcagccctctgtccgattactacgcctacagccctgtgcgggagcgggacgcccactccgtcctcttatcccatatcttycatggccggaagaatttcttcatcaccacagagaacttgctggcctcctggaacttctggacccctctgctggagagcctggcccataaggccccacgcc

SEQ ID NO: 57879 - DNA, 201 bp, Homo sapiens
tcctgcctttccgagaccagaaccgcaaggctttggacggcctctggaaccggcaccatgtggagcgggtggagatcatcatgaaagagaccgtggatgcygaaggccgcaccagcttctatgaggagtacggtgtcattcgcgacgtcctccagaaccatctgacggaggtcctcaccctcgtggccatggagctgcccc

SEQ ID NO: 57880 - DNA, 201 bp, Homo sapiens
ccatggagctgccccacaatgtcagcagtgcggaggctgtgctgcggcacaagcttcaggtcttccaggcgctgcggggcctgcagaggggcagtgccgtygtgggccagtaccagtcttacagtgagcaggtgcgcagagagctgcagaagccagacagcttccacagcctgacgccgaccttcgcagccgtcctagtgc

SEQ ID NO: 57881 - DNA, 201 bp, Homo sapiens
tcaaattcaggccaggagagaagtcttaagaaaagacctccagcagttacacattcatatcaaccagcacaacacgggatggcgcccaaactccggcgttyacaagaggagacgtgacgtggtgggctgaggttaatcagggaaggtttcctgggggaggtgatccttgaactggctcccggggaacattcagagcatgat

SEQ ID NO: 57882 - DNA, 201 bp, Homo sapiens
agcaggtgcgcagagagctgcagaagccagacagcttccacagcctgacgccgaccttcgcagccgtcctagtgcacattgacaaccttcgctgggagggygtgcctttcatcctgatgtctggcaaagccttggacgagagagtgggctacgctcggatcttgttcaagaaccaggcctgctgtgtgcagagcgaaaagc

SEQ ID NO: 57883 - DNA, 201 bp, Homo sapiens
cagcaggaacctgttcaggccctccctgccctccagctggaaggaaatggagggaccacctgggctccgccttttcggcagccctctgtccgattactacrcctacagccctgtgcgggagcgggacgcccactccgtcctcttatcccatatcttccatggccggaagaatttcttcatcaccacagagaacttgctggc

SEQ ID NO: 57884 - DNA, 141 bp, Homo sapiens
tgaggcctgaggcctggggcggggtggcggccgggctggcsttggcctcgcgccttcccctgcggccgccgcgggctccgcgggcggtatcggagtgtcgtgcggcgcgtggccgcgtgacacgcgcacttgtcggagtga

SEQ ID NO: 57885 - DNA, 201 bp, Homo sapiens
ctggacccctctgctggagagcctggcccataaggccccacgcctctaccctggaggagctgagaatggccgtctgttggactttgagttcagtagcggcyggttgttcttttcccagcagcagccggagcagctggtgccagggccagggccggccccaatgcccagtgacttccaggtcctcagggccaagtaccgaga

SEQ ID NO: 57886 - DNA, 201 bp, Homo sapiens
gacgagagagtgggctacgctcggatcttgttcaagaaccaggcctgctgtgtgcagagcgaaaagcactgggccgcggcgcagagccagtgcctgccccrgcagctcgtcttccacatcggccatggcgacctgggcagccctgccgtgctggtcagcaggaacctgttcaggccctccctgccctccagctggaaggaa

SEQ ID NO: 57887 - DNA, 201 bp, Homo sapiens
tgctgcagcacgtccggatcccctactacaacatccaccccatgcctgtgcacctgcagcagcggctctgcgccgaggaggaccagggcgcccagatctaygccagggagatctcagccctggtggccaacagcagcttcgacctggtgctgctgggcatgggtgccgacgggcacacagcctccctcttcccacagtcac

SEQ ID NO: 57888 - DNA, 201 bp, Homo sapiens
ttcttttcccagcagcagccggagcagctggtgccagggccagggccggccccaatgcccagtgacttccaggtcctcagggccaagtaccgagagagccygctggtctccgcctggtccgaggagctgatctctaagctggctaatgacatcgaggccaccgctgtgcgagccgtgcggcgctttggccagttccacctg

SEQ ID NO: 57889 - DNA, 201 bp, Homo sapiens
accacttctcagcccagcagctggccacagaactcgggacctttttccaggaggaggagatgtaccgggtggaccattacttaggcaagcaggctgtggcrcagatcctgcctttccgagaccagaaccgcaaggctttggacggcctctggaaccggcaccatgtggagcgggtggagatcatcatgaaagagaccgtgg

SEQ ID NO: 57890 - DNA, 201 bp, Homo sapiens
ggctggcaggatcttctacttctcagtgccacccttcgcctatgaagacattgcccgcaacatcaacagtagctgccggccaggcccgggcgcctggctgygggttgtccttgagaaaccctttggccatgaccacttctcagcccagcagctggccacagaactcgggacctttttccaggaggaggagatgtaccgggt

SEQ ID NO: 57891 - DNA, 201 bp, Homo sapiens
aggccctccctgccctccagctggaaggaaatggagggaccacctgggctccgccttttcggcagccctctgtccgattactacgcctacagccctgtgcrggagcgggacgcccactccgtcctcttatcccatatcttccatggccggaagaatttcttcatcaccacagagaacttgctggcctcctggaacttctgg

SEQ ID NO: 57892 - DNA, 201 bp, Homo sapiens
agtcacccactggcctggatggcgagcagctggtcgtgctgaccacgagcccctcccagccacaccgccgcatgagccttagcctgcctctcatcaaccgygccaagaaggtggcagtcctggtcatgggcaggatgaagcgtgagatcaccacgctggtgagccgggtgggccatgagcccaagaagtggcccatctcgg

SEQ ID NO: 57893 - DNA, 201 bp, Homo sapiens
ttttccaggaggaggagatgtaccgggtggaccattacttaggcaagcaggctgtggcgcagatcctgcctttccgagaccagaaccgcaaggctttggayggcctctggaaccggcaccatgtggagcgggtggagatcatcatgaaagagaccgtggatgctgaaggccgcaccagcttctatgaggagtacggtgtca

SEQ ID NO: 57894 - DNA, 201 bp, Homo sapiens; identical to SEQ ID NO: 57872

SEQ ID NO: 57895 - DNA, 201 bp, Homo sapiens; identical to SEQ ID NO: 57873

SEQ ID NO: 57896 - DNA, 201 bp, Homo sapiens; identical to SEQ ID NO: 57877

SEQ ID NO: 57897 - DNA, 201 bp, Homo sapiens; identical to SEQ ID NO: 57878

SEQ ID NO: 57898 - DNA, 201 bp, Homo sapiens; identical to SEQ ID NO: 57879

SEQ ID NO: 57899 - DNA, 201 bp, Homo sapiens; identical to SEQ ID NO: 57880

SEQ ID NO: 57900 - DNA, 201 bp, Homo sapiens; identical to SEQ ID NO: 57881

SEQ ID NO: 57901 - DNA, 141 bp, Homo sapiens; identical to SEQ ID NO: 57884

SEQ ID NO: 57902 - DNA, 102 bp, Homo sapiens
gtgggaggatcacctgagcccaggagactgaggctgcagtaaggtgtgattgcactattgctctctagcctggaaaacagagtgagaccctatctcaaaaaa

SEQ ID NO: 57903 - DNA, 201 bp, Homo sapiens; identical to SEQ ID NO: 57886

SEQ ID NO: 57904 - DNA, 201 bp, Homo sapiens; identical to SEQ ID NO: 57887

SEQ ID NO: 57905 - DNA, 201 bp, Homo sapiens; identical to SEQ ID NO: 57890

SEQ ID NO: 57906 - DNA, 201 bp, Homo sapiens; identical to SEQ ID NO: 57891

SEQ ID NO: 57907 - DNA, 193 bp, Homo sapiens
gcatggcaaagtcggtttctctctggactgtttacacttcaaggcggtggatttagaggaatcctggctttcattttcaatgccatctgaggtgggaggaycacctgagcccaggagactgaggctgcagtaaggtgtgattgcactattgctctctagcctggaaaacagagtgagaccctatctcaaaaaa

SEQ ID NO: 57908 - DNA, 201 bp, Homo sapiens
gataacaggaatacagtggcaaagactagactgtggaaagggttccagaaatcttttttcttttttaattaaaaaaaatatttgcagagatgagctcttgstatgttgcccaggctggtctcaaactcctgggctcaagcgatcctcccatctcagcctcccagagtgctgggattacaggtgtgagctactgcgcccagc

SEQ ID NO: 57909 - DNA, 201 bp, Homo sapiens; identical to SEQ ID NO: 57874

SEQ ID NO: 57910 - DNA, 201 bp, Homo sapiens; identical to SEQ ID NO: 57875

SEQ ID NO: 57911 - DNA, 201 bp, Homo sapiens; identical to SEQ ID NO: 57876

SEQ ID NO: 57912 - DNA, 201 bp, Homo sapiens; identical to SEQ ID NO: 57882

SEQ ID NO: 57913 - DNA, 201 bp, Homo sapiens; identical to SEQ ID NO: 57883

SEQ ID NO: 57914 - DNA, 201 bp, Homo sapiens; identical to SEQ ID NO: 57885

SEQ ID NO: 57915 - DNA, 201 bp, Homo sapiens
ctgtgcagtaggaattccaggctcctccctgtgtctttgctgttcttcagactccatttatagagaatgagggctgataacaggaatacagtggcaaagaytagactgtggaaagggttccagaaatcttttttcttttttaattaaaaaaaatatttgcagagatgagctcttgctatgttgcccaggctggtctcaaac

SEQ ID NO: 57916 - DNA, 201 bp, Homo sapiens
ctgtgtctttgctgttcttcagactccatttatagagaatgagggctgataacaggaatacagtggcaaagactagactgtggaaagggttccagaaatcttttttcttttttaattaaaaaaaatatttgcagagatgagctcttgctatgttgcccaggctggtctcaaactcctgggctcaagcgatcctcccatctc

SEQ ID NO: 57917 - DNA, 191 bp, Homo sapiens
atggcaaagtcggtttctctctggactgtttacacttcaaggcggtggatttagaggaatcctggctttcattttcaatgccatctgaggtgggaggatcrcctgagcccaggagactgaggctgcagtaaggtgtgattgcactattgctctctagcctggaaaacagagtgagaccctatctcaaaaaa

SEQ ID NO: 57918 - DNA, 162 bp, Homo sapiens
ttacacttcaaggcggtggatttagaggaatcctggctttcattttcaatgccatctgaggtgggaggatcacctgagcccaggagactgaggctgcagtraggtgtgattgcactattgctctctagcctggaaaacagagtgagaccctatctcaaaaaa

SEQ ID NO: 57919 - DNA, 161 bp, Homo sapiens
tacacttcaaggcggtggatttagaggaatcctggctttcattttcaatgccatctgaggtgggaggatcacctgagcccaggagactgaggctgcagtarggtgtgattgcactattgctctctagcctggaaaacagagtgagaccctatctcaaaaaa

SEQ ID NO: 57920 - DNA, 106 bp, Homo sapiens
tgaggtgggaggatcacctgagcccaggagactgaggctgcagtaaggtgtgattgcactattgctctctagcctggaaaacagagtgagaccctatctcaaaaaa

SEQ ID NO: 57921 - DNA, 105 bp, Homo sapiens
gaggtgggaggatcacctgagcccaggagactgaggctgcagtaaggtgtgattgcactattgctctctagcctggaaaacagagtgagaccctatctcaaaaaa

SEQ ID NO: 57922 - DNA, 104 bp, Homo sapiens
aggtgggaggatcacctgagcccaggagactgaggctgcagtaaggtgtgattgcactattgctctctagcctggaaaacagagtgagaccctatctcaaaaaa

SEQ ID NO: 57923 - DNA, 103 bp, Homo sapiens
ggtgggaggatcacctgagcccaggagactgaggctgcagtaaggtgtgattgcactattgctctctagcctggaaaacagagtgagaccctatctcaaaaaa

SEQ ID NO: 57924 - DNA, 201 bp, Homo sapiens; identical to SEQ ID NO: 57889

SEQ ID NO: 57925 - DNA, 201 bp, Homo sapiens; identical to SEQ ID NO: 57888

SEQ ID NO: 57926 - DNA, 201 bp, Homo sapiens; identical to SEQ ID NO: 57892

SEQ ID NO: 57927 - DNA, 201 bp, Homo sapiens; identical to SEQ ID NO: 57893

SEQ ID NO: 57928 - DNA, 201 bp, Homo sapiens
ccgctgtctgacctgggcaagctcagctaccgcagctactggtcctgggtgctgctggagatcctgcgggacttccggggcacactgtccatcaaggacckcagccagatgaccagtatcacccaaaatgacatcatcagtaccctgcaatccctcaatatggtcaagtactggaagggccagcacgtgatctgtgtcaca

SEQ ID NO: 57929 - DNA, 201 bp, Homo sapiens
gctggagagcacagtcggctccccggagaagccgctgtctgacctgggcaagctcagctaccgcagctactggtcctgggtgctgctggagatcctgcggracttccggggcacactgtccatcaaggacctcagccagatgaccagtatcacccaaaatgacatcatcagtaccctgcaatccctcaatatggtcaagta

SEQ ID NO: 57930 - DNA, 201 bp, Homo sapiens
actggaagggccagcacgtgatctgtgtcacacccaagctggtggaggagcacctcaaaagtgcccagtataagaaaccacccatcacagtggactccgtytgcctcaagtgggcaccccccaagcacaagcaagtcaagctctccaagaagtgagcagcctggcccctgctgtcggacctgagcctcctggctcccagcc

SEQ ID NO: 57931 - DNA, 201 bp, Homo sapiens
ccttgcccccctaccaacgccgcggctacgggaagttcctcatcgctttcagttatgagctctccaagctggagagcacagtcggctccccggagaagccrctgtctgacctgggcaagctcagctaccgcagctactggtcctgggtgctgctggagatcctgcgggacttccggggcacactgtccatcaaggacctca

SEQ ID NO: 57932 - DNA, 201 bp, Homo sapiens
atgagctctccaagctggagagcacagtcggctccccggagaagccgctgtctgacctgggcaagctcagctaccgcagctactggtcctgggtgctgctrgagatcctgcgggacttccggggcacactgtccatcaaggacctcagccagatgaccagtatcacccaaaatgacatcatcagtaccctgcaatccctca

SEQ ID NO: 57933 - DNA, 201 bp, Homo sapiens
gcccagagcctcaacccagtgctgaccagggcagtgctgaactgtgtggctctcaagaggtagatcagcccacaagtggcgcagacacagggacttccgaygcatcaggaggaagccgaagagccgtcagtgagaccgagtctctcgatcagggctctgagccttcccaggtgtcctctgaaacagaacccagtgatcctg

SEQ ID NO: 57934 - DNA, 201 bp, Homo sapiens
aaagaggaggtggaccccagtgattggattggactttatcatatagatgagaattctccagccaacttctgggattctaagaacaggggtgtgactggaayacaaaaagggcaaattgtatggagaattgagcctgggccctatttcatggaaccggagataaaaatctgttttaaatattaccacggcattagtggagcc

SEQ ID NO: 57935 - DNA, 201 bp, Homo sapiens
atcatatagatgagaattctccagccaacttctgggattctaagaacaggggtgtgactggaacacaaaaagggcaaattgtatggagaattgagcctggrccctatttcatggaaccggagataaaaatctgttttaaatattaccacggcattagtggagccctgcgagccacgaccccctgcatcaccgtgaagaacc

SEQ ID NO: 57936 - DNA, 201 bp, Homo sapiens
aattaacctctacgtcttcaaggacctcacctcccagaggacgtcaggattcactcaatgattacttagatgctatcgaacacaatggccactccaggccrgggacagcgacctgctctgagaggtccatgggtgcctctccgaaactgaggagtagttttcccactgacacaagactcaatgccatgcttcatattgatt

SEQ ID NO: 57937 - DNA, 201 bp, Homo sapiens
ctgacccttatcttaagatgtcaattcagccaggaaagaagagcagtttccccacctgtgcccaccacgggcaggagagacggtctactatcatcagtaayaccaccaatccaatttggcaccgagagaaatattccttttttgcacttcttactgatgtcttagaaattgaaattaaagacaaatttgccaagagccgtc

SEQ ID NO: 57938 - DNA, 201 bp, Homo sapiens
accatgaccaatgagaggcctgaggaaaataccaatgctattgatggggcaggggaggaagctgactttcaccaagccagtgcagatttccgacgggagarcatcctgcctcactctacctccagatccaggatcacgttgctgttacagtctccccccgtgaagttcctcatcagcccagagttcttcaccgtgctgcat

SEQ ID NO: 57939 - DNA, 201 bp, Homo sapiens
tggggaaactaaccattccagtccagaggctgctggagcgacaagccatcggtgatcaaatgctcagctacaaccttggcagaaggctcccagctgaccaygtgagtgggtacctccagtttaaagtggaggttacgtcttctgttcatgaagatgcctctccagaagctgttggcacaatacttggagtcaattctgtga

SEQ ID NO: 57940 - DNA, 201 bp, Homo sapiens
tccaatttatccgaactgaagggactccaggattggtgcgcctttcaagcgatgcagaccttgttatgttgctgagcttatttgaagaagagataatgtcrtatgtgcctccacatgccttactccaccccagctactgtcagtccccacgtggctctcccgtgtcatctcctcagaactcgccaggtacccagcgtgcca

SEQ ID NO: 57941 - DNA, 201 bp, Homo sapiens
tgctgttacagtctccccccgtgaagttcctcatcagcccagagttcttcaccgtgctgcattctaaccctagtgcctaccgcatgtttacaaacaacacrtgtttgaagcacatgatcaccaaagtccggagggacacccaccactttgaacgctaccagcataaccgcgaccttgtgggattcctcaacatgttcgcga

SEQ ID NO: 57942 - DNA, 201 bp, Homo sapiens
tccgattcagtggtaggatccttggtcttgcactaatacaccagtatttgttggatgccttcttcacacggcccttttataaggctcttctcagaattctrtgtgacctgagtgacctagaataccttgatgaagagttccatcagagcctgcagtggatgaaagacaatgatatccatgacatcctagacctcacgttca

SEQ ID NO: 57943 - DNA, 201 bp, Homo sapiens
tgagcccagagaacctccagagccttgccgcccagagctccatgccagagaacatgaccctgcagcgggccaacagcgacaccgacctggtgacttctgaragccgctccagcttaactgccagcatgtacgagtacacgctggggcaagcccagaacctcattatcttctgggacattaaagaggaggtggaccccagtg

SEQ ID NO: 57944 - DNA, 201 bp, Homo sapiens
ccagagccttgccgcccagagctccatgccagagaacatgaccctgcagcgggccaacagcgacaccgacctggtgacttctgagagccgctccagcttawctgccagcatgtacgagtacacgctggggcaagcccagaacctcattatcttctgggacattaaagaggaggtggaccccagtgattggattggacttta

SEQ ID NO: 57945 - DNA, 201 bp, Homo sapiens
gaagcttcatgtttgatgatacagatttaagaatacctgagacttaagagtgttggaagtcatttgatagaaagatgagatcggagacaatgttgtgttayagggcacacattgaaggtatatgccaaatctctcaccagataagtccttttctccctgtgccgttttcttgctcaaagggaacagtgaattagccagcta

SEQ ID NO: 57946 - DNA, 201 bp, Homo sapiens
tatactataacacaataacaaatttttctgagaaggaccgaccagaaaatgtccatggaggaattttagctgatgatatgggtttgggtaaaactcttacrgccattgcagtaatccttaccaacttccatgatggcagacctcttcctattgaaagagttaaaaagaatctactgaagaaggaatataatgttaacgatg

SEQ ID NO: 57947 - DNA, 201 bp, Homo sapiens
gtatcttccaagtactcagctttttcgtatttcaaataaggtcagaccttttatacttttgaccaaatagttattttctatgttggacacttagttatttrccaaagcctccgatttgtgatgcagtgtttgtagtccttgtaaacaatatatacagactatacaagaattaattttattgggctttcaaaaaccatattt

SEQ ID NO: 57948 - DNA, 201 bp, Homo sapiens
ctatatcatggacaacaaattggcacaaattgaaggggtagttccttttggtgcaaacaatgcttttaccatgcctctgcatatgactttttggggaaaaraagaaaatagaaaagcggtttcagatcagttgaagaaacatggatttaaattgggtcctgcaccaaaaactttaggattcaatttggaaagtggttgggg

SEQ ID NO: 57949 - DNA, 201 bp, Homo sapiens
gtgggattagcccgctagcattaggagcagttgggaagttacctggtagatcaagcattacacacaaaaaatcaagttgatcagagtatgggttctccatrtagcaatacttcagtgagattaagtataaacataagtttggcaagttgtttaaaaaatgtctctttgttttgtacagttctgttagatgttgttatattt

SEQ ID NO: 57950 - DNA, 201 bp, Homo sapiens
gctacattgagatatagttcacataaatgacttggagttttatgttcatgaaaaaattagggattatgttaagagtactattttttccattttagttaagyagtactacactcattgtttaaatgtaacttgctgtgtctgaggtataaatatagtctgtgggagtgagaggcaaaccagtcctacccaatttgatttgaa

SEQ ID NO: 57951 - DNA, 201 bp, Homo sapiens
tctctaggaaatgatacacctgaagaactgagaaagaagttaataaggaagatgaagttaattctgagctcaggttcagatgaggaataagaattagcacrtgacagtgagaaaaagtctgatatggaatggacatccagttcaaagattaatgcgctaatgcacgcattgactgacttaagaaagaagaatcccaacata

SEQ ID NO: 57952 - DNA, 201 bp, Homo sapiens
atgtgagaggcgtgatatctggatggaagttgggctggatgatctccaaagtcgtttcaactcttaaagacatcttaatcctgaatgtaaacaattgttawgtgtttagaatcagaatttgattttgaacttgagtaattcatccttacagctatctgtagaattagtcatcttttttcttttcttttttttttacttttt

SEQ ID NO: 57953 - DNA, 201 bp, Homo sapiens
ttttctgagaaggaccgaccagaaaatgtccatggaggaattttagctgatgatatgggtttgggtaaaactcttacagccattgcagtaatccttaccarcttccatgatggcagacctcttcctattgaaagagttaaaaagaatctactgaagaaggaatataatgttaacgatgactctatgaaacttggaggaaac

SEQ ID NO: 57954 - DNA, 201 bp, Homo sapiens
atagcataaggtggctaagagtgatcctggatgaaggacatgccatacgaaatccaaatgctcagcagacaaaagctgtacttgacttagaatcagaaagragatgggttttgacaggtactccaatccagaattctttaaaggacttgtggtctcttctttcctttttaaaacttaaaccatttattgatagagaatggt

SEQ ID NO: 57955 - DNA, 201 bp, Homo sapiens
accaaatagttattttctatgttggacacttagttatttaccaaagcctccgatttgtgatgcagtgtttgtagtccttgtaaacaatatatacagactakacaagaattaattttattgggctttcaaaaaccatatttgcattccagaaccaaatcttaaatgagaccaaagtccaggttagcacaggtttttattttt

SEQ ID NO: 57956 - DNA, 201 bp, Homo sapiens; identical to SEQ ID NO: 57945

SEQ ID NO: 57957 - DNA, 201 bp, Homo sapiens; identical to SEQ ID NO: 57946

SEQ ID NO: 57958 - DNA, 201 bp, Homo sapiens; identical to SEQ ID NO: 57948

SEQ ID NO: 57959 - DNA, 201 bp, Homo sapiens
gtgggattagcccgctagcattaggagcagttgggaagttacctggtagatcaagcattacacacaaaaaatcaagttgatcagagtatgggttctccatrtagcaatacttcagtgagattaagtataaacagtttttggcaaaaaacaacacagtctactctttctgcttacaaagacaaagccttacaaactcactat

SEQ ID NO: 57960 - DNA, 201 bp, Homo sapiens
caatggcccctcaggaaatgatacacctgaagaactgagaaagaagttaataaggaagatgaagttaattctgagctcaggttcagatgaggaatgtgcartttgcctggattctttaacagttcctgtgataacacattgtgcacatgtattttgtaaaccctgtatttgccaagtcattcagaatgagcagccacatgc

SEQ ID NO: 57961 - DNA, 201 bp, Homo sapiens
caagtcattcagaatgagcagccacatgctaaatgccctttatgcagaaatgatatacatgaagataatttattagaatgtcctccagaagaattagcacrtgacagtgagaaaaagtctgatatggaatggacatccagttcaaagattaatgcgctaatgcacgcattgactgacttaagaaagaagaatcccaacata

SEQ ID NO: 57962 - DNA, 201 bp, Homo sapiens
agttaataaggaagatgaagttaattctgagctcaggttcagatgaggaatgtgcaatttgcctggattctttaacagttcctgtgataacacattgtgcrcatgtattttgtaaaccctgtatttgccaagtcattcagaatgagcagccacatgctaaatgccctttatgcagaaatgatatacatgaagataatttat

SEQ ID NO: 57963 - DNA, 201 bp, Homo sapiens; identical to SEQ ID NO: 57953

SEQ ID NO: 57964 - DNA, 201 bp, Homo sapiens; identical to SEQ ID NO: 57952

SEQ ID NO: 57965 - DNA, 201 bp, Homo sapiens; identical to SEQ ID NO: 57954

SEQ ID NO: 57966 - DNA, 201 bp, Homo sapiens; identical to SEQ ID NO: 57945

SEQ ID NO: 57967 - DNA, 201 bp, Homo sapiens; identical to SEQ ID NO: 57946

SEQ ID NO: 57968 - DNA, 201 bp, Homo sapiens; identical to SEQ ID NO: 57947

SEQ ID NO: 57969 - DNA, 201 bp, Homo sapiens; identical to SEQ ID NO: 57948

SEQ ID NO: 57970 - DNA, 201 bp, Homo sapiens; identical to SEQ ID NO: 57949

SEQ ID NO: 57971 - DNA, 201 bp, Homo sapiens; identical to SEQ ID NO: 57960

SEQ ID NO: 57972 - DNA, 201 bp, Homo sapiens; identical to SEQ ID NO: 57950

SEQ ID NO: 57973 - DNA, 201 bp, Homo sapiens; identical to SEQ ID NO: 57961

SEQ ID NO: 57974 - DNA, 201 bp, Homo sapiens; identical to SEQ ID NO: 57953

SEQ ID NO: 57975 - DNA, 201 bp, Homo sapiens; identical to SEQ ID NO: 57962

SEQ ID NO: 57976 - DNA, 201 bp, Homo sapiens; identical to SEQ ID NO: 57952

SEQ ID NO: 57977 - DNA, 201 bp, Homo sapiens; identical to SEQ ID NO: 57954

SEQ ID NO: 57978 - DNA, 201 bp, Homo sapiens; identical to SEQ ID NO: 57955

SEQ ID NO: 57979 - DNA, 201 bp, Homo sapiens; identical to SEQ ID NO: 57945

SEQ ID NO: 57980 - DNA, 201 bp, Homo sapiens; identical to SEQ ID NO: 57946

SEQ ID NO: 57981 - DNA, 201 bp, Homo sapiens; identical to SEQ ID NO: 57947

SEQ ID NO: 57982 - DNA, 201 bp, Homo sapiens; identical to SEQ ID NO: 57948

SEQ ID NO: 57983 - DNA, 201 bp, Homo sapiens; identical to SEQ ID NO: 57959

SEQ ID NO: 57984 - DNA, 201 bp, Homo sapiens; identical to SEQ ID NO: 57960

SEQ ID NO: 57985 - DNA, 201 bp, Homo sapiens; identical to SEQ ID NO: 57950

SEQ ID NO: 57986 - DNA, 201 bp, Homo sapiens; identical to SEQ ID NO: 57961

SEQ ID NO: 57987 - DNA, 201 bp, Homo sapiens; identical to SEQ ID NO: 57953

SEQ ID NO: 57988 - DNA, 201 bp, Homo sapiens; identical to SEQ ID NO: 57962

SEQ ID NO: 57989 - DNA, 201 bp, Homo sapiens; identical to SEQ ID NO: 57952

SEQ ID NO: 57990 - DNA, 201 bp, Homo sapiens; identical to SEQ ID NO: 57954

SEQ ID NO: 57991 - DNA, 201 bp, Homo sapiens; identical to SEQ ID NO: 57955

SEQ ID NO: 57992 - DNA, 201 bp, Homo sapiens
cagtgggtatgaggtgtgcagggggagctgggtggcttcactccgcccattccaaagagggctctccctccacactgcagccgggagcctctgctgtcctycccagccgcctctgctcctcgggctcatcaccggttctgtgcctgtgctctgttgtgttggagggaaggactggcggttctggtttttactctgtgaact

SEQ ID NO: 57993 - DNA, 201 bp, Homo sapiens
tctctactgagggggctgaagaaaatggcaacagcgacaagaagaagaaggccaagcgagactagcagtcatccagacccctgcccacctagactgttttytgagccctccggacctgagactgagttttgtctttttcctttagccttagcagtgggtatgaggtgtgcagggggagctgggtggcttcactccgcccat

SEQ ID NO: 57994 - DNA, 201 bp, Homo sapiens
gcaagcgaaaactagaggaggtgctctctactgagggggctgaagaaaatggcaacagcgacaagaagaagaaggccaagcgagactagcagtcatccagmcccctgcccacctagactgttttctgagccctccggacctgagactgagttttgtctttttcctttagccttagcagtgggtatgaggtgtgcaggggga

SEQ ID NO: 57995 - DNA, 107 bp, Homo sapiens
gaattgcaacccagtgaagaagttacctggaagtaaagactggctagattatcgaatgttcacattttaaagttctgagagaaataaaaacatgaagaatytgaaat

SEQ ID NO: 57996 - DNA, 128 bp, Homo sapiens
tgttgcccttggtctcggggtcgctgtmggcgctgaggctgcagagactcgctgtatcccccaggctggagtgtagtggcgtcatctcagctcactgcaacctctgcctcccgagttcaagcaattct

SEQ ID NO: 57997 - DNA, 107 bp, Homo sapiens; identical to SEQ ID NO: 57995

SEQ ID NO: 57998 - DNA, 128 bp, Homo sapiens; identical to SEQ ID NO: 57996

SEQ ID NO: 57999 - DNA, 107 bp, Homo sapiens; identical to SEQ ID NO: 57995

SEQ ID NO: 58000 - DNA, 201 bp, Homo sapiens
cgctgtatcccccaggctggagtgtagtggcgtcatctcagctcactgcaacctctgcctcccgagttcaagcaattctcctgcctcagcctcctgagtarctgggactacagctatcatggtgaacttacttcagattgtgcgggaccactgggttcatgttcttgtccctatgggatttgtcattggatgttatttaga

SEQ ID NO: 58001 - DNA, 201 bp, Homo sapiens
cctctgctccgtgcgggcgcggcgaatggcaggtcccgaggtcgcagcttccactggcgcgggttgagttccctgttgcccttggtctcggggtcgctgtmggcgctgaggctgcagctatcatggtgaacttacttcagattgtgcgggaccactgggttcatgttcttgtccctatgggatttgtcattggatgttatt

SEQ ID NO: 58002 - DNA, 107 bp, Homo sapiens; identical to SEQ ID NO: 57995

SEQ ID NO: 58003 - DNA, 201 bp, Homo sapiens
cccacgcctggcctgaagcagggaagacgctgcctcccctccgcgagcagcttacattcgtccaagttccagccttctgtcttctcgctaacctcgctctyttccaaatcgcaaatcctcttgagccgacaccgttgcgcctaaatgatctatcatggtgaacttacttcagattgtgcgggaccactgggttcatgttct

SEQ ID NO: 58004 - DNA, 107 bp, Homo sapiens; identical to SEQ ID NO: 57995

SEQ ID NO: 58005 - DNA, 101 bp, Homo sapiens
caacccagtgaagaagttacctggaagtaaagactggctagattatcgaatgttcacattttaaagttctgagagaaataaaaacatgaagaatctgaaay

SEQ ID NO: 58006 - DNA, 141 bp, Homo sapiens
ctcattttttttttttttagcttccaaacattaccaataayttctgaataaaatttcgctccagacagacgaggcgtgcaggcgtgaccgccgtcgccttccgacagcaccgtgcccaccccccggagatggtctcgccct

SEQ ID NO: 58007 - DNA, 105 bp, Homo sapiens
ctcattttttttttttttagcttccaaacattaccaataatttctgaataaaatttcgctccagacagacgaggcgtgcaggcgtgaccgccgtcgccttccgac

SEQ ID NO: 58008 - DNA, 201 bp, Homo sapiens
agaagtatctgcttgacctttctaagaaaaagggattcttatcttactctgagcttttgatgttttgttttgtaacatacaaaaagaatctgccagaaaamcttacatgtatcagatttttaaaaatataaatagagaacattttgcaaatgctcaaatgagcattctatcttttggctttcagagtgatagagctcctaa

SEQ ID NO: 58009 - DNA, 106 bp, Homo sapiens
ctcattttttttttttttagcttccaaacattaccaataatttctgaataaaatttcgctccagacagacgaggcgtgcaggcgtgaccgccgtcgccttccgaca

SEQ ID NO: 58010 - DNA, 201 bp, Homo sapiens
tcctgtgttaaactgtttagtgctctgtttttaagaaaacaaatgttgaacctcacacttttatgtggtgacagtgtaatttaattaaaaggtgtaaatgktttcatctcttaggcttgctgtctcctaaggtcacccaagcagtggttggattttatacacattactactaaaataatactgaagttggataaggttatc

SEQ ID NO: 58011 - DNA, 107 bp, Homo sapiens
ctcattttttttttttttagcttccaaacattaccaataatttctgaataaaatttcgctccagacagacgaggcgtgcaggcgtgaccgccgtcgccttccgacag

SEQ ID NO: 58012 - DNA, 108 bp, Homo sapiens
ctcattttttttttttttagcttccaaacattaccaataatttctgaataaaatttcgctccagacagacgaggcgtgcaggcgtgaccgccgtcgccttccgacagc

SEQ ID NO: 58013 - DNA, 201 bp, Homo sapiens
aaaaggccatgaaaagtctgttcggagatgatgaaaaagaaacaggtgaagaaagtgagatcattcctactttggaacccttgccacctcatgaggttccwggacatcagtcagtttttatgaatgaaccaaggctgtcagacttcaagcaagttctcttacgggaggggattcaagctgaatttgtaggaggtgtacttg

SEQ ID NO: 58014 - DNA, 168 bp, Homo sapiens
ctcattttttttttttttagcttccaaacattaccaataatttctgaataaaatttcgctccagacaracgaggcgtgcaggcgtgaccgccgtcgccttccgacagcaccgtgcccaccccccggagatggtctcgccctggttcctcctcgtctccgccgctagtc

SEQ ID NO: 58015 - DNA, 201 bp, Homo sapiens; identical to SEQ ID NO: 58008

SEQ ID NO: 58016 - DNA, 201 bp, Homo sapiens; identical to SEQ ID NO: 58010

SEQ ID NO: 58017 - DNA, 201 bp, Homo sapiens; identical to SEQ ID NO: 58013

SEQ ID NO: 58018 - DNA, 201 bp, Homo sapiens
gttttccaagagataacttcaccaagatgtccagtgataggcaaaggtccgatgatgagagccccagcaccagcagtggcagttcagatgcggaccagcgwgacccagccgctccagagcctgaagaacaagaggaaagaaaaccttctgccacccagcagaagaaaaacaccaaactctctagcaaaaccactgctaagt

SEQ ID NO: 58019 - DNA, 201 bp, Homo sapiens
accctgcggatcctctggttggaagcatagccactcagtatttgaccaacagagcagaacacgacaggatagccagacagtggaccaagagatacgcaacrtaattcacataatttgtatgcagtgtgaaggagcagaaggcatcttctcactgtgctgcaaatctttatagcctttacaatacggacttctgtgtatatg

SEQ ID NO: 58020 - DNA, 201 bp, Homo sapiens
ttcccttttgacagactgcaaccctgcggatcctctggttggaagcatagccactcagtatttgaccaacagagcagaacacgacaggatagccagacagwggaccaagagatacgcaacataattcacataatttgtatgcagtgtgaaggagcagaaggcatcttctcactgtgctgcaaatctttatagcctttacaa

SEQ ID NO: 58021 - DNA, 200 bp, Homo sapiens
ttttccaagagataacttcaccaagatgtccagtgataggcaaaggtccgatgatgagagccccagcaccagcagtggcagttcagatgcggaccagcgwgacccagccgctccagagcctgaagaacaagaggaaagaaaaccttctgccacccagcagaagaaaaacaccaaactctctagcaaaaccactgctaagt

SEQ ID NO: 58022 - DNA, 201 bp, Homo sapiens; identical to SEQ ID NO: 58019

SEQ ID NO: 58023 - DNA, 201 bp, Homo sapiens; identical to SEQ ID NO: 58020

SEQ ID NO: 58024 - DNA, 201 bp, Homo sapiens; identical to SEQ ID NO: 58018

SEQ ID NO: 58025 - DNA, 201 bp, Homo sapiens; identical to SEQ ID NO: 58019

SEQ ID NO: 58026 - DNA, 201 bp, Homo sapiens; identical to SEQ ID NO: 58020

SEQ ID NO: 58027 - DNA, 201 bp, Homo sapiens
gcttaaagtataagcctgtggttaaccagattgagtgccacccttacctcactcaggagaagttaatccagtactgccagtccaaaggcatcgtggtgacygcctatagccccgttggcactcccagcaggccctgggtcaaccccgaggacccttccctcctgagggatcccaggatcaaggcgattgcagccaagcaca

SEQ ID NO: 58028 - DNA, 201 bp, Homo sapiens; identical to SEQ ID NO: 58027

SEQ ID NO: 58029 - DNA, 201 bp, Homo sapiens
tggaagaaaaacagaagaaaaagagtgaaaaagagaaatctaaagataaatctcattcataaaaagacatggtgtaaatattttgtatttatgtaaattcagactcattttacatgatatattttttatatttttattactctaaaccctcttattaaaaatatgatatttaaataacatagtaaacacatgtaaaaattt

SEQ ID NO: 58030 - DNA, 201 bp, Homo sapiens
attattctgtcctgtgtaaggacaagacaagtaggattcattgattcagaaaaaagaatgaatgttgcattgactagaggaaagaggcatttgttgattgygggaaatttagcctgtttgaggaaaaatcaactttggggacgagtgatccaacactgcgaaggaagggaagatggattgcaacatgcaaaccagtatgaa

SEQ ID NO: 58031 - DNA, 201 bp, Homo sapiens
ttgctggcagtggtgattttgttctttgtacagctgtttgaaaagagtgaagctcccaccattggaaatgcaaggccgtggaaacttctgatttcttcttstactaatgtggctgttgacagagtacttcttgggcttctcagtcttggatttgaaaactttatcagagttgggagtgttaggaagattgccaaaccaatt

SEQ ID NO: 58032 - DNA, 115 bp, Homo sapiens
ggttttaagtgataytaagagtattggcttatatttaagaagtcaaaagataccactttatgaggaatgccagcttttggtgagaaaaggatttgattttcagagaaaacagtat

SEQ ID NO: 58033 - DNA, 201 bp, Homo sapiens
ttatttttagattcagggtctcgctctgttgcccagggtctgtctctgactgtgctgtggtgcagtcatagctcactgtatccttaaattcctgggctcargtgatcctcctctttcagtctcctgagtagctgggactataagttcatgccaccatgccctactaatgttttaattttatttttgtaaagatgggatctt

SEQ ID NO: 58034 - DNA, 201 bp, Homo sapiens
actgatttgattgtgctggcaaatatactgtattgttaatattgaactgtttatttttctcttagtcttcttatttaattaacttcattgccgctggattmtgttcagcctttaaaaatatttcttagtggtcattgctctgcagaactcaaaaagaaaattgtacttgttcatagacatttttaaagggttaatttattg

SEQ ID NO: 58035 - DNA, 137 bp, Homo sapiens
ttaattttatttttgtaaagatgggatcttcctatgttttccaggccccttggcctcccaaagtgctgggattacagatgtgagccaccgagccaggccaygatatttacattattaaagttaatagttcaaactac

SEQ ID NO: 58036 - DNA, 201 bp, Homo sapiens
ctgctataattatttgtactgttgatcacatgtacttaaaacatctgatactgtattctaagacaggttgtttttgcaattaaatttattttaataagacratcatgaataaaactttaaattgatatttttattattattaccattatcattattattatttttagattcagggtctcgctctgttgcccagggtctgtc

SEQ ID NO: 58037 - DNA, 201 bp, Homo sapiens
tcatcaatggatatgtgttttggatgtatgatatgcttggtttaaattctctttgtccaggtcaaaaatttggaacttgtttcttattttactatgtctakgtttgcaagaattgacataatgtttgtttcactgatttaaaaaattttgcatgtaagaatgtactttaggaaacatacccaggaagtacagttgataaat

SEQ ID NO: 58038 - DNA, 201 bp, Homo sapiens
ttattgtaggttcgtttgagctttgtgttgtaaaattaaaaatgcttctgtaaagttttcaaggtagggagtgattttattattgtgtatatctaatatattaagtatgtgtgatactaaggtttgactgctataattatttgtactgttgatcacatgtacttaaaacatctgatactgtattctaagacaggttgtttt

SEQ ID NO: 58039 - DNA, 201 bp, Homo sapiens
atacaatataacattttactaagttcagtattcatgttttaaaggtgtttatactgatttgattgtgctggcaaatatactgtattgttaatattgaactrtttatttttctcttagtcttcttatttaattaacttcattgccgctggattctgttcagcctttaaaaatatttcttagtggtcattgctctgcagaact

SEQ ID NO: 58040 - DNA, 195 bp, Homo sapiens
agcccctctacctccggaagagacgagtgcggtaacaccgttcacagagctagccggacgtcctccgactcaagatatttgtcaaatattttcaraagatggctgatccttggcaggaatgcatggattatgcagtaactctagcaagacaagctggagaggtagtttgtgaagctataaaaaatgaaatgaatg

SEQ ID NO: 58041 - DNA, 198 bp, Homo sapiens
agcccctctacctccggaagagacgagtgcggtaacaccgttcacagagctagccggacgtcctccgactcaagatatttgtcaaatattttcagaaratggctgatccttggcaggaatgcatggattatgcagtaactctagcaagacaagctggagaggtagtttgtgaagctataaaaaatgaaatgaatgtta

SEQ ID NO: 58042 - DNA, 201 bp, Homo sapiens
tggggaaaaaagtatcttaaccgacaaccccacatggatcattgaccctattgatggaacaactaactttgtacatagatttccttttgtagctgtttcarttggctttgctgtaaataaaaagatagaatttggagttgtgtacagttgtgtggaaggcaagatgtacactgccagaaaaggaaaaggtgccttttgtaa

SEQ ID NO: 58043 - DNA, 201 bp, Homo sapiens
taagttcagtattcatgttttaaaggtgtttatactgatttgattgtgctggcaaatatactgtattgttaatattgaactgtttatttttctcttagtcktcttatttaattaacttcattgccgctggattctgttcagcctttaaaaatatttcttagtggtcattgctctgcagaactcaaaaagaaaattgtactt

SEQ ID NO: 58044 - DNA, 201 bp, Homo sapiens
accaaaaagttgaaaaaatgcttatctcttccataaaggaaaagtatccatctcacagtttcattggtgaagaatctgtggcagctggggaaaaaagtatyttaaccgacaaccccacatggatcattgaccctattgatggaacaactaactttgtacatagatttccttttgtagctgtttcaattggctttgctgtaa

SEQ ID NO: 58045 - DNA, 201 bp, Homo sapiens
agttgtgtacagttgtgtggaaggcaagatgtacactgccagaaaaggaaaaggtgccttttgtaatggtcaaaaactacaagtttcacaacaagaagatrttaccaaatctctcttggtgactgagttgggctcttccagaacaccagagactgtgagaatggttctttctaatatggaaaagcttttttgcattcctgt

SEQ ID NO: 58046 - DNA, 201 bp, Homo sapiens
cattattattatttttagattcagggtctcgctctgttgcccagggtctgtctctgactgtgctgtggtgcagtcatagctcactgtatccttaaattccygggctcaagtgatcctcctctttcagtctcctgagtagctgggactataagttcatgccaccatgccctactaatgttttaattttatttttgtaaagat

SEQ ID NO: 58047 - DNA, 201 bp, Homo sapiens
ttatcattattattatttttagattcagggtctcgctctgttgcccagggtctgtctctgactgtgctgtggtgcagtcatagctcactgtatccttaaaktcctgggctcaagtgatcctcctctttcagtctcctgagtagctgggactataagttcatgccaccatgccctactaatgttttaattttatttttgtaa

SEQ ID NO: 58048 - DNA, 201 bp, Homo sapiens
cattatcattattattatttttagattcagggtctcgctctgttgcccagggtctgtctctgactgtgctgtggtgcagtcatagctcactgtatccttawattcctgggctcaagtgatcctcctctttcagtctcctgagtagctgggactataagttcatgccaccatgccctactaatgttttaattttatttttgt

SEQ ID NO: 58049 - DNA, 201 bp, Homo sapiens
gttaatttattgttcagccttatcccttggcacgtaaacagactactagacttattgtaggttcgtttgagctttgtgttgtaaaattaaaaatgcttctrtaaagttttcaaggtagggagtgattttattattgtgtatatctaatatattaagtatgtgtgatactaaggtttgactgctataattatttgtactgtt

SEQ ID NO: 58050 - DNA, 201 bp, Homo sapiens
ctctgttgcccagggtctgtctctgactgtgctgtggtgcagtcatagctcactgtatccttaaattcctgggctcaagtgatcctcctctttcagtctcytgagtagctgggactataagttcatgccaccatgccctactaatgttttaattttatttttgtaaagatgggatcttcctatgttttccaggccccttgg

SEQ ID NO: 58051 - DNA, 201 bp, Homo sapiens
atttttagattcagggtctcgctctgttgcccagggtctgtctctgactgtgctgtggtgcagtcatagctcactgtatccttaaattcctgggctcaagwgatcctcctctttcagtctcctgagtagctgggactataagttcatgccaccatgccctactaatgttttaattttatttttgtaaagatgggatcttcc

SEQ ID NO: 58052 - DNA, 201 bp, Homo sapiens; identical to SEQ ID NO: 58033

SEQ ID NO: 58053 - DNA, 201 bp, Homo sapiens; identical to SEQ ID NO: 58034

SEQ ID NO: 58054 - DNA, 137 bp, Homo sapiens; identical to SEQ ID NO: 58035

SEQ ID NO: 58055 - DNA, 201 bp, Homo sapiens; identical to SEQ ID NO: 58036

SEQ ID NO: 58056 - DNA, 201 bp, Homo sapiens; identical to SEQ ID NO: 58037

SEQ ID NO: 58057 - DNA, 201 bp, Homo sapiens; identical to SEQ ID NO: 58038

SEQ ID NO: 58058 - DNA, 201 bp, Homo sapiens; identical to SEQ ID NO: 58039

SEQ ID NO: 58059 - DNA, 195 bp, Homo sapiens; identical to SEQ ID NO: 58040

SEQ ID NO: 58060 - DNA, 198 bp, Homo sapiens; identical to SEQ ID NO: 58041

SEQ ID NO: 58061 - DNA, 201 bp, Homo sapiens; identical to SEQ ID NO: 58043

SEQ ID NO: 58062 - DNA, 201 bp, Homo sapiens
accaaaaagttgaaaaaatgcttatctcttccataaaggaaaagtatccatctcacagtttcattggtgaagaatctgtggcagctggggaaaaaagtatyttaaccgacaaccccacatggatcattgaccctattgatggaacaactaactttgtacatagatagaatttggagttgtgtacagttgtgtggaaggcaa

SEQ ID NO: 58063 - DNA, 201 bp, Homo sapiens; identical to SEQ ID NO: 58045

SEQ ID NO: 58064 - DNA, 201 bp, Homo sapiens; identical to SEQ ID NO: 58046

SEQ ID NO: 58065 - DNA, 201 bp, Homo sapiens; identical to SEQ ID NO: 58047

SEQ ID NO: 58066 - DNA, 201 bp, Homo sapiens; identical to SEQ ID NO: 58048

SEQ ID NO: 58067 - DNA, 201 bp, Homo sapiens; identical to SEQ ID NO: 58049

SEQ ID NO: 58068 - DNA, 201 bp, Homo sapiens; identical to SEQ ID NO: 58050

SEQ ID NO: 58069 - DNA, 201 bp, Homo sapiens; identical to SEQ ID NO: 58051

SEQ ID NO: 58070 - DNA, 201 bp, Homo sapiens; identical to SEQ ID NO: 58042

SEQ ID NO: 58071 - DNA, 201 bp, Homo sapiens; identical to SEQ ID NO: 58043

SEQ ID NO: 58072 - DNA, 201 bp, Homo sapiens; identical to SEQ ID NO: 58044

SEQ ID NO: 58073 - DNA, 201 bp, Homo sapiens; identical to SEQ ID NO: 58034

SEQ ID NO: 58074 - DNA, 201 bp, Homo sapiens; identical to SEQ ID NO: 58045

SEQ ID NO: 58075 - DNA, 201 bp, Homo sapiens
atgtgagccaccgagccaggccatgatatttacattattaaagttaatagttcaaactacttttagaggctttgttttgtttttgttttttgaagacagtrtcttgctcttctgctcaaacagtaatgcagtggcatgatcaccattcattgcagtctcaaccttctgggctcaagcagtcctcccacctcagcctcccta

SEQ ID NO: 58076 - DNA, 201 bp, Homo sapiens
ttaattttatttttgtaaagatgggatcttcctatgttttccaggccccttggcctcccaaagtgctgggattacagatgtgagccaccgagccaggccaygatatttacattattaaagttaatagttcaaactacttttagaggctttgttttgtttttgttttttgaagacagtgtcttgctcttctgctcaaacagt

SEQ ID NO: 58077 - DNA, 201 bp, Homo sapiens; identical to SEQ ID NO: 58049

SEQ ID NO: 58078 - DNA, 201 bp, Homo sapiens
ctgctataattatttgtactgttgatcacatgtacttaaaacatctgatactgtattctaagacaggttgtttttgcaattaaatttattttaataagacratcatgaatgagtagctgggactataagttcatgccaccatgccctactaatgttttaattttatttttgtaaagatgggatcttcctatgttttccagg

SEQ ID NO: 58079 - DNA, 201 bp, Homo sapiens; identical to SEQ ID NO: 58037

SEQ ID NO: 58080 - DNA, 201 bp, Homo sapiens; identical to SEQ ID NO: 58038

SEQ ID NO: 58081 - DNA, 195 bp, Homo sapiens; identical to SEQ ID NO: 58040

SEQ ID NO: 58082 - DNA, 201 bp, Homo sapiens; identical to SEQ ID NO: 58039

SEQ ID NO: 58083 - DNA, 198 bp, Homo sapiens; identical to SEQ ID NO: 58041

SEQ ID NO: 58084 - DNA, 101 bp, Homo sapiens
tcaaacagtaatgcagtggcatgatcaccattcattgcagtctcaaccttctgggctcaagcagtcctcccacctcagcctccctagtaactggaaccacy

SEQ ID NO: 58085 - DNA, 201 bp, Homo sapiens; identical to SEQ ID NO: 58033

SEQ ID NO: 58086 - DNA, 201 bp, Homo sapiens; identical to SEQ ID NO: 58043

SEQ ID NO: 58087 - DNA, 201 bp, Homo sapiens; identical to SEQ ID NO: 58034

SEQ ID NO: 58088 - DNA, 139 bp, Homo sapiens
cgttcacagagctagccggacgtcctccgactcaagatrttaccaaatctctcttggtgactgagttgggctcttccagaacaccagagactgtgagaatggttctttctaatatggaaaagcttttttgcattcctgt

SEQ ID NO: 58089 - DNA, 201 bp, Homo sapiens; identical to SEQ ID NO: 58046

SEQ ID NO: 58090 - DNA, 201 bp, Homo sapiens; identical to SEQ ID NO: 58047

SEQ ID NO: 58091 - DNA, 137 bp, Homo sapiens; identical to SEQ ID NO: 58035

SEQ ID NO: 58092 - DNA, 201 bp, Homo sapiens; identical to SEQ ID NO: 58048

SEQ ID NO: 58093 - DNA, 201 bp, Homo sapiens; identical to SEQ ID NO: 58049

SEQ ID NO: 58094 - DNA, 201 bp, Homo sapiens; identical to SEQ ID NO: 58036

SEQ ID NO: 58095 - DNA, 201 bp, Homo sapiens; identical to SEQ ID NO: 58037

SEQ ID NO: 58096 - DNA, 201 bp, Homo sapiens; identical to SEQ ID NO: 58038

SEQ ID NO: 58097 - DNA, 201 bp, Homo sapiens; identical to SEQ ID NO: 58039

SEQ ID NO: 58098 - DNA, 201 bp, Homo sapiens; identical to SEQ ID NO: 58050

SEQ ID NO: 58099 - DNA, 201 bp, Homo sapiens; identical to SEQ ID NO: 58051

SEQ ID NO: 58100 - DNA, 201 bp, Homo sapiens; identical to SEQ ID NO: 58033

SEQ ID NO: 58101 - DNA, 201 bp, Homo sapiens; identical to SEQ ID NO: 58034

SEQ ID NO: 58102 - DNA, 137 bp, Homo sapiens; identical to SEQ ID NO: 58035

SEQ ID NO: 58103 - DNA, 201 bp, Homo sapiens; identical to SEQ ID NO: 58036

SEQ ID NO: 58104 - DNA, 201 bp, Homo sapiens; identical to SEQ ID NO: 58037

SEQ ID NO: 58105 - DNA, 201 bp, Homo sapiens; identical to SEQ ID NO: 58038

SEQ ID NO: 58106 - DNA, 201 bp, Homo sapiens; identical to SEQ ID NO: 58039

SEQ ID NO: 58107 - DNA, 195 bp, Homo sapiens; identical to SEQ ID NO: 58040

SEQ ID NO: 58108 - DNA, 198 bp, Homo sapiens; identical to SEQ ID NO: 58041

SEQ ID NO: 58109 - DNA, 201 bp, Homo sapiens
tgatttggtaactgctacggaccaaaaagttgaaaaaatgcttatctcttccataaaggaaaagtatccatctcacagatttccttttgtagctgtttcarttggctttgctgtaaataaaaagatagaatttggagttgtgtacagttgtgtggaaggcaagatgtacactgccagaaaaggaaaaggtgccttttgtaa

SEQ ID NO: 58110 - DNA, 201 bp, Homo sapiens; identical to SEQ ID NO: 58043

SEQ ID NO: 58111 - DNA, 201 bp, Homo sapiens; identical to SEQ ID NO: 58045

SEQ ID NO: 58112 - DNA, 201 bp, Homo sapiens; identical to SEQ ID NO: 58046

SEQ ID NO: 58113 - DNA, 201 bp, Homo sapiens; identical to SEQ ID NO: 58047

SEQ ID NO: 58114 - DNA, 201 bp, Homo sapiens; identical to SEQ ID NO: 58048

SEQ ID NO: 58115 - DNA, 201 bp, Homo sapiens; identical to SEQ ID NO: 58049

SEQ ID NO: 58116 - DNA, 201 bp, Homo sapiens; identical to SEQ ID NO: 58050

SEQ ID NO: 58117 - DNA, 201 bp, Homo sapiens; identical to SEQ ID NO: 58051

SEQ ID NO: 58118 - DNA, 201 bp, Homo sapiens; identical to SEQ ID NO: 58033

SEQ ID NO: 58119 - DNA, 201 bp, Homo sapiens; identical to SEQ ID NO: 58034

SEQ ID NO: 58120 - DNA, 201 bp, Homo sapiens; identical to SEQ ID NO: 58036

SEQ ID NO: 58121 - DNA, 201 bp, Homo sapiens; identical to SEQ ID NO: 58037

SEQ ID NO: 58122 - DNA, 201 bp, Homo sapiens; identical to SEQ ID NO: 58038

SEQ ID NO: 58123 - DNA, 201 bp, Homo sapiens; identical to SEQ ID NO: 58039

SEQ ID NO: 58124 - DNA, 195 bp, Homo sapiens; identical to SEQ ID NO: 58040

SEQ ID NO: 58125 - DNA, 198 bp, Homo sapiens; identical to SEQ ID NO: 58041

SEQ ID NO: 58126 - DNA, 201 bp, Homo sapiens; identical to SEQ ID NO: 58043

SEQ ID NO: 58127 - DNA, 201 bp, Homo sapiens
gaatgcatggattatgcagtaactctagcaagacaagctggagaggtagtttgtgaagctataaaaaatgaaatgaatgttatgctggggaaaaaagtatyttaaccgacaaccccacatggatcattgaccctattgatggaacaactaactttgtacatagatttggtgactcatcaatggatatgtgttttggatgta

SEQ ID NO: 58128 - DNA, 201 bp, Homo sapiens; identical to SEQ ID NO: 58046

SEQ ID NO: 58129 - DNA, 201 bp, Homo sapiens; identical to SEQ ID NO: 58047

SEQ ID NO: 58130 - DNA, 201 bp, Homo sapiens; identical to SEQ ID NO: 58048

SEQ ID NO: 58131 - DNA, 201 bp, Homo sapiens; identical to SEQ ID NO: 58049

SEQ ID NO: 58132 - DNA, 180 bp, Homo sapiens
ctctgttgcccagggtctgtctctgactgtgctgtggtgcagtcatagctcactgtatccttaaattcctgggctcaagtgatcctcctctttcagtctcytgagtagctgggactataagttcatgccaccatgccctactaatgttttaattttatttttgtaaagatgggatcttcc

SEQ ID NO: 58133 - DNA, 201 bp, Homo sapiens; identical to SEQ ID NO: 58051

SEQ ID NO: 58134 - DNA, 178 bp, Homo sapiens
attttgctcattctttaaaaacctacgaattttaaaaatcaaactttaaaaaactttttgtttttttttttaaaaaaacggcagcgtaatacaatatttggacacgctatactatgggctttgaagaacgcctgtccagaacacccaacaagctccattatgtcaaacgctcccgcgc

SEQ ID NO: 58135 - DNA, 201 bp, Homo sapiens
ccattatgtcaaacgctcccgcgcctctgtgatgtcaccacgacgcgctgggcgctctgcgacttggcagacgtcgtgcgtcattaccaacgaggcgcagkggtcaggacgactctcggcagcgccattgcgcgccctctagtggcagccggttttgaggccggcctccggctttgaagttcctcaccgcgtctccttccc

SEQ ID NO: 58136 - DNA, 201 bp, Homo sapiens
tgatttatttatgaagaataaactactatagaaagtactttgtgggaacctttattactgtgaaggagaaaaatagctatttcttgacagttctatagttwtacacataaattttcaaaataaagaataccatactacacaatgatctctgattttgctgagggaaggaattatatatgtgccactttttcctcaaatttc

SEQ ID NO: 58137 - DNA, 201 bp, Homo sapiens
gaggaacaggtgaaccgcagcgccggcctggcccccgactgtgaggcctcggcgactgcagaaactacggtttcctcagtggggacctgtgaagccgctgscaagtcaccagagcccaaggactacgacagcacctgcgtgttctgccggatcgcggggcggcaggacccgggcaccgaactcctgcactgcgagaatgag

SEQ ID NO: 58138 - DNA, 201 bp, Homo sapiens
tccagcctgggtgacagagtgagactttgtctcaaagaaaaaaaaacaataataggtaaagtatttaaggaattctcagatgccttatggacctcttcaaraatgtggttagccaattgattcaacttttataggtttatatgctctcatgtaaacctatttgtttccgagatcagacgagatcgggcgcgttcagggtgg

SEQ ID NO: 58139 - DNA, 178 bp, Homo sapiens; identical to SEQ ID NO: 58134

SEQ ID NO: 58140 - DNA, 201 bp, Homo sapiens; identical to SEQ ID NO: 58135

SEQ ID NO: 58141 - DNA, 201 bp, Homo sapiens; identical to SEQ ID NO: 58136

SEQ ID NO: 58142 - DNA, 201 bp, Homo sapiens
gaggaacaggtgaaccgcagcgccggcctggcccccgactgtgaggcctcggcgactgcagaaactacggtttcctcagtggggacctgtgaagccgctgscaagtcaccagagcccaaggactacgacagcacctgcgtgttctgccggatcgcggggcggcaggacccgggcaccgaactcctgcactgcgaggtgggc

SEQ ID NO: 58143 - DNA, 201 bp, Homo sapiens; identical to SEQ ID NO: 58138

SEQ ID NO: 58144 - DNA, 201 bp, Homo sapiens
gagaagttattcatgtgaagatccttggaattttggctcttattgatgaaggtgaaacagattggaaattaattgctatcaatgcgaatgatcctgaagcytcaaagtttcatgatattgatgatgttaagaagttcaaaccgggttacctggaagctactcttaattggtttagattatataaggtaccagatggaaaac

SEQ ID NO: 58145 - DNA, 201 bp, Homo sapiens
aaaaccagtttgcttttaatggagaattcaaaaacaaggcttttgctcttgaagttattaaatccactcatcaatgttggaaagcattgcttatgaagaastgtaatggaggagctataaattgcacaaacgtgcagatatctgatagccctttccgttgcactcaagaggaagcaagatcattagttgaatcggtatcat

SEQ ID NO: 58146 - DNA, 201 bp, Homo sapiens
gcacttccttggcaagtgattgaaacatctgaaattctgctgtcaagattcccatctctaaggactccaagtgctagagacaagggggtctatgagcattyactgacttcctgttaaaacttcattttttcaaactttttgagctatgcaatatataaataaacagtaagaattttaaattactctcctttggacatttat

SEQ ID NO: 58147 - DNA, 196 bp, Homo sapiens
tccgcgcgcacagcaggaccgtcattgacgccatgagcgcgctgctgcggctgctgcgcacgggtgccccagccgctgcgtgcctgcggttggggrccagtgcagggaccgggtcgcgccgtgctatggccctgtaccacactgaggagcgcggccagccctgctcgcagaattaccgcctcttctttaagaatgt

SEQ ID NO: 58148 - DNA, 159 bp, Homo sapiens
tccgcgcgcacagcaggaccgtcattgacgccatgagcgcgctgctgcggctgctgcgyacgggtgccccagccgctgcgtgcctgcggttggggaccagtgcagggaccgggtcgcgccgtgctatggccctgtaccacactgaggagcgcggccagc

SEQ ID NO: 58149 - DNA, 201 bp, Homo sapiens; identical to SEQ ID NO: 58144

SEQ ID NO: 58150 - DNA, 201 bp, Homo sapiens; identical to SEQ ID NO: 58145

SEQ ID NO: 58151 - DNA, 201 bp, Homo sapiens; identical to SEQ ID NO: 58146

SEQ ID NO: 58152 - DNA, 159 bp, Homo sapiens; identical to SEQ ID NO: 58148

SEQ ID NO: 58153 - DNA, 196 bp, Homo sapiens; identical to SEQ ID NO: 58147

SEQ ID NO: 58154 - DNA, 201 bp, Homo sapiens; identical to SEQ ID NO: 58144

SEQ ID NO: 58155 - DNA, 201 bp, Homo sapiens; identical to SEQ ID NO: 58145

SEQ ID NO: 58156 - DNA, 201 bp, Homo sapiens
accagtgcagggaccgggtcgcgccgtgctatggccctgtaccacactgaggagcgcggccagccctgctcgcagaattaccgcctcttctttacggtagycgcgcggtccaggccaccttacttcccgcgggagcgcgcaccgagtcacgagaactgccagcgaggaggcggcggatcaagaccccaaagcggagagcag

SEQ ID NO: 58157 - DNA, 201 bp, Homo sapiens
caccaaataaagaaagtaatgaagaagacagggtctcactcctgccacccagactgtagtgcagtggtgatcatggctcactgcagcctcggcttcctgarctcaggtgatcttctccctcagcctcacaagtagctggaactacagatactgcaacatggaagtggagtcaatacatactaatatagtggccaggcacac

SEQ ID NO: 58158 - DNA, 164 bp, Homo sapiens
atgagcgcgctgctgcggctgctgcgcacgggtgccccagccgctgcgtgcctgcggttggggrccagtgcagggaccgggtcgcgccgtgctatggccctgtaccacactgaggagcgcggccagccctgctcgcagaattaccgcctcttctttacggtagc

SEQ ID NO: 58159 - DNA, 127 bp, Homo sapiens
atgagcgcgctgctgcggctgctgcgyacgggtgccccagccgctgcgtgcctgcggttggggaccagtgcagggaccgggtcgcgccgtgctatggccctgtaccacactgaggagcgcggccagc

SEQ ID NO: 58160 - DNA, 201 bp, Homo sapiens; identical to SEQ ID NO: 58145

SEQ ID NO: 58161 - DNA, 201 bp, Homo sapiens; identical to SEQ ID NO: 58146

SEQ ID NO: 58162 - DNA, 158 bp, Homo sapiens
gcgctgctgcggctgctgcgcacgggtgccccagccgctgcgtgcctgcggttggggrccagtgcagggaccgggtcgcgccgtgctatggccctgtaccacactgaggagcgcggccagccctgctcgcagaattaccgcctcttctttaatattga

SEQ ID NO: 58163 - DNA, 121 bp, Homo sapiens
gcgctgctgcggctgctgcgyacgggtgccccagccgctgcgtgcctgcggttggggaccagtgcagggaccgggtcgcgccgtgctatggccctgtaccacactgaggagcgcggccagc

SEQ ID NO: 58164 - DNA, 201 bp, Homo sapiens; identical to SEQ ID NO: 58144

SEQ ID NO: 58165 - DNA, 201 bp, Homo sapiens; identical to SEQ ID NO: 58145

SEQ ID NO: 58166 - DNA, 201 bp, Homo sapiens; identical to SEQ ID NO: 58146

SEQ ID NO: 58167 - DNA, 159 bp, Homo sapiens; identical to SEQ ID NO: 58148

SEQ ID NO: 58168 - DNA, 196 bp, Homo sapiens; identical to SEQ ID NO: 58147

SEQ ID NO: 58169 - DNA, 201 bp, Homo sapiens
tcagtgcctggggtcggtgtcttgggttccagcttcggcttctggccagaaatccctcatcacacagcctggtactcaccttgtgtgtccctgggacgtargaagagtgcagccggctacaacctcacggggctcttcgtgggctccgaggggacgctgggcctcatcacagccaccaccctgcgcctgcaccctgcccct

SEQ ID NO: 58170 - DNA, 201 bp, Homo sapiens
cagccaccaccctgcgcctgcaccctgcccctgaggccacagtggccgccacgtgtgcgttccccagtgtccaggctgctgtggacagcactgtacacatyctccaggctgcagtgcccgtagcccgcattgagttcctggatgaagtcatgatggatgcctgcaacaggtacagcaagctgaattgcttagtggcgccca

SEQ ID NO: 58171 - DNA, 201 bp, Homo sapiens
tgaaccaggaggacttctctgtggtggtggagccaggtgtcacccgcaaagccctcaacgcccacctgcgggacagcggcctctggtttcccgtggacccrggcgcggacgcctctctctgtggcatggcggccaccggggcgtcggggaccaacgcggtccgctacggcaccatgcgggacaacgtgctcaacctggagg

SEQ ID NO: 58172 - DNA, 201 bp, Homo sapiens
atgcctcaggactcacaggaagcattgtcgggcatgtgggtgacggcaacttccactgcatcctgctggtcaaccctgatgacgccgaggaactgggcagsgtcaaggcttttgcagaacagctgggcaggcgggcactggctctccacggaacgtgcacgggggagcatggcatcggaatgggcaagcggcagctgctgc

SEQ ID NO: 58173 - DNA, 201 bp, Homo sapiens
cgctacggcaccatgcgggacaacgtgctcaacctggaggtggtgctgcccgacgggcggctgctgcacacggcgggccgaggccggcatttccggtgagygccctctgcggggggcccgggctctggccctgggcactgctggcgggctgccctgcagagaccgggctgtgaaaagcacctcctggcggccccctggttt

SEQ ID NO: 58174 - DNA, 201 bp, Homo sapiens
ctggaggtggtgctgcccgacgggcggctgctgcacacggcgggccgaggccggcatttccggtgagcgccctctgcggggggcccgggctctggccctgrgcactgctggcgggctgccctgcagagaccgggctgtgaaaagcacctcctggcggccccctggtttggcaggctaggcttcctcaggctctgaagccct

SEQ ID NO: 58175 - DNA, 201 bp, Homo sapiens
atggcatcggaatgggcaagcggcagctgctgcaggaggaggtgggcgccgtgggcgtggagaccatgcggcagctcaaggccgtgctagacccccaaggyctcatgaatccaggcaaagtgctgtgaagggggtctgagcacttagcccacaagttccctgactacggagccggttctggaacttttcttcatgccacgg

SEQ ID NO: 58176 - DNA, 108 bp, Homo sapiens
agcagtakctgctgccacagtagctgactggtcaccctgccacccagtgctcacaccctctggccagtgcctggctatggcccgactgctcaggtctgcaacctggga

SEQ ID NO: 58177 - DNA, 201 bp, Homo sapiens
ccatgcgggacaacgtgctcaacctggaggtggtgctgcccgacgggcggctgctgcacacggcgggccgaggccggcatttccggtgagcgccctctgcsgggggcccgggctctggccctgggcactgctggcgggctgccctgcagagaccgggctgtgaaaagcacctcctggcggccccctggtttggcaggctag

SEQ ID NO: 58178 - DNA, 173 bp, Homo sapiens
cctccccgaggcctcccactgccggggtcccaggacccttcccccttcacctggtgacaggaacactcctttcctggtatggaacgtgagctcccgtgacatgatgataggtcttctccttggggcctcccccaataaatctgtaataaacctgaaacccacctacagctacc

SEQ ID NO: 58179 - DNA, 172 bp, Homo sapiens
ctccccgaggcctcccactgccggggtcccaggacccttcccccttcacctggtgacaggaacactcctttcctggtatggaacgtgagctcccgtgacatgatgataggtcttctccttggggcctcccccaataaatctgtaataaacctgaaacccacctacagctacc

SEQ ID NO: 58180 - DNA, 171 bp, Homo sapiens
tccccgaggcctcccactgccggggtcccaggacccttcccccttcacctggtgacaggaacactcctttcctggtatggaacgtgagctcccgtgacatgatgataggtcttctccttggggcctcccccaataaatctgtaataaacctgaaacccacctacagctacc

SEQ ID NO: 58181 - DNA, 201 bp, Homo sapiens
cggtccgctacggcaccatgcgggacaacgtgctcaacctggaggtggtgctgcccgacgggcggctgctgcacacggcgggccgaggccggcatttccgraagagtgcagccggctacaacctcacggggctcttcgtgggctccgaggggacgctgggcctcatcacagccaccaccctgcgcctgcaccctgcccctg

SEQ ID NO: 58182 - DNA, 201 bp, Homo sapiens; identical to SEQ ID NO: 58170

SEQ ID NO: 58183 - DNA, 201 bp, Homo sapiens; identical to SEQ ID NO: 58171

SEQ ID NO: 58184 - DNA, 201 bp, Homo sapiens; identical to SEQ ID NO: 58172

SEQ ID NO: 58185 - DNA, 201 bp, Homo sapiens; identical to SEQ ID NO: 58175

SEQ ID NO: 58186 - DNA, 108 bp, Homo sapiens; identical to SEQ ID NO: 58176

SEQ ID NO: 58187 - DNA, 173 bp, Homo sapiens; identical to SEQ ID NO: 58178

SEQ ID NO: 58188 - DNA, 172 bp, Homo sapiens; identical to SEQ ID NO: 58179

SEQ ID NO: 58189 - DNA, 171 bp, Homo sapiens; identical to SEQ ID NO: 58180

SEQ ID NO: 58190 - DNA, 201 bp, Homo sapiens
ctgcacacggcgggccgaggccggcatttccgcttcggcttctggccagaaatccctcatcacacagcctggtactcaccttgtgtgtccctgggacgtargaagagtgcagccggctacaacctcacggggctcttcgtgggctccgaggggacgctgggcctcatcacagccaccaccctgcgcctgcaccctgcccct

SEQ ID NO: 58191 - DNA, 201 bp, Homo sapiens; identical to SEQ ID NO: 58170

SEQ ID NO: 58192 - DNA, 201 bp, Homo sapiens; identical to SEQ ID NO: 58171

SEQ ID NO: 58193 - DNA, 201 bp, Homo sapiens; identical to SEQ ID NO: 58172

SEQ ID NO: 58194 - DNA, 201 bp, Homo sapiens; identical to SEQ ID NO: 58175

SEQ ID NO: 58195 - DNA, 108 bp, Homo sapiens; identical to SEQ ID NO: 58176

SEQ ID NO: 58196 - DNA, 173 bp, Homo sapiens; identical to SEQ ID NO: 58178

SEQ ID NO: 58197 - DNA, 172 bp, Homo sapiens; identical to SEQ ID NO: 58179

SEQ ID NO: 58198 - DNA, 171 bp, Homo sapiens; identical to SEQ ID NO: 58180

SEQ ID NO: 58199 - DNA, 201 bp, Homo sapiens
cacccttcgacggctcccgcctggtcttcccccctgtgccagcctccctggtgatcggcgtcttctacttgtgcatgcagctcatcctgcctgaggcagtrgggggcactgtgtttgcggggggcctcctgggctacgtcctctatgacatgacccattactacctgcactttggctcgccgcacaagggctcctacctgt

SEQ ID NO: 58200 - DNA, 117 bp, Homo sapiens
tgtactgtttgctgcggagctatttaaagattttggaataaatatacaaaactacggttgtgaaataaaaacttaaattgtatattttgaaaaataaaacmctgaaaagaaaccaac

SEQ ID NO: 58201 - DNA, 201 bp, Homo sapiens
accacaaggcacccttcgacggctcccgcctggtcttcccccctgtgccagcctccctggtgatcggcgtcttctacttgtgcatgcagctcatcctgccygaggcagtagggggcactgtgtttgcggggggcctcctgggctacgtcctctatgacatgacccattactacctgcactttggctcgccgcacaagggct

SEQ ID NO: 58202 - DNA, 201 bp, Homo sapiens
ccctggtgatcggcgtcttctacttgtgcatgcagctcatcctgcctgaggcagtagggggcactgtgtttgcggggggcctcctgggctacgtcctctaygacatgacccattactacctgcactttggctcgccgcacaagggctcctacctgtacagcctgaaggcccaccacgtcaagcaccactttgcacatcaga

SEQ ID NO: 58203 - DNA, 201 bp, Homo sapiens
tttctaatcctacatgttgagcttatgtaaaaaatgttgtttcctcctgtttttggttcctttcttacccacaaaccattactacttgaaacttaaaaaastcgccaagtgtaaaggctaaagagaagcagtttgacggaccttgtgatttgtactgtttgctgcggagctatttaaagattttggaataaatatacaaaa

SEQ ID NO: 58204 - DNA, 201 bp, Homo sapiens
cccggggggcgagcagctgctgcgggccagggcgggccaggacatcagcgccgacctggacgggccgccgcacaggcactcggccaacgcgcgccgctggytggagcagtactacgtgggagagctccgcggggagcagcagggctccatggagaacgagcctgtagcccttgaggaaactcagaagacagatcctgctat

SEQ ID NO: 58205 - DNA, 201 bp, Homo sapiens
cgggccgccgcacaggcactcggccaacgcgcgccgctggctggagcagtactacgtgggagagctccgcggggagcagcagggctccatggagaacgagsctgtagcccttgaggaaactcagaagacagatcctgctatggaaccacggttcaaagtggtggattgggacaaggacctggtggactggcgaaagcctct

SEQ ID NO: 58206 - DNA, 201 bp, Homo sapiens; identical to SEQ ID NO: 58199

SEQ ID NO: 58207 - DNA, 121 bp, Homo sapiens
tgtactgtttgctgcggagctatttaaagattttggaataaatatacaaaactacggttgtgaaataaaaacttaaattgtatattttgaaaaataaaacmctgaaaagaaaccaacaaaa

SEQ ID NO: 58208 - DNA, 201 bp, Homo sapiens; identical to SEQ ID NO: 58201

SEQ ID NO: 58209 - DNA, 201 bp, Homo sapiens; identical to SEQ ID NO: 58202

SEQ ID NO: 58210 - DNA, 201 bp, Homo sapiens; identical to SEQ ID NO: 58203

SEQ ID NO: 58211 - DNA, 201 bp, Homo sapiens; identical to SEQ ID NO: 58204

SEQ ID NO: 58212 - DNA, 201 bp, Homo sapiens; identical to SEQ ID NO: 58205

SEQ ID NO: 58213 - DNA, 201 bp, Homo sapiens
caccaccggggttgactccgggggcgcggcgaggagagacatgaggctgagctggttccgggtcctgacagtactgtccatctgcctgagcgccgtggccrcggccacgggggccgagggcaaaaggaagctgcagatcggggtcaagaagcgggtggaccactgtcccatcaaatcgcgcaaaggggatgtcctgcacat

SEQ ID NO: 58214 - DNA, 201 bp, Homo sapiens
accaggggctgctggggatgtgtgagggggaaaagcgcaagctggtgatcccatccgagctagggtatggagagcggggagctcccccaaagattccaggyggtgcaaccctggtgttcgaggtggagctgctcaaaatagagcgacgaactgagctgtaaccagactggggaggggcagggggagaggcccccatcaggg

SEQ ID NO: 58215 - DNA, 201 bp, Homo sapiens
ggcctggtagcgacgaggacgcgcctgcgcagaggcggcagcaccaccggggttgactccgggggcgcggcgaggagagacatgaggctgagctggttccrggtcctgacagtactgtccatctgcctgagcgccgtggccacggccacgggggccgagggcaaaaggaagctgcagatcggggtcaagaagcgggtggac

SEQ ID NO: 58216 - DNA, 172 bp, Homo sapiens
gggcagggggagaggcccccatcagggaccagactgttccaaaaaaaaaacaaaaaacaaaaacaaacaaaaaaacacttaaaagcccaaggagtaagcctgtgtgtgtttgtgggccctgagagactcagagacctcagctccagcataccccaccaccttctcctttccc

SEQ ID NO: 58217 - DNA, 201 bp, Homo sapiens
gttcgaggtggagctgctcaaaatagagcgacgaactgagctgtaaccagactggggaggggcagggggagaggcccccatcagggaccagactgttccaraaaaaaaacaaaaaacaaaaacaaacaaaaaaacacttaaaagcccaaggagtaagcctgtgtgtgtttgtgggccctgagagactcagagacctcagct

SEQ ID NO: 58218 - DNA, 171 bp, Homo sapiens
ggcagggggagaggcccccatcagggaccagactgttccaaaaaaaaaacaaaaaacaaaaacaaacaaaaaaacacttaaaagcccaaggagtaagcctgtgtgtgtttgtgggccctgagagactcagagacctcagctccagcataccccaccaccttctcctttccc

SEQ ID NO: 58219 - DNA, 201 bp, Homo sapiens
tggggtcctcggccaagcccccttctcactggactgagacatgaggctgagctggttccgggtcctgacagtactgtccatctgcctgagcgccgtggccrcggccacgggggccgagggcaaaaggaagctgcagatcggggtcaagaagcgggtggaccactgtcccatcaaatcgcgcaaaggggatgtcctgcacat

SEQ ID NO: 58220 - DNA, 201 bp, Homo sapiens; identical to SEQ ID NO: 58214

SEQ ID NO: 58221 - DNA, 201 bp, Homo sapiens
cctggctgctgtggcctcccctgaccccctccccccgctgctggggtcctcggccaagcccccttctcactggactgagacatgaggctgagctggttccrggtcctgacagtactgtccatctgcctgagcgccgtggccacggccacgggggccgagggcaaaaggaagctgcagatcggggtcaagaagcgggtggac

SEQ ID NO: 58222 - DNA, 172 bp, Homo sapiens; identical to SEQ ID NO: 58216

SEQ ID NO: 58223 - DNA, 201 bp, Homo sapiens; identical to SEQ ID NO: 58217

SEQ ID NO: 58224 - DNA, 171 bp, Homo sapiens; identical to SEQ ID NO: 58218

SEQ ID NO: 58225 - DNA, 201 bp, Homo sapiens
accgtcttgtggctgggcagcagcaggtcctgcaacagctggcagaagaggagcccaagctgctggcccagctggcccaggagtgtcaggagcagcgggcraggctcccccaggagatccgccggagcctgctgggcgagatgccggaggggctgggggacgggcctctggtggcctgtgccagcaacggtcacgcacccg

SEQ ID NO: 58226 - DNA, 201 bp, Homo sapiens
ctgaggaggaacccttcattacccacggcttcaccatgaccacagaggtgcctctgcgcgacgtgctggaggccattgccgagactgccttcaagacctcrccctaccccgtcatcctctccttcgagaaccatgtggactcggcaaagcaacaggcaaagatggctgagtactgccgctccatctttggagacgcgctac

SEQ ID NO: 58227 - DNA, 201 bp, Homo sapiens
gcctgcccaaggaccccaagatccgggaagttctgggctttgggggtcccgatgcccggctggaggagaagctgatgacggtggtgtctgggccagacccrgtgaacacagtgttcttgaacttcatggccgtgcaggatgacacagccaaggtctggtctgaggagctattcaagctggctatgaacatcctggctcaga

SEQ ID NO: 58228 - DNA, 201 bp, Homo sapiens
ccctaggtggggccgctgatgtggaggacacgaaggagggggaggacgaggcaaagcggtatcaggagttccagaacagacaggtgcagagcctgctggarctgcgggaggcccaggtggacgcagaggcccagcggaggctggaacacctgagacaggctctgcagcggctcagggaggtcgtccttgatgcaaacacaa

SEQ ID NO: 58229 - DNA, 201 bp, Homo sapiens
tgacgctggagcagctcatggacttcatcaaccagaagcaacgcgacccgagactcaacgaagtgctgtacccgcccctgcggccctcccaggcccggctrctcatcgaaaagtatgagcccaaccagcagtttctggagcgagaccagatgtccatggagggctttagccgctacctgggaggcgaggagaatggcatcc

SEQ ID NO: 58230 - DNA, 201 bp, Homo sapiens
cctgtctctgccatccgctccggataccactacgtctgcctgcggaacgaggccaaccaaccgctgtgcctgccggccctgctcatctacaccgaagcctyggactacattcctgacgaccaccaggactatgcggaggccctgatcaaccccattaagcacgtcagcctgatggaccagagggcccggcagctggccgcc

SEQ ID NO: 58231 - DNA, 201 bp, Homo sapiens
aagctgtgtctgcggccggacattgacaagatcctgctggagataggcgccaagggcaagccatacctgacgctggagcagctcatggacttcatcaaccrgaagcaacgcgacccgagactcaacgaagtgctgtacccgcccctgcggccctcccaggcccggctgctcatcgaaaagtatgagcccaaccagcagttt

SEQ ID NO: 58232 - DNA, 201 bp, Homo sapiens
cctgtggcctcaaattcaaccggagtgagtccatccggcctgatgagttttccttggaaatctttgagcggttcctgaacaagctgtgtctgcggccggayattgacaagatcctgctggagataggcgccaagggcaagccatacctgacgctggagcagctcatggacttcatcaaccagaagcaacgcgacccgagac

SEQ ID NO: 58233 - DNA, 201 bp, Homo sapiens
agaagtaattggcctttctgagctgatttttccatcttttgtaattatctttattaaaaaattgtacttggattatcttttgtctgtttattactacaatrtgaagtcttgtttcagtggctaatgacatcatttctgtagacttacaatacactctaggtgaaagataatgattacagcttgaaagataactatttgctg

SEQ ID NO: 58234 - DNA, 201 bp, Homo sapiens
ggtatcattccataaatatggggaatactttcctggcacaggagacttgagggatattggtgctggaaaaggcaaatactatgctgtcaattttccaatgwgagatggtatagatgatgagtcatatgggcagatatttaagcctattatctcaaaggtgatggagatgtatcaacctagtgctgtggtattacagtgtgg

SEQ ID NO: 58235 - DNA, 201 bp, Homo sapiens
tatcattccataaatatggggaatactttcctggcacaggagacttgagggatattggtgctggaaaaggcaaatactatgctgtcaattttccaatgagwgatggtatagatgatgagtcatatgggcagatatttaagcctattatctcaaaggtgatggagatgtatcaacctagtgctgtggtattacagtgtggtg

SEQ ID NO: 58236 - DNA, 201 bp, Homo sapiens
gactgtatttattttcaaatggctttttcgtttttgtttttcttggcaagttttattgtgagtttttctaattatgaagcaaaatttcttttctccaccakgctttatgtgatagtatttaaaattgatgtgagttattatgtcaaaaaaactgatctattaaagaagtaattggcctttctgagctgatttttccatctt

SEQ ID NO: 58237 - DNA, 201 bp, Homo sapiens; identical to SEQ ID NO: 58233

SEQ ID NO: 58238 - DNA, 201 bp, Homo sapiens; identical to SEQ ID NO: 58234

SEQ ID NO: 58239 - DNA, 201 bp, Homo sapiens; identical to SEQ ID NO: 58235

SEQ ID NO: 58240 - DNA, 201 bp, Homo sapiens; identical to SEQ ID NO: 58236

SEQ ID NO: 58241 - DNA, 192 bp, Homo sapiens
gactccagtgtttcccctggaagttccttggcctcctctccattctccctggcctctgcctggcccccagcttcccctctgggcccgggggcatctccttyagcctctgcctggcccccagcttcccctctgggcccaggggcatctcctttagcctctgcctggccctcagcttcccctctgggccctgga

SEQ ID NO: 58242 - DNA, 201 bp, Homo sapiens
tttgggtgttcttagactccagtgtttcccctggaagttccttggcctcctctccattctccctggcctctgcctggcccccagcttcccctctgggcccrggggcatctccttcagcctctgcctggcccccagcttcccctctgggcccaggggcatctcctttagcctctgcctggccctcagcttcccctctgggcc

SEQ ID NO: 58243 - DNA, 201 bp, Homo sapiens
gaggcccagaaacactgggcaggcggcatccctgtcctttcggtccccaaccccgttcctctgagagggtctgggcaggctggacgggtagagaggtggccggggggatgaattcattcagttctttattggtaatctgccccttaacttagggtctccctgagctgcacagaaagacctgatacctactgggaccaggca

SEQ ID NO: 58244 - DNA, 201 bp, Homo sapiens
cggcggaggcgtggcctcggctgggactaaccggggcggggcggggcggggcggggcggggccgccgcgaccgcgggcttcaggcagggctgcagatgcgmggcccagctgtacctcgcgtgtcccgggtcgggagtcggagacgcaggtgcaggagagtgcggggcaagtagcgcattttctctttgcattctcgagatc

SEQ ID NO: 58245 - DNA, 201 bp, Homo sapiens
gctccactcggatgctttcccgccaccccgcgtggtggatacactgggagctggagacaccttcaatgcctccgtcatcttcagcctctcccaggggaggrgcgtgcaggaagcactgagattcgggtgccaggtggccggcaagaagtgtggcctgcagggctttgatggcatcgtgtgagagcaggtgccggctcctca

SEQ ID NO: 58246 - DNA, 201 bp, Homo sapiens
tgtgccttcatgggctcaatggctcctggccatgttgctgacttcctggtggccgacttcaggcggcggggcgtggacgtgtctcaggtggcctggcagascaagggggacacccccagctcctgctgcatcatcaacaactccaatggcaaccgtaccattgtgctccatgacacgagcctgccagatgtgtctgctaca

SEQ ID NO: 58247 - DNA, 201 bp, Homo sapiens
ttggaattaagggcgtgcctcagccacaaatgtgacccaggatacagagtgttgctgtcctcagggaggtccgatctggaacacatattggaattggggcyaactccaatatagggtgggtaaggccttataatgtaaagagcatataatgtaaagggctttagagtgagacagacctggattcaaatctgccatttaatt

SEQ ID NO: 58248 - DNA, 175 bp, Homo sapiens
tggaagttccttggcctcctctccattctccctggcctctgcctggcccccagcttcccctctgggcccgggggcatctccttcagcctctgcctggcccycagcttcccctctgggcccaggggcatctcctttagcctctgcctggccctcagcttcccctctgggccctgga

SEQ ID NO: 58249 - DNA, 141 bp, Homo sapiens
gcctctgcctggcccccagcttcccctctgggcccgggggcatctccttcagcctctgcctggcccccagcttcccctctgggcccaggggcatctccttyagcctctgcctggccctcagcttcccctctgggccctgga

SEQ ID NO: 58250 - DNA, 201 bp, Homo sapiens
cagctgtttggctacggagacgtggtgtttgtcagcaaagatgtggccaagcacttggggttccagtcagcagaggaagccttgaggggcttgtatggtcrtgtgaggaaaggggctgtgcttgtctgtgcctgggctgaggagggcgccgacgccctgggccctgatggcaaattgctccactcggatgctttcccgcca

SEQ ID NO: 58251 - DNA, 201 bp, Homo sapiens
  misc_feature (1)...(201): n = A,T,C or G
cgtcatcagcctggtggacaagtaccctaaggaggactcggagataaggtgtttgtcccagagatggcagcgcggaggcaacgcgtccaactcctgcaccnttctctccctgctcggagccccctgtgccttcatgggctcaatggctcctggccatgttgctgacttcctggtggccgacttcaggcggcggggcgtgga

SEQ ID NO: 58252 - DNA, 201 bp, Homo sapiens
ctggccatgttgctgacttcctggtggccgacttcaggcggcggggcgtggacgtgtctcaggtggcctggcagagcaagggggacacccccagctcctgstgcatcatcaacaactccaatggcaaccgtaccattgtgctccatgacacgagcctgccagatgtgtctgctacagactttgagaaggttgatctgaccc

SEQ ID NO: 58253 - DNA, 201 bp, Homo sapiens
catattggaattggggctaactccaatatagggtgggtaaggccttataatgtaaagagcatataatgtaaagggctttagagtgagacagacctggattmaaatctgccatttaattagctgcatatcaccttagggtacagcacttaacgcaatctgcctcaatttcttcatctgtcaaatggaaccaattctgcttgg

SEQ ID NO: 58254 - DNA, 201 bp, Homo sapiens
atggctcctggccatgttgctgacttcctggtggccgacttcaggcggcggggcgtggacgtgtctcaggtggcctggcagagcaagggggacacccccakctcctgctgcatcatcaacaactccaatggcaaccgtaccattgtgctccatgacacgagcctgccagatgtgtctgctacagactttgagaaggttgat

SEQ ID NO: 58255 - DNA, 201 bp, Homo sapiens
tccaggttgccctgttcaggggacagatgcaagctgtggggaggactctgcctgtgtcctgtgttccccacagggagaggctctggggggatggctggggsatgcagagcctcagagcaaataaatcttcctcagagccagcttctcctctcaatgtctgaactgctctggctgggcattcctgaggctctgactcttcga

SEQ ID NO: 58256 - DNA, 201 bp, Homo sapiens
gccggggggatgaattcattcagttctttattggtaatctgccccttaacttagggtctccctgagctgcacagaaagacctgatacctactgggaccagrcagggggcacagagatggtccttgtcccagcgtacatttcccctgcccacttcagggcttatgttctggcactgagacttcgtggggtacctgtatcttc

SEQ ID NO: 58257 - DNA, 201 bp, Homo sapiens
tctgggcaggctggacgggtagagaggtggccggggggatgaattcattcagttctttattggtaatctgccccttaacttagggtctccctgagctgcayagaaagacctgatacctactgggaccaggcagggggcacagagatggtccttgtcccagcgtacatttcccctgcccacttcagggcttatgttctggca

SEQ ID NO: 58258 - DNA, 201 bp, Homo sapiens
  misc_feature (1)...(201): n = A,T,C or G
cgtcatcagcctggtggacaagtaccctaaggaggactcggagataaggtgtttgtcccagagatggcagcgcggaggcaacgcgtccaactcctgcaccnttctctccctgctcggagccccctgtgccttcatgggctcaatggctcctggccatgttgctgattttgtcctggatgacctccgccgctattctgtgga

SEQ ID NO: 58259 - DNA, 201 bp, Homo sapiens; identical to SEQ ID NO: 58250

SEQ ID NO: 58260 - DNA, 141 bp, Homo sapiens; identical to SEQ ID NO: 58249

SEQ ID NO: 58261 - DNA, 175 bp, Homo sapiens; identical to SEQ ID NO: 58248

SEQ ID NO: 58262 - DNA, 192 bp, Homo sapiens; identical to SEQ ID NO: 58241

SEQ ID NO: 58263 - DNA, 201 bp, Homo sapiens; identical to SEQ ID NO: 58242

SEQ ID NO: 58264 - DNA, 201 bp, Homo sapiens; identical to SEQ ID NO: 58243

SEQ ID NO: 58265 - DNA, 201 bp, Homo sapiens; identical to SEQ ID NO: 58253

SEQ ID NO: 58266 - DNA, 201 bp, Homo sapiens; identical to SEQ ID NO: 58244

SEQ ID NO: 58267 - DNA, 201 bp, Homo sapiens; identical to SEQ ID NO: 58245

SEQ ID NO: 58268 - DNA, 201 bp, Homo sapiens; identical to SEQ ID NO: 58256

SEQ ID NO: 58269 - DNA, 201 bp, Homo sapiens; identical to SEQ ID NO: 58247

SEQ ID NO: 58270 - DNA, 201 bp, Homo sapiens; identical to SEQ ID NO: 58255

SEQ ID NO: 58271 - DNA, 201 bp, Homo sapiens; identical to SEQ ID NO: 58257

SEQ ID NO: 58272 - DNA, 201 bp, Homo sapiens
agtaaatgtaataaaaatgcacaacataaaatgtttatgatcccagcaatacactttttaaaaaatgtgaaagtcaaagaattaagttctagttctgactyatcacaagaggtcaaaagtatttgctactgtaacattcaattcacatttgagaatcatggtaaaaataacttgtatttgccttaccatcatgatcctact

SEQ ID NO: 58273 - DNA, 201 bp, Homo sapiens
caaagaattaagttctagttctgactcatcacaagaggtcaaaagtatttgctactgtaacattcaattcacatttgagaatcatggtaaaaataacttgyatttgccttaccatcatgatcctactgttgagttaggaaaatatggttagacagactcacattactttttttcagaggtaaactctagattactgtgtca

SEQ ID NO: 58274 - DNA, 201 bp, Homo sapiens
gagggagcgcgaagcggagggcgcctcgcggcaggagcgggatttccggggtcacgggaaccggcaggggaacgggataaagttcctggagaaaggaaagsagagcgtgggatagtaaaagagaagacgcggagaagaggagaggacctacaagaacggaggacaggggcgcacgatggtcccggggggagcggaaacaaa

SEQ ID NO: 58275 - DNA, 201 bp, Homo sapiens; identical to SEQ ID NO: 58274

SEQ ID NO: 58276 - DNA, 201 bp, Homo sapiens; identical to SEQ ID NO: 58272

SEQ ID NO: 58277 - DNA, 201 bp, Homo sapiens; identical to SEQ ID NO: 58273

SEQ ID NO: 58278 - DNA, 201 bp, Homo sapiens; identical to SEQ ID NO: 58274

SEQ ID NO: 58279 - DNA, 201 bp, Homo sapiens; identical to SEQ ID NO: 58272

SEQ ID NO: 58280 - DNA, 201 bp, Homo sapiens; identical to SEQ ID NO: 58273

SEQ ID NO: 58281 - DNA, 201 bp, Homo sapiens; identical to SEQ ID NO: 58274

SEQ ID NO: 58282 - DNA, 201 bp, Homo sapiens; identical to SEQ ID NO: 58272

SEQ ID NO: 58283 - DNA, 201 bp, Homo sapiens; identical to SEQ ID NO: 58273

SEQ ID NO: 58284 - DNA, 201 bp, Homo sapiens; identical to SEQ ID NO: 58274

SEQ ID NO: 58285 - DNA, 201 bp, Homo sapiens
ttataataagaagttcttatcaagaatctatccaagtgccatgaggatcgattccagtaacttgaatccacaggacttttggaattgtggctgtcagattrtagcaatgaattttcagactccgggtccaatgatggaccttcacacgggctggtttcttcaaaacgggggatgtggttatgttctaaggccgtctataat

SEQ ID NO: 58286 - DNA, 201 bp, Homo sapiens
aaaagccaaaactattgggaaatgtgttcatttagtgaaacagaggccagccgcattgcaaatgagtacccagaggattttgttaattataataagaagtkcttatcaagaatctatccaagtgccatgaggatcgattccagtaacttgaatccacaggacttttggaattgtggctgtcagattgtagcaatgaatttt

SEQ ID NO: 58287 - DNA, 201 bp, Homo sapiens
aaatgtctcgaaggatgtcggtagattacaatggtgagcagaagcaaatccgactctgtagggagctctctgatttggtgtctatttgtaaatctgttcartacagggattttgaactatctatgaaaagccaaaactattgggaaatgtgttcatttagtgaaacagaggccagccgcattgcaaatgagtacccagagg

SEQ ID NO: 58288 - DNA, 201 bp, Homo sapiens
aaaaccggcacatgcggttactgtgggctccagttcagacagcaccaccactagagcgtgtggcacgccgggggtcccgcagcatcctgtgagcatttccrcggggaagctgactcgctggttctgtgcgaagggtattcctggtgctgaataaagggtgttgctgtcaaggctgacaatttatatctgtgtgaggctgga

SEQ ID NO: 58289 - DNA, 201 bp, Homo sapiens
tataaacttggacaaagaaacaaaaaccggcacatgcggttactgtgggctccagttcagacagcaccaccactagagcgtgtggcacgccgggggtcccscagcatcctgtgagcatttccgcggggaagctgactcgctggttctgtgcgaagggtattcctggtgctgaataaagggtgttgctgtcaaggctgacaa

SEQ ID NO: 58290 - DNA, 201 bp, Homo sapiens
tgtggcacgccgggggtcccgcagcatcctgtgagcatttccgcggggaagctgactcgctggttctgtgcgaagggtattcctggtgctgaataaagggygttgctgtcaaggctgacaatttatatctgtgtgaggctggattttctttgcctactccaaccaaagcgacacatcacagcagactggatgcagaagcgt

SEQ ID NO: 58291 - DNA, 201 bp, Homo sapiens
gtgaatgaaaactttgccattgatttgatagcagagcagcccgtgagcgaggtggagactcgggtgatagcgtgcgatggcggcgggggagctcttggccmcccaaaagtgtatataaacttggacaaagaaacaaaaaccggcacatgcggttactgtgggctccagttcagacagcaccaccactagagcgtgtggcac

SEQ ID NO: 58292 - DNA, 201 bp, Homo sapiens
aggtcacgcacactggccaggtttatgatgataaagactacaggagaattcggtttgtaggtcgtcagaaagaggtgaatgaaaactttgccattgatttsatagcagagcagcccgtgagcgaggtggagactcgggtgatagcgtgcgatggcggcgggggagctcttggccacccaaaagtgtatataaacttggaca

SEQ ID NO: 58293 - DNA, 201 bp, Homo sapiens
ggcgggggagctcttggccacccaaaagtgtatataaacttggacaaagaaacaaaaaccggcacatgcggttactgtgggctccagttcagacagcaccmccactagagcgtgtggcacgccgggggtcccgcagcatcctgtgagcatttccgcggggaagctgactcgctggttctgtgcgaagggtattcctggtgc

SEQ ID NO: 58294 - DNA, 201 bp, Homo sapiens
ggcggcgggggagctcttggccacccaaaagtgtatataaacttggacaaagaaacaaaaaccggcacatgcggttactgtgggctccagttcagacagcmccaccactagagcgtgtggcacgccgggggtcccgcagcatcctgtgagcatttccgcggggaagctgactcgctggttctgtgcgaagggtattcctgg

SEQ ID NO: 58295 - DNA, 192 bp, Homo sapiens
aaaaccggcacatgcggttactgtgggctccagttcagacagcaccaccactagagcgtgtggcacgccgggggtcccgcagcatcctgtgagcatttccrcggggaagctgagcacgtgaagctcgctggttctgtgcgaagggtattcctggtgctgaataaagggtgttgctgtcaaggctgacaattt

SEQ ID NO: 58296 - DNA, 201 bp, Homo sapiens
tataaacttggacaaagaaacaaaaaccggcacatgcggttactgtgggctccagttcagacagcaccaccactagagcgtgtggcacgccgggggtcccscagcatcctgtgagcatttccgcggggaagctgagcacgtgaagctcgctggttctgtgcgaagggtattcctggtgctgaataaagggtgttgctgtca

SEQ ID NO: 58297 - DNA, 124 bp, Homo sapiens
cgggggtcccgcagcatcctgtgagcatttccgcggggaagctgagcacgtgaagctcgctggttctgtgcgaagggtattcctggtgctgaataaagggygttgctgtcaaggctgacaattt

SEQ ID NO: 58298 - DNA, 201 bp, Homo sapiens; identical to SEQ ID NO: 58291

SEQ ID NO: 58299 - DNA, 201 bp, Homo sapiens; identical to SEQ ID NO: 58292

SEQ ID NO: 58300 - DNA, 201 bp, Homo sapiens
ggcgggggagctcttggccacccaaaagtgtatataaacttggacaaagaaacaaaaaccggcacatgcggttactgtgggctccagttcagacagcaccmccactagagcgtgtggcacgccgggggtcccgcagcatcctgtgagcatttccgcggggaagctgagcacgtgaagctcgctggttctgtgcgaagggta

SEQ ID NO: 58301 - DNA, 201 bp, Homo sapiens
ggcggcgggggagctcttggccacccaaaagtgtatataaacttggacaaagaaacaaaaaccggcacatgcggttactgtgggctccagttcagacagcmccaccactagagcgtgtggcacgccgggggtcccgcagcatcctgtgagcatttccgcggggaagctgagcacgtgaagctcgctggttctgtgcgaagg

SEQ ID NO: 58302 - DNA, 124 bp, Homo sapiens
ctgtgtataccgctactaccactgcaattcacattatattggaatgaacaattcacatgtctaccacaagtctgtaaacataaccttatttgaaatgaatwgcaataaagctctgttacaacgt

SEQ ID NO: 58303 - DNA, 201 bp, Homo sapiens
tttggtaattgtgtgaaatataagctttttaacagggcatttaagtggctagcaaatcagtaattaaaaattaagctttctactccaagtatttcacaaaygcatctgccattttcctcatttaaaccttggttatcttggcctgataccacataaaagaatgtagaatggctgaagagatcaagaatttaaagcttctag

SEQ ID NO: 58304 - DNA, 201 bp, Homo sapiens
gtgtgtgggagggagggaggaggaatactagccctttttatatatttacacaagcaaaacttttaaatatttgaattgacagttacatgtttcataacttygtatgtctattggttgtgcaggtgtaattttttccctttttgattagggttacaaaatttagagaccagtatgattaagttgaagctccttagcctcctt

SEQ ID NO: 58305 - DNA, 201 bp, Homo sapiens
gatatccctttctccattctaggtttttctttttttcagtaactgatttaccttgatcacttttcaacttccatattcttcatatagtaaaaggcaaagtrttgaagatactacggtgtggtagtagttgaaaattattgccgtcattatttacatacttaagacatattagcaagttgatccaaaatgggaggccttata

SEQ ID NO: 58306 - DNA, 201 bp, Homo sapiens
cccaaatcaaacaattaaaatatacagtgtttttccactcactaattcactatacagagagtctgaaccttagcctccctcttggtcttgcagtgaggaartttctattagtatatccaatttagcaaaattggtaccaaaatgatttctttggtaattgtgtgaaatataagctttttaacagggcatttaagtggctag

SEQ ID NO: 58307 - DNA, 201 bp, Homo sapiens
ccaaactgttgtataaaggactgtaagatcaggggcatcattgctatacactcttgattacactggcagctctatgagtagaaagtcttcggaatttagamcccatctatgagagaaagttcagtcactttatttattttaaatctctctaggatgagtttagaactgtagcagtgcaggtggcttaagtgaagtaactcc

SEQ ID NO: 58308 - DNA, 201 bp, Homo sapiens
cggccccggtccgtagcactccgccctccgcttctcccgccctgtagccgcgaagactgcttcagcctttccctgtgctgcccctgccgcgcgatggagamgagctcgagctgcgagagtcttggctcccagccggcggcggctcggccgcccagcgtggactccttgtccagtgcctccacttctcattcagagaattca

SEQ ID NO: 58309 - DNA, 201 bp, Homo sapiens
ctatacagctgcttattcggaacattcctctgtaatagtgaacaacagagaggaaaagagaatcttcctaaaaggactgtgtcactgtggtcttacataarcagccagctggaagacttcactaatcctctctatgggagctattccaatcatgtcctttatccagtagccagcatgcgccacctagagctctgggtggga

SEQ ID NO: 58310 - DNA, 201 bp, Homo sapiens
atcaggggcatcattgctatacactcttgattacactggcagctctatgagtagaaagtcttcggaatttagaacccatctatgagagaaagttcagtcamtttatttattttaaatctctctaggatgagtttagaactgtagcagtgcaggtggcttaagtgaagtaactccatatgtaattacatgattatgatacta

SEQ ID NO: 58311 - DNA, 201 bp, Homo sapiens
caggtggcttaagtgaagtaactccatatgtaattacatgattatgatactaatcttttaagtatccaaagaatattaaaatacttcaatcctggattcasagtgggaacaagtttctattaaaaggcaaatgctgttacaaatttttggcatctggtaatattaaaaccattttagaaatacactctgtgctcactgtgc

SEQ ID NO: 58312 - DNA, 201 bp, Homo sapiens
aaaatgctgaactagttttcctggatatccacaatattcatgttatgagagaatcattacgaaaacttaaggagattgtgtaccccaacattgaggaaacycactggttgtctaacttggaatctactcattggctagaacatattaagcttattcttgcaggggctcttaggattgctgacaaggtagagtcagggaaga

SEQ ID NO: 58313 - DNA, 201 bp, Homo sapiens
ggtggcttaagtgaagtaactccatatgtaattacatgattatgatactaatcttttaagtatccaaagaatattaaaatacttcaatcctggattcacaktgggaacaagtttctattaaaaggcaaatgctgttacaaatttttggcatctggtaatattaaaaccattttagaaatacactctgtgctcactgtgcag

SEQ ID NO: 58314 - DNA, 201 bp, Homo sapiens
ttagcagaaatggaagaaccacccttgcttccaggagaaaatattaaagacatggccaaagatgtaacttatatatgtccattcactggcgctgtacgagraactctgactgtcacgaattataggttatatttcaaaagcatggaacgggatcccccatttgttttagatgcttcccttggtgtgataaatagagtagaa

SEQ ID NO: 58315 - DNA, 201 bp, Homo sapiens
gcttaagtgaagtaactccatatgtaattacatgattatgatactaatcttttaagtatccaaagaatattaaaatacttcaatcctggattcacagtggkaacaagtttctattaaaaggcaaatgctgttacaaatttttggcatctggtaatattaaaaccattttagaaatacactctgtgctcactgtgcagagga

SEQ ID NO: 58316 - DNA, 201 bp, Homo sapiens
taatcctctctatgggagctattccaatcatgtcctttatccagtagccagcatgcgccacctagagctctgggtgggatattacataaggtggaatccamggatgaaaccacaggaacctattcacaacagatacaaagaacttcttgctaaacgagcagagcttcagaaaaaagtagaggaactacagagagagatttc

SEQ ID NO: 58317 - DNA, 201 bp, Homo sapiens
gccgcttccggtctccctcccgggccggcgctggcctgactgcggccccggtccgtagcactccgccctccgcttctcccgccctgtagccgcgaagactscttcagcctttccctgtgctgcccctgccgcgcgatggagacgagctcgagctgcgagagtcttggctcccagccggcggcggctcggccgcccagcgtg

SEQ ID NO: 58318 - DNA, 201 bp, Homo sapiens
taagaaccatgcagatgcagacagatcgcctgtttttcttcaatttattgactgtgtctggcagatgacaagacagtttcctaccgcatttgaattcaatsagtattttctcattaccattttggaccacctatacagctgcttattcggaacattcctctgtaatagtgaacaacagagaggaaaagagaatcttcctaa

SEQ ID NO: 58319 - DNA, 201 bp, Homo sapiens
cctcctggttgtgccagcaaatattcctgatgaagaattaaagagagtggcatccttcagatcaagaggccgtatcccagttttatcatggattcatcctkaaagtcaagccacaatcactcggtgtagccagcccatggttggagtgagtggaaagcgaagcaaagaagatgaaaaataccttcaagctatcatggattc

SEQ ID NO: 58320 - DNA, 201 bp, Homo sapiens
aatcctctctatgggagctattccaatcatgtcctttatccagtagccagcatgcgccacctagagctctgggtgggatattacataaggtggaatccacrgatgaaaccacaggaacctattcacaacagatacaaagaacttcttgctaaacgagcagagcttcagaaaaaagtagaggaactacagagagagatttct

SEQ ID NO: 58321 - DNA, 201 bp, Homo sapiens
taagcttattcttgcaggggctcttaggattgctgacaaggtagagtcagggaagacgtctgtggtagtgcattgcagtgatggttgggatcgcacagctyagctcacttcccttgccatgctcatgttggatggatactatcgaaccatccgaggatttgaagtccttgtggagaaagaatggctaagttttggacatcg

SEQ ID NO: 58322 - DNA, 176 bp, Homo sapiens
attcacgactgccttctctgacatccccaccttcctctgtgcccccatagcactgtgtataccgctactaccactgcaattcacattatattggaatgaayaattcacatgtctaccacaagtctgtaaacataaccttatttgaaatgaattgcaataaagctctgttacaacgt

SEQ ID NO: 58323 - DNA, 201 bp, Homo sapiens
tgacagctattgaattccattcagcttgggcaatgggaatgggagttaatcttcttgtggccaacacacatcatgtcagcctaaatatgacaggaagtggyatttatgcaccaaatggtcccaaagtgtatcattatgacatgaagacagagttgggaaaacttctcctttcagaggtggattcacatcccctatcctcgc

SEQ ID NO: 58324 - DNA, 201 bp, Homo sapiens
aactcgtggcacgttaccataagtaccacctgtactctgagcctcagtttaatgtccctgaaaagccggagttggtgactttcaacaccgcatttggaagktttggcattttcacgtgctttgatatattcttctatgatcctggtgttaccctggtgaaagatttccatgtggacaccatactgtttcccacagcttgga

SEQ ID NO: 58325 - DNA, 201 bp, Homo sapiens
ctgttaattggaatgcctacgccaccaccatcaaaccatttccagtacagaaaaacactttcaggggatttatttccagggatgggttcaacttcacagarctttttgaaaatgcaggaaaccttacagtctgtcaaaaggagctttgctgtcatttaagctacagaatgttacaaaaagaagagaatgaagtatacgttc

SEQ ID NO: 58326 - DNA, 201 bp, Homo sapiens
caccagtacaagcaagactcagctgcctggccaaggacaactctatctatgtcttggcaaatttgggggacaaaaagccatgtaattcccgtgactccacrtgtcctcctaatggctactttcaatacaataccaatgtggtgtataatacagaaggaaaactcgtggcacgttaccataagtaccacctgtactctgagc

SEQ ID NO: 58327 - DNA, 201 bp, Homo sapiens
aataacttacctgctaatattcatattattaatgatcatagctttgcaaaatattgtaatgttatagggcgtctctttatcactcagcttctgcatcataygcttggctgaatgtgtttatcggcttcccaagtttactaagaaactttgaagggctatttcagtagtatagaccagtgagtcctaaatattttttctcat

SEQ ID NO: 58328 - DNA, 201 bp, Homo sapiens
gtctgtcaaaaggagctttgctgtcatttaagctacagaatgttacaaaaagaagagaatgaagtatacgttctaggagcttttacaggattacatggccraaggagaagagagtactggcaggtctgcacaatgctgaagtgcaaaactactaatttgacaacttgtggacggccagtagaaactgcttctacaagattt

SEQ ID NO: 58329 - DNA, 201 bp, Homo sapiens
acaataccaatgtggtgtataatacagaaggaaaactcgtggcacgttaccataagtaccacctgtactctgagcctcagtttaatgtccctgaaaagccrgagttggtgactttcaacaccgcatttggaaggtttggcattttcacgtgctttgatatattcttctatgatcctggtgttaccctggtgaaagatttcc

SEQ ID NO: 58330 - DNA, 201 bp, Homo sapiens
ctacagaatgttacaaaaagaagagaatgaagtatacgttctaggagcttttacaggattacatggccgaaggagaagagagtactggcaggtctgcacamtgctgaagtgcaaaactactaatttgacaacttgtggacggccagtagaaactgcttctacaagatttgaaatgttctccctcagtggcacatttggaac

SEQ ID NO: 58331 - DNA, 201 bp, Homo sapiens
cattttcacgtgctttgatatattcttctatgatcctggtgttaccctggtgaaagatttccatgtggacaccatactgtttcccacagcttggatgaacrttttgccccttttgacagctattgaattccattcagcttgggcaatgggaatgggagttaatcttcttgtggccaacacacatcatgtcagcctaaatat

SEQ ID NO: 58332 - DNA, 201 bp, Homo sapiens
tgagcctcagtttaatgtccctgaaaagccggagttggtgactttcaacaccgcatttggaaggtttggcattttcacgtgctttgatatattcttctatkatcctggtgttaccctggtgaaagatttccatgtggacaccatactgtttcccacagcttggatgaacgttttgccccttttgacagctattgaattcca

SEQ ID NO: 58333 - DNA, 200 bp, Homo sapiens
aaaccttggccatggtcacttcctcttttccaatctctgtggcagtttttgccctaataaccctgcaggttggtactcaggacagttttatagctgcagygtatgaacatgctgtcattttgccaaataaaacagaaacaccagtttctcaggaggatgccttgaatctcatgaacgagaatatagacattctggagaca

SEQ ID NO: 58334 - DNA, 201 bp, Homo sapiens; identical to SEQ ID NO: 58323

SEQ ID NO: 58335 - DNA, 201 bp, Homo sapiens; identical to SEQ ID NO: 58324

SEQ ID NO: 58336 - DNA, 161 bp, Homo sapiens
aaaccttggccatggtcacttcctcttttccaatctctgtggcagtttttgccctaataamcctgcaggttggtactcaggacagttttatagctgcagtgtatgaacatgctgtcattttgccaaataaaacagaaacaccagtttctcaggaggatgcc

SEQ ID NO: 58337 - DNA, 201 bp, Homo sapiens; identical to SEQ ID NO: 58326

SEQ ID NO: 58338 - DNA, 201 bp, Homo sapiens; identical to SEQ ID NO: 58325

SEQ ID NO: 58339 - DNA, 201 bp, Homo sapiens; identical to SEQ ID NO: 58327

SEQ ID NO: 58340 - DNA, 201 bp, Homo sapiens; identical to SEQ ID NO: 58328

SEQ ID NO: 58341 - DNA, 201 bp, Homo sapiens; identical to SEQ ID NO: 58329

SEQ ID NO: 58342 - DNA, 201 bp, Homo sapiens; identical to SEQ ID NO: 58332

SEQ ID NO: 58343 - DNA, 201 bp, Homo sapiens; identical to SEQ ID NO: 58331

SEQ ID NO: 58344 - DNA, 201 bp, Homo sapiens; identical to SEQ ID NO: 58330

SEQ ID NO: 58345 - DNA, 201 bp, Homo sapiens
ggaagactcccaggatttaaatgaacaatcagtaaagaaaacgtgcacagaatcagatgtttcacaatctcagaattccaggtctatggaaatgcaggacytagcaagtcctcatactcttgttggaggtggtgatactccaggtagctccaaactggaaaaatctaatctcagcagcacatcagttactacaaatgggac

SEQ ID NO: 58346 - DNA, 201 bp, Homo sapiens
tagttttgcaccatcatctactatttatgcaaataattcagtttccaattcaacgaatttcagtggttcacaacaggattatccatcctatacagcctttrgccaaaaccagtatgcacagtattattcagcatcaacgtatggagcgtatatgacatcgaataacacagccgatggcacaccctcttcaacctctactta

SEQ ID NO: 58347 - DNA, 201 bp, Homo sapiens
cccagcacttgcgaaggttctactctatagtttaggaggtgctttccccattgagaatatttacagtgcaactaaaataggaaaagaaagttgctttgaaygaataatgcaaaggtttggcagaaaagtagtgtatgttgtaattggggatggtgtagaagaagaacaggcagcaaaaaagcacaacatgcccttctggag

SEQ ID NO: 58348 - DNA, 201 bp, Homo sapiens
aacatgcccttctggaggatatccagtcactcagacctcctggctctccaccaagcactggaattagagtatttgtaactgtgttctttagccggagatcyattttttatatttcaagtacactgaatttttatgtgtgattcaatgcctctggctctacacatataaattgtcttaatggatgaaatcatatttggaata

SEQ ID NO: 58349 - DNA, 201 bp, Homo sapiens
cccaggatttaaatgaacaatcagtaaagaaaacgtgcacagaatcagatgtttcacaatctcagaattccaggtctatggaaatgcaggacctagcaagycctcatactcttgttggaggtggtgatactccaggtagctccaaactggaaaaatctaatctcagcagcacatcagttactacaaatgggacaggagggg

SEQ ID NO: 58350 - DNA, 201 bp, Homo sapiens
tgacagattcctggctaacaaatgcacttaagtctttatcaattattagcactaggagtaactgcataaatgtcttggtaacgacaactcaactgatcccrgcacttgcgaaggttctactctatagtttaggaggtgctttccccattgagaatatttacagtgcaactaaaataggaaaagaaagttgctttgaacgaa

SEQ ID NO: 58351 - DNA, 201 bp, Homo sapiens
ttacaacactttaatgggttttttaaaaatctgtggaggttgctggtacacaccaaatgagtccaaactggaatgagcagctttagcaaagaactcttacctggcaaagcagcaacacacatgctccgtctgacaaggtggtcaacaacattcctcaaaatgggagatcttctcagccctgaggtttgaatctgactttag

SEQ ID NO: 58352 - DNA, 201 bp, Homo sapiens
cctctggcctatttcctgcatccacaggtccatgaccagcattacgtcacacgtcttggtcaccgttttattaatcatatctttgagtacacaaaccctgragacggtgtcacttaccagatcaagggaatgacggcaaaccttgcagtgttggtggcctttatcattttggaaaaaaaacccacctttgaggttcaattt

SEQ ID NO: 58353 - DNA, 201 bp, Homo sapiens
gagttattcctgaaggttcataaaaaagctacaagcaggttatgatttactagagcaagagacaaagaactattcacgaggattctgtgtgtgcttattcrtagaacaacaacaatgccagctgttggaatttgacaggtgtgaatattttttctgcagtatgtagttagaatccttgcctcttttccagttgccttctat

SEQ ID NO: 58354 - DNA, 201 bp, Homo sapiens
ggttcataaaaaagctacaagcaggttatgatttactagagcaagagacaaagaactattcacgaggattctgtgtgtgcttattcgtagaacaacaacartgccagctgttggaatttgacaggtgtgaatattttttctgcagtatgtagttagaatccttgcctcttttccagttgccttctattgttttaggccaat

SEQ ID NO: 58355 - DNA, 201 bp, Homo sapiens
gcccctggagaagtttgcttccctggaggtaagcgtgaccctacagacatggatgatgcagccacagctctccgggaagcccaggaggaagtgggtctccrtcctcaccaagtggaagttgtctgctgcctggtgccatgtcttattgatacagatacattgataactccatttgtgggtttaatagaccacaacttccag

SEQ ID NO: 58356 - DNA, 201 bp, Homo sapiens; identical to SEQ ID NO: 58352

SEQ ID NO: 58357 - DNA, 201 bp, Homo sapiens; identical to SEQ ID NO: 58353

SEQ ID NO: 58358 - DNA, 200 bp, Homo sapiens
cagtatgtagttagaatccttgcctcttttccagttgccttctattgtctgaaaaagtaaaagccattcaaaaatgaaaactatgttcatagtgttgcatrttttcacccacaatatgttaataatatttttcttacacatataataaagaatatctggcacatactaggcccttaataaagattttttgaatatataac

SEQ ID NO: 58359 - DNA, 201 bp, Homo sapiens
ggttcataaaaaagctacaagcaggttatgatttactagagcaagagacaaagaactattcacgaggattctgtgtgtgcttattcgtagaacaacaacartgccagctgttggaatttgacaggtgtgaatattttttctgcagtatgtagttagaatccttgcctcttttccagttgccttctattgtctgaaaaagta

SEQ ID NO: 58360 - DNA, 201 bp, Homo sapiens
aggattccacaaggtggcttgtttacgtatgtttctggagccaatttcctcggtgagatcattgaatggatcggctatgccctggccacttggtccctccsagcacttgcatttgcatttttctcactttgtttccttgggctgcgagcttttcaccaccataggttctacctcaagatgtttgaggactaccccaaatct

SEQ ID NO: 58361 - DNA, 201 bp, Homo sapiens
gatgcaggttcagtgccagcagagcccagtgctggcaggcagcgccactttggtcgcccttggggcactggccttgtacgtcgcgaagccctccggctacrggaagcacacggagagcctgaagccggcggctacccgcctgccagcccgcgccgcctggttcctgcaggagctgccttccttcgcggtgcccgcggggat

SEQ ID NO: 58362 - DNA, 201 bp, Homo sapiens
ctggccttgtacgtcgcgaagccctccggctacgggaagcacacggagagcctgaagccggcggctacccgcctgccagcccgcgccgcctggttcctgcrggagctgccttccttcgcggtgcccgcggggatcctcgcccggcagcccctctccctcttcgggccacctgggacggtacttctgggcctcttctgcgta

SEQ ID NO: 58363 - DNA, 201 bp, Homo sapiens
gcaggagctgccttccttcgcggtgcccgcggggatcctcgcccggcagcccctctccctcttcgggccacctgggacggtacttctgggcctcttctgcstacattacttccacaggacatttgtgtactcactgctcaatcgagggaggccttatccagctatactcattctcagaggcactgccttctgcactggaaa

SEQ ID NO: 58364 - DNA, 198 bp, Homo sapiens
gcgccagggctggacgcggcgaggtgggaggcaggatggaggggcgggagccaaggccgagggggcggacacgggtggcgtctggcgctccataaagsggttgcgggggccgcgctctcttctgggagggcagcggccaccggcgaggaacacggcgcgatgcaggttcagtgccagcagagcccagtgctggcaggc

SEQ ID NO: 58365 - DNA, 201 bp, Homo sapiens
atttactgtgctgaataccctgatgggtggtacacagacatacggtttagcttgggtgtcttcttatttattttgggaatgggaataaacattcatagtgwctatatattgcgccagctcaggaagcctggagaaatcagctacaggattccacaaggtggcttgtttacgtatgtttctggagccaatttcctcggtgag

SEQ ID NO: 58366 - DNA, 201 bp, Homo sapiens
gcactggccttgtacgtcgcgaagccctccggctacgggaagcacacggagagcctgaagccggcggctacccgcctgccagcccgcgccgcctggttccwgcaggagctgccttccttcgcggtgcccgcggggatcctcgcccggcagcccctctccctcttcgggccacctgggacggtacttctgggcctcttctgc

SEQ ID NO: 58367 - DNA, 201 bp, Homo sapiens
tgggacggtacttctgggcctcttctgcgtacattacttccacaggacatttgtgtactcactgctcaatcgagggaggccttatccagctatactcattstcagaggcactgccttctgcactggaaatggagtccttcaaggctactatctgatttactgtgctgaataccctgatgggtggtacacagacatacggtt

SEQ ID NO: 58368 - DNA, 160 bp, Homo sapiens
tttgacaaatgagcaccagtggtactaagcacagaaactcactatataagtcacataggaaacttgaaaggtctgaggatgatgtagattactgaaaaatrcaaattgcaatcatataaataagtgtttttgttgttcattaaatacctttaaatcatgg

SEQ ID NO: 58369 - DNA, 201 bp, Homo sapiens
cttatgagagagtagagaacaacatgaccctggatggctactaagaggatagagaacagttttacaatagacattgcaaactctcatgtttttggaaactrgtggcaatatccaaataatgagtagtgtaaaacaaagagaattaatgatgaggttacatgctgcttgcctccaccagatgtccacaacaatatgaagtac

SEQ ID NO: 58370 - DNA, 201 bp, Homo sapiens
attgcgccagctcaggaagcctggagaaatcagctacaggattccacaaggtggcttgtttacgtatgtttctggagccaatttcctcggtgagatcattraatggatcggctatgccctggccacttggtccctcccagcacttgcatttgcatttttctcactttgtttccttgggctgcgagcttttcaccaccatag

SEQ ID NO: 58371 - DNA, 201 bp, Homo sapiens
actatatattgcgccagctcaggaagcctggagaaatcagctacaggattccacaaggtggcttgtttacgtatgtttctggagccaatttcctcggtgasatcattgaatggatcggctatgccctggccacttggtccctcccagcacttgcatttgcatttttctcactttgtttccttgggctgcgagcttttcacc

SEQ ID NO: 58372 - DNA, 201 bp, Homo sapiens
cactttggtcgcccttggggcactggccttgtacgtcgcgaagccctccggctacgggaagcacacggagagcctgaagccggcggctacccgcctgccarcccgcgccgcctggttcctgcaggagctgccttccttcgcggtgcccgcggggatcctcgcccggcagcccctctccctcttcgggccacctgggacggt

SEQ ID NO: 58373 - DNA, 201 bp, Homo sapiens
gctcaggaagcctggagaaatcagctacaggattccacaaggtggcttgtttacgtatgtttctggagccaatttcctcggtgagatcattgaatggatcrgctatgccctggccacttggtccctcccagcacttgcatttgcatttttctcactttgtttccttgggctgcgagcttttcaccaccataggttctacct

SEQ ID NO: 58374 - DNA, 201 bp, Homo sapiens
tgtcttcttatttattttgggaatgggaataaacattcatagtgactatatattgcgccagctcaggaagcctggagaaatcagctacaggattccacaargtggcttgtttacgtatgtttctggagccaatttcctcggtgagatcattgaatggatcggctatgccctggccacttggtccctcccagcacttgcatt

SEQ ID NO: 58375 - DNA, 201 bp, Homo sapiens
ttcctcggtgagatcattgaatggatcggctatgccctggccacttggtccctcccagcacttgcatttgcatttttctcactttgtttccttgggctgcragcttttcaccaccataggttctacctcaagatgtttgaggactaccccaaatctcggaaagcccttattccattcatcttttaaaggaaccaaattaaa

SEQ ID NO: 58376 - DNA, 201 bp, Homo sapiens
gtacttctgggcctcttctgcgtacattacttccacaggacatttgtgtactcactgctcaatcgagggaggccttatccagctatactcattctcagagrcactgccttctgcactggaaatggagtccttcaaggctactatctgatttactgtgctgaataccctgatgggtggtacacagacatacggtttagcttg

SEQ ID NO: 58377 - DNA, 201 bp, Homo sapiens
tttcctcggtgagatcattgaatggatcggctatgccctggccacttggtccctcccagcacttgcatttgcatttttctcactttgtttccttgggctgygagcttttcaccaccataggttctacctcaagatgtttgaggactaccccaaatctcggaaagcccttattccattcatcttttaaaggaaccaaattaa

SEQ ID NO: 58378 - DNA, 201 bp, Homo sapiens
cacaggacatttgtgtactcactgctcaatcgagggaggccttatccagctatactcattctcagaggcactgccttctgcactggaaatggagtccttcraggctactatctgatttactgtgctgaataccctgatgggtggtacacagacatacggtttagcttgggtgtcttcttatttattttgggaatgggaata

SEQ ID NO: 58379 - DNA, 201 bp, Homo sapiens
cctgggacggtacttctgggcctcttctgcgtacattacttccacaggacatttgtgtactcactgctcaatcgagggaggccttatccagctatactcawtctcagaggcactgccttctgcactggaaatggagtccttcaaggctactatctgatttactgtgctgaataccctgatgggtggtacacagacatacgg

SEQ ID NO: 58380 - DNA, 201 bp, Homo sapiens
cctcggtgagatcattgaatggatcggctatgccctggccacttggtccctcccagcacttgcatttgcatttttctcactttgtttccttgggctgcgarcttttcaccaccataggttctacctcaagatgtttgaggactaccccaaatctcggaaagcccttattccattcatcttttaaaggaaccaaattaaaaa

SEQ ID NO: 58381 - DNA, 201 bp, Homo sapiens
caaggtggcttgtttacgtatgtttctggagccaatttcctcggtgagatcattgaatggatcggctatgccctggccacttggtccctcccagcacttgyatttgcatttttctcactttgtttccttgggctgcgagcttttcaccaccataggttctacctcaagatgtttgaggactaccccaaatctcggaaagcc

SEQ ID NO: 58382 - DNA, 201 bp, Homo sapiens
ggagaaatcagctacaggattccacaaggtggcttgtttacgtatgtttctggagccaatttcctcggtgagatcattgaatggatcggctatgccctggmcacttggtccctcccagcacttgcatttgcatttttctcactttgtttccttgggctgcgagcttttcaccaccataggttctacctcaagatgtttgag

SEQ ID NO: 58383 - DNA, 201 bp, Homo sapiens
atcattgaatggatcggctatgccctggccacttggtccctcccagcacttgcatttgcatttttctcactttgtttccttgggctgcgagcttttcaccrccataggttctacctcaagatgtttgaggactaccccaaatctcggaaagcccttattccattcatcttttaaaggaaccaaattaaaaaggagcagagc

SEQ ID NO: 58384 - DNA, 149 bp, Homo sapiens
aattttatttgatcatgtggcctctctgttgctaatctctcctggaaacatctgccacatttagtgtgtgtatgtgtattcattcttttgtttttaataaytaaagttttttcccctcattattaaaatgaatttaccagtaagaatga

SEQ ID NO: 58385 - DNA, 150 bp, Homo sapiens
aaattttatttgatcatgtggcctctctgttgctaatctctcctggaaacatctgccacatttagtgtgtgtatgtgtattcattcttttgtttttaatamctaaagttttttcccctcattattaaaatgaatttaccagtaagaatga

SEQ ID NO: 58386 - DNA, 201 bp, Homo sapiens
cttggaaacaactccagactttcttccacaaacacttgggtggccacgaggggacaatcccatcaaaagtgtaaattttatttgatcatgtggcctctctsttgctaatctctcctggaaacatctgccacatttagtgtgtgtatgtgtattcattcttttgtttttaataactaaagttttttcccctcattattaaaa

SEQ ID NO: 58387 - DNA, 157 bp, Homo sapiens
cagacacactacttttcagaactgtattaagaactgtaacagtcactgcgagggtcygcggcttcattcttgatgtcagcgagaccaagaatccaccagaaggaaccaattccagacacagaattatttgccttcttacttcctgagagttctaggc

SEQ ID NO: 58388 - DNA, 156 bp, Homo sapiens
aagtgtaaattttatttgatcatgtggcctctctgttgctaatctctcctggaaacatctgccacatttagtgtgtgtatgtgtattcattcttttgtttwtaataactaaagttttttcccctcattattaaaatgaatttaccagtaagaatga

SEQ ID NO: 58389 - DNA, 201 bp, Homo sapiens
agtcctattatctggggaggggagcccagggctcatgccatggctcaggtggatgcttggaaacaactccagactttcttccacaaacacttgggtggccrcgaggggacaatcccatcaaaagtgtaaattttatttgatcatgtggcctctctgttgctaatctctcctggaaacatctgccacatttagtgtgtgtat

SEQ ID NO: 58390 - DNA, 201 bp, Homo sapiens
aaagggggtgagctctgcctttccatggcctctttcctgaagggcatcacggctgctgtcgtcatcaacggctctgtggccaatgttgggggaaccttacrctacaagggcgagaccctgccccctgtgggcgtcaacagaaatcgcatcaaggtgaccaaagatggctatgcagacattgtggatgtcctgaacagccct

SEQ ID NO: 58391 - DNA, 149 bp, Homo sapiens; identical to SEQ ID NO: 58384

SEQ ID NO: 58392 - DNA, 150 bp, Homo sapiens; identical to SEQ ID NO: 58385

SEQ ID NO: 58393 - DNA, 201 bp, Homo sapiens; identical to SEQ ID NO: 58386

SEQ ID NO: 58394 - DNA, 201 bp, Homo sapiens
atggtgcagattttgaaagaaaagccctaagattagtaatgagtgtgaattattcaacaaagtgatcaaaactaactccagctctgcattcctcttcgccrtcaggagtttggagcctggagactgctagctgcctggttctttaagaaccagccctggtccagcccattccgcaggccagcaagcttctgaaaagcaaac

SEQ ID NO: 58395 - DNA, 156 bp, Homo sapiens; identical to SEQ ID NO: 58388

SEQ ID NO: 58396 - DNA, 201 bp, Homo sapiens; identical to SEQ ID NO: 58389

SEQ ID NO: 58397 - DNA, 201 bp, Homo sapiens; identical to SEQ ID NO: 58390

SEQ ID NO: 58398 - DNA, 201 bp, Homo sapiens
aggcccacgcgcgctaccgcgccgacactcttggcgagctggacctggagcgcgcgcccgcgctgggcggcagcttcgcggggcttgagcccatggggctkctctgggccttggagcccgagaaacctttggtgcggctggtgaagcgcgacgtgcgaacgcccttggccgtggagctggaggtgctggatggccacgacc

SEQ ID NO: 58399 - DNA, 201 bp, Homo sapiens
tgcgcggcctagccccggagcagccggtcacgctgcgcgcgtccctgcgcgacgagaagggcgcgcttttccaggcccacgcgcgctaccgcgccgacacycttggcgagctggacctggagcgcgcgcccgcgctgggcggcagcttcgcggggcttgagcccatggggctgctctgggccttggagcccgagaaacctt

SEQ ID NO: 58400 - DNA, 201 bp, Homo sapiens
cgaccccgaccccgggcggctgctgtgccagacgcggcacgagcgctacttcctcccgcccggggtgcggcgcgagccggtgcgcgtgggccgggtgcgakgcacgctcttcctgccgccagaacctgggccctttcctgggattgtggacatgttcggaactggaggtggcctgctggagtatcgggctagtctgctggc

SEQ ID NO: 58401 - DNA, 201 bp, Homo sapiens
aggctgctaggagccggtcagagggattcatgcataaaattttccatcccaacactgacgacgcgtcaggaactgtgtgtctagatgtaattaatcaaacytggacagctctctatgatcttaccaatatatttgagtccttcctgccccagttgttggcctatcctaaccccatagatcctctcaatggtgaagatgcag

SEQ ID NO: 58402 - DNA, 201 bp, Homo sapiens
ctgacgacgcgtcaggaactgtgtgtctagatgtaattaatcaaacttggacagctctctatgatcttaccaatatatttgagtccttcctgccccagttrttggcctatcctaaccccatagatcctctcaatggtgaagatgcagccatgtacctccaaagaccagaagaatacaagcagaaaattaaagagtacatcc

SEQ ID NO: 58403 - DNA, 201 bp, Homo sapiens
gagctgatgaagtccaagtactcagacatcaccatcatgtttgaggagacgcaggtgcccgcgctgctggaggccggcttccggagggagaacatccgtayggaggtgatggcgctggtcccaccggccgactgccgctactacgccttcccacagatgatcacgcccctggtgaccaaaggctgagcccccaccccggcc

SEQ ID NO: 58404 - DNA, 201 bp, Homo sapiens
ccgggagtccagggtgtcgcaccagccctgggctgatcccagctgtgtgtcaccagaagctttcccggcttctctgtgaggggtcccaccagcccagggcygatcccagctgtgtgtcaccagcagctttcccagcttctctgtgagggtcactgctgcccactgcagggtccctgaggtgaagtaaacgccggcgctggg

SEQ ID NO: 58405 - DNA, 201 bp, Homo sapiens
cctggccgggagtccagggtgtcgcaccagccctgggctgatcccagctgtgtgtcaccagaagctttcccggcttctctgtgaggggtcccaccagcccmgggctgatcccagctgtgtgtcaccagcagctttcccagcttctctgtgagggtcactgctgcccactgcagggtccctgaggtgaagtaaacgccggcg

SEQ ID NO: 58406 - DNA, 201 bp, Homo sapiens
cgtacggaggtgatggcgctggtcccaccggccgactgccgctactacgccttcccacagatgatcacgcccctggtgaccaaaggctgagcccccacccyggcccggccacacccatgccctcctccgtgccttcctggccgggagtccagggtgtcgcaccagccctgggctgatcccagctgtgtgtcaccagaagct

SEQ ID NO: 58407 - DNA, 201 bp, Homo sapiens
accaaaggctgagcccccaccccggcccggccacacccatgccctcctccgtgccttcctggccgggagtccagggtgtcgcaccagccctgggctgatcmcagctgtgtgtcaccagaagctttcccggcttctctgtgaggggtcccaccagcccagggctgatcccagctgtgtgtcaccagcagctttcccagcttc

SEQ ID NO: 58408 - DNA, 199 bp, Homo sapiens
gggaagctcctcctcagctttgagctgtggctgccacccatggggctctccttccgcctctcaagatccccccagcctgacgggccgcttaccatcccctytgccctgcagagccagccgccaaggttgacctcagcttcggagccacctctggatgaactgcccccagcccccgccccattaaagacccggaagcctg

SEQ ID NO: 58409 - DNA, 201 bp, Homo sapiens
cccaggccctgcctgtgttgaaagctctggggactgggccagggaagctcctcctcagctttgagctgtggctgccacccatggggctctccttccgcctytcaagatccccccagcctgacgggccgcttaccatcccctctgccctgcagagccagccgccaaggttgacctcagcttcggagccacctctggatgaac

SEQ ID NO: 58410 - DNA, 201 bp, Homo sapiens
tcccgaggcccggccaggggctgggcagggatgccaggaggccaccagagggcagtgcaggcttctgcctgggccccaggccctgcctgtgttgaaagctytggggactgggccagggaagctcctcctcagctttgagctgtggctgccacccatggggctctccttccgcctctcaagatccccccagcctgacgggcc

SEQ ID NO: 58411 - DNA, 201 bp, Homo sapiens
acgtccggcaggtggacgtgcccacgctgaccggagccttcggcatcctggcggcccacgtgcccacgctgcaggtcctgcggccggggctggtcgtggtscatgcagaggacggcaccacctccaaatactttgtgagcagcggttccatcgcagtgaacgccgactcttcggtgcagttgttggccgaagaggccgtga

SEQ ID NO: 58412 - DNA, 201 bp, Homo sapiens
ggggctggtcgtggtgcatgcagaggacggcaccacctccaaatactttgtgagcagcggttccatcgcagtgaacgccgactcttcggtgcagttgttgrccgaagaggccgtgacgctggacatgttggacctgggggcagccaaggcaaacttggagaaggcccaggcggagctggtggggacagctgacgaggccac

SEQ ID NO: 58413 - DNA, 149 bp, Homo sapiens
cttccgcctctcaagatccccccagcctgacgggccgcttaccatcccctctgccctgcagagccagccgccaaggttgacctcagcttcggagccacctytggatgaactgcccccagcccccgccccattaaagacccggaagcctg

SEQ ID NO: 58414 - DNA, 201 bp, Homo sapiens; identical to SEQ ID NO: 58411

SEQ ID NO: 58415 - DNA, 201 bp, Homo sapiens; identical to SEQ ID NO: 58412

SEQ ID NO: 58416 - DNA, 152 bp, Homo sapiens
ggcagagatccagatccgaatcgaggccaacgaggccctggtgaaggccctggagtaggcgagccagccgccaaggttgacctcagcttcggagccacctytggatgaactgcccccagcccccgccccattaaagacccggaagcctgact

SEQ ID NO: 58417 - DNA, 201 bp, Homo sapiens
gggaagctcctcctcagctttgagctgtggctgccacccatggggctctccttccgcctctcaagatccccccagcctgacgggccgcttaccatcccctytgccctgcagagccagccgccaaggttgacctcagcttcggagccacctctggatgaactgcccccagcccccgccccattaaagacccggaagcctgac

SEQ ID NO: 58418 - DNA, 201 bp, Homo sapiens; identical to SEQ ID NO: 58409

SEQ ID NO: 58419 - DNA, 201 bp, Homo sapiens
ggggtcccggccacctggggaagccgcgcctgccaaggaggccaccagagggcagtgcaggcttctgcctgggccccaggccctgcctgtgttgaaagctytggggactgggccagggaagctcctcctcagctttgagctgtggctgccacccatggggctctccttccgcctctcaagatccccccagcctgacgggcc

SEQ ID NO: 58420 - DNA, 201 bp, Homo sapiens; identical to SEQ ID NO: 58411

SEQ ID NO: 58421 - DNA, 201 bp, Homo sapiens; identical to SEQ ID NO: 58412

SEQ ID NO: 58422 - DNA, 201 bp, Homo sapiens
ggtgaaggccctggagtaggcggtgcgtacccggtgtcccgaggcccggccaggggctgggcagggatgccaggtgggcccagccagctcctggggtcccsgccacctggggaagccgcgcctgccaaggaggccaccagagggcagtgcaggcttctgcctgggccccaggccctgcctgtgttgaaagctctggggact

SEQ ID NO: 58423 - DNA, 152 bp, Homo sapiens
cttccgcctctcaagatccccccagcctgacgggccgcttaccatcccctctgccctgcagagccagccgccaaggttgacctcagcttcggagccacctytggatgaactgcccccagcccccgccccattaaagacccggaagcctgact

SEQ ID NO: 58424 - DNA, 201 bp, Homo sapiens
tggggtccgggtctcccaccagccactgcttcctcctgggccctcggccttccacccctcgtcttccctccctcgggggccctgatgcgtggcggcccccrcccggcctcggctctttactccattcacagccgtgcacgcgctcaagccaccagggtgcgagatgccagctctggagttctcggttgttgtaggaggttg

SEQ ID NO: 58425 - DNA, 201 bp, Homo sapiens
cagtagctaccgcctgacagcccctagaggcggacacacagcgacccccatccctgcaggacaaacgcccctgccctgccagaatccggcccccacagctstcacggctgctgctcctctggactccccaaggcaggtggcctccacccacgttctcccgtcctggggtgaggcttcctgtggcccagcccgccccattca

SEQ ID NO: 58426 - DNA, 105 bp, Homo sapiens
cgcgsagaaggggtgcgagcagcggcggcggcggaggctgccatggacgacgaggaggagacgtaccggctctggaaaatccgcaagaccatcatgcagaggagc

SEQ ID NO: 58427 - DNA, 121 bp, Homo sapiens
cgcggagaaggggtgcgagcrgcggcggcggcggaggctgccatggacgacgaggaggagacgtaccggctctggaaaatccgcaagaccatcatgcagaggagcccaaggtgggcatcaa

SEQ ID NO: 58428 - DNA, 201 bp, Homo sapiens
gcatgacaccctccgccaagcagtccctggtcgacatggcccccaagtacatcctggagcagtttctgcagcaggagctgctcatcaacatcacggagcaygagctagtccctgagcacgtcgtcatgaccaaggaggaggtgacagagctgctggcccgatataagctccgagagaaccagctgcccaggatccaggcgg

SEQ ID NO: 58429 - DNA, 201 bp, Homo sapiens
gtactgccagcgcatgcaggaggagaacatcacacgggctctcatcgtggtgcagcagggcatgacaccctccgccaagcagtccctggtcgacatggccsccaagtacatcctggagcagtttctgcagcaggagctgctcatcaacatcacggagcacgagctagtccctgagcacgtcgtcatgaccaaggaggaggt

SEQ ID NO: 58430 - DNA, 201 bp, Homo sapiens
ttgcttgatacagaaaccaggccgactaacaaggtttccagcaggtggccttgcctcaccccaagcacacgaggtcagcctggcaggtgtgccctcctcgmgctggcttcaggggtcagtgtctccccaggccctcgccctgccctcccacttcgtgctcctgggtaaggcgtgagcgtgtctgtctcttcccttcccgtg

SEQ ID NO: 58431 - DNA, 201 bp, Homo sapiens
tgggtgttttcaaatggtaaagatgttttgagcaaataaatttgcttgatacagaaaccaggccgactaacaaggtttccagcaggtggccttgcctcacsccaagcacacgaggtcagcctggcaggtgtgccctcctcgagctggcttcaggggtcagtgtctccccaggccctcgccctgccctcccacttcgtgctc

SEQ ID NO: 58432 - DNA, 201 bp, Homo sapiens
tcctgggccctcggccttccacccctcgtcttccctccctcgggggccctgatgcgtggcggcccccgcccggcctcggctctttactccattcacagccrtgcacgcgctcaagccaccagggtgcgagatgccagctctggagttctcggttgttgtaggaggttgggtgttttcaaatggtaaagatgttttgagcaa

SEQ ID NO: 58433 - DNA, 102 bp, Homo sapiens
crcggagaaggggtgcgagcagcggcggcggcggaggctgccatggacgacgaggaggagacgtaccggctctggaaaatccgcaagaccatcatgcagagg

SEQ ID NO: 58434 - DNA, 201 bp, Homo sapiens
agctgtgccacgaccgtggctatctggtgacccaggacgagcttgaccagaccctggaggagttcaaagcccaatttggggacaagccgagtgaggggcgkccgcggcgcacggacctcaccgtgctggtggcccacaacgatgaccccaccgaccagatgtttgtgttctttccagaggagcccaaggtgggcatcaaga

SEQ ID NO: 58435 - DNA, 201 bp, Homo sapiens
cagtagctaccgcctgacagcccctagaggcggacacacagcgacccccatccctgcaggacaaacgcccctgccctgccagaatccggcccccacagctstcacggctgctgctcctctggactccccaagaaaccaggccgactaacaaggtttccagcaggtggccttgcctcaccccaagcacacgaggtcagcctg

SEQ ID NO: 58436 - DNA, 201 bp, Homo sapiens
ttcctccatccacacagccctgtgggcaccaacaaggccactgtgacttcacacgacagcagtgttccccagctcagctgagccggggtgcaggggacaghacagggcacagtcctgtgccgcaaggccctcgtgctcctggaagcctctgggaggaggcgcccgctggtgggacgtcgaagtccaggcgctctcggcagc

SEQ ID NO: 58437 - DNA, 123 bp, Homo sapiens
agtccgcgcgggttctcgcgcgsagaaggggtgcgagcagcggcggcggcggaggctgccatggacgacgaggaggagacgtaccggctctggaaaatccgcaagaccatcatgcagctgtgc

SEQ ID NO: 58438 - DNA, 150 bp, Homo sapiens
gcaggggacagcacagggcacagtcctgtgccgcaaggccctcgtgctcctggaagcctctgggaggaggcgcccgctggtgggacgtcgaagtccaggcrctctcggcagcgaccccaggacggcgcacctaagctatgccgtggtgca

SEQ ID NO: 58439 - DNA, 139 bp, Homo sapiens
agtccgcgcgggttctcgcgcggagaaggggtgcgagcrgcggcggcggcggaggctgccatggacgacgaggaggagacgtaccggctctggaaaatccgcaagaccatcatgcagctgtgccacgaccgtggctatc

SEQ ID NO: 58440 - DNA, 108 bp, Homo sapiens
cgtgctcctggaagcctctgggaggaggcgcccgctggtgggacgtcgaagtccaggcgctctcggcagcgaccccaggacggcgcacctaagctatgccrtggtgca

SEQ ID NO: 58441 - DNA, 201 bp, Homo sapiens
ttcctggactgccctgggctgcaggtggacgtgacgaggtcattcgatgcctgaccgtctgcacagcctgtggtgaagaccacccgggctcccacctcgcrgggccccgtggcggggggttcccttcctcacacatccctcccctagggggaggcccagggccacgccacggggctctctctgtcccctccctggcccctt

SEQ ID NO: 58442 - DNA, 201 bp, Homo sapiens
gcatgacaccctccgccaagcagtccctggtcgacatggcccccaagtacatcctggagcagtttctgcagcaggagctgctcatcaacatcacggagcaygagctagtccctgagcacgtcgtcatgaccaaggaggaggtgacagagctgctggcccgatacagtaagctccgagagaaccagctgcccaggatccagg

SEQ ID NO: 58443 - DNA, 201 bp, Homo sapiens; identical to SEQ ID NO: 58429

SEQ ID NO: 58444 - DNA, 201 bp, Homo sapiens
ccagaatccggcccccacagctctcacggctgctgctcctctggactccccaagaaaccaggccgactaacaaggtttccagcaggtggccttgcctcacsccaagcacacgaggtcagcctggcaggtgtgccctcctcgagctggcttcagggttccacaggcgcatgggccacgtttccagtgcttggtggccatgtg

SEQ ID NO: 58445 - DNA, 201 bp, Homo sapiens
tggactccccaagaaaccaggccgactaacaaggtttccagcaggtggccttgcctcaccccaagcacacgaggtcagcctggcaggtgtgccctcctcgmgctggcttcagggttccacaggcgcatgggccacgtttccagtgcttggtggccatgtggggctgacgtgcgaaaccttagagccgggggatacgtccgt

SEQ ID NO: 58446 - DNA, 120 bp, Homo sapiens
agtccgcgcgggttctcgcrcggagaaggggtgcgagcagcggcggcggcggaggctgccatggacgacgaggaggagacgtaccggctctggaaaatccgcaagaccatcatgcagctg

SEQ ID NO: 58447 - DNA, 201 bp, Homo sapiens; identical to SEQ ID NO: 58434

SEQ ID NO: 58448 - DNA, 201 bp, Homo sapiens
agtgagacggctggcaggtacatcacctaccggctggtgcagtagctaccgcctgacaggacaaacgcccctgccctgccagaatccggcccccacagctstcacggctgctgctcctctggactccccaagaaaccaggccgactaacaaggtttccagcaggtggccttgcctcaccccaagcacacgaggtcagcctg

SEQ ID NO: 58449 - DNA, 201 bp, Homo sapiens; identical to SEQ ID NO: 58436

SEQ ID NO: 58450 - DNA, 123 bp, Homo sapiens; identical to SEQ ID NO: 58437

SEQ ID NO: 58451 - DNA, 150 bp, Homo sapiens; identical to SEQ ID NO: 58438

SEQ ID NO: 58452 - DNA, 139 bp, Homo sapiens; identical to SEQ ID NO: 58439

SEQ ID NO: 58453 - DNA, 108 bp, Homo sapiens; identical to SEQ ID NO: 58440

SEQ ID NO: 58454 - DNA, 201 bp, Homo sapiens; identical to SEQ ID NO: 58441

SEQ ID NO: 58455 - DNA, 201 bp, Homo sapiens; identical to SEQ ID NO: 58428

SEQ ID NO: 58456 - DNA, 201 bp, Homo sapiens; identical to SEQ ID NO: 58429

SEQ ID NO: 58457 - DNA, 201 bp, Homo sapiens; identical to SEQ ID NO: 58444

SEQ ID NO: 58458 - DNA, 201 bp, Homo sapiens; identical to SEQ ID NO: 58445

SEQ ID NO: 58459 - DNA, 120 bp, Homo sapiens; identical to SEQ ID NO: 58446

SEQ ID NO: 58460 - DNA, 201 bp, Homo sapiens; identical to SEQ ID NO: 58434

SEQ ID NO: 58461 - DNA, 201 bp, Homo sapiens; identical to SEQ ID NO: 58424

SEQ ID NO: 58462 - DNA, 201 bp, Homo sapiens; identical to SEQ ID NO: 58425

SEQ ID NO: 58463 - DNA, 123 bp, Homo sapiens; identical to SEQ ID NO: 58437

SEQ ID NO: 58464 - DNA, 139 bp, Homo sapiens; identical to SEQ ID NO: 58439

SEQ ID NO: 58465 - DNA, 201 bp, Homo sapiens; identical to SEQ ID NO: 58428

SEQ ID NO: 58466 - DNA, 201 bp, Homo sapiens; identical to SEQ ID NO: 58429

SEQ ID NO: 58467 - DNA, 201 bp, Homo sapiens; identical to SEQ ID NO: 58431

SEQ ID NO: 58468 - DNA, 201 bp, Homo sapiens; identical to SEQ ID NO: 58430

SEQ ID NO: 58469 - DNA, 201 bp, Homo sapiens; identical to SEQ ID NO: 58432

SEQ ID NO: 58470 - DNA, 120 bp, Homo sapiens; identical to SEQ ID NO: 58446

SEQ ID NO: 58471 - DNA, 109 bp, Homo sapiens
atccagcgtgcaccccgccggaggaaggtcccatggcctgctgggcttggctcggcgcccccacccctggctaccttgtgggaataaacagacaaattagmctgctgga

SEQ ID NO: 58472 - DNA, 141 bp, Homo sapiens
ccaatgagcgctctggagggcgtggccgtgggaaaggaggygcggaaagccgacgcgcgtccattggtcggctggacgaggggaggagccgctggctcccagccccgccgcgatgagcctcggccgcctttgccgcctact

SEQ ID NO: 58473 - DNA, 201 bp, Homo sapiens
tacggacccatggaggagcccctggtgatagagaaggacctgccccactatttctagctccacaagtgtgtggccccgcccgagcccctgcccacgccctyggagccttccaccggcactcatgacggcctgcctgcaaacctgctggtggggcagacccgaaaatccagcgtgcaccccgccggaggaaggtcccatggc

SEQ ID NO: 58474 - DNA, 201 bp, Homo sapiens
cctggtgatagagaaggacctgccccactatttctagctccacaagtgtgtggccccgcccgagcccctgcccacgcccttggagccttccaccggcactyatgacggcctgcctgcaaacctgctggtggggcagacccgaaaatccagcgtgcaccccgccggaggaaggtcccatggcctgctgggcttggctcggcg

SEQ ID NO: 58475 - DNA, 201 bp, Homo sapiens
gatacgctgagtgtggtttgcggatcctggccttcccgtgtaaccagttcgggaagcaggagccagggagtaacgaagagatcaaagagttcgccgcgggytacaacgtcaaattcgatatgttcagcaagatctgcgtgaacggggacgacgcccacccgctgtggaagtggatgaagatccaacccaagggcaagggca

SEQ ID NO: 58476 - DNA, 109 bp, Homo sapiens; identical to SEQ ID NO: 58471

SEQ ID NO: 58477 - DNA, 141 bp, Homo sapiens; identical to SEQ ID NO: 58472

SEQ ID NO: 58478 - DNA, 201 bp, Homo sapiens; identical to SEQ ID NO: 58473

SEQ ID NO: 58479 - DNA, 201 bp, Homo sapiens; identical to SEQ ID NO: 58474

SEQ ID NO: 58480 - DNA, 201 bp, Homo sapiens; identical to SEQ ID NO: 58475

SEQ ID NO: 58481 - DNA, 141 bp, Homo sapiens; identical to SEQ ID NO: 58472

SEQ ID NO: 58482 - DNA, 201 bp, Homo sapiens
tacggacccatggaggagcccctggtgatagagaaggacctgccccactatttctagctccacaagtgtgtggccccgcccgagcccctgcccacgccctyggagccttccaccggcactcatgacggcctgcctgcaaacctgctggtggggcagacccggcttggctcggcgcccccacccctggctaccttgtgggaa

SEQ ID NO: 58483 - DNA, 197 bp, Homo sapiens
cctggtgatagagaaggacctgccccactatttctagctccacaagtgtgtggccccgcccgagcccctgcccacgcccttggagccttccaccggcactyatgacggcctgcctgcaaacctgctggtggggcagacccggcttggctcggcgcccccacccctggctaccttgtgggaataaacagacaaattag

SEQ ID NO: 58484 - DNA, 201 bp, Homo sapiens; identical to SEQ ID NO: 58475

SEQ ID NO: 58485 - DNA, 109 bp, Homo sapiens; identical to SEQ ID NO: 58471

SEQ ID NO: 58486 - DNA, 201 bp, Homo sapiens
gggctggggtcggggaaggggaaggggttgttccacgcgcgcgggtcgtggtcggggaaggggccgtccaggccgttgcaggcgcgcgtgccggggccggsgtcgggggtccaagcttgcagggggcggggtccgggacggctggggcggagctggaccgttgagggccacggcggggcgtctccgggccgagcggggctg

SEQ ID NO: 58487 - DNA, 201 bp, Homo sapiens; identical to SEQ ID NO: 58473

SEQ ID NO: 58488 - DNA, 201 bp, Homo sapiens; identical to SEQ ID NO: 58474

SEQ ID NO: 58489 - DNA, 201 bp, Homo sapiens; identical to SEQ ID NO: 58475

SEQ ID NO: 58490 - DNA, 201 bp, Homo sapiens
acggcccggcccagcagctctcaggattcaacaccaaccagtccaacaacgtgctgcaggccccactgccccccatgaggctccgtggcgggcggatgacrctgggctcctgcagggaaaggcagccggaattcgtgtgagctggggtggggctgggaccacaggtggcttctctcttgcctgctcctgtccctccagcac

SEQ ID NO: 58491 - DNA, 201 bp, Homo sapiens
gtgccggcccggacgtcgtcgaggacatctcccatctgctggcggacgtggcccgcttcgctgagggccttgagaaacttaaggagtgtgtgttgcgtgaygacctccttgaggcccgccgcccgcgggcccacgagtgcctgggtgaggctctgcgtgtcatgcatcagatcatctccaagtacccgctgctgaacaccg

SEQ ID NO: 58492 - DNA, 201 bp, Homo sapiens
aggctccgtggcgggcggatgacactgggctcctgcagggaaaggcagccggaattcgtgtgagctggggtggggctgggaccacaggtggcttctctctygcctgctcctgtccctccagcacgtcccctgcaccacggcatagcttaggtgcgccgtcctggggtcgctgccgagagcgcctggacttcgacgtcccac

SEQ ID NO: 58493 - DNA, 201 bp, Homo sapiens
acgagtcatccaaccagcgagctgaggtagtcgtccaggtgccgtacctggaggcgggcgaggcggtggtctacccgctgcaggaggcggcggcggacggktgcagagaatcccgagttgtgtccaacgattcggactcggacctagaggaggcctccgagctgctgtcctcatcggaggccagtgccctgggccacctca

SEQ ID NO: 58494 - DNA, 201 bp, Homo sapiens
tgagaaacttaaggagtgtgtgttgcgtgacgacctccttgaggcccgccgcccgcgggcccacgagtgcctgggtgaggctctgcgtgtcatgcatcagrtcatctccaagtacccgctgctgaacaccgtggagacgctcaccgcagccggcaccctcattgccaaggtcaaagccttccattatgagagcaacaatga

SEQ ID NO: 58495 - DNA, 201 bp, Homo sapiens
gctgccgagagcgcctggacttcgacgtcccaccagcgggcgcctcctcccagaggcttccaggagcacgagggccttgcggcacaggactgtgccctgtdctgtcccctgcaccccggctcagctgagctggggaacactgctgtcgtgtgaagtcacagtggccttgttggtgcccacagggctgtgtggatggaggaa

SEQ ID NO: 58496 - DNA, 201 bp, Homo sapiens
cgtatcccccggctctaaggtttcgcacgtcagccccacatggccaccaagcactggaaacgtggcccatgcgcctgtggaactgcattttttttttttttgagacagggtgtgaccctgtggcccaggctggagtacaggagcacaatcgtagctcactgcagcctcggcctcctgggctcaaatgatcctcccgcctca

SEQ ID NO: 58497 - DNA, 201 bp, Homo sapiens
gaccacaggtggcttctctcttgcctgctcctgtccctccagcacgtcccctgcaccacggcatagcttaggtgcgccgtcctggggtcgctgccgagagygcctggacttcgacgtcccaccagcgggcgcctcctcccagaggcttccaggagcacgagggccttgcggcacaggactgtgccctgtgctgtcccctgc

SEQ ID NO: 58498 - DNA, 201 bp, Homo sapiens
aaagaaccgcgcgggaagccccagcccgcagccctcgggggagctgcccaggaaggatggggctgacgcggtgttccccggaccaagcctggagccgcccrctgggtcctccggcgtcaaggccacagggaccctcaagcggcccaccagcctgagccgccacgccagcgcggctggcttccccctgtcgggtgctgcctc

SEQ ID NO: 58499 - DNA, 201 bp, Homo sapiens
tggacagcagcaccctcctagcagtgcctcctggggactcgagccagtccatggaaagcctgtatggaccgggcagtgagggcacgcctcccagcctggawgactgtgacgccggctgcctgcccgccgaggaggtggacgtgctgctacagcgctgtgaggggggcgtggatgccgcactgctgtatgccaagaacatgg

SEQ ID NO: 58500 - DNA, 201 bp, Homo sapiens
tgacggcgctgcggcagatccaggaggtcatccggcagagcgaccaaaccatcaagtcggccacgatctcctactaccagatgatgcatatgcagacggcrccgctgcccgtgcacttccagatgctgtgtgagagcagcaagctgtatgacccaggccagcagtacgcctcccacgtgcgccagctgcagcgggaccagg

SEQ ID NO: 58501 - DNA, 201 bp, Homo sapiens
gagggtgccggcccggacgtcgtcgaggacatctcccatctgctggcggacgtggcccgcttcgctgagggccttgagaaacttaaggagtgtgtgttgcrtgacgacctccttgaggcccgccgcccgcgggcccacgagtgcctgggtgaggctctgcgtgtcatgcatcagatcatctccaagtacccgctgctgaac

SEQ ID NO: 58502 - DNA, 201 bp, Homo sapiens
gggaaaggcagccggaattcgtgtgagctggggtggggctgggaccacaggtggcttctctcttgcctgctcctgtccctccagcacgtcccctgcaccayggcatagcttaggtgcgccgtcctggggtcgctgccgagagcgcctggacttcgacgtcccaccagcgggcgcctcctcccagaggcttccaggagcacg

SEQ ID NO: 58503 - DNA, 201 bp, Homo sapiens
cagcagcagagcgaggccagcctagaggtggcttctggcagccacagcggcagtgaggagcagctggaggccacagcccgggaggacggggacggggacgrggacggcccggcccagcagctctcaggattcaacaccaaccagtccaacaacgtgctgcaggccccactgccccccatgaggctccgtggcgggcggatg

SEQ ID NO: 58504 - DNA, 201 bp, Homo sapiens
cgtgctgcaggccccactgccccccatgaggctccgtggcgggcggatgacactgggctcctgcagggaaaggcagccggaattcgtgtgagctggggtgrggctgggaccacaggtggcttctctcttgcctgctcctgtccctccagcacgtcccctgcaccacggcatagcttaggtgcgccgtcctggggtcgctgc

SEQ ID NO: 58505 - DNA, 201 bp, Homo sapiens
tcaacaccaaccagtccaacaacgtgctgcaggccccactgccccccatgaggctccgtggcgggcggatgacactgggctcctgcagggaaaggcagccrgaattcgtgtgagctggggtggggctgggaccacaggtggcttctctcttgcctgctcctgtccctccagcacgtcccctgcaccacggcatagcttagg

SEQ ID NO: 58506 - DNA, 201 bp, Homo sapiens
accgtgcccagaggaagctgcaagaggcggagtccaacctgcgcaaggccaagcagggttacgtgcagcgctgcgaggaccacgacaaggctcgcttcctygtggccaaggcggaggaggagcaggctggcagcgcgccgggagcaggcagcacggccaccaagaccctggacaagcggcggcggctggaggaggaggcca

SEQ ID NO: 58507 - DNA, 201 bp, Homo sapiens
gctcgtagggctggccaaggacagcctgaaggcagaggccgaggccaaggcggcgtcccggggccggcaggacggctcggagagcgaggcagtggcggtgsccctggcaggtcggctgcgggagctcctgcgggacctgccgcctgagaaccgggcctcgctgcagtacctgctgcgtcacctacgcaggatcgtggaggt

SEQ ID NO: 58508 - DNA, 201 bp, Homo sapiens
tcagcttcctggagcagcagcagagcgaggccagcctagaggtggcttctggcagccacagcggcagtgaggagcagctggaggccacagcccgggaggayggggacggggacgaggacggcccggcccagcagctctcaggattcaacaccaaccagtccaacaacgtgctgcaggccccactgccccccatgaggctcc

SEQ ID NO: 58509 - DNA, 201 bp, Homo sapiens
caagcagggttacgtgcagcgctgcgaggaccacgacaaggctcgcttcctcgtggccaaggcggaggaggagcaggctggcagcgcgccgggagcaggcrgcacggccaccaagaccctggacaagcggcggcggctggaggaggaggccaagaacaaggcggaggaagctatggccacctaccgcacctgcgtggccga

SEQ ID NO: 58510 - DNA, 201 bp, Homo sapiens
ccatgtcgtccacggaggagctggtggacccagacggtggagccggggcttcagcctttgagcaggctgacctcaacggcatgacccccgagctgccggtrgccgtgcccagtggaccgttccgccacgaggggctgtccaaggcggcccgtactcaccggctccggaagctccgcacgcccgccaagtgccgcgagtgca

SEQ ID NO: 58511 - DNA, 201 bp, Homo sapiens
acgtctacttccagggtgctgagtgtgaagagtgctgcctggcctgccacaagaaatgtctggagacgctggccatacagtgcgggcacaagaagctgcarggccgcctgcagctgttcggccaggacttcagccacgcggcccgcagcgcccccgacggcgtgcccttcatcgtcaagaagtgcgtctgcgagatcgagc

SEQ ID NO: 58512 - DNA, 201 bp, Homo sapiens
caccgagggtgccggcccggacgtcgtcgaggacatctcccatctgctggcggacgtggcccgcttcgctgagggccttgagaaacttaaggagtgtgtgytgcgtgacgacctccttgaggcccgccgcccgcgggcccacgagtgcctgggtgaggctctgcgtgtcatgcatcagatcatctccaagtacccgctgct

SEQ ID NO: 58513 - DNA, 201 bp, Homo sapiens
gctgtcgtgtgaagtcacagtggccttgttggtgcccacagggctgtgtggatggaggaagctgtccctgcccagtgcatcccccaggtcatcacggggamgcaggaggcaggccctgccctgccctctcctcacaggtctgttgcagggactccagaaaccattctgggagccgtggatgggggcggagctggggtttgg

SEQ ID NO: 58514 - DNA, 201 bp, Homo sapiens
cggaggagacccccgggggccaggacgagtcatccaaccagcgagctgaggtagtcgtccaggtgccgtacctggaggcgggcgaggcggtggtctacccsctgcaggaggcggcggcggacgggtgcagagaatcccgagttgtgtccaacgattcggactcggacctagaggaggcctccgagctgctgtcctcatcgg

SEQ ID NO: 58515 - DNA, 201 bp, Homo sapiens
aaggggccagggaggggacagagagagccccgtggcgtggccctgggcctccccctaggggagggatgtgtgaggaagggaaccccccgccacggggcccygcgaggtgggagcccgggtggtcttcaccacaggctgtgcagacggtcaggcatcgaatgacctcgtcacgtccacctgcagcccagggcagtccaggaa

SEQ ID NO: 58516 - DNA, 201 bp, Homo sapiens
ataccaaggtgacggcgctgcggcagatccaggaggtcatccggcagagcgaccaaaccatcaagtcggccacgatctcctactaccagatgatgcatatrcagacggcgccgctgcccgtgcacttccagatgctgtgtgagagcagcaagctgtatgacccaggccagcagtacgcctcccacgtgcgccagctgcagc

SEQ ID NO: 58517 - DNA, 201 bp, Homo sapiens
atgtgcactacgactttgagccccacgtctccgccaacgcctggtcccccgtcatgcgtgcccggaagagcagcttcaacgtgagtgatgtggcgcggccsgaggctgccgggagccccccagaagaaggcgggtgcactgagggcacacctgccaaggaccacagggccgggcgaggacaccaggttcacaagtcatggc

SEQ ID NO: 58518 - DNA, 201 bp, Homo sapiens
ggccacagggaccctcaagcggcccaccagcctgagccgccacgccagcgcggctggcttccccctgtcgggtgctgcctcctggacactgggccggagcyaccggagcccactgacagccgccagcccgggcgagctgcccaccgagggtgccggcccggacgtcgtcgaggacatctcccatctgctggcggacgtggc

SEQ ID NO: 58519 - DNA, 201 bp, Homo sapiens; identical to SEQ ID NO: 58490

SEQ ID NO: 58520 - DNA, 201 bp, Homo sapiens; identical to SEQ ID NO: 58492

SEQ ID NO: 58521 - DNA, 201 bp, Homo sapiens; identical to SEQ ID NO: 58493

SEQ ID NO: 58522 - DNA, 201 bp, Homo sapiens; identical to SEQ ID NO: 58495

SEQ ID NO: 58523 - DNA, 201 bp, Homo sapiens; identical to SEQ ID NO: 58496

SEQ ID NO: 58524 - DNA, 201 bp, Homo sapiens; identical to SEQ ID NO: 58497

SEQ ID NO: 58525 - DNA, 201 bp, Homo sapiens; identical to SEQ ID NO: 58502

SEQ ID NO: 58526 - DNA, 201 bp, Homo sapiens; identical to SEQ ID NO: 58503

SEQ ID NO: 58527 - DNA, 201 bp, Homo sapiens; identical to SEQ ID NO: 58504

SEQ ID NO: 58528 - DNA, 201 bp, Homo sapiens; identical to SEQ ID NO: 58505

SEQ ID NO: 58529 - DNA, 201 bp, Homo sapiens; identical to SEQ ID NO: 58507

SEQ ID NO: 58530 - DNA, 201 bp, Homo sapiens; identical to SEQ ID NO: 58508

SEQ ID NO: 58531 - DNA, 201 bp, Homo sapiens
gggctgggctcactcactctggccgcccccagtgctgcctggcctgccacaagaaatgtctggagacgctggccatacagtgcgggcacaagaagctgcarggccgcctgcagctgttcggccaggacttcagccacgcggcccgcagcgcccccgacggcgtgcccttcatcgtcaagaagtgcgtctgcgagatcgagc

SEQ ID NO: 58532 - DNA, 122 bp, Homo sapiens
gccgtgtgggggctgtgagcgscccggggaggtggggtggagccgctgggggctgcgctgagctgggcgccccggggctgggctcactcactctggccgcccccagtgctgcctggcctgcc

SEQ ID NO: 58533 - DNA, 201 bp, Homo sapiens; identical to SEQ ID NO: 58513

SEQ ID NO: 58534 - DNA, 201 bp, Homo sapiens; identical to SEQ ID NO: 58515

SEQ ID NO: 58535 - DNA, 201 bp, Homo sapiens; identical to SEQ ID NO: 58514

SEQ ID NO: 58536 - DNA, 121 bp, Homo sapiens
gccgtgtgggggctgtgagcgccccggggaggtggggtggagccgctgggggctgcgctgagctgggcgccccggggctgggctcactcactctggccgcccccagtgctgcctggcctgc

SEQ ID NO: 58537 - DNA, 201 bp, Homo sapiens; identical to SEQ ID NO: 58490

SEQ ID NO: 58538 - DNA, 201 bp, Homo sapiens; identical to SEQ ID NO: 58491

SEQ ID NO: 58539 - DNA, 201 bp, Homo sapiens; identical to SEQ ID NO: 58492

SEQ ID NO: 58540 - DNA, 201 bp, Homo sapiens; identical to SEQ ID NO: 58493

SEQ ID NO: 58541 - DNA, 201 bp, Homo sapiens; identical to SEQ ID NO: 58494

SEQ ID NO: 58542 - DNA, 201 bp, Homo sapiens; identical to SEQ ID NO: 58495

SEQ ID NO: 58543 - DNA, 201 bp, Homo sapiens; identical to SEQ ID NO: 58496

SEQ ID NO: 58544 - DNA, 201 bp, Homo sapiens; identical to SEQ ID NO: 58497

SEQ ID NO: 58545 - DNA, 201 bp, Homo sapiens; identical to SEQ ID NO: 58498

SEQ ID NO: 58546 - DNA, 201 bp, Homo sapiens; identical to SEQ ID NO: 58499

SEQ ID NO: 58547 - DNA, 201 bp, Homo sapiens; identical to SEQ ID NO: 58500

SEQ ID NO: 58548 - DNA, 201 bp, Homo sapiens; identical to SEQ ID NO: 58501

SEQ ID NO: 58549 - DNA, 201 bp, Homo sapiens; identical to SEQ ID NO: 58502

SEQ ID NO: 58550 - DNA, 201 bp, Homo sapiens; identical to SEQ ID NO: 58503

SEQ ID NO: 58551 - DNA, 201 bp, Homo sapiens; identical to SEQ ID NO: 58504

SEQ ID NO: 58552 - DNA, 201 bp, Homo sapiens; identical to SEQ ID NO: 58505

SEQ ID NO: 58553 - DNA, 201 bp, Homo sapiens; identical to SEQ ID NO: 58506

SEQ ID NO: 58554 - DNA, 201 bp, Homo sapiens; identical to SEQ ID NO: 58507

SEQ ID NO: 58555 - DNA, 201 bp, Homo sapiens; identical to SEQ ID NO: 58508

SEQ ID NO: 58556 - DNA, 201 bp, Homo sapiens; identical to SEQ ID NO: 58509

SEQ ID NO: 58557 - DNA, 201 bp, Homo sapiens; identical to SEQ ID NO: 58510

SEQ ID NO: 58558 - DNA, 201 bp, Homo sapiens; identical to SEQ ID NO: 58511

SEQ ID NO: 58559 - DNA, 201 bp, Homo sapiens; identical to SEQ ID NO: 58512

SEQ ID NO: 58560 - DNA, 201 bp, Homo sapiens; identical to SEQ ID NO: 58513

SEQ ID NO: 58561 - DNA, 201 bp, Homo sapiens; identical to SEQ ID NO: 58514

SEQ ID NO: 58562 - DNA, 201 bp, Homo sapiens; identical to SEQ ID NO: 58515

SEQ ID NO: 58563 - DNA, 201 bp, Homo sapiens; identical to SEQ ID NO: 58516

SEQ ID NO: 58564 - DNA, 201 bp, Homo sapiens; identical to SEQ ID NO: 58517

SEQ ID NO: 58565 - DNA, 201 bp, Homo sapiens; identical to SEQ ID NO: 58518

SEQ ID NO: 58566 - DNA, 201 bp, Homo sapiens
tacacggaccacacgcacactcacgcacacaatgcacatatgcacactcgcacacatgcacacttgcacacacatgcacacacaagcacatgtgcacacaygcttgcacacatacacacatgcacacttgcactcatgcacactcatgcgcacatatacacatgcacacgcacactcgcacacacgtgcacatatatgcac

SEQ ID NO: 58567 - DNA, 201 bp, Homo sapiens
gcaggtgaagctggccttctgggggaggtcgtaccccctcgccccacccccatcccttccttattttctgcatcagtgccgcagccactgaggtgcatggytggggcagggagggggtcacacatcccagtccctgacctcatgtgggtccaggcctctggcagcggccgtgggggctcgcatccgcctctgggaagcacc

SEQ ID NO: 58568 - DNA, 201 bp, Homo sapiens
agcacatgtgcacacacgcttgcacacatacacacatgcacacttgcactcatgcacactcatgcgcacatatacacatgcacacgcacactcgcacacaygtgcacatatatgcacagtcatgcacacacatgcacacacacacatgcacacacgtccttgtgtggacacatgcatgtgtgcctgttggcatgcatgcac

SEQ ID NO: 58569 - DNA, 110 bp, Homo sapiens
gacatatatwtttttttattccaagcaaattcacagttctgaatcctcaccaggccccttgttaagaatgcctggcccacgcgcggtggctcacgcctgtaatcccagca

SEQ ID NO: 58570 - DNA, 201 bp, Homo sapiens
atcccagtccctgacctcatgtgggtccaggcctctggcagcggccgtgggggctcgcatccgcctctgggaagcacctgcgtggctgacgcctcctgtgyccgtgtgtctctgtgccagcacccagcctgccctgccaaaggccagagccgtggctcccaaacccagcagccggggcgagtatgtggtggccaagctgga

SEQ ID NO: 58571 - DNA, 201 bp, Homo sapiens
gcctgctgccagtttccttctgtggatgatcctgggaccgtccttgcttggacactgttgacctgccgcgttccatctcccggcagctccagcgtgggccyggctgtgcaggcacgaggtgtccatcagagcgtggccaccgatggcccaagcaggtgaagctggccttctgggggaggtcgtaccccctcgccccacccc

SEQ ID NO: 58572 - DNA, 201 bp, Homo sapiens
ctatgagctgtaggccctcctcgagcgccagggcctctctgcacactcacaggcacacacatacacacaccaacgtgcagacacgtacacacacaacacaygcatgcacactcacatgctcacatgtgcatgcaagctcacatgtatggacagatgtgtacacggaccacacgcacactcacgcacacaatgcacatatgc

SEQ ID NO: 58573 - DNA, 201 bp, Homo sapiens
ctcgagcgccagggcctctctgcacactcacaggcacacacatacacacaccaacgtgcagacacgtacacacacaacacatgcatgcacactcacatgckcacatgtgcatgcaagctcacatgtatggacagatgtgtacacggaccacacgcacactcacgcacacaatgcacatatgcacactcgcacacatgcaca

SEQ ID NO: 58574 - DNA, 201 bp, Homo sapiens
ttgcactcatgcacactcatgcgcacatatacacatgcacacgcacactcgcacacacgtgcacatatatgcacagtcatgcacacacatgcacacacacrcatgcacacacgtccttgtgtggacacatgcatgtgtgcctgttggcatgcatgcacacaggcacactcactgatgcacacacacccctgcggccgtgga

SEQ ID NO: 58575 - DNA, 184 bp, Homo sapiens
tacggccgaggccctgctctacggcatcctgcagctgcagaggaagatcaagcgggagcggaggctgcagatctggtaccgcaggtagcgccgccgccgcmgccgccggagcctgtcgccgtcctgtccccagcctgcttgtgtcccgtgaggttgtcaataaacctgccctcgggctgccgcc

SEQ ID NO: 58576 - DNA, 154 bp, Homo sapiens
gttaaccgaaaggttggtggttcgagcccacccagggacgcgtggtgacttttkccctcctggaataacaagaaaatgagtgtcgcctctgtttttgtcggtccgccgcagacccgcggcccccacgtgcgcactccgatgacctttccgcctc

SEQ ID NO: 58577 - DNA, 148 bp, Homo sapiens
gttaaccgaaaggttggtggttcgagcccacccagggacgcgtggtgrctttttccctcctggaataacaagaaaatgagtgtcgcctctgtttttgtcggtccgccgcagacccgcggcccccacgtgcgcactccgatgacctttc

SEQ ID NO: 58578 - DNA, 201 bp, Homo sapiens
gacctcagaggttgtctgaaggccgaggccaagatggcggtgctgtcagctcctggcctgcgcggcttccggatccttggtctgcgctccagcgtgggccyggctgtgcaggcacgaggtgtccatcagagcgtggccaccgatggcccaagcagcacccagcctgccctgccaaaggccagagccgtggctcccaaaccc

SEQ ID NO: 58579 - DNA, 201 bp, Homo sapiens
ctgcgccgtggagatgatgcacatggcagcaccccgctacgacatggaccgctttggcgtggtcttccgcgccagcccgcgccagtccgacgtcatgatcrtggccggcacactcaccaacaagatggccccagcgcttcgcaaggtctacgaccagatgccggagccgcgctacgtggtctccatggggagctgcgccaa

SEQ ID NO: 58580 - DNA, 184 bp, Homo sapiens; identical to SEQ ID NO: 58575

SEQ ID NO: 58581 - DNA, 201 bp, Homo sapiens; identical to SEQ ID NO: 58579

SEQ ID NO: 58582 - DNA, 152 bp, Homo sapiens
ctcctggcctgcgcggcttccggatccttggtctgcgctccagcgtgggccyggctgtgcaggcacgaggtgtccatcagagcgtggccaccgatggcccaagcagcacccagcctgccctgccaaaggccagagccgtggctcccaaaccc

SEQ ID NO: 58583 - DNA, 201 bp, Homo sapiens
gtcctttgaatgttccaacaaattcaaaacttcattttctgaatgttttacataaatgcgaactacctgttcgcattggtaacctgctgctgtatttcatrtcttaacggctattttgaggttcattaacaacatagaaagccttgaactgtataaccagctagattccttaataattagtcactagagacagcccaaaga

SEQ ID NO: 58584 - DNA, 201 bp, Homo sapiens
tcgtgctggattctgaatatctcgtcacacttctggtcatcgtccccaaaccaaactactcacaatggcaaaaaacctacgaatctctctcagacatggtrgtccctcgatcaaccaaactcattactgaggacaaggaagggggccttttcactgtgactctgtttcgaaaagtgattgaagatttcaaaaccaaggcca

SEQ ID NO: 58585 - DNA, 201 bp, Homo sapiens
caaatatcctgtcaagcagccgctcgtgagtgtggtggacacaatagccaagcaactggcgcagatcgagatggacctgaagtcccgaacggccgcctacracactctgaagacaaacctggagaacctggaaaagaaatccatggggaacctcttcacccggacactgagtgatattgtgagcaaagaggacttcgtgct

SEQ ID NO: 58586 - DNA, 201 bp, Homo sapiens
ttctgaatgttttacataaatgcgaactacctgttcgcattggtaacctgctgctgtatttcatgtcttaacggctattttgaggttcattaacaacataraaagccttgaactgtataaccagctagattccttaataattagtcactagagacagcccaaagacaaatattgggcaggaaatcagttctcactgagccc

SEQ ID NO: 58587 - DNA, 201 bp, Homo sapiens
ctgtcttccgacatctggatgaagtagccgctacaagtatactggatgcatctgtggagatcccgggactgcaactcaataaccaagactattttccttaygtctacttccatattgaccttagtcttcttgactagaaaggccagctggcacctctgtctcatgttcgtgcagattattacagacacctctttcctttag

SEQ ID NO: 58588 - DNA, 201 bp, Homo sapiens
ctgaagtcccgaacggccgcctacaacactctgaagacaaacctggagaacctggaaaagaaatccatggggaacctcttcacccggacactgagtgataytgtgagcaaagaggacttcgtgctggattctgaatatctcgtcacacttctggtcatcgtccccaaaccaaactactcacaatggcaaaaaacctacgaa

SEQ ID NO: 58589 - DNA, 201 bp, Homo sapiens
ttttctgaatgttttacataaatgcgaactacctgttcgcattggtaacctgctgctgtatttcatgtcttaacggctattttgaggttcattaacaacayagaaagccttgaactgtataaccagctagattccttaataattagtcactagagacagcccaaagacaaatattgggcaggaaatcagttctcactgagc

SEQ ID NO: 58590 - DNA, 201 bp, Homo sapiens
ttactatgatgagaaggaaattgaaagggaaagggaggagatggccagattgctgtctgataagaagcaacagtatggccccctgctgcgctggctcaagrtgaacttcagtgaagccttcattgcctggatccacatcaaggccctgagagtgtttgtggagtccgtgctcaggtatggactaccagtgaacttccaggc

SEQ ID NO: 58591 - DNA, 201 bp, Homo sapiens
aactaagatctttttcagagaaattgctcacaaaagttagtgacagttgtatttatttttttaagttacaataaaatgctctcaagtcctttgaatgttcyaacaaattcaaaacttcattttctgaatgttttacataaatgcgaactacctgttcgcattggtaacctgctgctgtatttcatgtcttaacggctattt

SEQ ID NO: 58592 - DNA, 201 bp, Homo sapiens
ttcattttctgaatgttttacataaatgcgaactacctgttcgcattggtaacctgctgctgtatttcatgtcttaacggctattttgaggttcattaacwacatagaaagccttgaactgtataaccagctagattccttaataattagtcactagagacagcccaaagacaaatattgggcaggaaatcagttctcact

SEQ ID NO: 58593 - DNA, 201 bp, Homo sapiens
caggtgcagatcatattatcaccatggacctacatgcttctcaaattcagggcttttttgatatcccagtagacaatttgtatgcagagccggctgtcctraagtggataagggagaatatctctgagtggaggaactgcactattgtctcacctgatgctggtggagctaagagagtgacctccattgcagacaggctga

SEQ ID NO: 58594 - DNA, 171 bp, Homo sapiens
ggcagtaggttttaggtggtatcgtagtgccttttgattaatttaagtatttaattttcatcttccttctttggatctatttggcctctcaaatgaactgrgattcctgttaaaaaagattgatgttattgtctcttgtagaggaaactaataaagtgtgtgtacctgtgt

SEQ ID NO: 58595 - DNA, 201 bp, Homo sapiens
accccacccttgtttccccttggtatttgatgacaaattcagcagaagacccggcttgctccagtgtagctttctacatcccacatcaggtatattagagsttatccgaactggggaaagacggattgagattaactgctgggacctcctacctgcattatctcattctggcttccttgataattctgtgggccttgcagc

SEQ ID NO: 58596 - DNA, 201 bp, Homo sapiens; identical to SEQ ID NO: 58593

SEQ ID NO: 58597 - DNA, 174 bp, Homo sapiens
ggcagtaggttttaggtggtatcgtagtgccttttgattaatttaagtatttaattttcatcttccttctttggatctatttggcctctcaaatgaactgrgattcctgttaaaaaagattgatgttattgtctcttgtagaggaaactaataaagtgtgtgtacctgtgtgat

SEQ ID NO: 58598 - DNA, 201 bp, Homo sapiens; identical to SEQ ID NO: 58595

SEQ ID NO: 58599 - DNA, 201 bp, Homo sapiens; identical to SEQ ID NO: 58593

SEQ ID NO: 58600 - DNA, 162 bp, Homo sapiens
ggcagtaggttttaggtggtatcgtagtgccttttgattaatttaagtatttaattttcatcttccttctttggatctatttggcctctcaaatgaactgrgattcctgttaaaaaagattgatgttattgtctcttgtagaggaaactaataaagtgtgtg

SEQ ID NO: 58601 - DNA, 201 bp, Homo sapiens
agccatgtccctttataatagagtatttgatgacaaattcagcagaagacccggcttgctccagtgtagctttctacatcccacatcaggtatattagagsttatccgaactggggaaagacggattgagattaactgctgggacctcctacctgcattatctcattctggcttccttgataattctgtgggccttgcagc

SEQ ID NO: 58602 - DNA, 201 bp, Homo sapiens
acctgttccatttctctgagggacctttagttggctctgtgggactgttccggatgggcctctgggtcactgcccccatcgccttgctgaagtcgctcatyagcgtcatccacctgatcacggccgcccgcaacatggctgccctggacgcagcagaccgcgccaagaagaagtgacgctggagccccgggtcctggctgc

SEQ ID NO: 58603 - DNA, 171 bp, Homo sapiens
tgatgtcactgactgtctacatgtatttatattcttgatattttctaccctcactagaatgtaaactccatgaaggcacagacttttcttgttctcttctstatccctagagtaagaccaacttgaacctggcatatagtagctgcttaataaatactcgtctgtcaatga

SEQ ID NO: 58604 - DNA, 191 bp, Homo sapiens
gtccccaccgcccacttgtttgatgtcactgactgtctacatgtatttatattcttgatattttctaccctcactagaatgtaaactccatgaaggcacakacttttcttgttctcttctctatccctagagtaagaccaacttgaacctggcatatagtagctgcttaataaatactcgtctgtcaatga

SEQ ID NO: 58605 - DNA, 172 bp, Homo sapiens
ttgatgtcactgactgtctacatgtatttatattcttgatattttctaccctcactagaatgtaaactccatgaaggcacagacttttcttgttctcttcyctatccctagagtaagaccaacttgaacctggcatatagtagctgcttaataaatactcgtctgtcaatga

SEQ ID NO: 58606 - DNA, 201 bp, Homo sapiens
acccatgctcatgtggtgtccccaccgcccacttgtttgatgtcactgactgtctacatgtatttatattcttgatattttctaccctcactagaatgtaractccatgaaggcacagacttttcttgttctcttctctatccctagagtaagaccaacttgaacctggcatatagtagctgcttaataaatactcgtctg

SEQ ID NO: 58607 - DNA, 201 bp, Homo sapiens
tgccctggacgcagcagaccgcgccaagaagaagtgacgctggagccccgggtcctggctgcccacctgccctgggagtcttgctgtgccacacagctccycaccccctgctaggaggtcccagtctcacgccttcctcatgtgttgttctacctgctgggatgggggtcagcctctctttggtgacgtcacgttctctgg

SEQ ID NO: 58608 - DNA, 201 bp, Homo sapiens
agttggctctgtgggactgttccggatgggcctctgggtcactgcccccatcgccttgctgaagtcgctcatcagcgtcatccacctgatcacggccgccygcaacatggctgccctggacgcagcagaccgcgccaagaagaagtgacgctggagccccgggtcctggctgcccacctgccctgggagtcttgctgtgcc

SEQ ID NO: 58609 - DNA, 201 bp, Homo sapiens
cctctgtcctgcctaccctggtcctggcgggacttcactatttgacttggtttcctttcagatattcttggctcagggcctgggttgagggagcttagggraggacgtccgtctgggtgcttttcctccagtttgctggctggcttctccgtctacccacagtgacctcacagagaggccctcctgccacccatgctcatg

SEQ ID NO: 58610 - DNA, 201 bp, Homo sapiens
tgccccctcacggcctcctccttctacctgctcagcggcctgctggacgctttcgatggacacgctgctcgcgctcttaatcaaggaacccggtttggggycatgctggacatgctgacggaccgctgctccaccatgtgcctgttggtcaacctggccctgctgtaccctggagccacgctgttcttccaaatcagcatg

SEQ ID NO: 58611 - DNA, 201 bp, Homo sapiens; identical to SEQ ID NO: 58602

SEQ ID NO: 58612 - DNA, 201 bp, Homo sapiens; identical to SEQ ID NO: 58607

SEQ ID NO: 58613 - DNA, 201 bp, Homo sapiens; identical to SEQ ID NO: 58608

SEQ ID NO: 58614 - DNA, 201 bp, Homo sapiens
cctctgtcctgcctaccctggtcctggcgggacttcactatttgacttggtttcctttcagatattcttggctcagggcctgggttgagggagcttagggraggacgtccgtctgggtgcttttcctccagtttgctggctggcttctccgtctacccacagtgacctcacagagagggagaggttgcagtgatccgtaat

SEQ ID NO: 58615 - DNA, 201 bp, Homo sapiens
agggaaggacgtccgtctgggtgcttttcctccagtttgctggctggcttctccgtctacccacagtgacctcacagagagggagaggttgcagtgatccrtaatggtgccactccagcctgggaggcagagccaggcagtctcaaaaaaaaaaaaaagcaactttggcccgtcttggaggctcacgcctggcctgtaatc

SEQ ID NO: 58616 - DNA, 201 bp, Homo sapiens; identical to SEQ ID NO: 58610

SEQ ID NO: 58617 - DNA, 201 bp, Homo sapiens
gagcatcagagtattatcactgctggaggaattttgtcaactacccacctggggatgaagctcactggccacaatacccacctctgtggatgatgttgtaygcactggagctgcactgcataattctaagtcttccaccctgtttaaagatttcaagaagatggcaaaatcatcttacatttttcagacttcatcttcaaa

SEQ ID NO: 58618 - DNA, 152 bp, Homo sapiens
tgattccgtgtgtgtactgattcaagaacaagcaatgatgacccactaaagagtgaatgccatttagaatctagaaatgttcacaaggtaccccaaaactstgtagcttaaaccaacaataaatatgtattacctctggcagtttctgtggg

SEQ ID NO: 58619 - DNA, 196 bp, Homo sapiens
gactccagaggaggaagtccagagacagagcaccatgacttctgagaaaggtccttcaaccggtgaccccactctgaggagaagaatcgaaccctrggagtttgacgtcttctatgaccccagagaacttcgtaaagaggcctgtctgctctacgaaatcaagtggggcatgagccggaagatctggcgaagctca

SEQ ID NO: 58620 - DNA, 201 bp, Homo sapiens
gccggaagatctggcgaagctcaggcaaaaacaccaccaatcacgtggaagttaattttataaaaaaatttacgtcagaaagagattttcacccatccatsagctgctccatcacctggttcttgtcctggagtccctgctgggaatgctcccaggctattagagagtttctgagtcggcaccctggtgtgactctagtga

SEQ ID NO: 58621 - DNA, 201 bp, Homo sapiens; identical to SEQ ID NO: 58617

SEQ ID NO: 58622 - DNA, 152 bp, Homo sapiens; identical to SEQ ID NO: 58618

SEQ ID NO: 58623 - DNA, 168 bp, Homo sapiens
gactccagaggaggaagtccagagacagagcaccatgacttctgagaaaggagaagaatcgaaccctrggagtttgacgtcttctatgaccccagagaacttcgtaaagaggcctgtctgctctacgaaatcaagtggggcatgagccggaagatctggcgaagctca

SEQ ID NO: 58624 - DNA, 201 bp, Homo sapiens; identical to SEQ ID NO: 58620

SEQ ID NO: 58625 - DNA, 201 bp, Homo sapiens
tgccatatttacccaactcaactgccaagtctcctggttcctccccgagggatcgaagctggtgccggtggccagagtggccgaggtccggggccctgccmactgcctgctgctgggggaacgggtggccctcaacacgctggcccgctgcagtggcattgccagtgctgccgccgctgcagtggaggccgccaggggggc

SEQ ID NO: 58626 - DNA, 201 bp, Homo sapiens
ctgtgggccaaatcccctggggtactggcagggcagcctttcttcgatgccatatttacccaactcaactgccaagtctcctggttcctccccgagggatygaagctggtgccggtggccagagtggccgaggtccggggccctgcccactgcctgctgctgggggaacgggtggccctcaacacgctggcccgctgcagt

SEQ ID NO: 58627 - DNA, 201 bp, Homo sapiens
gccaggggggccggctggactgggcacgtggcaggcacgaggaagaccacgccaggcttccggctggtggagaagtatgggctcctggtgggcggggccgyctcgcaccgctacgacctgggagggctggtgatggtgaaggataaccatgtggtggccgccggtggcgtggagaaggcggtgcgggcggccagacaggcg

SEQ ID NO: 58628 - DNA, 201 bp, Homo sapiens
ggccggctggactgggcacgtggcaggcacgaggaagaccacgccaggcttccggctggtggagaagtatgggctcctggtgggcggggccgcctcgcacsgctacgacctgggagggctggtgatggtgaaggataaccatgtggtggccgccggtggcgtggagaaggcggtgcgggcggccagacaggcggctgactt

SEQ ID NO: 58629 - DNA, 201 bp, Homo sapiens
cctccccgagggatcgaagctggtgccggtggccagagtggccgaggtccggggccctgcccactgcctgctgctgggggaacgggtggccctcaacacgstggcccgctgcagtggcattgccagtgctgccgccgctgcagtggaggccgccaggggggccggctggactgggcacgtggcaggcacgaggaagaccac

SEQ ID NO: 58630 - DNA, 201 bp, Homo sapiens; identical to SEQ ID NO: 58625

SEQ ID NO: 58631 - DNA, 201 bp, Homo sapiens; identical to SEQ ID NO: 58626

SEQ ID NO: 58632 - DNA, 201 bp, Homo sapiens; identical to SEQ ID NO: 58627

SEQ ID NO: 58633 - DNA, 201 bp, Homo sapiens; identical to SEQ ID NO: 58628

SEQ ID NO: 58634 - DNA, 201 bp, Homo sapiens; identical to SEQ ID NO: 58629

SEQ ID NO: 58635 - DNA, 201 bp, Homo sapiens
gtggtttgtactccgcctactgcctatatcgacttcgcccggcagaagctagatcccaagattgctgtggctgcgcagaactgctacaaagtgactaatgsggcttttactggggagatcagccctggcatgatcaaagactgcagagccacgtgggtggtcctggggcactcagagagaaggcatgtctttggggagtca

SEQ ID NO: 58636 - DNA, 201 bp, Homo sapiens
gctagatcccaagattgctgtggctgcgcagaactgctacaaagtgactaatggggcttttactggggagatcagccctggcatgatcaaagactgcagasccacgtgggtggtcctggggcactcagagagaaggcatgtctttggggagtcagatgagctgattgggcagaaagtggcccatgctctggcagaggcact

SEQ ID NO: 58637 - DNA, 201 bp, Homo sapiens
atggggcttttactggggagatcagccctggcatgatcaaagactgcagagccacgtgggtggtcctggggcactcagagagaaggcatgtctttggggastcagatgagctgattgggcagaaagtggcccatgctctggcagaggcactcggagtaatcgcctgcactggggagaagctagatgaaagggaagctggca

SEQ ID NO: 58638 - DNA, 201 bp, Homo sapiens
ccaacaggaccaggaagtacacgacaagctccgaggatggcttaagtccaacgtctctgatgcggtggctcagagcacccgtatcatttatggaggctctrtgactggggcaacctgcaaggagctggccagccagcctggcgtggatggcttccttgtgggtggtgcttccctcaagcccgaattcgtggacatcatcaa

SEQ ID NO: 58639 - DNA, 201 bp, Homo sapiens
ggactggagcaaggtcgtcctggcctatgagcctgtgtgggccattggtactggcaagactgcaacaccccaacaggaccaggaagtacacgacaagctcygaggatggcttaagtccaacgtctctgatgcggtggctcagagcacccgtatcatttatggaggctctgtgactggggcaacctgcaaggagctggccag

SEQ ID NO: 58640 - DNA, 168 bp, Homo sapiens
tgtagagacactgaccttcagcgcctcggctccagcgccatggcgccctccaggaagttcttcgttgkggggaactggaagatgaacgggcgaaagcagagtctgcgggagctcgtccgcactctgaacgcggccaaggtgccggccgacaccgaggtggtttgtact

SEQ ID NO: 58641 - DNA, 201 bp, Homo sapiens
actcggagtaatcgcctgcactggggagaagctagatgaaagggaagctggcatcactgagaaggttgttttcgagcagacaaaggtcatcgcagataacrtgaaggactggagcaaggtcgtcctggcctatgagcctgtgtgggccattggtactggcaagactgcaacaccccaacaggaccaggaagtacacgacaa

SEQ ID NO: 58642 - DNA, 201 bp, Homo sapiens
tggcatcactgagaaggttgttttcgagcagacaaaggtcatcgcagataacgtgaaggactggagcaaggtcgtcctggcctatgagcctgtgtgggccrttggtactggcaagactgcaacaccccaacaggaccaggaagtacacgacaagctccgaggatggcttaagtccaacgtctctgatgcggtggctcagag

SEQ ID NO: 58643 - DNA, 201 bp, Homo sapiens
cacgtgggtggtcctggggcactcagagagaaggcatgtctttggggagtcagatgagctgattgggcagaaagtggcccatgctctggcagaggcactcrgagtaatcgcctgcactggggagaagctagatgaaagggaagctggcatcactgagaaggttgttttcgagcagacaaaggtcatcgcagataacgtgaa

SEQ ID NO: 58644 - DNA, 201 bp, Homo sapiens
agagccacgtgggtggtcctggggcactcagagagaaggcatgtctttggggagtcagatgagctgattgggcagaaagtggcccatgctctggcagaggsactcggagtaatcgcctgcactggggagaagctagatgaaagggaagctggcatcactgagaaggttgttttcgagcagacaaaggtcatcgcagataac

SEQ ID NO: 58645 - DNA, 201 bp, Homo sapiens
gttgtggggaactggaagatgaacgggcgaaagcagagtctgcgggagctcgtccgcactctgaacgcggccaaggtgccggccgacaccgaggtggtttrtactccgcctactgcctatatcgacttcgcccggcagaagctagatcccaagattgctgtggctgcgcagaactgctacaaagtgactaatggggctttt

SEQ ID NO: 58646 - DNA, 201 bp, Homo sapiens
gaaagtggcccatgctctggcagaggcactcggagtaatcgcctgcactggggagaagctagatgaaagggaagctggcatcactgagaaggttgttttckagcagacaaaggtcatcgcagataacgtgaaggactggagcaaggtcgtcctggcctatgagcctgtgtgggccattggtactggcaagactgcaacacc

SEQ ID NO: 58647 - DNA, 201 bp, Homo sapiens
cctgcctggggtctccttatgccagggaccaggttaccctaacagcaggaaggttgtcattaacaacagtgtcttcagtgttcgcttcttcagaactacarctgtatgcaagtatgacttggttacagtcaaaaccccagcgtttgcagaacctgtcacagagggagatgtcaggtgggagaaagctgttggagacacagt

SEQ ID NO: 58648 - DNA, 201 bp, Homo sapiens
cctgctgctgcagccccaaaagcagaacctatagcagcggcagttcctccccgtgcagcacccatacccactcgatgccaccagtgccctcgccctcacarcctccttctagcaaacctgtgtctgcagtaaaacccactgctgtcccaccactagctgagccaggagctggcaaaggtctgcattcagaacatcgggaga

SEQ ID NO: 58649 - DNA, 201 bp, Homo sapiens
ctccttatgccagggaccaggttaccctaacagcaggaaggttgtcattaacaacagtgtcttcagtgttcgcttcttcagaactacaactgtatgcaagkatgacttggttacagtcaaaaccccagcgtttgcagaacctgtcacagagggagatgtcaggtgggagaaagctgttggagacacagttgcagaagatga

SEQ ID NO: 58650 - DNA, 201 bp, Homo sapiens
tgtctgcagtaaaacccactgctgtcccaccactagctgagccaggagctggcaaaggtctgcattcagaacatcgggagaaaatgaacaggatgcggcartgcattgctcagcgtctgaaggaggcccagaatacatgtgccaatgctgacaatttttaatgagattgatgtgagtaacatccagaagatgagggctcgg

SEQ ID NO: 58651 - DNA, 201 bp, Homo sapiens
gtgggagaaagctgttggagacacagttgcagaagatgaagtggtttgtgagattgaaactgacaagacattggtgcaggttccatcaccagcaaatggcrtgattgaagctcttttcgtacctgatgggggaaaagtcgaaggaggcactccgcttttcacactcaggaaaactggtgctgctcctgctaaggccaagcc

SEQ ID NO: 58652 - DNA, 201 bp, Homo sapiens
caggatgcggcagtgcattgctcagcgtctgaaggaggcccagaatacatgtgccaatgctgacaatttttaatgagattgatgtgagtaacatccagaaratgagggctcggcacaaagaggcttttttgaagaaacataacctcaaactaggcttcatgtcggcatctgtgaaggcctcagcctttgccttgcaggaac

SEQ ID NO: 58653 - DNA, 201 bp, Homo sapiens
ggaatgtggaagctatgaattatgcagatattgaacagaccatcactgaactgggagagaaggcccgaaagaatgaatttgccattgaagatatggatggyggtaccttcaccattagcaatggaggtgtttttggctcactctttgaacacccattatcaacccccctgtctgccatcctggggatgcatggcatctttg

SEQ ID NO: 58654 - DNA, 201 bp, Homo sapiens
caatggcaccttcattctccattgtcattgacttcaagatgcctcttctacctctaccaggaagcacaggccaggggatctgggtgtgtgaatgggaggaragagcagaggttccctgaggtcacgtgttgtaatcatcatagaaggagagcccaggtctgccctcacgctctccatcataggctcacaccaagaagactc

SEQ ID NO: 58655 - DNA, 201 bp, Homo sapiens
gagacccggccgccgtgatgctgtcccggtcccactgtgtcccgggcgttcagccactcgctctctgccttccagaaggggaactgccctctagggagacrttccctgcctggggtctccttatgccagggaccaggttaccctaacagcaggaaggttgtcattaacaacagtgtcttcagtgttcgcttcttcagaact

SEQ ID NO: 58656 - DNA, 201 bp, Homo sapiens
ggttgtcattaacaacagtgtcttcagtgttcgcttcttcagaactacaactgtatgcaagtatgacttggttacagtcaaaaccccagcgtttgcagaayctgtcacagagggagatgtcaggtgggagaaagctgttggagacacagttgcagaagatgaagtggtttgtgagattgaaactgacaagacattggtgca

SEQ ID NO: 58657 - DNA, 201 bp, Homo sapiens
accctacaaattgatcatgcaggaactgaaaaccagtcttctccctgtcccctcatgggtcccaggttagcctggtgacaggcacatgctgttggcctcamgcaaggaagcagagcactatgtaaccagcagtcacagcttttttcttggtgttcctgcctggctctctccctctctgcacctgtctcataccctcgaata

SEQ ID NO: 58658 - DNA, 201 bp, Homo sapiens
ctcaggaaaactggtgctgctcctgctaaggccaagccggctgaagctcctgctgctgcagccccaaaagcagaacctatagcagcggcagttcctccccrtgcagcacccatacccactcgatgccaccagtgccctcgccctcacaacctccttctagcaaacctgtgtctgcagtaaaacccactgctgtcccaccac

SEQ ID NO: 58659 - DNA, 201 bp, Homo sapiens
ggtcatttctaagatgtgttgccggtggatctgggcacaatcattggaattccttggagctactgggattcatggctttgtatccaactgcatccaggccwgaggctgctgacatttgacactagggccagtagagagtgcctttttgtatcttgagccaagaagtgaggcctgggggtggggaggggggaaggggtggga

SEQ ID NO: 58660 - DNA, 201 bp, Homo sapiens
tcacaacctccttctagcaaacctgtgtctgcagtaaaacccactgctgtcccaccactagctgagccaggagctggcaaaggtctgcattcagaacatcrggagaaaatgaacaggatgcggcagtgcattgctcagcgtctgaaggaggcccagaatacatgtgccaatgctgacaatttttaatgagattgatgtgag

SEQ ID NO: 58661 - DNA, 201 bp, Homo sapiens
tagggagacattccctgcctggggtctccttatgccagggaccaggttaccctaacagcaggaaggttgtcattaacaacagtgtcttcagtgttcgcttyttcagaactacaactgtatgcaagtatgacttggttacagtcaaaaccccagcgtttgcagaacctgtcacagagggagatgtcaggtgggagaaagctg

SEQ ID NO: 58662 - DNA, 201 bp, Homo sapiens
aaaagcagaacctatagcagcggcagttcctccccgtgcagcacccatacccactcgatgccaccagtgccctcgccctcacaacctccttctagcaaacstgtgtctgcagtaaaacccactgctgtcccaccactagctgagccaggagctggcaaaggtctgcattcagaacatcgggagaaaatgaacaggatgcgg

SEQ ID NO: 58663 - DNA, 201 bp, Homo sapiens
ctttgccttgcaggaacagcctgttgtaaacgcagtgattgatgatataaccaaagaggtggtatatagggattatattgacatcagtgttgcagtggccmccccacagggtctggtggttccagtcatcaggaatgtggaagctatgaattatgcagatattgaacagaccatcactgaactgggagagaaggcccgaaa

SEQ ID NO: 58664 - DNA, 201 bp, Homo sapiens
tcatttgggcacttgttagaaatgcacagtatcaggccctaccctacacttaaagaatcgggatctgtattttaaaagatgctcagctgattaatagccaygttaaacttttagaagcactgatctaatcccctaaatttcacatataaagaaacagagaccacccctcagaggagcaaacacagacatgctggatccggt

SEQ ID NO: 58665 - DNA, 201 bp, Homo sapiens
tgtattttaaaagatgctcagctgattaatagccacgttaaacttttagaagcactgatctaatcccctaaatttcacatataaagaaacagagaccaccyctcagaggagcaaacacagacatgctggatccggtcgtcactggatgggaacagggctcctaaagtttcgcactagaaggcaggcgatggacaggcgcaa

SEQ ID NO: 58666 - DNA, 201 bp, Homo sapiens
atcccctaaatttcacatataaagaaacagagaccacccctcagaggagcaaacacagacatgctggatccggtcgtcactggatgggaacagggctcctraagtttcgcactagaaggcaggcgatggacaggcgcaaaggggcctcacccggtcaaggagtaggatgcggccagcgcaggagctggtggtgaaaaactg

SEQ ID NO: 58667 - DNA, 201 bp, Homo sapiens
ctgggggcagccatattgaagcgagcggtggccgaaaaggtccaaacttcctcttcgttcttaatttgggaaattctagtgccttcgcctaggggtggagmgaggcgcacagcctgggtggagcgaggcgcacatcctgggtggagcctgcaaaagttggagaaggtgtggcagtcctcatttctgtggaatctgaagaag

SEQ ID NO: 58668 - DNA, 201 bp, Homo sapiens
cagtgcctgtgtgaaagctggagagagtgttctggttcatggggcaagtggaggagttggattagcagcatgccaaattgctagagcttatggcttaaagrttttgggcactgctggtactgaggaaggacaaaagattgttttgcaaaatggagcccatgaagtgttcaatcacagagaagtgaattacattgataaaat

SEQ ID NO: 58669 - DNA, 201 bp, Homo sapiens
catattgaagcgagcggtggccgaaaaggtccaaacttcctcttcgttcttaatttgggaaattctagtgccttcgcctaggggtggagagaggcgcacakcctgggtggagcgaggcgcacatcctgggtggagcctgcaaaagttggagaaggtgtggcagtcctcatttctgtggaatctgaagaagcccacgcagat

SEQ ID NO: 58670 - DNA, 201 bp, Homo sapiens
ctcatgaaaatatcattcatggtagtggggctactggaaaaatgattcttctcttatgatgattaattctttcatggatttcctatgtaattagaggtacygtctttcccccagttgtacttaccctatcttttctttaattaacattcgattccatgagcttcttatgtgaaaaaataagatttttctttagagagcaga

SEQ ID NO: 58671 - DNA, 201 bp, Homo sapiens
cagagtagatttagagttatctgtttttctggtgagggtcaaatatttttgttaattaagctcacaaatttgataaattaagaattatctgcatttgtctbgtaacataataatgtgtaataaagtctatagaaaattaaaacctgcttttctagtttttatattatttgcctctcatcacttctgcatagctcctgacag

SEQ ID NO: 58672 - DNA, 201 bp, Homo sapiens
cccacgcagattttaattcccactctagattctgtatctagatcaccatggcgactggacagaagttgatgagagctgttagagtttttgaatttggtggrccagaagtcctgaaattgcgatcagatattgcagtaccgattccaaaagaccatcaggttctaatcaaggtccatgcatgtggtgtcaaccccgtggaga

SEQ ID NO: 58673 - DNA, 201 bp, Homo sapiens
taacataataatgtgtaataaagtctatagaaaattaaaacctgcttttctagtttttatattatttgcctctcatcacttctgcatagctcctgacagtwacttcttaacagtgttctatgctggaagcctttatctaaactaaatacagggatgacctcttagcaatcttgccatcaatattatattcaagaaaataaa

SEQ ID NO: 58674 - DNA, 201 bp, Homo sapiens
tggaaattggctggttgaaacctgtgataggttctcaatatccattggagaaggtggccgaggctcatgaaaatatcattcatggtagtggggctactggwaaaatgattcttctcttatgatgattaattctttcatggatttcctatgtaattagaggtactgtctttcccccagttgtacttaccctatcttttcttt

SEQ ID NO: 58675 - DNA, 201 bp, Homo sapiens
ctttagagagcagaagcagaagagtaaaatttattgtatagctagcaatatttttttatgccatctgtctcaaatcaaagagtcatcatagtaggaaatarcatgttagttgtcatttggcatgagtgtgcattccagtaattcttaattgatatttgattaattccatacctttgattaaaacatgctagttcaaaataa

SEQ ID NO: 58676 - DNA, 201 bp, Homo sapiens
agagagtgttctggttcatggggcaagtggaggagttggattagcagcatgccaaattgctagagcttatggcttaaagattttgggcactgctggtactraggaaggacaaaagattgttttgcaaaatggagcccatgaagtgttcaatcacagagaagtgaattacattgataaaattaagaagtatgttggtgagaa

SEQ ID NO: 58677 - DNA, 201 bp, Homo sapiens
gactgctcagtttccaagggttttcaagcctacttacctttataaaggttctctagtctctgattagccatgactgtattggactttgaacattttctgawctaaaaacctctattctaaactaatctcatttggatgtgtaagtcttttgtaaaggcaagaataaataatatccaggacaatttattagttttctcagta

SEQ ID NO: 58678 - DNA, 201 bp, Homo sapiens
catgagcttcttatgtgaaaaaataagatttttctttagagagcagaagcagaagagtaaaatttattgtatagctagcaatatttttttatgccatctgwctcaaatcaaagagtcatcatagtaggaaataacatgttagttgtcatttggcatgagtgtgcattccagtaattcttaattgatatttgattaattcca

SEQ ID NO: 58679 - DNA, 201 bp, Homo sapiens
aaaaggtccaaacttcctcttcgttcttaatttgggaaattctagtgccttcgcctaggggtggagagaggcgcacagcctgggtggagcgaggcgcacakcctgggtggagcctgcaaaagttggagaaggtgtggcagtcctcatttctgtggaatctgaagaagcccacgcagattttaattcccactctagattctg

SEQ ID NO: 58680 - DNA, 201 bp, Homo sapiens
ccaggtcagcagtttcaacatcatttgggcacttgttagaaatgcacagtatcaggccctaccctacacttaaagaatcgggatctgtattttaaaagatsctcagctgattaatagccacgttaaacttttagaagcactgatctaatcccctaaatttcacatataaagaaacagagaccacccctcagaggagcaaac

SEQ ID NO: 58681 - DNA, 201 bp, Homo sapiens; identical to SEQ ID NO: 58664

SEQ ID NO: 58682 - DNA, 201 bp, Homo sapiens; identical to SEQ ID NO: 58665

SEQ ID NO: 58683 - DNA, 201 bp, Homo sapiens; identical to SEQ ID NO: 58666

SEQ ID NO: 58684 - DNA, 201 bp, Homo sapiens; identical to SEQ ID NO: 58667

SEQ ID NO: 58685 - DNA, 201 bp, Homo sapiens; identical to SEQ ID NO: 58668

SEQ ID NO: 58686 - DNA, 201 bp, Homo sapiens; identical to SEQ ID NO: 58669

SEQ ID NO: 58687 - DNA, 201 bp, Homo sapiens; identical to SEQ ID NO: 58670

SEQ ID NO: 58688 - DNA, 201 bp, Homo sapiens; identical to SEQ ID NO: 58671

SEQ ID NO: 58689 - DNA, 201 bp, Homo sapiens; identical to SEQ ID NO: 58672

SEQ ID NO: 58690 - DNA, 201 bp, Homo sapiens; identical to SEQ ID NO: 58673

SEQ ID NO: 58691 - DNA, 201 bp, Homo sapiens; identical to SEQ ID NO: 58674

SEQ ID NO: 58692 - DNA, 201 bp, Homo sapiens; identical to SEQ ID NO: 58675

SEQ ID NO: 58693 - DNA, 201 bp, Homo sapiens; identical to SEQ ID NO: 58676

SEQ ID NO: 58694 - DNA, 201 bp, Homo sapiens; identical to SEQ ID NO: 58677

SEQ ID NO: 58695 - DNA, 201 bp, Homo sapiens; identical to SEQ ID NO: 58678

SEQ ID NO: 58696 - DNA, 201 bp, Homo sapiens; identical to SEQ ID NO: 58679

SEQ ID NO: 58697 - DNA, 201 bp, Homo sapiens; identical to SEQ ID NO: 58680

SEQ ID NO: 58698 - DNA, 201 bp, Homo sapiens; identical to SEQ ID NO: 58664

SEQ ID NO: 58699 - DNA, 201 bp, Homo sapiens; identical to SEQ ID NO: 58665

SEQ ID NO: 58700 - DNA, 201 bp, Homo sapiens; identical to SEQ ID NO: 58666

SEQ ID NO: 58701 - DNA, 201 bp, Homo sapiens; identical to SEQ ID NO: 58667

SEQ ID NO: 58702 - DNA, 201 bp, Homo sapiens; identical to SEQ ID NO: 58668

SEQ ID NO: 58703 - DNA, 201 bp, Homo sapiens; identical to SEQ ID NO: 58669

SEQ ID NO: 58704 - DNA, 201 bp, Homo sapiens; identical to SEQ ID NO: 58670

SEQ ID NO: 58705 - DNA, 201 bp, Homo sapiens; identical to SEQ ID NO: 58671

SEQ ID NO: 58706 - DNA, 201 bp, Homo sapiens
atcgttatgaagcatatgatgatcccgtggatagtatctagatcaccatggcgactggacagaagttgatgagagctgttagagtttttgaatttggtggrccagaagtcctgaaattgcgatcagatattgcagtaccgattccaaaagaccatcaggttctaatcaaggtccatgcatgtggtgtcaaccccgtggaga

SEQ ID NO: 58707 - DNA, 201 bp, Homo sapiens; identical to SEQ ID NO: 58673

SEQ ID NO: 58708 - DNA, 201 bp, Homo sapiens; identical to SEQ ID NO: 58674

SEQ ID NO: 58709 - DNA, 201 bp, Homo sapiens; identical to SEQ ID NO: 58675

SEQ ID NO: 58710 - DNA, 201 bp, Homo sapiens; identical to SEQ ID NO: 58676

SEQ ID NO: 58711 - DNA, 201 bp, Homo sapiens; identical to SEQ ID NO: 58677

SEQ ID NO: 58712 - DNA, 201 bp, Homo sapiens; identical to SEQ ID NO: 58678

SEQ ID NO: 58713 - DNA, 201 bp, Homo sapiens; identical to SEQ ID NO: 58679

SEQ ID NO: 58714 - DNA, 201 bp, Homo sapiens; identical to SEQ ID NO: 58680

SEQ ID NO: 58715 - DNA, 201 bp, Homo sapiens
agtgacacactgattcgactttctgtgggcttagaggatgaggaagacctactggaagatctagatcaagctttgaaggcagcacaccctccaagtggaaktcacagctagtattccagagctgctattagaagctgcttcctgtgaagatcaaatcttcctgagtaattaaatggaccaacaatgagcctttgcaaaatt

SEQ ID NO: 58716 - DNA, 201 bp, Homo sapiens
gtttcctgccacacttccaacatttcgccacgcaggcgatccatgtgggccaggatccagagcaatggacctccagggctgtagtgccccccatctcactrtccaccacgttcaagcaaggggcgcctggccagcactcgggttttgaatatagccgttctggaaatcccactaggaattgccttgaaaaagcagtggcag

SEQ ID NO: 58717 - DNA, 115 bp, Homo sapiens
agcctcctcaggacsggtactcaggaatttcgcccgcagggactaacaccacttggacccaggaactccagcttcactccgctttgtgcactgggtggggcggtcgcggtgacgt

SEQ ID NO: 58718 - DNA, 164 bp, Homo sapiens
agcctcctcaggacgggtactcaggaatttcgcccgcagggactaacaccacttggacccaggractccagcttcactccgctttgtgcactgggtggggcggtcgcggtgacgtttcaggcaacgcctctgctgtcagccaataaggagcgggagacgcgtcg

SEQ ID NO: 58719 - DNA, 201 bp, Homo sapiens; identical to SEQ ID NO: 58715

SEQ ID NO: 58720 - DNA, 201 bp, Homo sapiens; identical to SEQ ID NO: 58716

SEQ ID NO: 58721 - DNA, 115 bp, Homo sapiens; identical to SEQ ID NO: 58717

SEQ ID NO: 58722 - DNA, 164 bp, Homo sapiens; identical to SEQ ID NO: 58718

SEQ ID NO: 58723 - DNA, 201 bp, Homo sapiens
gtatacgtaactgctcaaagattatgaatcttatgaatgttaacctttccgtttattacaagcaagtactattatttctgattttataataagaaaatctrtgtttaatcaactgaggcctctcaaccaaataacatctcagagattaagttatatattaaaagcttatgtaacataaaagcaagtacatatagtagtgac

SEQ ID NO: 58724 - DNA, 201 bp, Homo sapiens
ccccctctggctcaccggcagtctccttcgatgtgggccaggactctttgaagttggatctgagccattttaccacctgtttgatgggcaagccctcctgyacaagtttgactttaaagaaggacatgtcacataccacagaaggttcatccgcactgatgcttacgtacgggcaatgactgagaaaaggatcgtcataac

SEQ ID NO: 58725 - DNA, 201 bp, Homo sapiens
gaaaccttacacatatgcgtatggacttggcttgaatcactttgttccagataggctctgtaagctgaatgtcaaaactaaagaaacttgggtttggcaakagcctgattcatacccatcagaacccatctttgtttctcacccagatgccttggaagaagatgatggtgtagttctgagtgtggtggtgagcccaggagc

SEQ ID NO: 58726 - DNA, 200 bp, Homo sapiens
taattgtatttaagcattgtgcaatcacttgggaaaaatattaaattattaacattgaggtattaatacattttaagccttttgtttttaaatttcttttsttccagagattgtttaaaaataaatattgacaaaaataatgttttatatcttaattctagtatctgttttatgcttgaaagcattacagatcatgatac

SEQ ID NO: 58727 - DNA, 201 bp, Homo sapiens
aagacaatgggtttctgattgtggatctctgctgctggaaaggatttgagtttgtttataattacttatatttagccaatttacgtgagaactgggaagargtgaaaaaaaatgccagaaaggctccccaacctgaagttaggagatatgtacttcctttgaatattgacaaggctgacacaggcaagaatttagtcacgc

SEQ ID NO: 58728 - DNA, 201 bp, Homo sapiens
aggtgaaaaaaaatgccagaaaggctccccaacctgaagttaggagatatgtacttcctttgaatattgacaaggctgacacaggcaagaatttagtcacrctccccaatacaactgccactgcaattctgtgcagtgacgagactatctggctggagcctgaagttctcttttcagggcctcgtcaagcatttgagtttc

SEQ ID NO: 58729 - DNA, 201 bp, Homo sapiens
gctccccaacctgaagttaggagatatgtacttcctttgaatattgacaaggctgacacaggcaagaatttagtcacgctccccaatacaactgccactgsaattctgtgcagtgacgagactatctggctggagcctgaagttctcttttcagggcctcgtcaagcatttgagtttcctcaaatcaattaccagaagtat

SEQ ID NO: 58730 - DNA, 201 bp, Homo sapiens
aaaaagtacctcaataataaatacagaacttctcctttcaacctcttccatcacatcaacacctatgaagacaatgggtttctgattgtggatctctgctrctggaaaggatttgagtttgtttataattacttatatttagccaatttacgtgagaactgggaagaggtgaaaaaaaatgccagaaaggctccccaacct

SEQ ID NO: 58731 - DNA, 201 bp, Homo sapiens
atctggctggagcctgaagttctcttttcagggcctcgtcaagcatttgagtttcctcaaatcaattaccagaagtattgtgggaaaccttacacatatgygtatggacttggcttgaatcactttgttccagataggctctgtaagctgaatgtcaaaactaaagaaacttgggtttggcaagagcctgattcataccca

SEQ ID NO: 58732 - DNA, 201 bp, Homo sapiens
ctgctggaaaggatttgagtttgtttataattacttatatttagccaatttacgtgagaactgggaagaggtgaaaaaaaatgccagaaaggctccccaamctgaagttaggagatatgtacttcctttgaatattgacaaggctgacacaggcaagaatttagtcacgctccccaatacaactgccactgcaattctgtg

SEQ ID NO: 58733 - DNA, 201 bp, Homo sapiens
agtcacgctccccaatacaactgccactgcaattctgtgcagtgacgagactatctggctggagcctgaagttctcttttcagggcctcgtcaagcatttsagtttcctcaaatcaattaccagaagtattgtgggaaaccttacacatatgcgtatggacttggcttgaatcactttgttccagataggctctgtaagct

SEQ ID NO: 58734 - DNA, 201 bp, Homo sapiens
aacaggcaggatccccctctggctcaccggcagtctccttcgatgtgggccaggactctttgaagttggatctgagccattttaccacctgtttgatgggyaagccctcctgcacaagtttgactttaaagaaggacatgtcacataccacagaaggttcatccgcactgatgcttacgtacgggcaatgactgagaaaag

SEQ ID NO: 58735 - DNA, 201 bp, Homo sapiens
cctcaaatcaattaccagaagtattgtgggaaaccttacacatatgcgtatggacttggcttgaatcactttgttccagataggctctgtaagctgaatgkcaaaactaaagaaacttgggtttggcaagagcctgattcatacccatcagaacccatctttgtttctcacccagatgccttggaagaagatgatggtgta

SEQ ID NO: 58736 - DNA, 201 bp, Homo sapiens
caagtttgactttaaagaaggacatgtcacataccacagaaggttcatccgcactgatgcttacgtacgggcaatgactgagaaaaggatcgtcataacadaatttggcacctgtgctttcccagatccctgcaagaatatattttccaggtttttttcttactttcgaggagtagaggttactgacaatgcccttgttaa

SEQ ID NO: 58737 - DNA, 201 bp, Homo sapiens
acgggcaatgactgagaaaaggatcgtcataacagaatttggcacctgtgctttcccagatccctgcaagaatatattttccaggtttttttcttactttygaggagtagaggttactgacaatgcccttgttaatgtctacccagtgggggaagattactacgcttgcacagagaccaactttattacaaagattaatcc

SEQ ID NO: 58738 - DNA, 201 bp, Homo sapiens
cgtcataacagaatttggcacctgtgctttcccagatccctgcaagaatatattttccaggtttttttcttactttcgaggagtagaggttactgacaatrcccttgttaatgtctacccagtgggggaagattactacgcttgcacagagaccaactttattacaaagattaatccagagaccttggagacaattaagca

SEQ ID NO: 58739 - DNA, 201 bp, Homo sapiens
ggagacaccagtcaaaattaacctgttcaagttcctttcttcatggagtctttggggagccaactacatggattgttttgagtccaatgaaaccatggggktttggcttcatattgctgacaaaaaaaggaaaaagtacctcaataataaatacagaacttctcctttcaacctcttccatcacatcaacacctatgaaga

SEQ ID NO: 58740 - DNA, 201 bp, Homo sapiens
gcttaattactaaatgtcaaaccaaactttttctcaaaccagggactatcatctaagattaattacagtaattattttgcgtatacgtaactgctcaaagrttatgaatcttatgaatgttaacctttccgtttattacaagcaagtactattatttctgattttataataagaaaatctgtgtttaatcaactgaggcct

SEQ ID NO: 58741 - DNA, 201 bp, Homo sapiens
gaccaactttattacaaagattaatccagagaccttggagacaattaagcaggttgatctttgcaactatgtctctgtcaatggggccactgctcaccccyacattgaaaatgatggaaccgtttacaatattggtaattgctttggaaaaaatttttcaattgcctacaacattgtaaagatcccaccactgcaagcaga

SEQ ID NO: 58742 - DNA, 201 bp, Homo sapiens
tccctgcaagaatatattttccaggtttttttcttactttcgaggagtagaggttactgacaatgcccttgttaatgtctacccagtgggggaagattackacgcttgcacagagaccaactttattacaaagattaatccagagaccttggagacaattaagcaggttgatctttgcaactatgtctctgtcaatggggc

SEQ ID NO: 58743 - DNA, 201 bp, Homo sapiens
cagactcctcgtgaagtggcccagcaggctgtggatgcggatgtgcatgctgtgggcataagcaccctcgctgctggtcataaaaccctagttcctgaackcatcaaagaacttaactcccttggacggccagatattcttgtcatgtgtggaggggtgataccacctcaggattatgaatttctgtttgaagttggtgtt

SEQ ID NO: 58744 - DNA, 136 bp, Homo sapiens
tattagattggctggagggagggcggtgtcggcctwcgcccccagagtcgtccggctgacgctggcggtggcgcggtttgtgtgggcttggtgagggcggggaggcctggctgtgtggatgtctgacaggtgaggc

SEQ ID NO: 58745 - DNA, 201 bp, Homo sapiens
acttcgaattgaagaatgtgctgcccgaagacaagctagaatagattctggttctgaagtaattgttggagtaaataagtaccagttggaaaaagaagacrctgtagaagttctggcaattgataatacttcagtgcgaaacaggcagattgaaaaacttaagaagatcaaatccagcagggatcaagctttggctgaacg

SEQ ID NO: 58746 - DNA, 201 bp, Homo sapiens
ttccaaaggctgccgttcaggtgcttgatgatattgagaagtgtttggaaaagaagcagcaatctgtataatatcctctttttgttttagcttttgtctaraatattattttagttatgatcaaagaagagagtaaagctatgtcttcaatttaatttcaatacctgatttgtactttccttgaaagctttactttaaaat

SEQ ID NO: 58747 - DNA, 201 bp, Homo sapiens
catgactatgaatggagcagttattccagttcttgcaaattttatagtaactggagaagaacaaggtgtacctaaagagaagcttactggtaccatccaawatgatatactaaaggaatttatggttcgaaatacatacatttttcctccagaaccatccatgaaaattattgctgacatatttgaatatacagcaaagca

SEQ ID NO: 58748 - DNA, 201 bp, Homo sapiens
tttttgttttagcttttgtctaaaatattattttagttatgatcaaagaagagagtaaagctatgtcttcaatttaatttcaatacctgatttgtactttmcttgaaagctttactttaaaataccttacttataggcctggtgtcatgctataagtatgtacatacagtttcacttcaaaaataaaaaaaaaatccctaa

SEQ ID NO: 58749 - DNA, 201 bp, Homo sapiens
gacaacattaaggctggtcagcagggattatcagttgcctttgatctggcgacacatcgtggctatgattcagacaaccctcgagttcgtggtgatgttgkaatggctggagttgctattgacactgtggaagataccaaaattctttttgatggaattcctttagaaaaaatgtcagtttccatgactatgaatggagca

SEQ ID NO: 58750 - DNA, 201 bp, Homo sapiens
ctataaggacaacattaaggctggtcagcagggattatcagttgcctttgatctggcgacacatcgtggctatgattcagacaaccctcgagttcgtggtratgttggaatggctggagttgctattgacactgtggaagataccaaaattctttttgatggaattcctttagaaaaaatgtcagtttccatgactatgaa

SEQ ID NO: 58751 - DNA, 201 bp, Homo sapiens
aagagagatactatggacttacctgaagaacttccaggagtgaagccattcacacgtggaccatatcctaccatgtatacctttaggccctggaccatccrccagtatgctggttttagtactgtggaagaaagcaataagttctataaggacaacattaaggctggtcagcagggattatcagttgcctttgatctggcg

SEQ ID NO: 58752 - DNA, 201 bp, Homo sapiens
tttgggaggagtcctcagccaaattctaccagaatcaccttaataaaagaagtattaaaatcaagcacagcaggttggaatatggggaatttgacagtatrtttcttcaagtctgagtttactttcttcctgatcatgaccatctgaccttgttatttctgggcttggctcaagaccaaggagagtggatgttgatgaaca

SEQ ID NO: 58753 - DNA, 201 bp, Homo sapiens
cttgtattccaagagagatactatggacttacctgaagaacttccaggagtgaagccattcacacgtggaccatatcctaccatgtatacctttaggcccyggaccatccgccagtatgctggttttagtactgtggaagaaagcaataagttctataaggacaacattaaggctggtcagcagggattatcagttgcctt

SEQ ID NO: 58754 - DNA, 139 bp, Homo sapiens
gtccaatgatatattcactatgccattttattgacttttccttgtaaagcaatgcacactaatttagtaagtatttggtttctgtgatgtgttcagttgcrtgctgggtgacatgtgaaataaactcatccttgaggaa

SEQ ID NO: 58755 - DNA, 201 bp, Homo sapiens
tctatactctctataacaatactttatcaagaactctggacaatggtattatttttaaaaatcatggtgatgtatttattagaatgtttcttataaatctstttactttttatattaagaattaaactgtacctaaaaaaactctgactattcccatttgtcagtttagcattacattgtcttgagcaccagaaaataaaa

SEQ ID NO: 58756 - DNA, 201 bp, Homo sapiens
agttctggcaattgataatacttcagtgcgaaacaggcagattgaaaaacttaagaagatcaaatccagcagggatcaagctttggctgaacgttgtcttsctgcactaaccgaatgtgctgctagcggagatggaaatatcctggctcttgcagtggatgcatctcgggcaagatgtacagtgggagaaatcacagatgc

SEQ ID NO: 58757 - DNA, 201 bp, Homo sapiens
atatggcacaccccggaagggatctctataaaacccttgtattccaagagagatactatggacttacctgaagaacttccaggagtgaagccattcacacrtggaccatatcctaccatgtatacctttaggccctggaccatccgccagtatgctggttttagtactgtggaagaaagcaataagttctataaggacaac

SEQ ID NO: 58758 - DNA, 201 bp, Homo sapiens
tggcacaccccggaagggatctctataaaacccttgtattccaagagagatactatggacttacctgaagaacttccaggagtgaagccattcacacgtgkaccatatcctaccatgtatacctttaggccctggaccatccgccagtatgctggttttagtactgtggaagaaagcaataagttctataaggacaacatt

SEQ ID NO: 58759 - DNA, 201 bp, Homo sapiens
gctgaaaggcaaaaacccagaagacctaatatggcacaccccggaagggatctctataaaacccttgtattccaagagagatactatggacttacctgaakaacttccaggagtgaagccattcacacgtggaccatatcctaccatgtatacctttaggccctggaccatccgccagtatgctggttttagtactgtgga

SEQ ID NO: 58760 - DNA, 201 bp, Homo sapiens
aggcctaccagtcagttcttatttctattgggtgtttccatgctccaccatgttaagagctaagaatcagctttttttactttcacctcattacctgaggyaggtaaaagaatcatcaggctccaggctcatacagcaacgacttctacaccagcaacagccccttcacccagaatgggctgccctggctaaaaagcagct

SEQ ID NO: 58761 - DNA, 201 bp, Homo sapiens
agtaaagagataacatctgctatcaagagggttcataaattcatggaacgtgaaggtcgcagacctcgtcttcttgtagcaaaaatgggacaagatggccrtgacagaggagcaaaagttattgctacaggatttgctgatcttggttttgatgtggacataggccctcttttccagactcctcgtgaagtggcccagcag

SEQ ID NO: 58762 - DNA, 201 bp, Homo sapiens
atttgctgatcttggttttgatgtggacataggccctcttttccagactcctcgtgaagtggcccagcaggctgtggatgcggatgtgcatgctgtgggcrtaagcaccctcgctgctggtcataaaaccctagttcctgaactcatcaaagaacttaactcccttggacggccagatattcttgtcatgtgtggaggggt

SEQ ID NO: 58763 - DNA, 201 bp, Homo sapiens
ggctgtggatgcggatgtgcatgctgtgggcataagcaccctcgctgctggtcataaaaccctagttcctgaactcatcaaagaacttaactcccttggayggccagatattcttgtcatgtgtggaggggtgataccacctcaggattatgaatttctgtttgaagttggtgtttccaatgtatttggtcctgggactcg

SEQ ID NO: 58764 - DNA, 201 bp, Homo sapiens
tagaaaaaatgtcagtttccatgactatgaatggagcagttattccagttcttgcaaattttatagtaactggagaagaacaaggtgtacctaaagagaarcttactggtaccatccaaaatgatatactaaaggaatttatggttcgaaatacatacatttttcctccagaaccatccatgaaaattattgctgacatat

SEQ ID NO: 58765 - DNA, 201 bp, Homo sapiens
agaatcatcaggctccaggctcatacagcaacgacttctacaccagcaacagccccttcacccagaatgggctgccctggctaaaaagcagctgaaaggcwaaaacccagaagacctaatatggcacaccccggaagggatctctataaaacccttgtattccaagagagatactatggacttacctgaagaacttccagg

SEQ ID NO: 58766 - DNA, 201 bp, Homo sapiens
aagtaaagagataacatctgctatcaagagggttcataaattcatggaacgtgaaggtcgcagacctcgtcttcttgtagcaaaaatgggacaagatggcmatgacagaggagcaaaagttattgctacaggatttgctgatcttggttttgatgtggacataggccctcttttccagactcctcgtgaagtggcccagca

SEQ ID NO: 58767 - DNA, 201 bp, Homo sapiens
gccaggaatttggagaaagtaaagagataacatctgctatcaagagggttcataaattcatggaacgtgaaggtcgcagacctcgtcttcttgtagcaaawatgggacaagatggccatgacagaggagcaaaagttattgctacaggatttgctgatcttggttttgatgtggacataggccctcttttccagactcctc

SEQ ID NO: 58768 - DNA, 201 bp, Homo sapiens
gcgacacatcgtggctatgattcagacaaccctcgagttcgtggtgatgttggaatggctggagttgctattgacactgtggaagataccaaaattctttytgatggaattcctttagaaaaaatgtcagtttccatgactatgaatggagcagttattccagttcttgcaaattttatagtaactggagaagaacaaggt

SEQ ID NO: 58769 - DNA, 201 bp, Homo sapiens
gctatcaagagggttcataaattcatggaacgtgaaggtcgcagacctcgtcttcttgtagcaaaaatgggacaagatggccatgacagaggagcaaaagktattgctacaggatttgctgatcttggttttgatgtggacataggccctcttttccagactcctcgtgaagtggcccagcaggctgtggatgcggatgtg

SEQ ID NO: 58770 - DNA, 201 bp, Homo sapiens
taccaaaattctttttgatggaattcctttagaaaaaatgtcagtttccatgactatgaatggagcagttattccagttcttgcaaattttatagtaactrgagaagaacaaggtgtacctaaagagaagcttactggtaccatccaaaatgatatactaaaggaatttatggttcgaaatacatacatttttcctccaga

SEQ ID NO: 58771 - DNA, 201 bp, Homo sapiens
agggactcagtctttgcacacaaattcttttgatgaagctttgggtttgccaactgtgaaaagtgctcgaattgccaggaacacacaaatcatcattcaakaagaatctgggattcccaaagtggctgatccttggggaggttcttacatgatggaatgtctcacaaatgatgtttatgatgctgctttaaagctcattaa

SEQ ID NO: 58772 - DNA, 201 bp, Homo sapiens
ataacatctgctatcaagagggttcataaattcatggaacgtgaaggtcgcagacctcgtcttcttgtagcaaaaatgggacaagatggccatgacagagragcaaaagttattgctacaggatttgctgatcttggttttgatgtggacataggccctcttttccagactcctcgtgaagtggcccagcaggctgtggat

SEQ ID NO: 58773 - DNA, 201 bp, Homo sapiens
aaattttatagtaactggagaagaacaaggtgtacctaaagagaagcttactggtaccatccaaaatgatatactaaaggaatttatggttcgaaatacawacatttttcctccagaaccatccatgaaaattattgctgacatatttgaatatacagcaaagcacatgccaaaatttaattcaatttcaattagtggata

SEQ ID NO: 58774 - DNA, 201 bp, Homo sapiens
ccatgactatgaatggagcagttattccagttcttgcaaattttatagtaactggagaagaacaaggtgtacctaaagagaagcttactggtaccatccamaatgatatactaaaggaatttatggttcgaaatacatacatttttcctccagaaccatccatgaaaattattgctgacatatttgaatatacagcaaagc

SEQ ID NO: 58775 - DNA, 201 bp, Homo sapiens
agaaagtaaagagataacatctgctatcaagagggttcataaattcatggaacgtgaaggtcgcagacctcgtcttcttgtagcaaaaatgggacaagatkgccatgacagaggagcaaaagttattgctacaggatttgctgatcttggttttgatgtggacataggccctcttttccagactcctcgtgaagtggccca

SEQ ID NO: 58776 - DNA, 201 bp, Homo sapiens
gttcttgcaaattttatagtaactggagaagaacaaggtgtacctaaagagaagcttactggtaccatccaaaatgatatactaaaggaatttatggttcraaatacatacatttttcctccagaaccatccatgaaaattattgctgacatatttgaatatacagcaaagcacatgccaaaatttaattcaatttcaatt

SEQ ID NO: 58777 - DNA, 201 bp, Homo sapiens
ggaatttggagaaagtaaagagataacatctgctatcaagagggttcataaattcatggaacgtgaaggtcgcagacctcgtcttcttgtagcaaaaatgrgacaagatggccatgacagaggagcaaaagttattgctacaggatttgctgatcttggttttgatgtggacataggccctcttttccagactcctcgtga

SEQ ID NO: 58778 - DNA, 201 bp, Homo sapiens
tattgacactgtggaagataccaaaattctttttgatggaattcctttagaaaaaatgtcagtttccatgactatgaatggagcagttattccagttcttrcaaattttatagtaactggagaagaacaaggtgtacctaaagagaagcttactggtaccatccaaaatgatatactaaaggaatttatggttcgaaatac

SEQ ID NO: 58779 - DNA, 201 bp, Homo sapiens
ggaatggctggagttgctattgacactgtggaagataccaaaattctttttgatggaattcctttagaaaaaatgtcagtttccatgactatgaatggagmagttattccagttcttgcaaattttatagtaactggagaagaacaaggtgtacctaaagagaagcttactggtaccatccaaaatgatatactaaaggaa

SEQ ID NO: 58780 - DNA, 201 bp, Homo sapiens
gctgtagaagttctggcaattgataatacttcagtgcgaaacaggcagattgaaaaacttaagaagatcaaatccagcagggatcaagctttggctgaacrttgtcttgctgcactaaccgaatgtgctgctagcggagatggaaatatcctggctcttgcagtggatgcatctcgggcaagatgtacagtgggagaaatc

SEQ ID NO: 58781 - DNA, 201 bp, Homo sapiens
tctcttcttctaagagcacactgtcagacatctggatggtcacttactgagcaggatccctacaataatattgtccgtactgcaatagaagcaatggcagmagtatttggagggactcagtctttgcacacaaattcttttgatgaagctttgggtttgccaactgtgaaaagtgctcgaattgccaggaacacacaaatc

SEQ ID NO: 58782 - DNA, 201 bp, Homo sapiens
tactgcaatagaagcaatggcagcagtatttggagggactcagtctttgcacacaaattcttttgatgaagctttgggtttgccaactgtgaaaagtgctygaattgccaggaacacacaaatcatcattcaagaagaatctgggattcccaaagtggctgatccttggggaggttcttacatgatggaatgtctcacaaa

SEQ ID NO: 58783 - DNA, 201 bp, Homo sapiens
tctcacaaatgatgtttatgatgctgctttaaagctcattaatgaaattgaagaaatgggtggaatggccaaagctgtagctgagggaatacctaaacttygaattgaagaatgtgctgcccgaagacaagctagaatagattctggttctgaagtaattgttggagtaaataagtaccagttggaaaaagaagacgctgt

SEQ ID NO: 58784 - DNA, 201 bp, Homo sapiens
aaaatgtttcagcctaaaaactcaaaatctcttcttctaagagcacactgtcagacatctggatggtcacttactgagcaggatccctacaataatattgwccgtactgcaatagaagcaatggcagcagtatttggagggactcagtctttgcacacaaattcttttgatgaagctttgggtttgccaactgtgaaaagt

SEQ ID NO: 58785 - DNA, 201 bp, Homo sapiens
cctcgtcttcttgtagcaaaaatgggacaagatggccatgacagaggagcaaaagttattgctacaggatttgctgatcttggttttgatgtggacatagrccctcttttccagactcctcgtgaagtggcccagcaggctgtggatgcggatgtgcatgctgtgggcataagcaccctcgctgctggtcataaaacccta

SEQ ID NO: 58786 - DNA, 201 bp, Homo sapiens
gggcataagcaccctcgctgctggtcataaaaccctagttcctgaactcatcaaagaacttaactcccttggacggccagatattcttgtcatgtgtggasgggtgataccacctcaggattatgaatttctgtttgaagttggtgtttccaatgtatttggtcctgggactcgaattccaaaggctgccgttcaggtgct

SEQ ID NO: 58787 - DNA, 201 bp, Homo sapiens
acaggatttgctgatcttggttttgatgtggacataggccctcttttccagactcctcgtgaagtggcccagcaggctgtggatgcggatgtgcatgctgwgggcataagcaccctcgctgctggtcataaaaccctagttcctgaactcatcaaagaacttaactcccttggacggccagatattcttgtcatgtgtgga

SEQ ID NO: 58788 - DNA, 201 bp, Homo sapiens
aatcatggtgatgtatttattagaatgtttcttataaatctgtttactttttatattaagaattaaactgtacctaaaaaaactctgactattcccatttstcagtttagcattacattgtcttgagcaccagaaaataaaatccatatattaataaaaacctatcttgaaaaactagtggagtgtatttacgtggcaaaa

SEQ ID NO: 58789 - DNA, 201 bp, Homo sapiens
gtggacataggccctcttttccagactcctcgtgaagtggcccagcaggctgtggatgcggatgtgcatgctgtgggcataagcaccctcgctgctggtcrtaaaaccctagttcctgaactcatcaaagaacttaactcccttggacggccagatattcttgtcatgtgtggaggggtgataccacctcaggattatgaa

SEQ ID NO: 58790 - DNA, 201 bp, Homo sapiens
ttaagaattaaactgtacctaaaaaaactctgactattcccatttgtcagtttagcattacattgtcttgagcaccagaaaataaaatccatatattaatwaaaacctatcttgaaaaactagtggagtgtatttacgtggcaaaagagattttgggaggagtcctcagccaaattctaccagaatcaccttaataaaaga

SEQ ID NO: 58791 - DNA, 201 bp, Homo sapiens; identical to SEQ ID NO: 58743

SEQ ID NO: 58792 - DNA, 201 bp, Homo sapiens; identical to SEQ ID NO: 58745

SEQ ID NO: 58793 - DNA, 201 bp, Homo sapiens; identical to SEQ ID NO: 58746

SEQ ID NO: 58794 - DNA, 201 bp, Homo sapiens; identical to SEQ ID NO: 58747

SEQ ID NO: 58795 - DNA, 201 bp, Homo sapiens; identical to SEQ ID NO: 58748

SEQ ID NO: 58796 - DNA, 201 bp, Homo sapiens; identical to SEQ ID NO: 58749

SEQ ID NO: 58797 - DNA, 201 bp, Homo sapiens; identical to SEQ ID NO: 58750

SEQ ID NO: 58798 - DNA, 201 bp, Homo sapiens; identical to SEQ ID NO: 58751

SEQ ID NO: 58799 - DNA, 201 bp, Homo sapiens; identical to SEQ ID NO: 58752

SEQ ID NO: 58800 - DNA, 201 bp, Homo sapiens; identical to SEQ ID NO: 58753

SEQ ID NO: 58801 - DNA, 139 bp, Homo sapiens; identical to SEQ ID NO: 58754

SEQ ID NO: 58802 - DNA, 201 bp, Homo sapiens; identical to SEQ ID NO: 58755

SEQ ID NO: 58803 - DNA, 201 bp, Homo sapiens; identical to SEQ ID NO: 58756

SEQ ID NO: 58804 - DNA, 201 bp, Homo sapiens; identical to SEQ ID NO: 58757

SEQ ID NO: 58805 - DNA, 201 bp, Homo sapiens; identical to SEQ ID NO: 58758

SEQ ID NO: 58806 - DNA, 201 bp, Homo sapiens; identical to SEQ ID NO: 58759

SEQ ID NO: 58807 - DNA, 201 bp, Homo sapiens
tgtctgacaggtcagttcttatttctattgggtgtttccatgctccaccatgttaagagctaagaatcagctttttttactttcacctcattacctgaggyaggtaaaagaatcatcaggctccaggctcatacagcaacgacttctacaccagcaacagccccttcacccagaatgggctgccctggctaaaaagcagct

SEQ ID NO: 58808 - DNA, 201 bp, Homo sapiens; identical to SEQ ID NO: 58761

SEQ ID NO: 58809 - DNA, 201 bp, Homo sapiens; identical to SEQ ID NO: 58762

SEQ ID NO: 58810 - DNA, 201 bp, Homo sapiens; identical to SEQ ID NO: 58763

SEQ ID NO: 58811 - DNA, 201 bp, Homo sapiens; identical to SEQ ID NO: 58764

SEQ ID NO: 58812 - DNA, 201 bp, Homo sapiens; identical to SEQ ID NO: 58765

SEQ ID NO: 58813 - DNA, 201 bp, Homo sapiens; identical to SEQ ID NO: 58766

SEQ ID NO: 58814 - DNA, 201 bp, Homo sapiens; identical to SEQ ID NO: 58767

SEQ ID NO: 58815 - DNA, 201 bp, Homo sapiens; identical to SEQ ID NO: 58768

SEQ ID NO: 58816 - DNA, 201 bp, Homo sapiens; identical to SEQ ID NO: 58769

SEQ ID NO: 58817 - DNA, 201 bp, Homo sapiens; identical to SEQ ID NO: 58770

SEQ ID NO: 58818 - DNA, 201 bp, Homo sapiens; identical to SEQ ID NO: 58771

SEQ ID NO: 58819 - DNA, 201 bp, Homo sapiens; identical to SEQ ID NO: 58772

SEQ ID NO: 58820 - DNA, 201 bp, Homo sapiens; identical to SEQ ID NO: 58773

SEQ ID NO: 58821 - DNA, 201 bp, Homo sapiens; identical to SEQ ID NO: 58774

SEQ ID NO: 58822 - DNA, 201 bp, Homo sapiens; identical to SEQ ID NO: 58775

SEQ ID NO: 58823 - DNA, 201 bp, Homo sapiens; identical to SEQ ID NO: 58776

SEQ ID NO: 58824 - DNA, 201 bp, Homo sapiens; identical to SEQ ID NO: 58777

SEQ ID NO: 58825 - DNA, 201 bp, Homo sapiens; identical to SEQ ID NO: 58778

SEQ ID NO: 58826 - DNA, 201 bp, Homo sapiens; identical to SEQ ID NO: 58779

SEQ ID NO: 58827 - DNA, 201 bp, Homo sapiens; identical to SEQ ID NO: 58780

SEQ ID NO: 58828 - DNA, 201 bp, Homo sapiens; identical to SEQ ID NO: 58781

SEQ ID NO: 58829 - DNA, 201 bp, Homo sapiens; identical to SEQ ID NO: 58782

SEQ ID NO: 58830 - DNA, 201 bp, Homo sapiens; identical to SEQ ID NO: 58783

SEQ ID NO: 58831 - DNA, 201 bp, Homo sapiens; identical to SEQ ID NO: 58784

SEQ ID NO: 58832 - DNA, 201 bp, Homo sapiens; identical to SEQ ID NO: 58785

SEQ ID NO: 58833 - DNA, 201 bp, Homo sapiens; identical to SEQ ID NO: 58786

SEQ ID NO: 58834 - DNA, 201 bp, Homo sapiens; identical to SEQ ID NO: 58787

SEQ ID NO: 58835 - DNA, 201 bp, Homo sapiens; identical to SEQ ID NO: 58788

SEQ ID NO: 58836 - DNA, 201 bp, Homo sapiens; identical to SEQ ID NO: 58789

SEQ ID NO: 58837 - DNA, 201 bp, Homo sapiens; identical to SEQ ID NO: 58790

SEQ ID NO: 58838 - DNA, 201 bp, Homo sapiens
tcctcctgcctcaccctcccgagtagctgagactacagcctctgcaggtgtgcgagcaggattgcttctgcaacaaaagcctccacccagccacatcttgkgaaaagaatggccacttcttggggcacagtctttttcatgctggtggtatcctgtgtttgcagcgctgtctcccacaggaaccagcagacttggtttgag

SEQ ID NO: 58839 - DNA, 201 bp, Homo sapiens
aagcgatcctcctgcctcaccctcccgagtagctgagactacagcctctgcaggtgtgcgagcaggattgcttctgcaacaaaagcctccacccagccacwtcttgggaaaagaatggccacttcttggggcacagtctttttcatgctggtggtatcctgtgtttgcagcgctgtctcccacaggaaccagcagacttgg

SEQ ID NO: 58840 - DNA, 201 bp, Homo sapiens
aatctaggataagatgtagatatacaagacccctagcaaaataagaatcttcaactaccaacaatttggtctggaaggtgctgccatcacctagggtaatrtgaacccaagggctggagtcggccataggaaatggacaaggccaggtatagcgaatggctttgctcctgtagagaaccgtcactcggtctggggaggtca

SEQ ID NO: 58841 - DNA, 201 bp, Homo sapiens
cctgccccagtttgagaaaactctggaacaaactcctaggggctacctcacttcctttgagatgtttaacagcacttataagctctatacacatagttacytgggatttggattgaaagctgcaagactagcaaccctgggagccctggagacagaagggactgatgggcacactttccggagtgcctgtttaccgagatg

SEQ ID NO: 58842 - DNA, 201 bp, Homo sapiens
acaggatttacgatgagaccatctccacttgagctggcctgaataggtactggtcctcataaccaaaagttttgcctaaaattaaactatagcttaaatckaaaaccagagtccctagaatctaggataagatgtagatatacaagacccctagcaaaataagaatcttcaactaccaacaatttggtctggaaggtgctg

SEQ ID NO: 58843 - DNA, 201 bp, Homo sapiens
gcacatcatcagctgggtaaattgatactcacaaaggcagagttaacggcatccacaaatttttcctcatccatgctaactagctctgctgcatgttcatkggacgtggaccaaaccaaggaactcaaggtgtctgagagctgtgtcaaaagaacaccaataccaacggctaagactctgctgcacttggaaactctcaag

SEQ ID NO: 58844 - DNA, 201 bp, Homo sapiens
cacatcatcagctgggtaaattgatactcacaaaggcagagttaacggcatccacaaatttttcctcatccatgctaactagctctgctgcatgttcatgkgacgtggaccaaaccaaggaactcaaggtgtctgagagctgtgtcaaaagaacaccaataccaacggctaagactctgctgcacttggaaactctcaagc

SEQ ID NO: 58845 - DNA, 201 bp, Homo sapiens
gtctctgggcatctcccattgaggccacgtacttccttggagacctgcatttgccaacacctttttaaggggaggagagagcacttagtttctgaactagwctggggacatcctggacttgagcctagagatttaggtttaattaattttacacatctaatgtgaactgctgcctaaccactcaagagtacacagctggca

SEQ ID NO: 58846 - DNA, 201 bp, Homo sapiens
cgaaagcaaggactcagggaaccggcagacacaagcagcctctgcaggtgtgcgagcaggattgcttctgcaacaaaagcctccacccagccacatcttgkgaaaagaatggccacttcttggggcacagtctttttcatgctggtggtatcctgtgtttgcagcgctgtctcccacaggaaccagcagacttggtttgag

SEQ ID NO: 58847 - DNA, 201 bp, Homo sapiens
ccctatacagtgccctgcccacccttatctgcacccacctcccctgaaaaagagagaaaaaaaaaaacctggttttgctttccatgtataattcaacaacrcaaaatgggaccatgtcagaatctgtatgatcctattctgtgttagctccaatcagccagctgagagccatcctaaatattaataggatgagagagtaac

SEQ ID NO: 58848 - DNA, 201 bp, Homo sapiens
ctgcagcgaaagcaaggactcagggaaccggcagacacaagcagcctctgcaggtgtgcgagcaggattgcttctgcaacaaaagcctccacccagccacwtcttgggaaaagaatggccacttcttggggcacagtctttttcatgctggtggtatcctgtgtttgcagcgctgtctcccacaggaaccagcagacttgg

SEQ ID NO: 58849 - DNA, 201 bp, Homo sapiens
aacacctttttaaggggaggagagagcacttagtttctgaactagtctggggacatcctggacttgagcctagagatttaggtttaattaattttacacayctaatgtgaactgctgcctaaccactcaagagtacacagctggcaccagagcatcacagagagccctgtgagccaaaaagtatagttttggaacttaacc

SEQ ID NO: 58850 - DNA, 201 bp, Homo sapiens; identical to SEQ ID NO: 58841

SEQ ID NO: 58851 - DNA, 197 bp, Homo sapiens
ttacaggctgccgtactgaggtgatgggccaagctggagatatccccaaagcccatgttgacaccctgtcctgcaagcggatggactctgtgggctgcatycctaagaataaagcagagttcaggtgtgacctctggcagcaaagtgagaagggagtggccctgctctgttatcgtcttacccaatgagcgccaccc

SEQ ID NO: 58852 - DNA, 201 bp, Homo sapiens
ggaaccaaggagaaaattcagaaggaaagaaaaaattgcctctgcaggtgtgcgagcaggattgcttctgcaacaaaagcctccacccagccacatcttgkgaaaagaatggccacttcttggggcacagtctttttcatgctggtggtatcctgtgtttgcagcgctgtctcccacaggaaccagcagacttggtttgag

SEQ ID NO: 58853 - DNA, 201 bp, Homo sapiens
aataaaggaaccaaggagaaaattcagaaggaaagaaaaaattgcctctgcaggtgtgcgagcaggattgcttctgcaacaaaagcctccacccagccacwtcttgggaaaagaatggccacttcttggggcacagtctttttcatgctggtggtatcctgtgtttgcagcgctgtctcccacaggaaccagcagacttgg

SEQ ID NO: 58854 - DNA, 201 bp, Homo sapiens
cacctcaggcagtcctttcctgtgcatggatctcagctacatcacagccctgttaaaggatggctttggctttgcagacagcacagtcttacaggctgccrtactgaggtgatgggccaagctggagatatccccaaagcccatgttgacaccctgtcctgcaagcggatggactctgtgggctgcatccctaagaataaa

SEQ ID NO: 58855 - DNA, 201 bp, Homo sapiens; identical to SEQ ID NO: 58841

SEQ ID NO: 58856 - DNA, 201 bp, Homo sapiens
taaggttgaaaaagtgatataataaaggaaccaaggagaaaattcagaaggaaagaaaaaattgccagccactgggttataaagacattcaagcagccctrtggaggatctacacggggagctactgagacttcctgcccacagctggcatcaacttgccaaccattgagtgagccatcttggagcctctgcaggtgtgcg

SEQ ID NO: 58857 - DNA, 201 bp, Homo sapiens; identical to SEQ ID NO: 58845

SEQ ID NO: 58858 - DNA, 201 bp, Homo sapiens
gcatcaacttgccaaccattgagtgagccatcttggagcctctgcaggtgtgcgagcaggattgcttctgcaacaaaagcctccacccagccacatcttgkgaaaagaatggccacttcttggggcacagtctttttcatgctggtggtatcctgtgtttgcagcgctgtctcccacaggaaccagcagacttggtttgag

SEQ ID NO: 58859 - DNA, 201 bp, Homo sapiens; identical to SEQ ID NO: 58847

SEQ ID NO: 58860 - DNA, 201 bp, Homo sapiens
cagctggcatcaacttgccaaccattgagtgagccatcttggagcctctgcaggtgtgcgagcaggattgcttctgcaacaaaagcctccacccagccacwtcttgggaaaagaatggccacttcttggggcacagtctttttcatgctggtggtatcctgtgtttgcagcgctgtctcccacaggaaccagcagacttgg

SEQ ID NO: 58861 - DNA, 201 bp, Homo sapiens; identical to SEQ ID NO: 58849

SEQ ID NO: 58862 - DNA, 201 bp, Homo sapiens; identical to SEQ ID NO: 58841

SEQ ID NO: 58863 - DNA, 201 bp, Homo sapiens; identical to SEQ ID NO: 58845

SEQ ID NO: 58864 - DNA, 201 bp, Homo sapiens; identical to SEQ ID NO: 58852

SEQ ID NO: 58865 - DNA, 201 bp, Homo sapiens; identical to SEQ ID NO: 58847

SEQ ID NO: 58866 - DNA, 201 bp, Homo sapiens; identical to SEQ ID NO: 58853

SEQ ID NO: 58867 - DNA, 201 bp, Homo sapiens; identical to SEQ ID NO: 58849

SEQ ID NO: 58868 - DNA, 201 bp, Homo sapiens; identical to SEQ ID NO: 58841

SEQ ID NO: 58869 - DNA, 201 bp, Homo sapiens; identical to SEQ ID NO: 58845

SEQ ID NO: 58870 - DNA, 201 bp, Homo sapiens; identical to SEQ ID NO: 58852

SEQ ID NO: 58871 - DNA, 201 bp, Homo sapiens; identical to SEQ ID NO: 58847

SEQ ID NO: 58872 - DNA, 201 bp, Homo sapiens; identical to SEQ ID NO: 58853

SEQ ID NO: 58873 - DNA, 201 bp, Homo sapiens; identical to SEQ ID NO: 58849

SEQ ID NO: 58874 - DNA, 201 bp, Homo sapiens
ctgacaggtcagctgcatggccacagacaggagactgtggggaccttggacctagggggagcctccacccaaatcacgttcctgccccagtttgagttacytgggatttggattgaaagctgcaagactagcaaccctgggagccctggagacagaagggactgatgggcacactttccggagtgcctgtttaccgagatg

SEQ ID NO: 58875 - DNA, 201 bp, Homo sapiens; identical to SEQ ID NO: 58845

SEQ ID NO: 58876 - DNA, 201 bp, Homo sapiens
ccaaggagaaaattcagaaggaaagaaaaaattggtaacctctgcaggtgtgcgagcaggattgcttctgcaacaaaagcctccacccagccacatcttgkgaaaagaatggccacttcttggggcacagtctttttcatgctggtggtatcctgtgtttgcagcgctgtctcccacaggaaccagcagacttggtttgag

SEQ ID NO: 58877 - DNA, 201 bp, Homo sapiens; identical to SEQ ID NO: 58847

SEQ ID NO: 58878 - DNA, 201 bp, Homo sapiens
aaggaaccaaggagaaaattcagaaggaaagaaaaaattggtaacctctgcaggtgtgcgagcaggattgcttctgcaacaaaagcctccacccagccacwtcttgggaaaagaatggccacttcttggggcacagtctttttcatgctggtggtatcctgtgtttgcagcgctgtctcccacaggaaccagcagacttgg

SEQ ID NO: 58879 - DNA, 201 bp, Homo sapiens; identical to SEQ ID NO: 58849

SEQ ID NO: 58880 - DNA, 201 bp, Homo sapiens; identical to SEQ ID NO: 58841

SEQ ID NO: 58881 - DNA, 201 bp, Homo sapiens
ccagatttccattttatttatggttcctctctgggacaccactgtcggtttaataaaacaataaataattcattgcacagatccgaagacctcaggaaccrgatcacaagggaaaccgattagcagcagaatttgttcatgtttggtggcagactggtggccaactggagggaggggagttttactgtgggtttttgaaga

SEQ ID NO: 58882 - DNA, 201 bp, Homo sapiens
cccaagcgtagccagggtggatgccaaaagccgagttctgtttcctcttgggttgggacatgctgctgagtacgtcaggcctcgggtggcgctcattgggratgcagcccacagagtccatccgcttgcaggacagggtgtcaacatgggctttggggatatctccagcttggcccatcacctcagtacggcagccttcaa

SEQ ID NO: 58883 - DNA, 201 bp, Homo sapiens
aggctgtgtctgaccgagtgacggttctctacaggagcaaagccattcgctatacctggccttgtccatttcctatggccgactccagcccttgggttcayattaccctaggtgatggcagcaccttccagaccaaattgttgataggtgcagatggtcacaactccggagtacggcaggctgttggaatccagaatgtga

SEQ ID NO: 58884 - DNA, 201 bp, Homo sapiens
gcgctcattggggatgcagcccacagagtccatccgcttgcaggacagggtgtcaacatgggctttggggatatctccagcttggcccatcacctcagtayggcagccttcaatgggaaggacttaggttccgtgagccacctcacaggttatgaaacagaaagacagcgtcacaacactgctcttctggctgctacagac

SEQ ID NO: 58885 - DNA, 201 bp, Homo sapiens
ataaataattcattgcacagatccgaagacctcaggaaccagatcacaagggaaaccgattagcagcagaatttgttcatgtttggtggcagactggtggvcaactggagggaggggagttttactgtgggtttttgaagaggtctcgtcacaagaccagagatgcctcttgaagagatttttaggttgtaggtttgctta

SEQ ID NO: 58886 - DNA, 201 bp, Homo sapiens
gacgtggggcttgcaggccacaaatgcagtgtctccactcaaagaacagattatggcctttgcaagcaaatgagtactcctctcctaaagaaagattacgytgatgaaaaagaacatcctgcccaggacccatcatacatattttcaagatcttatttaatttaataaacttactttacattaaaattctctttttcttct

SEQ ID NO: 58887 - DNA, 201 bp, Homo sapiens
ccacagaaaacaacgtagcctggcagagatttcttccctctgggcctattgctctgctcccgctctcagacaccttgagttccttggtttggtccacgtcmcatgaacatgcagcagagctagttagcatggatgaggaaaaatttgtggatgccgttaactctgccttttggagtgatgctgaccacacggacttcatcg

SEQ ID NO: 58888 - DNA, 201 bp, Homo sapiens
catggatgaggaaaaatttgtggatgccgttaactctgccttttggagtgatgctgaccacacggacttcatcgacacagctggtgccatgctgcagtatsctgtcagccttctgaagcccactaaggtctcggctcgccagctgcccccaagcgtagccagggtggatgccaaaagccgagttctgtttcctcttgggtt

SEQ ID NO: 58889 - DNA, 201 bp, Homo sapiens
ttcatcgacacagctggtgccatgctgcagtatgctgtcagccttctgaagcccactaaggtctcggctcgccagctgcccccaagcgtagccagggtggwtgccaaaagccgagttctgtttcctcttgggttgggacatgctgctgagtacgtcaggcctcgggtggcgctcattggggatgcagcccacagagtccat

SEQ ID NO: 58890 - DNA, 201 bp, Homo sapiens
caagggaaaccgattagcagcagaatttgttcatgtttggtggcagactggtggccaactggagggaggggagttttactgtgggtttttgaagaggtctygtcacaagaccagagatgcctcttgaagagatttttaggttgtaggtttgcttactctaaagaacatcttgcccagaagtctgatttgagatgaaatgaa

SEQ ID NO: 58891 - DNA, 147 bp, Homo sapiens
cgggacgggattggagtgctctgctccggacgcactacgtaggtggkcctgcgggagttctgagtgcgacggcgcaggtctgcaccatggcggcccggcttgtcagccgatgcggggctgtgcgtgcagctccccacagcggcccgc

SEQ ID NO: 58892 - DNA, 201 bp, Homo sapiens
ccttgagttccttggtttggtccacgtcccatgaacatgcagcagagctagttagcatggatgaggaaaaatttgtggatgccgttaactctgccttttgragtgatgctgaccacacggacttcatcgacacagctggtgccatgctgcagtatgctgtcagccttctgaagcccactaaggtctcggctcgccagctgc

SEQ ID NO: 58893 - DNA, 201 bp, Homo sapiens
tttcatgacaagaaaatcctgttgctcgaagcaggtccaaagaaagtactggagaaattgtcagaaacttacagcaacagggtcagctccatttcccctgrctctgcaacgcttctcagtagttttggtgcctgggaccatatctgcaacatgagatacagagcctttcggcgaatgcaggtgtgggacgcctgctcagag

SEQ ID NO: 58894 - DNA, 201 bp, Homo sapiens
tccccacagcggcccgctggtgtcctggcgcaggtggtccggcgcctcaacagacaccgtgtatgacgtggtggtgtcgggtggaggcctggtgggcgctkccatggcctgtgccttgggatatgatattcactttcatgacaagaaaatcctgttgctcgaagcaggtccaaagaaagtactggagaaattgtcagaaac

SEQ ID NO: 58895 - DNA, 201 bp, Homo sapiens
tccgcttgcaggacagggtgtcaacatgggctttggggatatctccagcttggcccatcacctcagtacggcagccttcaatgggaaggacttaggttccrtgagccacctcacaggttatgaaacagaaagacagcgtcacaacactgctcttctggctgctacagacttactaaaaaggctctattctaccagtgcctc

SEQ ID NO: 58896 - DNA, 201 bp, Homo sapiens
gagttccttggtttggtccacgtcccatgaacatgcagcagagctagttagcatggatgaggaaaaatttgtggatgccgttaactctgccttttggagtkatgctgaccacacggacttcatcgacacagctggtgccatgctgcagtatgctgtcagccttctgaagcccactaaggtctcggctcgccagctgccccc

SEQ ID NO: 58897 - DNA, 201 bp, Homo sapiens
cacagaaaacaacgtagcctggcagagatttcttccctctgggcctattgctctgctcccgctctcagacaccttgagttccttggtttggtccacgtccmatgaacatgcagcagagctagttagcatggatgaggaaaaatttgtggatgccgttaactctgccttttggagtgatgctgaccacacggacttcatcga

SEQ ID NO: 58898 - DNA, 201 bp, Homo sapiens
aataacttttattaatttaaaatagaatgcttaaaataaaatagaatgcttgagaggcactgagtaaagatttgttgaactggaaatgttttacatgattyttaaactgaaacttggtgtaaaaatagaattgagatggcctttttttcacattgtagactgaaaagagacttaatggtatgatgtgtacatagggactgg

SEQ ID NO: 58899 - DNA, 201 bp, Homo sapiens
ttgcatagggtatttgatacaatcattaatggatcatacacaataggtttttaaaaattaataacttttagtaattacttttattaatttaaaatagaacrcttgagaggcactttgtaaagatttgttaaactggaaacgttttacatgatctgatacaaccattaatgaatcatacacaataggttttttaaaattaat

SEQ ID NO: 58900 - DNA, 198 bp, Homo sapiens
tgcggtcagagggccgaggcctgggggcgagctggggtcgtgcagtacagcctctttccggcaaatcacgcgagatttcgttcacccgggctccacasggagtattttatacagaaatcttgtgaaaccactgcccaaccagagcaatgattgttcaaagagtggtattgaattctcgacctggaaaaaatggtaatc

SEQ ID NO: 58901 - DNA, 201 bp, Homo sapiens
gacggccacgacaccgagcccgggcggctgctggccagcctcctggccggacatggttttgctgtgcttgccctggcttatttcagatttgaagacctccycgaagatctgaatgatgtatatctggagtactttgaagaagccgtggactttatgctgcagcatccaaaggtgaaaggtcctagtattgcgcttcttgga

SEQ ID NO: 58902 - DNA, 201 bp, Homo sapiens
gaaagaaagaccccagataatctgttacccagaaactggtcactgtattgacccaccttattttcctccttctagagcttctgtgcacgctgttttgggtraggcaatattctatggaggtgagccaaaggctcactcaaaggcacaggtagatgcctggcagcaaattcaaactttcttccataaacatctcaatggtaa

SEQ ID NO: 58903 - DNA, 201 bp, Homo sapiens
ctggccggacatggttttgctgtgcttgccctggcttatttcagatttgaagacctccccgaagatctgaatgatgtatatctggagtactttgaagaagycgtggactttatgctgcagcatccaaaggtgaaaggtcctagtattgcgcttcttggattttccaaaggaggtgacctgtgtctctcaatggcttctttc

SEQ ID NO: 58904 - DNA, 201 bp, Homo sapiens
cgggcggctgctggccagcctcctggccggacatggttttgctgtgcttgccctggcttatttcagatttgaagacctccccgaagatctgaatgatgtayatctggagtactttgaagaagccgtggactttatgctgcagcatccaaaggtgaaaggtcctagtattgcgcttcttggattttccaaaggaggtgacct

SEQ ID NO: 58905 - DNA, 201 bp, Homo sapiens
aaaggaggtgacctgtgtctctcaatggcttctttcttgaagggcatcacagccactgtacttatcaatgcctgtgtagccaacacagtagctcctctacrttacaaggatatgattattcctaaacttgtcgatgatctaggaaaagtaaaaatcactaagtcaggatttctcacttttatggacacttggagcaatcca

SEQ ID NO: 58906 - DNA, 201 bp, Homo sapiens
atttaagggaaatcacttctaaaaaaacacactaatcagaactgtgatgctctaattagaaacaactcatctggccaactatttgctgctcagagtttctyatttcttagatgaaaaaaactcatcagttatattcatgtgatcgcggctaaaaagtcagtattttctttttgttctaatgtggcttcatttgaaatttct

SEQ ID NO: 58907 - DNA, 201 bp, Homo sapiens
gtgcaggcattgctccattcaattttcctgccatgatccccctttggatgtttcccatggccatggtgtgtggaaataccttcctaatgaaaccatctgarcgagtccctggagcaactatgcttcttgctaagttgctccaggattctggtgcccctgatggaacattaaacatcatccatggacagcatgaagctgtaa

SEQ ID NO: 58908 - DNA, 201 bp, Homo sapiens
ctgttacaaagaggagatttttggtccagttcttgtggttctggagacagaaacattggatgaagccatccagattgtaaataacaacccatatggaaatrgaactgccatcttcaccaccaatggagccactgctcggaaatatgcccacttggtggatgttggacaggtgggagtgaatgtccccattccagtgccttt

SEQ ID NO: 58909 - DNA, 201 bp, Homo sapiens
gatttctaaaaattatcccattttctgatgatttgaaggggagaaaagccagtgtatgtaaagaaaatgttccagccaggcgcggtggctcacgcctgtarttccatcattttgggaggccacagtgggcagattgcttgagcccaggagttgaagaacgtggcgaaaccccgtatctattatttaaaaaaattgaaaaag

SEQ ID NO: 58910 - DNA, 201 bp, Homo sapiens
tgatttctaaaaattatcccattttctgatgatttgaaggggagaaaagccagtgtatgtaaagaaaatgttccagccaggcgcggtggctcacgcctgtrattccatcattttgggaggccacagtgggcagattgcttgagcccaggagttgaagaacgtggcgaaaccccgtatctattatttaaaaaaattgaaaaa

SEQ ID NO: 58911 - DNA, 201 bp, Homo sapiens
tgctccgctatcaacaacttattaaagaaaacttgaaagaaattgccaagttaatcacattggaacaagggaagaccctagctgatgctgaaggagatgtrtttcgaggccttcaggtggttgagcatgcctgtagtgtgacatccctcatgatgggagagaccatgccatccatcaccaaagacatggacctttattcct

SEQ ID NO: 58912 - DNA, 201 bp, Homo sapiens
ccagccgcctctatgctttttgtttctttgatatatctaaacttaaggtcagaacagaaattcatgtgctgaacagaatggattctttttgcagtaccaayccaattgaatcctctttttattttcctgcgtccttaccagtcactttgatagtgctaactaacctacactatgggggttattcatgaattaagtatgata

SEQ ID NO: 58913 - DNA, 201 bp, Homo sapiens
aaaatgttccagccaggcgcggtggctcacgcctgtaattccatcattttgggaggccacagtgggcagattgcttgagcccaggagttgaagaacgtggygaaaccccgtatctattatttaaaaaaattgaaaaagtaaaaaaagaaaagggaaaaaaaattttttaaagaagatgttccaataattgcaagaagaact

SEQ ID NO: 58914 - DNA, 120 bp, Homo sapiens
ccacctgtgatggaaagctaagagtcacaaggtcactatgtttactcttacgtaaaagatagtacacattttggctaggctgtttacttcaaaaggcaacstataggtttctacacaaaa

SEQ ID NO: 58915 - DNA, 201 bp, Homo sapiens
ccagcttcatttgtcagctttgctcagatcagatcgatgggattggaatacattgtaactaaaatcttcctcaggactattaacccctgcaaagtttctayagggaactgcctagtgtaacaatgaaaccagatttctcacttgctcttcatacttctattttgaggtaactgttgtaactatgaaatgcttatctgaaag

SEQ ID NO: 58916 - DNA, 201 bp, Homo sapiens
tgaaggggagaaaagccagtgtatgtaaagaaaatgttccagccaggcgcggtggctcacgcctgtaattccatcattttgggaggccacagtgggcagaytgcttgagcccaggagttgaagaacgtggcgaaaccccgtatctattatttaaaaaaattgaaaaagtaaaaaaagaaaagggaaaaaaaattttttaaa

SEQ ID NO: 58917 - DNA, 201 bp, Homo sapiens
atttgaaggggagaaaagccagtgtatgtaaagaaaatgttccagccaggcgcggtggctcacgcctgtaattccatcattttgggaggccacagtgggcrgattgcttgagcccaggagttgaagaacgtggcgaaaccccgtatctattatttaaaaaaattgaaaaagtaaaaaaagaaaagggaaaaaaaatttttt

SEQ ID NO: 58918 - DNA, 201 bp, Homo sapiens
ttcttccaaggtgaaatccagtcccacctggtattcagcatcttccttctcttcttcagtgccaactgtaaagctcttcattggtgggaaattcgttgaayccaaaagtgacaaatggatcgatatccacaacccagccaccaatgaggtcattggtcgggtccctcaggccaccaaggcagaaatggatgcagccattgc

SEQ ID NO: 58919 - DNA, 201 bp, Homo sapiens
accggctctcgatcctccttcaggggagacaccaatttctatggcaaacagggcatccaattctacactcagttaaagaccattacttctcagtggaaagragaagatgctactctttcctcacctgctgttgtcatgcctaccatgggccgttagaaacaagtttgtttaagactgactccatcctgagtaatctccctt

SEQ ID NO: 58920 - DNA, 201 bp, Homo sapiens; identical to SEQ ID NO: 58906

SEQ ID NO: 58921 - DNA, 201 bp, Homo sapiens; identical to SEQ ID NO: 58907

SEQ ID NO: 58922 - DNA, 201 bp, Homo sapiens; identical to SEQ ID NO: 58908

SEQ ID NO: 58923 - DNA, 201 bp, Homo sapiens; identical to SEQ ID NO: 58909

SEQ ID NO: 58924 - DNA, 201 bp, Homo sapiens; identical to SEQ ID NO: 58910

SEQ ID NO: 58925 - DNA, 201 bp, Homo sapiens; identical to SEQ ID NO: 58911

SEQ ID NO: 58926 - DNA, 201 bp, Homo sapiens; identical to SEQ ID NO: 58912

SEQ ID NO: 58927 - DNA, 201 bp, Homo sapiens; identical to SEQ ID NO: 58913

SEQ ID NO: 58928 - DNA, 120 bp, Homo sapiens; identical to SEQ ID NO: 58914

SEQ ID NO: 58929 - DNA, 201 bp, Homo sapiens; identical to SEQ ID NO: 58915

SEQ ID NO: 58930 - DNA, 201 bp, Homo sapiens; identical to SEQ ID NO: 58916

SEQ ID NO: 58931 - DNA, 201 bp, Homo sapiens; identical to SEQ ID NO: 58917

SEQ ID NO: 58932 - DNA, 201 bp, Homo sapiens; identical to SEQ ID NO: 58918

SEQ ID NO: 58933 - DNA, 201 bp, Homo sapiens; identical to SEQ ID NO: 58919

SEQ ID NO: 58934 - DNA, 201 bp, Homo sapiens; identical to SEQ ID NO: 58907

SEQ ID NO: 58935 - DNA, 201 bp, Homo sapiens; identical to SEQ ID NO: 58908

SEQ ID NO: 58936 - DNA, 201 bp, Homo sapiens; identical to SEQ ID NO: 58909

SEQ ID NO: 58937 - DNA, 201 bp, Homo sapiens; identical to SEQ ID NO: 58910

SEQ ID NO: 58938 - DNA, 201 bp, Homo sapiens; identical to SEQ ID NO: 58911

SEQ ID NO: 58939 - DNA, 201 bp, Homo sapiens; identical to SEQ ID NO: 58912

SEQ ID NO: 58940 - DNA, 201 bp, Homo sapiens; identical to SEQ ID NO: 58913

SEQ ID NO: 58941 - DNA, 201 bp, Homo sapiens; identical to SEQ ID NO: 58915

SEQ ID NO: 58942 - DNA, 201 bp, Homo sapiens; identical to SEQ ID NO: 58916

SEQ ID NO: 58943 - DNA, 201 bp, Homo sapiens; identical to SEQ ID NO: 58917

SEQ ID NO: 58944 - DNA, 201 bp, Homo sapiens; identical to SEQ ID NO: 58918

SEQ ID NO: 58945 - DNA, 201 bp, Homo sapiens; identical to SEQ ID NO: 58919

SEQ ID NO: 58946 - DNA, 201 bp, Homo sapiens
tgtcagctaaaggaatcaaacctgttaccttggaacttggaggcaaatctccactcatcatcttctcagactgtgatatgaacaatgctgtaaagggggcrctgatggccaacttcctcacacaaggccaggtttgctgtaatggcacaagagtatttgtgcagaaagaaattcttgataaatttacagaggaagtggtga

SEQ ID NO: 58947 - DNA, 201 bp, Homo sapiens
cggctccagcattagcctgtggtaatgccatggtctttaaaccttctccctttacacctgtttctgcattgctactggctgaaatctacagtgaggctggkgtacctcctgggctcttcaatgtggtgcagggaggggctgccacaggccagtttctgtgtcagcatcccgatgtggccaaagtctccttcactggaagtg

SEQ ID NO: 58948 - DNA, 201 bp, Homo sapiens
gaaccgatcccgcggccccgcccctcccgcggccccgcccctcccgcggcccgtcagcctctgccgcggagctgcgtccgccactcatgtttctccgagcmggcctggccgcgctctccccgcttcttcgcagtcttcggccctctcctgtcgccgccatgagcactggcaccttcgtcgtgtcgcagccgctcaattacc

SEQ ID NO: 58949 - DNA, 201 bp, Homo sapiens
ttttggaggctgccaggataataagggaacgggaggatgaaattgctactatggagtgcatcaacaatggcaagtccatctttgaggcccgcttggacatygacatttcctggcagtgcctggagtattatgcgggcttggctgcatccatggctggtgaacacatccagctcccaggtggatcgtttggttataccagaa

SEQ ID NO: 58950 - DNA, 201 bp, Homo sapiens
tagaatcagtagagatgatttcagctcattgacatttttttaagctatatccccttgtcattccattgagaaagctgacaactgggatagggaggggattmgataatagatggggtcaaattctgtgtgaatgtgaacttgcctagtaagcactttgtctctgttcactactgcgatagaggaaatctatctccctatctt

SEQ ID NO: 58951 - DNA, 201 bp, Homo sapiens
tgaagaaaaaaaacaaaaaacaaaaaaaaaccttgttcctttataggttcctggtagaatcagtagagatgatttcagctcattgacatttttttaagctrtatccccttgtcattccattgagaaagctgacaactgggatagggaggggattcgataatagatggggtcaaattctgtgtgaatgtgaacttgcctagt

SEQ ID NO: 58952 - DNA, 201 bp, Homo sapiens
atgcaatgatgaacccgaaaacacttgcaaagtgctacgcaaatattgatcacgaagaaggaagtcctcttcccgcctggagactgtgtggggtatggcgsggtggtggggagaatgtggtgtcttgctccaccctcctggcgaggggagggcctggcctggaccgcagaggaatcgagtgactgcccctaaaatctccta

SEQ ID NO: 58953 - DNA, 155 bp, Homo sapiens
tcactactgcgatagaggaaatctatctccctatcttgggtccttgaactacagcctgctgtcttacaccagtggagctaccctttaaatgtacaaattayttgtatgctaatgtaatatggtgaaattaaaataaatcacactgttaattgttt

SEQ ID NO: 58954 - DNA, 201 bp, Homo sapiens
gcaatgatgaacccgaaaacacttgcaaagtgctacgcaaatattgatcacgaagaaggaagtcctcttcccgcctggagactgtgtggggtatggcgggrtggtggggagaatgtggtgtcttgctccaccctcctggcgaggggagggcctggcctggaccgcagaggaatcgagtgactgcccctaaaatctcctaga

SEQ ID NO: 58955 - DNA, 201 bp, Homo sapiens
tcttggaagtcggctccagcattagcctgtggtaatgccatggtctttaaaccttctccctttacacctgtttctgcattgctactggctgaaatctacastgaggctggtgtacctcctgggctcttcaatgtggtgcagggaggggctgccacaggccagtttctgtgtcagcatcccgatgtggccaaagtctccttc

SEQ ID NO: 58956 - DNA, 201 bp, Homo sapiens
cccaacaataagcccaagctacctgtggtgatctcgcagtgtggggagatgtagtccagacaaagactgaatcaggccttcccttcttcttggtggtgttmttgagtaagataatctggactggcccccgtctttgcttccctgcctgctgctgccccatttgatcaagagaccatggaagtgtcagagattcagaatcca

SEQ ID NO: 58957 - DNA, 201 bp, Homo sapiens
ttaatggagatggtactggagtcgccagtatttaccgggggccatttgcagatgaaaattttaaacttagacactcagctccaggcctgctttccatggcraacagtggtccaagtacaaatggctgtcagttctttatcacctgctctaagtgcgattggctggatgggaagcatgtggtgtttggccccaacaataagc

SEQ ID NO: 58958 - DNA, 201 bp, Homo sapiens
ttgatgtcagtattggcggtcaggaagttggccgcatgaagatcgagctctttgcagacgttgtgcctaagacggccgagaactttagtctctttcttttyggttataggaaagatggggttccaataggatacaaaggaagcaccttccacagggtcataaaggatttcatgattcagggtggagattttgttaatggag

SEQ ID NO: 58959 - DNA, 201 bp, Homo sapiens
gtggggagatgtagtccagacaaagactgaatcagcacttcccaggagcctgcccacagctgtggctaacatcaggccttcccttcttcttggtggtgttmttgagtaagataatctggactggcccccgtctttgcttccctgcctgctgctgccccatttgatcaagagaccatggaagtgtcagagattcagaatcca

SEQ ID NO: 58960 - DNA, 201 bp, Homo sapiens
ttaatggagatggtactggagtcgccagtatttaccgggggccatttgcagatgaaaattttaaacttagacactcagctccaggcctgctttccatggcraacagtggtccaagtacaaatggctgtcagttctttatcacctgctctaagtgcgattggctggatgggaagcatgtggtgtttggaaaaatcatcgatg

SEQ ID NO: 58961 - DNA, 201 bp, Homo sapiens
gtttcagatgtgtttgacttctttgcctgctccagaggggtgttctggggctgcagtgagggtatcggtgaaccacctgctggccttgaatgattgctggygacagtgatagaaggaaagatggggttccaataggatacaaaggaagcaccttccacagggtcataaaggatttcatgattcagggtggagattttgtta

SEQ ID NO: 58962 - DNA, 201 bp, Homo sapiens; identical to SEQ ID NO: 58960

SEQ ID NO: 58963 - DNA, 184 bp, Homo sapiens
actagggaggcggaggtgggagataccgagcggcagggtggtgggtcagcccatcatgccccctgctccgtgaagccctcatgrtcttggactgggccttctgacactctcccgctgattgcaggaagttggccgcatgaagatcgagctctttgcagacgttgtgcctaagacggccgagaac

SEQ ID NO: 58964 - DNA, 201 bp, Homo sapiens
ccaggagcctgcccacagctgtggctaacatcaggtgtgaatccattgctgatccctccacctcctcttccaggtctaagcccagacagtgggtgctcccmcagcacttggttcatctctccactgtggcatttaatatactgtatcacaaatatgccttcccttcttcttggtggtgttcttgagtaagataatctggac

SEQ ID NO: 58965 - DNA, 201 bp, Homo sapiens
cccagacagtgggtgctcccacagcacttggttcatctctccactgtggcatttaatatactgtatcacaaatatgccttcccttcttcttggtggtgttmttgagtaagataatctggactggcccccgtctttgcttccctgcctgctgctgccccatttgatcaagagaccatggaagtgtcagagattcagaatcca

SEQ ID NO: 58966 - DNA, 201 bp, Homo sapiens; identical to SEQ ID NO: 58960

SEQ ID NO: 58967 - DNA, 201 bp, Homo sapiens; identical to SEQ ID NO: 58956

SEQ ID NO: 58968 - DNA, 201 bp, Homo sapiens; identical to SEQ ID NO: 58960

SEQ ID NO: 58969 - DNA, 155 bp, Homo sapiens
ccaggagcctgcccacagctgtggctaacatcaggtgtgaatccattgctgatccctccacctcctcttccaggtctaagcccagacagtgggtgctcccmcagcacttggttcatctctccactgtggcatttaatatactgtatcacaaatat

SEQ ID NO: 58970 - DNA, 201 bp, Homo sapiens; identical to SEQ ID NO: 58960

SEQ ID NO: 58971 - DNA, 201 bp, Homo sapiens; identical to SEQ ID NO: 58956

SEQ ID NO: 58972 - DNA, 201 bp, Homo sapiens; identical to SEQ ID NO: 58957

SEQ ID NO: 58973 - DNA, 201 bp, Homo sapiens
actgatacactggaaagcacaacagttggcacttctgtctagaaaataataattgcaagttgtataactcaggcgtctttgcatttctgcgaaagatcaargtctgcaagggaattcttgtgtgctgctttccatttgacaccgcagttctgttcagccatcagaagagagacaaggaattaaaaatttctttttaatcct

SEQ ID NO: 58974 - DNA, 201 bp, Homo sapiens
aacaacatcaaggaagtacttctgtttcctgccatgaaacccgaagacaagaaggagaatgtagcaaccactgatacactggaaagcacaacagttggcasttctgtctagaaaataataattgcaagttgtataactcaggcgtctttgcatttctgcgaaagatcaaggtctgcaagggaattcttgtgtgctgctttc

SEQ ID NO: 58975 - DNA, 201 bp, Homo sapiens
acgatctcatggaaatcacggagaagatggtttcagggatggtgaagcatattacaggcagttacaaggtcacctaccacccagatggcccagagggccargcctacgatgttgacttcaccccacccttccggcgaatcaacatggtagaagagcttgagaaagccctggggatgaagctgccagaaacgaacctctttg

SEQ ID NO: 58976 - DNA, 201 bp, Homo sapiens
aagaaggagaatgtagcaaccactgatacactggaaagcacaacagttggcacttctgtctagaaaataataattgcaagttgtataactcaggcgtcttygcatttctgcgaaagatcaaggtctgcaagggaattcttgtgtgctgctttccatttgacaccgcagttctgttcagccatcagaagagagacaaggaat

SEQ ID NO: 58977 - DNA, 201 bp, Homo sapiens
aaacccgaagacaagaaggagaatgtagcaaccactgatacactggaaagcacaacagttggcacttctgtctagaaaataataattgcaagttgtataastcaggcgtctttgcatttctgcgaaagatcaaggtctgcaagggaattcttgtgtgctgctttccatttgacaccgcagttctgttcagccatcagaaga

SEQ ID NO: 58978 - DNA, 201 bp, Homo sapiens
cacccccgctatccgcggcctccgggtcctcctccgccttccgcttgagcttctgggaggaggggctcaccggcgcgtcccccagcagtgagctgaagagrcgcctgaaagctgagaagaaagtagcagagaaggaggccaaacagaaagagctcagtgagaaacagctaagccaagccactgctgctgccaccaaccaca

SEQ ID NO: 58979 - DNA, 201 bp, Homo sapiens
aagacaagaaggagaatgtagcaaccactgatacactggaaagcacaacagttggcacttctgtctagaaaataataattgcaagttgtataactcaggcrtctttgcatttctgcgaaagatcaaggtctgcaagggaattcttgtgtgctgctttccatttgacaccgcagttctgttcagccatcagaagagagacaa

SEQ ID NO: 58980 - DNA, 201 bp, Homo sapiens; identical to SEQ ID NO: 58973

SEQ ID NO: 58981 - DNA, 148 bp, Homo sapiens
tcgcaccttgacctggaaattaacgtactatcctccttacttttgggycgggccctccgggaagatggcggccgtgcaggcggccgaggtgaaagtggatggcagcgagccgaaactgagcaagaatgagctgaagagacgcctgaaa

SEQ ID NO: 58982 - DNA, 201 bp, Homo sapiens; identical to SEQ ID NO: 58974

SEQ ID NO: 58983 - DNA, 201 bp, Homo sapiens; identical to SEQ ID NO: 58975

SEQ ID NO: 58984 - DNA, 201 bp, Homo sapiens; identical to SEQ ID NO: 58976

SEQ ID NO: 58985 - DNA, 201 bp, Homo sapiens; identical to SEQ ID NO: 58977

SEQ ID NO: 58986 - DNA, 201 bp, Homo sapiens
acttttgggtcgggccctccgggaagatggcggccgtgcaggcggccgaggtgaaagtggatggcagcgagccgaaactgagcaagaatgagctgaagagrcgcctgaaagctgagaagaaagtagcagagaaggaggccaaacagaaagagctcagtgagaaacagctaagccaagccactgctgctgccaccaaccaca

SEQ ID NO: 58987 - DNA, 201 bp, Homo sapiens; identical to SEQ ID NO: 58979

SEQ ID NO: 58988 - DNA, 201 bp, Homo sapiens; identical to SEQ ID NO: 58973

SEQ ID NO: 58989 - DNA, 116 bp, Homo sapiens
ctccttacttttgggycgggccctccgggaagatggcggccgtgcaggcggccgaggtgaaagtggatggcagcgagccgaaactgagcaagaaccatgttgacgcaagctgctgt

SEQ ID NO: 58990 - DNA, 201 bp, Homo sapiens; identical to SEQ ID NO: 58974

SEQ ID NO: 58991 - DNA, 201 bp, Homo sapiens; identical to SEQ ID NO: 58975

SEQ ID NO: 58992 - DNA, 201 bp, Homo sapiens; identical to SEQ ID NO: 58976

SEQ ID NO: 58993 - DNA, 201 bp, Homo sapiens; identical to SEQ ID NO: 58977

SEQ ID NO: 58994 - DNA, 201 bp, Homo sapiens
cagagtggggtcacagggaactgcgactgggtcaacttgctcctttcacagcgcctcacaaggacaagtcattttctgatcaaagaagtgagctgaagagrcgcctgaaagctgagaagaaagtagcagagaaggaggccaaacagaaagagctcagtgagaaacagctaagccaagccactgctgctgccaccaaccaca

SEQ ID NO: 58995 - DNA, 201 bp, Homo sapiens; identical to SEQ ID NO: 58979

SEQ ID NO: 58996 - DNA, 201 bp, Homo sapiens; identical to SEQ ID NO: 58973

SEQ ID NO: 58997 - DNA, 148 bp, Homo sapiens; identical to SEQ ID NO: 58981

SEQ ID NO: 58998 - DNA, 201 bp, Homo sapiens; identical to SEQ ID NO: 58974

SEQ ID NO: 58999 - DNA, 201 bp, Homo sapiens; identical to SEQ ID NO: 58975

SEQ ID NO: 59000 - DNA, 201 bp, Homo sapiens; identical to SEQ ID NO: 58976

SEQ ID NO: 59001 - DNA, 201 bp, Homo sapiens; identical to SEQ ID NO: 58977

SEQ ID NO: 59002 - DNA, 201 bp, Homo sapiens; identical to SEQ ID NO: 58986

SEQ ID NO: 59003 - DNA, 201 bp, Homo sapiens; identical to SEQ ID NO: 58979

SEQ ID NO: 59004 - DNA, 201 bp, Homo sapiens
ggccgaggtgaaagtggatggcagcgagccgaaactgagcaagaagtgagtgtcgctgcgagtctttaaagcctttgcggtaggagagtctgggctgggargcgccgcgaggttcccaccaaggctgctgtgccggggccttcttgccggctctcgtgggtggtggtaatcattagttccagggtgctctgccatgttgac

SEQ ID NO: 59005 - DNA, 201 bp, Homo sapiens; identical to SEQ ID NO: 58973

SEQ ID NO: 59006 - DNA, 201 bp, Homo sapiens; identical to SEQ ID NO: 58974

SEQ ID NO: 59007 - DNA, 201 bp, Homo sapiens; identical to SEQ ID NO: 58975

SEQ ID NO: 59008 - DNA, 201 bp, Homo sapiens; identical to SEQ ID NO: 58976

SEQ ID NO: 59009 - DNA, 201 bp, Homo sapiens; identical to SEQ ID NO: 58977

SEQ ID NO: 59010 - DNA, 201 bp, Homo sapiens; identical to SEQ ID NO: 58994

SEQ ID NO: 59011 - DNA, 201 bp, Homo sapiens; identical to SEQ ID NO: 58979

SEQ ID NO: 59012 - DNA, 201 bp, Homo sapiens
cagaataatcctcaggtctgcccctacaatctctatgctgagcagctctcaggatcggctttcacttgtccacggagcaccaataagagaagctggctgtrtaggattctaccttcagtttctcacaagccctttgaatccattgacgaaggccatgtcactcacaactgggatgaagttgatcctgatcctaaccagctt

SEQ ID NO: 59013 - DNA, 201 bp, Homo sapiens
ttttcacagtattgactgctaagtctgtccgccctggagtggccattgctgattttgtcatcttcccacctcgatggggggttgctgataagaccttcagkcctccttattaccataggaactgcatgagtgagttcatgggactcatccgaggtcactatgaggcaaagcaaggtgggttcctgccagggggagggagtc

SEQ ID NO: 59014 - DNA, 201 bp, Homo sapiens
taacaatgggcttgctatccacattttcctctgcaatacctccatggagaacagatgcttttacaattcagatggggacttcttgattgttccgcagaaarggaaccttctcatttacaccgagtttggcaagatgcttgtacagcccaatgagatctgcgtcattcagagaggaatgcggttcagcatagatgtctttga

SEQ ID NO: 59015 - DNA, 201 bp, Homo sapiens
ttacaattcagatggggacttcttgattgttccgcagaaagggaaccttctcatttacaccgagtttggcaagatgcttgtacagcccaatgagatctgcktcattcagagaggaatgcggttcagcatagatgtctttgaggagaccaggggctacatcttggaggtctatggtgtccactttgagttacctgaccttgg

SEQ ID NO: 59016 - DNA, 201 bp, Homo sapiens
attgttccgcagaaagggaaccttctcatttacaccgagtttggcaagatgcttgtacagcccaatgagatctgcgtcattcagagaggaatgcggttcakcatagatgtctttgaggagaccaggggctacatcttggaggtctatggtgtccactttgagttacctgaccttggaccaattggggccaatggcttggcc

SEQ ID NO: 59017 - DNA, 201 bp, Homo sapiens
cggctttcacttgtccacggagcaccaataagagaagctggctgtataggattctaccttcagtttctcacaagccctttgaatccattgacgaaggccawgtcactcacaactgggatgaagttgatcctgatcctaaccagcttagatggaaaccatttgagattccaaaagcatctcagaagaaagtagactttgtga

SEQ ID NO: 59018 - DNA, 201 bp, Homo sapiens
cagagaggaatgcggttcagcatagatgtctttgaggagaccaggggctacatcttggaggtctatggtgtccactttgagttacctgaccttggaccaaytggggccaatggcttggccaatcctcgtgatttcttgatacccattgcctggtatgaggatcgccaagtaccaggtggttacacggtcattaataaatac

SEQ ID NO: 59019 - DNA, 201 bp, Homo sapiens
aggatgtctccccgttcaatgttgtggcctggcacgggaattatacaccctacaagtacaacctgaagaatttcatggttatcaactcagtggcctttgamcatgcagacccatccattttcacagtattgactgctaagtctgtccgccctggagtggccattgctgattttgtcatcttcccacctcgatggggggttg

SEQ ID NO: 59020 - DNA, 201 bp, Homo sapiens
taaagtctaacaatgggcttgctatccacattttcctctgcaatacctccatggagaacagatgcttttacaattcagatggggacttcttgattgttcckcagaaagggaaccttctcatttacaccgagtttggcaagatgcttgtacagcccaatgagatctgcgtcattcagagaggaatgcggttcagcatagatg

SEQ ID NO: 59021 - DNA, 201 bp, Homo sapiens
taagaccttcaggcctccttattaccataggaactgcatgagtgagttcatgggactcatccgaggtcactatgaggcaaagcaaggtgggttcctgccasggggagggagtctacacagcacaatgaccccccatggacctgatgctgactgctttgagaaggccagcaaggtcaagctggcacctgagaggattgccga

SEQ ID NO: 59022 - DNA, 201 bp, Homo sapiens
tgcatgagtgagttcatgggactcatccgaggtcactatgaggcaaagcaaggtgggttcctgccagggggagggagtctacacagcacaatgaccccccrtggacctgatgctgactgctttgagaaggccagcaaggtcaagctggcacctgagaggattgccgatggcaccatggcatttatgtttgaatcatcttta

SEQ ID NO: 59023 - DNA, 132 bp, Homo sapiens
ccacagttcctttccccgatagcttcaaattytctgccttttgaaataagcctacttttaactggaataaataattggtcaatctctacctcaggtgaagaggaaccaagcctctggaaacacttaggaaca

SEQ ID NO: 59024 - DNA, 201 bp, Homo sapiens
atgctgactgctttgagaaggccagcaaggtcaagctggcacctgagaggattgccgatggcaccatggcatttatgtttgaatcatctttaagtctggcrgtcacaaagtggggactcaaggcctccaggtgtttggatgagaactaccacaagtgctgggagccactcaagagccacttcactcccaactccaggaacc

SEQ ID NO: 59025 - DNA, 201 bp, Homo sapiens
ggaataaataattggtcaatctctacctcaggtgaagaggaaccaagcctctggaaacacttaggaacaaactgtaaaaaccaaaggcaattgtgtaaccrgttaaataagcttgctggactttgtccctgtgtatgagttagacaattctttcagctagtttgagtgacgcactgaccagtgaagcgcagtgaagcagtg

SEQ ID NO: 59026 - DNA, 201 bp, Homo sapiens
ggatttgggaatgagtgttcttcagaggatcctcgctgcccaggttccctgccagaaggacagaataatcctcaggtctgcccctacaatctctatgctgmgcagctctcaggatcggctttcacttgtccacggagcaccaataagagaagctggctgtataggattctaccttcagtttctcacaagccctttgaatcc

SEQ ID NO: 59027 - DNA, 201 bp, Homo sapiens
ccataggaactgcatgagtgagttcatgggactcatccgaggtcactatgaggcaaagcaaggtgggttcctgccagggggagggagtctacacagcacartgaccccccatggacctgatgctgactgctttgagaaggccagcaaggtcaagctggcacctgagaggattgccgatggcaccatggcatttatgtttga

SEQ ID NO: 59028 - DNA, 201 bp, Homo sapiens
ttcttcagaggatcctcgctgcccaggttccctgccagaaggacagaataatcctcaggtctgcccctacaatctctatgctgagcagctctcaggatcgkctttcacttgtccacggagcaccaataagagaagctggctgtataggattctaccttcagtttctcacaagccctttgaatccattgacgaaggccatgt

SEQ ID NO: 59029 - DNA, 201 bp, Homo sapiens
agcaccaataagagaagctggctgtataggattctaccttcagtttctcacaagccctttgaatccattgacgaaggccatgtcactcacaactgggatgmagttgatcctgatcctaaccagcttagatggaaaccatttgagattccaaaagcatctcagaagaaagtagactttgtgagtggcctgcataccttgtgt

SEQ ID NO: 59030 - DNA, 201 bp, Homo sapiens
atcctaaccagcttagatggaaaccatttgagattccaaaagcatctcagaagaaagtagactttgtgagtggcctgcataccttgtgtggagctggagayataaagtctaacaatgggcttgctatccacattttcctctgcaatacctccatggagaacagatgcttttacaattcagatggggacttcttgattgttc

SEQ ID NO: 59031 - DNA, 201 bp, Homo sapiens
tacacagcacaatgaccccccatggacctgatgctgactgctttgagaaggccagcaaggtcaagctggcacctgagaggattgccgatggcaccatggcmtttatgtttgaatcatctttaagtctggcggtcacaaagtggggactcaaggcctccaggtgtttggatgagaactaccacaagtgctgggagccactca

SEQ ID NO: 59032 - DNA, 201 bp, Homo sapiens
ggcctttgaccatgcagacccatccattttcacagtattgactgctaagtctgtccgccctggagtggccattgctgattttgtcatcttcccacctcgayggggggttgctgataagaccttcaggcctccttattaccataggaactgcatgagtgagttcatgggactcatccgaggtcactatgaggcaaagcaagg

SEQ ID NO: 59033 - DNA, 201 bp, Homo sapiens
agtggcctttgaccatgcagacccatccattttcacagtattgactgctaagtctgtccgccctggagtggccattgctgattttgtcatcttcccacctygatggggggttgctgataagaccttcaggcctccttattaccataggaactgcatgagtgagttcatgggactcatccgaggtcactatgaggcaaagca

SEQ ID NO: 59034 - DNA, 201 bp, Homo sapiens
agtcaccacacatagaggagagagaaaatggctgagttaaagtacatttctggatttgggaatgagtgttcttcagaggatcctcgctgcccaggttcccygccagaaggacagaataatcctcaggtctgcccctacaatctctatgctgagcagctctcaggatcggctttcacttgtccacggagcaccaataagaga

SEQ ID NO: 59035 - DNA, 201 bp, Homo sapiens
tcgctgcccaggttccctgccagaaggacagaataatcctcaggtctgcccctacaatctctatgctgagcagctctcaggatcggctttcacttgtccayggagcaccaataagagaagctggctgtataggattctaccttcagtttctcacaagccctttgaatccattgacgaaggccatgtcactcacaactggga

SEQ ID NO: 59036 - DNA, 201 bp, Homo sapiens
gatgtctccccgttcaatgttgtggcctggcacgggaattatacaccctacaagtacaacctgaagaatttcatggttatcaactcagtggcctttgaccrtgcagacccatccattttcacagtattgactgctaagtctgtccgccctggagtggccattgctgattttgtcatcttcccacctcgatggggggttgct

SEQ ID NO: 59037 - DNA, 201 bp, Homo sapiens
agaaggacagaataatcctcaggtctgcccctacaatctctatgctgagcagctctcaggatcggctttcacttgtccacggagcaccaataagagaagckggctgtataggattctaccttcagtttctcacaagccctttgaatccattgacgaaggccatgtcactcacaactgggatgaagttgatcctgatcctaa

SEQ ID NO: 59038 - DNA, 201 bp, Homo sapiens
gcctggcacgggaattatacaccctacaagtacaacctgaagaatttcatggttatcaactcagtggcctttgaccatgcagacccatccattttcacagkattgactgctaagtctgtccgccctggagtggccattgctgattttgtcatcttcccacctcgatggggggttgctgataagaccttcaggcctccttat

SEQ ID NO: 59039 - DNA, 201 bp, Homo sapiens; identical to SEQ ID NO: 59013

SEQ ID NO: 59040 - DNA, 201 bp, Homo sapiens; identical to SEQ ID NO: 59012

SEQ ID NO: 59041 - DNA, 201 bp, Homo sapiens; identical to SEQ ID NO: 59014

SEQ ID NO: 59042 - DNA, 201 bp, Homo sapiens; identical to SEQ ID NO: 59015

SEQ ID NO: 59043 - DNA, 201 bp, Homo sapiens; identical to SEQ ID NO: 59016

SEQ ID NO: 59044 - DNA, 201 bp, Homo sapiens; identical to SEQ ID NO: 59018

SEQ ID NO: 59045 - DNA, 201 bp, Homo sapiens; identical to SEQ ID NO: 59017

SEQ ID NO: 59046 - DNA, 201 bp, Homo sapiens; identical to SEQ ID NO: 59019

SEQ ID NO: 59047 - DNA, 201 bp, Homo sapiens; identical to SEQ ID NO: 59020

SEQ ID NO: 59048 - DNA, 201 bp, Homo sapiens; identical to SEQ ID NO: 59021

SEQ ID NO: 59049 - DNA, 190 bp, Homo sapiens
tgcatgagtgagttcatgggactcatccgaggtcactatgaggcaaagcaaggtgggttcctgccagggggagggagtctacacagcacaatgaccccccrtggacctgatgctgactgctttgagaaggccagcaaggtcaagctggcacctgagaggattgccgatggcaccatggtaagtatgttaa

SEQ ID NO: 59050 - DNA, 200 bp, Homo sapiens
ccataggaactgcatgagtgagttcatgggactcatccgaggtcactatgaggcaaagcaaggtgggttcctgccagggggagggagtctacacagcacartgaccccccatggacctgatgctgactgctttgagaaggccagcaaggtcaagctggcacctgagaggattgccgatggcaccatggtaagtatgttaa

SEQ ID NO: 59051 - DNA, 201 bp, Homo sapiens; identical to SEQ ID NO: 59026

SEQ ID NO: 59052 - DNA, 201 bp, Homo sapiens; identical to SEQ ID NO: 59028

SEQ ID NO: 59053 - DNA, 201 bp, Homo sapiens; identical to SEQ ID NO: 59029

SEQ ID NO: 59054 - DNA, 201 bp, Homo sapiens; identical to SEQ ID NO: 59030

SEQ ID NO: 59055 - DNA, 201 bp, Homo sapiens; identical to SEQ ID NO: 59033

SEQ ID NO: 59056 - DNA, 201 bp, Homo sapiens; identical to SEQ ID NO: 59032

SEQ ID NO: 59057 - DNA, 174 bp, Homo sapiens
ctttgtcacctacagtacatttctggatttgggaatgagtgttcttcagaggatcctcgctgcccaggttcccygccagaaggacagaataatcctcaggtctgcccctacaatctctatgctgagcagctctcaggatcggctttcacttgtccacggagcaccaataagaga

SEQ ID NO: 59058 - DNA, 201 bp, Homo sapiens; identical to SEQ ID NO: 59036

SEQ ID NO: 59059 - DNA, 201 bp, Homo sapiens; identical to SEQ ID NO: 59035

SEQ ID NO: 59060 - DNA, 201 bp, Homo sapiens; identical to SEQ ID NO: 59038

SEQ ID NO: 59061 - DNA, 201 bp, Homo sapiens; identical to SEQ ID NO: 59037

SEQ ID NO: 59062 - DNA, 201 bp, Homo sapiens; identical to SEQ ID NO: 59012

SEQ ID NO: 59063 - DNA, 201 bp, Homo sapiens; identical to SEQ ID NO: 59014

SEQ ID NO: 59064 - DNA, 201 bp, Homo sapiens; identical to SEQ ID NO: 59015

SEQ ID NO: 59065 - DNA, 201 bp, Homo sapiens; identical to SEQ ID NO: 59016

SEQ ID NO: 59066 - DNA, 201 bp, Homo sapiens; identical to SEQ ID NO: 59018

SEQ ID NO: 59067 - DNA, 201 bp, Homo sapiens; identical to SEQ ID NO: 59017

SEQ ID NO: 59068 - DNA, 191 bp, Homo sapiens
aggatgtctccccgttcaatgttgtggcctggcacgggaattatacaccctacaagtacaacctgaagaatttcatggttatcaactcagtggcctttgamcatgcagacccatccattttcacagtattgactgctaaaaggccagcaaggtcaagctggcacctgagaggattgccgatggcaccatgg

SEQ ID NO: 59069 - DNA, 201 bp, Homo sapiens; identical to SEQ ID NO: 59020

SEQ ID NO: 59070 - DNA, 201 bp, Homo sapiens; identical to SEQ ID NO: 59026

SEQ ID NO: 59071 - DNA, 201 bp, Homo sapiens; identical to SEQ ID NO: 59028

SEQ ID NO: 59072 - DNA, 201 bp, Homo sapiens; identical to SEQ ID NO: 59029

SEQ ID NO: 59073 - DNA, 201 bp, Homo sapiens; identical to SEQ ID NO: 59030

SEQ ID NO: 59074 - DNA, 174 bp, Homo sapiens; identical to SEQ ID NO: 59057

SEQ ID NO: 59075 - DNA, 189 bp, Homo sapiens
gatgtctccccgttcaatgttgtggcctggcacgggaattatacaccctacaagtacaacctgaagaatttcatggttatcaactcagtggcctttgaccrtgcagacccatccattttcacagtattgactgctaaaaggccagcaaggtcaagctggcacctgagaggattgccgatggcaccatgg

SEQ ID NO: 59076 - DNA, 201 bp, Homo sapiens; identical to SEQ ID NO: 59035

SEQ ID NO: 59077 - DNA, 201 bp, Homo sapiens; identical to SEQ ID NO: 59037

SEQ ID NO: 59078 - DNA, 165 bp, Homo sapiens
gcctggcacgggaattatacaccctacaagtacaacctgaagaatttcatggttatcaactcagtggcctttgaccatgcagacccatccattttcacagkattgactgctaaaaggccagcaaggtcaagctggcacctgagaggattgccgatggcaccatgg

SEQ ID NO: 59079 - DNA, 123 bp, Homo sapiens
acaccctaacaacacagaagcagacgcagcccgtgttgggaatctgctgtcagagtgacagcaaacatttgctgtacattgaatgaatgaacataaacttyattaaactgtgagctcttagaa

SEQ ID NO: 59080 - DNA, 201 bp, Homo sapiens
tgagagggataggaaagaaaaacttatccaggaaggaaaattggatcgaacatttcacctctcatattaagtctggcaatgatgactatatgtattcctgyctaaataaatcatctattaatcattaagtagtagtttctctttcttagtattaccttgattcaatgttaaaaactattaacaccctaacaacacagaagc

SEQ ID NO: 59081 - DNA, 201 bp, Homo sapiens
gcatctacgtggtgcaggacgggctgctggagctctgtctgccagggcctgacgggaaggagtgtgtggtgaaggaagtggttcctggggacagcgtcaayagccttctcagcatcctggatgtcatcaccggtcaccagcatccccagcggaccgtgtctgcccgggcggcccgggactccacggtgctgcgcctgccgg

SEQ ID NO: 59082 - DNA, 201 bp, Homo sapiens
cagagattgtgtcccggattgagccccccacgagctatgtctctgatggctgtgctgacggagaggagtcagattgtctgacagagtatgaggaggacgcyggacccgactgctcgagggatgaaggggggtcccccgagggcgcaagccccagcactgcctccgagatggaggaggagaagtcgattctccggcaacgac

SEQ ID NO: 59083 - DNA, 201 bp, Homo sapiens
ggctaccagatcggccgtccagctggaatcaaccgatggaggctccgctgcaaactggaatggtgcttggcgtgatgatcggggccggagtggcggtggtrgtcacggccgtgctcatcctcctggtggtgcggaggctgcgagtgccaaaaaccccagccccggatggcccccggtatcggttccggaagagggacaaag

SEQ ID NO: 59084 - DNA, 201 bp, Homo sapiens
gcccagggagaccccagggcggccacccgatcccaccggggccccgctgcctggacctacaggggaccctgtgaagcccacatccctggaaaccccctcgscccctctgctgagccgctgcgtctccatgccaggggacatctcaggcttgcagggtggcccccgctccgacttcgacatggcctatgagcgtggccggat

SEQ ID NO: 59085 - DNA, 117 bp, Homo sapiens
taatttaaaggggccgygcctgcggagccgggcggaacgctagcggtgttggcgcggagtggaccccggctgcggcccctggcaatggcgccaccatcggtcccggagtcccagtga

SEQ ID NO: 59086 - DNA, 201 bp, Homo sapiens
gggcctccgcactggatagcatccaagagttccggctgtcagggtggctggcccagcaggaggatgcacaccgtatcgtactctaccagacggacgcctcrctgacgccctggaccgtgcgctgcctgcgacaggccgactgcatcctcattgtgggcctgggggaccaggagcctaccctcggccagctggagcagatgc

SEQ ID NO: 59087 - DNA, 201 bp, Homo sapiens
ggagccaggatgagacggacctcagcacctacggggacagcctgtccggctggtggctgctgtggaagcggctgaatccctgggctgacaaggtaaaggtyccagacatggctgaaatccagtcccgcctggcctacgtgtcctgtgtgcggcagctagaggttgtcaagtccagctcctactgcgagtacctgcgcccgc

SEQ ID NO: 59088 - DNA, 201 bp, Homo sapiens
gcaatggcgccaccatcggtcccggagtcccagtgatgctctgtgccatagagcccccataacttcactactacgtgatagtaaatccccggcaaaaaccmgcagcgccttgcaagcccacgccaccccaagcatcccaggactcttctgaaacgactccgggctaccagatcggccgtccagctggaatcaaccgatgga

SEQ ID NO: 59089 - DNA, 201 bp, Homo sapiens; identical to SEQ ID NO: 59081

SEQ ID NO: 59090 - DNA, 201 bp, Homo sapiens; identical to SEQ ID NO: 59086

SEQ ID NO: 59091 - DNA, 201 bp, Homo sapiens; identical to SEQ ID NO: 59082

SEQ ID NO: 59092 - DNA, 201 bp, Homo sapiens; identical to SEQ ID NO: 59083

SEQ ID NO: 59093 - DNA, 201 bp, Homo sapiens; identical to SEQ ID NO: 59087

SEQ ID NO: 59094 - DNA, 201 bp, Homo sapiens; identical to SEQ ID NO: 59084

SEQ ID NO: 59095 - DNA, 201 bp, Homo sapiens
gcaatggcgccaccatcggtcccggagtcccagtgatgctctgtgccatagagcccccataacttcactactacgtgatagtaaatccccggcaaaaaccmgcagcgccttgcaagcccacgccaccccaagcatcccaggactcttctgaaacagggcagtgacccgggaggaagtcaccaggtgcagaggaccgtgccc

SEQ ID NO: 59096 - DNA, 201 bp, Homo sapiens; identical to SEQ ID NO: 59081

SEQ ID NO: 59097 - DNA, 201 bp, Homo sapiens; identical to SEQ ID NO: 59086

SEQ ID NO: 59098 - DNA, 201 bp, Homo sapiens; identical to SEQ ID NO: 59082

SEQ ID NO: 59099 - DNA, 201 bp, Homo sapiens; identical to SEQ ID NO: 59083

SEQ ID NO: 59100 - DNA, 201 bp, Homo sapiens; identical to SEQ ID NO: 59087

SEQ ID NO: 59101 - DNA, 201 bp, Homo sapiens; identical to SEQ ID NO: 59084

SEQ ID NO: 59102 - DNA, 201 bp, Homo sapiens; identical to SEQ ID NO: 59095

SEQ ID NO: 59103 - DNA, 201 bp, Homo sapiens
atgggaaacaagccagaagaacaaactcttgttcccctttaggggagctctttgaccatggctgtgactctctttccacagtatttatggcagtgggagcrtcaattgccgctcgcttaggaacttatcctgactggttttttttctgctcttttattgggatgtttgtgttttattgcgctcattggcagacttatgttt

SEQ ID NO: 59104 - DNA, 201 bp, Homo sapiens
gagctctttgaccatggctgtgactctctttccacagtatttatggcagtgggagcttcaattgccgctcgcttaggaacttatcctgactggtttttttyctgctcttttattgggatgtttgtgttttattgcgctcattggcagacttatgtttcaggcatgttgagatttggaaaagtggatgtaactgaaattcag

SEQ ID NO: 59105 - DNA, 201 bp, Homo sapiens
aaaaattagtggtagctcacatgaccaaaagtgaactatatcttcaagacactgtctttttggggccaggtcttttgtttttagaccagtactttaataaytttatagacgaatatgttgttctatggatggcaatggtgatttcttcatttgatatggtgatatactttagtgctttgtgcctgcaaatttcaagacacc

SEQ ID NO: 59106 - DNA, 201 bp, Homo sapiens; identical to SEQ ID NO: 59103

SEQ ID NO: 59107 - DNA, 201 bp, Homo sapiens; identical to SEQ ID NO: 59104

SEQ ID NO: 59108 - DNA, 201 bp, Homo sapiens
aaaaattagtggtagctcacatgaccaaaagtgaactatatcttcaagacactgtctttttggggccaggtcttttgtttttagaccagtactttaataaytttatagacgaatatgttgttctatggatggcaatggtaagtatttttctccattttatttattttttaacaatggtgatttcttcatttgatatggtga

SEQ ID NO: 59109 - DNA, 201 bp, Homo sapiens
aaacaagccagaagaacaaactcttgttcccctttaggggagctctttgaccatggctgtgactctctttccacaggaacttatcctgactggtttttttyctgctcttttattgggatgtttgtgttttattgcgctcattggcagacttatagtggatgtaactgaaattcagatagctttagtgattgtctttgtgtt

SEQ ID NO: 59110 - DNA, 201 bp, Homo sapiens
cttgccagaagatgatcttagagttgttttctaaggtgccatccttggtaggaagctttattagaagccaaaataaagaagactatgctggcctaaaagargaatttcgtaaagaatttaccaagctagaggaggttctgactaataagaagacgaccttctttggtggcaattctatctctatgattgattacctcatct

SEQ ID NO: 59111 - DNA, 119 bp, Homo sapiens
gagcttggggaagggtgargcctgcccgccgcgaagagggggtgatctcggcgacccccggcggcatgttcgaggctgctccgggagcccagccgcccgggagcgccccaccggcgggg

SEQ ID NO: 59112 - DNA, 201 bp, Homo sapiens
ctggaagcaatgaagttaaatgagtgtgtagaccacactccaaaactgaaactgtggatggcagccatgaaggaagatcccacagtctcagccctgcttamtagtgagaaagactggcaaggtttcctagagctctacttacagaacagccctgaggcctgtgactatgggctctgaagggggcaggagtcagcaataaag

SEQ ID NO: 59113 - DNA, 157 bp, Homo sapiens
cccacagtctcagccctgcttactagtgagaaagactggcaaggtttcctagagctctacttacagaacagccctgaggcctgtgactatgggctctgaarggggcaggagtcagcaataaagctatgtctgatattttccttcactaatatgaata

SEQ ID NO: 59114 - DNA, 201 bp, Homo sapiens
ccctatgagaaagcttgccagaagatgatcttagagttgttttctaaggtgccatccttggtaggaagctttattagaagccaaaataaagaagactatgmtggcctaaaagaagaatttcgtaaagaatttaccaagctagaggaggttctgactaataagaagacgaccttctttggtggcaattctatctctatgatt

SEQ ID NO: 59115 - DNA, 201 bp, Homo sapiens
ttacctcatctggccctggtttgaacggctggaagcaatgaagttaaatgagtgtgtagaccacactccaaaactgaaactgtggatggcagccatgaagraagatcccacagtctcagccctgcttactagtgagaaagactggcaaggtttcctagagctctacttacagaacagccctgaggcctgtgactatgggct

SEQ ID NO: 59116 - DNA, 162 bp, Homo sapiens
aagatcccacagtctcagccctgcttactagtgagaaagactggcaaggtttcctagagctctacttacagaacagccctgaggcctgtgactatgggctytgaagggggcaggagtcagcaataaagctatgtctgatattttccttcactaatatgaata

SEQ ID NO: 59117 - DNA, 201 bp, Homo sapiens
aggtgccatccttggtaggaagctttattagaagccaaaataaagaagactatgctggcctaaaagaagaatttcgtaaagaatttaccaagctagaggaggttctgactaataagaagacgaccttctttggtggcaattctatctctatgattgattacctcatctggccctggtttgaacggctggaagcaatgaagt

SEQ ID NO: 59118 - DNA, 201 bp, Homo sapiens
cctggtttgaacggctggaagcaatgaagttaaatgagtgtgtagaccacactccaaaactgaaactgtggatggcagccatgaaggaagatcccacagtytcagccctgcttactagtgagaaagactggcaaggtttcctagagctctacttacagaacagccctgaggcctgtgactatgggctctgaagggggcagg

SEQ ID NO: 59119 - DNA, 108 bp, Homo sapiens
tttaaggratcaaacttgacttgtaaagccaataaaagccacttggagaattggcctcagatcttgtctgcaactgtccctgtaaaggtgaggaaactgaaacacact

SEQ ID NO: 59120 - DNA, 201 bp, Homo sapiens; identical to SEQ ID NO: 59110

SEQ ID NO: 59121 - DNA, 201 bp, Homo sapiens; identical to SEQ ID NO: 59112

SEQ ID NO: 59122 - DNA, 157 bp, Homo sapiens; identical to SEQ ID NO: 59113

SEQ ID NO: 59123 - DNA, 201 bp, Homo sapiens; identical to SEQ ID NO: 59114

SEQ ID NO: 59124 - DNA, 201 bp, Homo sapiens; identical to SEQ ID NO: 59115

SEQ ID NO: 59125 - DNA, 162 bp, Homo sapiens; identical to SEQ ID NO: 59116

SEQ ID NO: 59126 - DNA, 201 bp, Homo sapiens; identical to SEQ ID NO: 59117

SEQ ID NO: 59127 - DNA, 201 bp, Homo sapiens; identical to SEQ ID NO: 59118

SEQ ID NO: 59128 - DNA, 201 bp, Homo sapiens
ccatgaggtcgggccacaggctctgaagtcgtgaagccttgggacggagcgggtggtgcttcgaggtcagtgtcacgggagggaggtcagggtcagggtcrgacgtggagccccgtggagtgcggagtggtgaccccttcgttcgggggcggagggatgactgagcatttataacttttgtgtatctccccgtgggtgcaa

SEQ ID NO: 59129 - DNA, 201 bp, Homo sapiens; identical to SEQ ID NO: 59110

SEQ ID NO: 59130 - DNA, 201 bp, Homo sapiens; identical to SEQ ID NO: 59112

SEQ ID NO: 59131 - DNA, 201 bp, Homo sapiens
agacgtggagccccgtggagtgcggagtggtgaccccttcgttcgggggcggagggatgactgagcatttataacttttgtgtatctccccgtgggtgcarcccttggccagcgagatgctttgacacagccccttaagatgttttaagggctatcccataaagccgggaaggcacaacgggtggagctggcggccgccgg

SEQ ID NO: 59132 - DNA, 201 bp, Homo sapiens
gtggagtgcggagtggtgaccccttcgttcgggggcggagggatgactgagcatttataacttttgtgtatctccccgtgggtgcaacccttggccagcgwgatgctttgacacagccccttaagatgttttaagggctatcccataaagccgggaaggcacaacgggtggagctggcggccgccgggggcaggcactttt

SEQ ID NO: 59133 - DNA, 157 bp, Homo sapiens; identical to SEQ ID NO: 59113

SEQ ID NO: 59134 - DNA, 201 bp, Homo sapiens; identical to SEQ ID NO: 59114

SEQ ID NO: 59135 - DNA, 201 bp, Homo sapiens; identical to SEQ ID NO: 59115

SEQ ID NO: 59136 - DNA, 162 bp, Homo sapiens; identical to SEQ ID NO: 59116

SEQ ID NO: 59137 - DNA, 201 bp, Homo sapiens
ggagggaggtcagggtcagggtcagacgtggagccccgtggagtgcggagtggtgaccccttcgttcgggggcggagggatgactgagcatttataacttytgtgtatctccccgtgggtgcaacccttggccagcgagatgctttgacacagccccttaagatgttttaagggctatcccataaagccgggaaggcacaa

SEQ ID NO: 59138 - DNA, 201 bp, Homo sapiens; identical to SEQ ID NO: 59117

SEQ ID NO: 59139 - DNA, 201 bp, Homo sapiens; identical to SEQ ID NO: 59118

SEQ ID NO: 59140 - DNA, 201 bp, Homo sapiens; identical to SEQ ID NO: 59115

SEQ ID NO: 59141 - DNA, 162 bp, Homo sapiens; identical to SEQ ID NO: 59116

SEQ ID NO: 59142 - DNA, 201 bp, Homo sapiens; identical to SEQ ID NO: 59110

SEQ ID NO: 59143 - DNA, 201 bp, Homo sapiens; identical to SEQ ID NO: 59112

SEQ ID NO: 59144 - DNA, 157 bp, Homo sapiens; identical to SEQ ID NO: 59113

SEQ ID NO: 59145 - DNA, 201 bp, Homo sapiens; identical to SEQ ID NO: 59117

SEQ ID NO: 59146 - DNA, 201 bp, Homo sapiens; identical to SEQ ID NO: 59118

SEQ ID NO: 59147 - DNA, 201 bp, Homo sapiens; identical to SEQ ID NO: 59114

SEQ ID NO: 59148 - DNA, 201 bp, Homo sapiens
acactgactacaagcggcaccagctgacacggtcaattagtgagattaaacctcccaacctcttcccactggccccccaggaaattacacactgccatgaygaagatgatgatgaagaggaggaggaggaggaagaataaggaggaaaaccaaaaccccaagcacccattaaacaagtcctggcaggactcacaggaacaa

SEQ ID NO: 59149 - DNA, 201 bp, Homo sapiens
gttaaggtcaagttttcttttataagcctttaattcatcctcagtgactctggcaaggctgcttctctatcactggctttgcacagaagtatgctctactwgcgttgctttagggcaggattctattttgagggaaaagacagtatccttattaccttttgtttgtttaatagcacaaatgcttatttgttatccaaaaac

SEQ ID NO: 59150 - DNA, 201 bp, Homo sapiens
atgtagtctctgttaaggtcaagttttcttttataagcctttaattcatcctcagtgactctggcaaggctgcttctctatcactggctttgcacagaagwatgctctacttgcgttgctttagggcaggattctattttgagggaaaagacagtatccttattaccttttgtttgtttaatagcacaaatgcttatttgt

SEQ ID NO: 59151 - DNA, 201 bp, Homo sapiens
atgggaagagggctctgtaagccagaaccttactaaagtagagggcacaatcagtgtgaataaattcacttcagaatctcaagtcaaggccaggcacggcrgctcacgcctgtaatcccagcactttgggaggccgagacaggcggatcacctgaggtcgggagttcgagaccagccttaccaacatggagaaaccccatc

SEQ ID NO: 59152 - DNA, 201 bp, Homo sapiens
atctttcatcaacctgctgtattaccctttcagctacctcttcagggctgcccatgtcttgatgcctcatgaatcaacggtggagcacacacacgtagatwtcaatgagatggagtctcctcttgccacccggaaccgcacatcagtggatttcaaagacactgactacaagcggcaccagctgacacggtcaattagtga

SEQ ID NO: 59153 - DNA, 201 bp, Homo sapiens
gttgcagtgagccaggattgtgccattgcactccagcctgggcaacaagaacaaaactccatctcaaaaaataaaaatcccaatcccaagtcgaaatcacytcttgttttaaacaagaatgaatcattactgtgtatgttagggtattaaaactgtttcaccagtacagtgaaagttgtttcaacattttaaacaaacagt

SEQ ID NO: 59154 - DNA, 201 bp, Homo sapiens
acagtgatgtgatctcctgacgtcaagtgatccattcgcctcggcctcccaaagttctgggattacaagtaatacaaaatacagttaaaataaaatgtcarcctcctggagtgatcggttacagaatgcagcagatatgcctgctaacatggataagcatgccctgaaaaagtatcgtcgagaagcctatcatcgggtgtt

SEQ ID NO: 59155 - DNA, 201 bp, Homo sapiens
gacacactgtatggaaatcttttgaaagtcgatgcctatggaaacctcttggtctgtgcacatggatttaactttataaggggaccagaaactagagaacrgtatccaaataaatttatccagcgagatgatactgaaagattttacattctgaacacactattcaacctaccagagacctacctgttggcctgcctagta

SEQ ID NO: 59156 - DNA, 201 bp, Homo sapiens
tgcagatggtccaaaattgtaatggagtctgtattagaagaaaataagggtaaaatcaggctgaactgcatgtatatggctccactgtggcttgtgacacktttaaaatcatccgtatgtcagtgtatctggatacacgaggaaaaggaaagagtctcagagtggaacaaagagtgggaagaggtgatctgtaatgttaca

SEQ ID NO: 59157 - DNA, 201 bp, Homo sapiens; identical to SEQ ID NO: 59148

SEQ ID NO: 59158 - DNA, 154 bp, Homo sapiens
cggggagggcgcgcgttgaggcggctgcggcagttgcgcgctgggattgttgcsgtgcgctggagccgagtttcgctctgctgcccaggctggagtacagtgatgtgatctcctgacgtcaagtgatccattcgcctcggcctcccaaagttct

SEQ ID NO: 59159 - DNA, 201 bp, Homo sapiens; identical to SEQ ID NO: 59149

SEQ ID NO: 59160 - DNA, 201 bp, Homo sapiens; identical to SEQ ID NO: 59150

SEQ ID NO: 59161 - DNA, 201 bp, Homo sapiens; identical to SEQ ID NO: 59151

SEQ ID NO: 59162 - DNA, 201 bp, Homo sapiens; identical to SEQ ID NO: 59152

SEQ ID NO: 59163 - DNA, 201 bp, Homo sapiens; identical to SEQ ID NO: 59153

SEQ ID NO: 59164 - DNA, 201 bp, Homo sapiens; identical to SEQ ID NO: 59154

SEQ ID NO: 59165 - DNA, 117 bp, Homo sapiens
cggggagggcgcgcgtygaggcggctgcggcagttgcgcgctgggattgttgcggtgcgctggagccgagtttcgctctgctgcccaggctggagtacagtgatgtgatctcctgac

SEQ ID NO: 59166 - DNA, 201 bp, Homo sapiens; identical to SEQ ID NO: 59155

SEQ ID NO: 59167 - DNA, 201 bp, Homo sapiens; identical to SEQ ID NO: 59156

SEQ ID NO: 59168 - DNA, 201 bp, Homo sapiens; identical to SEQ ID NO: 59148

SEQ ID NO: 59169 - DNA, 149 bp, Homo sapiens
agggcgcgcgttgaggcggctgcggcagttgcgcgctgggattgttgcsgtgcgctggagccgaatacaaaatacagttaaaataaaatgtcagcctcctggagtgatcggttacagaatgcagcagatatgcctgctaacatggataa

SEQ ID NO: 59170 - DNA, 201 bp, Homo sapiens; identical to SEQ ID NO: 59149

SEQ ID NO: 59171 - DNA, 201 bp, Homo sapiens; identical to SEQ ID NO: 59150

SEQ ID NO: 59172 - DNA, 201 bp, Homo sapiens; identical to SEQ ID NO: 59151

SEQ ID NO: 59173 - DNA, 201 bp, Homo sapiens; identical to SEQ ID NO: 59152

SEQ ID NO: 59174 - DNA, 201 bp, Homo sapiens; identical to SEQ ID NO: 59153

SEQ ID NO: 59175 - DNA, 194 bp, Homo sapiens
agggcgcgcgttgaggcggctgcggcagttgcgcgctgggattgttgcggtgcgctggagccgaatacaaaatacagttaaaataaaatgtcarcctcctggagtgatcggttacagaatgcagcagatatgcctgctaacatggataagcatgccctgaaaaagtatcgtcgagaagcctatcatcgggtgtt

SEQ ID NO: 59176 - DNA, 112 bp, Homo sapiens
agggcgcgcgtygaggcggctgcggcagttgcgcgctgggattgttgcggtgcgctggagccgaatacaaaatacagttaaaataaaatgtcagcctcctggagtgatcggt

SEQ ID NO: 59177 - DNA, 201 bp, Homo sapiens; identical to SEQ ID NO: 59155

SEQ ID NO: 59178 - DNA, 201 bp, Homo sapiens; identical to SEQ ID NO: 59156

SEQ ID NO: 59179 - DNA, 201 bp, Homo sapiens
tttgcatgttttgcacttagccagaggaagtctggcgcatccgagccggccagccgagcacatctggaagtggtttctggggccgcccctctctgccagckcaactcctgggttcccagcggcttcgcgcagaggtggaagaaacccgagacgttccgaagtcaacgcaagcaaaggggagtgcgggtcggggaggaatat

SEQ ID NO: 59180 - DNA, 201 bp, Homo sapiens
gtgatatccaagaactgtatgacaccaccttggccctgggccacgcggcggctttctcagatgactgcgatttgccctctgctcaggacataaacagactygtgggacttcagaacacatatatgggctatctggactaccggaagaaggccatcaaggaccttggcatcagccccagcacctgctctttcaatcctggtg

SEQ ID NO: 59181 - DNA, 201 bp, Homo sapiens
ttgtgagctgagtattggacatctgttcttgaatagtccctgggcctgccataggaaaggaagttctccagggttacagttcttatccgcgtgaatacacrtggctctgttacgaaaaattaatcaggtgctgctgttccttctgatcgtgaccctctgtgtgattctgtataagaaagttcataaggggactgtgcccaa

SEQ ID NO: 59182 - DNA, 201 bp, Homo sapiens; identical to SEQ ID NO: 59179

SEQ ID NO: 59183 - DNA, 201 bp, Homo sapiens; identical to SEQ ID NO: 59180

SEQ ID NO: 59184 - DNA, 201 bp, Homo sapiens
ttcccactgaccacgtctcccatccccacccagagcctcccgttcggtattttgggaagaagccacagcatcttcctttacgtccactttaattgagcatmtaggatgtgtgggcgaggcagtctcacaagcaacgtgagagaagctcgggtagagaacagcgttgttttttgcatgttttgcacttagccagaggaagtc

SEQ ID NO: 59185 - DNA, 201 bp, Homo sapiens; identical to SEQ ID NO: 59179

SEQ ID NO: 59186 - DNA, 201 bp, Homo sapiens; identical to SEQ ID NO: 59180

SEQ ID NO: 59187 - DNA, 201 bp, Homo sapiens; identical to SEQ ID NO: 59181

SEQ ID NO: 59188 - DNA, 201 bp, Homo sapiens; identical to SEQ ID NO: 59184

SEQ ID NO: 59189 - DNA, 201 bp, Homo sapiens
catgggcagcccatccctcgagtggaatacatggaggaagaaaagaaaacatggggcacagtgttcaagactctgaagtccttgtataaaacccatgcttrctatgagtacaatcacatttttccacttcttgaaaagtactgtggcttccatgaagataacattccccagctggaagacgtttctcaattcctgcagact

SEQ ID NO: 59190 - DNA, 201 bp, Homo sapiens
ctaccgccatgggcagcccatccctcgagtggaatacatggaggaagaaaagaaaacatggggcacagtgttcaagactctgaagtccttgtataaaaccyatgcttgctatgagtacaatcacatttttccacttcttgaaaagtactgtggcttccatgaagataacattccccagctggaagacgtttctcaattcct

SEQ ID NO: 59191 - DNA, 201 bp, Homo sapiens
tttgctgacattgcctacaactaccgccatgggcagcccatccctcgagtggaatacatggaggaagaaaagaaaacatggggcacagtgttcaagactcygaagtccttgtataaaacccatgcttgctatgagtacaatcacatttttccacttcttgaaaagtactgtggcttccatgaagataacattccccagctg

SEQ ID NO: 59192 - DNA, 201 bp, Homo sapiens
agacggaagcagtttgctgacattgcctacaactaccgccatgggcagcccatccctcgagtggaatacatggaggaagaaaagaaaacatggggcacagygttcaagactctgaagtccttgtataaaacccatgcttgctatgagtacaatcacatttttccacttcttgaaaagtactgtggcttccatgaagataac

SEQ ID NO: 59193 - DNA, 201 bp, Homo sapiens
accgtgcaagacggaagcagtttgctgacattgcctacaactaccgccatgggcagcccatccctcgagtggaatacatggaggaagaaaagaaaacatgsggcacagtgttcaagactctgaagtccttgtataaaacccatgcttgctatgagtacaatcacatttttccacttcttgaaaagtactgtggcttccatg

SEQ ID NO: 59194 - DNA, 201 bp, Homo sapiens
taccgtgcaagacggaagcagtttgctgacattgcctacaactaccgccatgggcagcccatccctcgagtggaatacatggaggaagaaaagaaaacatrgggcacagtgttcaagactctgaagtccttgtataaaacccatgcttgctatgagtacaatcacatttttccacttcttgaaaagtactgtggcttccat

SEQ ID NO: 59195 - DNA, 201 bp, Homo sapiens
gtaccgtgcaagacggaagcagtttgctgacattgcctacaactaccgccatgggcagcccatccctcgagtggaatacatggaggaagaaaagaaaacayggggcacagtgttcaagactctgaagtccttgtataaaacccatgcttgctatgagtacaatcacatttttccacttcttgaaaagtactgtggcttcca

SEQ ID NO: 59196 - DNA, 201 bp, Homo sapiens
tatttgaggagaatgatgtaaacctgacccacattgaatctagaccttctcgtttaaagaaagatgagtatgaatttttcacccatttggataaacgtagmctgcctgctctgacaaacatcatcaagatcttgaggcatgacattggtgccactgtccatgagctttcacgagataagaagaaagacacagtgccctggt

SEQ ID NO: 59197 - DNA, 201 bp, Homo sapiens
cagcccatccctcgagtggaatacatggaggaagaaaagaaaacatggggcacagtgttcaagactctgaagtccttgtataaaacccatgcttgctatgmgtacaatcacatttttccacttcttgaaaagtactgtggcttccatgaagataacattccccagctggaagacgtttctcaattcctgcagacttgcact

SEQ ID NO: 59198 - DNA, 201 bp, Homo sapiens
aggcatgacattggtgccactgtccatgagctttcacgagataagaagaaagacacagtgccctggttcccaagaaccattcaagagctggacagatttgycaatcagattctcagctatggagcggaactggatgctgaccaccctggttttaaagatcctgtgtaccgtgcaagacggaagcagtttgctgacattgcc

SEQ ID NO: 59199 - DNA, 201 bp, Homo sapiens
ggcagagagttttaatgatgccaaggagaaagtaaggaactttgctgccacaatacctcggcccttctcagttcgctacgacccatacacccaaaggattraggtcttggacaatacccagcagcttaagattttggctgattccattaacagtgaaattggaatcctttgcagtgccctccagaaaataaagtaaagcca

SEQ ID NO: 59200 - DNA, 201 bp, Homo sapiens
cctgtattacgtggcagagagttttaatgatgccaaggagaaagtaaggaactttgctgccacaatacctcggcccttctcagttcgctacgacccatacmcccaaaggattgaggtcttggacaatacccagcagcttaagattttggctgattccattaacagtgaaattggaatcctttgcagtgccctccagaaaat

SEQ ID NO: 59201 - DNA, 201 bp, Homo sapiens
ttcagatcgcagctttgcccagttttcccaggaaattggccttgcctctctgggtgcacctgatgaatacattgaaaagctcgccacaatttactggtttrctgtggagtttgggctctgcaaacaaggagactccataaaggcatatggtgctgggctcctgtcatcctttggtgaattacagtactgcttatcagagaa

SEQ ID NO: 59202 - DNA, 201 bp, Homo sapiens
gcagctttgcccagttttcccaggaaattggccttgcctctctgggtgcacctgatgaatacattgaaaagctcgccacaatttactggtttactgtggastttgggctctgcaaacaaggagactccataaaggcatatggtgctgggctcctgtcatcctttggtgaattacagtactgcttatcagagaagccaaagc

SEQ ID NO: 59203 - DNA, 201 bp, Homo sapiens
tgatgaatacattgaaaagctcgccacaatttactggtttactgtggagtttgggctctgcaaacaaggagactccataaaggcatatggtgctgggctcstgtcatcctttggtgaattacagtactgcttatcagagaagccaaagcttctccccctggagctggagaagacagccatccaaaattacactgtcacgga

SEQ ID NO: 59204 - DNA, 201 bp, Homo sapiens
gaatacattgaaaagctcgccacaatttactggtttactgtggagtttgggctctgcaaacaaggagactccataaaggcatatggtgctgggctcctgtyatcctttggtgaattacagtactgcttatcagagaagccaaagcttctccccctggagctggagaagacagccatccaaaattacactgtcacggagttc

SEQ ID NO: 59205 - DNA, 201 bp, Homo sapiens
tgaatacattgaaaagctcgccacaatttactggtttactgtggagtttgggctctgcaaacaaggagactccataaaggcatatggtgctgggctcctgycatcctttggtgaattacagtactgcttatcagagaagccaaagcttctccccctggagctggagaagacagccatccaaaattacactgtcacggagtt

SEQ ID NO: 59206 - DNA, 201 bp, Homo sapiens
atacattgaaaagctcgccacaatttactggtttactgtggagtttgggctctgcaaacaaggagactccataaaggcatatggtgctgggctcctgtcawcctttggtgaattacagtactgcttatcagagaagccaaagcttctccccctggagctggagaagacagccatccaaaattacactgtcacggagttcca

SEQ ID NO: 59207 - DNA, 201 bp, Homo sapiens
tgaaaagctcgccacaatttactggtttactgtggagtttgggctctgcaaacaaggagactccataaaggcatatggtgctgggctcctgtcatcctttbgtgaattacagtactgcttatcagagaagccaaagcttctccccctggagctggagaagacagccatccaaaattacactgtcacggagttccagcccct

SEQ ID NO: 59208 - DNA, 201 bp, Homo sapiens
cgccacaatttactggtttactgtggagtttgggctctgcaaacaaggagactccataaaggcatatggtgctgggctcctgtcatcctttggtgaattayagtactgcttatcagagaagccaaagcttctccccctggagctggagaagacagccatccaaaattacactgtcacggagttccagcccctgtattacgt

SEQ ID NO: 59209 - DNA, 201 bp, Homo sapiens
cacaatttactggtttactgtggagtttgggctctgcaaacaaggagactccataaaggcatatggtgctgggctcctgtcatcctttggtgaattacagyactgcttatcagagaagccaaagcttctccccctggagctggagaagacagccatccaaaattacactgtcacggagttccagcccctgtattacgtggc

SEQ ID NO: 59210 - DNA, 201 bp, Homo sapiens
caatttactggtttactgtggagtttgggctctgcaaacaaggagactccataaaggcatatggtgctgggctcctgtcatcctttggtgaattacagtavtgcttatcagagaagccaaagcttctccccctggagctggagaagacagccatccaaaattacactgtcacggagttccagcccctgtattacgtggcag

SEQ ID NO: 59211 - DNA, 201 bp, Homo sapiens
attccccagctggaagacgtttctcaattcctgcagacttgcactggtttccgcctccgacctgtggctggcctgctttcctctcgggatttcttgggtgdcctggccttccgagtcttccactgcacacagtacatcagacatggatccaagcccatgtatacccccgaacctgacatctgccatgagctgttgggacat

SEQ ID NO: 59212 - DNA, 201 bp, Homo sapiens
cattccccagctggaagacgtttctcaattcctgcagacttgcactggtttccgcctccgacctgtggctggcctgctttcctctcgggatttcttgggtdgcctggccttccgagtcttccactgcacacagtacatcagacatggatccaagcccatgtatacccccgaacctgacatctgccatgagctgttgggaca

SEQ ID NO: 59213 - DNA, 201 bp, Homo sapiens
ccactgtccatgagctttcacgagataagaagaaagacacagtgccctggttcccaagaaccattcaagagctggacagatttgccaatcagattctcagytatggagcggaactggatgctgaccaccctggttttaaagatcctgtgtaccgtgcaagacggaagcagtttgctgacattgcctacaactaccgccatg

SEQ ID NO: 59214 - DNA, 201 bp, Homo sapiens
cgtttaaagaaagatgagtatgaatttttcacccatttggataaacgtagcctgcctgctctgacaaacatcatcaagatcttgaggcatgacattggtgmcactgtccatgagctttcacgagataagaagaaagacacagtgccctggttcccaagaaccattcaagagctggacagatttgccaatcagattctcagc

SEQ ID NO: 59215 - DNA, 201 bp, Homo sapiens
ccttctcgtttaaagaaagatgagtatgaatttttcacccatttggataaacgtagcctgcctgctctgacaaacatcatcaagatcttgaggcatgacaytggtgccactgtccatgagctttcacgagataagaagaaagacacagtgccctggttcccaagaaccattcaagagctggacagatttgccaatcagatt

SEQ ID NO: 59216 - DNA, 201 bp, Homo sapiens
tctagaccttctcgtttaaagaaagatgagtatgaatttttcacccatttggataaacgtagcctgcctgctctgacaaacatcatcaagatcttgaggcrtgacattggtgccactgtccatgagctttcacgagataagaagaaagacacagtgccctggttcccaagaaccattcaagagctggacagatttgccaat

SEQ ID NO: 59217 - DNA, 201 bp, Homo sapiens
attgaatctagaccttctcgtttaaagaaagatgagtatgaatttttcacccatttggataaacgtagcctgcctgctctgacaaacatcatcaagatctygaggcatgacattggtgccactgtccatgagctttcacgagataagaagaaagacacagtgccctggttcccaagaaccattcaagagctggacagattt

SEQ ID NO: 59218 - DNA, 201 bp, Homo sapiens
cctgacccacattgaatctagaccttctcgtttaaagaaagatgagtatgaatttttcacccatttggataaacgtagcctgcctgctctgacaaacatcwtcaagatcttgaggcatgacattggtgccactgtccatgagctttcacgagataagaagaaagacacagtgccctggttcccaagaaccattcaagagct

SEQ ID NO: 59219 - DNA, 201 bp, Homo sapiens
aatttactggtttactgtggagtttgggctctgcaaacaaggagactccataaaggcatatggtgctgggctcctgtcatcctttggtgaattacagtackgcttatcagagaagccaaagcttctccccctggagctggagaagacagccatccaaaattacactgtcacggagttccagcccctgtattacgtggcaga

SEQ ID NO: 59220 - DNA, 201 bp, Homo sapiens
gttccagcccctgtattacgtggcagagagttttaatgatgccaaggagaaagtaaggaactttgctgccacaatacctcggcccttctcagttcgctacracccatacacccaaaggattgaggtcttggacaatacccagcagcttaagattttggctgattccattaacagtgaaattggaatcctttgcagtgccct

SEQ ID NO: 59221 - DNA, 201 bp, Homo sapiens
tggtttactgtggagtttgggctctgcaaacaaggagactccataaaggcatatggtgctgggctcctgtcatcctttggtgaattacagtactgcttatsagagaagccaaagcttctccccctggagctggagaagacagccatccaaaattacactgtcacggagttccagcccctgtattacgtggcagagagtttt

SEQ ID NO: 59222 - DNA, 201 bp, Homo sapiens
aacctgacccacattgaatctagaccttctcgtttaaagaaagatgagtatgaatttttcacccatttggataaacgtagcctgcctgctctgacaaacakcatcaagatcttgaggcatgacattggtgccactgtccatgagctttcacgagataagaagaaagacacagtgccctggttcccaagaaccattcaagag

SEQ ID NO: 59223 - DNA, 201 bp, Homo sapiens
gagttccagcccctgtattacgtggcagagagttttaatgatgccaaggagaaagtaaggaactttgctgccacaatacctcggcccttctcagttcgctrcgacccatacacccaaaggattgaggtcttggacaatacccagcagcttaagattttggctgattccattaacagtgaaattggaatcctttgcagtgcc

SEQ ID NO: 59224 - DNA, 201 bp, Homo sapiens
gtttactgtggagtttgggctctgcaaacaaggagactccataaaggcatatggtgctgggctcctgtcatcctttggtgaattacagtactgcttatcakagaagccaaagcttctccccctggagctggagaagacagccatccaaaattacactgtcacggagttccagcccctgtattacgtggcagagagttttaa

SEQ ID NO: 59225 - DNA, 201 bp, Homo sapiens
tgtggagtttgggctctgcaaacaaggagactccataaaggcatatggtgctgggctcctgtcatcctttggtgaattacagtactgcttatcagagaagmcaaagcttctccccctggagctggagaagacagccatccaaaattacactgtcacggagttccagcccctgtattacgtggcagagagttttaatgatgc

SEQ ID NO: 59226 - DNA, 201 bp, Homo sapiens
aagccaaagcttctccccctggagctggagaagacagccatccaaaattacactgtcacggagttccagcccctgtattacgtggcagagagttttaatgmtgccaaggagaaagtaaggaactttgctgccacaatacctcggcccttctcagttcgctacgacccatacacccaaaggattgaggtcttggacaatacc

SEQ ID NO: 59227 - DNA, 201 bp, Homo sapiens
gaagccaaagcttctccccctggagctggagaagacagccatccaaaattacactgtcacggagttccagcccctgtattacgtggcagagagttttaatsatgccaaggagaaagtaaggaactttgctgccacaatacctcggcccttctcagttcgctacgacccatacacccaaaggattgaggtcttggacaatac

SEQ ID NO: 59228 - DNA, 201 bp, Homo sapiens
ggcgccgccgctctccatcttggcagagctttccatgcgcagcggcggccaaggagtcgcggaatcagagcgatccgggacgcgagtgcgaggttaaaacyttcagccccacgtgctgtttgcaaacctgcctgtacctgaggccctaaaaagccagagacctcactcccggggagccagcatgtccactgcggtcctgga

SEQ ID NO: 59229 - DNA, 201 bp, Homo sapiens
ccaaagcttctccccctggagctggagaagacagccatccaaaattacactgtcacggagttccagcccctgtattacgtggcagagagttttaatgatgscaaggagaaagtaaggaactttgctgccacaatacctcggcccttctcagttcgctacgacccatacacccaaaggattgaggtcttggacaatacccag

SEQ ID NO: 59230 - DNA, 201 bp, Homo sapiens
gccaaagcttctccccctggagctggagaagacagccatccaaaattacactgtcacggagttccagcccctgtattacgtggcagagagttttaatgatsccaaggagaaagtaaggaactttgctgccacaatacctcggcccttctcagttcgctacgacccatacacccaaaggattgaggtcttggacaataccca

SEQ ID NO: 59231 - DNA, 201 bp, Homo sapiens
gagaagacagccatccaaaattacactgtcacggagttccagcccctgtattacgtggcagagagttttaatgatgccaaggagaaagtaaggaactttgytgccacaatacctcggcccttctcagttcgctacgacccatacacccaaaggattgaggtcttggacaatacccagcagcttaagattttggctgattcc

SEQ ID NO: 59232 - DNA, 201 bp, Homo sapiens
gccatccaaaattacactgtcacggagttccagcccctgtattacgtggcagagagttttaatgatgccaaggagaaagtaaggaactttgctgccacaayacctcggcccttctcagttcgctacgacccatacacccaaaggattgaggtcttggacaatacccagcagcttaagattttggctgattccattaacagt

SEQ ID NO: 59233 - DNA, 201 bp, Homo sapiens
cgagtgcgaggttaaaaccttcagccccacgtgctgtttgcaaacctgcctgtacctgaggccctaaaaagccagagacctcactcccggggagccagcakgtccactgcggtcctggaaaacccaggcttgggcaggaaactctctgactttggacaggaaacaagctatattgaagacaactgcaatcaaaatggtgcc

SEQ ID NO: 59234 - DNA, 201 bp, Homo sapiens
gagtgcgaggttaaaaccttcagccccacgtgctgtttgcaaacctgcctgtacctgaggccctaaaaagccagagacctcactcccggggagccagcatrtccactgcggtcctggaaaacccaggcttgggcaggaaactctctgactttggacaggaaacaagctatattgaagacaactgcaatcaaaatggtgcca

SEQ ID NO: 59235 - DNA, 201 bp, Homo sapiens
ccaggcttgggcaggaaactctctgactttggacaggaaacaagctatattgaagacaactgcaatcaaaatggtgccatatcactgatcttctcactcawagaagaagttggtgcattggccaaagtattgcgcttatttgaggagaatgatgtaaacctgacccacattgaatctagaccttctcgtttaaagaaagat

SEQ ID NO: 59236 - DNA, 201 bp, Homo sapiens
cctgcctgtacctgaggccctaaaaagccagagacctcactcccggggagccagcatgtccactgcggtcctggaaaacccaggcttgggcaggaaactcyctgactttggacaggaaacaagctatattgaagacaactgcaatcaaaatggtgccatatcactgatcttctcactcaaagaagaagttggtgcattggc

SEQ ID NO: 59237 - DNA, 201 bp, Homo sapiens
tcaattcctgcagacttgcactggtttccgcctccgacctgtggctggcctgctttcctctcgggatttcttgggtggcctggccttccgagtcttccackgcacacagtacatcagacatggatccaagcccatgtatacccccgaacctgacatctgccatgagctgttgggacatgtgcccttgttttcagatcgcag

SEQ ID NO: 59238 - DNA, 201 bp, Homo sapiens
aaaagaaaacatggggcacagtgttcaagactctgaagtccttgtataaaacccatgcttgctatgagtacaatcacatttttccacttcttgaaaagtastgtggcttccatgaagataacattccccagctggaagacgtttctcaattcctgcagacttgcactggtttccgcctccgacctgtggctggcctgcttt

SEQ ID NO: 59239 - DNA, 201 bp, Homo sapiens
gaagacgtttctcaattcctgcagacttgcactggtttccgcctccgacctgtggctggcctgctttcctctcgggatttcttgggtggcctggccttccvagtcttccactgcacacagtacatcagacatggatccaagcccatgtatacccccgaacctgacatctgccatgagctgttgggacatgtgcccttgttt

SEQ ID NO: 59240 - DNA, 201 bp, Homo sapiens
ttcttgaaaagtactgtggcttccatgaagataacattccccagctggaagacgtttctcaattcctgcagacttgcactggtttccgcctccgacctgtrgctggcctgctttcctctcgggatttcttgggtggcctggccttccgagtcttccactgcacacagtacatcagacatggatccaagcccatgtataccc

SEQ ID NO: 59241 - DNA, 201 bp, Homo sapiens
caattcctgcagacttgcactggtttccgcctccgacctgtggctggcctgctttcctctcgggatttcttgggtggcctggccttccgagtcttccactrcacacagtacatcagacatggatccaagcccatgtatacccccgaacctgacatctgccatgagctgttgggacatgtgcccttgttttcagatcgcagc

SEQ ID NO: 59242 - DNA, 201 bp, Homo sapiens
tttctcaattcctgcagacttgcactggtttccgcctccgacctgtggctggcctgctttcctctcgggatttcttgggtggcctggccttccgagtcttscactgcacacagtacatcagacatggatccaagcccatgtatacccccgaacctgacatctgccatgagctgttgggacatgtgcccttgttttcagatc

SEQ ID NO: 59243 - DNA, 201 bp, Homo sapiens
gatgtaaacctgacccacattgaatctagaccttctcgtttaaagaaagatgagtatgaatttttcacccatttggataaacgtagcctgcctgctctgayaaacatcatcaagatcttgaggcatgacattggtgccactgtccatgagctttcacgagataagaagaaagacacagtgccctggttcccaagaaccatt

SEQ ID NO: 59244 - DNA, 201 bp, Homo sapiens
tgaggagaatgatgtaaacctgacccacattgaatctagaccttctcgtttaaagaaagatgagtatgaatttttcacccatttggataaacgtagcctgyctgctctgacaaacatcatcaagatcttgaggcatgacattggtgccactgtccatgagctttcacgagataagaagaaagacacagtgccctggttccc

SEQ ID NO: 59245 - DNA, 201 bp, Homo sapiens
ccagctggaagacgtttctcaattcctgcagacttgcactggtttccgcctccgacctgtggctggcctgctttcctctcgggatttcttgggtggcctgrccttccgagtcttccactgcacacagtacatcagacatggatccaagcccatgtatacccccgaacctgacatctgccatgagctgttgggacatgtgcc

SEQ ID NO: 59246 - DNA, 201 bp, Homo sapiens
cttatttgaggagaatgatgtaaacctgacccacattgaatctagaccttctcgtttaaagaaagatgagtatgaatttttcacccatttggataaacgtmgcctgcctgctctgacaaacatcatcaagatcttgaggcatgacattggtgccactgtccatgagctttcacgagataagaagaaagacacagtgccctg

SEQ ID NO: 59247 - DNA, 201 bp, Homo sapiens
agtattgcgcttatttgaggagaatgatgtaaacctgacccacattgaatctagaccttctcgtttaaagaaagatgagtatgaatttttcacccatttgkataaacgtagcctgcctgctctgacaaacatcatcaagatcttgaggcatgacattggtgccactgtccatgagctttcacgagataagaagaaagacac

SEQ ID NO: 59248 - DNA, 201 bp, Homo sapiens
tgctgggctcctgtcatcctttggtgaattacagtactgcttatcagagaagccaaagcttctccccctggagctggagaagacagccatccaaaattacwctgtcacggagttccagcccctgtattacgtggcagagagttttaatgatgccaaggagaaagtaaggaactttgctgccacaatacctcggcccttctc

SEQ ID NO: 59249 - DNA, 201 bp, Homo sapiens
attggccaaagtattgcgcttatttgaggagaatgatgtaaacctgacccacattgaatctagaccttctcgtttaaagaaagatgagtatgaatttttcmcccatttggataaacgtagcctgcctgctctgacaaacatcatcaagatcttgaggcatgacattggtgccactgtccatgagctttcacgagataagaa

SEQ ID NO: 59250 - DNA, 201 bp, Homo sapiens
aagttggtgcattggccaaagtattgcgcttatttgaggagaatgatgtaaacctgacccacattgaatctagaccttctcgtttaaagaaagatgagtakgaatttttcacccatttggataaacgtagcctgcctgctctgacaaacatcatcaagatcttgaggcatgacattggtgccactgtccatgagctttcac

SEQ ID NO: 59251 - DNA, 201 bp, Homo sapiens
atccaaaattacactgtcacggagttccagcccctgtattacgtggcagagagttttaatgatgccaaggagaaagtaaggaactttgctgccacaatacytcggcccttctcagttcgctacgacccatacacccaaaggattgaggtcttggacaatacccagcagcttaagattttggctgattccattaacagtgaa

SEQ ID NO: 59252 - DNA, 201 bp, Homo sapiens
catccaaaattacactgtcacggagttccagcccctgtattacgtggcagagagttttaatgatgccaaggagaaagtaaggaactttgctgccacaatayctcggcccttctcagttcgctacgacccatacacccaaaggattgaggtcttggacaatacccagcagcttaagattttggctgattccattaacagtga

SEQ ID NO: 59253 - DNA, 201 bp, Homo sapiens
aatacctcggcccttctcagttcgctacgacccatacacccaaaggattgaggtcttggacaatacccagcagcttaagattttggctgattccattaacmgtgaaattggaatcctttgcagtgccctccagaaaataaagtaaagccatggacagaatgtggtctgtcagctgtgaatctgttgatggagatccaacta

SEQ ID NO: 59254 - DNA, 201 bp, Homo sapiens
gaggccctaaaaagccagagacctcactcccggggagccagcatgtccactgcggtcctggaaaacccaggcttgggcaggaaactctctgactttggacwggaaacaagctatattgaagacaactgcaatcaaaatggtgccatatcactgatcttctcactcaaagaagaagttggtgcattggccaaagtattgcgc

SEQ ID NO: 59255 - DNA, 201 bp, Homo sapiens
tgaggccctaaaaagccagagacctcactcccggggagccagcatgtccactgcggtcctggaaaacccaggcttgggcaggaaactctctgactttggayaggaaacaagctatattgaagacaactgcaatcaaaatggtgccatatcactgatcttctcactcaaagaagaagttggtgcattggccaaagtattgcg

SEQ ID NO: 59256 - DNA, 201 bp, Homo sapiens
ctaaaaagccagagacctcactcccggggagccagcatgtccactgcggtcctggaaaacccaggcttgggcaggaaactctctgactttggacaggaaamaagctatattgaagacaactgcaatcaaaatggtgccatatcactgatcttctcactcaaagaagaagttggtgcattggccaaagtattgcgcttattt

SEQ ID NO: 59257 - DNA, 201 bp, Homo sapiens
cttgtataaaacccatgcttgctatgagtacaatcacatttttccacttcttgaaaagtactgtggcttccatgaagataacattccccagctggaagacrtttctcaattcctgcagacttgcactggtttccgcctccgacctgtggctggcctgctttcctctcgggatttcttgggtggcctggccttccgagtctt

SEQ ID NO: 59258 - DNA, 201 bp, Homo sapiens
agttggtgcattggccaaagtattgcgcttatttgaggagaatgatgtaaacctgacccacattgaatctagaccttctcgtttaaagaaagatgagtatraatttttcacccatttggataaacgtagcctgcctgctctgacaaacatcatcaagatcttgaggcatgacattggtgccactgtccatgagctttcacg

SEQ ID NO: 59259 - DNA, 201 bp, Homo sapiens
attacagtactgcttatcagagaagccaaagcttctccccctggagctggagaagacagccatccaaaattacactgtcacggagttccagcccctgtatyacgtggcagagagttttaatgatgccaaggagaaagtaaggaactttgctgccacaatacctcggcccttctcagttcgctacgacccatacacccaaag

SEQ ID NO: 59260 - DNA, 201 bp, Homo sapiens
tataaaacccatgcttgctatgagtacaatcacatttttccacttcttgaaaagtactgtggcttccatgaagataacattccccagctggaagacgtttytcaattcctgcagacttgcactggtttccgcctccgacctgtggctggcctgctttcctctcgggatttcttgggtggcctggccttccgagtcttccac

SEQ ID NO: 59261 - DNA, 201 bp, Homo sapiens
gaattacagtactgcttatcagagaagccaaagcttctccccctggagctggagaagacagccatccaaaattacactgtcacggagttccagcccctgtrttacgtggcagagagttttaatgatgccaaggagaaagtaaggaactttgctgccacaatacctcggcccttctcagttcgctacgacccatacacccaa

SEQ ID NO: 59262 - DNA, 201 bp, Homo sapiens
gtataaaacccatgcttgctatgagtacaatcacatttttccacttcttgaaaagtactgtggcttccatgaagataacattccccagctggaagacgttyctcaattcctgcagacttgcactggtttccgcctccgacctgtggctggcctgctttcctctcgggatttcttgggtggcctggccttccgagtcttcca

SEQ ID NO: 59263 - DNA, 201 bp, Homo sapiens
ctcctgtcatcctttggtgaattacagtactgcttatcagagaagccaaagcttctccccctggagctggagaagacagccatccaaaattacactgtcayggagttccagcccctgtattacgtggcagagagttttaatgatgccaaggagaaagtaaggaactttgctgccacaatacctcggcccttctcagttcgc

SEQ ID NO: 59264 - DNA, 201 bp, Homo sapiens
taaaacccatgcttgctatgagtacaatcacatttttccacttcttgaaaagtactgtggcttccatgaagataacattccccagctggaagacgtttctyaattcctgcagacttgcactggtttccgcctccgacctgtggctggcctgctttcctctcgggatttcttgggtggcctggccttccgagtcttccactg

SEQ ID NO: 59265 - DNA, 201 bp, Homo sapiens
cccatgcttgctatgagtacaatcacatttttccacttcttgaaaagtactgtggcttccatgaagataacattccccagctggaagacgtttctcaattmctgcagacttgcactggtttccgcctccgacctgtggctggcctgctttcctctcgggatttcttgggtggcctggccttccgagtcttccactgcacac

SEQ ID NO: 59266 - DNA, 201 bp, Homo sapiens
tgagtacaatcacatttttccacttcttgaaaagtactgtggcttccatgaagataacattccccagctggaagacgtttctcaattcctgcagacttgcmctggtttccgcctccgacctgtggctggcctgctttcctctcgggatttcttgggtggcctggccttccgagtcttccactgcacacagtacatcagaca

SEQ ID NO: 59267 - DNA, 201 bp, Homo sapiens
tacaatcacatttttccacttcttgaaaagtactgtggcttccatgaagataacattccccagctggaagacgtttctcaattcctgcagacttgcactgbtttccgcctccgacctgtggctggcctgctttcctctcgggatttcttgggtggcctggccttccgagtcttccactgcacacagtacatcagacatgga

SEQ ID NO: 59268 - DNA, 201 bp, Homo sapiens
taccgccatgggcagcccatccctcgagtggaatacatggaggaagaaaagaaaacatggggcacagtgttcaagactctgaagtccttgtataaaacccrtgcttgctatgagtacaatcacatttttccacttcttgaaaagtactgtggcttccatgaagataacattccccagctggaagacgtttctcaattcctg

SEQ ID NO: 59269 - DNA, 201 bp, Homo sapiens
aaacccatgcttgctatgagtacaatcacatttttccacttcttgaaaagtactgtggcttccatgaagataacattccccagctggaagacgtttctcarttcctgcagacttgcactggtttccgcctccgacctgtggctggcctgctttcctctcgggatttcttgggtggcctggccttccgagtcttccactgca

SEQ ID NO: 59270 - DNA, 201 bp, Homo sapiens
ggtgctgggctcctgtcatcctttggtgaattacagtactgcttatcagagaagccaaagcttctccccctggagctggagaagacagccatccaaaattrcactgtcacggagttccagcccctgtattacgtggcagagagttttaatgatgccaaggagaaagtaaggaactttgctgccacaatacctcggcccttc

SEQ ID NO: 59271 - DNA, 201 bp, Homo sapiens
agataacattccccagctggaagacgtttctcaattcctgcagacttgcactggtttccgcctccgacctgtggctggcctgctttcctctcgggatttcktgggtggcctggccttccgagtcttccactgcacacagtacatcagacatggatccaagcccatgtatacccccgaacctgacatctgccatgagctgtt

SEQ ID NO: 59272 - DNA, 201 bp, Homo sapiens
gggcttaatataaatcgtaacctatgaagtttattttctattttagttaactatgattccaattactactttgttattgtacctaagtaaattttctttargtcagaagcccattaaaatagttacaagcattgaacttctttagtattatattaatataaaaacatttttgtatgttttattgtaatcataaatactgct

SEQ ID NO: 59273 - DNA, 201 bp, Homo sapiens
cttccatgaagataacattccccagctggaagacgtttctcaattcctgcagacttgcactggtttccgcctccgacctgtggctggcctgctttcctctbgggatttcttgggtggcctggccttccgagtcttccactgcacacagtacatcagacatggatccaagcccatgtatacccccgaacctgacatctgcca

SEQ ID NO: 59274 - DNA, 201 bp, Homo sapiens
acagaatgtggtctgtcagctgtgaatctgttgatggagatccaactatttctttcatcagaaaaagtccgaaaagcaaaccttaatttgaaataacagcyttaaatcctttacaagatggagaaacaacaaataagtcaaaataatctgaaatgacaggatatgagtacatactcaagagcataatggtaaatcttttgg

SEQ ID NO: 59275 - DNA, 201 bp, Homo sapiens
ggcacagtgttcaagactctgaagtccttgtataaaacccatgcttgctatgagtacaatcacatttttccacttcttgaaaagtactgtggcttccatgragataacattccccagctggaagacgtttctcaattcctgcagacttgcactggtttccgcctccgacctgtggctggcctgctttcctctcgggatttc

SEQ ID NO: 59276 - DNA, 201 bp, Homo sapiens
tacatggaggaagaaaagaaaacatggggcacagtgttcaagactctgaagtccttgtataaaacccatgcttgctatgagtacaatcacatttttccacytcttgaaaagtactgtggcttccatgaagataacattccccagctggaagacgtttctcaattcctgcagacttgcactggtttccgcctccgacctgtg

SEQ ID NO: 59277 - DNA, 201 bp, Homo sapiens
ctccataaaggcatatggtgctgggctcctgtcatcctttggtgaattacagtactgcttatcagagaagccaaagcttctccccctggagctggagaagwcagccatccaaaattacactgtcacggagttccagcccctgtattacgtggcagagagttttaatgatgccaaggagaaagtaaggaactttgctgccac

SEQ ID NO: 59278 - DNA, 201 bp, Homo sapiens
gactccataaaggcatatggtgctgggctcctgtcatcctttggtgaattacagtactgcttatcagagaagccaaagcttctccccctggagctggagargacagccatccaaaattacactgtcacggagttccagcccctgtattacgtggcagagagttttaatgatgccaaggagaaagtaaggaactttgctgcc

SEQ ID NO: 59279 - DNA, 201 bp, Homo sapiens
gtacaatcacatttttccacttcttgaaaagtactgtggcttccatgaagataacattccccagctggaagacgtttctcaattcctgcagacttgcactrgtttccgcctccgacctgtggctggcctgctttcctctcgggatttcttgggtggcctggccttccgagtcttccactgcacacagtacatcagacatgg

SEQ ID NO: 59280 - DNA, 201 bp, Homo sapiens
aatcacatttttccacttcttgaaaagtactgtggcttccatgaagataacattccccagctggaagacgtttctcaattcctgcagacttgcactggttyccgcctccgacctgtggctggcctgctttcctctcgggatttcttgggtggcctggccttccgagtcttccactgcacacagtacatcagacatggatcc

SEQ ID NO: 59281 - DNA, 201 bp, Homo sapiens
caatcacatttttccacttcttgaaaagtactgtggcttccatgaagataacattccccagctggaagacgtttctcaattcctgcagacttgcactggtktccgcctccgacctgtggctggcctgctttcctctcgggatttcttgggtggcctggccttccgagtcttccactgcacacagtacatcagacatggatc

SEQ ID NO: 59282 - DNA, 201 bp, Homo sapiens
tcacatttttccacttcttgaaaagtactgtggcttccatgaagataacattccccagctggaagacgtttctcaattcctgcagacttgcactggtttcygcctccgacctgtggctggcctgctttcctctcgggatttcttgggtggcctggccttccgagtcttccactgcacacagtacatcagacatggatccaa

SEQ ID NO: 59283 - DNA, 201 bp, Homo sapiens
gaagaagttggtgcattggccaaagtattgcgcttatttgaggagaatgatgtaaacctgacccacattgaatctagaccttctcgtttaaagaaagatgvgtatgaatttttcacccatttggataaacgtagcctgcctgctctgacaaacatcatcaagatcttgaggcatgacattggtgccactgtccatgagctt

SEQ ID NO: 59284 - DNA, 201 bp, Homo sapiens
cacatttttccacttcttgaaaagtactgtggcttccatgaagataacattccccagctggaagacgtttctcaattcctgcagacttgcactggtttccdcctccgacctgtggctggcctgctttcctctcgggatttcttgggtggcctggccttccgagtcttccactgcacacagtacatcagacatggatccaag

SEQ ID NO: 59285 - DNA, 201 bp, Homo sapiens
gggcagcccatccctcgagtggaatacatggaggaagaaaagaaaacatggggcacagtgttcaagactctgaagtccttgtataaaacccatgcttgctrtgagtacaatcacatttttccacttcttgaaaagtactgtggcttccatgaagataacattccccagctggaagacgtttctcaattcctgcagacttgc

SEQ ID NO: 59286 - DNA, 201 bp, Homo sapiens
atcttctcactcaaagaagaagttggtgcattggccaaagtattgcgcttatttgaggagaatgatgtaaacctgacccacattgaatctagaccttctcrtttaaagaaagatgagtatgaatttttcacccatttggataaacgtagcctgcctgctctgacaaacatcatcaagatcttgaggcatgacattggtgcc

SEQ ID NO: 59287 - DNA, 201 bp, Homo sapiens
catttttccacttcttgaaaagtactgtggcttccatgaagataacattccccagctggaagacgtttctcaattcctgcagacttgcactggtttccgcytccgacctgtggctggcctgctttcctctcgggatttcttgggtggcctggccttccgagtcttccactgcacacagtacatcagacatggatccaagcc

SEQ ID NO: 59288 - DNA, 201 bp, Homo sapiens
ttttccacttcttgaaaagtactgtggcttccatgaagataacattccccagctggaagacgtttctcaattcctgcagacttgcactggtttccgcctcygacctgtggctggcctgctttcctctcgggatttcttgggtggcctggccttccgagtcttccactgcacacagtacatcagacatggatccaagcccat

SEQ ID NO: 59289 - DNA, 201 bp, Homo sapiens
actgatcttctcactcaaagaagaagttggtgcattggccaaagtattgcgcttatttgaggagaatgatgtaaacctgacccacattgaatctagacctyctcgtttaaagaaagatgagtatgaatttttcacccatttggataaacgtagcctgcctgctctgacaaacatcatcaagatcttgaggcatgacattgg

SEQ ID NO: 59290 - DNA, 201 bp, Homo sapiens
aacccaggcttgggcaggaaactctctgactttggacaggaaacaagctatattgaagacaactgcaatcaaaatggtgccatatcactgatcttctcacycaaagaagaagttggtgcattggccaaagtattgcgcttatttgaggagaatgatgtaaacctgacccacattgaatctagaccttctcgtttaaagaaa

SEQ ID NO: 59291 - DNA, 201 bp, Homo sapiens
tactgtggcttccatgaagataacattccccagctggaagacgtttctcaattcctgcagacttgcactggtttccgcctccgacctgtggctggcctgcwttcctctcgggatttcttgggtggcctggccttccgagtcttccactgcacacagtacatcagacatggatccaagcccatgtatacccccgaacctgac

SEQ ID NO: 59292 - DNA, 201 bp, Homo sapiens
gtactgtggcttccatgaagataacattccccagctggaagacgtttctcaattcctgcagacttgcactggtttccgcctccgacctgtggctggcctgytttcctctcgggatttcttgggtggcctggccttccgagtcttccactgcacacagtacatcagacatggatccaagcccatgtatacccccgaacctga

SEQ ID NO: 59293 - DNA, 201 bp, Homo sapiens
gcagacttgcactggtttccgcctccgacctgtggctggcctgctttcctctcgggatttcttgggtggcctggccttccgagtcttccactgcacacagyacatcagacatggatccaagcccatgtatacccccgaacctgacatctgccatgagctgttgggacatgtgcccttgttttcagatcgcagctttgccca

SEQ ID NO: 59294 - DNA, 201 bp, Homo sapiens
aatacctcggcccttctcagttcgctacgacccatacacccaaaggattgaggtcttggacaatacccagcagcttaagattttggctgattccattaacygtgaaattggaatcctttgcagtgccctccagaaaataaagtaaagccatggacagaatgtggtctgtcagctgtgaatctgttgatggagatccaacta

SEQ ID NO: 59295 - DNA, 201 bp, Homo sapiens
agttccagcccctgtattacgtggcagagagttttaatgatgccaaggagaaagtaaggaactttgctgccacaatacctcggcccttctcagttcgctaygacccatacacccaaaggattgaggtcttggacaatacccagcagcttaagattttggctgattccattaacagtgaaattggaatcctttgcagtgccc

SEQ ID NO: 59296 - DNA, 201 bp, Homo sapiens
ctctccatcttggcagagctttccatgcgcagcggcggccaaggagtcgcggaatcagagcgatccgggacgcgagtgcgaggttaaaaccttcagccccmcgtgctgtttgcaaacctgcctgtacctgaggccctaaaaagccagagacctcactcccggggagccagcatgtccactgcggtcctggaaaacccaggc

SEQ ID NO: 59297 - DNA, 201 bp, Homo sapiens
gtgaattacagtactgcttatcagagaagccaaagcttctccccctggagctggagaagacagccatccaaaattacactgtcacggagttccagcccctstattacgtggcagagagttttaatgatgccaaggagaaagtaaggaactttgctgccacaatacctcggcccttctcagttcgctacgacccatacaccc

SEQ ID NO: 59298 - DNA, 201 bp, Homo sapiens
ctccgacctgtggctggcctgctttcctctcgggatttcttgggtggcctggccttccgagtcttccactgcacacagtacatcagacatggatccaagcscatgtatacccccgaacctgacatctgccatgagctgttgggacatgtgcccttgttttcagatcgcagctttgcccagttttcccaggaaattggcctt

SEQ ID NO: 59299 - DNA, 201 bp, Homo sapiens
cctccgacctgtggctggcctgctttcctctcgggatttcttgggtggcctggccttccgagtcttccactgcacacagtacatcagacatggatccaagyccatgtatacccccgaacctgacatctgccatgagctgttgggacatgtgcccttgttttcagatcgcagctttgcccagttttcccaggaaattggcct

SEQ ID NO: 59300 - DNA, 201 bp, Homo sapiens
gacctgtggctggcctgctttcctctcgggatttcttgggtggcctggccttccgagtcttccactgcacacagtacatcagacatggatccaagcccatktatacccccgaacctgacatctgccatgagctgttgggacatgtgcccttgttttcagatcgcagctttgcccagttttcccaggaaattggccttgcct

SEQ ID NO: 59301 - DNA, 201 bp, Homo sapiens
gcccctgtattacgtggcagagagttttaatgatgccaaggagaaagtaaggaactttgctgccacaatacctcggcccttctcagttcgctacgacccakacacccaaaggattgaggtcttggacaatacccagcagcttaagattttggctgattccattaacagtgaaattggaatcctttgcagtgccctccagaa

SEQ ID NO: 59302 - DNA, 201 bp, Homo sapiens
ccgacctgtggctggcctgctttcctctcgggatttcttgggtggcctggccttccgagtcttccactgcacacagtacatcagacatggatccaagcccrtgtatacccccgaacctgacatctgccatgagctgttgggacatgtgcccttgttttcagatcgcagctttgcccagttttcccaggaaattggccttgc

SEQ ID NO: 59303 - DNA, 201 bp, Homo sapiens
acctgtggctggcctgctttcctctcgggatttcttgggtggcctggccttccgagtcttccactgcacacagtacatcagacatggatccaagcccatgkatacccccgaacctgacatctgccatgagctgttgggacatgtgcccttgttttcagatcgcagctttgcccagttttcccaggaaattggccttgcctc

SEQ ID NO: 59304 - DNA, 201 bp, Homo sapiens
cctgtggctggcctgctttcctctcgggatttcttgggtggcctggccttccgagtcttccactgcacacagtacatcagacatggatccaagcccatgtrtacccccgaacctgacatctgccatgagctgttgggacatgtgcccttgttttcagatcgcagctttgcccagttttcccaggaaattggccttgcctct

SEQ ID NO: 59305 - DNA, 201 bp, Homo sapiens
tgtggctggcctgctttcctctcgggatttcttgggtggcctggccttccgagtcttccactgcacacagtacatcagacatggatccaagcccatgtatrcccccgaacctgacatctgccatgagctgttgggacatgtgcccttgttttcagatcgcagctttgcccagttttcccaggaaattggccttgcctctct

SEQ ID NO: 59306 - DNA, 201 bp, Homo sapiens
gtggctggcctgctttcctctcgggatttcttgggtggcctggccttccgagtcttccactgcacacagtacatcagacatggatccaagcccatgtatahccccgaacctgacatctgccatgagctgttgggacatgtgcccttgttttcagatcgcagctttgcccagttttcccaggaaattggccttgcctctctg

SEQ ID NO: 59307 - DNA, 201 bp, Homo sapiens
tggcctgctttcctctcgggatttcttgggtggcctggccttccgagtcttccactgcacacagtacatcagacatggatccaagcccatgtatacccccraacctgacatctgccatgagctgttgggacatgtgcccttgttttcagatcgcagctttgcccagttttcccaggaaattggccttgcctctctgggtgc

SEQ ID NO: 59308 - DNA, 201 bp, Homo sapiens
ctgctttcctctcgggatttcttgggtggcctggccttccgagtcttccactgcacacagtacatcagacatggatccaagcccatgtatacccccgaacytgacatctgccatgagctgttgggacatgtgcccttgttttcagatcgcagctttgcccagttttcccaggaaattggccttgcctctctgggtgcacct

SEQ ID NO: 59309 - DNA, 201 bp, Homo sapiens
cttgcctctctgggtgcacctgatgaatacattgaaaagctcgccacaatttactggtttactgtggagtttgggctctgcaaacaaggagactccataavggcatatggtgctgggctcctgtcatcctttggtgaattacagtactgcttatcagagaagccaaagcttctccccctggagctggagaagacagccatc

SEQ ID NO: 59310 - DNA, 201 bp, Homo sapiens
caggaaattggccttgcctctctgggtgcacctgatgaatacattgaaaagctcgccacaatttactggtttactgtggagtttgggctctgcaaacaagkagactccataaaggcatatggtgctgggctcctgtcatcctttggtgaattacagtactgcttatcagagaagccaaagcttctccccctggagctggag

SEQ ID NO: 59311 - DNA, 201 bp, Homo sapiens
ttccatgaagataacattccccagctggaagacgtttctcaattcctgcagacttgcactggtttccgcctccgacctgtggctggcctgctttcctctcrggatttcttgggtggcctggccttccgagtcttccactgcacacagtacatcagacatggatccaagcccatgtatacccccgaacctgacatctgccat

SEQ ID NO: 59312 - DNA, 201 bp, Homo sapiens
cataaaggcatatggtgctgggctcctgtcatcctttggtgaattacagtactgcttatcagagaagccaaagcttctccccctggagctggagaagacarccatccaaaattacactgtcacggagttccagcccctgtattacgtggcagagagttttaatgatgccaaggagaaagtaaggaactttgctgccacaat

SEQ ID NO: 59313 - DNA, 201 bp, Homo sapiens
gataacattccccagctggaagacgtttctcaattcctgcagacttgcactggtttccgcctccgacctgtggctggcctgctttcctctcgggatttctygggtggcctggccttccgagtcttccactgcacacagtacatcagacatggatccaagcccatgtatacccccgaacctgacatctgccatgagctgttg

SEQ ID NO: 59314 - DNA, 201 bp, Homo sapiens
aaacccaggcttgggcaggaaactctctgactttggacaggaaacaagctatattgaagacaactgcaatcaaaatggtgccatatcactgatcttctcaytcaaagaagaagttggtgcattggccaaagtattgcgcttatttgaggagaatgatgtaaacctgacccacattgaatctagaccttctcgtttaaagaa

SEQ ID NO: 59315 - DNA, 201 bp, Homo sapiens
cagctggaagacgtttctcaattcctgcagacttgcactggtttccgcctccgacctgtggctggcctgctttcctctcgggatttcttgggtggcctggycttccgagtcttccactgcacacagtacatcagacatggatccaagcccatgtatacccccgaacctgacatctgccatgagctgttgggacatgtgccc

SEQ ID NO: 59316 - DNA, 201 bp, Homo sapiens
ggaagacgtttctcaattcctgcagacttgcactggtttccgcctccgacctgtggctggcctgctttcctctcgggatttcttgggtggcctggccttcygagtcttccactgcacacagtacatcagacatggatccaagcccatgtatacccccgaacctgacatctgccatgagctgttgggacatgtgcccttgtt

SEQ ID NO: 59317 - DNA, 201 bp, Homo sapiens
tgaagataacattccccagctggaagacgtttctcaattcctgcagacttgcactggtttccgcctccgacctgtggctggcctgctttcctctcgggatwtcttgggtggcctggccttccgagtcttccactgcacacagtacatcagacatggatccaagcccatgtatacccccgaacctgacatctgccatgagct

SEQ ID NO: 59318 - DNA, 201 bp, Homo sapiens
ggaaattggccttgcctctctgggtgcacctgatgaatacattgaaaagctcgccacaatttactggtttactgtggagtttgggctctgcaaacaaggakactccataaaggcatatggtgctgggctcctgtcatcctttggtgaattacagtactgcttatcagagaagccaaagcttctccccctggagctggagaa

SEQ ID NO: 59319 - DNA, 201 bp, Homo sapiens
tgcctctctgggtgcacctgatgaatacattgaaaagctcgccacaatttactggtttactgtggagtttgggctctgcaaacaaggagactccataaagvcatatggtgctgggctcctgtcatcctttggtgaattacagtactgcttatcagagaagccaaagcttctccccctggagctggagaagacagccatcca

SEQ ID NO: 59320 - DNA, 201 bp, Homo sapiens
ccttgcctctctgggtgcacctgatgaatacattgaaaagctcgccacaatttactggtttactgtggagtttgggctctgcaaacaaggagactccatawaggcatatggtgctgggctcctgtcatcctttggtgaattacagtactgcttatcagagaagccaaagcttctccccctggagctggagaagacagccat

SEQ ID NO: 59321 - DNA, 201 bp, Homo sapiens
agttttaatgatgccaaggagaaagtaaggaactttgctgccacaatacctcggcccttctcagttcgctacgacccatacacccaaaggattgaggtctyggacaatacccagcagcttaagattttggctgattccattaacagtgaaattggaatcctttgcagtgccctccagaaaataaagtaaagccatggacag

SEQ ID NO: 59322 - DNA, 201 bp, Homo sapiens
cctgctttcctctcgggatttcttgggtggcctggccttccgagtcttccactgcacacagtacatcagacatggatccaagcccatgtatacccccgaayctgacatctgccatgagctgttgggacatgtgcccttgttttcagatcgcagctttgcccagttttcccaggaaattggccttgcctctctgggtgcacc

SEQ ID NO: 59323 - DNA, 201 bp, Homo sapiens
gctttcctctcgggatttcttgggtggcctggccttccgagtcttccactgcacacagtacatcagacatggatccaagcccatgtatacccccgaacctracatctgccatgagctgttgggacatgtgcccttgttttcagatcgcagctttgcccagttttcccaggaaattggccttgcctctctgggtgcacctga

SEQ ID NO: 59324 - DNA, 201 bp, Homo sapiens
tcctctcgggatttcttgggtggcctggccttccgagtcttccactgcacacagtacatcagacatggatccaagcccatgtatacccccgaacctgacawctgccatgagctgttgggacatgtgcccttgttttcagatcgcagctttgcccagttttcccaggaaattggccttgcctctctgggtgcacctgatgaa

SEQ ID NO: 59325 - DNA, 201 bp, Homo sapiens
acagtgttcaagactctgaagtccttgtataaaacccatgcttgctatgagtacaatcacatttttccacttcttgaaaagtactgtggcttccatgaagdtaacattccccagctggaagacgtttctcaattcctgcagacttgcactggtttccgcctccgacctgtggctggcctgctttcctctcgggatttcttg

SEQ ID NO: 59326 - DNA, 201 bp, Homo sapiens
ttcctctcgggatttcttgggtggcctggccttccgagtcttccactgcacacagtacatcagacatggatccaagcccatgtatacccccgaacctgacwtctgccatgagctgttgggacatgtgcccttgttttcagatcgcagctttgcccagttttcccaggaaattggccttgcctctctgggtgcacctgatga

SEQ ID NO: 59327 - DNA, 201 bp, Homo sapiens
tcgggatttcttgggtggcctggccttccgagtcttccactgcacacagtacatcagacatggatccaagcccatgtatacccccgaacctgacatctgcyatgagctgttgggacatgtgcccttgttttcagatcgcagctttgcccagttttcccaggaaattggccttgcctctctgggtgcacctgatgaatacat

SEQ ID NO: 59328 - DNA, 201 bp, Homo sapiens
ccactgcacacagtacatcagacatggatccaagcccatgtatacccccgaacctgacatctgccatgagctgttgggacatgtgcccttgttttcagatygcagctttgcccagttttcccaggaaattggccttgcctctctgggtgcacctgatgaatacattgaaaagctcgccacaatttactggtttactgtgga

SEQ ID NO: 59329 - DNA, 201 bp, Homo sapiens
cactgcacacagtacatcagacatggatccaagcccatgtatacccccgaacctgacatctgccatgagctgttgggacatgtgcccttgttttcagatcrcagctttgcccagttttcccaggaaattggccttgcctctctgggtgcacctgatgaatacattgaaaagctcgccacaatttactggtttactgtggag

SEQ ID NO: 59330 - DNA, 201 bp, Homo sapiens
acagtacatcagacatggatccaagcccatgtatacccccgaacctgacatctgccatgagctgttgggacatgtgcccttgttttcagatcgcagctttkcccagttttcccaggaaattggccttgcctctctgggtgcacctgatgaatacattgaaaagctcgccacaatttactggtttactgtggagtttgggct

SEQ ID NO: 59331 - DNA, 201 bp, Homo sapiens
cagtacatcagacatggatccaagcccatgtatacccccgaacctgacatctgccatgagctgttgggacatgtgcccttgttttcagatcgcagctttgyccagttttcccaggaaattggccttgcctctctgggtgcacctgatgaatacattgaaaagctcgccacaatttactggtttactgtggagtttgggctc

SEQ ID NO: 59332 - DNA, 201 bp, Homo sapiens
cagacatggatccaagcccatgtatacccccgaacctgacatctgccatgagctgttgggacatgtgcccttgttttcagatcgcagctttgcccagtttbcccaggaaattggccttgcctctctgggtgcacctgatgaatacattgaaaagctcgccacaatttactggtttactgtggagtttgggctctgcaaaca

SEQ ID NO: 59333 - DNA, 201 bp, Homo sapiens
atgggcagcccatccctcgagtggaatacatggaggaagaaaagaaaacatggggcacagtgttcaagactctgaagtccttgtataaaacccatgcttgytatgagtacaatcacatttttccacttcttgaaaagtactgtggcttccatgaagataacattccccagctggaagacgtttctcaattcctgcagactt

SEQ ID NO: 59334 - DNA, 201 bp, Homo sapiens
gaaaacccaggcttgggcaggaaactctctgactttggacaggaaacaagctatattgaagacaactgcaatcaaaatggtgccatatcactgatcttctyactcaaagaagaagttggtgcattggccaaagtattgcgcttatttgaggagaatgatgtaaacctgacccacattgaatctagaccttctcgtttaaag

SEQ ID NO: 59335 - DNA, 201 bp, Homo sapiens
tgggacatgtgcccttgttttcagatcgcagctttgcccagttttcccaggaaattggccttgcctctctgggtgcacctgatgaatacattgaaaagctygccacaatttactggtttactgtggagtttgggctctgcaaacaaggagactccataaaggcatatggtgctgggctcctgtcatcctttggtgaattac

SEQ ID NO: 59336 - DNA, 201 bp, Homo sapiens
aaccttaatttgaaataacagccttaaatcctttacaagatggagaaacaacaaataagtcaaaataatctgaaatgacaggatatgagtacatactcaaragcataatggtaaatcttttggggtcatctttgatttagagatgataatcccatactctcaattgagttaaatcagtaatctgtcgcatttcatcaagat

SEQ ID NO: 59337 - DNA, 201 bp, Homo sapiens
aaaacatggggcacagtgttcaagactctgaagtccttgtataaaacccatgcttgctatgagtacaatcacatttttccacttcttgaaaagtactgtgkcttccatgaagataacattccccagctggaagacgtttctcaattcctgcagacttgcactggtttccgcctccgacctgtggctggcctgctttcctct

SEQ ID NO: 59338 - DNA, 201 bp, Homo sapiens
aaagaaaacatggggcacagtgttcaagactctgaagtccttgtataaaacccatgcttgctatgagtacaatcacatttttccacttcttgaaaagtackgtggcttccatgaagataacattccccagctggaagacgtttctcaattcctgcagacttgcactggtttccgcctccgacctgtggctggcctgctttc

SEQ ID NO: 59339 - DNA, 201 bp, Homo sapiens
tggaaaacccaggcttgggcaggaaactctctgactttggacaggaaacaagctatattgaagacaactgcaatcaaaatggtgccatatcactgatcttstcactcaaagaagaagttggtgcattggccaaagtattgcgcttatttgaggagaatgatgtaaacctgacccacattgaatctagaccttctcgtttaa

SEQ ID NO: 59340 - DNA, 201 bp, Homo sapiens
atggaggaagaaaagaaaacatggggcacagtgttcaagactctgaagtccttgtataaaacccatgcttgctatgagtacaatcacatttttccacttcytgaaaagtactgtggcttccatgaagataacattccccagctggaagacgtttctcaattcctgcagacttgcactggtttccgcctccgacctgtggct

SEQ ID NO: 59341 - DNA, 201 bp, Homo sapiens
ggaatacatggaggaagaaaagaaaacatggggcacagtgttcaagactctgaagtccttgtataaaacccatgcttgctatgagtacaatcacatttttmcacttcttgaaaagtactgtggcttccatgaagataacattccccagctggaagacgtttctcaattcctgcagacttgcactggtttccgcctccgacc

SEQ ID NO: 59342 - DNA, 201 bp, Homo sapiens
atccctcgagtggaatacatggaggaagaaaagaaaacatggggcacagtgttcaagactctgaagtccttgtataaaacccatgcttgctatgagtacartcacatttttccacttcttgaaaagtactgtggcttccatgaagataacattccccagctggaagacgtttctcaattcctgcagacttgcactggtttc

SEQ ID NO: 59343 - DNA, 201 bp, Homo sapiens
catggatccaagcccatgtatacccccgaacctgacatctgccatgagctgttgggacatgtgcccttgttttcagatcgcagctttgcccagttttcccrggaaattggccttgcctctctgggtgcacctgatgaatacattgaaaagctcgccacaatttactggtttactgtggagtttgggctctgcaaacaagga

SEQ ID NO: 59344 - DNA, 201 bp, Homo sapiens
catccctcgagtggaatacatggaggaagaaaagaaaacatggggcacagtgttcaagactctgaagtccttgtataaaacccatgcttgctatgagtacratcacatttttccacttcttgaaaagtactgtggcttccatgaagataacattccccagctggaagacgtttctcaattcctgcagacttgcactggttt

SEQ ID NO: 59345 - DNA, 201 bp, Homo sapiens
atccaagcccatgtatacccccgaacctgacatctgccatgagctgttgggacatgtgcccttgttttcagatcgcagctttgcccagttttcccaggaarttggccttgcctctctgggtgcacctgatgaatacattgaaaagctcgccacaatttactggtttactgtggagtttgggctctgcaaacaaggagactc

SEQ ID NO: 59346 - DNA, 201 bp, Homo sapiens
ccatccctcgagtggaatacatggaggaagaaaagaaaacatggggcacagtgttcaagactctgaagtccttgtataaaacccatgcttgctatgagtasaatcacatttttccacttcttgaaaagtactgtggcttccatgaagataacattccccagctggaagacgtttctcaattcctgcagacttgcactggtt

SEQ ID NO: 59347 - DNA, 201 bp, Homo sapiens
gcccatgtatacccccgaacctgacatctgccatgagctgttgggacatgtgcccttgttttcagatcgcagctttgcccagttttcccaggaaattggcsttgcctctctgggtgcacctgatgaatacattgaaaagctcgccacaatttactggtttactgtggagtttgggctctgcaaacaaggagactccataaa

SEQ ID NO: 59348 - DNA, 201 bp, Homo sapiens
tgttgggacatgtgcccttgttttcagatcgcagctttgcccagttttcccaggaaattggccttgcctctctgggtgcacctgatgaatacattgaaaasctcgccacaatttactggtttactgtggagtttgggctctgcaaacaaggagactccataaaggcatatggtgctgggctcctgtcatcctttggtgaat

SEQ ID NO: 59349 - DNA, 201 bp, Homo sapiens
gcccatccctcgagtggaatacatggaggaagaaaagaaaacatggggcacagtgttcaagactctgaagtccttgtataaaacccatgcttgctatgagkacaatcacatttttccacttcttgaaaagtactgtggcttccatgaagataacattccccagctggaagacgtttctcaattcctgcagacttgcactgg

SEQ ID NO: 59350 - DNA, 201 bp, Homo sapiens
ggacatgtgcccttgttttcagatcgcagctttgcccagttttcccaggaaattggccttgcctctctgggtgcacctgatgaatacattgaaaagctcgscacaatttactggtttactgtggagtttgggctctgcaaacaaggagactccataaaggcatatggtgctgggctcctgtcatcctttggtgaattacag

SEQ ID NO: 59351 - DNA, 201 bp, Homo sapiens
ggcagcccatccctcgagtggaatacatggaggaagaaaagaaaacatggggcacagtgttcaagactctgaagtccttgtataaaacccatgcttgctakgagtacaatcacatttttccacttcttgaaaagtactgtggcttccatgaagataacattccccagctggaagacgtttctcaattcctgcagacttgca

SEQ ID NO: 59352 - DNA, 201 bp, Homo sapiens
gggacatgtgcccttgttttcagatcgcagctttgcccagttttcccaggaaattggccttgcctctctgggtgcacctgatgaatacattgaaaagctcrccacaatttactggtttactgtggagtttgggctctgcaaacaaggagactccataaaggcatatggtgctgggctcctgtcatcctttggtgaattaca

SEQ ID NO: 59353 - DNA, 201 bp, Homo sapiens
cccttgttttcagatcgcagctttgcccagttttcccaggaaattggccttgcctctctgggtgcacctgatgaatacattgaaaagctcgccacaatttrctggtttactgtggagtttgggctctgcaaacaaggagactccataaaggcatatggtgctgggctcctgtcatcctttggtgaattacagtactgctta

SEQ ID NO: 59354 - DNA, 201 bp, Homo sapiens
ccttgttttcagatcgcagctttgcccagttttcccaggaaattggccttgcctctctgggtgcacctgatgaatacattgaaaagctcgccacaatttastggtttactgtggagtttgggctctgcaaacaaggagactccataaaggcatatggtgctgggctcctgtcatcctttggtgaattacagtactgcttat

SEQ ID NO: 59355 - DNA, 201 bp, Homo sapiens
ttgttttcagatcgcagctttgcccagttttcccaggaaattggccttgcctctctgggtgcacctgatgaatacattgaaaagctcgccacaatttactrgtttactgtggagtttgggctctgcaaacaaggagactccataaaggcatatggtgctgggctcctgtcatcctttggtgaattacagtactgcttatca

SEQ ID NO: 59356 - DNA, 201 bp, Homo sapiens
tttcagatcgcagctttgcccagttttcccaggaaattggccttgcctctctgggtgcacctgatgaatacattgaaaagctcgccacaatttactggttkactgtggagtttgggctctgcaaacaaggagactccataaaggcatatggtgctgggctcctgtcatcctttggtgaattacagtactgcttatcagaga

SEQ ID NO: 59357 - DNA, 201 bp, Homo sapiens
ccgcctccgacctgtggctggcctgctttcctctcgggatttcttgggtggcctggccttccgagtcttccactgcacacagtacatcagacatggatccragcccatgtatacccccgaacctgacatctgccatgagctgttgggacatgtgcccttgttttcagatcgcagctttgcccagttttcccaggaaattgg

SEQ ID NO: 59358 - DNA, 201 bp, Homo sapiens
acgtgctgtttgcaaacctgcctgtacctgaggccctaaaaagccagagacctcactcccggggagccagcatgtccactgcggtcctggaaaacccaggsttgggcaggaaactctctgactttggacaggaaacaagctatattgaagacaactgcaatcaaaatggtgccatatcactgatcttctcactcaaagaag

SEQ ID NO: 59359 - DNA, 201 bp, Homo sapiens
tctcaattcctgcagacttgcactggtttccgcctccgacctgtggctggcctgctttcctctcgggatttcttgggtggcctggccttccgagtcttccwctgcacacagtacatcagacatggatccaagcccatgtatacccccgaacctgacatctgccatgagctgttgggacatgtgcccttgttttcagatcgc

SEQ ID NO: 59360 - DNA, 201 bp, Homo sapiens; identical to SEQ ID NO: 59189

SEQ ID NO: 59361 - DNA, 201 bp, Homo sapiens; identical to SEQ ID NO: 59190

SEQ ID NO: 59362 - DNA, 201 bp, Homo sapiens; identical to SEQ ID NO: 59191

SEQ ID NO: 59363 - DNA, 201 bp, Homo sapiens; identical to SEQ ID NO: 59192

SEQ ID NO: 59364 - DNA, 201 bp, Homo sapiens; identical to SEQ ID NO: 59193

SEQ ID NO: 59365 - DNA, 201 bp, Homo sapiens; identical to SEQ ID NO: 59194

SEQ ID NO: 59366 - DNA, 201 bp, Homo sapiens; identical to SEQ ID NO: 59195

SEQ ID NO: 59367 - DNA, 201 bp, Homo sapiens; identical to SEQ ID NO: 59196

SEQ ID NO: 59368 - DNA, 201 bp, Homo sapiens; identical to SEQ ID NO: 59197

SEQ ID NO: 59369 - DNA, 201 bp, Homo sapiens; identical to SEQ ID NO: 59198

SEQ ID NO: 59370 - DNA, 201 bp, Homo sapiens; identical to SEQ ID NO: 59199

SEQ ID NO: 59371 - DNA, 201 bp, Homo sapiens; identical to SEQ ID NO: 59200

SEQ ID NO: 59372 - DNA, 201 bp, Homo sapiens; identical to SEQ ID NO: 59201

SEQ ID NO: 59373 - DNA, 201 bp, Homo sapiens; identical to SEQ ID NO: 59202

SEQ ID NO: 59374 - DNA, 201 bp, Homo sapiens; identical to SEQ ID NO: 59203

SEQ ID NO: 59375 - DNA, 201 bp, Homo sapiens; identical to SEQ ID NO: 59204

SEQ ID NO: 59376 - DNA, 201 bp, Homo sapiens; identical to SEQ ID NO: 59205

SEQ ID NO: 59377 - DNA, 201 bp, Homo sapiens; identical to SEQ ID NO: 59206

SEQ ID NO: 59378 - DNA, 201 bp, Homo sapiens; identical to SEQ ID NO: 59207

SEQ ID NO: 59379 - DNA, 201 bp, Homo sapiens; identical to SEQ ID NO: 59208

SEQ ID NO: 59380 - DNA, 201 bp, Homo sapiens; identical to SEQ ID NO: 59209

SEQ ID NO: 59381 - DNA, 201 bp, Homo sapiens; identical to SEQ ID NO: 59210

SEQ ID NO: 59382 - DNA, 201 bp, Homo sapiens; identical to SEQ ID NO: 59211

SEQ ID NO: 59383 - DNA, 201 bp, Homo sapiens; identical to SEQ ID NO: 59212

SEQ ID NO: 59384 - DNA, 201 bp, Homo sapiens; identical to SEQ ID NO: 59213

SEQ ID NO: 59385 - DNA, 201 bp, Homo sapiens; identical to SEQ ID NO: 59214

SEQ ID NO: 59386 - DNA, 201 bp, Homo sapiens; identical to SEQ ID NO: 59215

SEQ ID NO: 59387 - DNA, 201 bp, Homo sapiens; identical to SEQ ID NO: 59216

SEQ ID NO: 59388 - DNA, 201 bp, Homo sapiens; identical to SEQ ID NO: 59217

SEQ ID NO: 59389 - DNA, 201 bp, Homo sapiens; identical to SEQ ID NO: 59218

SEQ ID NO: 59390 - DNA, 201 bp, Homo sapiens; identical to SEQ ID NO: 59219

SEQ ID NO: 59391 - DNA, 201 bp, Homo sapiens; identical to SEQ ID NO: 59220

SEQ ID NO: 59392 - DNA, 201 bp, Homo sapiens; identical to SEQ ID NO: 59221

SEQ ID NO: 59393 - DNA, 201 bp, Homo sapiens; identical to SEQ ID NO: 59222

SEQ ID NO: 59394 - DNA, 201 bp, Homo sapiens; identical to SEQ ID NO: 59223

SEQ ID NO: 59395 - DNA, 201 bp, Homo sapiens; identical to SEQ ID NO: 59224

SEQ ID NO: 59396 - DNA, 201 bp, Homo sapiens; identical to SEQ ID NO: 59225

SEQ ID NO: 59397 - DNA, 201 bp, Homo sapiens; identical to SEQ ID NO: 59226

SEQ ID NO: 59398 - DNA, 201 bp, Homo sapiens; identical to SEQ ID NO: 59227

SEQ ID NO: 59399 - DNA, 201 bp, Homo sapiens; identical to SEQ ID NO: 59228

SEQ ID NO: 59400 - DNA, 201 bp, Homo sapiens; identical to SEQ ID NO: 59229

SEQ ID NO: 59401 - DNA, 201 bp, Homo sapiens; identical to SEQ ID NO: 59230

SEQ ID NO: 59402 - DNA, 201 bp, Homo sapiens; identical to SEQ ID NO: 59231

SEQ ID NO: 59403 - DNA, 201 bp, Homo sapiens; identical to SEQ ID NO: 59232

SEQ ID NO: 59404 - DNA, 201 bp, Homo sapiens; identical to SEQ ID NO: 59233

SEQ ID NO: 59405 - DNA, 201 bp, Homo sapiens; identical to SEQ ID NO: 59234

SEQ ID NO: 59406 - DNA, 201 bp, Homo sapiens; identical to SEQ ID NO: 59235

SEQ ID NO: 59407 - DNA, 201 bp, Homo sapiens; identical to SEQ ID NO: 59236

SEQ ID NO: 59408 - DNA, 201 bp, Homo sapiens; identical to SEQ ID NO: 59237

SEQ ID NO: 59409 - DNA, 201 bp, Homo sapiens; identical to SEQ ID NO: 59238

SEQ ID NO: 59410 - DNA, 201 bp, Homo sapiens; identical to SEQ ID NO: 59239

SEQ ID NO: 59411 - DNA, 201 bp, Homo sapiens; identical to SEQ ID NO: 59240

SEQ ID NO: 59412 - DNA, 201 bp, Homo sapiens; identical to SEQ ID NO: 59241

SEQ ID NO: 59413 - DNA, 201 bp, Homo sapiens; identical to SEQ ID NO: 59242

SEQ ID NO: 59414 - DNA, 201 bp, Homo sapiens; identical to SEQ ID NO: 59243

SEQ ID NO: 59415 - DNA, 201 bp, Homo sapiens; identical to SEQ ID NO: 59244

SEQ ID NO: 59416 - DNA, 201 bp, Homo sapiens; identical to SEQ ID NO: 59245

SEQ ID NO: 59417 - DNA, 201 bp, Homo sapiens; identical to SEQ ID NO: 59246

SEQ ID NO: 59418 - DNA, 201 bp, Homo sapiens; identical to SEQ ID NO: 59247

SEQ ID NO: 59419 - DNA, 201 bp, Homo sapiens; identical to SEQ ID NO: 59248

SEQ ID NO: 59420 - DNA, 201 bp, Homo sapiens; identical to SEQ ID NO: 59249

SEQ ID NO: 59421 - DNA, 201 bp, Homo sapiens; identical to SEQ ID NO: 59250

SEQ ID NO: 59422 - DNA, 201 bp, Homo sapiens; identical to SEQ ID NO: 59251

SEQ ID NO: 59423 - DNA, 201 bp, Homo sapiens; identical to SEQ ID NO: 59252

SEQ ID NO: 59424 - DNA, 201 bp, Homo sapiens; identical to SEQ ID NO: 59253

SEQ ID NO: 59425 - DNA, 201 bp, Homo sapiens; identical to SEQ ID NO: 59254

SEQ ID NO: 59426 - DNA, 201 bp, Homo sapiens; identical to SEQ ID NO: 59255

SEQ ID NO: 59427 - DNA, 201 bp, Homo sapiens; identical to SEQ ID NO: 59256

SEQ ID NO: 59428 - DNA, 201 bp, Homo sapiens; identical to SEQ ID NO: 59257

SEQ ID NO: 59429 - DNA, 201 bp, Homo sapiens; identical to SEQ ID NO: 59258

SEQ ID NO: 59430 - DNA, 201 bp, Homo sapiens; identical to SEQ ID NO: 59259

SEQ ID NO: 59431 - DNA, 201 bp, Homo sapiens; identical to SEQ ID NO: 59260

SEQ ID NO: 59432 - DNA, 201 bp, Homo sapiens; identical to SEQ ID NO: 59261

SEQ ID NO: 59433 - DNA, 201 bp, Homo sapiens; identical to SEQ ID NO: 59262

SEQ ID NO: 59434 - DNA, 201 bp, Homo sapiens; identical to SEQ ID NO: 59263

SEQ ID NO: 59435 - DNA, 201 bp, Homo sapiens; identical to SEQ ID NO: 59264

SEQ ID NO: 59436 - DNA, 201 bp, Homo sapiens; identical to SEQ ID NO: 59265

SEQ ID NO: 59437 - DNA, 201 bp, Homo sapiens; identical to SEQ ID NO: 59266

SEQ ID NO: 59438 - DNA, 201 bp, Homo sapiens; identical to SEQ ID NO: 59267

SEQ ID NO: 59439 - DNA, 201 bp, Homo sapiens; identical to SEQ ID NO: 59268

SEQ ID NO: 59440 - DNA, 201 bp, Homo sapiens; identical to SEQ ID NO: 59269

SEQ ID NO: 59441 - DNA, 201 bp, Homo sapiens; identical to SEQ ID NO: 59270

SEQ ID NO: 59442 - DNA, 201 bp, Homo sapiens; identical to SEQ ID NO: 59271

SEQ ID NO: 59443 - DNA, 163 bp, Homo sapiens
gggcttaatataaatcgtaacctatgaagtttattttctattttagttaactatgattccaattactactttgttattgtacctaagtaaattttctttargtcagaagcccaatttttgtatgttttattgtaatcataaatactgctgtataaggtaataa

SEQ ID NO: 59444 - DNA, 201 bp, Homo sapiens; identical to SEQ ID NO: 59273

SEQ ID NO: 59445 - DNA, 201 bp, Homo sapiens; identical to SEQ ID NO: 59274

SEQ ID NO: 59446 - DNA, 201 bp, Homo sapiens; identical to SEQ ID NO: 59275

SEQ ID NO: 59447 - DNA, 201 bp, Homo sapiens; identical to SEQ ID NO: 59276

SEQ ID NO: 59448 - DNA, 201 bp, Homo sapiens; identical to SEQ ID NO: 59277

SEQ ID NO: 59449 - DNA, 201 bp, Homo sapiens; identical to SEQ ID NO: 59278

SEQ ID NO: 59450 - DNA, 201 bp, Homo sapiens; identical to SEQ ID NO: 59279

SEQ ID NO: 59451 - DNA, 201 bp, Homo sapiens; identical to SEQ ID NO: 59280

SEQ ID NO: 59452 - DNA, 201 bp, Homo sapiens; identical to SEQ ID NO: 59281

SEQ ID NO: 59453 - DNA, 201 bp, Homo sapiens; identical to SEQ ID NO: 59282

SEQ ID NO: 59454 - DNA, 201 bp, Homo sapiens; identical to SEQ ID NO: 59283

SEQ ID NO: 59455 - DNA, 201 bp, Homo sapiens; identical to SEQ ID NO: 59284

SEQ ID NO: 59456 - DNA, 201 bp, Homo sapiens; identical to SEQ ID NO: 59285

SEQ ID NO: 59457 - DNA, 201 bp, Homo sapiens; identical to SEQ ID NO: 59286

SEQ ID NO: 59458 - DNA, 201 bp, Homo sapiens; identical to SEQ ID NO: 59287

SEQ ID NO: 59459 - DNA, 201 bp, Homo sapiens; identical to SEQ ID NO: 59288

SEQ ID NO: 59460 - DNA, 201 bp, Homo sapiens; identical to SEQ ID NO: 59289

SEQ ID NO: 59461 - DNA, 201 bp, Homo sapiens; identical to SEQ ID NO: 59290

SEQ ID NO: 59462 - DNA, 201 bp, Homo sapiens; identical to SEQ ID NO: 59291

SEQ ID NO: 59463 - DNA, 201 bp, Homo sapiens; identical to SEQ ID NO: 59292

SEQ ID NO: 59464 - DNA, 201 bp, Homo sapiens; identical to SEQ ID NO: 59293

SEQ ID NO: 59465 - DNA, 201 bp, Homo sapiens; identical to SEQ ID NO: 59294

SEQ ID NO: 59466 - DNA, 201 bp, Homo sapiens; identical to SEQ ID NO: 59295

SEQ ID NO: 59467 - DNA, 201 bp, Homo sapiens; identical to SEQ ID NO: 59296

SEQ ID NO: 59468 - DNA, 201 bp, Homo sapiens; identical to SEQ ID NO: 59297

SEQ ID NO: 59469 - DNA, 201 bp, Homo sapiens; identical to SEQ ID NO: 59298

SEQ ID NO: 59470 - DNA, 201 bp, Homo sapiens; identical to SEQ ID NO: 59299

SEQ ID NO: 59471 - DNA, 201 bp, Homo sapiens; identical to SEQ ID NO: 59300

SEQ ID NO: 59472 - DNA, 201 bp, Homo sapiens; identical to SEQ ID NO: 59301

SEQ ID NO: 59473 - DNA, 201 bp, Homo sapiens; identical to SEQ ID NO: 59302

SEQ ID NO: 59474 - DNA, 201 bp, Homo sapiens; identical to SEQ ID NO: 59303

SEQ ID NO: 59475 - DNA, 201 bp, Homo sapiens; identical to SEQ ID NO: 59304

SEQ ID NO: 59476 - DNA, 201 bp, Homo sapiens; identical to SEQ ID NO: 59305

SEQ ID NO: 59477 - DNA, 201 bp, Homo sapiens; identical to SEQ ID NO: 59306

SEQ ID NO: 59478 - DNA, 201 bp, Homo sapiens; identical to SEQ ID NO: 59307

SEQ ID NO: 59479 - DNA, 201 bp, Homo sapiens; identical to SEQ ID NO: 59308

SEQ ID NO: 59480 - DNA, 201 bp, Homo sapiens; identical to SEQ ID NO: 59309

SEQ ID NO: 59481 - DNA, 201 bp, Homo sapiens; identical to SEQ ID NO: 59310

SEQ ID NO: 59482 - DNA, 201 bp, Homo sapiens; identical to SEQ ID NO: 59311

SEQ ID NO: 59483 - DNA, 201 bp, Homo sapiens; identical to SEQ ID NO: 59312

SEQ ID NO: 59484 - DNA, 201 bp, Homo sapiens; identical to SEQ ID NO: 59313

SEQ ID NO: 59485 - DNA, 201 bp, Homo sapiens; identical to SEQ ID NO: 59314

SEQ ID NO: 59486 - DNA, 201 bp, Homo sapiens; identical to SEQ ID NO: 59315

SEQ ID NO: 59487 - DNA, 201 bp, Homo sapiens; identical to SEQ ID NO: 59316

SEQ ID NO: 59488 - DNA, 201 bp, Homo sapiens; identical to SEQ ID NO: 59317

SEQ ID NO: 59489 - DNA, 201 bp, Homo sapiens; identical to SEQ ID NO: 59318

SEQ ID NO: 59490 - DNA, 201 bp, Homo sapiens; identical to SEQ ID NO: 59319

SEQ ID NO: 59491 - DNA, 201 bp, Homo sapiens; identical to SEQ ID NO: 59320

SEQ ID NO: 59492 - DNA, 201 bp, Homo sapiens; identical to SEQ ID NO: 59321

SEQ ID NO: 59493 - DNA, 201 bp, Homo sapiens; identical to SEQ ID NO: 59322

SEQ ID NO: 59494 - DNA, 201 bp, Homo sapiens; identical to SEQ ID NO: 59323

SEQ ID NO: 59495 - DNA, 201 bp, Homo sapiens; identical to SEQ ID NO: 59324

SEQ ID NO: 59496 - DNA, 201 bp, Homo sapiens; identical to SEQ ID NO: 59325

SEQ ID NO: 59497 - DNA, 201 bp, Homo sapiens; identical to SEQ ID NO: 59326

SEQ ID NO: 59498 - DNA, 201 bp, Homo sapiens; identical to SEQ ID NO: 59327

SEQ ID NO: 59499 - DNA, 201 bp, Homo sapiens; identical to SEQ ID NO: 59328

SEQ ID NO: 59500 - DNA, 201 bp, Homo sapiens; identical to SEQ ID NO: 59329

SEQ ID NO: 59501 - DNA, 201 bp, Homo sapiens; identical to SEQ ID NO: 59330

SEQ ID NO: 59502 - DNA, 201 bp, Homo sapiens; identical to SEQ ID NO: 59331

SEQ ID NO: 59503 - DNA, 201 bp, Homo sapiens; identical to SEQ ID NO: 59332

SEQ ID NO: 59504 - DNA, 201 bp, Homo sapiens; identical to SEQ ID NO: 59333

SEQ ID NO: 59505 - DNA, 201 bp, Homo sapiens; identical to SEQ ID NO: 59334

SEQ ID NO: 59506 - DNA, 201 bp, Homo sapiens; identical to SEQ ID NO: 59335

SEQ ID NO: 59507 - DNA, 201 bp, Homo sapiens; identical to SEQ ID NO: 59336

SEQ ID NO: 59508 - DNA, 201 bp, Homo sapiens; identical to SEQ ID NO: 59337

SEQ ID NO: 59509 - DNA, 201 bp, Homo sapiens; identical to SEQ ID NO: 59338

SEQ ID NO: 59510 - DNA, 201 bp, Homo sapiens; identical to SEQ ID NO: 59339

SEQ ID NO: 59511 - DNA, 201 bp, Homo sapiens; identical to SEQ ID NO: 59340

SEQ ID NO: 59512 - DNA, 201 bp, Homo sapiens; identical to SEQ ID NO: 59341

SEQ ID NO: 59513 - DNA, 201 bp, Homo sapiens; identical to SEQ ID NO: 59342

SEQ ID NO: 59514 - DNA, 201 bp, Homo sapiens; identical to SEQ ID NO: 59343

SEQ ID NO: 59515 - DNA, 201 bp, Homo sapiens; identical to SEQ ID NO: 59344

SEQ ID NO: 59516 - DNA, 201 bp, Homo sapiens; identical to SEQ ID NO: 59345

SEQ ID NO: 59517 - DNA, 201 bp, Homo sapiens; identical to SEQ ID NO: 59346

SEQ ID NO: 59518 - DNA, 201 bp, Homo sapiens; identical to SEQ ID NO: 59347

SEQ ID NO: 59519 - DNA, 201 bp, Homo sapiens; identical to SEQ ID NO: 59348

SEQ ID NO: 59520 - DNA, 201 bp, Homo sapiens; identical to SEQ ID NO: 59349

SEQ ID NO: 59521 - DNA, 201 bp, Homo sapiens; identical to SEQ ID NO: 59350

SEQ ID NO: 59522 - DNA, 201 bp, Homo sapiens; identical to SEQ ID NO: 59351

SEQ ID NO: 59523 - DNA, 201 bp, Homo sapiens; identical to SEQ ID NO: 59352

SEQ ID NO: 59524 - DNA, 201 bp, Homo sapiens; identical to SEQ ID NO: 59353

SEQ ID NO: 59525 - DNA, 201 bp, Homo sapiens; identical to SEQ ID NO: 59354

SEQ ID NO: 59526 - DNA, 201 bp, Homo sapiens; identical to SEQ ID NO: 59355

SEQ ID NO: 59527 - DNA, 201 bp, Homo sapiens; identical to SEQ ID NO: 59356

SEQ ID NO: 59528 - DNA, 201 bp, Homo sapiens; identical to SEQ ID NO: 59357

SEQ ID NO: 59529 - DNA, 201 bp, Homo sapiens; identical to SEQ ID NO: 59358

SEQ ID NO: 59530 - DNA, 201 bp, Homo sapiens; identical to SEQ ID NO: 59359

SEQ ID NO: 59531 - DNA, 201 bp, Homo sapiens; identical to SEQ ID NO: 59189

SEQ ID NO: 59532 - DNA, 201 bp, Homo sapiens; identical to SEQ ID NO: 59190

SEQ ID NO: 59533 - DNA, 201 bp, Homo sapiens; identical to SEQ ID NO: 59191

SEQ ID NO: 59534 - DNA, 201 bp, Homo sapiens; identical to SEQ ID NO: 59192

SEQ ID NO: 59535 - DNA, 201 bp, Homo sapiens; identical to SEQ ID NO: 59193

SEQ ID NO: 59536 - DNA, 201 bp, Homo sapiens; identical to SEQ ID NO: 59194

SEQ ID NO: 59537 - DNA, 201 bp, Homo sapiens; identical to SEQ ID NO: 59195

SEQ ID NO: 59538 - DNA, 201 bp, Homo sapiens; identical to SEQ ID NO: 59196

SEQ ID NO: 59539 - DNA, 201 bp, Homo sapiens; identical to SEQ ID NO: 59197

SEQ ID NO: 59540 - DNA, 201 bp, Homo sapiens; identical to SEQ ID NO: 59198

SEQ ID NO: 59541 - DNA, 201 bp, Homo sapiens; identical to SEQ ID NO: 59199

SEQ ID NO: 59542 - DNA, 201 bp, Homo sapiens; identical to SEQ ID NO: 59200

SEQ ID NO: 59543 - DNA, 201 bp, Homo sapiens; identical to SEQ ID NO: 59201

SEQ ID NO: 59544 - DNA, 201 bp, Homo sapiens; identical to SEQ ID NO: 59202

SEQ ID NO: 59545 - DNA, 201 bp, Homo sapiens; identical to SEQ ID NO: 59203

SEQ ID NO: 59546 - DNA, 201 bp, Homo sapiens; identical to SEQ ID NO: 59204

SEQ ID NO: 59547 - DNA, 201 bp, Homo sapiens; identical to SEQ ID NO: 59205

SEQ ID NO: 59548 - DNA, 201 bp, Homo sapiens; identical to SEQ ID NO: 59206

SEQ ID NO: 59549 - DNA, 201 bp, Homo sapiens; identical to SEQ ID NO: 59207

SEQ ID NO: 59550 - DNA, 201 bp, Homo sapiens; identical to SEQ ID NO: 59208

SEQ ID NO: 59551 - DNA, 201 bp, Homo sapiens; identical to SEQ ID NO: 59209

SEQ ID NO: 59552 - DNA, 201 bp, Homo sapiens; identical to SEQ ID NO: 59210

SEQ ID NO: 59553 - DNA, 201 bp, Homo sapiens; identical to SEQ ID NO: 59211

SEQ ID NO: 59554 - DNA, 201 bp, Homo sapiens; identical to SEQ ID NO: 59212

SEQ ID NO: 59555 - DNA, 201 bp, Homo sapiens; identical to SEQ ID NO: 59213

SEQ ID NO: 59556 - DNA, 201 bp, Homo sapiens; identical to SEQ ID NO: 59214

SEQ ID NO: 59557 - DNA, 201 bp, Homo sapiens; identical to SEQ ID NO: 59215

SEQ ID NO: 59558 - DNA, 201 bp, Homo sapiens; identical to SEQ ID NO: 59216

SEQ ID NO: 59559 - DNA, 201 bp, Homo sapiens; identical to SEQ ID NO: 59217

SEQ ID NO: 59560 - DNA, 201 bp, Homo sapiens; identical to SEQ ID NO: 59218

SEQ ID NO: 59561 - DNA, 201 bp, Homo sapiens; identical to SEQ ID NO: 59219

SEQ ID NO: 59562 - DNA, 201 bp, Homo sapiens; identical to SEQ ID NO: 59220

SEQ ID NO: 59563 - DNA, 201 bp, Homo sapiens; identical to SEQ ID NO: 59221

SEQ ID NO: 59564 - DNA, 201 bp, Homo sapiens; identical to SEQ ID NO: 59222

SEQ ID NO: 59565 - DNA, 201 bp, Homo sapiens; identical to SEQ ID NO: 59223

SEQ ID NO: 59566 - DNA, 201 bp, Homo sapiens; identical to SEQ ID NO: 59224

SEQ ID NO: 59567 - DNA, 201 bp, Homo sapiens; identical to SEQ ID NO: 59225

SEQ ID NO: 59568 - DNA, 201 bp, Homo sapiens; identical to SEQ ID NO: 59226

SEQ ID NO: 59569 - DNA, 201 bp, Homo sapiens; identical to SEQ ID NO: 59227

SEQ ID NO: 59570 - DNA, 201 bp, Homo sapiens
cgtcaggacaacgcccacgaggggcgttactgtgcggagatgcaccacgcaagagacaccctttgtaactctcttctcctccctagtgcgaggttaaaacyttcagccccacgtgctgtttgcaaacctgcctgtacctgaggccctaaaaagccagagacctcactcccggggagccagcatgtccactgcggtcctgga

SEQ ID NO: 59571 - DNA, 201 bp, Homo sapiens; identical to SEQ ID NO: 59229

SEQ ID NO: 59572 - DNA, 201 bp, Homo sapiens; identical to SEQ ID NO: 59230

SEQ ID NO: 59573 - DNA, 201 bp, Homo sapiens; identical to SEQ ID NO: 59231

SEQ ID NO: 59574 - DNA, 201 bp, Homo sapiens; identical to SEQ ID NO: 59232

SEQ ID NO: 59575 - DNA, 201 bp, Homo sapiens
ctagtgcgaggttaaaaccttcagccccacgtgctgtttgcaaacctgcctgtacctgaggccctaaaaagccagagacctcactcccggggagccagcakgtccactgcggtcctggaaaacccaggcttgggcaggaaactctctgactttggacaggaaacaagctatattgaagacaactgcaatcaaaatggtgcc

SEQ ID NO: 59576 - DNA, 201 bp, Homo sapiens
tagtgcgaggttaaaaccttcagccccacgtgctgtttgcaaacctgcctgtacctgaggccctaaaaagccagagacctcactcccggggagccagcatrtccactgcggtcctggaaaacccaggcttgggcaggaaactctctgactttggacaggaaacaagctatattgaagacaactgcaatcaaaatggtgcca

SEQ ID NO: 59577 - DNA, 201 bp, Homo sapiens; identical to SEQ ID NO: 59235

SEQ ID NO: 59578 - DNA, 201 bp, Homo sapiens; identical to SEQ ID NO: 59236

SEQ ID NO: 59579 - DNA, 201 bp, Homo sapiens; identical to SEQ ID NO: 59237

SEQ ID NO: 59580 - DNA, 201 bp, Homo sapiens; identical to SEQ ID NO: 59238

SEQ ID NO: 59581 - DNA, 201 bp, Homo sapiens; identical to SEQ ID NO: 59239

SEQ ID NO: 59582 - DNA, 201 bp, Homo sapiens; identical to SEQ ID NO: 59240

SEQ ID NO: 59583 - DNA, 201 bp, Homo sapiens; identical to SEQ ID NO: 59241

SEQ ID NO: 59584 - DNA, 201 bp, Homo sapiens; identical to SEQ ID NO: 59242

SEQ ID NO: 59585 - DNA, 201 bp, Homo sapiens; identical to SEQ ID NO: 59243

SEQ ID NO: 59586 - DNA, 201 bp, Homo sapiens; identical to SEQ ID NO: 59244

SEQ ID NO: 59587 - DNA, 201 bp, Homo sapiens; identical to SEQ ID NO: 59245

SEQ ID NO: 59588 - DNA, 201 bp, Homo sapiens; identical to SEQ ID NO: 59246

SEQ ID NO: 59589 - DNA, 201 bp, Homo sapiens; identical to SEQ ID NO: 59247

SEQ ID NO: 59590 - DNA, 201 bp, Homo sapiens; identical to SEQ ID NO: 59248

SEQ ID NO: 59591 - DNA, 201 bp, Homo sapiens; identical to SEQ ID NO: 59249

SEQ ID NO: 59592 - DNA, 201 bp, Homo sapiens; identical to SEQ ID NO: 59250

SEQ ID NO: 59593 - DNA, 201 bp, Homo sapiens; identical to SEQ ID NO: 59251

SEQ ID NO: 59594 - DNA, 201 bp, Homo sapiens; identical to SEQ ID NO: 59252

SEQ ID NO: 59595 - DNA, 201 bp, Homo sapiens; identical to SEQ ID NO: 59253

SEQ ID NO: 59596 - DNA, 201 bp, Homo sapiens; identical to SEQ ID NO: 59254

SEQ ID NO: 59597 - DNA, 201 bp, Homo sapiens; identical to SEQ ID NO: 59255

SEQ ID NO: 59598 - DNA, 201 bp, Homo sapiens; identical to SEQ ID NO: 59256

SEQ ID NO: 59599 - DNA, 201 bp, Homo sapiens; identical to SEQ ID NO: 59257

SEQ ID NO: 59600 - DNA, 201 bp, Homo sapiens; identical to SEQ ID NO: 59258

SEQ ID NO: 59601 - DNA, 201 bp, Homo sapiens; identical to SEQ ID NO: 59259

SEQ ID NO: 59602 - DNA, 201 bp, Homo sapiens; identical to SEQ ID NO: 59260

SEQ ID NO: 59603 - DNA, 201 bp, Homo sapiens; identical to SEQ ID NO: 59261

SEQ ID NO: 59604 - DNA, 201 bp, Homo sapiens; identical to SEQ ID NO: 59262

SEQ ID NO: 59605 - DNA, 201 bp, Homo sapiens; identical to SEQ ID NO: 59263

SEQ ID NO: 59606 - DNA, 201 bp, Homo sapiens; identical to SEQ ID NO: 59264

SEQ ID NO: 59607 - DNA, 201 bp, Homo sapiens; identical to SEQ ID NO: 59265

SEQ ID NO: 59608 - DNA, 201 bp, Homo sapiens; identical to SEQ ID NO: 59266

SEQ ID NO: 59609 - DNA, 201 bp, Homo sapiens; identical to SEQ ID NO: 59267

SEQ ID NO: 59610 - DNA, 201 bp, Homo sapiens; identical to SEQ ID NO: 59268

SEQ ID NO: 59611 - DNA, 201 bp, Homo sapiens; identical to SEQ ID NO: 59269

SEQ ID NO: 59612 - DNA, 201 bp, Homo sapiens; identical to SEQ ID NO: 59270

SEQ ID NO: 59613 - DNA, 201 bp, Homo sapiens; identical to SEQ ID NO: 59271

SEQ ID NO: 59614 - DNA, 201 bp, Homo sapiens; identical to SEQ ID NO: 59272

SEQ ID NO: 59615 - DNA, 201 bp, Homo sapiens; identical to SEQ ID NO: 59273

SEQ ID NO: 59616 - DNA, 201 bp, Homo sapiens; identical to SEQ ID NO: 59274

SEQ ID NO: 59617 - DNA, 201 bp, Homo sapiens; identical to SEQ ID NO: 59275

SEQ ID NO: 59618 - DNA, 201 bp, Homo sapiens; identical to SEQ ID NO: 59276

SEQ ID NO: 59619 - DNA, 201 bp, Homo sapiens; identical to SEQ ID NO: 59277

SEQ ID NO: 59620 - DNA, 201 bp, Homo sapiens; identical to SEQ ID NO: 59278

SEQ ID NO: 59621 - DNA, 201 bp, Homo sapiens; identical to SEQ ID NO: 59279

SEQ ID NO: 59622 - DNA, 201 bp, Homo sapiens; identical to SEQ ID NO: 59280

SEQ ID NO: 59623 - DNA, 201 bp, Homo sapiens; identical to SEQ ID NO: 59281

SEQ ID NO: 59624 - DNA, 201 bp, Homo sapiens; identical to SEQ ID NO: 59282

SEQ ID NO: 59625 - DNA, 201 bp, Homo sapiens; identical to SEQ ID NO: 59283

SEQ ID NO: 59626 - DNA, 201 bp, Homo sapiens; identical to SEQ ID NO: 59284

SEQ ID NO: 59627 - DNA, 201 bp, Homo sapiens; identical to SEQ ID NO: 59285

SEQ ID NO: 59628 - DNA, 201 bp, Homo sapiens; identical to SEQ ID NO: 59286

SEQ ID NO: 59629 - DNA, 201 bp, Homo sapiens; identical to SEQ ID NO: 59287

SEQ ID NO: 59630 - DNA, 201 bp, Homo sapiens; identical to SEQ ID NO: 59288

SEQ ID NO: 59631 - DNA, 201 bp, Homo sapiens; identical to SEQ ID NO: 59289

SEQ ID NO: 59632 - DNA, 201 bp, Homo sapiens; identical to SEQ ID NO: 59290

SEQ ID NO: 59633 - DNA, 201 bp, Homo sapiens; identical to SEQ ID NO: 59291

SEQ ID NO: 59634 - DNA, 201 bp, Homo sapiens; identical to SEQ ID NO: 59292

SEQ ID NO: 59635 - DNA, 201 bp, Homo sapiens; identical to SEQ ID NO: 59293

SEQ ID NO: 59636 - DNA, 201 bp, Homo sapiens; identical to SEQ ID NO: 59294

SEQ ID NO: 59637 - DNA, 201 bp, Homo sapiens; identical to SEQ ID NO: 59295

SEQ ID NO: 59638 - DNA, 201 bp, Homo sapiens
acgcccacgaggggcgttactgtgcggagatgcaccacgcaagagacaccctttgtaactctcttctcctccctagtgcgaggttaaaaccttcagccccmcgtgctgtttgcaaacctgcctgtacctgaggccctaaaaagccagagacctcactcccggggagccagcatgtccactgcggtcctggaaaacccaggc

SEQ ID NO: 59639 - DNA, 201 bp, Homo sapiens; identical to SEQ ID NO: 59297

SEQ ID NO: 59640 - DNA, 201 bp, Homo sapiens
gcttagtccaattgcagagaactcgcttcccaggcttctgagagtcccggaagtgcctaaacctgtctaatcgacggggcttgggtggcccgtcgctcccyggcttcttccctttacccagggcgggcagcgaagtggtgcctcctgcgtcccccacaccctccctcagcccctcccctccggcccgtcctgggcaggtga

SEQ ID NO: 59641 - DNA, 201 bp, Homo sapiens
atcgacggggcttgggtggcccgtcgctccctggcttcttccctttacccagggcgggcagcgaagtggtgcctcctgcgtcccccacaccctccctcagyccctcccctccggcccgtcctgggcaggtgacctggagcatccggcaggctgccctggcctcctgcgtcaggacaacgcccacgaggggcgttactgtgc

SEQ ID NO: 59642 - DNA, 201 bp, Homo sapiens; identical to SEQ ID NO: 59298

SEQ ID NO: 59643 - DNA, 201 bp, Homo sapiens; identical to SEQ ID NO: 59299

SEQ ID NO: 59644 - DNA, 201 bp, Homo sapiens; identical to SEQ ID NO: 59300

SEQ ID NO: 59645 - DNA, 201 bp, Homo sapiens; identical to SEQ ID NO: 59301

SEQ ID NO: 59646 - DNA, 201 bp, Homo sapiens; identical to SEQ ID NO: 59302

SEQ ID NO: 59647 - DNA, 201 bp, Homo sapiens; identical to SEQ ID NO: 59303

SEQ ID NO: 59648 - DNA, 201 bp, Homo sapiens; identical to SEQ ID NO: 59304

SEQ ID NO: 59649 - DNA, 201 bp, Homo sapiens; identical to SEQ ID NO: 59305

SEQ ID NO: 59650 - DNA, 201 bp, Homo sapiens; identical to SEQ ID NO: 59306

SEQ ID NO: 59651 - DNA, 201 bp, Homo sapiens; identical to SEQ ID NO: 59307

SEQ ID NO: 59652 - DNA, 201 bp, Homo sapiens; identical to SEQ ID NO: 59308

SEQ ID NO: 59653 - DNA, 201 bp, Homo sapiens; identical to SEQ ID NO: 59309

SEQ ID NO: 59654 - DNA, 201 bp, Homo sapiens; identical to SEQ ID NO: 59310

SEQ ID NO: 59655 - DNA, 201 bp, Homo sapiens; identical to SEQ ID NO: 59311

SEQ ID NO: 59656 - DNA, 201 bp, Homo sapiens; identical to SEQ ID NO: 59312

SEQ ID NO: 59657 - DNA, 201 bp, Homo sapiens; identical to SEQ ID NO: 59313

SEQ ID NO: 59658 - DNA, 201 bp, Homo sapiens; identical to SEQ ID NO: 59314

SEQ ID NO: 59659 - DNA, 201 bp, Homo sapiens; identical to SEQ ID NO: 59315

SEQ ID NO: 59660 - DNA, 201 bp, Homo sapiens; identical to SEQ ID NO: 59316

SEQ ID NO: 59661 - DNA, 201 bp, Homo sapiens; identical to SEQ ID NO: 59317

SEQ ID NO: 59662 - DNA, 201 bp, Homo sapiens; identical to SEQ ID NO: 59318

SEQ ID NO: 59663 - DNA, 201 bp, Homo sapiens; identical to SEQ ID NO: 59319

SEQ ID NO: 59664 - DNA, 201 bp, Homo sapiens; identical to SEQ ID NO: 59320

SEQ ID NO: 59665 - DNA, 201 bp, Homo sapiens; identical to SEQ ID NO: 59321

SEQ ID NO: 59666 - DNA, 201 bp, Homo sapiens; identical to SEQ ID NO: 59322

SEQ ID NO: 59667 - DNA, 201 bp, Homo sapiens; identical to SEQ ID NO: 59323

SEQ ID NO: 59668 - DNA, 201 bp, Homo sapiens; identical to SEQ ID NO: 59324

SEQ ID NO: 59669 - DNA, 201 bp, Homo sapiens; identical to SEQ ID NO: 59325

SEQ ID NO: 59670 - DNA, 201 bp, Homo sapiens; identical to SEQ ID NO: 59326

SEQ ID NO: 59671 - DNA, 201 bp, Homo sapiens; identical to SEQ ID NO: 59327

SEQ ID NO: 59672 - DNA, 201 bp, Homo sapiens; identical to SEQ ID NO: 59328

SEQ ID NO: 59673 - DNA, 201 bp, Homo sapiens; identical to SEQ ID NO: 59329

SEQ ID NO: 59674 - DNA, 201 bp, Homo sapiens; identical to SEQ ID NO: 59330

SEQ ID NO: 59675 - DNA, 201 bp, Homo sapiens; identical to SEQ ID NO: 59331

SEQ ID NO: 59676 - DNA, 201 bp, Homo sapiens; identical to SEQ ID NO: 59332

SEQ ID NO: 59677 - DNA, 201 bp, Homo sapiens; identical to SEQ ID NO: 59333

SEQ ID NO: 59678 - DNA, 201 bp, Homo sapiens; identical to SEQ ID NO: 59334

SEQ ID NO: 59679 - DNA, 201 bp, Homo sapiens; identical to SEQ ID NO: 59335

SEQ ID NO: 59680 - DNA, 201 bp, Homo sapiens; identical to SEQ ID NO: 59336

SEQ ID NO: 59681 - DNA, 201 bp, Homo sapiens; identical to SEQ ID NO: 59337

SEQ ID NO: 59682 - DNA, 201 bp, Homo sapiens
cccctcccctccggcccgtcctgggcaggtgacctggagcatccggcaggctgccctggcctcctgcgtcaggacaacgcccacgaggggcgttactgtgyggagatgcaccacgcaagagacaccctttgtaactctcttctcctccctagtgcgaggttaaaaccttcagccccacgtgctgtttgcaaacctgcctgt

SEQ ID NO: 59683 - DNA, 201 bp, Homo sapiens; identical to SEQ ID NO: 59338

SEQ ID NO: 59684 - DNA, 201 bp, Homo sapiens; identical to SEQ ID NO: 59339

SEQ ID NO: 59685 - DNA, 201 bp, Homo sapiens; identical to SEQ ID NO: 59340

SEQ ID NO: 59686 - DNA, 201 bp, Homo sapiens; identical to SEQ ID NO: 59341

SEQ ID NO: 59687 - DNA, 201 bp, Homo sapiens; identical to SEQ ID NO: 59342

SEQ ID NO: 59688 - DNA, 201 bp, Homo sapiens; identical to SEQ ID NO: 59343

SEQ ID NO: 59689 - DNA, 201 bp, Homo sapiens; identical to SEQ ID NO: 59344

SEQ ID NO: 59690 - DNA, 201 bp, Homo sapiens; identical to SEQ ID NO: 59345

SEQ ID NO: 59691 - DNA, 201 bp, Homo sapiens; identical to SEQ ID NO: 59346

SEQ ID NO: 59692 - DNA, 201 bp, Homo sapiens; identical to SEQ ID NO: 59347

SEQ ID NO: 59693 - DNA, 201 bp, Homo sapiens; identical to SEQ ID NO: 59348

SEQ ID NO: 59694 - DNA, 201 bp, Homo sapiens; identical to SEQ ID NO: 59349

SEQ ID NO: 59695 - DNA, 201 bp, Homo sapiens; identical to SEQ ID NO: 59350

SEQ ID NO: 59696 - DNA, 201 bp, Homo sapiens; identical to SEQ ID NO: 59351

SEQ ID NO: 59697 - DNA, 201 bp, Homo sapiens; identical to SEQ ID NO: 59352

SEQ ID NO: 59698 - DNA, 201 bp, Homo sapiens; identical to SEQ ID NO: 59353

SEQ ID NO: 59699 - DNA, 201 bp, Homo sapiens; identical to SEQ ID NO: 59354

SEQ ID NO: 59700 - DNA, 201 bp, Homo sapiens; identical to SEQ ID NO: 59355

SEQ ID NO: 59701 - DNA, 201 bp, Homo sapiens; identical to SEQ ID NO: 59356

SEQ ID NO: 59702 - DNA, 201 bp, Homo sapiens; identical to SEQ ID NO: 59357

SEQ ID NO: 59703 - DNA, 201 bp, Homo sapiens; identical to SEQ ID NO: 59358

SEQ ID NO: 59704 - DNA, 201 bp, Homo sapiens; identical to SEQ ID NO: 59359

SEQ ID NO: 59705 - DNA, 201 bp, Homo sapiens
cacaccctccgatgtcaacttcttattaccacctgaggatgcaggggaagaggctgaggccaaaaatgagctgagccccatggacagaggcctgggcgtcmgtgccgccttccccgagggtttccacccccgacgctccagccagggtgccacacagatgcccctctactcctcacccatagtcaagaaccccttcatgtc

SEQ ID NO: 59706 - DNA, 201 bp, Homo sapiens
gccactgactgccgaccccacgctcacggtcaccatctcacccccactggcccacacaggccctgggcccgtcctcgtcaggctcatctcctatgacctgygtgaaggacaggacagtgaggagctcagcagcctgataaagtccaacggccaacggagcctggagctgtggccgcgcccccagcaggcaccccgctcgcg

SEQ ID NO: 59707 - DNA, 201 bp, Homo sapiens
catgaatgccttccgggccgggcggaaggggacgcgggctgtgccttacttaagtcgggggtggcaagggggcggggcgggggcccgaaagctgagacccycgccacggggagggggacgcgcacacacaccggtcaccgagacggctggacctgcacgccaccgctgccttttgctgctgctgctgcggcgaccgccgca

SEQ ID NO: 59708 - DNA, 201 bp, Homo sapiens
tggacgactcggtcatgctcgcgcggcgactgcgcaacctgggccagccggtgacgctgcgcgtggtggaggacctgccgcacggcttcctgaccctagasgcgctgtgtcgcgagacgcgccaggccgcagagctgtgcgtggagcgcatccgcctcgtcctcactcctcccgccggagccgggccgagcggggagacgg

SEQ ID NO: 59709 - DNA, 201 bp, Homo sapiens
tcgtcaggctcatctcctatgacctgcgtgaaggacaggacagtgaggagctcagcagcctgataaagtccaacggccaacggagcctggagctgtggccrcgcccccagcaggcaccccgctcgcggtccctgatagtgcacttccacggcggtggctttgtggcccagacctccagatcccacgagccctacctcaaga

SEQ ID NO: 59710 - DNA, 201 bp, Homo sapiens
acatgatgctgaatcccagaaggaacctagagcccaacaaaaatctgcttcacaagaggaatttcttgccccacagaagcccgcaccacagcaatcacctyacatccaaagggtgctgctcactcaacaggaagctgcctcccagcagggacctgggctaggaaaagaatctataactcaacaggagccagcattgagaca

SEQ ID NO: 59711 - DNA, 201 bp, Homo sapiens
ttgcgggggacagtgcaggcgggaacctctgcttcaccgtggctcttcgggcagcagcctacggggtgcgggtgccagatggcatcatggcagcctacccrgccacaatgctgcagcctgccgcctctccctcccgcctgctgagcctcatggaccccttgctgcccctcagtgtgctctccaagtgtgtcagcgcctatg

SEQ ID NO: 59712 - DNA, 201 bp, Homo sapiens
aatcccgctatgtggcctccaaccgccgcagcatcttcttccgcaccagccacaacctggccgagctggaggcctacctggctgccctcacccagctccgygctctggtctactacgcccagcgcctgctggttaccaatcggccgggggtactcttctttgagggcgacgaggggctcaccgccgacttcctccgggagt

SEQ ID NO: 59713 - DNA, 201 bp, Homo sapiens
ctatggccgctgcctgggcttccagttcacgcctgccatccggccattcctgcagaccatctccattgggctggtgtccttcggggagcactacaaacgcmacgagacaggcctcagtgtggccgccagctctctcttcaccagcggccgctttgccatcgaccccgagctgcgtggggctgagtttgagcggatcacaca

SEQ ID NO: 59714 - DNA, 201 bp, Homo sapiens
agtttgagcggatcacacagaacctggacgtgcacttctggaaagccttctggaacatcaccgagatggaagtgctatcgtctctggccaacatggcatcrgccaccgtgagggtaagccgcctgctcagcctgccacccgaagcctttgagatgccactgactgccgaccccacgctcacggtcaccatctcacccccac

SEQ ID NO: 59715 - DNA, 201 bp, Homo sapiens
aggagagccacctccagctcaacaagaagctgaatcaacacctgcggcccaggctaaacctggagccaaaagggagccatctgccccgactgaatctacgwcccaagagacacctgaacagtcagacaagcaaacaacgccagtccagggagccaaatccaagcagggatctttgacagagctgggatttctaacaaaact

SEQ ID NO: 59716 - DNA, 201 bp, Homo sapiens
tcagacaagcaaacaacgccagtccagggagccaaatccaagcagggatctttgacagagctgggatttctaacaaaacttcaggaactatccatacagcdatcagccctagagtggaaggcactttctgagtgggtcacagattctgagtcagaatcagatgtgggatcatcttcagacacagattctccagccacgatg

SEQ ID NO: 59717 - DNA, 201 bp, Homo sapiens
tccgcaaactcatcctgcgcaggaacccagggggttgggtggagaaggaaacctactactgacctcagccccaccacatcgcccatctcttccccgtcccscaggcccaggaccgcccctgtcagtccccccaattttgtattctggggggaggagccctctcttcctgtggccccaccttggcccccaccccctccacta

SEQ ID NO: 59718 - DNA, 201 bp, Homo sapiens
agagactcatcagcatggcctacgggcagattggaatgatccaggctctcggtggcttcttctcttactttgtgatcctggcagaaaatggcttcttgccyggcaacctggtgggcatccggctgaactgggatgaccgcaccgtcaatgacctggaagacagttacgggcagcagtggacatacgagcagaggaaggtgg

SEQ ID NO: 59719 - DNA, 201 bp, Homo sapiens
ttgccttcgactgtgatgacgtgaacttcaccacggacaacctctgctttgtgggcctcatgtccatgatcgacccaccccgggcagccgtccctgacgcrgtgggcaagtgtcgcagcgcaggcatcaaggtcatcatggtcaccggcgatcaccccatcacggccaaggccattgccaagggtgtgggcatcatctctg

SEQ ID NO: 59720 - DNA, 201 bp, Homo sapiens
tgccagctgacctgcggatcatctcagcccacggctgcaaggtggacaactcctccctgactggcgaatccgagccccagactcgctctcccgactgcackcacgacaaccccttggagactcggaacatcaccttcttttccaccaactgtgtggaaggcacggctcggggcgtggtggtggccacgggcgaccgcactg

SEQ ID NO: 59721 - DNA, 201 bp, Homo sapiens
tccctgtgctcaagagggatgtggctggggatgcgtctgagtctgccctgctcaagtgcatcgagctgtcctctggctccgtgaagctgatgcgtgaacgmaacaagaaagtggctgagattcccttcaattccaccaacaaataccagctctccatccatgagaccgaggaccccaacgacaaccgatacctgctggtga

SEQ ID NO: 59722 - DNA, 201 bp, Homo sapiens
gggtggccctgtctcacatcgctgggctctgcaatcgcgctgtcttcaagggtggtcaggacaacatccctgtgctcaagagggatgtggctggggatgcrtctgagtctgccctgctcaagtgcatcgagctgtcctctggctccgtgaagctgatgcgtgaacgcaacaagaaagtggctgagattcccttcaattcca

SEQ ID NO: 59723 - DNA, 201 bp, Homo sapiens
agatgggggacaagaaagatgacaaggactcacccaagaagaacaagggcaaggagcgccgggacctggatgacctcaagaaggaggtggctatgacagarcacaagatgtcagtggaagaggtctgccggaaatacaacacagactgtgtgcagggtttgacccacagcaaagcccaggagatcctggcccgggatgggc

SEQ ID NO: 59724 - DNA, 201 bp, Homo sapiens
tcccagagggtctgctggccactgtcactgtgtgtctgacgctgaccgccaagcgcatggcccggaagaactgcctggtgaagaacctggaggctgtagaraccctgggctccacgtccaccatctgctcagataagacagggaccctcactcagaaccgcatgacagtcgcccacatgtggtttgacaaccagatccacg

SEQ ID NO: 59725 - DNA, 201 bp, Homo sapiens
ctgcccgaggagcagttccccaagggctttgccttcgactgtgatgacgtgaacttcaccacggacaacctctgctttgtgggcctcatgtccatgatcgrcccaccccgggcagccgtccctgacgcggtgggcaagtgtcgcagcgcaggcatcaaggtcatcatggtcaccggcgatcaccccatcacggccaaggcc

SEQ ID NO: 59726 - DNA, 201 bp, Homo sapiens
tcaatgacctggaagacagttacgggcagcagtggacatacgagcagaggaaggtggtggagttcacctgccacacggccttctttgtgagcatcgttgtygtccagtgggccgatctgatcatctgcaagacccggaggaactcggtcttccagcagggcatgaagaacaagatcctgatcttcgggctgtttgaggaga

SEQ ID NO: 59727 - DNA, 201 bp, Homo sapiens
tgctggacgacaactttgcctccatcgtcacaggggtggaggagggccgcctgatcttcgacaacctaaagaagtccattgcctacaccctgaccagcaayatcccggagatcacgcccttcctgctgttcatcatggccaacatcccgctgcccctgggcaccatcaccatcctctgcatcgatctgggcactgacatgg

SEQ ID NO: 59728 - DNA, 201 bp, Homo sapiens; identical to SEQ ID NO: 59717

SEQ ID NO: 59729 - DNA, 201 bp, Homo sapiens; identical to SEQ ID NO: 59718

SEQ ID NO: 59730 - DNA, 201 bp, Homo sapiens; identical to SEQ ID NO: 59719

SEQ ID NO: 59731 - DNA, 201 bp, Homo sapiens; identical to SEQ ID NO: 59720

SEQ ID NO: 59732 - DNA, 201 bp, Homo sapiens; identical to SEQ ID NO: 59721

SEQ ID NO: 59733 - DNA, 201 bp, Homo sapiens; identical to SEQ ID NO: 59722

SEQ ID NO: 59734 - DNA, 201 bp, Homo sapiens
gcgggagggacaagaaagatgacaaggactcacccaagaagaacaagggcaaggagcgccgggacctggatgacctcaagaaggaggtggctatgacagarcacaagatgtcagtggaagaggtctgccggaaatacaacacagactgtgtgcagggtttgacccacagcaaagcccaggagatcctggcccgggatgggc

SEQ ID NO: 59735 - DNA, 201 bp, Homo sapiens; identical to SEQ ID NO: 59724

SEQ ID NO: 59736 - DNA, 201 bp, Homo sapiens; identical to SEQ ID NO: 59725

SEQ ID NO: 59737 - DNA, 201 bp, Homo sapiens; identical to SEQ ID NO: 59726

SEQ ID NO: 59738 - DNA, 201 bp, Homo sapiens; identical to SEQ ID NO: 59727

SEQ ID NO: 59739 - DNA, 201 bp, Homo sapiens; identical to SEQ ID NO: 59717

SEQ ID NO: 59740 - DNA, 201 bp, Homo sapiens; identical to SEQ ID NO: 59718

SEQ ID NO: 59741 - DNA, 201 bp, Homo sapiens; identical to SEQ ID NO: 59719

SEQ ID NO: 59742 - DNA, 201 bp, Homo sapiens; identical to SEQ ID NO: 59720

SEQ ID NO: 59743 - DNA, 201 bp, Homo sapiens; identical to SEQ ID NO: 59721

SEQ ID NO: 59744 - DNA, 201 bp, Homo sapiens; identical to SEQ ID NO: 59722

SEQ ID NO: 59745 - DNA, 193 bp, Homo sapiens
gacaagaaagatgacaaggactcacccaagaagaacaagggcaaggagcgccgggacctggatgacctcaagaaggaggtggctatgacagarcacaagatgtcagtggaagaggtctgccggaaatacaacacagactgtgtgcagggtttgacccacagcaaagcccaggagatcctggcccgggatgggc

SEQ ID NO: 59746 - DNA, 201 bp, Homo sapiens; identical to SEQ ID NO: 59724

SEQ ID NO: 59747 - DNA, 201 bp, Homo sapiens; identical to SEQ ID NO: 59725

SEQ ID NO: 59748 - DNA, 201 bp, Homo sapiens; identical to SEQ ID NO: 59726

SEQ ID NO: 59749 - DNA, 201 bp, Homo sapiens; identical to SEQ ID NO: 59727

SEQ ID NO: 59750 - DNA, 201 bp, Homo sapiens
ctcagatggcaccatcagccatcatgacatgtatgattacctgcatctgagccgcctgggctacacacctgtttgccgggctctgcactccctgcttctgsgtctgctggcccaagaccagggccaaggtgctcccctgctggagcccgcaccctaagcatcctgctgccttcccacaacattaaactctccttcctcagt

SEQ ID NO: 59751 - DNA, 201 bp, Homo sapiens
actggctggccaccctcgggcccacttcctagatgccgaccctggctttgtgcactcagatggcaccatcagccatcatgacatgtatgattacctgcatytgagccgcctgggctacacacctgtttgccgggctctgcactccctgcttctgcgtctgctggcccaagaccagggccaaggtgctcccctgctggagcc

SEQ ID NO: 59752 - DNA, 201 bp, Homo sapiens
gcggcgccctgtatcggccttcgtcctccgcgggtgtgctagcgttgggacggtcctttgttgccgcgaggggtaggagtgggcgtggcggagccagctcsgttcggaacactcccgggccgacccgactcgctcatcctgcaggagctgcggcgccaagatgagtggagaggagaacccagccagcaagcccacgccggt

SEQ ID NO: 59753 - DNA, 201 bp, Homo sapiens; identical to SEQ ID NO: 59750

SEQ ID NO: 59754 - DNA, 201 bp, Homo sapiens; identical to SEQ ID NO: 59751

SEQ ID NO: 59755 - DNA, 201 bp, Homo sapiens; identical to SEQ ID NO: 59750

SEQ ID NO: 59756 - DNA, 201 bp, Homo sapiens; identical to SEQ ID NO: 59751

SEQ ID NO: 59757 - DNA, 201 bp, Homo sapiens; identical to SEQ ID NO: 59750

SEQ ID NO: 59758 - DNA, 201 bp, Homo sapiens; identical to SEQ ID NO: 59751

SEQ ID NO: 59759 - DNA, 201 bp, Homo sapiens
ctggttcacagatagctgctttttattgacaaacaagatcatagtatttcagtcatggtgtcaagcacattaatacttttctgttactcagcatttttttwtatatcagttcaaaagctacttttgccaagaaggatgagacaaaaggccagacagaaattggactttggttttcagacatgggactctcatgttaacaaa

SEQ ID NO: 59760 - DNA, 201 bp, Homo sapiens
ctaaagggttcctgaagggttggggaggagagagggtgggggaaatagattgaccccaaattcagtgtgaacacagctccattcttgtttactcttccttyggactcctacttttcttctaaactctctgggtagataatgttatccttattggccttagagatacccaagatattataaaaccagagctgttatgtctgt

SEQ ID NO: 59761 - DNA, 201 bp, Homo sapiens
tgtcaagcacattaatacttttctgttactcagcatttttttttatatcagttcaaaagctacttttgccaagaaggatgagacaaaaggccagacagaawttggactttggttttcagacatgggactctcatgttaacaaagaataaataagcaaatattgaatcctttgtttctaagttagtttcttctgtataagat

SEQ ID NO: 59762 - DNA, 201 bp, Homo sapiens
tagatccccaagttgtggggtgaaaagtgtgaacagaaatggctgtaaaactacttgccttgcaaagtcaagtacatttaaaagaggcagaaacttggatstgcttcttttttcatcatgcttgtcagtttacggggtgagagaggagaagcttacagcagctgaggtgttcagataaactagttctggcctcgcagtttt

SEQ ID NO: 59763 - DNA, 201 bp, Homo sapiens
gcctggcgctgcagcgccgctactactccccgtcctgccgggaattctgcctcagctgccctcggctctcgctgcgttcgctcaccgctgtcacctgcackgtgtggctggcggcctacggactcttcaccctctgcgagaacagcatgatcctctctgctgccatcttcatcaccctcttaggtctgcttggttatctcc

SEQ ID NO: 59764 - DNA, 110 bp, Homo sapiens
gaccagggcsggcgagcgcagtgcagcgccgtgcggtgcgggcggccgagtgggggcgtcatggaggatgagcggagcttttcggatatctgcggcggccgcctggcgct

SEQ ID NO: 59765 - DNA, 201 bp, Homo sapiens
gcgagaacagcatgatcctctctgctgccatcttcatcaccctcttaggtctgcttggttatctccattttgtgaagattgatcaggagactctgttaatyattgattcccttggcattcagatgacttcatcttatgcttcaggcaaagaaagcactaccttcatagaaatgggcaaggtcaaggatattgtcatcaatg

SEQ ID NO: 59766 - DNA, 201 bp, Homo sapiens
tgcggtgcgggcggccgagtgggggcgtcatggaggatgagcggagcttttcggatatctgcggcggccgcctggcgctgcagcgccgctactactccccrtcctgccgggaattctgcctcagctgccctcggctctcgctgcgttcgctcaccgctgtcacctgcacggtgtggctggcggcctacggactcttcaccc

SEQ ID NO: 59767 - DNA, 175 bp, Homo sapiens
gaccagggccggcgagcgcagtgcagcgccgtgcggtgcgggcggccgagtgggggcgtcatggaggatgagcgragcttttcggatatctgcggcggccgcctggcgctgcagcgccgctactactccccgtcctgccgggaattctgcctcagctgccctcggctctcgctgc

SEQ ID NO: 59768 - DNA, 102 bp, Homo sapiens
grccagggccggcgagcgcagtgcagcgccgtgcggtgcgggcggccgagtgggggcgtcatggaggatgagcggagcttttcggatatctgcggcggccgc

SEQ ID NO: 59769 - DNA, 132 bp, Homo sapiens
gaccagggccggcgagcgcagtgcagcgccgygcggtgcgggcggccgagtgggggcgtcatggaggatgagcggagcttttcggatatctgcggcggccgcctggcgctgcagcgccgctactactccccg

SEQ ID NO: 59770 - DNA, 201 bp, Homo sapiens
aaatgtcctacaaaagacgagtctgtcaacctagtgcctgtgttctgtacagggcttatttatttactgttaataaacagatcttccaaaacacacagttwcctggttcacagatagctgctttttattgacaaacaagatcatagtatttcagtcatggtgtcaagcacattaatacttttctgttactcagcatttttt

SEQ ID NO: 59771 - DNA, 101 bp, Homo sapiens
aagaaggatgagacaaaaggccagacagaaattggactttggttttcagacatgggactctcatgttaacaaagaataaataagcaaatattgaatccttw

SEQ ID NO: 59772 - DNA, 171 bp, Homo sapiens
ctggttcacagatagctgctttttattgacaaacaagatcatatatatcagttcaaaagctacttttgccaagaaggatgagacaaaaggccagacagaawttggactttggttttcagacatgggactctcatgttaacaaagaataaataagcaaatattgaatccttt

SEQ ID NO: 59773 - DNA, 201 bp, Homo sapiens; identical to SEQ ID NO: 59763

SEQ ID NO: 59774 - DNA, 110 bp, Homo sapiens; identical to SEQ ID NO: 59764

SEQ ID NO: 59775 - DNA, 201 bp, Homo sapiens; identical to SEQ ID NO: 59765

SEQ ID NO: 59776 - DNA, 201 bp, Homo sapiens; identical to SEQ ID NO: 59766

SEQ ID NO: 59777 - DNA, 175 bp, Homo sapiens; identical to SEQ ID NO: 59767

SEQ ID NO: 59778 - DNA, 102 bp, Homo sapiens; identical to SEQ ID NO: 59768

SEQ ID NO: 59779 - DNA, 132 bp, Homo sapiens; identical to SEQ ID NO: 59769

SEQ ID NO: 59780 - DNA, 201 bp, Homo sapiens
aaatgtcctacaaaagacgagtctgtcaacctagtgcctgtgttctgtacagggcttatttatttactgttaataaacagatcttccaaaacacacagttwcctggttcacagatagctgctttttattgacaaacaagatcatatatatcagttcaaaagctacttttgccaagaaggatgagacaaaaggccagacaga

SEQ ID NO: 59781 - DNA, 201 bp, Homo sapiens
agtgccagttggacccaagagaagactgcagcagactacacagtacttcttgtcaaaatgattctccttcaaggttttcaaaacctttagcacaaagagarcaaaaccttccagccttgcctgcttggtgtccagttaaaactcagtgtactgccagattcgtctaaatgtctgtcatgtccagatttactttgcttctgt

SEQ ID NO: 59782 - DNA, 201 bp, Homo sapiens
aggcagtgccagttggacccaagagaagactgcagcagactacacagtacttcttgtcaaaatgattctccttcaaggttttcaaaacctttagcacaaaragagcaaaaccttccagccttgcctgcttggtgtccagttaaaactcagtgtactgccagattcgtctaaatgtctgtcatgtccagatttactttgctt

SEQ ID NO: 59783 - DNA, 201 bp, Homo sapiens
gcagtgccagttggacccaagagaagactgcagcagactacacagtacttcttgtcaaaatgattctccttcaaggttttcaaaacctttagcacaaagaragcaaaaccttccagccttgcctgcttggtgtccagttaaaactcagtgtactgccagattcgtctaaatgtctgtcatgtccagatttactttgcttct

SEQ ID NO: 59784 - DNA, 201 bp, Homo sapiens
gagaaggagaatactggaagataatgcacaaaatgaagggactagttaaggattaactagccctttaaggattaactagttaaggattaatagcaaaagayattaaatatgctaacatagctatggaggaattgagggcaagcacccaggactgatgaggtcttaacaaaaaccagtgtggcaaaaaaaaaaaaaaaaaaa

SEQ ID NO: 59785 - DNA, 201 bp, Homo sapiens
gccacaataatcagagatggagcaaaccagtgccatccagtctttatgcaaatgaaatgctgcaaagggaagcagattctgtatatgttggtaactacccrccaagagcacatgggtagcagggaagaagtaaaaaaagagaaggagaatactggaagataatgcacaaaatgaagggactagttaaggattaactagccc

SEQ ID NO: 59786 - DNA, 201 bp, Homo sapiens
agggaagcagattctgtatatgttggtaactacccaccaagagcacatgggtagcagggaagaagtaaaaaaagagaaggagaatactggaagataatgcmcaaaatgaagggactagttaaggattaactagccctttaaggattaactagttaaggattaatagcaaaagatattaaatatgctaacatagctatggag

SEQ ID NO: 59787 - DNA, 201 bp, Homo sapiens
tggtgaaaccccacctctactaaaaattgtgtatatctttgtgtgtcttcctgtttatgtgtgccaagggagtattttcacaaagttcaaaacagccacartaatcagagatggagcaaaccagtgccatccagtctttatgcaaatgaaatgctgcaaagggaagcagattctgtatatgttggtaactacccaccaaga

SEQ ID NO: 59788 - DNA, 201 bp, Homo sapiens; identical to SEQ ID NO: 59781

SEQ ID NO: 59789 - DNA, 201 bp, Homo sapiens; identical to SEQ ID NO: 59782

SEQ ID NO: 59790 - DNA, 201 bp, Homo sapiens; identical to SEQ ID NO: 59783

SEQ ID NO: 59791 - DNA, 201 bp, Homo sapiens; identical to SEQ ID NO: 59784

SEQ ID NO: 59792 - DNA, 201 bp, Homo sapiens; identical to SEQ ID NO: 59785

SEQ ID NO: 59793 - DNA, 201 bp, Homo sapiens; identical to SEQ ID NO: 59786

SEQ ID NO: 59794 - DNA, 201 bp, Homo sapiens; identical to SEQ ID NO: 59787

SEQ ID NO: 59795 - DNA, 201 bp, Homo sapiens
gtactgtttgatttggcatgagccatccatggggactcagtctttctcgcatccatttccaggcatttttgacatgattagccatggaataatgtttagtwctgaaattgtgacactgtctttattaatactgtattttaatcaagtgacatcacagtccaggtagtttttctttcttttttttttttttgaaacagagtc

SEQ ID NO: 59796 - DNA, 201 bp, Homo sapiens
atatatgaagatgaagcatttgagtggccacatcaggtgtctgaggtttttagtactgtttgatttggcatgagccatccatggggactcagtctttctcrcatccatttccaggcatttttgacatgattagccatggaataatgtttagttctgaaattgtgacactgtctttattaatactgtattttaatcaagtga

SEQ ID NO: 59797 - DNA, 201 bp, Homo sapiens
tgatgggcgaagtgatgagagaagctgccttttcactagctgaagccaagttcacagcaggtgacttcagcactacagttatccaaaatgtcaataaagckcaagtgaagattcgagcgaagaaagataatgtagcaggtgttactttgccagtatttgaacattaccatgaaggaactgacagttatgaactgactggtt

SEQ ID NO: 59798 - DNA, 201 bp, Homo sapiens
tcttctatttgaataatctttcctgttctggttctttgagaaaccctaacactggcttcattttaattcacagtgtgtaggtttgatttgtgtggctattkattttttggcctaagaatttcactggttgtaaaatttacctagatgtctatttatgggattacttttgcagaatcataatttagcaaccatttatcatgg

SEQ ID NO: 59799 - DNA, 201 bp, Homo sapiens; identical to SEQ ID NO: 59795

SEQ ID NO: 59800 - DNA, 201 bp, Homo sapiens; identical to SEQ ID NO: 59796

SEQ ID NO: 59801 - DNA, 201 bp, Homo sapiens; identical to SEQ ID NO: 59797

SEQ ID NO: 59802 - DNA, 201 bp, Homo sapiens; identical to SEQ ID NO: 59798

SEQ ID NO: 59803 - DNA, 201 bp, Homo sapiens
tgggttgaagctactttgttaggcttgaattcatttatatgtcttttgattcttaaaaaaacaaaaaacattccattagaagcaccagtttttttgctcaractttgtggatcagactctacactcaacacactctaatctacttaaaggtatacaaaatatgctgatcttttttaaattatgatttcctgaatttttttc

SEQ ID NO: 59804 - DNA, 201 bp, Homo sapiens
atttcctatacccagagctaaacactggaataatactgacatcatttaatttaacataagcaattatgtttaaggagtaatttgtgtcatgtacatatttrattgattttttttcttctacataattttatttgaacaaatgtagacagtttatatgtcgcctttttctgttcaaatttgcatggcctattaagttggctg

SEQ ID NO: 59805 - DNA, 201 bp, Homo sapiens
gatcaacaaatggtcattgaaaacacttgtttagcattagaataaaattatatatgtccttgggaaatattatgacagttgactttaagatcaaaaggaarggaagacctgaaagtcatttgaacattttaggaaaagaatattggagagaaaaaggtattaaatatatagaaataggtttttaacctaacaaggtctgcc

SEQ ID NO: 59806 - DNA, 201 bp, Homo sapiens
ttgcttaggaaactaatttagtcatcagagatactttcctaaaaaggaaaaataaaaaacaaaatggtgccactttgggttgaagctactttgttaggctygaattcatttatatgtcttttgattcttaaaaaaacaaaaaacattccattagaagcaccagtttttttgctcagactttgtggatcagactctacactc

SEQ ID NO: 59807 - DNA, 201 bp, Homo sapiens
gagaaactgtaaaaatagttcgtatagaaaaggctcgtgatattccgttgggtgctacagttcgtaatgaaatggactctgtcatcattagccggatagtmaaagggggtgctgcagagaaaagtggtctgttgcatgaaggagatgaagttctagagattaatggcattgaaattcgggggaaagatgtcaatgaggttt

SEQ ID NO: 59808 - DNA, 201 bp, Homo sapiens
tgttaaatcattaacacttaaatgacttcattgggaatattgagcagagggactgtgcttctatgcactgggcaaggcagtatttgcttaggaaactaatktagtcatcagagatactttcctaaaaaggaaaaataaaaaacaaaatggtgccactttgggttgaagctactttgttaggcttgaattcatttatatgtc

SEQ ID NO: 59809 - DNA, 201 bp, Homo sapiens
tgatttactcacttagcttcccttccctcatcagcatagtataatagaatgtatgttacatttttatgaatggcaggtgttcattataatctgtattgacktaaaaagtttcttcctcatgatgctaatagttttttgtatacatgggaggatagcacatttgacagtttttgcatttttatgtatgagcacagtatccta

SEQ ID NO: 59810 - DNA, 201 bp, Homo sapiens
gaaggaattgtcttagaaagtcctcattatgctgtgaaaatattagaaatagaagacttgttttcttcacttaaacatatccaacatactttggtagattmtcagagccaggaggatatttcactgcttttacaacttgttcaaaataaggatttccagaatgcatttaagatacacaatgccatcacagtacacatgaac

SEQ ID NO: 59811 - DNA, 201 bp, Homo sapiens
gtaactgacaactgttttcaactccaagagctaaactattggcagttcatgttaagttagagtgagggtgtaggtagtgtcagtgagtggctcttgtgccygctgtagacattaggcctgcactagggccatgtgctgtcaagattcaggaacatggctttaacaagcagatcttgtatcaaggcagaggtgatgccatgc

SEQ ID NO: 59812 - DNA, 201 bp, Homo sapiens; identical to SEQ ID NO: 59803

SEQ ID NO: 59813 - DNA, 201 bp, Homo sapiens; identical to SEQ ID NO: 59804

SEQ ID NO: 59814 - DNA, 201 bp, Homo sapiens; identical to SEQ ID NO: 59805

SEQ ID NO: 59815 - DNA, 201 bp, Homo sapiens; identical to SEQ ID NO: 59806

SEQ ID NO: 59816 - DNA, 201 bp, Homo sapiens; identical to SEQ ID NO: 59807

SEQ ID NO: 59817 - DNA, 201 bp, Homo sapiens; identical to SEQ ID NO: 59808

SEQ ID NO: 59818 - DNA, 201 bp, Homo sapiens; identical to SEQ ID NO: 59809

SEQ ID NO: 59819 - DNA, 155 bp, Homo sapiens
aaatagaagacttgttttcttcacttaaacatatccaacatactttggtagattmtcagagccaggaggatatttcactgcttttacaacttgttcaaaataaggatttccagaatgcatttaagatacacaatgccatcacagtacacatgaac

SEQ ID NO: 59820 - DNA, 201 bp, Homo sapiens; identical to SEQ ID NO: 59811

SEQ ID NO: 59821 - DNA, 201 bp, Homo sapiens
ggagctgggtaacaagccacctacacccccgctgcaccagttttcatcctgggagagccggatctatgctgtggccacatcgggcatgcggctctcagatrtgtctcccagaagtaatactgcatgctgcgcttcaagccctcctgcccttgtttcccctgggtctttctctggcctggtctacaagaatgtcactgtgcc

SEQ ID NO: 59822 - DNA, 201 bp, Homo sapiens
gatagtggcagggaggtttcctatcaacaaggaattggctcttgagatggctgccctgatggcccaggtagaatatggggacttggagaagcctgccctgycaggccctggaggcacatcccctgccaaggctcagcatcttctccagcaggtcctagacaggttccaccccaggcgctatagacatggggcccccgctga

SEQ ID NO: 59823 - DNA, 201 bp, Homo sapiens
tccggttccgcctacaggccagcaagataagggagctgctggctgacaagatgcaggagctggagcagaggctgctggaggcagagcagagagcagagaaygctgagacccaggtgggtgtcatggaagagaaggtaaaactatccaatctgaagaatgtggactctgaggggagcctgcaccggaaataccaagaattgc

SEQ ID NO: 59824 - DNA, 201 bp, Homo sapiens
ccttggagctgagctggaggaagtggagctgggtaacaagccacctacacccccgctgcaccagttttcatcctgggagagccggatctatgctgtggccrcatcgggcatgcggctctcagatatgtctcccagaagtaatactgcatgctgcgcttcaagccctcctgcccttgtttcccctgggtctttctctggcct

SEQ ID NO: 59825 - DNA, 201 bp, Homo sapiens
acagacataacagctctggttttataatatcttgggtatctctaaggccaataaggataacattatctacccagagagtttagaagaaaagtaggagtccraaggaagagtaaacaagaatggagctgtgttcacactgaatttggggtcaatctatttcccccaccctctctcctccccaacccttcaggaaccctttag

SEQ ID NO: 59826 - DNA, 201 bp, Homo sapiens
acatgccctttatggacgagtcctctgggtctgacgatgactgcagctctcaggcgagtttccgaatctcggtcccctcctctgagtccaggaagaccagyggactaggcagcccccgggccatcaagagaggcgtctccatgtcctcactgagctccgagggtgactacgccatccccccggacgcctgctcactggaca

SEQ ID NO: 59827 - DNA, 201 bp, Homo sapiens
gtgcctgtctacacagcactgaaggggagagctacacagatcagcaacatgccctttatggacgagtcctctgggtctgacgatgactgcagctctcaggsgagtttccgaatctcggtcccctcctctgagtccaggaagaccagcggactaggcagcccccgggccatcaagagaggcgtctccatgtcctcactgagc

SEQ ID NO: 59828 - DNA, 201 bp, Homo sapiens
catctctgagaagaaaacctactacctgacggccgattcacccagcctgctggaggagtggatccgagtactccagagcctgctgaaggtgcaggccaccrggcctccagctctgcttcggggtggcaccaagcccaccgtgaagggctggctgaccaaggtaaagcatggccactccaaggtggtctggtgcgctcttgt

SEQ ID NO: 59829 - DNA, 201 bp, Homo sapiens
cagagagcagagaacgctgagacccaggtgggtgtcatggaagagaaggtaaaactatccaatctgaagaatgtggactctgaggggagcctgcaccggarataccaagaattgctgaaagccataaagggcaaagatgagctcatcagccagctagaggctcagctggagaagctgaagcagatgagggcagaggaagca

SEQ ID NO: 59830 - DNA, 201 bp, Homo sapiens
cctacctcctcattggcaccaagcatgaaaaggatacgtggctctaccacctcacagtggctgcaggtggcagcagtgccaaggtgggcactgcctatgarcagctcattggaaaactgatggatggtgaaggagatccagattcgccgctctggaggcaccccatgctgtgctacagcaaagacggcctatacgcctccc

SEQ ID NO: 59831 - DNA, 104 bp, Homo sapiens
aaaaaatgctgagtaacagaaaagtattaatgtgcttgacaccatgactgaaatactatgatcttgtttgtcaataaaaagcagctatctgtgaaccaggwaac

SEQ ID NO: 59832 - DNA, 201 bp, Homo sapiens
tttgttaacatgagagtcccatgtctgaaaaccaaagtccaatttctgtctggccttttgtctcatccttcttggcaaaagtagcttttgaactgatatawaaaaaaatgctgagtaacagaaaagtattaatgtgcttgacaccatgactgaaatactatgatcttgtttgtcaataaaaagcagctatctgtgaaccag

SEQ ID NO: 59833 - DNA, 201 bp, Homo sapiens
gactctgaggggagcctgcaccggaaataccaagaattgctgaaagccataaagggcaaagatgagctcatcagccagctagaggctcagctggagaagcwgaagcagatgagggcagaggaagcaaaaactgttcaagaaaaagctgcaaagatcaaggaatgggtgacactcaagttggcaaagcttgagatggagaat

SEQ ID NO: 59834 - DNA, 201 bp, Homo sapiens
acttcatgcttgtgattagatctatcccagacaagagctctggaaaaagccacattgagaagttgatcttccggatggctgctcccaagattgcagaagcyaccttcatcatggccagctatatgaaccattgcactacaactgtgaacccccccaccaacccacccggagcctgccagctgtgggaactggatggacgac

SEQ ID NO: 59835 - DNA, 201 bp, Homo sapiens
gctcagagagggatgctccctgggacaaagacctctgccagggaaggtggtcctggcagcagtctgaccctaccaaaggtgcgggctcctggcaccccgcrggacagcatccagttggccaaaaggcaccacagccagccccaggtgggccatgggcactttggccgtgtggtgaacattgagactgaggccttctcagcc

SEQ ID NO: 59836 - DNA, 201 bp, Homo sapiens
gccatgcagatcccagaagtgaaactggccagtatgccacctactgccagcgggcagtggagcggaccctgcggaccggggagcgggaagccaggccatcrcgcatggaagtggtgtccatcctgctgcgtaaccccttccaccactccttgcccttcagcatccccgtgcactttaccaacgggacttaccatgtggttg

SEQ ID NO: 59837 - DNA, 201 bp, Homo sapiens
tccaaggtggtctggtgcgctcttgttgggaaaatcttctactactatcggagccatgaggacaagcgacccctgggctgcctgcctgtgcgggatgcgcrcatagaggaagtagatcgatcctgtgactcagacgaggactatgaggctggaggaaccagacggttgctttcctcccactgcaccctggtgatccacccc

SEQ ID NO: 59838 - DNA, 201 bp, Homo sapiens
atcttatacagaagaaactaacttagaaacaaaggattcaatatttgcttatttattctttgttaacatgagagtcccatgtctgaaaaccaaagtccaawttctgtctggccttttgtctcatccttcttggcaaaagtagcttttgaactgatataaaaaaaaatgctgagtaacagaaaagtattaatgtgcttgaca

SEQ ID NO: 59839 - DNA, 201 bp, Homo sapiens
caaaggtgcgggctcctggcaccccgcgggacagcatccagttggccaaaaggcaccacagccagccccaggtgggccatgggcactttggccgtgtggtraacattgagactgaggccttctcagccctccacccctctggccttcctgagctggagtcccgagctaggtcccgggaggaaccagagaagatggagatgg

SEQ ID NO: 59840 - DNA, 201 bp, Homo sapiens
aagatgcaggagctggagcagaggctgctggaggcagagcagagagcagagaacgctgagacccaggtgggtgtcatggaagagaaggtaaaactatccartctgaagaatgtggactctgaggggagcctgcaccggaaataccaagaattgctgaaagccataaagggcaaagatgagctcatcagccagctagaggct

SEQ ID NO: 59841 - DNA, 201 bp, Homo sapiens
aaaactgcgaggccagaactagtttatctgaacacctcagctgctgtaagcttctcctctctcaccccgtaaactgacaagcatgatgaaaaaagaagcasatccaagtttctgcctcttttaaatgtacttgactttgcaaggcaagtagttttacagccatttctgttcacacttttcaccccacaacttggggatcta

SEQ ID NO: 59842 - DNA, 201 bp, Homo sapiens
ggaacagggagagcagcagccatgtcagctacacgctcaaatgtgcagatgattatggaaaataacctcaaaatcttacaaagctgaacatccaaggagtyattgaaaactatcttaaatgttcttggtaggggagttggcattgttgataaagccagtcccttcatttaactgtctttcaggatgttccttcgttgtttc

SEQ ID NO: 59843 - DNA, 201 bp, Homo sapiens
attgtccttgtacaaaatgctcatatttaattatgaactgctttaaatcactatcaaagttacaagaaatgtttggcttattgtgtgatgcaacagatatrtagccctttcaagtcatgttgtgtttggacttggggttggaacagggagagcagcagccatgtcagctacacgctcaaatgtgcagatgattatggaaaa

SEQ ID NO: 59844 - DNA, 154 bp, Homo sapiens
ggcgctagggacgggagcgcgcgcgggagctagagagcagtggtctcggcgctsgtccggcccgcagcttcgggtcctcaggcggctgttgctccggaacgggtggttggggaggggggggtggggggactctagacagctgaggcgcgaaagc

SEQ ID NO: 59845 - DNA, 201 bp, Homo sapiens
ttactaattgataagcagcagcttcctacatatagtaggaaactgccacatttttgctatcatgattggctgggcctgctgctgttcctagtaagatattytgaattccattttatcaataaagcttgatttaacaaacaagaaacttaatcatgtatgtgtaattcctcttttaccctggccttttaaaacactgtgccg

SEQ ID NO: 59846 - DNA, 113 bp, Homo sapiens
ggaacagggagagcagcagccatgtcagctacacgctcaaatgtgcagatgattatggaaaataacctcaaaatcttacaaagctgaacatccaaggagtyattgaaaactat

SEQ ID NO: 59847 - DNA, 201 bp, Homo sapiens
tacaacagctagcccagaactgatttttttttttttttttgtttaaatcactatcaaagttacaagaaatgtttggcttattgtgtgatgcaacagatatrtagccctttcaagtcatgttgtgtttggacttggggttggaacagggagagcagcagccatgtcagctacacgctcaaatgtgcagatgattatggaaaa

SEQ ID NO: 59848 - DNA, 154 bp, Homo sapiens; identical to SEQ ID NO: 59844

SEQ ID NO: 59849 - DNA, 154 bp, Homo sapiens; identical to SEQ ID NO: 59844

SEQ ID NO: 59850 - DNA, 154 bp, Homo sapiens; identical to SEQ ID NO: 59844

SEQ ID NO: 59851 - DNA, 201 bp, Homo sapiens; identical to SEQ ID NO: 59842

SEQ ID NO: 59852 - DNA, 201 bp, Homo sapiens; identical to SEQ ID NO: 59843

SEQ ID NO: 59853 - DNA, 160 bp, Homo sapiens
ggtggcggcgctagggacgggagcgcgcgcgggagctagagagcagtggtctcggcgctsgtccggcccgcagcttcgggtcctcaggcggctgttgctccggaacgggtggttggggaggggggggtggggggactctagacagctgaggcgcgaaagc

SEQ ID NO: 59854 - DNA, 201 bp, Homo sapiens; identical to SEQ ID NO: 59845

SEQ ID NO: 59855 - DNA, 201 bp, Homo sapiens
tcaggattttgatactctgaagcaggaaactttgattcccatggcaaaccctgttcctgttcagaggagccacctccagggccccattctcaggctgcgcyacatggtgaagcagttggagaatggggagataaacattgaggagctgaagaaaaatctggagtacacagcttctctgctggaagccgtctacatagatga

SEQ ID NO: 59856 - DNA, 201 bp, Homo sapiens
tcaagggtgcctggggagggtgagtaatcctgcattgctaaaagagagggtctgtcccctcctctccacgtcccagaactggcccagctgcaggcactaaraagctcctcccctgagacaagtgaggggtagtcggtgaaaggcagatggacaaggggctcagggctgctgccttcctgtcctctggagagaacccagcca

SEQ ID NO: 59857 - DNA, 201 bp, Homo sapiens
gcaccttcagaatgtatcgacaccagctgggttagggtcaagggtgcctggggagggtgagtaatcctgcattgctaaaagagagggtctgtcccctcctytccacgtcccagaactggcccagctgcaggcactaagaagctcctcccctgagacaagtgaggggtagtcggtgaaaggcagatggacaaggggctcagg

SEQ ID NO: 59858 - DNA, 201 bp, Homo sapiens
gctttcagtggcgccagccctctctggatgtggaagtgggagaccccaaccctgatgtggtcagctttcgttccacctgggtcaagcgcattcaggagaayaagcagaaatggaaggaacgggcagcaagtggcatcaccaaccagatgtccattgacgagctgtccccctgtgaagaagaggcccccccatcccctgccg

SEQ ID NO: 59859 - DNA, 132 bp, Homo sapiens
tcctagacctgctaccctggtacttccaccctaccccaccccgagaagggcagagacgcatgtgactcacccctgcccttggtttcccagacccctgctayagccagagaacaataaagaagggagaccagg

SEQ ID NO: 59860 - DNA, 201 bp, Homo sapiens
acctccagggccccattctcaggctgcgctacatggtgaagcagttggagaatggggagataaacattgaggagctgaagaaaaatctggagtacacagcwtctctgctggaagccgtctacatagatgagacacggcaaatcttggacacggaggacgagctgcaggagctgcggtcagatgccgtgccttcggaggtgc

SEQ ID NO: 59861 - DNA, 201 bp, Homo sapiens
gtgccccttcctctcctcaggctcctccttgcccccaccttgccccaggaaaggccaaagtccaggtgactgccctccttctttcttgtaaataccaaccrtgcatttgtacagtgggccctgttcatgcgaaatccacatccatggtctcctagacctgctaccctggtacttccaccctaccccaccccgagaagggca

SEQ ID NO: 59862 - DNA, 201 bp, Homo sapiens
gaatggggtggagaggacatcctcttcaccccagaattgcgctgcttcagccccatctccagcctgatcctctgaatcttccttccctccctttctgatayagtgactggggcttgtcgcctgccctgagtccggagccctttgcctccttcctctcccctggggctgggaggctccatccgaccaatgtctgtaaagtgc

SEQ ID NO: 59863 - DNA, 201 bp, Homo sapiens
gaataggatagaaagctgggggttttcagagccctatgtgtggggaggggagtggattccttcagggcatggtacctttctaggacctgggaatggggtggagaggacatcctcttcaccccagaattgcgctgcttcagccccatctccagcctgatcctctgaatcttccttccctccctttctgatatagtgactggg

SEQ ID NO: 59864 - DNA, 201 bp, Homo sapiens
tcctccggagatgctggaggagtcggattgcccgtcacccctggagctgaagtcagcccccagcaagaagatgtggattaagcttcggtctctgctgcgcyacatggtgaagcagttggagaatggggagataaacattgaggagctgaagaaaaatctggagtacacagcttctctgctggaagccgtctacatagatga

SEQ ID NO: 59865 - DNA, 201 bp, Homo sapiens; identical to SEQ ID NO: 59856

SEQ ID NO: 59866 - DNA, 201 bp, Homo sapiens; identical to SEQ ID NO: 59857

SEQ ID NO: 59867 - DNA, 201 bp, Homo sapiens; identical to SEQ ID NO: 59858

SEQ ID NO: 59868 - DNA, 201 bp, Homo sapiens
tgtggattaagcttcggtctctgctgcgctacatggtgaagcagttggagaatggggagataaacattgaggagctgaagaaaaatctggagtacacagcwtctctgctggaagccgtctacatagatgagacacggcaaatcttggacacggaggacgagctgcaggagctgcggtcagatgccgtgccttcggaggtgc

SEQ ID NO: 59869 - DNA, 124 bp, Homo sapiens
gtgccccttcctctcctcaggctcctccttgcccccaccttgccccaggaaaggccaaagtccaggtgactgccctccttctttcttgtaaataccaaccrtgcatttgtacagtgggccctgt

SEQ ID NO: 59870 - DNA, 201 bp, Homo sapiens
gaatggggtggagaggacatcctcttcaccccagaattgcgctgcttcagccccatctccagcctgatcctctgaatcttccttccctccctttctgatayagtgactggggcaaaaggagccattgtgaccaggggctgcgggaggcctttcctgggaccttccttgggactggtctgggcccctggggcttgtcgcctg

SEQ ID NO: 59871 - DNA, 201 bp, Homo sapiens; identical to SEQ ID NO: 59863

SEQ ID NO: 59872 - DNA, 201 bp, Homo sapiens; identical to SEQ ID NO: 59864

SEQ ID NO: 59873 - DNA, 201 bp, Homo sapiens; identical to SEQ ID NO: 59856

SEQ ID NO: 59874 - DNA, 201 bp, Homo sapiens; identical to SEQ ID NO: 59857

SEQ ID NO: 59875 - DNA, 201 bp, Homo sapiens; identical to SEQ ID NO: 59858

SEQ ID NO: 59876 - DNA, 132 bp, Homo sapiens; identical to SEQ ID NO: 59859

SEQ ID NO: 59877 - DNA, 201 bp, Homo sapiens; identical to SEQ ID NO: 59868

SEQ ID NO: 59878 - DNA, 201 bp, Homo sapiens; identical to SEQ ID NO: 59861

SEQ ID NO: 59879 - DNA, 201 bp, Homo sapiens; identical to SEQ ID NO: 59862

SEQ ID NO: 59880 - DNA, 201 bp, Homo sapiens; identical to SEQ ID NO: 59863

SEQ ID NO: 59881 - DNA, 201 bp, Homo sapiens; identical to SEQ ID NO: 59864

SEQ ID NO: 59882 - DNA, 201 bp, Homo sapiens; identical to SEQ ID NO: 59856

SEQ ID NO: 59883 - DNA, 201 bp, Homo sapiens; identical to SEQ ID NO: 59857

SEQ ID NO: 59884 - DNA, 201 bp, Homo sapiens; identical to SEQ ID NO: 59858

SEQ ID NO: 59885 - DNA, 132 bp, Homo sapiens; identical to SEQ ID NO: 59859

SEQ ID NO: 59886 - DNA, 201 bp, Homo sapiens; identical to SEQ ID NO: 59868

SEQ ID NO: 59887 - DNA, 201 bp, Homo sapiens; identical to SEQ ID NO: 59861

SEQ ID NO: 59888 - DNA, 201 bp, Homo sapiens; identical to SEQ ID NO: 59862

SEQ ID NO: 59889 - DNA, 201 bp, Homo sapiens; identical to SEQ ID NO: 59863

SEQ ID NO: 59890 - DNA, 201 bp, Homo sapiens; identical to SEQ ID NO: 59864

SEQ ID NO: 59891 - DNA, 201 bp, Homo sapiens; identical to SEQ ID NO: 59856

SEQ ID NO: 59892 - DNA, 201 bp, Homo sapiens; identical to SEQ ID NO: 59857

SEQ ID NO: 59893 - DNA, 201 bp, Homo sapiens; identical to SEQ ID NO: 59858

SEQ ID NO: 59894 - DNA, 201 bp, Homo sapiens; identical to SEQ ID NO: 59868

SEQ ID NO: 59895 - DNA, 124 bp, Homo sapiens; identical to SEQ ID NO: 59869

SEQ ID NO: 59896 - DNA, 201 bp, Homo sapiens; identical to SEQ ID NO: 59870

SEQ ID NO: 59897 - DNA, 201 bp, Homo sapiens; identical to SEQ ID NO: 59863

SEQ ID NO: 59898 - DNA, 106 bp, Homo sapiens
tctctgcctaatttttagtgtttaataacaaccgaatgtctagtaaatgactctcctctgagctgtaataaataaaatggtagtaatgaatgcaatcagtrttagc

SEQ ID NO: 59899 - DNA, 201 bp, Homo sapiens
agaacctcaaggagagaaccctgattgacatgtacgtggaggggacactggatctgctggaactgcttatcatgcatcctttcttaaaaccagatgatcarcaaaaggaagtggttaacatggcccagaaggctataattagatactttcctgtgtttgaaaagattttaaggggtcacggacaaagctttcttgttggta

SEQ ID NO: 59900 - DNA, 164 bp, Homo sapiens
ctctcctgagcgtctttctgctctccttatcctgttctcttatccttatcccctccagtctctgcctaatttttagtgtttaataacaaccgaatgtctartaaatgactctcctctgagctgtaataaataaaatggtagtaatgaatgcaatcagtattagc

SEQ ID NO: 59901 - DNA, 136 bp, Homo sapiens
tctctgcctaatttttagtgtttaataacaaccgaatgtctagtaaatgactctcctctgagctgtaataaataaaatggtagtaatgaatgcaatcagtrttagccaaaataaagaatttatgagtcattgctca

SEQ ID NO: 59902 - DNA, 201 bp, Homo sapiens
tttagctgccgccggagtcgaggattgacatgtacgtggaggggacactggatctgctggaactgcttatcatgcatcctttcttaaaaccagatgatcarcaaaaggaagtggttaacatggcccagaaggctataattagatactttcctgtgtttgaaaagattttaaggggtcacggacaaagctttcttgttggta

SEQ ID NO: 59903 - DNA, 201 bp, Homo sapiens
agagatggtattgtctacagtcatgtcttaatggatcccagctctgtcatggtgctatctatgtattaagttgggtcctaagttgggtcttttgtgtcaamgagatcatctcttctagaaatatcaaccttttttgtccagtaaataattgttaggggatctttattggaaaacttttttggagaggctggtatttaagtt

SEQ ID NO: 59904 - DNA, 194 bp, Homo sapiens
ctctcctgagcgtctttctgctctccttatcctgttctcttatccttatcccctccagtctctgcctaatttttagtgtttaataacaaccgaatgtctartaaatgactctcctctgagctgtaataaataaaatggtagtaatgaatgcaatcagtattagccaaaataaagaatttatgagtcattgctca

SEQ ID NO: 59905 - DNA, 136 bp, Homo sapiens; identical to SEQ ID NO: 59901

SEQ ID NO: 59906 - DNA, 201 bp, Homo sapiens; identical to SEQ ID NO: 59899

SEQ ID NO: 59907 - DNA, 201 bp, Homo sapiens; identical to SEQ ID NO: 59903

SEQ ID NO: 59908 - DNA, 194 bp, Homo sapiens; identical to SEQ ID NO: 59904

SEQ ID NO: 59909 - DNA, 136 bp, Homo sapiens; identical to SEQ ID NO: 59901

SEQ ID NO: 59910 - DNA, 201 bp, Homo sapiens
cagttgtacaagttgcaggatggattgacatgtacgtggaggggacactggatctgctggaactgcttatcatgcatcctttcttaaaaccagatgatcarcaaaaggaagtggttaacatggcccagaaggctataattagatactttcctgtgtttgaaaagattttaaggggtcacggacaaagctttcttgttggta

SEQ ID NO: 59911 - DNA, 201 bp, Homo sapiens; identical to SEQ ID NO: 59903

SEQ ID NO: 59912 - DNA, 194 bp, Homo sapiens; identical to SEQ ID NO: 59904

SEQ ID NO: 59913 - DNA, 136 bp, Homo sapiens; identical to SEQ ID NO: 59901

SEQ ID NO: 59914 - DNA, 201 bp, Homo sapiens
tgaaattgacgggatgaagttggattgacatgtacgtggaggggacactggatctgctggaactgcttatcatgcatcctttcttaaaaccagatgatcarcaaaaggaagtggttaacatggcccagaaggctataattagatactttcctgtgtttgaaaagattttaaggggtcacggacaaagctttcttgttggta

SEQ ID NO: 59915 - DNA, 201 bp, Homo sapiens; identical to SEQ ID NO: 59903

SEQ ID NO: 59916 - DNA, 194 bp, Homo sapiens; identical to SEQ ID NO: 59904

SEQ ID NO: 59917 - DNA, 201 bp, Homo sapiens
tcaagtggggcgatgaggtggaatacatgttggtatcttttgatcatgaaaataaaaaagtccggttggtcctgtctggggagaaagttcttgaaactctkcaagagaagggggaaaggacaaacccaaaccatcctaccctttggagaccagagtatgggagttacatgattgaagggacaccaggacagccctacggag

SEQ ID NO: 59918 - DNA, 201 bp, Homo sapiens
gtgcggcggcacgggatcctccagttcctgcacatctaccacgccgtcaaggaccggcacaaggacgttctcaagtggggcgatgaggtggaatacatgtyggtatcttttgatcatgaaaataaaaaagtccggttggtcctgtctggggagaaagttcttgaaactctgcaagagaagggggaaaggacaaacccaaac

SEQ ID NO: 59919 - DNA, 201 bp, Homo sapiens
tgctgatgcaggaattaagtttaaacacaactctatagaaagaaaggagattattacccagaattcacatgtagtgattattaaggacaatttttttttttaactaaaaaagttggcggcaggggtggggggtggcaatcatttttcttcctatacatacaaaggatattgtcaaaaatggcgttcttctcttgtggcctg

SEQ ID NO: 59920 - DNA, 201 bp, Homo sapiens
catggaggtgcaattaacagactttgagaactctgcctatgtggtgtttgtggtactgctcaccagagtgatcctttcctacaaattggattttctcattycactgtcaaaggttgatgagaacatgaaggtagcacagaaaagagatgctgtcttgcagggaatgttttatttcaggaaagatatttgcaaaggtggcaa

SEQ ID NO: 59921 - DNA, 201 bp, Homo sapiens
aagtttaaacacaactctatagaaagaaaggagattattacccagaattcacatgtagtgattattaaggacaatttttttttttaactaaaaaagttggyggcaggggtggggggtggcaatcatttttcttcctatacatacaaaggatattgtcaaaaatggcgttcttctcttgtggcctgttattctgattgctgc

SEQ ID NO: 59922 - DNA, 201 bp, Homo sapiens
aagatatttgcaaaggtggcaatgcagtggtggatggttgtggcaaggcccagaacagcacggagctcgctgcagaggagtacaccctcatgagcatagayaccatcatcaatgggaaggaaggtgtgtttcctggactgatcccaattctgaactcttaccttgaaaacatggaagtggatgtggacaccagatgtagta

SEQ ID NO: 59923 - DNA, 201 bp, Homo sapiens
aaagagatgctgtcttgcagggaatgttttatttcaggaaagatatttgcaaaggtggcaatgcagtggtggatggttgtggcaaggcccagaacagcacrgagctcgctgcagaggagtacaccctcatgagcatagacaccatcatcaatgggaaggaaggtgtgtttcctggactgatcccaattctgaactcttacc

SEQ ID NO: 59924 - DNA, 201 bp, Homo sapiens
caataacttcatttcccagattaggctgtcctgggttcacactgcccgaggtcaaacccaacccagtggaaggaggagcttccaagtccctcttctttccrgatgaagcaataaacaagcaccctcgcttcagtaccttaacaagaaatatccgacataggagaggagaaaaggttgtcatcaatgtaccaatatttaagg

SEQ ID NO: 59925 - DNA, 201 bp, Homo sapiens
acactgtttgaagagaaaatacacctggatgatgctaatgagtctgaccattttgagaatattcagtccacaaattggcagacaatgagatttaagccccytcctccaaactcagacattggatggagagtagaatttcgacccatggaggtgcaattaacagactttgagaactctgcctatgtggtgtttgtggtactg

SEQ ID NO: 59926 - DNA, 201 bp, Homo sapiens; identical to SEQ ID NO: 59917

SEQ ID NO: 59927 - DNA, 201 bp, Homo sapiens; identical to SEQ ID NO: 59918

SEQ ID NO: 59928 - DNA, 103 bp, Homo sapiens
tgctgatgcaggaattaagtttaaacacaactctatagaaagaaaggagattattacccagaattcacatgtagtgattattaaggacaatttttttttttaa

SEQ ID NO: 59929 - DNA, 201 bp, Homo sapiens; identical to SEQ ID NO: 59920

SEQ ID NO: 59930 - DNA, 201 bp, Homo sapiens; identical to SEQ ID NO: 59922

SEQ ID NO: 59931 - DNA, 201 bp, Homo sapiens; identical to SEQ ID NO: 59923

SEQ ID NO: 59932 - DNA, 201 bp, Homo sapiens; identical to SEQ ID NO: 59924

SEQ ID NO: 59933 - DNA, 201 bp, Homo sapiens; identical to SEQ ID NO: 59925

SEQ ID NO: 59934 - DNA, 201 bp, Homo sapiens
tgcagaagatttgggaaagttaagaaatgatgggagtttgatgttccagcaagtaccaatggttgagattgatgggatgaagttggtacagaccagagccmttctcaactacattgccagcaaatacaacctctacgggaaagacataaaggagagagccctaattgatatgtatacagaaggtatggcagatttgaatga

SEQ ID NO: 59935 - DNA, 201 bp, Homo sapiens
tggccttgagaagctgagcggagaccggctagactttactcaaagaaaccaagagactgttaccatggcagggaagcccaagcttcactacttcaatggayggggcagaatggagcccatccggtggctcttggctgcagctggagtggagtttgaagagaaatttataggatctgcagaagatttgggaaagttaagaaa

SEQ ID NO: 59936 - DNA, 201 bp, Homo sapiens; identical to SEQ ID NO: 59934

SEQ ID NO: 59937 - DNA, 201 bp, Homo sapiens
ctgttgctgctgcctctacgttcaatggcttccagaggccgacgatctactatgtgatgtcagggcctgcgtggcaactcatgcagcaattccagaacccygacttcccacccgaagtagaggaacaggatgccagcaccctgcctgtgtcttgtgcctgggagagtgggatgaaacgccacagagcagcctgtgcttcgg

SEQ ID NO: 59938 - DNA, 201 bp, Homo sapiens
tgggcgctctgagattgtcactgctgttccaagggcacacgcagagggatttggaattcctggagagttgcctttgtgagaagctggaaatatttctttcrattccatctcttagttttccataggaacatcaagaaatcatgaacaactttggtaatgaagagtttgactgccacttcctcgatgaaggttttactgcca

SEQ ID NO: 59939 - DNA, 201 bp, Homo sapiens
gcacacgcagagggatttggaattcctggagagttgcctttgtgagaagctggaaatatttctttcaattccatctcttagttttccataggaacatcaaraaatcatgaacaactttggtaatgaagagtttgactgccacttcctcgatgaaggttttactgccaaggacattctggaccagaaaattaatgaagtttc

SEQ ID NO: 59940 - DNA, 201 bp, Homo sapiens
gcggcgcctgggcgctctgagattgtcactgctgttccaagggcacacgcagagggatttggaattcctggagagttgcctttgtgagaagctggaaatakttctttcaattccatctcttagttttccataggaacatcaagaaatcatgaacaactttggtaatgaagagtttgactgccacttcctcgatgaaggttt

SEQ ID NO: 59941 - DNA, 201 bp, Homo sapiens
tgcaaaagagacctaaaccagatgagaagtattattcatccagcatatggggaccaacatgtgatggcctcgatcggattgttgagcgctgtgacctgccygaaatgcatgtgggtgattggatgctctttgaaaacatgggcgcttacactgttgctgctgcctctacgttcaatggcttccagaggccgacgatctact

SEQ ID NO: 59942 - DNA, 201 bp, Homo sapiens
gcacatcccaaagcaaagttggttttgcggattgccactgatgattccaaagcagtctgtcgtctcagtgtgaaattcggtgccacgctcagaaccagcargctccttttggaacgggcgaaagagctaaatatcgatgttgttggtgtcagcttccatgtaggaagcggctgtaccgatcctgagaccttcgtgcaggca

SEQ ID NO: 59943 - DNA, 201 bp, Homo sapiens
atatttgttttatatggatttttattcactcttcagacacgctactcaagagtgcccctcagctgctgaacaagcatttgtagcttgtacaatggcagaaygggccaaaagcttagtgttgtgacctgtttttaaaataaagtatcttgaaataattaggcattgggacgtttttatggtgtgttcattccagacagttca

SEQ ID NO: 59944 - DNA, 201 bp, Homo sapiens
tggcggtggctttcctggatctgaggatgtgaaacttaaatttgaagagatcaccggcgtaatcaacccagcgttggacaaatactttccgtcagactctrgagtgagaatcatagctgagcccggcagatactatgttgcatcagctttcacgcttgcagttaatatcattgccaagaaaattgtattaaaggaacagac

SEQ ID NO: 59945 - DNA, 201 bp, Homo sapiens
ccggcgtaatcaacccagcgttggacaaatactttccgtcagactctggagtgagaatcatagctgagcccggcagatactatgttgcatcagctttcacrcttgcagttaatatcattgccaagaaaattgtattaaaggaacagacgggctctgatgacgaagatgagtcgagtgagcagacctttatgtattatgtga

SEQ ID NO: 59946 - DNA, 201 bp, Homo sapiens
gggcgctctgagattgtcactgctgttccaagggcacacgcagagggatttggaattcctggagagttgcctttgtgagaagctggaaatatttctttcarttccatctcttagttttccataggaacatcaagaaatcatgaacaactttggtaatgaagagtttgactgccacttcctcgatgaaggttttactgccaa

SEQ ID NO: 59947 - DNA, 201 bp, Homo sapiens; identical to SEQ ID NO: 59937

SEQ ID NO: 59948 - DNA, 161 bp, Homo sapiens
ggccggggagccgttggggaggccctggcggccgcgcagcaggtgcaggggcgcagagccygggctcgccttggtacagacgagcgggccccggccttggcgccttcagtttccttccagtttttattttcgctgtgtctacagagcagatgacaccaatt

SEQ ID NO: 59949 - DNA, 201 bp, Homo sapiens
gaaacccgcgagaattgtcactgctgttccaagggcacacgcagagggatttggaattcctggagagttgcctttgtgagaagctggaaatatttctttcrattccatctcttagttttccataggaacatcaagaaatcatgaacaactttggtaatgaagagtttgactgccacttcctcgatgaaggttttactgcca

SEQ ID NO: 59950 - DNA, 201 bp, Homo sapiens; identical to SEQ ID NO: 59939

SEQ ID NO: 59951 - DNA, 201 bp, Homo sapiens
ccaatttggaaacccgcgagaattgtcactgctgttccaagggcacacgcagagggatttggaattcctggagagttgcctttgtgagaagctggaaatakttctttcaattccatctcttagttttccataggaacatcaagaaatcatgaacaactttggtaatgaagagtttgactgccacttcctcgatgaaggttt

SEQ ID NO: 59952 - DNA, 201 bp, Homo sapiens; identical to SEQ ID NO: 59941

SEQ ID NO: 59953 - DNA, 201 bp, Homo sapiens; identical to SEQ ID NO: 59942

SEQ ID NO: 59954 - DNA, 201 bp, Homo sapiens; identical to SEQ ID NO: 59943

SEQ ID NO: 59955 - DNA, 201 bp, Homo sapiens; identical to SEQ ID NO: 59944

SEQ ID NO: 59956 - DNA, 201 bp, Homo sapiens; identical to SEQ ID NO: 59945

SEQ ID NO: 59957 - DNA, 201 bp, Homo sapiens
aaacccgcgagaattgtcactgctgttccaagggcacacgcagagggatttggaattcctggagagttgcctttgtgagaagctggaaatatttctttcarttccatctcttagttttccataggaacatcaagaaatcatgaacaactttggtaatgaagagtttgactgccacttcctcgatgaaggttttactgccaa

SEQ ID NO: 59958 - DNA, 201 bp, Homo sapiens
taggccaaagtccggaaggatgctcctcttacacttttccgaagataatgagcccagccaaggcaacagagatgcttatttttggaaagaagttaacagcrggagaggcatgtgctcaaggacttgttactgaagttttccctgatagcacttttcagaaagaagtctggaccaggctgaaggcatttgcaaagcttcccc

SEQ ID NO: 59959 - DNA, 201 bp, Homo sapiens
aggcatgtgctcaaggacttgttactgaagttttccctgatagcacttttcagaaagaagtctggaccaggctgaaggcatttgcaaagcttcccccaaaygtcttgagaatttcaaaagaggtaatcaggaaaagagagagagaaaaactacacgctgttaatgctgaagaatgcaatgtccttcagggaagatggctat

SEQ ID NO: 59960 - DNA, 201 bp, Homo sapiens
gaagataatgagcccagccaaggcaacagagatgcttatttttggaaagaagttaacagcgggagaggcatgtgctcaaggacttgttactgaagttttcyctgatagcacttttcagaaagaagtctggaccaggctgaaggcatttgcaaagcttcccccaaatgtcttgagaatttcaaaagaggtaatcaggaaaag

SEQ ID NO: 59961 - DNA, 201 bp, Homo sapiens
cgtgtccgagttctctgcaggtcactagtttcccggtagttcagctgcacatgaatagaacagcaatgagagccagtcagaaggactttgaaaattcaatraatcaagtgaaactcttgaaaaaggatccaggaaacgaagtgaagctaaaactctacgcgctatataagcaggccactgaaggaccttgtaacatgccca

SEQ ID NO: 59962 - DNA, 201 bp, Homo sapiens
atgctgtggtgaacttcttatccagaaaatcaaaactgtgatgaccactacagcagagtaaagcatgtccaaggaaggatgtgctgttacctctgatttcyagtactggaactaaataagcttcattgtgccttttgtagtgctagaatatcaattacaatgatgatatttcactacagctctgatgaataaaaagttttg

SEQ ID NO: 59963 - DNA, 201 bp, Homo sapiens
gcatgtgctcaaggacttgttactgaagttttccctgatagcacttttcagaaagaagtctggaccaggctgaaggcatttgcaaagcttcccccaaatgycttgagaatttcaaaagaggtaatcaggaaaagagagagagaaaaactacacgctgttaatgctgaagaatgcaatgtccttcagggaagatggctatca

SEQ ID NO: 59964 - DNA, 167 bp, Homo sapiens
tgcctgagctcagctgctccaaagacatccggtatctcaaggactccctggcaccggggaaaacagaggaggcgctgaagcacttccgagtgaagtttaamgaagcacttccgactggaaaccgagtgaactggctggcccacaacgtgtccgaagataaccggcag

SEQ ID NO: 59965 - DNA, 201 bp, Homo sapiens
cctgggagcgcccgagccgcccggctgcccggagccccatcgcctaggaccgggagatgctggaaatgcaaccgcctgttccccgaggagccgctgccccsgggaccccctggcactgtgcgcaccctggtcagcagcccccggagaagacggcgcccccaacgcccgacccgcgtggccgtggcagcgccacgcgagccc

SEQ ID NO: 59966 - DNA, 201 bp, Homo sapiens
cgttgggcaggacttcaggtgggaataagcccacgaaaggaaagggctctcaagggctcttctgctcatctcttccgtgagatttgctcccagaccctctkatctccctccaacaaaccctggctccagccccctttcccaacttgagttgcatcatcttggaaccaggaagcccagctaaagccaagagaccagagagtc

SEQ ID NO: 59967 - DNA, 201 bp, Homo sapiens
cagtaaattccagaatcattctcctttctgcccataaagggccttggagaattgctttaagaagagtgaatgttccaatgatgatagatattataagcgaygatggttctgttgctatgaacacagcagtcggtccctgtcattgtccacccaggagtggccttgttaattccaagtggcatgtatcttccctctgagctt

SEQ ID NO: 59968 - DNA, 201 bp, Homo sapiens
ccatctctgattacacgcagacactctccaagaagcccgacatcccgacctttgagggcctctccttccgcaaccgcaccctgggcctggtggacgtgtcrtggaacgccatccgcatcggcatgtacgtgctgcacctggagagctggctgcagtacttcccgctagctcagattcacttcgtcagtggcgagcgactca

SEQ ID NO: 59969 - DNA, 201 bp, Homo sapiens
gcctctccggttccaaccactccggctcacccaagctgggtaccaagcggttgccccaagccctcattgtgggcgtgaagaaggggggcacccgggccgtrctggagtttatccgagtacacccggacgtgcgggccttgggcacggaaccccacttctttgacaggaactacggccgcgggctggattggtacaggagcc

SEQ ID NO: 59970 - DNA, 201 bp, Homo sapiens
actccggctcacccaagctgggtaccaagcggttgccccaagccctcattgtgggcgtgaagaaggggggcacccgggccgtgctggagtttatccgagtrcacccggacgtgcgggccttgggcacggaaccccacttctttgacaggaactacggccgcgggctggattggtacaggagcctgatgcccaggaccctcg

SEQ ID NO: 59971 - DNA, 201 bp, Homo sapiens
tccggaagactgtctactcctgaccaggatccccaaggtcaagtgcctgcgcaatgatcggcgggaagggctgatccggtcccgagtgcgtggggcggacrtggctgcagctaccgttctcacctttctggatagccactgcgaagtgaacaccgagtggctgccgcccatgctgcagcgggtgaaggaggaccacacccg

SEQ ID NO: 59972 - DNA, 201 bp, Homo sapiens
tgatccggtcccgagtgcgtggggcggacgtggctgcagctaccgttctcacctttctggatagccactgcgaagtgaacaccgagtggctgccgcccatkctgcagcgggtgaaggaggaccacacccgcgtggtgagtcccatcattgatgtcatcagtctggataattttgcctaccttgcagcatctgctgaccttc

SEQ ID NO: 59973 - DNA, 201 bp, Homo sapiens
ttcagctcagatccggaagactgtctactcctgaccaggatccccaaggtcaagtgcctgcgcaatgatcggcgggaagggctgatccggtcccgagtgcrtggggcggacgtggctgcagctaccgttctcacctttctggatagccactgcgaagtgaacaccgagtggctgccgcccatgctgcagcgggtgaaggag

SEQ ID NO: 59974 - DNA, 201 bp, Homo sapiens
tgaaggaggaccacacccgcgtggtgagtcccatcattgatgtcatcagtctggataattttgcctaccttgcagcatctgctgaccttcgtggagggttygactggagcctgcatttcaagtgggagcagatccctcttgagcagaagatgacccggacagaccccaccaggcccataaggacgcctgtcatagctggag

SEQ ID NO: 59975 - DNA, 201 bp, Homo sapiens
tgccaagaacccgcagcccgcccaggcatggctgttcagtgaccacctcatccagcagcaggggaagtgcctggctgccacctccaccttaatgtcctccyctggatccccagtcatactgcagatgtgcaaccctagagaaggcaagcaggtgagtctccttgcctctggcccagaggcccagcagcccgaggggccatg

SEQ ID NO: 59976 - DNA, 201 bp, Homo sapiens; identical to SEQ ID NO: 59971

SEQ ID NO: 59977 - DNA, 201 bp, Homo sapiens; identical to SEQ ID NO: 59972

SEQ ID NO: 59978 - DNA, 201 bp, Homo sapiens
agcttaggacagaactgggcccagggcaaaggcctctccccagaggatggactagaaggcctgggccacactcgggcatggacctttggggctggggagcmggggctgcgcctgttgaatgtaagaggactgctgaccagagggccttcaagagggtctctctgtcctttgctgtggtcagatcaggctctgcacttatca

SEQ ID NO: 59979 - DNA, 201 bp, Homo sapiens
caagtgtctgtggtccgcagcacctgctctggagggctctccagcagtttcgcctcctgactctcaccagcgtcctctcggcagcactcccgtgcccaagygcacccctctggacttgccagcgcaggccccttcgctcccagggccatgctttgcctgtcctctgtcgtgatgtttcttccgcagccaggtgcagcctca

SEQ ID NO: 59980 - DNA, 201 bp, Homo sapiens; identical to SEQ ID NO: 59973

SEQ ID NO: 59981 - DNA, 201 bp, Homo sapiens; identical to SEQ ID NO: 59974

SEQ ID NO: 59982 - DNA, 201 bp, Homo sapiens
tgccaagaacccgcagcccgcccaggcatggctgttcagtgaccacctcatccagcagcaggggaagtgcctggctgccacctccaccttaatgtcctccyctggatccccagtcatactgcagatgtgcaaccctagagaaggcaagcagaaatggaggagaaaaggatctttcatccagcattcagtcagtggcctctg

SEQ ID NO: 59983 - DNA, 201 bp, Homo sapiens
tggcggtgcattttatgcatttgttactgctgaaaagttaggactagacatttgttctgcaaagaccagggaccttgtggatgcagcgagtgcagtgacakaggcagtgaaagctcagtttaaaattaatcatcctgatagtgaagaccttgcctttttatatggaactatattaacagatggaaaagatgcttataccaa

SEQ ID NO: 59984 - DNA, 201 bp, Homo sapiens
gttatagtggaagtatcaggacaagcccattacacgggtacagcaagctttataatagaagatgacgacccattgagggatggatttcttctcaagtgacwtcttccatgattttaagggctttctttttaaagtaatcattatccttaaggactgttttctctaaattatatgaaaacaaataaattatacatataaact

SEQ ID NO: 59985 - DNA, 201 bp, Homo sapiens
cgtcctgttcctgcacaacgagggctacagctccatgtgcggccacgcagtgctggcgctgggccgcttcgctttggacttcgggcttgtgccggcgcccyctgcgggcacccgcgaggcccgcgtcaatatccactgcccctgcgggctggtgaccgccttcgtggcatgcgaggacggccgcagccacggaccggtgcg

SEQ ID NO: 59986 - DNA, 201 bp, Homo sapiens
cgagcgagctgccggacgcgcatctgggcgtcctgttcctgcacaacgagggctacagctccatgtgcggccacgcagtgctggcgctgggccgcttcgckttggacttcgggcttgtgccggcgccccctgcgggcacccgcgaggcccgcgtcaatatccactgcccctgcgggctggtgaccgccttcgtggcatgcg

SEQ ID NO: 59987 - DNA, 201 bp, Homo sapiens
agacatttgttctgcaaagaccagggaccttgtggatgcagcgagtgcagtgacagaggcagtgaaagctcagtttaaaattaatcatcctgatagtgaakaccttgcctttttatatggaactatattaacagatggaaaagatgcttataccaaggaaccaaccaccaacatttgtgtttttgcagatgaacaggttga

SEQ ID NO: 59988 - DNA, 201 bp, Homo sapiens
cggctgcccccgcatgatccagggacgccggtgctgtcggtggtggacatgcacacgggcggcgagcccttgcgtatcgtgctggcggggtgtccggaggygtctgggcccaccctgctggccaagcggcgctacatgcgccagcaccttgaccacgtgcggcgacggctcatgttcgagccccgagggcaccgggacatg

SEQ ID NO: 59989 - DNA, 201 bp, Homo sapiens
tggctaaatataaagtcattatacctcgtatttgcaactgtatttgtataaatatcacttatgtctagcatacaaaatgccagaaattcagagtctttttytagtgattaacgtatcaggtaaaattaaaacagtagttacttttaaaatattgctctatagtaattactattaatatcatattttgtattaaaggctctt

SEQ ID NO: 59990 - DNA, 201 bp, Homo sapiens
gccttacagtatcacaaagggcttctggaactgaaccagatgagagccttcaaaagcagtgcaactggctcagtattcacagggaaagctgtgagggaagygaaatgtggtgattttaaagctgttatagtggaagtatcaggacaagcccattacacgggtacagcaagctttataatagaagatgacgacccattgagg

SEQ ID NO: 59991 - DNA, 201 bp, Homo sapiens
atgagagccttcaaaagcagtgcaactggctcagtattcacagggaaagctgtgagggaagcgaaatgtggtgattttaaagctgttatagtggaagtatmaggacaagcccattacacgggtacagcaagctttataatagaagatgacgacccattgagggatggatttcttctcaagtgacttcttccatgattttaa

SEQ ID NO: 59992 - DNA, 201 bp, Homo sapiens
gacgcgcatctgggcgtcctgttcctgcacaacgagggctacagctccatgtgcggccacgcagtgctggcgctgggccgcttcgctttggacttcgggcktgtgccggcgccccctgcgggcacccgcgaggcccgcgtcaatatccactgcccctgcgggctggtgaccgccttcgtggcatgcgaggacggccgcagc

SEQ ID NO: 59993 - DNA, 201 bp, Homo sapiens
cacagggaaagctgtgagggaagcgaaatgtggtgattttaaagctgttatagtggaagtatcaggacaagcccattacacgggtacagcaagctttatartagaagatgacgacccattgagggatggatttcttctcaagtgacttcttccatgattttaagggctttctttttaaagtaatcattatccttaaggact

SEQ ID NO: 59994 - DNA, 124 bp, Homo sapiens
agaccccgccccccggacgtggcwggttagcgtcccgccctcctcccgcggagtcagtgggtgagggtcgggcttgaagccatagctgcgggaccgtactcgtctcccccgacgcagaccatgg

SEQ ID NO: 59995 - DNA, 163 bp, Homo sapiens
agaccccgccccccggacgtggctggttagcgtcccgccctcctcccgcggagtcagtgggtragggtcgggcttgaagccatagctgcgggaccgtactcgtctcccccgacgcagaccatggagagcgcgctggcggtgccccggctgcccccgcatgatc

SEQ ID NO: 59996 - DNA, 201 bp, Homo sapiens
cgacgcagaccatggagagcgcgctggcggtgccccggctgcccccgcatgatccagggacgccggtgctgtcggtggtggacatgcacacgggcggcgarcccttgcgtatcgtgctggcggggtgtccggaggtgtctgggcccaccctgctggccaagcggcgctacatgcgccagcaccttgaccacgtgcggcgac

SEQ ID NO: 59997 - DNA, 201 bp, Homo sapiens
atccgagatggatggcaggtagaagaagcagatgattggctcagatatggaaacccttgggagaagtcccgcccagaattcatgctgcctgtgcacttctrtggaaaagtagaacacaccaacaccgggaccaagtggattgacactcaagtggtcctggctctgccatatgacacccccgtgcccggctacatgaataac

SEQ ID NO: 59998 - DNA, 201 bp, Homo sapiens
gaagggaaggagctaagattgaagcaggaatactttgtggtggctgcaaccttgcaagatatcatccgccgtttcaaagcctccaagtttggctccacccrtggtgcaggaactgtgtttgatgccttcccggatcaggcaagtggccatccagctgaatgacactcaccctgcactcgcgatccctgagctgatgaggat

SEQ ID NO: 59999 - DNA, 201 bp, Homo sapiens
catccgccgtttcaaagcctccaagtttggctccacccgtggtgcaggaactgtgtttgatgccttcccggatcaggcaagtggccatccagctgaatgayactcaccctgcactcgcgatccctgagctgatgaggatttttgtggatattgaaaaactgccctggtccaaggcatgggagctcacccagaagaccttcg

SEQ ID NO: 60000 - DNA, 201 bp, Homo sapiens
tccacccctgcccggcagcccagcgcctccggccgcacttccagctctctgcgcagcccgccgcgcagcccgccgccccagccatggcgaagcccctgacrgaccaggagaagcggcggcagatcagcatccgcggcatcgtgggcgtggagaacgtggcagagctgaagaagagtttcaaccggcacctgcacttcacgc

SEQ ID NO: 60001 - DNA, 201 bp, Homo sapiens
gcaagttgaaagtcatcttcttggagaactacagagtatctcttgctgaaaaagtcattccagccacagatctgtcagagcagatttccactgcaggcacygaagcctcggggacaggcaatatgaagttcatgctaaatggggccctaactatcgggaccatggatggggccaatgtggaaatggcagaagaagctgggg

SEQ ID NO: 60002 - DNA, 201 bp, Homo sapiens
tgaagaagagtttcaaccggcacctgcacttcacgctggtcaaggaccgcaacgtggccaccacccgcgactactacttcgcgctggcgcacacggtgcgsgaccacctggtggggcgctggatccgcacgcagcagcactactacgacaagtgccccaagagggtatattacctctctctggaattttacatgggccgaa

SEQ ID NO: 60003 - DNA, 201 bp, Homo sapiens
taaagtctttgcagactacgaagcctatgtcaagtgtcaagataaagtgagtcagctgtacatgaatccaaaggcctggaacacaatggtactcaaaaacwtagctgcctcggggaaattctccagtgaccgaacaattaaagaatatgcccaaaacatctggaacgtggaaccttcagatctaaagatttctctatccaa

SEQ ID NO: 60004 - DNA, 201 bp, Homo sapiens
atgctgcctgtgcacttctatggaaaagtagaacacaccaacaccgggaccaagtggattgacactcaagtggtcctggctctgccatatgacacccccgwgcccggctacatgaataacactgtcaacaccatgcgcctctggtctgctcgggcaccaaatgactttaacctcagagactttaatgttggagactacatt

SEQ ID NO: 60005 - DNA, 201 bp, Homo sapiens
ccccagccatggcgaagcccctgacggaccaggagaagcggcggcagatcagcatccgcggcatcgtgggcgtggagaacgtggcagagctgaagaagagyttcaaccggcacctgcacttcacgctggtcaaggaccgcaacgtggccaccacccgcgactactacttcgcgctggcgcacacggtgcgcgaccacctgg

SEQ ID NO: 60006 - DNA, 201 bp, Homo sapiens
gagcagatttccactgcaggcaccgaagcctcggggacaggcaatatgaagttcatgctaaatggggccctaactatcgggaccatggatggggccaatgkggaaatggcagaagaagctggggaagagaacctgttcatctttggcatgaggatagatgatgtggctgctttggacaagaaagggtacgaggcaaaagaa

SEQ ID NO: 60007 - DNA, 201 bp, Homo sapiens
cccttgggagaagtcccgcccagaattcatgctgcctgtgcacttctatggaaaagtagaacacaccaacaccgggaccaagtggattgacactcaagtgrtcctggctctgccatatgacacccccgtgcccggctacatgaataacactgtcaacaccatgcgcctctggtctgctcgggcaccaaatgactttaacct

SEQ ID NO: 60008 - DNA, 201 bp, Homo sapiens
tcatgctaaatggggccctaactatcgggaccatggatggggccaatgtggaaatggcagaagaagctggggaagagaacctgttcatctttggcatgagsatagatgatgtggctgctttggacaagaaagggtacgaggcaaaagaatactatgaggcacttccagagctgaagctggtcattgatcaaattgacaatg

SEQ ID NO: 60009 - DNA, 201 bp, Homo sapiens
aattaaagaatatgcccaaaacatctggaacgtggaaccttcagatctaaagatttctctatccaatgaatctaacaaagtcaatggaaattgaactctasaattgtctctagaaaacatagcttcttactgaacttgaacatttttacaacattcactggtttttgttttgttagctaataatctataatagttgagtat

SEQ ID NO: 60010 - DNA, 201 bp, Homo sapiens
ctcccgggtcctctatcccaatgacaatttttttgaagggaaggagctaagattgaagcaggaatactttgtggtggctgcaaccttgcaagatatcatcygccgtttcaaagcctccaagtttggctccacccgtggtgcaggaactgtgtttgatgccttcccggatcaggcaagtggccatccagctgaatgacactc

SEQ ID NO: 60011 - DNA, 201 bp, Homo sapiens
atatcatccgccgtttcaaagcctccaagtttggctccacccgtggtgcaggaactgtgtttgatgccttcccggatcaggcaagtggccatccagctgartgacactcaccctgcactcgcgatccctgagctgatgaggatttttgtggatattgaaaaactgccctggtccaaggcatgggagctcacccagaagacc

SEQ ID NO: 60012 - DNA, 201 bp, Homo sapiens
gccaaggacagttatcattggtggtaaagctgccccaggatatcacatggccaaaatgatcataaagctgatcacttcagtggcagatgtggtgaacaatsaccctatggttggaagcaagttgaaagtcatcttcttggagaactacagagtatctcttgctgaaaaagtcattccagccacagatctgtcagagcagat

SEQ ID NO: 60013 - DNA, 201 bp, Homo sapiens
gcaccgaagcctcggggacaggcaatatgaagttcatgctaaatggggccctaactatcgggaccatggatggggccaatgtggaaatggcagaagaagcyggggaagagaacctgttcatctttggcatgaggatagatgatgtggctgctttggacaagaaagggtacgaggcaaaagaatactatgaggcacttccag

SEQ ID NO: 60014 - DNA, 201 bp, Homo sapiens; identical to SEQ ID NO: 59997

SEQ ID NO: 60015 - DNA, 201 bp, Homo sapiens
tgaagggaaggagctaagattgaagcaggaatactttgtggtggctgcaaccttgcaagatatcatccgccgtttcaaagcctccaagtttggctccaccraccctgagccatccgttgccttcatgttgatgtctttccccacccaggtggccatccagctgaatgacactcaccctgcactcgcgatccctgagctgat

SEQ ID NO: 60016 - DNA, 201 bp, Homo sapiens
gccgtttcaaagcctccaagtttggctccacccaccctgagccatccgttgccttcatgttgatgtctttccccacccaggtggccatccagctgaatgayactcaccctgcactcgcgatccctgagctgatgaggatttttgtggatattgaaaaactgccctggtccaaggcatgggagctcacccagaagaccttcg

SEQ ID NO: 60017 - DNA, 201 bp, Homo sapiens; identical to SEQ ID NO: 60000

SEQ ID NO: 60018 - DNA, 201 bp, Homo sapiens; identical to SEQ ID NO: 60002

SEQ ID NO: 60019 - DNA, 201 bp, Homo sapiens; identical to SEQ ID NO: 60001

SEQ ID NO: 60020 - DNA, 201 bp, Homo sapiens; identical to SEQ ID NO: 60004

SEQ ID NO: 60021 - DNA, 201 bp, Homo sapiens; identical to SEQ ID NO: 60003

SEQ ID NO: 60022 - DNA, 201 bp, Homo sapiens; identical to SEQ ID NO: 60006

SEQ ID NO: 60023 - DNA, 201 bp, Homo sapiens; identical to SEQ ID NO: 60005

SEQ ID NO: 60024 - DNA, 201 bp, Homo sapiens; identical to SEQ ID NO: 60007

SEQ ID NO: 60025 - DNA, 201 bp, Homo sapiens; identical to SEQ ID NO: 60008

SEQ ID NO: 60026 - DNA, 201 bp, Homo sapiens; identical to SEQ ID NO: 60009

SEQ ID NO: 60027 - DNA, 201 bp, Homo sapiens
ctcccgggtcctctatcccaatgacaatttttttgaagggaaggagctaagattgaagcaggaatactttgtggtggctgcaaccttgcaagatatcatcygccgtttcaaagcctccaagtttggctccacccaccctgagccatccgttgccttcatgttgatgtctttccccacccaggtggccatccagctgaatga

SEQ ID NO: 60028 - DNA, 201 bp, Homo sapiens; identical to SEQ ID NO: 60013

SEQ ID NO: 60029 - DNA, 201 bp, Homo sapiens; identical to SEQ ID NO: 60012

SEQ ID NO: 60030 - DNA, 201 bp, Homo sapiens
atccgccgtttcaaagcctccaagtttggctccacccaccctgagccatccgttgccttcatgttgatgtctttccccacccaggtggccatccagctgartgacactcaccctgcactcgcgatccctgagctgatgaggatttttgtggatattgaaaaactgccctggtccaaggcatgggagctcacccagaagacc

SEQ ID NO: 60031 - DNA, 201 bp, Homo sapiens; identical to SEQ ID NO: 59997

SEQ ID NO: 60032 - DNA, 201 bp, Homo sapiens
gaagggaaggagctaagattgaagcaggaatactttgtggtggctgcaaccttgcaagatatcatccgccgtttcaaagcctccaagtttggctccacccrtggtgcaggaactgtgtttgatgccttcccggatcaggtggccatccagctgaatgacactcaccctgcactcgcgatccctgagctgatgaggattttt

SEQ ID NO: 60033 - DNA, 201 bp, Homo sapiens
atatcatccgccgtttcaaagcctccaagtttggctccacccgtggtgcaggaactgtgtttgatgccttcccggatcaggtggccatccagctgaatgayactcaccctgcactcgcgatccctgagctgatgaggatttttgtggatattgaaaaactgccctggtccaaggcatgggagctcacccagaagaccttcg

SEQ ID NO: 60034 - DNA, 201 bp, Homo sapiens; identical to SEQ ID NO: 60000

SEQ ID NO: 60035 - DNA, 201 bp, Homo sapiens; identical to SEQ ID NO: 60002

SEQ ID NO: 60036 - DNA, 201 bp, Homo sapiens; identical to SEQ ID NO: 60001

SEQ ID NO: 60037 - DNA, 201 bp, Homo sapiens; identical to SEQ ID NO: 60004

SEQ ID NO: 60038 - DNA, 201 bp, Homo sapiens; identical to SEQ ID NO: 60003

SEQ ID NO: 60039 - DNA, 201 bp, Homo sapiens; identical to SEQ ID NO: 60006

SEQ ID NO: 60040 - DNA, 201 bp, Homo sapiens; identical to SEQ ID NO: 60005

SEQ ID NO: 60041 - DNA, 201 bp, Homo sapiens; identical to SEQ ID NO: 60007

SEQ ID NO: 60042 - DNA, 201 bp, Homo sapiens; identical to SEQ ID NO: 60008

SEQ ID NO: 60043 - DNA, 201 bp, Homo sapiens; identical to SEQ ID NO: 60009

SEQ ID NO: 60044 - DNA, 201 bp, Homo sapiens
ctcccgggtcctctatcccaatgacaatttttttgaagggaaggagctaagattgaagcaggaatactttgtggtggctgcaaccttgcaagatatcatcygccgtttcaaagcctccaagtttggctccacccgtggtgcaggaactgtgtttgatgccttcccggatcaggtggccatccagctgaatgacactcaccc

SEQ ID NO: 60045 - DNA, 201 bp, Homo sapiens; identical to SEQ ID NO: 60013

SEQ ID NO: 60046 - DNA, 201 bp, Homo sapiens; identical to SEQ ID NO: 60012

SEQ ID NO: 60047 - DNA, 201 bp, Homo sapiens
caagatatcatccgccgtttcaaagcctccaagtttggctccacccgtggtgcaggaactgtgtttgatgccttcccggatcaggtggccatccagctgartgacactcaccctgcactcgcgatccctgagctgatgaggatttttgtggatattgaaaaactgccctggtccaaggcatgggagctcacccagaagacc

SEQ ID NO: 60048 - DNA, 201 bp, Homo sapiens
actgagagatccatcaaattgaacaatctgttgtaatttaaaattttggccacttttttcagattttacatcattcttgctgaacttcaacttgaaattgkttttttttttttttctttttggatgtgaaggtgaacattcctgatttttgtctgatgtgaaaaagccttggtattttacattttgaaaattcaaagaagc

SEQ ID NO: 60049 - DNA, 201 bp, Homo sapiens
agtggaagagtattgagcccgtttcatcatggtttggtccaggttctgttctgatgagtagtatgtcagcactctttcagctatctatgtggatcaggacktgccataactactttattgaagaccttggattgccagtgtggggatcatatactgtttttgctttagcaactctgttttccggactgttattaggactct

SEQ ID NO: 60050 - DNA, 201 bp, Homo sapiens
tttttgctttagcaactctgttttccggactgttattaggactctgtatgatatttgtggcagattgcctttgtccttcaaaaaggcgcagaccacagccrtacccatacccttcaaaaaaattattatcagaatctgcacaacctttgaaaaaagtggaggaggaacaagaggcggatgaagaagatgtttcagaagaag

SEQ ID NO: 60051 - DNA, 201 bp, Homo sapiens
acgttcgcgtcatcacggacgagaactggagagaactgctggaaggagactggatgatagaattttatgccccgtggtgccctgcttgtcaaaatcttcamccggaatgggaaagttttgctgaatggggagaagatcttgaggttaatattgcgaaagtagatgtcacagagcagccaggactgagtggacggtttatca

SEQ ID NO: 60052 - DNA, 169 bp, Homo sapiens
atcttcttgtatatgtcttaaatgtatttttgtcctcatatacagaaagttcttaattgattttacagtctgtaatgcttgatgttttaaaataataacayttttatattttttaaaagacaaacttcatattatcctgtgttctttcctgactggtaatattgtgtgg

SEQ ID NO: 60053 - DNA, 201 bp, Homo sapiens
aaattgaacaatctgttgtaatttaaaattttggccacttttttcagattttacatcattcttgctgaacttcaacttgaaattgtttttttttttttttytttttggatgtgaaggtgaacattcctgatttttgtctgatgtgaaaaagccttggtattttacattttgaaaattcaaagaagcttaatataaaagttt

SEQ ID NO: 60054 - DNA, 197 bp, Homo sapiens
actgagagatccatcaaattgaacaatctgttgtaatttaaaattttggccacttttttcagattttacatcattcttgctgaacttcaacttgaaattgkttttttttttttttctttttggatgtgaaggtgaacattcctgatttttgtctgatgtgaaaaagccttggtattttacattttgaaaattcaaag

SEQ ID NO: 60055 - DNA, 201 bp, Homo sapiens; identical to SEQ ID NO: 60049

SEQ ID NO: 60056 - DNA, 201 bp, Homo sapiens; identical to SEQ ID NO: 60050

SEQ ID NO: 60057 - DNA, 201 bp, Homo sapiens; identical to SEQ ID NO: 60051

SEQ ID NO: 60058 - DNA, 182 bp, Homo sapiens
aaattgaacaatctgttgtaatttaaaattttggccacttttttcagattttacatcattcttgctgaacttcaacttgaaattgtttttttttttttttytttttggatgtgaaggtgaacattcctgatttttgtctgatgtgaaaaagccttggtattttacattttgaaaattcaaag

SEQ ID NO: 60059 - DNA, 201 bp, Homo sapiens
ggaagtacagctcaggcttcgttactgccgacatgatcaaggagcaccttcctcctccagcgaagtccacgctcatcctggtgtgtggcccgccaccactratccagacggcggctcaccctaacctggagaagctgggttatacccaggacatgattttcacctactaacacctccatgtgctcagcaattttgcatgtc

SEQ ID NO: 60060 - DNA, 163 bp, Homo sapiens
ttcgcgcacacactggttctcctcttttgggtgtgggcctaacaaaaagggctcaaggggctggagactggctgctggggcctccttgcttggaggctggmaagagctccatttcagtatctttctccgtggttttgtgaaataaactcaagtacaaagcaga

SEQ ID NO: 60061 - DNA, 201 bp, Homo sapiens
ctgctcctgaccatcaccgtcactggggtcactgtgctcgtgttggtcctgaagagcatgaactccaggaggagagagccaatcaccttacaggaccctgmagccaagtacccgctgcccttgattgagaaagagaaaatcagccacaacacccggaggttccgctttggactgccttcgccggaccatgtcttagggctt

SEQ ID NO: 60062 - DNA, 201 bp, Homo sapiens
catcaccgtcactggggtcactgtgctcgtgttggtcctgaagagcatgaactccaggaggagagagccaatcaccttacaggaccctgaagccaagtacycgctgcccttgattgagaaagagaaaatcagccacaacacccggaggttccgctttggactgccttcgccggaccatgtcttagggcttcctgtaggtaa

SEQ ID NO: 60063 - DNA, 201 bp, Homo sapiens
gggaatcttggaatcagaccagaccagacgagtgagcctaaaaaaacactggccgatcacctgggaatgattgctgggggcacaggcatcacacccatgtkgcagctcattcgccacatcaccaaggaccccagtgacaggaccaggatgtccctcatctttgccaaccaggctggaagtacagctcaggcttcgttactg

SEQ ID NO: 60064 - DNA, 201 bp, Homo sapiens
acgctcatcctggtgtgtggcccgccaccactgatccagacggcggctcaccctaacctggagaagctgggttatacccaggacatgattttcacctactmacacctccatgtgctcagcaattttgcatgtcccttttcatctgtttcagagtaagttcaatttcaccacggtaaactgggatgttttcaaaagtgcctt

SEQ ID NO: 60065 - DNA, 201 bp, Homo sapiens
caaggggacgcttgttttaccatgggccagggaatcttggaatcagaccagaccagacgagtgagcctaaaaaaacactggccgatcacctgggaatgatwgctgggggcacaggcatcacacccatgttgcagctcattcgccacatcaccaaggaccccagtgacaggaccaggatgtccctcatctttgccaaccagg

SEQ ID NO: 60066 - DNA, 201 bp, Homo sapiens
gcttcctgtaggtaactatgtccagctcttggcaaaaatcgataatgaattggtggtcagggcttacacccctgtctccagtgatgatgacagaggctttrtggacctaattataaagatctacttcaaaaatgtacacccccaatatcctgaaggtgggaagatgactcagtatttggagaacatgaaaatcggggagac

SEQ ID NO: 60067 - DNA, 201 bp, Homo sapiens
ctcagcaattttgcatgtcccttttcatctgtttcagagtaagttcaatttcaccacggtaaactgggatgttttcaaaagtgccttgccatgtaccttcrcgcacacactggttctcctcttttgggtgtgggcctaacaaaaagggctcaaggggctggagactggctgctggggcctccttgcttggaggctggaaag

SEQ ID NO: 60068 - DNA, 201 bp, Homo sapiens
gctcagcaattttgcatgtcccttttcatctgtttcagagtaagttcaatttcaccacggtaaactgggatgttttcaaaagtgccttgccatgtaccttsgcgcacacactggttctcctcttttgggtgtgggcctaacaaaaagggctcaaggggctggagactggctgctggggcctccttgcttggaggctggaaa

SEQ ID NO: 60069 - DNA, 201 bp, Homo sapiens
cgccaccactgatccagacggcggctcaccctaacctggagaagctgggttatacccaggacatgattttcacctactaacacctccatgtgctcagcaawtttgcatgtcccttttcatctgtttcagagtaagttcaatttcaccacggtaaactgggatgttttcaaaagtgccttgccatgtaccttcgcgcacaca

SEQ ID NO: 60070 - DNA, 201 bp, Homo sapiens
tggtgtgtggcccgccaccactgatccagacggcggctcaccctaacctggagaagctgggttatacccaggacatgattttcacctactaacacctccaygtgctcagcaattttgcatgtcccttttcatctgtttcagagtaagttcaatttcaccacggtaaactgggatgttttcaaaagtgccttgccatgtacc

SEQ ID NO: 60071 - DNA, 201 bp, Homo sapiens; identical to SEQ ID NO: 60059

SEQ ID NO: 60072 - DNA, 134 bp, Homo sapiens
ccatgtgaagaaggatgtgttcacttcccctttygccatgattttataagtttcctgaggcctccccagccaagctgaactgtcctgaggcaagaatttgcctttgcctgtaatcaagggcgagccgggcagcc

SEQ ID NO: 60073 - DNA, 165 bp, Homo sapiens
ttcgcgcacacactggttctcctcttttgggtgtgggcctaacaaaaagggctcaaggggctggagactggctgctggggcctccttgcttggaggctggmaagagctccatttcagtatctttctccgtggttttgtgaaataaactcaagtacaaagcagaca

SEQ ID NO: 60074 - DNA, 201 bp, Homo sapiens
caggaccaggatgtccctcatctttgccaaccagacagaggaggatatcttggtcagaaaagagcttgaagaaattgccaggactcacccagaccagttcracctgtggtacaccctggacaggcctcccattggctggaagtacagctcaggcttcgttactgccgacatgatcaaggagcaccttcctcctccagcgaa

SEQ ID NO: 60075 - DNA, 201 bp, Homo sapiens; identical to SEQ ID NO: 60061

SEQ ID NO: 60076 - DNA, 201 bp, Homo sapiens; identical to SEQ ID NO: 60062

SEQ ID NO: 60077 - DNA, 201 bp, Homo sapiens
gggaatcttggaatcagaccagaccagacgagtgagcctaaaaaaacactggccgatcacctgggaatgattgctgggggcacaggcatcacacccatgtkgcagctcattcgccacatcaccaaggaccccagtgacaggaccaggatgtccctcatctttgccaaccagacagaggaggatatcttggtcagaaaagag

SEQ ID NO: 60078 - DNA, 201 bp, Homo sapiens; identical to SEQ ID NO: 60064

SEQ ID NO: 60079 - DNA, 201 bp, Homo sapiens; identical to SEQ ID NO: 60066

SEQ ID NO: 60080 - DNA, 201 bp, Homo sapiens
caaggggacgcttgttttaccatgggccagggaatcttggaatcagaccagaccagacgagtgagcctaaaaaaacactggccgatcacctgggaatgatwgctgggggcacaggcatcacacccatgttgcagctcattcgccacatcaccaaggaccccagtgacaggaccaggatgtccctcatctttgccaaccaga

SEQ ID NO: 60081 - DNA, 201 bp, Homo sapiens; identical to SEQ ID NO: 60067

SEQ ID NO: 60082 - DNA, 201 bp, Homo sapiens; identical to SEQ ID NO: 60068

SEQ ID NO: 60083 - DNA, 201 bp, Homo sapiens; identical to SEQ ID NO: 60069

SEQ ID NO: 60084 - DNA, 201 bp, Homo sapiens; identical to SEQ ID NO: 60070

SEQ ID NO: 60085 - DNA, 201 bp, Homo sapiens; identical to SEQ ID NO: 60077

SEQ ID NO: 60086 - DNA, 134 bp, Homo sapiens; identical to SEQ ID NO: 60072

SEQ ID NO: 60087 - DNA, 201 bp, Homo sapiens; identical to SEQ ID NO: 60080

SEQ ID NO: 60088 - DNA, 201 bp, Homo sapiens; identical to SEQ ID NO: 60066

SEQ ID NO: 60089 - DNA, 187 bp, Homo sapiens
caggaccaggatgtccctcatctttgccaaccagacagaggaggatatcttggtcagaaaagagcttgaagaaattgccaggactcacccagaccagttcracctgtggtacaccctggacaggcctcccattggtccctggtcggcagagggcgctaccctactgagcaattctgcgcagttccac

SEQ ID NO: 60090 - DNA, 201 bp, Homo sapiens; identical to SEQ ID NO: 60061

SEQ ID NO: 60091 - DNA, 201 bp, Homo sapiens; identical to SEQ ID NO: 60062

SEQ ID NO: 60092 - DNA, 201 bp, Homo sapiens; identical to SEQ ID NO: 60059

SEQ ID NO: 60093 - DNA, 165 bp, Homo sapiens; identical to SEQ ID NO: 60073

SEQ ID NO: 60094 - DNA, 201 bp, Homo sapiens; identical to SEQ ID NO: 60074

SEQ ID NO: 60095 - DNA, 201 bp, Homo sapiens; identical to SEQ ID NO: 60061

SEQ ID NO: 60096 - DNA, 201 bp, Homo sapiens; identical to SEQ ID NO: 60062

SEQ ID NO: 60097 - DNA, 201 bp, Homo sapiens; identical to SEQ ID NO: 60077

SEQ ID NO: 60098 - DNA, 201 bp, Homo sapiens; identical to SEQ ID NO: 60064

SEQ ID NO: 60099 - DNA, 201 bp, Homo sapiens; identical to SEQ ID NO: 60066

SEQ ID NO: 60100 - DNA, 201 bp, Homo sapiens; identical to SEQ ID NO: 60080

SEQ ID NO: 60101 - DNA, 171 bp, Homo sapiens
accgggaggttgggggccggagcgggaggcgtggggagaggtcgtgggcgggaccgcgaagggcggggagyggggcgggccggctcggattccggaaggctgagactccagtgacccggcgggaggagaggcaactttccctgtcgggcttgagttgggagaggagcaggg

SEQ ID NO: 60102 - DNA, 201 bp, Homo sapiens; identical to SEQ ID NO: 60067

SEQ ID NO: 60103 - DNA, 201 bp, Homo sapiens; identical to SEQ ID NO: 60068

SEQ ID NO: 60104 - DNA, 201 bp, Homo sapiens; identical to SEQ ID NO: 60069

SEQ ID NO: 60105 - DNA, 201 bp, Homo sapiens; identical to SEQ ID NO: 60070

SEQ ID NO: 60106 - DNA, 201 bp, Homo sapiens
cccgtggaggatgacattgacctcagtgatgtggagcttgatgacttagggaaagatgagttgtgagagccacaacagaggcttcagaccattttcttttyttgggagccagtggatttttccagcagtgaagggacattctctacactcagatgactctaccagtggccttttaaccaagaagtagtacttgattggtca

SEQ ID NO: 60107 - DNA, 201 bp, Homo sapiens
tctttgggctgtctctagtgactaattattaaggaatctagctggttatacagttcaaggctttctatgttgttaatgaacctcaaaatagccgttaagayatgaaatacagcagcaggttaccaatgcgaacaggtagttcgcatttatgtaaaacattcagaaaatgaagttttgaatttgttggaacattcaaaggac

SEQ ID NO: 60108 - DNA, 201 bp, Homo sapiens
gccagctcgtgaaggatcgcctcgggggacggagcggaggatacagttctggaaaacaaggcagaagtgatagttcaagtaagaaggatgtgattgagctracagacgacagctttgataagaatgttctggacagtgaagatgtttggatggttgagttctatgctccttggtgtggacactgcaaaaacctagagccag

SEQ ID NO: 60109 - DNA, 201 bp, Homo sapiens
acagaccagaagattaccaaggtggcagaactggtgaagccattgtagatgctgcgctgagtgctctgcgccagctcgtgaaggatcgcctcgggggacgragcggaggatacagttctggaaaacaaggcagaagtgatagttcaagtaagaaggatgtgattgagctgacagacgacagctttgataagaatgttctgg

SEQ ID NO: 60110 - DNA, 201 bp, Homo sapiens
tggatggttgagttctatgctccttggtgtggacactgcaaaaacctagagccagagtgggctgccgcagcttcagaagtaaaagagcagacgaaaggaaragtgaaactggcagctgtggatgctacagtcaatcaggttctggcctcccgatacgggattagaggatttcctacaatcaagatatttcagaaaggcgag

SEQ ID NO: 60111 - DNA, 201 bp, Homo sapiens
gtattcctctagtgatgatgtgatcgaattaactccatcgaatttcaaccgagaagttattcagagtgatagtttgtggcttgtagaattctatgctccayggtgtggtcactgtcaaagattaacaccagaatggaagaaagcagcaactgcattaaaagatgttgtcaaagttggtgcagttgatgcagataagcatca

SEQ ID NO: 60112 - DNA, 201 bp, Homo sapiens
gcatggctctcctggtgctcggtctggtgagctgtaccttctttctggcagtgaatggtctgtattcctctagtgatgatgtgatcgaattaactccatcraatttcaaccgagaagttattcagagtgatagtttgtggcttgtagaattctatgctccatggtgtggtcactgtcaaagattaacaccagaatggaaga

SEQ ID NO: 60113 - DNA, 201 bp, Homo sapiens
tagtacttgattggtcatttgaaaacactgcaacagtgaacttttgcatctcaagaaaacattgaaaaattctatgaattgttgtagccggtgaattgagycgtattctgtcacataatattttgaagaaaacttggctgtcgaaacatttttctctctgactgctgcttgaatgttcttggaggctgtttcttatgtatg

SEQ ID NO: 60114 - DNA, 201 bp, Homo sapiens
cggtgaattgagtcgtattctgtcacataatattttgaagaaaacttggctgtcgaaacatttttctctctgactgctgcttgaatgttcttggaggctgyttcttatgtatgggttttttttaatgtgatcccttcatttgaatattaatggctttttccattaaagaataaaatattttggacaatgccgataaatgta

SEQ ID NO: 60115 - DNA, 201 bp, Homo sapiens
gggctcagtgagaactgatttcctgcccaatatttgtctttgggctgtctctagtgactaattattaaggaatctagctggttatacagttcaaggctttytatgttgttaatgaacctcaaaatagccgttaagacatgaaatacagcagcaggttaccaatgcgaacaggtagttcgcatttatgtaaaacattcagaa

SEQ ID NO: 60116 - DNA, 201 bp, Homo sapiens
acagtcaatcaggttctggcctcccgatacgggattagaggatttcctacaatcaagatatttcagaaaggcgagtctcctgtggattatgacggtgggckgacaagatccgacatcgtgtcccgggcccttgatttgttttctgataacgccccacctcctgagctgcttgagattatcaacgaggacattgccaagagg

SEQ ID NO: 60117 - DNA, 201 bp, Homo sapiens
gctcagtgagaactgatttcctgcccaatatttgtctttgggctgtctctagtgactaattattaaggaatctagctggttatacagttcaaggctttctrtgttgttaatgaacctcaaaatagccgttaagacatgaaatacagcagcaggttaccaatgcgaacaggtagttcgcatttatgtaaaacattcagaaaa

SEQ ID NO: 60118 - DNA, 201 bp, Homo sapiens
gtagcccggcgctcggcatggctctcctggtgctcggtctggtgagctgtaccttctttctggcagtgaatggtctgtattcctctagtgatgatgtgatygaattaactccatcgaatttcaaccgagaagttattcagagtgatagtttgtggcttgtagaattctatgctccatggtgtggtcactgtcaaagattaa

SEQ ID NO: 60119 - DNA, 163 bp, Homo sapiens
aaatagccgttaagacatgaaatacagcagcaggttaccaatgcgaacaggtagttcgcatttatgtaaaacattcagaaaatgaagttttgaatttgttrgaacattcaaaggacttgagagcattttattgtaacttaaaaaaataaatacaactgtcact

SEQ ID NO: 60120 - DNA, 201 bp, Homo sapiens
agtgagaactgatttcctgcccaatatttgtctttgggctgtctctagtgactaattattaaggaatctagctggttatacagttcaaggctttctatgtwgttaatgaacctcaaaatagccgttaagacatgaaatacagcagcaggttaccaatgcgaacaggtagttcgcatttatgtaaaacattcagaaaatgaa

SEQ ID NO: 60121 - DNA, 201 bp, Homo sapiens
cccgtggaggatgacattgacctcagtgatgtggagcttgatgacttagggaaagatgagttgtgagagccacaacagaggcttcagaccattttcttttyttgggagccagtggatttttccagcatctctacactcagatgactctaccagtggccttttaaccaagaagtagtacttgattggtcatttgaaaacact

SEQ ID NO: 60122 - DNA, 201 bp, Homo sapiens; identical to SEQ ID NO: 60107

SEQ ID NO: 60123 - DNA, 201 bp, Homo sapiens; identical to SEQ ID NO: 60108

SEQ ID NO: 60124 - DNA, 201 bp, Homo sapiens; identical to SEQ ID NO: 60110

SEQ ID NO: 60125 - DNA, 201 bp, Homo sapiens; identical to SEQ ID NO: 60109

SEQ ID NO: 60126 - DNA, 201 bp, Homo sapiens; identical to SEQ ID NO: 60111

SEQ ID NO: 60127 - DNA, 201 bp, Homo sapiens
cacttttgtttttatcttcaggtctggtgagctgtaccttctttctggcagtgaatggtctgtattcctctagtgatgatgtgatcgaattaactccatcraatttcaaccgagaagttattcagagtgatagtttgtggcttgtagaattctatgctccatggtgtggtcactgtcaaagattaacaccagaatggaaga

SEQ ID NO: 60128 - DNA, 201 bp, Homo sapiens; identical to SEQ ID NO: 60113

SEQ ID NO: 60129 - DNA, 201 bp, Homo sapiens; identical to SEQ ID NO: 60114

SEQ ID NO: 60130 - DNA, 201 bp, Homo sapiens; identical to SEQ ID NO: 60115

SEQ ID NO: 60131 - DNA, 201 bp, Homo sapiens; identical to SEQ ID NO: 60116

SEQ ID NO: 60132 - DNA, 201 bp, Homo sapiens; identical to SEQ ID NO: 60117

SEQ ID NO: 60133 - DNA, 187 bp, Homo sapiens
gcacttttgtttttatcttcaggtctggtgagctgtaccttctttctggcagtgaatggtctgtattcctctagtgatgatgtgatygaattaactccatcgaatttcaaccgagaagttattcagagtgatagtttgtggcttgtagaattctatgctccatggtgtggtcactgtcaaagattaa

SEQ ID NO: 60134 - DNA, 163 bp, Homo sapiens; identical to SEQ ID NO: 60119

SEQ ID NO: 60135 - DNA, 201 bp, Homo sapiens; identical to SEQ ID NO: 60120

SEQ ID NO: 60136 - DNA, 201 bp, Homo sapiens
aagttcaggagagaaagaagtcataaccatcttggaagaatctcaacttgttttatcagaactcaaacgccaatttctcacccctagcttccctcattagygcttattaactagtattgggaggaccaagcgaagagtaaagctagggtagcagaggccataagctaattgcaaaggacagagctaaagaaacatgctagt

SEQ ID NO: 60137 - DNA, 201 bp, Homo sapiens
accagctgcctgctgagtttcagctgctgtaccgaatgcatggggaagggctcaccaagctgactctgtcacactgtgcctaagaactccaaacggaaagygccaaatggctgtttaaaaagtgccccaaatcaaattgaatagccttcagaatagaaccctagagaatgtcttataaggattgtctgccatttaaaagga

SEQ ID NO: 60138 - DNA, 201 bp, Homo sapiens
attattccagccataaatatgttttctctattagcaataacttccggtcacttcttccagatgtgtcacccattatgaacaagcattataatatttgtgcygtggttggaaatagtgggatcctgacagggagccagtgtggacaagaaatagataaatcagattttgttttccgttgcaatttcgcccctacggaggctt

SEQ ID NO: 60139 - DNA, 201 bp, Homo sapiens
aaaacaaacatttgtcacctaaacggctgagcacaggtattcttatgtacacccttgcatcagcaatatgtgaagagatccacttgtatggattttggccktttggatttgaccccaacacaagggaagatcttccataccattactatgacaaaaaaggaaccaaatttaccaccaagtggcaggagtcccaccagctgc

SEQ ID NO: 60140 - DNA, 201 bp, Homo sapiens
ggattccggtcacaatttgcgctgaagtttctagacccgtcattcgtgcccattacgaattctctcacccaggaactccaagagaaaccttctaagtggamatttaatcggacagcgtttttacatcaaaggcaagaaattcttcagcatgtcgatgtaataaaaaatttttctttgaccaagaatagtgttcggattgga

SEQ ID NO: 60141 - DNA, 201 bp, Homo sapiens
ggtgggatcagactctgaaaaatggaaacgtaaaaaactggtttgcatatctcatcttctatctatctccctatctccatctctatcaccatctcactccytccctctgcaactactccctgccctaccaccgtggagtttaataatttgctaggaatcctattgaattcgctttgcttgtatatgttgcatttgtacttg

SEQ ID NO: 60142 - DNA, 201 bp, Homo sapiens
gaggagtcttgcctaatggcaatgtctatttctcggatcagcacttggtggacgaagacactctgaaggaggatgggagccaggatgctgagctgctgcgsctgacggaagatgctgtctacaccaccatgcacttttccaggcccttccgctcctgcgaccctcatgacctggatattacgagcaacaccgtgagggtgc

SEQ ID NO: 60143 - DNA, 201 bp, Homo sapiens
ccttccgctcctgcgaccctcatgacctggatattacgagcaacaccgtgagggtgctggccacctatggcctggatgacactctgaagctgtatcgggarcgtacttttgtcaagtccatctttctgctacaagtcgtccaccctgacgatctggatgtccctgaggacaccatcatccatgacttggagatcactaatt

SEQ ID NO: 60144 - DNA, 201 bp, Homo sapiens
gtgtacgcctgcggcaatgctagcgttctccccacaggcatcagcgactgctatggggccgaccctgccttctccctttgctcacaggtcatcgtgggctsggctgtcgggggcacaagctaccagtttccagatgacgtaggcgtctctattgggacccccttggaccttcagtggatccgactggagattcattacagc

SEQ ID NO: 60145 - DNA, 201 bp, Homo sapiens
cgtctctattgggacccccttggaccttcagtggatccgactggagattcattacagcaattttaacaaccttcctggtgtgtatgattcctcggggattygcgtgtactacacttctcagctgcgcaaatacgacacggatgtcctccagctgggcttcttcacgtttcccatccacttcatccccccgggcgctgagtc

SEQ ID NO: 60146 - DNA, 201 bp, Homo sapiens
ctctccctattgtgagcgagaagcatcacatttacaagtttgagcctaagttggtctaccacaatgagacaacggtgcatcacatcctggtgtacgcctgyggcaatgctagcgttctccccacaggcatcagcgactgctatggggccgaccctgccttctccctttgctcacaggtcatcgtgggctgggctgtcgggg

SEQ ID NO: 60147 - DNA, 201 bp, Homo sapiens
gcgctgagtccttcatgtcctatgggctgtgtaggacggagaagtttgaggagatgaatggagctcctatgcctgacatataggtatatggctacctgctrcacacccacttggctggacgggctctgcaagcagtgcaatacaggaatggaacacaacttcgaaaaatctgtaaagacgattcctatgacttcaacctgc

SEQ ID NO: 60148 - DNA, 201 bp, Homo sapiens
ttctccctttgctcacaggtcatcgtgggctgggctgtcgggggcacaagctaccagtttccagatgacgtaggcgtctctattgggacccccttggaccytcagtggatccgactggagattcattacagcaattttaacaaccttcctggtgtgtatgattcctcggggatttgcgtgtactacacttctcagctgcgc

SEQ ID NO: 60149 - DNA, 201 bp, Homo sapiens
ggaagatgctgtctacaccaccatgcacttttccaggcccttccgctcctgcgaccctcatgacctggatattacgagcaacaccgtgagggtgctggccrcctatggcctggatgacactctgaagctgtatcgggagcgtacttttgtcaagtccatctttctgctacaagtcgtccaccctgacgatctggatgtccc

SEQ ID NO: 60150 - DNA, 143 bp, Homo sapiens
atggcccatgaccttctcttcaggctttttccacttttggccstgggagtccccttacaaagcaaccgccttggccccacatctcgcctgcgctattccaggttcctagatccttctaatgtcattttcctgcgttgggactt

SEQ ID NO: 60151 - DNA, 201 bp, Homo sapiens
tcggtgtcacaaatcgctacaccaacgtgggaagtgatctggttgttggaggagtcttgcctaatggcaatgtctatttctcggatcagcacttggtggasgaagacactctgaaggaggatgggagccaggatgctgagctgctgcggctgacggaagatgctgtctacaccaccatgcacttttccaggcccttccgct

SEQ ID NO: 60152 - DNA, 119 bp, Homo sapiens
ccattaatgagatgtgcctcatcttcctcttctactatccccaaaataacatctccagctgcatggggtaccctgacattatctacgtggcccacgagctrggggaggaggcatcagag

SEQ ID NO: 60153 - DNA, 201 bp, Homo sapiens
tccctattgtgagcgagaagcatcacatttacaagtttgagcctaagttggtctaccacaatgagacaacggtgcatcacatcctggtgtacgcctgcggsaatgctagcgttctccccacaggcatcagcgactgctatggggccgaccctgccttctccctttgctcacaggtcatcgtgggctgggctgtcgggggca

SEQ ID NO: 60154 - DNA, 201 bp, Homo sapiens
gctggacgggctctgcaagcagtgcaatacaggaatggaacacaacttcgaaaaatctgtaaagacgattcctatgacttcaacctgcaggagactcgagrtttgccctctagagtggagatcaagccgggagatgaattgctggtagaatgtcactaccagacactggaccgtgactccatgacatttggaggccccagc

SEQ ID NO: 60155 - DNA, 201 bp, Homo sapiens
ctcacaggtcatcgtgggctgggctgtcgggggcacaagctaccagtttccagatgacgtaggcgtctctattgggacccccttggaccttcagtggatcygactggagattcattacagcaattttaacaaccttcctggtgtgtatgattcctcggggatttgcgtgtactacacttctcagctgcgcaaatacgacac

SEQ ID NO: 60156 - DNA, 201 bp, Homo sapiens
catccacttcatccccccgggcgctgagtccttcatgtcctatgggctgtgtaggacggagaagtttgaggagatgaatggagctcctatgcctgacatayaggtatatggctacctgctacacacccacttggctggacgggctctgcaagcagtgcaatacaggaatggaacacaacttcgaaaaatctgtaaagacga

SEQ ID NO: 60157 - DNA, 201 bp, Homo sapiens
ccttcagtggatccgactggagattcattacagcaattttaacaaccttcctggtgtgtatgattcctcggggatttgcgtgtactacacttctcagctgygcaaatacgacacggatgtcctccagctgggcttcttcacgtttcccatccacttcatccccccgggcgctgagtccttcatgtcctatgggctgtgtag

SEQ ID NO: 60158 - DNA, 201 bp, Homo sapiens
acttcatccccccgggcgctgagtccttcatgtcctatgggctgtgtaggacggagaagtttgaggagatgaatggagctcctatgcctgacatataggtrtatggctacctgctacacacccacttggctggacgggctctgcaagcagtgcaatacaggaatggaacacaacttcgaaaaatctgtaaagacgattcct

SEQ ID NO: 60159 - DNA, 201 bp, Homo sapiens
tgaggacaccatcatccatgacttggagatcactaatttcctcattccagaggatgacaccacgtatgcctgcacctttcttcctctccctattgtgagcragaagcatcacatttacaagtttgagcctaagttggtctaccacaatgagacaacggtgcatcacatcctggtgtacgcctgcggcaatgctagcgttct

SEQ ID NO: 60160 - DNA, 201 bp, Homo sapiens
tgagggtgctggccacctatggcctggatgacactctgaagctgtatcgggagcgtacttttgtcaagtccatctttctgctacaagtcgtccaccctgaygatctggatgtccctgaggacaccatcatccatgacttggagatcactaatttcctcattccagaggatgacaccacgtatgcctgcacctttcttcctc

SEQ ID NO: 60161 - DNA, 201 bp, Homo sapiens
gcgactgctatggggccgaccctgccttctccctttgctcacaggtcatcgtgggctgggctgtcgggggcacaagctaccagtttccagatgacgtaggmgtctctattgggacccccttggaccttcagtggatccgactggagattcattacagcaattttaacaaccttcctggtgtgtatgattcctcggggattt

SEQ ID NO: 60162 - DNA, 201 bp, Homo sapiens
tggaggagtcttgcctaatggcaatgtctatttctcggatcagcacttggtggacgaagacactctgaaggaggatgggagccaggatgctgagctgctgsggctgacggaagatgctgtctacaccaccatgcacttttccaggcccttccgctcctgcgaccctcatgacctggatattacgagcaacaccgtgagggt

SEQ ID NO: 60163 - DNA, 201 bp, Homo sapiens
catgccaggaagacccataactggttttaacactaactagagggaatgacttctttgcatagtgagtgacttgggccttcacaaacagggtgtggagtggmaggcagaggcctctaaatctcagggcaaacatggtgaatctatctctccggagataatttcatacagagattttaagaaaacatctttatattaaaaaca

SEQ ID NO: 60164 - DNA, 201 bp, Homo sapiens
tagaggctttctcggactgcctgcgctatgagatgtaccccctgggcgtgaaggtcagcgtggtggagcccggcaacttcatcgctgccaccagcctttayagccctgagagcattcaggccatcgccaagaagatgtgggaggagctgcctgaggtcgtgcgcaaggactacggcaagaagtactttgatgaaaagatcg

SEQ ID NO: 60165 - DNA, 201 bp, Homo sapiens
tccggctggtcacttgcctggagaggatcctgcatgctgatagtgctgaggcacctgccagctaagaaccaccgggaggaactgggccattctaacacccrttgctaccatgctggccacccgcctctccagacccctgtcacggctcccaggaaaaaccctaagtgcctgtgatagagaaaatggagcaagacgcccact

SEQ ID NO: 60166 - DNA, 201 bp, Homo sapiens
tcaatgtctgcagcagcgaagaggtggagaaagtggtggagattgtccgctcgagcctgaaggaccctgagaaaggcatgtggggcctcgttaacaatgcyggcatctcaacgttcggggaggtggagttcaccagcctggagacctacaagcaggtggcagaagtgaacctttggggcacagtgcggatgacgaaatcct

SEQ ID NO: 60167 - DNA, 201 bp, Homo sapiens
aactcacagacattttaagcttaaaacaaacagttacaaagctgttgaactttgcctgtgcaaggacaaacacaaaaacatcccaaggcccaccccccgcygacccccactgtacttgtcacacatatgtgagaatttccattctcagctaaaggcaagcattgaaagaatacacagaaagcctggaaaaggtttccaggg

SEQ ID NO: 60168 - DNA, 201 bp, Homo sapiens
ttcacaaacagggtgtggagtggcaggcagaggcctctaaatctcagggcaaacatggtgaatctatctctccggagataatttcatacagagattttaaraaaacatctttatattaaaaacagatctcatttgatccttaagccagtctcatgaatgaaaaggacaggtttttttcttttgtaaatgaagcatttgcag

SEQ ID NO: 60169 - DNA, 201 bp, Homo sapiens
ttttaacactaactagagggaatgacttctttgcatagtgagtgacttgggccttcacaaacagggtgtggagtggcaggcagaggcctctaaatctcagrgcaaacatggtgaatctatctctccggagataatttcatacagagattttaagaaaacatctttatattaaaaacagatctcatttgatccttaagccag

SEQ ID NO: 60170 - DNA, 201 bp, Homo sapiens
cctgtcacggctcccaggaaaaaccctaagtgcctgtgatagagaaaatggagcaagacgcccactattgcttggttctacttcctttatcccgattggcygtcggacttatgccagtgcggcggagccggttggcagcaaagctgtcctggtcacaggctgtgactctggatttgggttctcattggccaagcatctgca

SEQ ID NO: 60171 - DNA, 201 bp, Homo sapiens
gtgaccgattgagaaccgtccagctcaatgtctgcagcagcgaagaggtggagaaagtggtggagattgtccgctcgagcctgaaggaccctgagaaaggsatgtggggcctcgttaacaatgccggcatctcaacgttcggggaggtggagttcaccagcctggagacctacaagcaggtggcagaagtgaacctttggg

SEQ ID NO: 60172 - DNA, 201 bp, Homo sapiens
ggacaggtttttttcttttgtaaatgaagcatttgcagcttaaagaggatgcatgaaataacccttttatcgcttataaatagtgccagttatgtgttccygccacggctgtggaaatacttcacatttgcattccaggactgttttggatccatttgcccgagaatcttctgactaactctgtgtcctcatctgggcagc

SEQ ID NO: 60173 - DNA, 201 bp, Homo sapiens; identical to SEQ ID NO: 60163

SEQ ID NO: 60174 - DNA, 201 bp, Homo sapiens; identical to SEQ ID NO: 60164

SEQ ID NO: 60175 - DNA, 201 bp, Homo sapiens
tcactatggagggccgcctgcaggcctcgcgctgacaggatcttttgtgacgctgcaaatgtcctgaaccaccgggaggaactgggccattctaacacccrttgctaccatgctggccacccgcctctccagacccctgtcacggctcccaggaaaaaccctaagtgcctgtgatagagaaaatggagcaagacgcccact

SEQ ID NO: 60176 - DNA, 201 bp, Homo sapiens; identical to SEQ ID NO: 60166

SEQ ID NO: 60177 - DNA, 201 bp, Homo sapiens; identical to SEQ ID NO: 60168

SEQ ID NO: 60178 - DNA, 201 bp, Homo sapiens; identical to SEQ ID NO: 60169

SEQ ID NO: 60179 - DNA, 201 bp, Homo sapiens; identical to SEQ ID NO: 60170

SEQ ID NO: 60180 - DNA, 201 bp, Homo sapiens; identical to SEQ ID NO: 60171

SEQ ID NO: 60181 - DNA, 201 bp, Homo sapiens; identical to SEQ ID NO: 60172

SEQ ID NO: 60182 - DNA, 201 bp, Homo sapiens; identical to SEQ ID NO: 60163

SEQ ID NO: 60183 - DNA, 201 bp, Homo sapiens; identical to SEQ ID NO: 60164

SEQ ID NO: 60184 - DNA, 201 bp, Homo sapiens
cgccgggtgaaggcgagagcctcggcgagccctctgcagcggagccccctgcccatttggttttggaaccaccgggaggaactgggccattctaacacccrttgctaccatgctggccacccgcctctccagacccctgtcacggctcccaggaaaaaccctaagtgcctgtgatagagaaaatggagcaagacgcccact

SEQ ID NO: 60185 - DNA, 201 bp, Homo sapiens; identical to SEQ ID NO: 60166

SEQ ID NO: 60186 - DNA, 201 bp, Homo sapiens; identical to SEQ ID NO: 60168

SEQ ID NO: 60187 - DNA, 201 bp, Homo sapiens; identical to SEQ ID NO: 60169

SEQ ID NO: 60188 - DNA, 201 bp, Homo sapiens; identical to SEQ ID NO: 60170

SEQ ID NO: 60189 - DNA, 201 bp, Homo sapiens; identical to SEQ ID NO: 60171

SEQ ID NO: 60190 - DNA, 201 bp, Homo sapiens; identical to SEQ ID NO: 60172

SEQ ID NO: 60191 - DNA, 201 bp, Homo sapiens; identical to SEQ ID NO: 60163

SEQ ID NO: 60192 - DNA, 201 bp, Homo sapiens; identical to SEQ ID NO: 60164

SEQ ID NO: 60193 - DNA, 201 bp, Homo sapiens
gacagctgaacttgaacatgtgggctgtcactgagagcggtcagcagaagaaaatttgagccatggaaccaccgggaggaactgggccattctaacacccrttgctaccatgctggccacccgcctctccagacccctgtcacggctcccaggaaaaaccctaagtgcctgtgatagagaaaatggagcaagacgcccact

SEQ ID NO: 60194 - DNA, 201 bp, Homo sapiens; identical to SEQ ID NO: 60166

SEQ ID NO: 60195 - DNA, 201 bp, Homo sapiens
tggtcacttgcctggagaggatcctgcatgctgatagtgctgaggcacctgccagctaaggtgagagacagctgaacttgaacatgtgggctgtcactgaragcggtcagcagaagaaaatttgagccatggaaccaccgggaggaactgggccattctaacacccgttgctaccatgctggccacccgcctctccagacc

SEQ ID NO: 60196 - DNA, 201 bp, Homo sapiens; identical to SEQ ID NO: 60168

SEQ ID NO: 60197 - DNA, 201 bp, Homo sapiens; identical to SEQ ID NO: 60169

SEQ ID NO: 60198 - DNA, 201 bp, Homo sapiens; identical to SEQ ID NO: 60170

SEQ ID NO: 60199 - DNA, 201 bp, Homo sapiens; identical to SEQ ID NO: 60171

SEQ ID NO: 60200 - DNA, 201 bp, Homo sapiens; identical to SEQ ID NO: 60172

SEQ ID NO: 60201 - DNA, 201 bp, Homo sapiens
tgaatgtcttcaagaccgacacccgcgctgagattgacttggtgtgtgagcttgcaaagcgggctggtgcctttgatgcagtcccctgctatcactggtcsgttggtggaaaaggatcggtggacttggctcgggctgtgagagaggctgcgagtaaaagaagccgattccagttcctgtatgatgttcaggttccaattg

SEQ ID NO: 60202 - DNA, 201 bp, Homo sapiens
aggactgcccacccggccctgcttttatgacatagatcttgataccgaaacagaacaagttaaaggcttgttctaagtggacaaggctctcacaggaccckatgcagactcctgaaacagactactctttgcctttttgctgcagttggagaagaaactgaatttgaaaaatgtctgttatgcaatgctggagacatggtg

SEQ ID NO: 60203 - DNA, 201 bp, Homo sapiens
  misc_feature (1)...(201): n = A,T,C or G
gacccgatgcagactcctgaaacagactactctttgcctttttgctgcagttggagaagaaactgaatttgaaaaatgtctgttatgcaatgctggagacntggtgaaataggccaaagatttcttcttcgttcaagatgaattctgttcacagtggagtatggtgttcggcaaaaggacctccaccaagactgaaagaaa

SEQ ID NO: 60204 - DNA, 201 bp, Homo sapiens
tgcaatgctggagacatggtgaaataggccaaagatttcttcttcgttcaagatgaattctgttcacagtggagtatggtgttcggcaaaaggacctccascaagactgaaagaaactaatttatttctgtttctgtggagtttccattatttctactgcttacactttagaatgtttattttatggggactaagggatta

SEQ ID NO: 60205 - DNA, 201 bp, Homo sapiens
ttgcccatctgcatggcaaagacccacctttctctatctcaccaacctgacaaaaaaggtgtgccaagggacttcatcttacctatcagtgacgtccgggycagcataggcgctgggttcatttaccctttggtcggaacgatgagcaccatgccaggactgcccacccggccctgcttttatgacatagatcttgatacc

SEQ ID NO: 60206 - DNA, 201 bp, Homo sapiens
gctgtgagagaggctgcgagtaaaagaagccgattccagttcctgtatgatgttcaggttccaattgtggacaagataaggaccattgctcaggctgtctrtggagccaaagatattgaactctctcctgaggcacaagccaaaatagatcgttacactcaacagggttttggaaatttgcccatctgcatggcaaagacc

SEQ ID NO: 60207 - DNA, 201 bp, Homo sapiens
tttatttctgtttctgtggagtttccattatttctactgcttacactttagaatgtttattttatggggactaagggattaggagtgtgaactaaaaggtracattttccactctcaagttttctactttgtctttgaactgaaaataaacatggatctagaaaaccaaccagcaagttttcagtgccagataaaactctg

SEQ ID NO: 60208 - DNA, 201 bp, Homo sapiens
caagactgaaagaaactaatttatttctgtttctgtggagtttccattatttctactgcttacactttagaatgtttattttatggggactaagggattargagtgtgaactaaaaggtaacattttccactctcaagttttctactttgtctttgaactgaaaataaacatggatctagaaaaccaaccagcaagttttc

SEQ ID NO: 60209 - DNA, 201 bp, Homo sapiens
cgaaacagaacaagttaaaggcttgttctaagtggacaaggctctcacaggacccgatgcagactcctgaaacagactactctttgcctttttgctgcagytggagaagaaactgaatttgaaaaatgtctgttatgcaatgctggagacatggtgaaataggccaaagatttcttcttcgttcaagatgaattctgttca

SEQ ID NO: 60210 - DNA, 201 bp, Homo sapiens
gagccaaagatattgaactctctcctgaggcacaagccaaaatagatcgttacactcaacagggttttggaaatttgcccatctgcatggcaaagacccayctttctctatctcaccaacctgacaaaaaaggtgtgccaagggacttcatcttacctatcagtgacgtccgggccagcataggcgctgggttcatttacc

SEQ ID NO: 60211 - DNA, 201 bp, Homo sapiens
cttgcaaagcgggctggtgcctttgatgcagtcccctgctatcactggtccgttggtggaaaaggatcggtggacttggctcgggctgtgagagaggctgygagtaaaagaagccgattccagttcctgtatgatgttcaggttccaattgtggacaagataaggaccattgctcaggctgtctatggagccaaagatatt

SEQ ID NO: 60212 - DNA, 201 bp, Homo sapiens; identical to SEQ ID NO: 60201

SEQ ID NO: 60213 - DNA, 201 bp, Homo sapiens; identical to SEQ ID NO: 60202

SEQ ID NO: 60214 - DNA, 201 bp, Homo sapiens; identical to SEQ ID NO: 60203
  misc_feature (1)...(201): n = A,T,C or G

SEQ ID NO: 60215 - DNA, 201 bp, Homo sapiens; identical to SEQ ID NO: 60204

SEQ ID NO: 60216 - DNA, 201 bp, Homo sapiens; identical to SEQ ID NO: 60205

SEQ ID NO: 60217 - DNA, 201 bp, Homo sapiens; identical to SEQ ID NO: 60206

SEQ ID NO: 60218 - DNA, 201 bp, Homo sapiens; identical to SEQ ID NO: 60207

SEQ ID NO: 60219 - DNA, 201 bp, Homo sapiens; identical to SEQ ID NO: 60208

SEQ ID NO: 60220 - DNA, 201 bp, Homo sapiens; identical to SEQ ID NO: 60209

SEQ ID NO: 60221 - DNA, 201 bp, Homo sapiens; identical to SEQ ID NO: 60210

SEQ ID NO: 60222 - DNA, 201 bp, Homo sapiens; identical to SEQ ID NO: 60211

SEQ ID NO: 60223 - DNA, 171 bp, Homo sapiens
ttccctatctccttcctctaagagctacacccagaccagctggttatcagcggaggccccgctgctcctcatgagaacgctggtggaagacgaaggtgatrgcagtggaggcagcatcccaggcagcctggagtacctcatcccggagcccccacttatcagtgcagtggt

SEQ ID NO: 60224 - DNA, 201 bp, Homo sapiens
tagccacataataggcgatgaggagataccagaaaactgcctggagcagttggagatgggatttccacggggagcccagccagccccactgctgtgctccrttctgaaggcctcgggttctctgcagcagctgtccctggatagtgccacctttgcctctccccaggattttgggcttgttttgcaaacactcaaagagta

SEQ ID NO: 60225 - DNA, 201 bp, Homo sapiens
tggagcctttggtcacctgcgcctcttccaaaactggctggaccaggatgcagtcacagccagggaagccatccggcggctccgggctacctgccatgtgkttagcgactcatgggactcatcccaggccttcgcagattatgttagcaccatgtgatggggcccgtacctcacagtctcatgctcggtaccatcagcttg

SEQ ID NO: 60226 - DNA, 201 bp, Homo sapiens
agcatgggctgcccagaaccccaaccaccagttctatctttctctttctgtcaccttttttctcttttttccttcttcccttgcactgaggtcctggaggycttgatgaggcccagcaaacaggcattctcacagctgggtttatagtctttgggccccttactcagtatcctgggaaccctgggccaggaggttacagtg

SEQ ID NO: 60227 - DNA, 171 bp, Homo sapiens; identical to SEQ ID NO: 60223

SEQ ID NO: 60228 - DNA, 201 bp, Homo sapiens; identical to SEQ ID NO: 60225

SEQ ID NO: 60229 - DNA, 201 bp, Homo sapiens; identical to SEQ ID NO: 60226

SEQ ID NO: 60230 - DNA, 171 bp, Homo sapiens; identical to SEQ ID NO: 60223

SEQ ID NO: 60231 - DNA, 201 bp, Homo sapiens; identical to SEQ ID NO: 60224

SEQ ID NO: 60232 - DNA, 201 bp, Homo sapiens; identical to SEQ ID NO: 60225

SEQ ID NO: 60233 - DNA, 201 bp, Homo sapiens; identical to SEQ ID NO: 60226

SEQ ID NO: 60234 - DNA, 201 bp, Homo sapiens
ctgactgcacttcagacctggcagggtggaaccactgcactgataagtgggggctccgggatgaggtactccaggctgcctgggatgctgcctccactgcyatcaccttcgtcttccaccagcgttctcatgaggagcagcggggcctccgctgataaccagctggtctgggtgtagctcttagaggaaggagatagggaa

SEQ ID NO: 60235 - DNA, 201 bp, Homo sapiens
accttgtctggacagcagtcagcatgaagcatttattcgaagcattttgtcaaagcctttcaaagtccccattccaaattatcaaggtcctctgggctctygagcattgggcctgaaaagggctggggtccgccgggccctccatgaccccctggaaaaagatgccttggttctgtatgagcctcccccgctgagcgctca

SEQ ID NO: 60236 - DNA, 201 bp, Homo sapiens
gctcatgggtacttgacgttttaaactcctaggcccaggatgaggaggagcttggctcccagccagctggccaagagaaaacctgaaggcaggtcctgtgrtgatgaagactggcaacctggcctagtgactcctaggaaacggaaatccagcagtgagacccagatccaggagtgtttcctgtctccttttcggaaacct

SEQ ID NO: 60237 - DNA, 201 bp, Homo sapiens
cttggttctgtatgagcctcccccgctgagcgctcatgaccagctgaagcttgacaaggagaaactccctgtccatgtggttgttgaccctattctcagtraggttttgcggcctcatcagagagagggagtgaaattcctgtgggagtgtgtcaccagtcggcgcatccctggcagccatggctgcatcatggctgatga

SEQ ID NO: 60238 - DNA, 201 bp, Homo sapiens
tctggtcatatgtgacgagggacacaggctcaagaactctgagaatcagacttaccaagccctggacagcttgaacaccagccggcgggtgctcatctccrgaactcccatccagaatgatctgcttgagtatttcagcttggtacattttgttaattccggcatcctagggactgcccatgaattcaagaagcattttga

SEQ ID NO: 60239 - DNA, 201 bp, Homo sapiens
gcttattggggacggccactctcacagtttggttccaaacaccagttcctggatggattcccgccatccatgccccctctttaattagccggtcctctcartaatgtagcagccccctctacagattagaccctggtcctacactcttagccgctgcctgcttttgacctttggctcatgggtacttgacgttttaaactc

SEQ ID NO: 60240 - DNA, 201 bp, Homo sapiens
gagtctgatcctggtttccacctccagccctgggaaatttcctttctccagactcgccctccccacccgggcctcggactttcaccccagcttctctctcytggccagtgattacccacccccaatcccaccccgccccgccgcgcaactacctcctcccttcacccggactgggaccatcatccccactccactccgccc

SEQ ID NO: 60241 - DNA, 201 bp, Homo sapiens; identical to SEQ ID NO: 60234

SEQ ID NO: 60242 - DNA, 201 bp, Homo sapiens; identical to SEQ ID NO: 60235

SEQ ID NO: 60243 - DNA, 201 bp, Homo sapiens
cagcgcggcgggaggttcgattgacccggtcttggcgggtcgaggaggagcttggctcccagccagctggccaagagaaaacctgaaggcaggtcctgtgrtgatgaagactggcaacctggcctagtgactcctaggaaacggaaatccagcagtgagacccagatccaggagtgtttcctgtctccttttcggaaacct

SEQ ID NO: 60244 - DNA, 201 bp, Homo sapiens; identical to SEQ ID NO: 60238

SEQ ID NO: 60245 - DNA, 201 bp, Homo sapiens; identical to SEQ ID NO: 60237

SEQ ID NO: 60246 - DNA, 147 bp, Homo sapiens
ccttatggttttggatgtaccatttgtttcttatttgtgtaactgtaagttcacatgaacctcatgggtttggcttaggctggtagcttctatgtaattcrcaatgattccatctaaataaaagttctatgatctgcaaacctgccc

SEQ ID NO: 60247 - DNA, 201 bp, Homo sapiens
agtgtggctctgccagctggccttctgcacggatcccctaacaacagtgagagagcaatgcgagcagttggagaaatgtgtaaaggcccgggagcggctasagctctgtgatgagcgtgtatcctctcgatcacatacagaagaggattgcacggaggagctctttgacttcttgcatgcgagggaccattgcgtggccca

SEQ ID NO: 60248 - DNA, 201 bp, Homo sapiens
ttgctgctcgtgttgaatctagaaccgtagccagacatgggactggaggacgagcaaaagatgcttaccgaatccggagatcctgaggaggaggaagaggragaggaggaattagtgataggactgaggctttcagtgcatactggcaaccttggaaggcaggaatgtgaaacttttccctactacttagcatcagaattg

SEQ ID NO: 60249 - DNA, 137 bp, Homo sapiens
aaatgtggttttggatgtaccatttgtttcttatttgtgtaactgtaagttcacatgaacctcatgggtttggcttaggctggtagcttctatgtaattcrcaatgattccatctaaataaaagttctatgatctgc

SEQ ID NO: 60250 - DNA, 201 bp, Homo sapiens
ggaggaggaagaggaagaggaggaattagtggatcccctaacaacagtgagagagcaatgcgagcagttggagaaatgtgtaaaggcccgggagcggctasagctctgtgatgagcgtgtatcctctcgatcacatacagaagaggattgcacggaggagctctttgacttcttgcatgcgagggaccattgcgtggccca

SEQ ID NO: 60251 - DNA, 201 bp, Homo sapiens
ttgctgctcgtgttgaatctagaaccgtagccagacatgggactggaggacgagcaaaagatgcttaccgaatccggagatcctgaggaggaggaagaggragaggaggaattagtggatcccctaacaacagtgagagagcaatgcgagcagttggagaaatgtgtaaaggcccgggagcggctagagctctgtgatgag

SEQ ID NO: 60252 - DNA, 147 bp, Homo sapiens; identical to SEQ ID NO: 60246

SEQ ID NO: 60253 - DNA, 201 bp, Homo sapiens
ccattttgttttttttctgtttctacatcaggatcccctaacaacagtgagagagcaatgcgagcagttggagaaatgtgtaaaggcccgggagcggctasagctctgtgatgagcgtgtatcctctcgatcacatacagaagaggattgcacggaggagctctttgacttcttgcatgcgagggaccattgcgtggccca

SEQ ID NO: 60254 - DNA, 201 bp, Homo sapiens
ttgctgctcgtgttgaatctagaaccgtagccagacatgggactggaggacgagcaaaagatgcttaccgaatccggagatcctgaggaggaggaagaggragaggaggaattagtggtaagaactgtctcaggtttggaaacatctcagtaaaagcagggtttgagcttcatgaaattctaagggcattttaaggagttt

SEQ ID NO: 60255 - DNA, 147 bp, Homo sapiens; identical to SEQ ID NO: 60246

SEQ ID NO: 60256 - DNA, 201 bp, Homo sapiens
gatgcttaccgaatccggagatcctgaggaggatcccctaacaacagtgagagagcaatgcgagcagttggagaaatgtgtaaaggcccgggagcggctasagctctgtgatgagcgtgtatcctctcgatcacatacagaagaggattgcacggaggagctctttgacttcttgcatgcgagggaccattgcgtggccca

SEQ ID NO: 60257 - DNA, 147 bp, Homo sapiens; identical to SEQ ID NO: 60246

SEQ ID NO: 60258 - DNA, 201 bp, Homo sapiens; identical to SEQ ID NO: 60250

SEQ ID NO: 60259 - DNA, 201 bp, Homo sapiens; identical to SEQ ID NO: 60251

SEQ ID NO: 60260 - DNA, 201 bp, Homo sapiens
tcccgtatgcccacccactctggttcggacagttcattggcttcctgaacatctatgagcctgactatgccaaagctgtgtacagccgtggggaccctaargcccctgatgtgtatgacttcttcctccagtggattgggagaggcctgctggttcttgaggggcccaagtggttgcagcaccgcaagctgctcacacctg

SEQ ID NO: 60261 - DNA, 201 bp, Homo sapiens
  misc_feature (1)...(201): n = A,T,C or G
ggctgaagtggacacattcatgtttgaaggccatgacaccaccaccagtggtatctcctggtttctctactgcatagccctgtaccctgagcaccagcatngttgtagagaggaggtccgcgagatcctaggggaccaggacttcttccagtgggatgatctgggcaaaatgacttatctgaccatgtgcatcaaggagag

SEQ ID NO: 60262 - DNA, 201 bp, Homo sapiens
gggcccaggaactgcattgggcagcagtttgccatgagtgagatgaaggtggtcacagccatgtgcttgctccgctttgagttctctctggacccctcacrgctgcccatcaagatgccccagcttgtcctgcgctccaagaatggctttcacctccacctgaagccactgggccctgggtctgggaagtagctctgatga

SEQ ID NO: 60263 - DNA, 201 bp, Homo sapiens
gcgctccaagaatggctttcacctccacctgaagccactgggccctgggtctgggaagtagctctgatgagaatggggtcccagatggctcaggctgtgamctccctgggcaccaccctccccaggctgggtgtggaggagttggggccccctgccttcaggaggcttgtagtttagaagggaagtaggcattaccataga

SEQ ID NO: 60264 - DNA, 201 bp, Homo sapiens
gagcaccagcatcgttgtagagaggaggtccgcgagatcctaggggaccaggacttcttccagtgggatgatctgggcaaaatgacttatctgaccatgtscatcaaggagagcttccgcctctacccacctgtgccccaggtgtaccgccagctcagcaagcctgtcacctttgtggatggccggtctctacctgcagga

SEQ ID NO: 60265 - DNA, 201 bp, Homo sapiens
gggtctgggaagtagctctgatgagaatggggtcccagatggctcaggctgtgacctccctgggcaccaccctccccaggctgggtgtggaggagttgggrccccctgccttcaggaggcttgtagtttagaagggaagtaggcattaccatagacgactcctagaggacagtgctatgtaaaaatgtgtgtctataaatg

SEQ ID NO: 60266 - DNA, 201 bp, Homo sapiens
tagagaggaggtccgcgagatcctaggggaccaggacttcttccagtgggatgatctgggcaaaatgacttatctgaccatgtgcatcaaggagagcttcygcctctacccacctgtgccccaggtgtaccgccagctcagcaagcctgtcacctttgtggatggccggtctctacctgcaggaagcctgatctctatgca

SEQ ID NO: 60267 - DNA, 201 bp, Homo sapiens
cattctcctgggtgcccgggtgaatgacatcaaactgtcagatgcagacctccgggctgaagtggacacattcatgtttgaaggccatgacaccaccaccrgtggtatctcctggtttctctactgcatagccctgtaccctgagcaccagcatcgttgtagagaggaggtccgcgagatcctaggggaccaggacttctt

SEQ ID NO: 60268 - DNA, 201 bp, Homo sapiens
tcaaactgtcagatgcagacctccgggctgaagtggacacattcatgtttgaaggccatgacaccaccaccagtggtatctcctggtttctctactgcatrgccctgtaccctgagcaccagcatcgttgtagagaggaggtccgcgagatcctaggggaccaggacttcttccagtgggatgatctgggcaaaatgactt

SEQ ID NO: 60269 - DNA, 201 bp, Homo sapiens
gctgctcacacctggctttcattatgatgtgctgaagccctatgtggccgtgttcactgagtctacacgtatcatgctggacaagtgggaagagaaagctygggagggtaagtcctttgacatcttctgcgatgtgggtcacatggcgctgaacacactcatgaagtgcacctttggaagaggagacaccggcctgggcca

SEQ ID NO: 60270 - DNA, 201 bp, Homo sapiens
ccaagtttgctgtggttctggaagaggacctggacattgctgtggattttttcagtttcctgagccaatccatccacctactggaggaggatgacagcctrtactgcatctctgcctggaatgaccaggggtatgaacacacggctgaggacccagcactactgtaccgtgtggagaccatgcctgggctgggctgggtgc

SEQ ID NO: 60271 - DNA, 201 bp, Homo sapiens
gaggagcttgagcccaagtggcctacaccggaaaagctctgggattgggacatgtggatgcggatgcctgaacaacgccggggccgagagtgcatcatccstgacgtttcccgatcctaccactttggcatcgtcggcctcaacatgaatggctactttcacgaggcctacttcaagaagcacaagttcaacacggttcca

SEQ ID NO: 60272 - DNA, 201 bp, Homo sapiens
caggccgaacctggagggcctggatttctttttgggctggaatgctgccctgagggtggggctggctcttactcaggaaactgctgtgcccaacccatggrcaggcccagctggggcccacatgctgacacagactcactcagagacccttagacactggaccaggcctcctctcagccttctctttgtccagatttccaa

SEQ ID NO: 60273 - DNA, 201 bp, Homo sapiens
ttcaagaagcacaagttcaacacggttccaggtgtccagctcaggaatgtggacagtctgaagaaagaagcttatgaagtggaagttcacaggctgctcartgaggctgaggttctggaccacagcaagaacccttgtgaagactctttcctgccagacacagagggccacacctacgtggcctttattcgaatggagaaa

SEQ ID NO: 60274 - DNA, 201 bp, Homo sapiens
ggagcctgggcagccaggctggccctgccctgggctggagggacacatgggccttcgtgggacgaaaaggaggtcctgtcttcggggagaaacattctaartcacctgccctctcttcctggggggacccagtcctgctgaagacagatgtgccattgagctcagcagaagaggcagagtgccactgggcagacacagagc

SEQ ID NO: 60275 - DNA, 201 bp, Homo sapiens
ggtgactgtcattgtcaatatcaagttgatcctggacactcggcgagccatcagtgaagccaatgaagacccagagccagagcaagactatgatgaggccytaggccgcctggagcccccacggcgcagaggcagtggtccccggcgggtcctggacgtagaggtgtattcaagtcgcagcaaagtatatgtggcagtgga

SEQ ID NO: 60276 - DNA, 201 bp, Homo sapiens
aacagttttcattgacggctactatgaggaacccatggatgtggtggcactgtttggtctgaggggcatccagcatactcccatcagcatcaagaatgccygcgtgtctcagcactacaaggccagcctcactgccactttcaacctgtttccggaggccaagtttgctgtggttctggaagaggacctggacattgctgt

SEQ ID NO: 60277 - DNA, 201 bp, Homo sapiens
gccgagcagtgagggccctagcggggcccgagcggggcccggggcccctaagcctatggacgactggaagcccagccccctcatcaagccctttggggctyggaagaagcggagctggtaccttacctggaagtataaactgacaaaccagcgggccctgcggagattctgtcagacaggggccgtgcttttcctgctggt

SEQ ID NO: 60278 - DNA, 201 bp, Homo sapiens; identical to SEQ ID NO: 60270

SEQ ID NO: 60279 - DNA, 201 bp, Homo sapiens; identical to SEQ ID NO: 60271

SEQ ID NO: 60280 - DNA, 201 bp, Homo sapiens; identical to SEQ ID NO: 60272

SEQ ID NO: 60281 - DNA, 201 bp, Homo sapiens; identical to SEQ ID NO: 60273

SEQ ID NO: 60282 - DNA, 201 bp, Homo sapiens
ttacaagaaggtcacatcatcctggcactgctcccagaaccagtgggcctcgaagcccagcttggcactctcatcctctggtgactcaggtggtccacctygaagcctctcccctgggggcttccacacagctctcaagctccctagcctggtggctgccacatccacctcagtcctggccctctctccaccagctataac

SEQ ID NO: 60283 - DNA, 201 bp, Homo sapiens; identical to SEQ ID NO: 60274

SEQ ID NO: 60284 - DNA, 201 bp, Homo sapiens; identical to SEQ ID NO: 60275

SEQ ID NO: 60285 - DNA, 201 bp, Homo sapiens; identical to SEQ ID NO: 60276

SEQ ID NO: 60286 - DNA, 201 bp, Homo sapiens
cgcagattcctgaagtcatgggctggccaggacattggtgacccgccaatccggtatggacgactggaagcccagccccctcatcaagccctttggggctyggaagaagcggagctggtaccttacctggaagtataaactgacaaaccagcgggccctgcggagattctgtcagacaggggccgtgcttttcctgctggt

SEQ ID NO: 60287 - DNA, 201 bp, Homo sapiens; identical to SEQ ID NO: 60270

SEQ ID NO: 60288 - DNA, 201 bp, Homo sapiens; identical to SEQ ID NO: 60271

SEQ ID NO: 60289 - DNA, 201 bp, Homo sapiens; identical to SEQ ID NO: 60272

SEQ ID NO: 60290 - DNA, 201 bp, Homo sapiens; identical to SEQ ID NO: 60273

SEQ ID NO: 60291 - DNA, 201 bp, Homo sapiens; identical to SEQ ID NO: 60282

SEQ ID NO: 60292 - DNA, 201 bp, Homo sapiens; identical to SEQ ID NO: 60275

SEQ ID NO: 60293 - DNA, 201 bp, Homo sapiens; identical to SEQ ID NO: 60276

SEQ ID NO: 60294 - DNA, 201 bp, Homo sapiens; identical to SEQ ID NO: 60286

SEQ ID NO: 60295 - DNA, 201 bp, Homo sapiens; identical to SEQ ID NO: 60270

SEQ ID NO: 60296 - DNA, 201 bp, Homo sapiens; identical to SEQ ID NO: 60271

SEQ ID NO: 60297 - DNA, 201 bp, Homo sapiens; identical to SEQ ID NO: 60272

SEQ ID NO: 60298 - DNA, 201 bp, Homo sapiens; identical to SEQ ID NO: 60273

SEQ ID NO: 60299 - DNA, 201 bp, Homo sapiens; identical to SEQ ID NO: 60274

SEQ ID NO: 60300 - DNA, 201 bp, Homo sapiens; identical to SEQ ID NO: 60275

SEQ ID NO: 60301 - DNA, 201 bp, Homo sapiens; identical to SEQ ID NO: 60276

SEQ ID NO: 60302 - DNA, 201 bp, Homo sapiens
aagccattcctgaagtcatgggctggccaggacattggtgacccgccaatccggtatggacgactggaagcccagccccctcatcaagccctttggggctyggaagaagcggagctggtaccttacctggaagtataaactgacaaaccagcgggccctgcggagattctgtcagacaggggccgtgcttttcctgctggt

SEQ ID NO: 60303 - DNA, 201 bp, Homo sapiens
attagatccgcattatgtgctcctagaagtccattatgataatcccacttatgaggaaggcttaatagataattctggactgaggttattttacacaatgratataaggaaatatgatgctggggtgattgaggctggcctctgggtgagcctcttccataccatccctccagggatgcctgagttccagtctgagggtca

SEQ ID NO: 60304 - DNA, 201 bp, Homo sapiens
ctttattacccaagaattaatcttactcgatgtgcaagtattccagacattatggaacaacttcagttcattggggttaaggagatctacagaccagtcargacctggcctttcattatcaaaagtcccaagcaatataaaaacctttctttcatggatgctatgaataagtttaaatggactaaaaaggaaggtctctcc

SEQ ID NO: 60305 - DNA, 201 bp, Homo sapiens
atcccttggcactccattagatccgcattatgtgctcctagaagtccattatgataatcccacttatgaggaaggcttaatagataattctggactgaggytattttacacaatggatataaggaaatatgatgctggggtgattgaggctggcctctgggtgagcctcttccataccatccctccagggatgcctgagtt

SEQ ID NO: 60306 - DNA, 201 bp, Homo sapiens
tatgtattaataactgatcataggctgaggagaaaaaatgtagctggctgcaaacccagtgctgtgaggtgacttatatgaggttccagatcaaagacagrccgtgtgagccagtccaggagggtgtaagttctgaatggttccttgctgactttgggtgacacatgtaccacatactggctcagtttaagtcatggttct

SEQ ID NO: 60307 - DNA, 201 bp, Homo sapiens
ttggggaggactaagcaccaggagtgaaatgtgtctctcataccttctttattacccaagaattaatcttactcgatgtgcaagtattccagacattatgsaacaacttcagttcattggggttaaggagatctacagaccagtcacgacctggcctttcattatcaaaagtcccaagcaatataaaaacctttctttcat

SEQ ID NO: 60308 - DNA, 201 bp, Homo sapiens
gacaggccgtgtgagccagtccaggagggtgtaagttctgaatggttccttgctgactttgggtgacacatgtaccacatactggctcagtttaagtcatsgttctattgtagatttatttttatattagttaataaatgactttaaattgtcaccaattgaaaatcttgtcactcttttggttttctttatatagctcag

SEQ ID NO: 60309 - DNA, 201 bp, Homo sapiens
caagattaccatctagaatatgccatggaaaatagcacacacacaataattgaatttaccagagagctgcatacatgtgacataaatgacaagagtataayggatagcactgtgagagtgatctgggcctaccaccatgaagatgcaggagaagctggtcccaagtaccatgactccaataggggcaccaagagtttgcgg

SEQ ID NO: 60310 - DNA, 201 bp, Homo sapiens; identical to SEQ ID NO: 60303

SEQ ID NO: 60311 - DNA, 201 bp, Homo sapiens; identical to SEQ ID NO: 60304

SEQ ID NO: 60312 - DNA, 201 bp, Homo sapiens; identical to SEQ ID NO: 60305

SEQ ID NO: 60313 - DNA, 201 bp, Homo sapiens; identical to SEQ ID NO: 60306

SEQ ID NO: 60314 - DNA, 201 bp, Homo sapiens; identical to SEQ ID NO: 60307

SEQ ID NO: 60315 - DNA, 201 bp, Homo sapiens; identical to SEQ ID NO: 60308

SEQ ID NO: 60316 - DNA, 201 bp, Homo sapiens; identical to SEQ ID NO: 60309

SEQ ID NO: 60317 - DNA, 201 bp, Homo sapiens; identical to SEQ ID NO: 60303

SEQ ID NO: 60318 - DNA, 201 bp, Homo sapiens; identical to SEQ ID NO: 60304

SEQ ID NO: 60319 - DNA, 201 bp, Homo sapiens; identical to SEQ ID NO: 60305

SEQ ID NO: 60320 - DNA, 201 bp, Homo sapiens; identical to SEQ ID NO: 60306

SEQ ID NO: 60321 - DNA, 201 bp, Homo sapiens; identical to SEQ ID NO: 60307

SEQ ID NO: 60322 - DNA, 201 bp, Homo sapiens; identical to SEQ ID NO: 60308

SEQ ID NO: 60323 - DNA, 201 bp, Homo sapiens; identical to SEQ ID NO: 60309

SEQ ID NO: 60324 - DNA, 201 bp, Homo sapiens
ttccaaccatccctgaagaagaagccaaaaaacttttcccgaaaggagtcttcaccaaagagctcccatctggcaagaaatacctccgctacacaccccarccttaagtctcttggagaagctggtgctgtgagccagaggatgtcagctgccaattgtgttttcctgcagcaattccataaacacatcctggtgtcatca

SEQ ID NO: 60325 - DNA, 201 bp, Homo sapiens
ttaattctgtaccttcctagtagataagtgaagagcagggaaagagacctttaaatattttgctataaaaaaatttgtgataagtttctatcaaaatgggragattgcagaaaaggcttcccttggctcccaaggaggtgtagcaggtgtgagcaatattagtgccatgtgcctttcacacagggtttgcatttatcagtc

SEQ ID NO: 60326 - DNA, 185 bp, Homo sapiens
ggaggtgtagcaggtgtgagcaatattagtgccatgtgcctttcacacagggtttgcatttatcagtctgttttccgatgatgtgtacatgaaagagtacmccatgtgaagagaagagagaatgattgaaaatgttttagtatagaactcttcttgcagtgggttgctattttctagattttact

SEQ ID NO: 60327 - DNA, 112 bp, Homo sapiens
tccgatgatgtgtacatgaaagagtacaccatgtgaagagaagagagaatgattgaaaatgttttagtatagaactcttcttgcagtgggttgctattttytagattttact

SEQ ID NO: 60328 - DNA, 201 bp, Homo sapiens
ttgtgaccaatgaagtcatatttgttgatggttgacaaagcttgcttcactccatcagagaatgactatcaatttttttttaactgtcctatcacgtcctstcctgtcacccattttgaagagtggcagaacttgaagttcaacttcctctgtaaatatccaagtataaagcccaggaacttctagaataacccagatgcg

SEQ ID NO: 60329 - DNA, 201 bp, Homo sapiens
gggaaagagacctttaaatattttgctataaaaaaatttgtgataagtttctatcaaaatggggagattgcagaaaaggcttcccttggctcccaaggagrtgtagcaggtgtgagcaatattagtgccatgtgcctttcacacagggtttgcatttatcagtctgttttccgatgatgtgtacatgaaagagtacaccat

SEQ ID NO: 60330 - DNA, 201 bp, Homo sapiens
aagccaaaaaacttttcccgaaaggagtcttcaccaaagagctcccatctggcaagaaatacctccgctacacaccccagccttaagtctcttggagaagytggtgctgtgagccagaggatgtcagctgccaattgtgttttcctgcagcaattccataaacacatcctggtgtcatcacagccaaggtttttaggttgc

SEQ ID NO: 60331 - DNA, 201 bp, Homo sapiens
gacagcagaaaaaagggttgccaccccagttgattggaaggatggggatagtgtgatggtccttccaaccatccctgaagaagaagccaaaaaacttttcmcgaaaggagtcttcaccaaagagctcccatctggcaagaaatacctccgctacacaccccagccttaagtctcttggagaagctggtgctgtgagccaga

SEQ ID NO: 60332 - DNA, 201 bp, Homo sapiens
tatgttttgatcacagaacttctagaataacccagatgctctttcatattcttttaatacatcttgatcacagctgggggaaaaaaagctttttaattctrtaccttcctagtagataagtgaagagcagggaaagagacctttaaatattttgctataaaaaaatttgtgataagtttctatcaaaatggggagattgca

SEQ ID NO: 60333 - DNA, 201 bp, Homo sapiens
gaaatacctccgctacacaccccagccttaagtctcttggagaagctggtgctgtgagccagaggatgtcagctgccaattgtgttttcctgcagcaattmcataaacacatcctggtgtcatcacagccaaggtttttaggttgctataccaatggcttattaaatgaaaatggcactaaaagtttcttgagattcttta

SEQ ID NO: 60334 - DNA, 201 bp, Homo sapiens
catccctgaagaagaagccaaaaaacttttcccgaaaggagtcttcaccaaagagctcccatctggcaagaaatacctccgctacacaccccagccttaastctcttggagaagctggtgctgtgagccagaggatgtcagctgccaattgtgttttcctgcagcaattccataaacacatcctggtgtcatcacagccaa

SEQ ID NO: 60335 - DNA, 132 bp, Homo sapiens
ttgcatttatcagtctgttttccgatgatgtgtacatgaaagagtacaccatgtgaagagaagagagaatgattgaaaatgttttagtatagaactcttcwtgcagtgggttgctattttctagattttact

SEQ ID NO: 60336 - DNA, 175 bp, Homo sapiens
caggtgtgagcaatattagtgccatgtgcctttcacacagggtttgcatttatcagtctgttttccgatgatgtgtacatgaaagagtacaccatgtgaaragaagagagaatgattgaaaatgttttagtatagaactcttcttgcagtgggttgctattttctagattttact

SEQ ID NO: 60337 - DNA, 201 bp, Homo sapiens; identical to SEQ ID NO: 60324

SEQ ID NO: 60338 - DNA, 201 bp, Homo sapiens; identical to SEQ ID NO: 60325

SEQ ID NO: 60339 - DNA, 201 bp, Homo sapiens
ggaggtgtagcaggtgtgagcaatattagtgccatgtgcctttcacacagggtttgcatttatcagtctgttttccgatgatgtgtacatgaaagagtacmccatgtgaagagaagagagaatgattgaaaatgttttagtatagaactcttcttgcagtgggttgctattttctagattttactttttagggaacaaaat

SEQ ID NO: 60340 - DNA, 149 bp, Homo sapiens
tccgatgatgtgtacatgaaagagtacaccatgtgaagagaagagagaatgattgaaaatgttttagtatagaactcttcttgcagtgggttgctattttytagattttactttttagggaacaaaataaaatcctttgttaaaactgg

SEQ ID NO: 60341 - DNA, 201 bp, Homo sapiens; identical to SEQ ID NO: 60328

SEQ ID NO: 60342 - DNA, 201 bp, Homo sapiens; identical to SEQ ID NO: 60329

SEQ ID NO: 60343 - DNA, 201 bp, Homo sapiens; identical to SEQ ID NO: 60330

SEQ ID NO: 60344 - DNA, 201 bp, Homo sapiens; identical to SEQ ID NO: 60331

SEQ ID NO: 60345 - DNA, 201 bp, Homo sapiens; identical to SEQ ID NO: 60332

SEQ ID NO: 60346 - DNA, 201 bp, Homo sapiens; identical to SEQ ID NO: 60333

SEQ ID NO: 60347 - DNA, 201 bp, Homo sapiens; identical to SEQ ID NO: 60334

SEQ ID NO: 60348 - DNA, 169 bp, Homo sapiens
ttgcatttatcagtctgttttccgatgatgtgtacatgaaagagtacaccatgtgaagagaagagagaatgattgaaaatgttttagtatagaactcttcwtgcagtgggttgctattttctagattttactttttagggaacaaaataaaatcctttgttaaaactgg

SEQ ID NO: 60349 - DNA, 201 bp, Homo sapiens
caggtgtgagcaatattagtgccatgtgcctttcacacagggtttgcatttatcagtctgttttccgatgatgtgtacatgaaagagtacaccatgtgaaragaagagagaatgattgaaaatgttttagtatagaactcttcttgcagtgggttgctattttctagattttactttttagggaacaaaataaaatccttt

SEQ ID NO: 60350 - DNA, 201 bp, Homo sapiens
gaagcagaaggatgctcactttctggtgacagaggtggaaaatggtggctccttgggcagcaagaagagtgtgaaccttcctggggctgccgtggacctgyctgccatgttggagaaggacatccaggacctgaagtttgggggcgagcaagatgtcgatatgatgttttcatcattcatctgcaagacatctgatgtcca

SEQ ID NO: 60351 - DNA, 201 bp, Homo sapiens
cacgctggataatacctacatggaaaagggtaagagaacatcctgtggcgggactacaagaacatctgcaaggtggtggaagtgggctgcaagatctacgwggatgatgggctaatttctctccaagtgaagcagaaggatgctcactttctggtgacagaggtggaaaatggtggctccttgggcagcaagaagagtgtg

SEQ ID NO: 60352 - DNA, 147 bp, Homo sapiens
atggagaacaacactaccagcaggtggctccggcagggccgtctgayggacggcgtagcccaagtcggtcagcactggaggacctcagaagccatgttgaagccccatagtgaagccagggctgccttcattcagacccagcagctg

SEQ ID NO: 60353 - DNA, 201 bp, Homo sapiens
ccagcagctgcacgcagccatggctgacacattcttggagcacatgtgctgcctggacactgactcgccacccatcacagcctggagcactggcatcatcygtactatgggcccagcttctccattgctagagatgctgaagaaaacgattaagtctggaattaatgtggctcatctgaactctcatggagcccatgagta

SEQ ID NO: 60354 - DNA, 101 bp, Homo sapiens
aggatgtggacctccgagtgaacttggccatgaatgttgctgtcctgcagcaaacacttcaccctccaccttccattttcccccactactgcagccgccty

SEQ ID NO: 60355 - DNA, 201 bp, Homo sapiens
aagccagggctgccttcattcagacccagcagctgcacgcagccatggctgacacattcttggagcacatgtgctgcctggacactgactcgccacccatyacagcctggagcactggcatcatccgtactatgggcccagcttctccattgctagagatgctgaagaaaacgattaagtctggaattaatgtggctcatc

SEQ ID NO: 60356 - DNA, 201 bp, Homo sapiens
ggagttctgccacctggcacccattaccagtgaccccgcagaagctactgccgtgggcactgtggaggcctccttcaagtgctgcagtggggccataatcrtcctcaccaagtctgcaggtgtgcccaccaggtggccagatactgcccacgctgaggatgtggacctccgagtgaacttggccatgaatgttgctgtcct

SEQ ID NO: 60357 - DNA, 201 bp, Homo sapiens; identical to SEQ ID NO: 60350

SEQ ID NO: 60358 - DNA, 201 bp, Homo sapiens; identical to SEQ ID NO: 60351

SEQ ID NO: 60359 - DNA, 201 bp, Homo sapiens; identical to SEQ ID NO: 60353

SEQ ID NO: 60360 - DNA, 201 bp, Homo sapiens; identical to SEQ ID NO: 60355

SEQ ID NO: 60361 - DNA, 113 bp, Homo sapiens
ctggctgcccatcatgtggccccacccaagcaagagaagaaggaggaatgcagaacagaggcccccagagtgtatggcaagagggtggcagcttcctttcytctgtgtactct

SEQ ID NO: 60362 - DNA, 201 bp, Homo sapiens
ggagttctgccacctggcacccattaccagtgaccccgcagaagctactgccgtgggcactgtggaggcctccttcaagtgctgcagtggggccataatcrtcctcaccaagtctgcaggtgtgcccaccaggtggccagatactgcccacgtgcccccatgattgttgtgacatggcatccccaggcagctcgccaggcc

SEQ ID NO: 60363 - DNA, 201 bp, Homo sapiens
gacatcatgaaaggtctataatgacggatctatactacctcagtcagacagatggagcaggtgattggcgggaaaaagaggccaaagatctgacagaactrgttcagcggagaataacatatcttcagaatcccaaggactgcagcaaagccaaaaagctggtgtgtaatatcaacaaaggctgtggctatggctgtcagc

SEQ ID NO: 60364 - DNA, 201 bp, Homo sapiens
ccggataccagaaggccctattgatcaggggccagctataggaagagtacgcgttttagaagagcagcttgttaaggccaaagaacagattgaaaattacmagaaacagaccagaaatggtctggggaaggatcatgaaatcctgaggaggaggattgaaaatggagctaaagagctctggtttttcctacagagtgaatt

SEQ ID NO: 60365 - DNA, 201 bp, Homo sapiens
ttttaaataattgcatcagttcattgacctcatcattaataagtgaagaatacatcagaaaataaaatattcactctccattagaaaattttgtaaaacartgccatgaacaaattctttagtactcaatgtttctggacattctctttgataacaaaaaataaattttaaaaaggaattttgtaaagtttctagaatttt

SEQ ID NO: 60366 - DNA, 201 bp, Homo sapiens
tgttttatataggtggtcacttggtacgagataatgaccatcctgatcactctagccgagaactgtccaagattctggcaaagcttgaacgcttaaaacarcagaatgaagacttgaggcgaatggccgaatctctccggataccagaaggccctattgatcaggggccagctataggaagagtacgcgttttagaagagc

SEQ ID NO: 60367 - DNA, 201 bp, Homo sapiens
ttcactccagtcaacagattcagaatgagaatggacgtttggtttttttttgtttttgtttttgttttttcctttataaggttgtctgttttttttttttwaaataattgcatcagttcattgacctcatcattaataagtgaagaatacatcagaaaataaaatattcactctccattagaaaattttgtaaaacaatgc

SEQ ID NO: 60368 - DNA, 201 bp, Homo sapiens
acggtcaagtaccccacatatcctgaggctgagaaataaagctcagatggaagagataaacgaccaaactcagttcgaccaaactcagttcaaaccatttsagccaaactgtagatgaagagggctctgatctaacaaaataaggttatatgagtagatactctcagcaccaagagcagctgggaactgacataggcttca

SEQ ID NO: 60369 - DNA, 201 bp, Homo sapiens
gcatatggcacccagcgaacactcatcttggaatctcagaattggcgctatgctactggtggatgggagactgtatttaggcctgtaagtgagacatgcamagacagatctggcatctccactggacactggtcaggtgaagtgaaggacaaaaatgttcaagtggtcgagcttcccattgtagacagtcttcatccccgt

SEQ ID NO: 60370 - DNA, 201 bp, Homo sapiens; identical to SEQ ID NO: 60363

SEQ ID NO: 60371 - DNA, 201 bp, Homo sapiens; identical to SEQ ID NO: 60364

SEQ ID NO: 60372 - DNA, 201 bp, Homo sapiens; identical to SEQ ID NO: 60365

SEQ ID NO: 60373 - DNA, 201 bp, Homo sapiens; identical to SEQ ID NO: 60366

SEQ ID NO: 60374 - DNA, 201 bp, Homo sapiens; identical to SEQ ID NO: 60367

SEQ ID NO: 60375 - DNA, 201 bp, Homo sapiens; identical to SEQ ID NO: 60368

SEQ ID NO: 60376 - DNA, 201 bp, Homo sapiens; identical to SEQ ID NO: 60369

SEQ ID NO: 60377 - DNA, 201 bp, Homo sapiens
aacgataccagaaggccctattgatcaggggccagctataggaagagtacgcgttttagaagagcagcttgttaaggccaaagaacagattgaaaattacmagaaacagaccagaaatggtctggggaaggatcatgaaatcctgaggaggaggattgaaaatggagctaaagagctctggtttttcctacagagtgaatt

SEQ ID NO: 60378 - DNA, 201 bp, Homo sapiens; identical to SEQ ID NO: 60363

SEQ ID NO: 60379 - DNA, 201 bp, Homo sapiens; identical to SEQ ID NO: 60365

SEQ ID NO: 60380 - DNA, 201 bp, Homo sapiens; identical to SEQ ID NO: 60367

SEQ ID NO: 60381 - DNA, 201 bp, Homo sapiens; identical to SEQ ID NO: 60368

SEQ ID NO: 60382 - DNA, 131 bp, Homo sapiens
cgcgttatctccggccgacccgagcagccgsttccctcctctccaggccccctccccatcccacccccgccgcctggccccagccgacccgtcccttcgtctccccgcggaatggggccggcactgctcag

SEQ ID NO: 60383 - DNA, 201 bp, Homo sapiens; identical to SEQ ID NO: 60369

SEQ ID NO: 60384 - DNA, 201 bp, Homo sapiens; identical to SEQ ID NO: 60365

SEQ ID NO: 60385 - DNA, 201 bp, Homo sapiens; identical to SEQ ID NO: 60368

SEQ ID NO: 60386 - DNA, 201 bp, Homo sapiens
gctggaactgtgccgtcccgctgtggcccgcggctctgctaggcggtggatgctgctgctacgctctccaccggcgcagcgaggaagggggcggggagaakccctggcacatgccagggtcgccgtaggtggcagcggccggcgcatgcgcgccctctcccagaagccaggaacgccgaggggcgcgctcccccattcgcg

SEQ ID NO: 60387 - DNA, 201 bp, Homo sapiens
cgcgcgcacgccggcgctggccgaggcttccccgcctgcgctcgttgtcagagccgctccggcgcgtgcgcgcgttatctccggccgacccgagcagccgsttccctcctctccaggccccctccccatcccacccccgccgcctggccccagccgacccgtcccttcgtctccccgcggaatggggccggcactgctcag

SEQ ID NO: 60388 - DNA, 201 bp, Homo sapiens; identical to SEQ ID NO: 60364

SEQ ID NO: 60389 - DNA, 201 bp, Homo sapiens; identical to SEQ ID NO: 60363

SEQ ID NO: 60390 - DNA, 201 bp, Homo sapiens; identical to SEQ ID NO: 60367

SEQ ID NO: 60391 - DNA, 201 bp, Homo sapiens; identical to SEQ ID NO: 60366

SEQ ID NO: 60392 - DNA, 201 bp, Homo sapiens; identical to SEQ ID NO: 60369

SEQ ID NO: 60393 - DNA, 201 bp, Homo sapiens; identical to SEQ ID NO: 60363

SEQ ID NO: 60394 - DNA, 201 bp, Homo sapiens; identical to SEQ ID NO: 60364

SEQ ID NO: 60395 - DNA, 201 bp, Homo sapiens; identical to SEQ ID NO: 60365

SEQ ID NO: 60396 - DNA, 201 bp, Homo sapiens; identical to SEQ ID NO: 60366

SEQ ID NO: 60397 - DNA, 201 bp, Homo sapiens; identical to SEQ ID NO: 60367

SEQ ID NO: 60398 - DNA, 201 bp, Homo sapiens; identical to SEQ ID NO: 60368

SEQ ID NO: 60399 - DNA, 201 bp, Homo sapiens; identical to SEQ ID NO: 60369

SEQ ID NO: 60400 - DNA, 131 bp, Homo sapiens; identical to SEQ ID NO: 60382

SEQ ID NO: 60401 - DNA, 186 bp, Homo sapiens
actctgggcgaggccgcccctatcccagccgcaccggtccttcccggcacacgcgaggctcccatggctctggcggtggccccgtrggggcgacagtgggaagaggcccgcgccctgggccgggcagtcaggatgctgcagcgcctagaagagcaatgcgtcgacccccggctgtccgtgagtccc

SEQ ID NO: 60402 - DNA, 201 bp, Homo sapiens
ggtgtgtgctgccctgggctgagtttgagtccctcctgggcacctgccaccctgtggaaccaggctgcacagccctggccttgcgcaccaccattgacctsacctgcagcgggcacgtgtccatcttcgagttcgacgtcttcaccaggctctttcagccatggccaacactcctcaagaactggcagctcctggcagtca

SEQ ID NO: 60403 - DNA, 201 bp, Homo sapiens
cagctggccaagctggccatcatcttcagccacatgcacgcagagctgcacgcactcttccccgggggaaagtactgtggacacatgtaccagctcaccamggcccccgcccacaccttctggagggaaagttgcggagcccggtgtgtgctgccctgggctgagtttgagtccctcctgggcacctgccaccctgtggaa

SEQ ID NO: 60404 - DNA, 201 bp, Homo sapiens
caacactcctcaagaactggcagctcctggcagtcaaccacccaggctacatggccttcctcacctatgatgaggtccaagagcgtctgcaggcctgcagrgacaagccaggcagttacatcttccggcccagctgtactcgcctggggcagtgggccatcggctatgtgagctcagatggcagcatcctgcagaccatcc

SEQ ID NO: 60405 - DNA, 201 bp, Homo sapiens
tgtcagaggagcagctgcagctctactgggccatggactccacatttgagctctgcaagatctgtgctgagagcaacaaggatgtgaagattgagccgtgygggcacctgctctgcagctgctgcctggctgcctggcagcactcggacagccagacctgccccttctgccgctgcgagatcaagggctgggaggccgtga

SEQ ID NO: 60406 - DNA, 201 bp, Homo sapiens
tggaggccaagagcaggcaggtggccgcgctgctgcctccccggggccgaaggagtgccaacgacgagctcttccgggcgggctccagactcaggcgacasctggccaagctggccatcatcttcagccacatgcacgcagagctgcacgcactcttccccgggggaaagtactgtggacacatgtaccagctcaccaagg

SEQ ID NO: 60407 - DNA, 201 bp, Homo sapiens
ggaggccaagagcaggcaggtggccgcgctgctgcctccccggggccgaaggagtgccaacgacgagctcttccgggcgggctccagactcaggcgacagstggccaagctggccatcatcttcagccacatgcacgcagagctgcacgcactcttccccgggggaaagtactgtggacacatgtaccagctcaccaaggc

SEQ ID NO: 60408 - DNA, 201 bp, Homo sapiens
caaggatgtgaagattgagccgtgcgggcacctgctctgcagctgctgcctggctgcctggcagcactcggacagccagacctgccccttctgccgctgcragatcaagggctgggaggccgtgagtatctaccagttccacggtcaggctactgctgaggactcagggaacagcagtgaccaggaaggcagggagttgga

SEQ ID NO: 60409 - DNA, 147 bp, Homo sapiens
gccgtccccaggcctggtccccacctgaacaacaggagtccaggccccagcccctcctccctcagactcaggagtccatactccagcccctcctccctcaracccaggagtccatactgcagcccctcctccctcagacccaggagt

SEQ ID NO: 60410 - DNA, 201 bp, Homo sapiens
cagctgctgcctggctgcctggcagcactcggacagccagacctgccccttctgccgctgcgagatcaagggctgggaggccgtgagtatctaccagttcyacggtcaggctactgctgaggactcagggaacagcagtgaccaggaaggcagggagttggagctggggcaggtgcccctttcggctcctccattgccccc

SEQ ID NO: 60411 - DNA, 186 bp, Homo sapiens; identical to SEQ ID NO: 60401

SEQ ID NO: 60412 - DNA, 201 bp, Homo sapiens; identical to SEQ ID NO: 60402

SEQ ID NO: 60413 - DNA, 201 bp, Homo sapiens; identical to SEQ ID NO: 60403

SEQ ID NO: 60414 - DNA, 201 bp, Homo sapiens
caacactcctcaagaactggcagctcctggcagtcaaccacccaggctacatggccttcctcacctatgatgaggtccaagagcgtctgcaggcctgcagrgacaagccaggcagctacctctacccagatggaaagacccacaacccagacctgactgagctcggccaggcagaaccccagcagcgcatccacgtgtcag

SEQ ID NO: 60415 - DNA, 201 bp, Homo sapiens; identical to SEQ ID NO: 60405

SEQ ID NO: 60416 - DNA, 201 bp, Homo sapiens; identical to SEQ ID NO: 60406

SEQ ID NO: 60417 - DNA, 201 bp, Homo sapiens; identical to SEQ ID NO: 60407

SEQ ID NO: 60418 - DNA, 201 bp, Homo sapiens; identical to SEQ ID NO: 60408

SEQ ID NO: 60419 - DNA, 147 bp, Homo sapiens; identical to SEQ ID NO: 60409

SEQ ID NO: 60420 - DNA, 201 bp, Homo sapiens; identical to SEQ ID NO: 60410

SEQ ID NO: 60421 - DNA, 186 bp, Homo sapiens; identical to SEQ ID NO: 60401

SEQ ID NO: 60422 - DNA, 201 bp, Homo sapiens; identical to SEQ ID NO: 60402

SEQ ID NO: 60423 - DNA, 201 bp, Homo sapiens; identical to SEQ ID NO: 60403

SEQ ID NO: 60424 - DNA, 201 bp, Homo sapiens; identical to SEQ ID NO: 60414

SEQ ID NO: 60425 - DNA, 201 bp, Homo sapiens; identical to SEQ ID NO: 60405

SEQ ID NO: 60426 - DNA, 190 bp, Homo sapiens
agacccaggagtccatactgcagcccctcctccctcagacccaggagtccatactgcagcccctccttcctcagacccagtagtccatactgcagcccctyctccctcagacccaggagtccaggccccagcccctcctccctcagacctaggagtccaggccccagcccctcctccctcagacccagga

SEQ ID NO: 60427 - DNA, 141 bp, Homo sapiens
catactgcagcccctccttcctcagacccagtagtccatactgcagcccctcctccctcagacccaggagtccaggccccagcccctcctccctcagaccyaggagtccaggccccagcccctcctccctcagacccagga

SEQ ID NO: 60428 - DNA, 201 bp, Homo sapiens; identical to SEQ ID NO: 60406

SEQ ID NO: 60429 - DNA, 201 bp, Homo sapiens
tcctccctcagacccaggagtccatactgcagcccctcctccctcagacccaggagtccatactccagcccctcctccctcagacccaggagtccatactscagcccctcctccctcagacccaggagtccatactgcagcccctccttcctcagacccaggagtccatactccagcccctcctccctcagacccaggagt

SEQ ID NO: 60430 - DNA, 201 bp, Homo sapiens; identical to SEQ ID NO: 60407

SEQ ID NO: 60431 - DNA, 201 bp, Homo sapiens
cccaggagtccatactgcagcccctcctccctcagacccaggagtccatactccagcccctcctccctcagacccaggagtccatactccagcccctcctycctcagacccaggagtccatactgcagcccctccttcctcagacccaggagtccatactccagcccctcctccctcagacccaggagtccatactgcagc

SEQ ID NO: 60432 - DNA, 201 bp, Homo sapiens
gccgtccccaggcctggtccccacctgaacaacaggagtccaggccccagcccctcctccctcagactcaggagtccatactccagcccctcctccctcaracccaggagtccatactgcagcccctcctccctcagacccaggagtccatactccagcccctcctccctcagacccaggagtccatactccagcccctcc

SEQ ID NO: 60433 - DNA, 201 bp, Homo sapiens; identical to SEQ ID NO: 60408

SEQ ID NO: 60434 - DNA, 201 bp, Homo sapiens
tcctccctcagacccaggagtccatactccagcccctcctccctcagacccaggagtccatactgcagcccctccttcctcagacccaggagtccatactscagcccctcctccctcagacccaggagtccatactgcagcccctcctccctcagacccaggagtccatactgcagcccctccttcctcagacccaggaat

SEQ ID NO: 60435 - DNA, 201 bp, Homo sapiens; identical to SEQ ID NO: 60410

SEQ ID NO: 60436 - DNA, 186 bp, Homo sapiens; identical to SEQ ID NO: 60401

SEQ ID NO: 60437 - DNA, 201 bp, Homo sapiens; identical to SEQ ID NO: 60402

SEQ ID NO: 60438 - DNA, 201 bp, Homo sapiens; identical to SEQ ID NO: 60403

SEQ ID NO: 60439 - DNA, 201 bp, Homo sapiens; identical to SEQ ID NO: 60404

SEQ ID NO: 60440 - DNA, 201 bp, Homo sapiens; identical to SEQ ID NO: 60405

SEQ ID NO: 60441 - DNA, 190 bp, Homo sapiens; identical to SEQ ID NO: 60426

SEQ ID NO: 60442 - DNA, 141 bp, Homo sapiens; identical to SEQ ID NO: 60427

SEQ ID NO: 60443 - DNA, 201 bp, Homo sapiens; identical to SEQ ID NO: 60406

SEQ ID NO: 60444 - DNA, 201 bp, Homo sapiens; identical to SEQ ID NO: 60429

SEQ ID NO: 60445 - DNA, 201 bp, Homo sapiens; identical to SEQ ID NO: 60407

SEQ ID NO: 60446 - DNA, 201 bp, Homo sapiens; identical to SEQ ID NO: 60431

SEQ ID NO: 60447 - DNA, 201 bp, Homo sapiens; identical to SEQ ID NO: 60432

SEQ ID NO: 60448 - DNA, 201 bp, Homo sapiens; identical to SEQ ID NO: 60408

SEQ ID NO: 60449 - DNA, 201 bp, Homo sapiens; identical to SEQ ID NO: 60434

SEQ ID NO: 60450 - DNA, 201 bp, Homo sapiens; identical to SEQ ID NO: 60410

SEQ ID NO: 60451 - DNA, 201 bp, Homo sapiens
accccatcatctcggatcgccacgggggctacaaacccactgacaagcacaagactgacctcaaccatgaaaacctcaagggtggagacgacctggacccyaactacgtgctcagcagccgcgtccgcactggccgcagcatcaagggctacacgttgcccccacactgctcccgtggcgagcgccgggcggtggagaagc

SEQ ID NO: 60452 - DNA, 201 bp, Homo sapiens
acctgggggctctctccacccttctcagagttccagtttcaaccagagttccaaccaatgggctccatcctctggattctggccaatgaaatatctccctrgcagggtcctcttcttttcccagagctccaccccaaccaggagctctagttaatggagagctcccagcacactcggagcttgtgctttgtctccacgcaa

SEQ ID NO: 60453 - DNA, 201 bp, Homo sapiens
atcggctgggctcgtccgaagtagaacaggtgcagctggtggtggatggtgtgaagctcatggtggaaatggagaagaagttggagaaaggccagtccatygacgacatgatccccgcccagaagtaggcgcctgcccacctgccaccgactgctggaacccagccagtgggagggcctggcccaccagagtcctgctccc

SEQ ID NO: 60454 - DNA, 201 bp, Homo sapiens
agtaggcgcctgcccacctgccaccgactgctggaacccagccagtgggagggcctggcccaccagagtcctgctccctcactcctcgccccgccccctgkcccagagtcccacctgggggctctctccacccttctcagagttccagtttcaaccagagttccaaccaatgggctccatcctctggattctggccaatga

SEQ ID NO: 60455 - DNA, 201 bp, Homo sapiens
tggcgctggtgtaccgggaccagaacaagtacaaagaagccacagaccttctccatgatgccctgcagatccgggagcagacgctgggccctgagcacccygcggtggccgccacgctcaacaacttggctgtcctctatgggaagcgtgggcgttaccgggaggcagagcccctgtgccagcgcgctttggagatccgag

SEQ ID NO: 60456 - DNA, 201 bp, Homo sapiens
tggccctgtcggcacatgtgggtgcactggaggcagagaagcagcggctgcgctcgcaggcccggcggctggcccaggagaacgtgtggctgcgggaggarctggaggagacgcagcggcggcttcgggccagcgaggagtccgtggcccagctggaggaggagaagcgccacctggagttcctggggcagctgcgacagt

SEQ ID NO: 60457 - DNA, 201 bp, Homo sapiens
ttggaggacctggagcgcagctcgggccactgccaccctgacgtggccaccatgctcaacatcctggcgctggtgtaccgggaccagaacaagtacaaagmagccacagaccttctccatgatgccctgcagatccgggagcagacgctgggccctgagcaccccgcggtggccgccacgctcaacaacttggctgtcctc

SEQ ID NO: 60458 - DNA, 169 bp, Homo sapiens
cgtccagtgaactgcgctggccgcagcttcttgggaacagtgcaggagggatgggctggtggggtgagagggggtctatcatctcctggcccccccttgcstctgggtacctggtggatagctgccttctcctgcgattaaaggctgtggacgtgacagtgagaaatgt

SEQ ID NO: 60459 - DNA, 201 bp, Homo sapiens; identical to SEQ ID NO: 60455

SEQ ID NO: 60460 - DNA, 201 bp, Homo sapiens; identical to SEQ ID NO: 60456

SEQ ID NO: 60461 - DNA, 201 bp, Homo sapiens; identical to SEQ ID NO: 60457

SEQ ID NO: 60462 - DNA, 169 bp, Homo sapiens; identical to SEQ ID NO: 60458

SEQ ID NO: 60463 - DNA, 201 bp, Homo sapiens
tgcaaaaatttaccttcaggcccccaaacaatgagaagctgagcctgaagtttagaatgggtatcaccatttccccagtcagtcaccgcctctgcgctgtwcctcaggtgtaatattgttaagaaagaaaggggcaaggaaagtaagaagacatggcacgtgttctgaaaccactggtgtctgctcagatgtgttgggaca

SEQ ID NO: 60464 - DNA, 201 bp, Homo sapiens
catattatggaatcagaatactgtaatgttgactttctttttcccaggattgattatgtcaagtggccaggcatggaaggagcaaagaaggttcactctgrcagcactaaggaactttggtttaggaaagaagagcttagaggaacgcattcaggaggaggcccaacacctcactgaagcaataaaagaggagaacggaca

SEQ ID NO: 60465 - DNA, 201 bp, Homo sapiens
aggattgattatgtcaagtggccaggcatggaaggagcaaagaaggttcactctgacagcactaaggaactttggtttaggaaagaagagcttagaggaaygcattcaggaggaggcccaacacctcactgaagcaataaaagaggagaacggacagccttttgaccctcatttcaagatcaacaatgcagtttccaatat

SEQ ID NO: 60466 - DNA, 201 bp, Homo sapiens
gcacacaggcaatcctacttcaagtttccatgaagaaaacctcatctgcagcaccctggacctcttctttgccggaaccgagacaacttccacaactctgmgatgggctctgctttatatggccctctacccagaaatccaagaaaaagtacaagctgagattgacagagtgattggccaggggcagcagccgagcacagc

SEQ ID NO: 60467 - DNA, 201 bp, Homo sapiens
gtaaatattagccattatatccattgctttgggattatttctctgggcagttttcaagtgccttaatgatcttctcctgtccttcatctgatacacattcycatatcatttgctggatattcatattatggaatcagaatactgtaatgttgactttctttttcccaggattgattatgtcaagtggccaggcatggaagg

SEQ ID NO: 60468 - DNA, 201 bp, Homo sapiens
ttgtacctatcccagagagtttctatgagtactaaattatataatgcacaacaaaatgcatattaaagtgcctgccattgcaagcaatcagtaaatattakccattatatccattgctttgggattatttctctgggcagttttcaagtgccttaatgatcttctcctgtccttcatctgatacacattcccatatcattt

SEQ ID NO: 60469 - DNA, 201 bp, Homo sapiens
tctgctcagatgtgttgggacaaaatgaaagtgactttcaagaaagatcagaggaatttgactcagagaaaactagatccaaatcccagctctactgtctygtccgaattagccttgggaaaatcatttatatgctaaataatttacctttttatctaggagatgaaaagaggataatgtttccttccataaagaaagttc

SEQ ID NO: 60470 - DNA, 201 bp, Homo sapiens
tcctcaggtgtaatattgttaagaaagaaaggggcaaggaaagtaagaagacatggcacgtgttctgaaaccactggtgtctgctcagatgtgttgggacmaaatgaaagtgactttcaagaaagatcagaggaatttgactcagagaaaactagatccaaatcccagctctactgtctcgtccgaattagccttgggaaa

SEQ ID NO: 60471 - DNA, 201 bp, Homo sapiens
tcatattatggaatcagaatactgtaatgttgactttctttttcccaggattgattatgtcaagtggccaggcatggaaggagcaaagaaggttcactctkacagcactaaggaactttggtttaggaaagaagagcttagaggaacgcattcaggaggaggcccaacacctcactgaagcaataaaagaggagaacggac

SEQ ID NO: 60472 - DNA, 201 bp, Homo sapiens
cctgaagtttagaatgggtatcaccatttccccagtcagtcaccgcctctgcgctgttcctcaggtgtaatattgttaagaaagaaaggggcaaggaaagyaagaagacatggcacgtgttctgaaaccactggtgtctgctcagatgtgttgggacaaaatgaaagtgactttcaagaaagatcagaggaatttgactca

SEQ ID NO: 60473 - DNA, 201 bp, Homo sapiens
attggccaggggcagcagccgagcacagccgcccgggagtccatgccctacaccaatgctgtcatccatgaggtgcagagaatgggcaacatcatcccccwgaacgttcccagggaagtgacagttgataccactttggctgggtaccacctgcccaagaacatctcaccagactagggatctgccaaactttgggaaatt

SEQ ID NO: 60474 - DNA, 160 bp, Homo sapiens
agatttaatagaagatgaaccagcaaaatatataggaagttgctggcagagaattaggamgaaaatctggagacagtggtatcctgagcaccactggaaggcagtatttcaagaaagaagtgtctactgctgctgcaagtaagacgaggtcaaaaggtat

SEQ ID NO: 60475 - DNA, 177 bp, Homo sapiens
agatttaatagaagatgaaccagcaaaatatataggaagttgctggcagagaattaggacgaaaatctggagacagkggtatcctgagcaccactggaaggcagtatttcaagaaagaagtgtctactgctgctgcaagtaagacgaggtcaaaaggtatccggaccaattcagtgg

SEQ ID NO: 60476 - DNA, 197 bp, Homo sapiens
caaatcccagctctactgtctcgtccgaattagccttgggaaaatcatttatatgctaaataatttacctttttatctaggagatgaaaagaggataatgwttccttccataaagaaagttcttgtaagaatcaaaagaaatggtgagctttaagtggtttgtaaaccataaaacacatcataaaagttctatctat

SEQ ID NO: 60477 - DNA, 201 bp, Homo sapiens
attcaggaggaggcccaacacctcactgaagcaataaaagaggagaacggacagccttttgaccctcatttcaagatcaacaatgcagtttccaatatcawttgctccatcaccttcggagaacgctttgagtaccaggatagttggtttcagcagctgctgaagttactagatgaagtcacatacttggaggcttcaaag

SEQ ID NO: 60478 - DNA, 201 bp, Homo sapiens
tgctaaaatgtgaaaggacatttaagaccacctgggacaacatcatattaatgctggtgtttttaacataatatccccacagggtaccatgatcctgaccwatttgacggcgctgcacagggaccccacagagtgggccacccctgacacattcaatccggaccattttctggagaatggacagtttaagaaaagggaagc

SEQ ID NO: 60479 - DNA, 102 bp, Homo sapiens
taatgtttccttccataaagaaagttcttgtaagaatcaaaagaaatggtgagctttaagtggtttgtaaaccataaaacacatcataaaagttctatctrt

SEQ ID NO: 60480 - DNA, 201 bp, Homo sapiens; identical to SEQ ID NO: 60463

SEQ ID NO: 60481 - DNA, 201 bp, Homo sapiens
attactggcttgcccttaatcaaagaagcccttatccacatggaccaaaactttgggaaccgccccgtgacccctatgcgagaacatatctttaagaaaartggattgattatgtcaagtggccaggcatggaaggagcaaagaaggttcactctgacagcactaaggaactttggtttaggaaagaagagcttagaggaa

SEQ ID NO: 60482 - DNA, 201 bp, Homo sapiens
gaaccgccccgtgacccctatgcgagaacatatctttaagaaaaatggattgattatgtcaagtggccaggcatggaaggagcaaagaaggttcactctgrcagcactaaggaactttggtttaggaaagaagagcttagaggaacgcattcaggaggaggcccaacacctcactgaagcaataaaagaggagaacggaca

SEQ ID NO: 60483 - DNA, 201 bp, Homo sapiens
tggattgattatgtcaagtggccaggcatggaaggagcaaagaaggttcactctgacagcactaaggaactttggtttaggaaagaagagcttagaggaaygcattcaggaggaggcccaacacctcactgaagcaataaaagaggagaacggacagccttttgaccctcatttcaagatcaacaatgcagtttccaatat

SEQ ID NO: 60484 - DNA, 201 bp, Homo sapiens; identical to SEQ ID NO: 60466

SEQ ID NO: 60485 - DNA, 201 bp, Homo sapiens; identical to SEQ ID NO: 60469

SEQ ID NO: 60486 - DNA, 201 bp, Homo sapiens; identical to SEQ ID NO: 60470

SEQ ID NO: 60487 - DNA, 201 bp, Homo sapiens
ggaaccgccccgtgacccctatgcgagaacatatctttaagaaaaatggattgattatgtcaagtggccaggcatggaaggagcaaagaaggttcactctkacagcactaaggaactttggtttaggaaagaagagcttagaggaacgcattcaggaggaggcccaacacctcactgaagcaataaaagaggagaacggac

SEQ ID NO: 60488 - DNA, 201 bp, Homo sapiens; identical to SEQ ID NO: 60472

SEQ ID NO: 60489 - DNA, 201 bp, Homo sapiens
attggccaggggcagcagccgagcacagccgcccgggagtccatgccctacaccaatgctgtcatccatgaggtgcagagaatgggcaacatcatcccccwgaacgttcccagggaagtgacagttgataccactttggctgggtaccacctgcccaagggtaccatgatcctgaccaatttgacggcgctgcacagggac

SEQ ID NO: 60490 - DNA, 201 bp, Homo sapiens
ccatcctcggactctcctactgggcactgtcgcctttctgctcgctgctgactttctcaaaagacggcgcccaaagaactacccgccggggccctggcgcytgcccttccttggcaacttcttccttgtggacttcgagcagtcgcacctggaggttcagctgtttgtgaagaaatatgggaacctttttagcttggagct

SEQ ID NO: 60491 - DNA, 201 bp, Homo sapiens; identical to SEQ ID NO: 60477

SEQ ID NO: 60492 - DNA, 197 bp, Homo sapiens; identical to SEQ ID NO: 60476

SEQ ID NO: 60493 - DNA, 102 bp, Homo sapiens; identical to SEQ ID NO: 60479

SEQ ID NO: 60494 - DNA, 201 bp, Homo sapiens
gagaatgggcaacatcatccccctgaacgttcccagggaagtgacagttgataccactttggctgggtaccacctgcccaagggtaccatgatcctgaccwatttgacggcgctgcacagggaccccacagagtgggccacccctgacacattcaatccggaccattttctggagaatggacagtttaagaaaagggaagc

SEQ ID NO: 60495 - DNA, 201 bp, Homo sapiens
tttttagcttggagcttggtgacatatctgcagttcttattactggcttgcccttaatcaaagaagcccttatccacatggaccaaaactttgggaaccgscccgtgacccctatgcgagaacatatctttaagaaaaatggattgattatgtcaagtggccaggcatggaaggagcaaagaaggttcactctgacagcac

SEQ ID NO: 60496 - DNA, 201 bp, Homo sapiens
tgtttgtgaagaaatatgggaacctttttagcttggagcttggtgacatatctgcagttcttattactggcttgcccttaatcaaagaagcccttatccayatggaccaaaactttgggaaccgccccgtgacccctatgcgagaacatatctttaagaaaaatggattgattatgtcaagtggccaggcatggaaggagc

SEQ ID NO: 60497 - DNA, 201 bp, Homo sapiens; identical to SEQ ID NO: 60463

SEQ ID NO: 60498 - DNA, 201 bp, Homo sapiens; identical to SEQ ID NO: 60489

SEQ ID NO: 60499 - DNA, 201 bp, Homo sapiens
cttcgagcagtcgcacctggaggttcagctggtaggagtgggagaaggattgattatgtcaagtggccaggcatggaaggagcaaagaaggttcactctgrcagcactaaggaactttggtttaggaaagaagagcttagaggaacgcattcaggaggaggcccaacacctcactgaagcaataaaagaggagaacggaca

SEQ ID NO: 60500 - DNA, 201 bp, Homo sapiens; identical to SEQ ID NO: 60465

SEQ ID NO: 60501 - DNA, 201 bp, Homo sapiens
ccatcctcggactctcctactgggcactgtcgcctttctgctcgctgctgactttctcaaaagacggcgcccaaagaactacccgccggggccctggcgcytgcccttccttggcaacttcttccttgtggacttcgagcagtcgcacctggaggttcagctggtaggagtgggagaaggattgattatgtcaagtggcca

SEQ ID NO: 60502 - DNA, 201 bp, Homo sapiens; identical to SEQ ID NO: 60466

SEQ ID NO: 60503 - DNA, 197 bp, Homo sapiens; identical to SEQ ID NO: 60476

SEQ ID NO: 60504 - DNA, 201 bp, Homo sapiens; identical to SEQ ID NO: 60477

SEQ ID NO: 60505 - DNA, 201 bp, Homo sapiens; identical to SEQ ID NO: 60494

SEQ ID NO: 60506 - DNA, 201 bp, Homo sapiens; identical to SEQ ID NO: 60469

SEQ ID NO: 60507 - DNA, 102 bp, Homo sapiens; identical to SEQ ID NO: 60479

SEQ ID NO: 60508 - DNA, 201 bp, Homo sapiens; identical to SEQ ID NO: 60470

SEQ ID NO: 60509 - DNA, 201 bp, Homo sapiens
acttcgagcagtcgcacctggaggttcagctggtaggagtgggagaaggattgattatgtcaagtggccaggcatggaaggagcaaagaaggttcactctkacagcactaaggaactttggtttaggaaagaagagcttagaggaacgcattcaggaggaggcccaacacctcactgaagcaataaaagaggagaacggac

SEQ ID NO: 60510 - DNA, 201 bp, Homo sapiens; identical to SEQ ID NO: 60472

SEQ ID NO: 60511 - DNA, 201 bp, Homo sapiens
ggcgttcggcgagcggggccgctgcttgttgcgctcctggctctcccggggcgggcgcagatgggcgccgctcccgggatgtagttggtgttggtgcaagrcgggagcgagcggcggtcggggttcccgctcttgggagcggatggtcactcccccgcggggagggcgagccgaccagattttcctggggccggggacccg

SEQ ID NO: 60512 - DNA, 197 bp, Homo sapiens
gtggcccatcccgtctgctctctgtcccgtctcccgacccgtacgcttttccctcaactcgcgcgcacgaatggttaaaaaaagggtgtgaggctcragcccgccagccaggccgctagcacctcgcgcgcgccctcagcgaggacccgcacgagctgcccggctctgtgcctgcgttgtttgaaactgtggaaccc

SEQ ID NO: 60513 - DNA, 201 bp, Homo sapiens
actgtgagaagagagaaaacttgttaccatttgtgggactgaataatctcggcaatacttgctatcttaatagtatacttcaggtattatatttttgtccsggttttaaatctggagtaaagcacttatttaatattatttcaaggaagaaagaagctctaaaggatgaagccaatcaaaaagacaagggaaattgcaaag

SEQ ID NO: 60514 - DNA, 201 bp, Homo sapiens
tgagactgaggaaaacgcgccaagttcccctcggtggcggagtgctaaagaccctagcggttcaggcgttcggcgagcggggccgctgcttgttgcgctcytggctctcccggggcgggcgcagatgggcgccgctcccgggatgtagttggtgttggtgcaagacgggagcgagcggcggtcggggttcccgctcttggg

SEQ ID NO: 60515 - DNA, 201 bp, Homo sapiens; identical to SEQ ID NO: 60511

SEQ ID NO: 60516 - DNA, 201 bp, Homo sapiens
tagagtgagtgtattttccttgtgtatatattaaacacacccatacaaacattggtaaagttgattacatcaaagaatctttagcttatcttttgaagctmctggatattattggtctctctaggtttttatataaatagtgaaatttgaattactgaaaaccatgttaatttttagaactcattttcctcagtagagact

SEQ ID NO: 60517 - DNA, 197 bp, Homo sapiens; identical to SEQ ID NO: 60512

SEQ ID NO: 60518 - DNA, 201 bp, Homo sapiens
taaacacacccatacaaacattggtaaagttgattacatcaaagaatctttagcttatcttttgaagctactggatattattggtctctctaggtttttayataaatagtgaaatttgaattactgaaaaccatgttaatttttagaactcattttcctcagtagagactagtgatgcattagcttctgggaacaaacttg

SEQ ID NO: 60519 - DNA, 201 bp, Homo sapiens
tacatctcctacttctactccttacttgctattttataagaaattatagagtgagtgtattttccttgtgtatatattaaacacacccatacaaacattgktaaagttgattacatcaaagaatctttagcttatcttttgaagctactggatattattggtctctctaggtttttatataaatagtgaaatttgaattac

SEQ ID NO: 60520 - DNA, 201 bp, Homo sapiens; identical to SEQ ID NO: 60513

SEQ ID NO: 60521 - DNA, 201 bp, Homo sapiens; identical to SEQ ID NO: 60514

SEQ ID NO: 60522 - DNA, 201 bp, Homo sapiens
aaacattggtaaagttgattacatcaaagaatctttagcttatcttttgaagctactggatattattggtctctctaggtttttatataaatagtgaaatytgaattactgaaaaccatgttaatttttagaactcattttcctcagtagagactagtgatgcattagcttctgggaacaaacttgtatcggttcttaatt

SEQ ID NO: 60523 - DNA, 148 bp, Homo sapiens
gtaagtgatgaatgatttcatgacttgttaatggacattcttggtactaagtttttcctagaaatgattctaaatatgtaaatgctattggggtaacactwtaataccccatttcaacaaggagtaccttctcaattaaaaaaaaatc

SEQ ID NO: 60524 - DNA, 156 bp, Homo sapiens
ctgaagtggtaagtgatgaatgatttcatgacttgttaatggacattcttggtactaagtttttcctagaaatgattctaaatatgtaaatgctattgggrtaacactttaataccccatttcaacaaggagtaccttctcaattaaaaaaaaatc

SEQ ID NO: 60525 - DNA, 201 bp, Homo sapiens
ttaagatgatgctttgggcacacataaaaacttggttaaaatttcattttaaactagtatactgaagtggtaagtgatgaatgatttcatgacttgttaakggacattcttggtactaagtttttcctagaaatgattctaaatatgtaaatgctattggggtaacactttaataccccatttcaacaaggagtaccttct

SEQ ID NO: 60526 - DNA, 201 bp, Homo sapiens; identical to SEQ ID NO: 60516

SEQ ID NO: 60527 - DNA, 201 bp, Homo sapiens; identical to SEQ ID NO: 60518

SEQ ID NO: 60528 - DNA, 201 bp, Homo sapiens; identical to SEQ ID NO: 60519

SEQ ID NO: 60529 - DNA, 201 bp, Homo sapiens; identical to SEQ ID NO: 60513

SEQ ID NO: 60530 - DNA, 201 bp, Homo sapiens; identical to SEQ ID NO: 60522

SEQ ID NO: 60531 - DNA, 148 bp, Homo sapiens; identical to SEQ ID NO: 60523

SEQ ID NO: 60532 - DNA, 156 bp, Homo sapiens; identical to SEQ ID NO: 60524

SEQ ID NO: 60533 - DNA, 201 bp, Homo sapiens; identical to SEQ ID NO: 60525

SEQ ID NO: 60534 - DNA, 201 bp, Homo sapiens; identical to SEQ ID NO: 60516

SEQ ID NO: 60535 - DNA, 201 bp, Homo sapiens; identical to SEQ ID NO: 60518

SEQ ID NO: 60536 - DNA, 201 bp, Homo sapiens; identical to SEQ ID NO: 60519

SEQ ID NO: 60537 - DNA, 201 bp, Homo sapiens; identical to SEQ ID NO: 60513

SEQ ID NO: 60538 - DNA, 201 bp, Homo sapiens; identical to SEQ ID NO: 60522

SEQ ID NO: 60539 - DNA, 148 bp, Homo sapiens; identical to SEQ ID NO: 60523

SEQ ID NO: 60540 - DNA, 156 bp, Homo sapiens; identical to SEQ ID NO: 60524

SEQ ID NO: 60541 - DNA, 201 bp, Homo sapiens; identical to SEQ ID NO: 60525

SEQ ID NO: 60542 - DNA, 147 bp, Homo sapiens
aacggaggcggggcttaccgcgagggcctcgctccggaagccgcacyctccgcggcgtcccaccgtcgaggattaacaaaacgccaaacaagattttaacagtcggcagcgaaagcgcgcactcgagcgccaatgagagcggaagga

SEQ ID NO: 60543 - DNA, 201 bp, Homo sapiens
cccttgcttaagcatcatctgaatccagccccatgtactcttctgaagctcctgttggtacgtgcttgtctaggtcttacatcttctttggggaacagtcmtttacctctacccatcaggcagccttcttgaggagcaggtgcagagagagacaaagctggagcataagatgtgaaaggaagggagaggaagtaggactga

SEQ ID NO: 60544 - DNA, 201 bp, Homo sapiens; identical to SEQ ID NO: 60516

SEQ ID NO: 60545 - DNA, 201 bp, Homo sapiens; identical to SEQ ID NO: 60518

SEQ ID NO: 60546 - DNA, 201 bp, Homo sapiens; identical to SEQ ID NO: 60519

SEQ ID NO: 60547 - DNA, 201 bp, Homo sapiens; identical to SEQ ID NO: 60513

SEQ ID NO: 60548 - DNA, 101 bp, Homo sapiens
taagtttttcctagaaatgattctaaatatgtaaatgctattggggtaacactttaataccccatttcaacaaggagtaccttctcaattaaaaaaaaatk

SEQ ID NO: 60549 - DNA, 201 bp, Homo sapiens; identical to SEQ ID NO: 60522

SEQ ID NO: 60550 - DNA, 148 bp, Homo sapiens; identical to SEQ ID NO: 60523

SEQ ID NO: 60551 - DNA, 156 bp, Homo sapiens; identical to SEQ ID NO: 60524

SEQ ID NO: 60552 - DNA, 201 bp, Homo sapiens; identical to SEQ ID NO: 60525

SEQ ID NO: 60553 - DNA, 201 bp, Homo sapiens
ttttgtttgtttccttttatctccttccacgggccaggcgagcgccgcccgccctcactggccttgtgacggtttattctgattgagaactgggcggactygaaagagtccccttttccgcacagctgtgttgactttttaattacttttaggtgatgtatggctaagatttcactttaagcagtcgtgaactgtgcgagc

SEQ ID NO: 60554 - DNA, 201 bp, Homo sapiens
agagcatctggtcccgcctgcaggagacgggcctccggggcaaatgcgagtgcatccgcggacgcaaggccaccctggaggagctacagacggtgcactcrgaagcccacaccctcctgtatggcacgaaccccctcaaccggcagaaactggacagtaagaaacttctaggctcgctcgcctccgtgttcgtccggctcc

SEQ ID NO: 60555 - DNA, 201 bp, Homo sapiens
taacatggactgctcagtggccaggttatcagtggggggacttaattctaatctcattcaaatggagacgccctctgcaaaggcctggcagggggaggcaygtttcatctgtcagctcactccagcttcacaaatgtgctgagagcattactgtgtagccttttctttgaagacacactcggctcttctccacagcaagcg

SEQ ID NO: 60556 - DNA, 201 bp, Homo sapiens
ccaacgattgtgtctttcctggtctgtcctaggagctgtataaagaagcccaggggctctttttaactttcaacactagtagtattacgaggggtggtgtrtttttcccctccgtggcaagggcagggagggttgcttaggatgcccggccaccctgggaggcttgccagatgccgggggcagtcagcattaatgaaactc

SEQ ID NO: 60557 - DNA, 201 bp, Homo sapiens
gaggaacaatgccttaagaaaaaacaaacagcaggaatcggtgggacagtttcctgtggccagccgagcctggcagtgctggcaccgcgagctggcctgaygcctcaagcacgggcaccagccgtcatctccggggccaggggctgcagcccggcggtccctgttttgctttattgctgtttaagaaaaatggaggtagtt

SEQ ID NO: 60558 - DNA, 201 bp, Homo sapiens
ccaagcttctgcagcagaggttgagcgtgagcaagatcctcatcgtggactgggacgtgcaccatggaaacgggacccagcaggctttctacagcgacccyagcgtcctgtacatgtccctccaccgctacgacgatgggaacttcttcccaggcagcggggctcctgatgaggtgggcacagggcccggcgtgggtttca

SEQ ID NO: 60559 - DNA, 201 bp, Homo sapiens
ttggaggaattttgttttgttttgttttgtttgtttccttttatctccttccacgggccaggcgagcgccgcccgccctcactggccttgtgacggtttawtctgattgagaactgggcggactcgaaagagtccccttttccgcacagctgtgttgactttttaattacttttaggtgatgtatggctaagatttcactt

SEQ ID NO: 60560 - DNA, 201 bp, Homo sapiens
cggtggtgttggggtggacagtgacaccatatggaacgaggtgcactcggcgggggcagcccgcctggctgtgggctgcgtggtagagctggtcttcaagrtggccacaggggagctgaagaatggctttgctgtggtccgcccccctggacaccatgcggaggagagcacgcccatgggcttttgctacttcaactccgt

SEQ ID NO: 60561 - DNA, 201 bp, Homo sapiens
ctctctcgagttgatttggaggaattttgttttgttttgttttgtttgtttccttttatctccttccacgggccaggcgagcgccgcccgccctcactggycttgtgacggtttattctgattgagaactgggcggactcgaaagagtccccttttccgcacagctgtgttgactttttaattacttttaggtgatgtatg

SEQ ID NO: 60562 - DNA, 201 bp, Homo sapiens
cgccaaagatgacttccctcttaggaaaacagcttctgaaccgaatctgaaattacggtccaggctaaagcagaaagtggccgaaagacggagcagccccytgttacgcaggaaagacgggccagtggtcactgctctaaaaaagcgtccgttggatgtcacagactccgcgtgcagcagcgccccaggctccggacccag

SEQ ID NO: 60563 - DNA, 164 bp, Homo sapiens
gatttcactttaagcagtcgtgaactgtgcgagcactgtggtttacaattatactttgcatcgaaaggaaaccatttcttcattgtaacgaagctgagcgkgttcttagctcggcctcactttgtctctggcattgattaaaagtctgctattgaaagaaaaag

SEQ ID NO: 60564 - DNA, 201 bp, Homo sapiens
cggagagccacccggaggagacggaggaggagctccgtgagcaccaggctctgctggacgagccctacctggaccggctgccggggcagaaggaggcgcaygcacaggccggcgtgcaggtgaagcaggagcccattgagagcgatgaggaagaggcagagcccccacgggaggtggagccgggccagcgccagcccagtg

SEQ ID NO: 60565 - DNA, 201 bp, Homo sapiens
gcacccacctcactccctacctgagcacctcgcccttggagcgggacggaggggcagcgcacagccctcttctgcagcacatggtcttactggagcagccrccggcacaagcacccctcgtcacaggcctgggagcactgcccctccacgcacagtccttggttggtgcagaccgggtgtccccctccatccacaagctgc

SEQ ID NO: 60566 - DNA, 201 bp, Homo sapiens
tgcagcaggagctcctggcgctcaagcagaagcagcagatccagaggcagatcctcatcgctgagttccagaggcagcacgagcagctctcccggcagcaygaggcgcagctccacgagcacatcaagcaacaacaggagatgctggccatgaagcaccagcaggagctgctggaacaccagcggaagctggagaggcacc

SEQ ID NO: 60567 - DNA, 201 bp, Homo sapiens
gcttcgatgccgtggagggccaccccacccctcttgggggctacaacctctccgccagatgcttcgggtacctgacgaagcagctgatgggcctggctggyggccggattgtcctggccctcgagggaggccacgacctgaccgccatttgcgacgcctcggaagcatgtgtttctgccttgctgggaaacgagcttgatc

SEQ ID NO: 60568 - DNA, 201 bp, Homo sapiens
catggaagaggagccgcccctgtagcactccctcgaagctgctgttctcttgtctgtctgtctctgtcttgaagctcagccaagaaactttcccgtgtcaygcctgcgtcccaccgtggggctctcttggagcacccagggacacccagcgtgcaacagccacgggaagcctttctgccgcccaggcccacaggtctcgag

SEQ ID NO: 60569 - DNA, 201 bp, Homo sapiens
ccaaagaatatgaaattcatcatggaaagaagattctatatgatatacttgcctttgccaaagaaagtgtgaattctcatgttaccacgcttggacctcaraattttcctgccaatgacaaagaaccatggcttgttgatttctttgccccctggtgtccaccatgtcgagctttactaccagagttacgaagagcatcaa

SEQ ID NO: 60570 - DNA, 201 bp, Homo sapiens
ctaggatgattaaaggaaaagtgaaagctggaaaagtagactgtcaggcttatgctcagacatgccagaaagctgggatcagggcctatccaactgttaarttttatttctacgaaagagcaaagagaaattttcaagaagagcagataaataccagagatgcaaaagcaatcgctgccttaataagtgaaaaattggaaa

SEQ ID NO: 60571 - DNA, 201 bp, Homo sapiens
actttgctaaagaagtggatgggttacttcgaattggagctgttaactgtggtgatgatagaatgctttgccgaatgaaaggagtcaacagctatcccagyctcttcatttttcggtctggaatggccccagtgaaatatcatggagacagatcaaaggagagtttagtgagttttgcaatgcagcatgttagaagtacag

SEQ ID NO: 60572 - DNA, 201 bp, Homo sapiens
gatcctgagctgaaaaaactaaaaactctacttaaaaatgatcatattcaagttggcaggtttgactgttcctctgcaccagacatctgtagtaatctgtrtgtttttcagccgtctctagcagtatttaaaggacaaggaaccaaagaatatgaaattcatcatggaaagaagattctatatgatatacttgcctttgcc

SEQ ID NO: 60573 - DNA, 201 bp, Homo sapiens
gtatagattgccaacagtatcattctttttgtgcccaggaaaacgttcaaagataccctgagataagattttttcccccaaaatcaaataaagcttatcaktatcacagttacaatggttggaatagggatgcttattccctgagaatctggggtctaggatttttacctcaagtatccacagatctaacacctcagactt

SEQ ID NO: 60574 - DNA, 201 bp, Homo sapiens
gaggagattgtttgacttcacagacacgactcaggcttagtggcatgttggatggtcttgttaatgtaggatggatggactgtgccacccaggataacctytgtaaaagcttagatattacaacaagtactactgcttattttcctcctggagccactttaaataacaaagagaaaaacagtattttgtttctcaactcat

SEQ ID NO: 60575 - DNA, 201 bp, Homo sapiens
acatcagaagacacctatttagaatgttacatttatgatgggaatgaatgaacattatcttagacttgcagttgtactgccagaattatctacagcactgstgtaaaagaagggtctgcaaactttttctgtaaagggccggtttataaatattttagactttgcaggctataatatatggttcacacatgagaacaagaa

SEQ ID NO: 60576 - DNA, 198 bp, Homo sapiens
gagaaacattttaggcagtaaataaaatagtaaatattatgtgtcctataatttgacctaagctgtgtgcctttggaatcagctctaagccagggcccccygggagtcatgttaagaaacacgtatcataaagtgacatacatcaaggttatcttatatagtcataacagtattattgggtctttcaaaaacagctgg

SEQ ID NO: 60577 - DNA, 201 bp, Homo sapiens
gggtctaggatttttacctcaagtatccacagatctaacacctcagactttcagtgaaaaagttctacaagggaaaaatcattgggtgattgatttctatsctccttggtgtggaccttgccagaattttgctccagaatttgagctcttggctaggatgattaaaggaaaagtgaaagctggaaaagtagactgtcaggc

SEQ ID NO: 60578 - DNA, 201 bp, Homo sapiens
cttttaatttttcacagccgagaaacagtgcagcagtatatgtgcacacagtaagtacacaaatttgagcaacagtaagtgcacaaattctgtagtttgcygtatcatccaggaaaacctgagggaaaaaaattatagcaattaactgggcattgtagagtatcctaaatatgttatcaagtatttagagttctatatttt

SEQ ID NO: 60579 - DNA, 182 bp, Homo sapiens
agtaaataaaatagtaaatattatgtgtcctataatttgacctaagctgtgtgcctttggaatcagctctaagccagggccccctgggagtcatgttaagwaacacgtatcataaagtgacatacatcaaggttatcttatatagtcataacagtattattgggtctttcaaaaacagctgg

SEQ ID NO: 60580 - DNA, 201 bp, Homo sapiens
tcccactgatagttgatttttgaggcatctaatatttacatatttgccttctgaactttgttttgacctgtatcctttatttacattgggtttttctttcrtagttttggtttttcactcctgtccagtctatttattattcaaataggaaaaattactttacaggttgttttactgtagcttataatgatactgtagtta

SEQ ID NO: 60581 - DNA, 201 bp, Homo sapiens; identical to SEQ ID NO: 60569

SEQ ID NO: 60582 - DNA, 201 bp, Homo sapiens; identical to SEQ ID NO: 60570

SEQ ID NO: 60583 - DNA, 201 bp, Homo sapiens; identical to SEQ ID NO: 60571

SEQ ID NO: 60584 - DNA, 201 bp, Homo sapiens; identical to SEQ ID NO: 60572

SEQ ID NO: 60585 - DNA, 201 bp, Homo sapiens; identical to SEQ ID NO: 60573

SEQ ID NO: 60586 - DNA, 120 bp, Homo sapiens
tcaaaaaatagtaagatagctgaaaattctactttgggaaataggacaatcaaaatgtagcctagacactgaaatgcttttaaaaatttggacaagtaaamccacttaacaaaaaatagt

SEQ ID NO: 60587 - DNA, 201 bp, Homo sapiens; identical to SEQ ID NO: 60574

SEQ ID NO: 60588 - DNA, 201 bp, Homo sapiens; identical to SEQ ID NO: 60577

SEQ ID NO: 60589 - DNA, 201 bp, Homo sapiens; identical to SEQ ID NO: 60569

SEQ ID NO: 60590 - DNA, 201 bp, Homo sapiens; identical to SEQ ID NO: 60570

SEQ ID NO: 60591 - DNA, 201 bp, Homo sapiens; identical to SEQ ID NO: 60571

SEQ ID NO: 60592 - DNA, 201 bp, Homo sapiens; identical to SEQ ID NO: 60572

SEQ ID NO: 60593 - DNA, 201 bp, Homo sapiens; identical to SEQ ID NO: 60573

SEQ ID NO: 60594 - DNA, 201 bp, Homo sapiens; identical to SEQ ID NO: 60575

SEQ ID NO: 60595 - DNA, 198 bp, Homo sapiens; identical to SEQ ID NO: 60576

SEQ ID NO: 60596 - DNA, 201 bp, Homo sapiens; identical to SEQ ID NO: 60577

SEQ ID NO: 60597 - DNA, 182 bp, Homo sapiens; identical to SEQ ID NO: 60579

SEQ ID NO: 60598 - DNA, 201 bp, Homo sapiens; identical to SEQ ID NO: 60578

SEQ ID NO: 60599 - DNA, 201 bp, Homo sapiens; identical to SEQ ID NO: 60580

SEQ ID NO: 60600 - DNA, 201 bp, Homo sapiens
attaaatttctggatttgggttgtgacccagggtgcattaacttaaaagattcactaaagcagcacatagcactgggaactctggctccgaaaaactttgytatatatatcaaggatgttctggctttacattttatttattagctgtaaatacatgtgtggatgtgtaaatggagcttgtacatattggaaaggtcattg

SEQ ID NO: 60601 - DNA, 201 bp, Homo sapiens
actgggaactctggctccgaaaaactttgttatatatatcaaggatgttctggctttacattttatttattagctgtaaatacatgtgtggatgtgtaaayggagcttgtacatattggaaaggtcattgtggctatctgcatttataaatgtgtggtgctaactgtatgtgtctttatcagtgatggtctcacagagcca

SEQ ID NO: 60602 - DNA, 201 bp, Homo sapiens
gcttgtacatattggaaaggtcattgtggctatctgcatttataaatgtgtggtgctaactgtatgtgtctttatcagtgatggtctcacagagccaactyactcttatgaaatgggctttaacaaaacaagaaagaaacgtacttaactgtgtgaagaaatggaatcagcttttaataaaattgacaacattttattacc

SEQ ID NO: 60603 - DNA, 201 bp, Homo sapiens
ttgtacatattggaaaggtcattgtggctatctgcatttataaatgtgtggtgctaactgtatgtgtctttatcagtgatggtctcacagagccaactcamtcttatgaaatgggctttaacaaaacaagaaagaaacgtacttaactgtgtgaagaaatggaatcagcttttaataaaattgacaacattttattaccac

SEQ ID NO: 60604 - DNA, 201 bp, Homo sapiens
acctaactttgagtatgcagaagccccgagtcgtctttctcctgatgatgcagattttgtagacgtcttacacacattcaccagagggtcccctggtcgamgcattggaatccagaaaccagttgggcatgttgacatttacccgaatggaggtacttttcagccaggatgtaacattggagaagctatccgcgtgattgc

SEQ ID NO: 60605 - DNA, 201 bp, Homo sapiens
acctcattcccggagtagcagagtccgtggctacctgtcatttcaatcacagcagcaaaaccttcatggtgatccatggctggacggtaacaggaatgtawgagagttgggtgccaaaacttgtggccgccctgtacaagagagaaccagactccaatgtcattgtggtggactggctgtcacgggctcaggagcattacc

SEQ ID NO: 60606 - DNA, 201 bp, Homo sapiens
cccggagtagcagagtccgtggctacctgtcatttcaatcacagcagcaaaaccttcatggtgatccatggctggacggtaacaggaatgtatgagagttrggtgccaaaacttgtggccgccctgtacaagagagaaccagactccaatgtcattgtggtggactggctgtcacgggctcaggagcattacccagtgtcc

SEQ ID NO: 60607 - DNA, 201 bp, Homo sapiens
actggctgtcacgggctcaggagcattacccagtgtccgcgggctacaccaaactggtgggacaggatgtggcccggtttatcaactggatggaggaggartttaactaccctctggacaatgtccatctcttgggatacagccttggagcccatgctgctggcattgcaggaagtctgaccaataagaaagtcaacagaa

SEQ ID NO: 60608 - DNA, 201 bp, Homo sapiens
ctaccctctggacaatgtccatctcttgggatacagccttggagcccatgctgctggcattgcaggaagtctgaccaataagaaagtcaacagaattactrgcctcgatccagctggacctaactttgagtatgcagaagccccgagtcgtctttctcctgatgatgcagattttgtagacgtcttacacacattcaccag

SEQ ID NO: 60609 - DNA, 201 bp, Homo sapiens
tctggacaatgtccatctcttgggatacagccttggagcccatgctgctggcattgcaggaagtctgaccaataagaaagtcaacagaattactggcctcvatccagctggacctaactttgagtatgcagaagccccgagtcgtctttctcctgatgatgcagattttgtagacgtcttacacacattcaccagagggtc

SEQ ID NO: 60610 - DNA, 201 bp, Homo sapiens
tcaatcacagcagcaaaaccttcatggtgatccatggctggacggtaacaggaatgtatgagagttgggtgccaaaacttgtggccgccctgtacaagagmgaaccagactccaatgtcattgtggtggactggctgtcacgggctcaggagcattacccagtgtccgcgggctacaccaaactggtgggacaggatgtgg

SEQ ID NO: 60611 - DNA, 201 bp, Homo sapiens
ggagaagctatccgcgtgattgcagagagaggacttggagatgtggaccagctagtgaagtgctcccacgagcgctccattcatctcttcatcgactctckgttgaatgaagaaaatccaagtaaggcctacaggtgcagttccaaggaagcctttgagaaagggctctgcttgagttgtagaaagaaccgctgcaacaat

SEQ ID NO: 60612 - DNA, 201 bp, Homo sapiens
ctggacaatgtccatctcttgggatacagccttggagcccatgctgctggcattgcaggaagtctgaccaataagaaagtcaacagaattactggcctcgrtccagctggacctaactttgagtatgcagaagccccgagtcgtctttctcctgatgatgcagattttgtagacgtcttacacacattcaccagagggtcc

SEQ ID NO: 60613 - DNA, 201 bp, Homo sapiens
agaaagtcaacagaattactggcctcgatccagctggacctaactttgagtatgcagaagccccgagtcgtctttctcctgatgatgcagattttgtagasgtcttacacacattcaccagagggtcccctggtcgaagcattggaatccagaaaccagttgggcatgttgacatttacccgaatggaggtacttttcagc

SEQ ID NO: 60614 - DNA, 201 bp, Homo sapiens
tcagccggctcatcagtcggtccgcgccttgcagctcctccagagggacgcgccccgagatggagagcaaagccctgctcgtgctgactctggccgtgtgrctccagagtctgaccgcctcccgcggaggggtggccgccgccgaccaaagaagagattttatcgacatcgaaagtaaatttgccctaaggacccctgaag

SEQ ID NO: 60615 - DNA, 201 bp, Homo sapiens
gacaatgtccatctcttgggatacagccttggagcccatgctgctggcattgcaggaagtctgaccaataagaaagtcaacagaattactggcctcgatcsagctggacctaactttgagtatgcagaagccccgagtcgtctttctcctgatgatgcagattttgtagacgtcttacacacattcaccagagggtcccct

SEQ ID NO: 60616 - DNA, 201 bp, Homo sapiens
gagaggacttggagatgtggaccagctagtgaagtgctcccacgagcgctccattcatctcttcatcgactctctgttgaatgaagaaaatccaagtaagrcctacaggtgcagttccaaggaagcctttgagaaagggctctgcttgagttgtagaaagaaccgctgcaacaatctgggctatgagatcaataaagtcag

SEQ ID NO: 60617 - DNA, 201 bp, Homo sapiens
ggtgccaaaacttgtggccgccctgtacaagagagaaccagactccaatgtcattgtggtggactggctgtcacgggctcaggagcattacccagtgtccrcgggctacaccaaactggtgggacaggatgtggcccggtttatcaactggatggaggaggagtttaactaccctctggacaatgtccatctcttgggata

SEQ ID NO: 60618 - DNA, 201 bp, Homo sapiens
caatgtccatctcttgggatacagccttggagcccatgctgctggcattgcaggaagtctgaccaataagaaagtcaacagaattactggcctcgatccarctggacctaactttgagtatgcagaagccccgagtcgtctttctcctgatgatgcagattttgtagacgtcttacacacattcaccagagggtcccctgg

SEQ ID NO: 60619 - DNA, 201 bp, Homo sapiens
ccaagtaaggcctacaggtgcagttccaaggaagcctttgagaaagggctctgcttgagttgtagaaagaaccgctgcaacaatctgggctatgagatcartaaagtcagagccaaaagaagcagcaaaatgtacctgaagactcgttctcagatgccctacaaagtcttccattaccaagtaaagattcatttttctggg

SEQ ID NO: 60620 - DNA, 201 bp, Homo sapiens
cgaagcattggaatccagaaaccagttgggcatgttgacatttacccgaatggaggtacttttcagccaggatgtaacattggagaagctatccgcgtgaytgcagagagaggacttggagatgtggaccagctagtgaagtgctcccacgagcgctccattcatctcttcatcgactctctgttgaatgaagaaaatcca

SEQ ID NO: 60621 - DNA, 201 bp, Homo sapiens
ccatggctggacggtaacaggaatgtatgagagttgggtgccaaaacttgtggccgccctgtacaagagagaaccagactccaatgtcattgtggtggacbggctgtcacgggctcaggagcattacccagtgtccgcgggctacaccaaactggtgggacaggatgtggcccggtttatcaactggatggaggaggagtt

SEQ ID NO: 60622 - DNA, 201 bp, Homo sapiens
aagattcatttttctgggactgagagtgaaacccataccaatcaggcctttgagatttctctgtatggcaccgtggccgagagtgagaacatcccattcaytctgcctgaagtttccacaaataagacatactccttcctaatttacacagaggtagatattggagaactactcatgttgaagctcaaatggaagagtgat

SEQ ID NO: 60623 - DNA, 201 bp, Homo sapiens
ctggtgggacaggatgtggcccggtttatcaactggatggaggaggagtttaactaccctctggacaatgtccatctcttgggatacagccttggagcccrtgctgctggcattgcaggaagtctgaccaataagaaagtcaacagaattactggcctcgatccagctggacctaactttgagtatgcagaagccccgagt

SEQ ID NO: 60624 - DNA, 201 bp, Homo sapiens
catgttgaagctcaaatggaagagtgattcatactttagctggtcagactggtggagcagtcccggcttcgccattcagaagatcagagtaaaagcaggaragactcagaaaaaggtgatcttctgttctagggagaaagtgtctcatttgcagaaaggaaaggcacctgcggtatttgtgaaatgccatgacaagtctct

SEQ ID NO: 60625 - DNA, 201 bp, Homo sapiens
acacacattcaccagagggtcccctggtcgaagcattggaatccagaaaccagttgggcatgttgacatttacccgaatggaggtacttttcagccaggawgtaacattggagaagctatccgcgtgattgcagagagaggacttggagatgtggaccagctagtgaagtgctcccacgagcgctccattcatctcttcat

SEQ ID NO: 60626 - DNA, 201 bp, Homo sapiens
attggagaagctatccgcgtgattgcagagagaggacttggagatgtggaccagctagtgaagtgctcccacgagcgctccattcatctcttcatcgactstctgttgaatgaagaaaatccaagtaaggcctacaggtgcagttccaaggaagcctttgagaaagggctctgcttgagttgtagaaagaaccgctgcaac

SEQ ID NO: 60627 - DNA, 201 bp, Homo sapiens
aaggtgatcttctgttctagggagaaagtgtctcatttgcagaaaggaaaggcacctgcggtatttgtgaaatgccatgacaagtctctgaataagaagtsaggctgaaactgggcaaatctacagaacaaagaacggcatgtgaattctgtgaagaatgaagtggaggaagtaacttttacaaaacatacccagtgtttg

SEQ ID NO: 60628 - DNA, 201 bp, Homo sapiens
tggagaagctatccgcgtgattgcagagagaggacttggagatgtggaccagctagtgaagtgctcccacgagcgctccattcatctcttcatcgactctstgttgaatgaagaaaatccaagtaaggcctacaggtgcagttccaaggaagcctttgagaaagggctctgcttgagttgtagaaagaaccgctgcaacaa

SEQ ID NO: 60629 - DNA, 201 bp, Homo sapiens
ttacacagaggtagatattggagaactactcatgttgaagctcaaatggaagagtgattcatactttagctggtcagactggtggagcagtcccggcttcrccattcagaagatcagagtaaaagcaggagagactcagaaaaaggtgatcttctgttctagggagaaagtgtctcatttgcagaaaggaaaggcacctgc

SEQ ID NO: 60630 - DNA, 201 bp, Homo sapiens
tgtaacattggagaagctatccgcgtgattgcagagagaggacttggagatgtggaccagctagtgaagtgctcccacgagcgctccattcatctcttcaycgactctctgttgaatgaagaaaatccaagtaaggcctacaggtgcagttccaaggaagcctttgagaaagggctctgcttgagttgtagaaagaaccgc

SEQ ID NO: 60631 - DNA, 201 bp, Homo sapiens
gagatgtggaccagctagtgaagtgctcccacgagcgctccattcatctcttcatcgactctctgttgaatgaagaaaatccaagtaaggcctacaggtgmagttccaaggaagcctttgagaaagggctctgcttgagttgtagaaagaaccgctgcaacaatctgggctatgagatcaataaagtcagagccaaaagaa

SEQ ID NO: 60632 - DNA, 201 bp, Homo sapiens
aaacccataccaatcaggcctttgagatttctctgtatggcaccgtggccgagagtgagaacatcccattcactctgcctgaagtttccacaaataagacmtactccttcctaatttacacagaggtagatattggagaactactcatgttgaagctcaaatggaagagtgattcatactttagctggtcagactggtgga

SEQ ID NO: 60633 - DNA, 201 bp, Homo sapiens
tgtggaccagctagtgaagtgctcccacgagcgctccattcatctcttcatcgactctctgttgaatgaagaaaatccaagtaaggcctacaggtgcagtyccaaggaagcctttgagaaagggctctgcttgagttgtagaaagaaccgctgcaacaatctgggctatgagatcaataaagtcagagccaaaagaagcag

SEQ ID NO: 60634 - DNA, 201 bp, Homo sapiens
atgttgaagctcaaatggaagagtgattcatactttagctggtcagactggtggagcagtcccggcttcgccattcagaagatcagagtaaaagcaggagwgactcagaaaaaggtgatcttctgttctagggagaaagtgtctcatttgcagaaaggaaaggcacctgcggtatttgtgaaatgccatgacaagtctctg

SEQ ID NO: 60635 - DNA, 201 bp, Homo sapiens
gattcatactttagctggtcagactggtggagcagtcccggcttcgccattcagaagatcagagtaaaagcaggagagactcagaaaaaggtgatcttctrttctagggagaaagtgtctcatttgcagaaaggaaaggcacctgcggtatttgtgaaatgccatgacaagtctctgaataagaagtcaggctgaaactgg

SEQ ID NO: 60636 - DNA, 201 bp, Homo sapiens
ctttagctggtcagactggtggagcagtcccggcttcgccattcagaagatcagagtaaaagcaggagagactcagaaaaaggtgatcttctgttctaggragaaagtgtctcatttgcagaaaggaaaggcacctgcggtatttgtgaaatgccatgacaagtctctgaataagaagtcaggctgaaactgggcaaatct

SEQ ID NO: 60637 - DNA, 201 bp, Homo sapiens
tcccattcactctgcctgaagtttccacaaataagacatactccttcctaatttacacagaggtagatattggagaactactcatgttgaagctcaaatgraagagtgattcatactttagctggtcagactggtggagcagtcccggcttcgccattcagaagatcagagtaaaagcaggagagactcagaaaaaggtga

SEQ ID NO: 60638 - DNA, 201 bp, Homo sapiens
tctcctgatgatgcagattttgtagacgtcttacacacattcaccagagggtcccctggtcgaagcattggaatccagaaaccagttgggcatgttgacakttacccgaatggaggtacttttcagccaggatgtaacattggagaagctatccgcgtgattgcagagagaggacttggagatgtggaccagctagtgaag

SEQ ID NO: 60639 - DNA, 201 bp, Homo sapiens
aatgtacctgaagactcgttctcagatgccctacaaagtcttccattaccaagtaaagattcatttttctgggactgagagtgaaacccataccaatcagrcctttgagatttctctgtatggcaccgtggccgagagtgagaacatcccattcactctgcctgaagtttccacaaataagacatactccttcctaattta

SEQ ID NO: 60640 - DNA, 201 bp, Homo sapiens
caacagaattactggcctcgatccagctggacctaactttgagtatgcagaagccccgagtcgtctttctcctgatgatgcagattttgtagacgtcttasacacattcaccagagggtcccctggtcgaagcattggaatccagaaaccagttgggcatgttgacatttacccgaatggaggtacttttcagccaggatg

SEQ ID NO: 60641 - DNA, 201 bp, Homo sapiens
ggagtaccatgagggttgttatttgttgtttttaacaactaatcaagagtgagtgaacaactatttataaactagatctcctatttttcagaatgctcttmtacgtataaatatgaaatgataaagatgtcaaatatctcagaggctatagctgggaacccgactgtgaaagtatgtgatatctgaacacatactagaaag

SEQ ID NO: 60642 - DNA, 201 bp, Homo sapiens
tttgagaaagaaataattgtttgagcgcagagtaaaataaggctccttcatgtggcgtattgggccatagcctataattggttagaacctcctattttaaytggaattctggatctttcggactgaggccttctcaaactttactctaagtctccaagaatacagaaaatgcttttccgcggcacgaatcagactcatcta

SEQ ID NO: 60643 - DNA, 201 bp, Homo sapiens
gtctcaagattatattataataatgttctctgggtaggtgttgaaaatgagcctgtaatcctcagctgacacataatttgaatggtgcagaaaaaaaaaargataccgtaattttattattagattctccaaatgattttcatcaatttaaaatcattcaatatctgacagttactcttcagttttaggcttaccttggtc

SEQ ID NO: 60644 - DNA, 201 bp, Homo sapiens
  misc_feature (1)...(201): n = A,T,C or G
gagaaccagactccaatgtcattgtggtggactggctgtcacgggctcaggagcattacccagtgtccgcgggctacaccaaactggtgggacaggatgtngcccggtttatcaactggatggaggaggagtttaactaccctctggacaatgtccatctcttgggatacagccttggagcccatgctgctggcattgcag

SEQ ID NO: 60645 - DNA, 201 bp, Homo sapiens
aagtctgaccaataagaaagtcaacagaattactggcctcgatccagctggacctaactttgagtatgcagaagccccgagtcgtctttctcctgatgatrcagattttgtagacgtcttacacacattcaccagagggtcccctggtcgaagcattggaatccagaaaccagttgggcatgttgacatttacccgaatgg

SEQ ID NO: 60646 - DNA, 201 bp, Homo sapiens
gagcaaagccctgctcgtgctgactctggccgtgtggctccagagtctgaccgcctcccgcggaggggtggccgccgccgaccaaagaagagattttatcracatcgaaagtaaatttgccctaaggacccctgaagacacagctgaggacacttgccacctcattcccggagtagcagagtccgtggctacctgtcattt

SEQ ID NO: 60647 - DNA, 201 bp, Homo sapiens
acagaattactggcctcgatccagctggacctaactttgagtatgcagaagccccgagtcgtctttctcctgatgatgcagattttgtagacgtcttacasacattcaccagagggtcccctggtcgaagcattggaatccagaaaccagttgggcatgttgacatttacccgaatggaggtacttttcagccaggatgta

SEQ ID NO: 60648 - DNA, 201 bp, Homo sapiens
ggctacctgtcatttcaatcacagcagcaaaaccttcatggtgatccatggctggacggtaacaggaatgtatgagagttgggtgccaaaacttgtggccrccctgtacaagagagaaccagactccaatgtcattgtggtggactggctgtcacgggctcaggagcattacccagtgtccgcgggctacaccaaactggt

SEQ ID NO: 60649 - DNA, 201 bp, Homo sapiens
taccctctggacaatgtccatctcttgggatacagccttggagcccatgctgctggcattgcaggaagtctgaccaataagaaagtcaacagaattactgkcctcgatccagctggacctaactttgagtatgcagaagccccgagtcgtctttctcctgatgatgcagattttgtagacgtcttacacacattcaccaga

SEQ ID NO: 60650 - DNA, 201 bp, Homo sapiens
ctcgatccagctggacctaactttgagtatgcagaagccccgagtcgtctttctcctgatgatgcagattttgtagacgtcttacacacattcaccagagrgtcccctggtcgaagcattggaatccagaaaccagttgggcatgttgacatttacccgaatggaggtacttttcagccaggatgtaacattggagaagct

SEQ ID NO: 60651 - DNA, 201 bp, Homo sapiens
gaaagtcaacagaattactggcctcgatccagctggacctaactttgagtatgcagaagccccgagtcgtctttctcctgatgatgcagattttgtagacrtcttacacacattcaccagagggtcccctggtcgaagcattggaatccagaaaccagttgggcatgttgacatttacccgaatggaggtacttttcagcc

SEQ ID NO: 60652 - DNA, 201 bp, Homo sapiens
gactctctgttgaatgaagaaaatccaagtaaggcctacaggtgcagttccaaggaagcctttgagaaagggctctgcttgagttgtagaaagaaccgctrcaacaatctgggctatgagatcaataaagtcagagccaaaagaagcagcaaaatgtacctgaagactcgttctcagatgccctacaaagtcttccattac

SEQ ID NO: 60653 - DNA, 201 bp, Homo sapiens
atcccattcactctgcctgaagtttccacaaataagacatactccttcctaatttacacagaggtagatattggagaactactcatgttgaagctcaaatrgaagagtgattcatactttagctggtcagactggtggagcagtcccggcttcgccattcagaagatcagagtaaaagcaggagagactcagaaaaaggtg

SEQ ID NO: 60654 - DNA, 201 bp, Homo sapiens
aactttgagtatgcagaagccccgagtcgtctttctcctgatgatgcagattttgtagacgtcttacacacattcaccagagggtcccctggtcgaagcaytggaatccagaaaccagttgggcatgttgacatttacccgaatggaggtacttttcagccaggatgtaacattggagaagctatccgcgtgattgcagag

SEQ ID NO: 60655 - DNA, 201 bp, Homo sapiens
aagaaaatccaagtaaggcctacaggtgcagttccaaggaagcctttgagaaagggctctgcttgagttgtagaaagaaccgctgcaacaatctgggctawgagatcaataaagtcagagccaaaagaagcagcaaaatgtacctgaagactcgttctcagatgccctacaaagtcttccattaccaagtaaagattcatt

SEQ ID NO: 60656 - DNA, 201 bp, Homo sapiens
actcgttctcagatgccctacaaagtcttccattaccaagtaaagattcatttttctgggactgagagtgaaacccataccaatcaggcctttgagatttytctgtatggcaccgtggccgagagtgagaacatcccattcactctgcctgaagtttccacaaataagacatactccttcctaatttacacagaggtagat

SEQ ID NO: 60657 - DNA, 201 bp, Homo sapiens
gtcatttcaatcacagcagcaaaaccttcatggtgatccatggctggacggtaacaggaatgtatgagagttgggtgccaaaacttgtggccgccctgtamaagagagaaccagactccaatgtcattgtggtggactggctgtcacgggctcaggagcattacccagtgtccgcgggctacaccaaactggtgggacagg

SEQ ID NO: 60658 - DNA, 201 bp, Homo sapiens
ctagggagaaagtgtctcatttgcagaaaggaaaggcacctgcggtatttgtgaaatgccatgacaagtctctgaataagaagtcaggctgaaactgggcraatctacagaacaaagaacggcatgtgaattctgtgaagaatgaagtggaggaagtaacttttacaaaacatacccagtgtttggggtgtttcaaaagtg

SEQ ID NO: 60659 - DNA, 201 bp, Homo sapiens
cagagagaggacttggagatgtggaccagctagtgaagtgctcccacgagcgctccattcatctcttcatcgactctctgttgaatgaagaaaatccaagwaaggcctacaggtgcagttccaaggaagcctttgagaaagggctctgcttgagttgtagaaagaaccgctgcaacaatctgggctatgagatcaataaag

SEQ ID NO: 60660 - DNA, 201 bp, Homo sapiens
tgaagtgctcccacgagcgctccattcatctcttcatcgactctctgttgaatgaagaaaatccaagtaaggcctacaggtgcagttccaaggaagccttkgagaaagggctctgcttgagttgtagaaagaaccgctgcaacaatctgggctatgagatcaataaagtcagagccaaaagaagcagcaaaatgtacctga

SEQ ID NO: 60661 - DNA, 201 bp, Homo sapiens
ctgggtaggtgttgaaaatgagcctgtaatcctcagctgacacataatttgaatggtgcagaaaaaaaaaaagataccgtaattttattattagattctcyaaatgattttcatcaatttaaaatcattcaatatctgacagttactcttcagttttaggcttaccttggtcatgcttcagttgtacttccagtgcgtctc

SEQ ID NO: 60662 - DNA, 201 bp, Homo sapiens
cctcgatccagctggacctaactttgagtatgcagaagccccgagtcgtctttctcctgatgatgcagattttgtagacgtcttacacacattcaccagarggtcccctggtcgaagcattggaatccagaaaccagttgggcatgttgacatttacccgaatggaggtacttttcagccaggatgtaacattggagaagc

SEQ ID NO: 60663 - DNA, 201 bp, Homo sapiens
tttactaagtaaaagggtggagaggttcctggggtggattcctaagcagtgcttgtaaaccatcgcgtgcaatgagccagatggagtaccatgagggttgytatttgttgtttttaacaactaatcaagagtgagtgaacaactatttataaactagatctcctatttttcagaatgctcttctacgtataaatatgaaat

SEQ ID NO: 60664 - DNA, 201 bp, Homo sapiens
ttgaatgaagaaaatccaagtaaggcctacaggtgcagttccaaggaagcctttgagaaagggctctgcttgagttgtagaaagaaccgctgcaacaatcygggctatgagatcaataaagtcagagccaaaagaagcagcaaaatgtacctgaagactcgttctcagatgccctacaaagtcttccattaccaagtaaag

SEQ ID NO: 60665 - DNA, 201 bp, Homo sapiens
ctgtgaaagtatgtgatatctgaacacatactagaaagctctgcatgtgtgttgtccttcagcataattcggaagggaaaacagtcgatcaagggatgtaytggaacatgtcggagtagaaattgttcctgatgtgccagaacttcgaccctttctctgagagagatgatcgtgcctataaatagtaggaccaatgttgtg

SEQ ID NO: 60666 - DNA, 201 bp, Homo sapiens
atcgaaagtaaatttgccctaaggacccctgaagacacagctgaggacacttgccacctcattcccggagtagcagagtccgtggctacctgtcatttcartcacagcagcaaaaccttcatggtgatccatggctggacggtaacaggaatgtatgagagttgggtgccaaaacttgtggccgccctgtacaagagagaa

SEQ ID NO: 60667 - DNA, 201 bp, Homo sapiens
aaagattcatttttctgggactgagagtgaaacccataccaatcaggcctttgagatttctctgtatggcaccgtggccgagagtgagaacatcccattcrctctgcctgaagtttccacaaataagacatactccttcctaatttacacagaggtagatattggagaactactcatgttgaagctcaaatggaagagtga

SEQ ID NO: 60668 - DNA, 201 bp, Homo sapiens
accaagtaaagattcatttttctgggactgagagtgaaacccataccaatcaggcctttgagatttctctgtatggcaccgtggccgagagtgagaacatyccattcactctgcctgaagtttccacaaataagacatactccttcctaatttacacagaggtagatattggagaactactcatgttgaagctcaaatgga

SEQ ID NO: 60669 - DNA, 201 bp, Homo sapiens
tttctcctgatgatgcagattttgtagacgtcttacacacattcaccagagggtcccctggtcgaagcattggaatccagaaaccagttgggcatgttgasatttacccgaatggaggtacttttcagccaggatgtaacattggagaagctatccgcgtgattgcagagagaggacttggagatgtggaccagctagtga

SEQ ID NO: 60670 - DNA, 201 bp, Homo sapiens
ggcattgcaggaagtctgaccaataagaaagtcaacagaattactggcctcgatccagctggacctaactttgagtatgcagaagccccgagtcgtctttstcctgatgatgcagattttgtagacgtcttacacacattcaccagagggtcccctggtcgaagcattggaatccagaaaccagttgggcatgttgacatt

SEQ ID NO: 60671 - DNA, 201 bp, Homo sapiens
gatgatgcagattttgtagacgtcttacacacattcaccagagggtcccctggtcgaagcattggaatccagaaaccagttgggcatgttgacatttaccygaatggaggtacttttcagccaggatgtaacattggagaagctatccgcgtgattgcagagagaggacttggagatgtggaccagctagtgaagtgctcc

SEQ ID NO: 60672 - DNA, 201 bp, Homo sapiens
aggacttggagatgtggaccagctagtgaagtgctcccacgagcgctccattcatctcttcatcgactctctgttgaatgaagaaaatccaagtaaggccyacaggtgcagttccaaggaagcctttgagaaagggctctgcttgagttgtagaaagaaccgctgcaacaatctgggctatgagatcaataaagtcagagc

SEQ ID NO: 60673 - DNA, 201 bp, Homo sapiens
acttgtggccgccctgtacaagagagaaccagactccaatgtcattgtggtggactggctgtcacgggctcaggagcattacccagtgtccgcgggctacrccaaactggtgggacaggatgtggcccggtttatcaactggatggaggaggagtttaactaccctctggacaatgtccatctcttgggatacagccttgg

SEQ ID NO: 60674 - DNA, 201 bp, Homo sapiens
gccctacaaagtcttccattaccaagtaaagattcatttttctgggactgagagtgaaacccataccaatcaggcctttgagatttctctgtatggcaccrtggccgagagtgagaacatcccattcactctgcctgaagtttccacaaataagacatactccttcctaatttacacagaggtagatattggagaactact

SEQ ID NO: 60675 - DNA, 201 bp, Homo sapiens
acaggatgtggcccggtttatcaactggatggaggaggagtttaactaccctctggacaatgtccatctcttgggatacagccttggagcccatgctgctrgcattgcaggaagtctgaccaataagaaagtcaacagaattactggcctcgatccagctggacctaactttgagtatgcagaagccccgagtcgtctttc

SEQ ID NO: 60676 - DNA, 201 bp, Homo sapiens
tttgagtatgcagaagccccgagtcgtctttctcctgatgatgcagattttgtagacgtcttacacacattcaccagagggtcccctggtcgaagcattgraatccagaaaccagttgggcatgttgacatttacccgaatggaggtacttttcagccaggatgtaacattggagaagctatccgcgtgattgcagagaga

SEQ ID NO: 60677 - DNA, 201 bp, Homo sapiens
taacattggagaagctatccgcgtgattgcagagagaggacttggagatgtggaccagctagtgaagtgctcccacgagcgctccattcatctcttcatcractctctgttgaatgaagaaaatccaagtaaggcctacaggtgcagttccaaggaagcctttgagaaagggctctgcttgagttgtagaaagaaccgctg

SEQ ID NO: 60678 - DNA, 201 bp, Homo sapiens
tgtttttaacaactaatcaagagtgagtgaacaactatttataaactagatctcctatttttcagaatgctcttctacgtataaatatgaaatgataaagrtgtcaaatatctcagaggctatagctgggaacccgactgtgaaagtatgtgatatctgaacacatactagaaagctctgcatgtgtgttgtccttcagca

SEQ ID NO: 60679 - DNA, 201 bp, Homo sapiens
tgcagagagaggacttggagatgtggaccagctagtgaagtgctcccacgagcgctccattcatctcttcatcgactctctgttgaatgaagaaaatccargtaaggcctacaggtgcagttccaaggaagcctttgagaaagggctctgcttgagttgtagaaagaaccgctgcaacaatctgggctatgagatcaataa

SEQ ID NO: 60680 - DNA, 201 bp, Homo sapiens
cgttcacaaagagttttggtgcttctggaggatatattggaggcaagaaggagctgatagactacctgcgaacacattctcatagtgcagtgtatgccacrtcattgtcacctcctgtagtggagcagatcatcacctccatgaagtgcatcatggggcaggatggcaccagccttggtaaagagtgtgtacaacagttag

SEQ ID NO: 60681 - DNA, 201 bp, Homo sapiens
gggacctattgcagctgaagtattcccgtcatcggttggtacctctactggacaggccctttgacgagacgacgtatgaagaaacagaagactgagccttkttggtgctccctcagaggaactctccctcacccaggacagcctgtggcctttgtgagccagttccaggaaccacacttctgtggccatctcacgtgaaag

SEQ ID NO: 60682 - DNA, 201 bp, Homo sapiens
caggttttgcctgtcagcagctcataccaaagaaatacttgatactgctttaaaggagatagatgaagttggggacctattgcagctgaagtattcccgtyatcggttggtacctctactggacaggccctttgacgagacgacgtatgaagaaacagaagactgagcctttttggtgctccctcagaggaactctccctc

SEQ ID NO: 60683 - DNA, 201 bp, Homo sapiens
ggcttttaaaaacaattttttttcaaatttcttcattacctaagggagcctgcatctaaatttctcaactagttcagcctagctgaattttctagtgtgtwatacactttgcttccttcttattgatgaaaaccagggggatgagtggcttccatggagagatttcctgatttctcagggaggaaaaaagtgatgacattt

SEQ ID NO: 60684 - DNA, 201 bp, Homo sapiens
tagaagctgctatggcgtatggcatgggatttgcaacgaattcaatgaacattcctgctcttgttggcaaaggttgcctgattctgagtgatgaactgaaycatgcatcactggttctgggagccagactgtcaggagcaaccattagaatcttcaaacacaacaatatgcaaagcctagagaagctattgaaagatgcca

SEQ ID NO: 60685 - DNA, 201 bp, Homo sapiens
ggccttaaactgtgattctttctggtaggataagttataataaactgaccctaaagaatgcaatggcttttaaactgcagttactgtgttcttaatgaagsaatacccaaagctctgttcttttggagcacttgaggggagcttgaatgaaaggtgcagataagagcagtaccttgatcttatgctttctgagtgtcctgc

SEQ ID NO: 60686 - DNA, 124 bp, Homo sapiens
ttattgggttggggtaggtgtgttgattttgagagtgcatgttaagaactgaaggggaactacttgagatgacttaagaagcatcccatgcaaatatcttkttttgccctaataaaatattcag

SEQ ID NO: 60687 - DNA, 201 bp, Homo sapiens
ggaattggcggcggcgctgcagccatttccggtttcggggaggtgggtggggtgcggagcgggacttggagcagccgccgccgctgccaccgcctacagakcctgccttgcgcctggtgctgccaggaagatgcggccggagcccggaggctgctgctgccgccgcacggtgcgggcgaatggctgcgtggcgaacgggga

SEQ ID NO: 60688 - DNA, 201 bp, Homo sapiens
ctgaaaacaccaggtatttcaggagacgcctgaaagagatgggcttcatcatctatggaaatgaagactctccagtagtgcctttgatgctctacatgcckgccaaaattggcgcctttggacgggagatgctgaagcggaacatcggtgtcgttgtggttggatttcctgccaccccaattattgagtccagagccaggt

SEQ ID NO: 60689 - DNA, 201 bp, Homo sapiens
aatcccagctacgtcaggaggctgaggcacaggaattgcttgaacccaagaggcagaggatgcaatgagccaagatcacaccactgcactccagccttggygacagagggagactctgtctcaaaaaaaaaaaaaaaaggtgtgcccaggcccctagccattgccatgtgcccagccagagagccaaattagagggctggc

SEQ ID NO: 60690 - DNA, 201 bp, Homo sapiens
cccaattattgagtccagagccaggttttgcctgtcagcagctcataccaaagaaatacttgatactgctttaaaggagatagatgaagttggggacctaytgcagctgaagtattcccgtcatcggttggtacctctactggacaggccctttgacgagacgacgtatgaagaaacagaagactgagcctttttggtgct

SEQ ID NO: 60691 - DNA, 201 bp, Homo sapiens
cgtagcctgggcaacacagcaagaccccatctaagaaaaaaatgttttttaaatcagcttagcccaaaggggttgtgaatggggaggtataaaaagcaaakattattttttggctactaagccaagaacttacagggattttttttttcagtcccagaacctacagataccctgctacttgcttcacgtggatgctcagtg

SEQ ID NO: 60692 - DNA, 201 bp, Homo sapiens
aatttcttcattacctaagggagcctgcatctaaatttctcaactagttcagcctagctgaattttctagtgtgtaatacactttgcttccttcttattgrtgaaaaccagggggatgagtggcttccatggagagatttcctgatttctcagggaggaaaaaagtgatgacatttaccactacttttatgtttttcccct

SEQ ID NO: 60693 - DNA, 201 bp, Homo sapiens
agcatatcagacgccttggttctgtttgtacacttagccttacatttcaggaggaggcttttcattaggggcttaagctagctcctttggcttttaaaaamaattttttttcaaatttcttcattacctaagggagcctgcatctaaatttctcaactagttcagcctagctgaattttctagtgtgtaatacactttgct

SEQ ID NO: 60694 - DNA, 201 bp, Homo sapiens
ccgcccgggaattggcggcggcgctgcagccatttccggtttcggggaggtgggtggggtgcggagcgggacttggagcagccgccgccgctgccaccgcytacagagcctgccttgcgcctggtgctgccaggaagatgcggccggagcccggaggctgctgctgccgccgcacggtgcgggcgaatggctgcgtggcga

SEQ ID NO: 60695 - DNA, 201 bp, Homo sapiens
agtgtgtacaacagttagctgaaaacaccaggtatttcaggagacgcctgaaagagatgggcttcatcatctatggaaatgaagactctccagtagtgccyttgatgctctacatgcctgccaaaattggcgcctttggacgggagatgctgaagcggaacatcggtgtcgttgtggttggatttcctgccaccccaatta

SEQ ID NO: 60696 - DNA, 201 bp, Homo sapiens
agagcagtaccttgatcttatgctttctgagtgtcctgccttgttgccatctgcatggatgagtgaatgcttctatgcacgaggagactcaagccaactcrgagtctgctttttccaacgctcttcccaggtttcttttgcaaagcttggtcatttggcccaggtcttcctggaaagtggagtacatgtcactgactaggg

SEQ ID NO: 60697 - DNA, 201 bp, Homo sapiens
ttcctttgctaaatctcacctttaaaaacgaaggtgactcactttgctttttcagtccattaaaaaaacattttattttgcaaccattctacttgtgaaaycacgctgaccctagcctgtctctggctaaccacacaggccattcccctctcccagcaccttgcagacttgggcccatcaagagctactgctggccctggc

SEQ ID NO: 60698 - DNA, 201 bp, Homo sapiens
cgttcacaaagagttttggtgcttctggaggatatattggaggcaagaaggagctgatagactacctgcgaacacattctcatagtgcagtgtatgccacrtcattgtcacctcctgtagtggagcagatcatcacctccatgaagtgcatcatggggcaggatggcaccagccttggtaatggcatcactattcatgaag

SEQ ID NO: 60699 - DNA, 201 bp, Homo sapiens; identical to SEQ ID NO: 60694

SEQ ID NO: 60700 - DNA, 201 bp, Homo sapiens; identical to SEQ ID NO: 60684

SEQ ID NO: 60701 - DNA, 201 bp, Homo sapiens; identical to SEQ ID NO: 60687

SEQ ID NO: 60702 - DNA, 201 bp, Homo sapiens; identical to SEQ ID NO: 60680

SEQ ID NO: 60703 - DNA, 201 bp, Homo sapiens; identical to SEQ ID NO: 60681

SEQ ID NO: 60704 - DNA, 201 bp, Homo sapiens; identical to SEQ ID NO: 60682

SEQ ID NO: 60705 - DNA, 201 bp, Homo sapiens; identical to SEQ ID NO: 60683

SEQ ID NO: 60706 - DNA, 201 bp, Homo sapiens; identical to SEQ ID NO: 60684

SEQ ID NO: 60707 - DNA, 201 bp, Homo sapiens; identical to SEQ ID NO: 60685

SEQ ID NO: 60708 - DNA, 130 bp, Homo sapiens
gtattgggttggggtaggtgtgttgattttgagagtgcatgttaagaactgaaggggaactacttgagatgacttaagaagcatcccatgcaaatatcttkttttgccctaataaaatattcagaaagat

SEQ ID NO: 60709 - DNA, 201 bp, Homo sapiens; identical to SEQ ID NO: 60687

SEQ ID NO: 60710 - DNA, 201 bp, Homo sapiens; identical to SEQ ID NO: 60688

SEQ ID NO: 60711 - DNA, 201 bp, Homo sapiens; identical to SEQ ID NO: 60689

SEQ ID NO: 60712 - DNA, 201 bp, Homo sapiens; identical to SEQ ID NO: 60690

SEQ ID NO: 60713 - DNA, 201 bp, Homo sapiens; identical to SEQ ID NO: 60691

SEQ ID NO: 60714 - DNA, 201 bp, Homo sapiens; identical to SEQ ID NO: 60692

SEQ ID NO: 60715 - DNA, 201 bp, Homo sapiens; identical to SEQ ID NO: 60693

SEQ ID NO: 60716 - DNA, 201 bp, Homo sapiens; identical to SEQ ID NO: 60694

SEQ ID NO: 60717 - DNA, 201 bp, Homo sapiens; identical to SEQ ID NO: 60695

SEQ ID NO: 60718 - DNA, 201 bp, Homo sapiens; identical to SEQ ID NO: 60696

SEQ ID NO: 60719 - DNA, 201 bp, Homo sapiens; identical to SEQ ID NO: 60697

SEQ ID NO: 60720 - DNA, 170 bp, Homo sapiens
gcagtcgtgaggctgagatgagaatgcggattaaaatgcctggcgtgctcaccgtaacaccacggggaaggctgtgtgccttttctcatccgcttttgttrtgtgtgactccaaagaatgcccgcgctgaaatttggcgtgaattaaactgaagcccaggcctctacctt

SEQ ID NO: 60721 - DNA, 201 bp, Homo sapiens
attcctatttccgaagctcctgctcatggagagttcgaattgctctggccttgaaaggcatcgactacgagacggtgcccatcaatctcataaaggatggrggccaacagttttctaaggacttccaggcactgaatcctatgaagcaggtgccaaccctgaagattgatggaatcaccattcaccagtcactggccatca

SEQ ID NO: 60722 - DNA, 201 bp, Homo sapiens
gtgccagatgcaggcggggaagcccatcctctattcctatttccgaagctcctgctcatggagagttcgaattgctctggccttgaaaggcatcgactacragacggtgcccatcaatctcataaaggatgggggccaacagttttctaaggacttccaggcactgaatcctatgaagcaggtgccaaccctgaagattga

SEQ ID NO: 60723 - DNA, 201 bp, Homo sapiens
gagggcctagctcccaaatcctgccccgttggcacagggccacaggagcagaagctgggtgggctgaagaggcctggaaacgagagtcttaattgaggagrtgggagactcgaactctagccctggatctgccttcctgctgaaacttgttccacctcagtcccctcatctgtcacacgcatgtggggtggagtagggaga

SEQ ID NO: 60724 - DNA, 201 bp, Homo sapiens
gcgtatgatttctgacctcatcgctggtggcatccagcccctgcagaacctgtctgtcctgaagcaagtgggagaggagatgcagctgacctgggcccagmacgccatcacttgtggctttaacgccctggagcagatcctacagagcacagcgggcatatactgtgtaggagacgaggtgaccatggctgatctgtgctt

SEQ ID NO: 60725 - DNA, 201 bp, Homo sapiens
ccggacgaaagacacgggcctgattcgtcgagtctcactgagccttagtcgtcggcaggtcccaggcgcgaagtttctcggcctggaggagggggtcgcgygaagtgccagatgcaggcggggaagcccatcctctattcctatttccgaagctcctgctcatggagagttcgaattgctctggccttgaaaggcatcgac

SEQ ID NO: 60726 - DNA, 201 bp, Homo sapiens
gacttccaggcactgaatcctatgaagcaggtgccaaccctgaagattgatggaatcaccattcaccagtcactggccatcattgagtatctagaggagaygcgtcccactccgcgacttctgcctcaggacccaaagaagagggccagcgtgcgtatgatttctgacctcatcgctggtggcatccagcccctgcagaac

SEQ ID NO: 60727 - DNA, 201 bp, Homo sapiens
atctttctagtccagcccctcgctttacccggacgaaagacacgggcctgattcgtcgagtctcactgagccttagtcgtcggcaggtcccaggcgcgaastttctcggcctggaggagggggtcgcgcgaagtgccagatgcaggcggggaagcccatcctctattcctatttccgaagctcctgctcatggagagttcg

SEQ ID NO: 60728 - DNA, 201 bp, Homo sapiens
ctattcctatttccgaagctcctgctcatggagagttcgaattgctctggccttgaaaggcatcgactacgagacggtgcccatcaatctcataaaggatrggggccaacagttttctaaggacttccaggcactgaatcctatgaagcaggtgccaaccctgaagattgatggaatcaccattcaccagtcactggccat

SEQ ID NO: 60729 - DNA, 201 bp, Homo sapiens
tgtggcccccaggctgctagggccgcaggccgggacgtggccgctgaggctgtggcgcgaagccccaaacggcctgcttggggctcacggcgcttcgaggmggtcggctggtgggccctgctggccttggtgacgctgctgtccttcgccacccgcttccaccgcttggacgagccgccgcacatctgttgggatgagact

SEQ ID NO: 60730 - DNA, 201 bp, Homo sapiens
gcatcgccctctacctcctctcagggagcatcattgctgtagccatgcagagaggggcacggctgccagcggaggttgcagggttgtcccaggtcctgctkcgaggaggcggccaggtcctgctcggctggacactccattacttcccgtttttcctgatgggccgggtcctctacttccaccactacttcccagccatgc

SEQ ID NO: 60731 - DNA, 196 bp, Homo sapiens
ggtgcttctatgaatatgggcttcagctgtagcacttggcagaaacgtgatgtgtcccacaaactgctggtggaggaagaagatgttcgtcagccaattcracctccagccagcttcttgagcctatttggtttaaaaaaaaaaagtcttctaatcagaagccactgattttataataaataacacttgttttgaa

SEQ ID NO: 60732 - DNA, 201 bp, Homo sapiens
tgctcacccctccctcactccgtgggcaattccctttctctctgtcactgcttcagcagtgaagacccatggcacctagaaatgcatgccagcttcctgcrtctaccactctgcagctcaaacaagaagctcagagctgccccttccacttcctccccaaaagggatgaagaaaaccctgtggtagaaccaaaccacccaa

SEQ ID NO: 60733 - DNA, 201 bp, Homo sapiens
gtgcctccgggccggagggcgacccagaggagggggaagatgccgccggccacgggcggaggcctggcagagtccgagctgcgtccccggaggggccgctrtggcccccaggctgctagggccgcaggccgggacgtggccgctgaggctgtggcgcgaagccccaaacggcctgcttggggctcacggcgcttcgaggcg

SEQ ID NO: 60734 - DNA, 201 bp, Homo sapiens
ggtggctggactcatgggacttttgaggccactgcaaagattccagcctgggtccaggaacttcccaggagagccagctgggaagcagtactggaccatcyggccatgaggaagctgcctaaggagcccgaagaattctgctgctcaccaggacccagctctgggagtgcagctggaatggaacccagcattggagagagc

SEQ ID NO: 60735 - DNA, 182 bp, Homo sapiens
cccagggtctccaggtgtctaaccagcttccctccacccgggtgcgcgtcacagaccttccccgcctgcatctggcacttcrcgcgaccccctcctccaggccgagaaacttcgcgcctgggacctgccgacgactaaggctcagtgagactcgacgaatcaggcccgtgtctttcgtccgg

SEQ ID NO: 60736 - DNA, 130 bp, Homo sapiens
cccagggtctccaggtgtctaaccagcttycctccacccgggtgcgcgtcacagaccttccccgcctgcatctggcacttcgcgcgaccccctcctccaggccgagaaacttcgcgcctgggacctgccg

SEQ ID NO: 60737 - DNA, 201 bp, Homo sapiens
acgctgcccgccccgccccgagcccggggccccgcgctccgctgcagtgaagggcgttgcatttcccggggtaccccgagctgccctcttgtgactccttrgcggggcggctggtcagacaaagtgtgcctccgggccggagggcgacccagaggagggggaagatgccgccggccacgggcggaggcctggcagagtccg

SEQ ID NO: 60738 - DNA, 201 bp, Homo sapiens
tccaggtgtctaaccagcttccctccacccgggtgcgcgtcacagaccttccccgcctgcatctggcacttcgcgcgaccccctcctccaggccgagaaasttcgcgcctgggacctgccgacgactaaggctcagtgagactcgacgaatcaggcccgtgtctttcgtccgggtaaagcgaggggctggactagaaagat

SEQ ID NO: 60739 - DNA, 201 bp, Homo sapiens
gtggcccccaggctgctagggccgcaggccgggacgtggccgctgaggctgtggcgcgaagccccaaacggcctgcttggggctcacggcgcttcgaggckgtcggctggtgggccctgctggccttggtgacgctgctgtccttcgccacccgcttccaccgcttggacgagccgccgcacatctgttgggatgagactc

SEQ ID NO: 60740 - DNA, 201 bp, Homo sapiens
tgtggggactctggcctctccagactaatgttcctgtcacctgctgagctttcccagtgtcacttctgcagtcctcctctgctcacccctccctcactccrtgggcaattccctttctctctgtcactgcttcagcagtgaagacccatggcacctagaaatgcatgccagcttcctgcgtctaccactctgcagctcaaa

SEQ ID NO: 60741 - DNA, 201 bp, Homo sapiens
atgaggcccccatgacccggaagcactatcaggtcaccggctatggcataaatggaacaggggactcaaatgatttctggcggattgaggtcgtaaacagraaatttggaaaccggatcaaagtgctgagaagtcgaattcgcttcatccatttggtcacaggttgtgtcctgggctcctcgggaaaggttctgcccaagt

SEQ ID NO: 60742 - DNA, 201 bp, Homo sapiens
actccggagcgtcagcctgccttagcccttggttcctcgttttttgggattgtcacactgtgacactcgggaggaacgatgtcctatcctgggctgctcartgttcccaggccctgtgtgccagaggccaggtctctccaagtgcatctagcctggcctggagggcaaggcagatgcattctcctggctgctgggagagcc

SEQ ID NO: 60743 - DNA, 201 bp, Homo sapiens; identical to SEQ ID NO: 60729

SEQ ID NO: 60744 - DNA, 201 bp, Homo sapiens
tggctattatgacccccattttatggattaggaaaccaaggaaccatgagattaagaaacttgccccaggacatacagctaggttgtcccaggtcctgctkcgaggaggcggccaggtcctgctcggctggacactccattacttcccgtttttcctgatgggccgggtcctctacttccaccactacttcccagccatgc

SEQ ID NO: 60745 - DNA, 201 bp, Homo sapiens
tgctgtagccatgcagagaggggcacggctgccagcggaggttgcaggtcaggtcctctgggctctccctcccctgacctggcggcagcagggcacctgcrcccctggggagggccggctgcctgctgatgggccatcctttgcgtttaccaccccacaccttcccttatcctttgcttttgaaaggtaacaacccccaag

SEQ ID NO: 60746 - DNA, 196 bp, Homo sapiens; identical to SEQ ID NO: 60731

SEQ ID NO: 60747 - DNA, 201 bp, Homo sapiens; identical to SEQ ID NO: 60732

SEQ ID NO: 60748 - DNA, 201 bp, Homo sapiens; identical to SEQ ID NO: 60733

SEQ ID NO: 60749 - DNA, 201 bp, Homo sapiens; identical to SEQ ID NO: 60734

SEQ ID NO: 60750 - DNA, 182 bp, Homo sapiens; identical to SEQ ID NO: 60735

SEQ ID NO: 60751 - DNA, 130 bp, Homo sapiens; identical to SEQ ID NO: 60736

SEQ ID NO: 60752 - DNA, 201 bp, Homo sapiens; identical to SEQ ID NO: 60738

SEQ ID NO: 60753 - DNA, 201 bp, Homo sapiens; identical to SEQ ID NO: 60737

SEQ ID NO: 60754 - DNA, 201 bp, Homo sapiens; identical to SEQ ID NO: 60739

SEQ ID NO: 60755 - DNA, 201 bp, Homo sapiens; identical to SEQ ID NO: 60740

SEQ ID NO: 60756 - DNA, 201 bp, Homo sapiens; identical to SEQ ID NO: 60741

SEQ ID NO: 60757 - DNA, 201 bp, Homo sapiens; identical to SEQ ID NO: 60742

SEQ ID NO: 60758 - DNA, 182 bp, Homo sapiens
aagattctgtcagcgtctggggggccaataagggagtcatagctgctctccaagatcctacgattcttcaagctacctgtccctacagtcctgctggtcayggctcaacatatttctggcattcttttgaaaattactttcctgttggcccattgctatcttattaaatcaatctctctctc

SEQ ID NO: 60759 - DNA, 201 bp, Homo sapiens
cagagactctgggtgagctccagaagctgggaatcaaatgcttttaccataacgctgatctggtgagttgggccgatgtgatattcctctgctgcttgccrtctcagctgcctaatatctgcgtagaaatttacaccagccttgagaaggccagcattgtgtacagctttgtagctgccatcccactacccaggctgaaac

SEQ ID NO: 60760 - DNA, 201 bp, Homo sapiens
ctgaagagtttaaggtgggcatcattggaggtggccaccttgggaagcagctggctggcacactgctgcagcttggccccatccctgctgaaagcctgcgratctccactcggaggccagagactctgggtgagctccagaagctgggaatcaaatgcttttaccataacgctgatctggtgagttgggccgatgtgatat

SEQ ID NO: 60761 - DNA, 201 bp, Homo sapiens
agcggatgagttcagtggccgtggagaactggcttcaataaagcaaaacttccaaggtcatggtgtagctctggccaatggagaacgatggaggattctcygacgcttccccctgaccatccttcgggacttcgggatgggaaagcggagcattgaggagcgaattcaggaggaggccagctacctactggaggagttccg

SEQ ID NO: 60762 - DNA, 201 bp, Homo sapiens
agccttggtagaccaagcggatgagttcagtggccgtggagaactggcttcaataaagcaaaacttccaaggtcatggtgtagctctggccaatggagaaygatggaggattctctgacgcttccccctgaccatccttcgggacttcgggatgggaaagcggagcattgaggagcgaattcaggaggaggccagctacct

SEQ ID NO: 60763 - DNA, 201 bp, Homo sapiens
cactctgcttgtcttgcctgctcatcctcattgcctggaaatgaatgaataaggcaggaaagctgcccccaggtcctacaccaattcctttcctggggaasctgctgcaagttcgaactgacgctacgtttcagtctttcatgaagctcagggagaaatacagccctgtgttcactgtgtacatgggtccccggccagtgg

SEQ ID NO: 60764 - DNA, 201 bp, Homo sapiens
ttgctggcacggagacggtgagctctacactgcgctatggattcttgctgttaatgaagcatcctgaagtggaagctaagatccatgaagagattaaccargtgattggaccacaccggctcccaagggtggatgaccgggtcaagatgccctacacagatgccgtcatccacgaaatacagagactggtagacatcgtgc

SEQ ID NO: 60765 - DNA, 201 bp, Homo sapiens
cattgcctggaaatgaatgaataaggcaggaaagctgcccccaggtcctacaccaattcctttcctggggaacctgctgcaagttcgaactgacgctacgwttcagtctttcatgaagctcagggagaaatacagccctgtgttcactgtgtacatgggtccccggccagtggtggttttatgtggacatgaagcagtgaa

SEQ ID NO: 60766 - DNA, 201 bp, Homo sapiens
agttcctgaatctgctgcggttgatcaatgagagtttcattgagatgagcactccctgggcacagctatatgacatgtactctggaatcatgcagtatttkccaggaagacacaatctcatctactacttggtagaagagctcaaggacttcattgcctccagggtcaagatcaacgaagcatcctttgacccccaaaacc

SEQ ID NO: 60767 - DNA, 201 bp, Homo sapiens
agaatgaagcctttgtgcctttttcctctggaaagcgcatctgcctgggcgaggccatggaccgcatggaactctttctctacttcacctccacccttcaraacttctctctacactcgctggtgccgcctgtggacatcgatatcacccccaagctctcaggctttggcaacatccccccgacctacgagctctgtcttg

SEQ ID NO: 60768 - DNA, 201 bp, Homo sapiens
catgaagctcagggagaaatacagccctgtgttcactgtgtacatgggtccccggccagtggtggttttatgtggacatgaagcagtgaaggaagccttgrtagaccaagcggatgagttcagtggccgtggagaactggcttcaataaagcaaaacttccaaggtcatggtgtagctctggccaatggagaacgatggag

SEQ ID NO: 60769 - DNA, 201 bp, Homo sapiens
ctgaagtggaagctaagatccatgaagagattaaccaagtgattggaccacaccggctcccaagggtggatgaccgggtcaagatgccctacacagatgcygtcatccacgaaatacagagactggtagacatcgtgcccatgggtgtcccccacaacctcatccgggacactcagtttcgaggctaccttctgcccaagg

SEQ ID NO: 60770 - DNA, 201 bp, Homo sapiens
ctgacgctacgtttcagtctttcatgaagctcagggagaaatacagccctgtgttcactgtgtacatgggtccccggccagtggtggttttatgtggacaygaagcagtgaaggaagccttggtagaccaagcggatgagttcagtggccgtggagaactggcttcaataaagcaaaacttccaaggtcatggtgtagctc

SEQ ID NO: 60771 - DNA, 201 bp, Homo sapiens
agctaagatccatgaagagattaaccaagtgattggaccacaccggctcccaagggtggatgaccgggtcaagatgccctacacagatgccgtcatccacraaatacagagactggtagacatcgtgcccatgggtgtcccccacaacctcatccgggacactcagtttcgaggctaccttctgcccaagggcacagatgt

SEQ ID NO: 60772 - DNA, 201 bp, Homo sapiens
cctggggaacctgctgcaagttcgaactgacgctacgtttcagtctttcatgaagctcagggagaaatacagccctgtgttcactgtgtacatgggtccccggccagtggtggttttatgtggacatgaagcagtgaaggaagccttggtagaccaagcggatgagttcagtggccgtggagaactggcttcaataaagca

SEQ ID NO: 60773 - DNA, 176 bp, Homo sapiens
atggagatgggaggggctgtcaccatctttctggcactctgcttgtcttgcctgctcatcctcattgcctggaaaygaatgaataaggcaggaaagctgcccccaggtcctacaccaattcctttcctggggaacctgctgcaagttcgaactgacgctacgtttcagtctttcat

SEQ ID NO: 60774 - DNA, 201 bp, Homo sapiens
attcaggaggaggccagctacctactggaggagttccggaagaccaagggtgcccccatcgaccccatcttcttgctgagccgcaccgtttccaacgtcaycagttccgttgtcttcagaagtcgcttcgactatgaggacaagcagttcctgaatctgctgcggttgatcaatgagagtttcattgagatgagcactccc

SEQ ID NO: 60775 - DNA, 200 bp, Homo sapiens
atggagatgggaggggctgtcaccatctttctggcactctgcttgtcttgcctgctcatcctcattgcctggaaatgaatgaataaggcaggaaagctgyccccaggtcctacaccaattcctttcctggggaacctgctgcaagttcgaactgacgctacgtttcagtctttcatgaagctcagggagaaatacagccc

SEQ ID NO: 60776 - DNA, 201 bp, Homo sapiens
tctggtggagacattccaggggacagaaggacgcccattcgatccctccctgctgctggcccaggccacctccaacgtagtctgctccctcctctttggcytccgcttctcctatgaggataaggagttccaggccgtggtccgggcagctggtggtaccctgctgggagtcagctcccaggggggtcagacctacgagat

SEQ ID NO: 60777 - DNA, 201 bp, Homo sapiens
aagggacttttgatggccatggggttttcttctccaacggggagcggtggaggcagctgaggaagtttaccatgcttgctctgcgggacctgggcatgggraagcgagaaggcgaggagctgatccaggcggaggcccggtgtctggtggagacattccaggggacagaaggacgcccattcgatccctccctgctgctgg

SEQ ID NO: 60778 - DNA, 201 bp, Homo sapiens
cttgctctgcgggacctgggcatggggaagcgagaaggcgaggagctgatccaggcggaggcccggtgtctggtggagacattccaggggacagaaggacrcccattcgatccctccctgctgctggcccaggccacctccaacgtagtctgctccctcctctttggcctccgcttctcctatgaggataaggagttccag

SEQ ID NO: 60779 - DNA, 201 bp, Homo sapiens
tgctgggaaacctcctgcagctacggcccggggcgctgtattcagggctcatgcggctgagtaagaagtacggaccggtgttcaccatctacctgggaccstggcggcctgtggtggtcctggttgggcaggaggctgtgcgggaggccctgggaggtcaggctgaggagttcagcggccggggaaccgtagcgatgctgg

SEQ ID NO: 60780 - DNA, 201 bp, Homo sapiens
aataccctcatgtccaaaagtgggtacgtgaggagctgaatcgggagctgggggctggccaggcaccaagcctaggggaccgtacccgcctcccttacacygacgcggttctgcatgaggcgcagcggctgctggcgctggtgcccatgggaataccccgcaccctcatgcggaccacccgcttccgagggtacaccctgc

SEQ ID NO: 60781 - DNA, 201 bp, Homo sapiens
caacattcccccagccttccagctgcaagtccgtcccactgaccttcactccaccacgcagaccagatgaaggaaggcaacttggaagtggtgggtgcccrggacggtgcctccagcctcaacagtgggcatggacagggttaatgtctccagagtgtacactgcaggcagccacatttacacgcctgcagttgttttccg

SEQ ID NO: 60782 - DNA, 201 bp, Homo sapiens
tctccaacggggagcggtggaggcagctgaggaagtttaccatgcttgctctgcgggacctgggcatggggaagcgagaaggcgaggagctgatccaggcrgaggcccggtgtctggtggagacattccaggggacagaaggacgcccattcgatccctccctgctgctggcccaggccacctccaacgtagtctgctccc

SEQ ID NO: 60783 - DNA, 201 bp, Homo sapiens
cgggggcccaaggcgctgtctccgccgcccaagccccgcgtaaacctgggtgacctcggagacatccgttggagcatgagttcccgacatcaggcggcggyggtggtccgggagaaacccggcggcggggagataagcctgcccaggaggcagggggctgggctagctgccccgccccgcgcctgacttcgttggggaggg

SEQ ID NO: 60784 - DNA, 172 bp, Homo sapiens
tctacagcccctgttcggcgtcagagtccccactagacccagtggaaggggttagagaccaagtaggggccagtttccaattcaccctgtcagggagtgarccggatctgacgttccttgtgacttaagggtccggcttgggaattaaagtttgtttctggcctttagccta

SEQ ID NO: 60785 - DNA, 201 bp, Homo sapiens
ttctccttagggaagcgtgtctgccttggagagggcctggcaaaagcggagctcttcctcttcttcaccaccatcctacaagccttctccctggagagccygtgcccgccggacaccctgagcctcaagcccaccgtcagtggccttttcaacattcccccagccttccagctgcaagtccgtcccactgaccttcactcc

SEQ ID NO: 60786 - DNA, 201 bp, Homo sapiens
gcgtgtctgccttggagagggcctggcaaaagcggagctcttcctcttcttcaccaccatcctacaagccttctccctggagagcccgtgcccgccggacmccctgagcctcaagcccaccgtcagtggccttttcaacattcccccagccttccagctgcaagtccgtcccactgaccttcactccaccacgcagaccag

SEQ ID NO: 60787 - DNA, 172 bp, Homo sapiens; identical to SEQ ID NO: 60784

SEQ ID NO: 60788 - DNA, 201 bp, Homo sapiens; identical to SEQ ID NO: 60779

SEQ ID NO: 60789 - DNA, 201 bp, Homo sapiens; identical to SEQ ID NO: 60781

SEQ ID NO: 60790 - DNA, 201 bp, Homo sapiens; identical to SEQ ID NO: 60785

SEQ ID NO: 60791 - DNA, 201 bp, Homo sapiens; identical to SEQ ID NO: 60783

SEQ ID NO: 60792 - DNA, 201 bp, Homo sapiens; identical to SEQ ID NO: 60786

SEQ ID NO: 60793 - DNA, 201 bp, Homo sapiens
ccccaacctgctcttctcagacgtgtatcaggagatgcccgcccagctccgcaagcagcaggagtctctggcccgccacctgcagacctacggggagcacwacccactggatcacttcgataagtgagacctgctcagcccacccccacccatcctcagctaccccgagaggtagccccactctaaggggagcagggggac

SEQ ID NO: 60794 - DNA, 201 bp, Homo sapiens
atgccggcttcaacttcgctgccacacttgagtgccccatcatcttcttctgccggaacaatggctacgccatctccacgcccacctctgagcagtatcgyggcgatggcattgcagcacgaggccccgggtatggcatcatgtcaatccgcgtggatggtaatgatgtgtttgccgtatacaacgccacaaaggaggccc

SEQ ID NO: 60795 - DNA, 201 bp, Homo sapiens
gcaggaaggtgatggaggcctttgagcaggccgagcggaagcccaaacccaaccccaacctgctcttctcagacgtgtatcaggagatgcccgcccagctycgcaagcagcaggagtctctggcccgccacctgcagacctacggggagcactacccactggatcacttcgataagtgagacctgctcagcccacccccac

SEQ ID NO: 60796 - DNA, 201 bp, Homo sapiens
gcaacatcagtgacttgggcaaggggcgccagatgcctgtccactacggctgcaaggaacgccacttcgtcactatctcctctccactggccacgcagatycctcaggcggtgggggcggcgtacgcagccaagcgggccaatgccaacagggtcgtcatctgttacttcggcgagggggcagccagtgagggggacgccc

SEQ ID NO: 60797 - DNA, 201 bp, Homo sapiens
ggccatgacctacaggatcgggcaccacagcaccagtgacgacagttcagcgtaccgctcggtggatgaggtcaattactgggataaacaggaccaccccrtctcccggctgcggcactatctgctgagccaaggctggtgggatgaggagcaggagaaggcctggaggaagcagtcccgcaggaaggtgatggaggcctt

SEQ ID NO: 60798 - DNA, 201 bp, Homo sapiens
tgaggagggcacgcacgtggggagtgccgccgccctggacaacacggacctggtgtttggccagtaccgggaggcaggtgtgctgatgtatcgggactacyccctggaactattcatggcccagtgctatggcaacatcagtgacttgggcaaggggcgccagatgcctgtccactacggctgcaaggaacgccacttcgt

SEQ ID NO: 60799 - DNA, 201 bp, Homo sapiens
atcctctatgagtctcagcggcagggccggatctccttctacatgaccaactatggtgaggagggcacgcacgtggggagtgccgccgccctggacaacayggacctggtgtttggccagtaccgggaggcaggtgtgctgatgtatcgggactaccccctggaactattcatggcccagtgctatggcaacatcagtgac

SEQ ID NO: 60800 - DNA, 201 bp, Homo sapiens
tcgctgcagcgagggtctggcggctaaaccgtggtttgagccaggctgccctcctgctgctgcggcagcctggggctcggggactggctagatctcacccbcccaggcagcagcagcagttttcatctctggatgacaagccccagttcccaggggcctcggcggagtttatagataagttggaattcatccagcccaacg

SEQ ID NO: 60801 - DNA, 201 bp, Homo sapiens
gctgcagcgagggtctggcggctaaaccgtggtttgagccaggctgccctcctgctgctgcggcagcctggggctcggggactggctagatctcacccccmcaggcagcagcagcagttttcatctctggatgacaagccccagttcccaggggcctcggcggagtttatagataagttggaattcatccagcccaacgtc

SEQ ID NO: 60802 - DNA, 146 bp, Homo sapiens
ttgttagccaagatggcggtagcgatcgctgcagcgagggtctggmggctaaaccgtggtttgagccaggctgccctcctgctgctgcggcagcctggggctcggggactggctagatctcacccccccaggcagcagcagcagtt

SEQ ID NO: 60803 - DNA, 201 bp, Homo sapiens
atggcatcatgtcaatccgcgtggatggtaatgatgtgtttgccgtatacaacgccacaaaggaggcccgacggcgggctgtggcagagaaccagcccttyctcatcgaggccatgacctacaggatcgggcaccacagcaccagtgacgacagttcagcgtaccgctcggtggatgaggtcaattactgggataaacagg

SEQ ID NO: 60804 - DNA, 201 bp, Homo sapiens
gggatgaggagcaggagaaggcctggaggaagcagtcccgcaggaaggtgatggaggcctttgagcaggccgagcggaagcccaaacccaaccccaacctrctcttctcagacgtgtatcaggagatgcccgcccagctccgcaagcagcaggagtctctggcccgccacctgcagacctacggggagcactacccactgg

SEQ ID NO: 60805 - DNA, 201 bp, Homo sapiens
aaggcctggaggaagcagtcccgcaggaaggtgatggaggcctttgagcaggccgagcggaagcccaaacccaaccccaacctgctcttctcagacgtgtrtcaggagatgcccgcccagctccgcaagcagcaggagtctctggcccgccacctgcagacctacggggagcactacccactggatcacttcgataagtga

SEQ ID NO: 60806 - DNA, 201 bp, Homo sapiens
gacagcatctgcagcagttgctgaggctccgtcagccccctcttcacctgttgttacagtgccttctcccaggggctgggtgagggcacattcaggactaraagcccctctgggcatggggtggacatggcaggtcagcctgtggaacttgcgcaggtgcgagtggccagcagaggtcacgaataaactgcatctctgcgc

SEQ ID NO: 60807 - DNA, 201 bp, Homo sapiens
tgccacacttgagtgccccatcatcttcttctgccggaacaatggctacgccatctccacgcccacctctgagcagtatcgcggcgatggcattgcagcaygaggccccgggtatggcatcatgtcaatccgcgtggatggtaatgatgtgtttgccgtatacaacgccacaaaggaggcccgacggcgggctgtggcaga

SEQ ID NO: 60808 - DNA, 201 bp, Homo sapiens
ggcgtacgcagccaagcgggccaatgccaacagggtcgtcatctgttacttcggcgagggggcagccagtgagggggacgcccatgccggcttcaacttcrctgccacacttgagtgccccatcatcttcttctgccggaacaatggctacgccatctccacgcccacctctgagcagtatcgcggcgatggcattgcagc

SEQ ID NO: 60809 - DNA, 201 bp, Homo sapiens
tgagtgccccatcatcttcttctgccggaacaatggctacgccatctccacgcccacctctgagcagtatcgcggcgatggcattgcagcacgaggccccrggtatggcatcatgtcaatccgcgtggatggtaatgatgtgtttgccgtatacaacgccacaaaggaggcccgacggcgggctgtggcagagaaccagcc

SEQ ID NO: 60810 - DNA, 201 bp, Homo sapiens
atcatgtcaatccgcgtggatggtaatgatgtgtttgccgtatacaacgccacaaaggaggcccgacggcgggctgtggcagagaaccagccctttctcaycgaggccatgacctacaggatcgggcaccacagcaccagtgacgacagttcagcgtaccgctcggtggatgaggtcaattactgggataaacaggaccac

SEQ ID NO: 60811 - DNA, 201 bp, Homo sapiens
gaggagcaggagaaggcctggaggaagcagtcccgcaggaaggtgatggaggcctttgagcaggccgagcggaagcccaaacccaaccccaacctgctctkctcagacgtgtatcaggagatgcccgcccagctccgcaagcagcaggagtctctggcccgccacctgcagacctacggggagcactacccactggatcac

SEQ ID NO: 60812 - DNA, 201 bp, Homo sapiens
cagcgaggacccccacctgccgaaggagaaggtgctgaagctctacaagagcatgacactgcttaacaccatggaccgcatcctctatgagtctcagcggsagggccggatctccttctacatgaccaactatggtgaggagggcacgcacgtggggagtgccgccgccctggacaacacggacctggtgtttggccagta

SEQ ID NO: 60813 - DNA, 201 bp, Homo sapiens
ccagtaccgggaggcaggtgtgctgatgtatcgggactaccccctggaactattcatggcccagtgctatggcaacatcagtgacttgggcaaggggcgcmagatgcctgtccactacggctgcaaggaacgccacttcgtcactatctcctctccactggccacgcagatccctcaggcggtgggggcggcgtacgcagc

SEQ ID NO: 60814 - DNA, 201 bp, Homo sapiens
cgggccaatgccaacagggtcgtcatctgttacttcggcgagggggcagccagtgagggggacgcccatgccggcttcaacttcgctgccacacttgagtrccccatcatcttcttctgccggaacaatggctacgccatctccacgcccacctctgagcagtatcgcggcgatggcattgcagcacgaggccccgggtat

SEQ ID NO: 60815 - DNA, 201 bp, Homo sapiens; identical to SEQ ID NO: 60793

SEQ ID NO: 60816 - DNA, 201 bp, Homo sapiens; identical to SEQ ID NO: 60794

SEQ ID NO: 60817 - DNA, 201 bp, Homo sapiens; identical to SEQ ID NO: 60795

SEQ ID NO: 60818 - DNA, 201 bp, Homo sapiens; identical to SEQ ID NO: 60796

SEQ ID NO: 60819 - DNA, 201 bp, Homo sapiens; identical to SEQ ID NO: 60797

SEQ ID NO: 60820 - DNA, 201 bp, Homo sapiens; identical to SEQ ID NO: 60798

SEQ ID NO: 60821 - DNA, 201 bp, Homo sapiens; identical to SEQ ID NO: 60799

SEQ ID NO: 60822 - DNA, 201 bp, Homo sapiens; identical to SEQ ID NO: 60800

SEQ ID NO: 60823 - DNA, 201 bp, Homo sapiens; identical to SEQ ID NO: 60801

SEQ ID NO: 60824 - DNA, 146 bp, Homo sapiens; identical to SEQ ID NO: 60802

SEQ ID NO: 60825 - DNA, 201 bp, Homo sapiens; identical to SEQ ID NO: 60803

SEQ ID NO: 60826 - DNA, 201 bp, Homo sapiens; identical to SEQ ID NO: 60804

SEQ ID NO: 60827 - DNA, 201 bp, Homo sapiens; identical to SEQ ID NO: 60805

SEQ ID NO: 60828 - DNA, 201 bp, Homo sapiens; identical to SEQ ID NO: 60807

SEQ ID NO: 60829 - DNA, 201 bp, Homo sapiens; identical to SEQ ID NO: 60808

SEQ ID NO: 60830 - DNA, 201 bp, Homo sapiens; identical to SEQ ID NO: 60809

SEQ ID NO: 60831 - DNA, 201 bp, Homo sapiens; identical to SEQ ID NO: 60810

SEQ ID NO: 60832 - DNA, 201 bp, Homo sapiens; identical to SEQ ID NO: 60811

SEQ ID NO: 60833 - DNA, 201 bp, Homo sapiens; identical to SEQ ID NO: 60812

SEQ ID NO: 60834 - DNA, 201 bp, Homo sapiens; identical to SEQ ID NO: 60813

SEQ ID NO: 60835 - DNA, 201 bp, Homo sapiens; identical to SEQ ID NO: 60814

SEQ ID NO: 60836 - DNA, 201 bp, Homo sapiens
aatgattcatgcggtgttgcagtggcagaagaggaatgctgcccctcctccaagtaacaccgaagcaccacctggagagaccagaactgaggccggagctragactagatcaccaggcaaggctgaagctgagtctgatgcattgcctgacgatactgtaattgagagtgaagcactgcccagtgatattgcagccgaggc

SEQ ID NO: 60837 - DNA, 201 bp, Homo sapiens
tgctttgagctgtctctccaagcagaagaagaagaagacaaagaagccgaaggagccacagccggaacagccacagccaagtacaagtgcaaattaactgccgtggtcaagtgtgtcagtgactgcacattggtttctgttctctggctatttgcaaaacctctcccacccttgtgtttcactccaccaccaaccccaggt

SEQ ID NO: 60838 - DNA, 201 bp, Homo sapiens
agagcgagtctgctttgagctgtctctccaagcagaagaagaagaagacaaagaagccgaaggagccacagccggaacagccacagccaagtacaagtgcraattaactgccgtggtcaagtgtgtcagtgactgcacattggtttctgttctctggctatttgcaaaacctctcccacccttgtgtttcactccaccacc

SEQ ID NO: 60839 - DNA, 201 bp, Homo sapiens
agaaaggccattttgctgagctctcacagctgctagagatgctcaatgactcccaatacaacccaaagagacaaacgcttgttttttctgccacactcacmctggtgcatcaggctcctgctcgaatccttcataagaagcacaccaagaaaatggataaaacagccaaacttgacctccttatgcagaaaattggcatga

SEQ ID NO: 60840 - DNA, 201 bp, Homo sapiens
agaactgaggccggagctgagactagatcaccaggcaaggctgaagctgagtctgatgcattgcctgacgatactgtaattgagagtgaagcactgcccaktgatattgcagccgaggccagagccaagactggaggcactgtctcagaccaggcgttgctctttggtgacgatgatgctggtgaagggccttcttccctg

SEQ ID NO: 60841 - DNA, 201 bp, Homo sapiens
ttgctgagctctcacagctgctagagatgctcaatgactcccaatacaacccaaagagacaaacgcttgttttttctgccacactcaccctggtgcatcargctcctgctcgaatccttcataagaagcacaccaagaaaatggataaaacagccaaacttgacctccttatgcagaaaattggcatgaggggcaagccca

SEQ ID NO: 60842 - DNA, 181 bp, Homo sapiens
ccggaactgcagttgctgctgcagctgaggtacagcggcggtttctgaggttcttcactcgcgactgacggagctgcggtrgcgtctccacacgcaaccatgaagttgaaggacacaaaatcaaggccaaagcagtcaagctgtggcaaatttcagacaaagggaatcaaagttgtgggaa

SEQ ID NO: 60843 - DNA, 201 bp, Homo sapiens
tgagctgtctctccaagcagaagaagaagaagacaaagaagccgaaggagccacagccggaacagccacagccaagtacaagtgcaaattaactgccgtggtcaagtgtgtcagtgactgcacattggtttctgttctctggctatttgcaaaacctctcccacccttgtgtttcactccaccaccaaccccaggtaaaaa

SEQ ID NO: 60844 - DNA, 201 bp, Homo sapiens
gagctgtctctccaagcagaagaagaagaagacaaagaagccgaaggagccacagccggaacagccacagccaagtacaagtgcaaattaactgccgtggtcaagtgtgtcagtgactgcacattggtttctgttctctggctatttgcaaaacctctcccacccttgtgtttcactccaccaccaaccccaggtaaaaaa

SEQ ID NO: 60845 - DNA, 201 bp, Homo sapiens
ttgagctgtctctccaagcagaagaagaagaagacaaagaagccgaaggagccacagccggaacagccacagccaagtacaagtgcaaattaactgccgtggtcaagtgtgtcagtgactgcacattggtttctgttctctggctatttgcaaaacctctcccacccttgtgtttcactccaccaccaaccccaggtaaaa

SEQ ID NO: 60846 - DNA, 201 bp, Homo sapiens
ctttgagctgtctctccaagcagaagaagaagaagacaaagaagccgaaggagccacagccggaacagccacagccaagtacaagtgcaaattaactgccstggtcaagtgtgtcagtgactgcacattggtttctgttctctggctatttgcaaaacctctcccacccttgtgtttcactccaccaccaaccccaggtaa

SEQ ID NO: 60847 - DNA, 201 bp, Homo sapiens
aggaaccttcggcagctcaggtgcctggtagtggatgaggctgaccggatggttgagaaaggccattttgctgagctctcacagctgctagagatgctcartgactcccaatacaacccaaagagacaaacgcttgttttttctgccacactcaccctggtgcatcaggctcctgctcgaatccttcataagaagcacacc

SEQ ID NO: 60848 - DNA, 164 bp, Homo sapiens
ccggaactgcagttgctgctgcagctgaggtacagcggcggtttctgaggttcttcactcgcgrctgacggagctgcggtggcgtctccacacgcaaccatgaagttgaaggacacaaaatcaaggccaaagcagtcaagctgtggcaaatttcagacaaaggg

SEQ ID NO: 60849 - DNA, 201 bp, Homo sapiens
gctttgagctgtctctccaagcagaagaagaagaagacaaagaagccgaaggagccacagccggaacagccacagccaagtacaagtgcaaattaactgccgtggtcaagtgtgtcagtgactgcacattggtttctgttctctggctatttgcaaaacctctcccacccttgtgtttcactccaccaccaaccccaggta

SEQ ID NO: 60850 - DNA, 201 bp, Homo sapiens
ccttgaccctgcatgcctgtatgcaccagaagcagaggctcagaaacctggagcagtttgcccgtctggaagactgtgttctcttggcaacagatgtggcrgctcggggtctggatattcctaaagtccagcatgtcatccattaccaggtcccacgtacctcggagatttatgtccaccgaagtggtcgaactgctcgag

SEQ ID NO: 60851 - DNA, 201 bp, Homo sapiens
agctgagactagatcaccaggcaaggctgaagctgagtctgatgcattgcctgacgatactgtaattgagagtgaagcactgcccagtgatattgcagccraggccagagccaagactggaggcactgtctcagaccaggcgttgctctttggtgacgatgatgctggtgaagggccttcttccctgatcagggagaaacc

SEQ ID NO: 60852 - DNA, 201 bp, Homo sapiens; identical to SEQ ID NO: 60836

SEQ ID NO: 60853 - DNA, 201 bp, Homo sapiens; identical to SEQ ID NO: 60837

SEQ ID NO: 60854 - DNA, 201 bp, Homo sapiens; identical to SEQ ID NO: 60838

SEQ ID NO: 60855 - DNA, 201 bp, Homo sapiens; identical to SEQ ID NO: 60839

SEQ ID NO: 60856 - DNA, 201 bp, Homo sapiens; identical to SEQ ID NO: 60840

SEQ ID NO: 60857 - DNA, 201 bp, Homo sapiens; identical to SEQ ID NO: 60841

SEQ ID NO: 60858 - DNA, 181 bp, Homo sapiens; identical to SEQ ID NO: 60842

SEQ ID NO: 60859 - DNA, 201 bp, Homo sapiens; identical to SEQ ID NO: 60843

SEQ ID NO: 60860 - DNA, 201 bp, Homo sapiens; identical to SEQ ID NO: 60844

SEQ ID NO: 60861 - DNA, 201 bp, Homo sapiens; identical to SEQ ID NO: 60845

SEQ ID NO: 60862 - DNA, 201 bp, Homo sapiens; identical to SEQ ID NO: 60846

SEQ ID NO: 60863 - DNA, 201 bp, Homo sapiens; identical to SEQ ID NO: 60847

SEQ ID NO: 60864 - DNA, 164 bp, Homo sapiens; identical to SEQ ID NO: 60848

SEQ ID NO: 60865 - DNA, 201 bp, Homo sapiens; identical to SEQ ID NO: 60849

SEQ ID NO: 60866 - DNA, 201 bp, Homo sapiens; identical to SEQ ID NO: 60850

SEQ ID NO: 60867 - DNA, 201 bp, Homo sapiens; identical to SEQ ID NO: 60851

SEQ ID NO: 60868 - DNA, 201 bp, Homo sapiens
tgtgtgctccctccggcgagagactttgtcagctcccgcacagtaacgtggaagtccaagaatccgagtggaggctcaccgaggcgaaggggccaaccatrggaaaggagagtggatgggactcaggcagggctgctgtagcagctgtggtcggaggagttgtggctgtggggactgtgctcgtggcgctcagtgccatgg

SEQ ID NO: 60869 - DNA, 201 bp, Homo sapiens
cgggacctccacgcacgtactcgtgcgcgctggggaggaagtcccgcccctatggcaaactcagctacctgattggctgcctcgcggaccgcagcagtgcmggcgggagagctggcttggggcgctggcacctcctcttacagctttactcctgccagcttgggaaaaggccggagaaggtgaaattctgtgtgctccctc

SEQ ID NO: 60870 - DNA, 201 bp, Homo sapiens
aggcgaaggggccaaccatgggaaaggagagtggatgggactcaggcagggctgctgtagcagctgtggtcggaggagttgtggctgtggggactgtgctygtggcgctcagtgccatgggcttcacctcagtaggaatcgccgcatcctccatagcagccaagatgatgtctacagcagccattgccaacgggggcggag

SEQ ID NO: 60871 - DNA, 132 bp, Homo sapiens
gcggccgccctctctggacccgggaacccacmggcccagagcgacccgcgataggaacccgggttcctggcctcagcccctctccagagtcggctccaaccccgctcgttttggtactcaccgtgtggagac

SEQ ID NO: 60872 - DNA, 201 bp, Homo sapiens
aggccggagaaggtgaaattctgtgtgctccctccggcgagagactttgtcagctcccgcacagtaacgtggaagtccaagaatccgagtggaggctcacygaggcgaaggggccaaccatgggaaaggagagtggatgggactcaggcagggctgctgtagcagctgtggtcggaggagttgtggctgtggggactgtgc

SEQ ID NO: 60873 - DNA, 201 bp, Homo sapiens
cccagagcgacccgcgataggaacccgggttcctggcctcagcccctctccagagtcggctccaaccccgctcgttttggtactcaccgtgtggagacgcyaccgcagctccgtcagtcgcgagtgaagaacctcagaaaccgccgctgtacctcagctgcagcagcaactgcagttccggggcgggacctccacgcacgt

SEQ ID NO: 60874 - DNA, 201 bp, Homo sapiens
accgtgtggagacgccaccgcagctccgtcagtcgcgagtgaagaacctcagaaaccgccgctgtacctcagctgcagcagcaactgcagttccggggcgrgacctccacgcacgtactcgtgcgcgctggggaggaagtcccgcccctatggcaaactcagctacctgattggctgcctcgcggaccgcagcagtgccgg

SEQ ID NO: 60875 - DNA, 201 bp, Homo sapiens
taggaacccgggttcctggcctcagcccctctccagagtcggctccaaccccgctcgttttggtactcaccgtgtggagacgccaccgcagctccgtcagycgcgagtgaagaacctcagaaaccgccgctgtacctcagctgcagcagcaactgcagttccggggcgggacctccacgcacgtactcgtgcgcgctgggg

SEQ ID NO: 60876 - DNA, 201 bp, Homo sapiens
ttctgtgtgctccctccggcgagagactttgtcagctcccgcacagtaacgtaatccaagaatccgagtggaggctcaccgaggcgaaggggccaaccatrggaaaggagagtggatgggactcaggcagggctgctgtagcagctgtggtcggaggagttgtggctgtggggactgtgctcgtggcgctcagtgccatgg

SEQ ID NO: 60877 - DNA, 201 bp, Homo sapiens; identical to SEQ ID NO: 60869

SEQ ID NO: 60878 - DNA, 201 bp, Homo sapiens; identical to SEQ ID NO: 60870

SEQ ID NO: 60879 - DNA, 132 bp, Homo sapiens; identical to SEQ ID NO: 60871

SEQ ID NO: 60880 - DNA, 201 bp, Homo sapiens
aaaaggccggagaaggtgaaattctgtgtgctccctccggcgagagactttgtcagctcccgcacagtaacgtaatccaagaatccgagtggaggctcacygaggcgaaggggccaaccatgggaaaggagagtggatgggactcaggcagggctgctgtagcagctgtggtcggaggagttgtggctgtggggactgtgc

SEQ ID NO: 60881 - DNA, 201 bp, Homo sapiens; identical to SEQ ID NO: 60873

SEQ ID NO: 60882 - DNA, 201 bp, Homo sapiens; identical to SEQ ID NO: 60874

SEQ ID NO: 60883 - DNA, 201 bp, Homo sapiens; identical to SEQ ID NO: 60875

SEQ ID NO: 60884 - DNA, 201 bp, Homo sapiens
tttcataccaaaatcagccaatcaataatggtgaatttgacattattgtcctaagtgaggatgagaagaatatcgtcgaacgcaatgtgtccacttcaggygtgagcatttactttgaggcttatctttataatgctaccaactgtagcagcactccatggcacctgccacccatgcacatgacctcttcccagcgccggc

SEQ ID NO: 60885 - DNA, 201 bp, Homo sapiens
tgtaaggagaggaacattctagcagccacttttatccgctccctgcataagaacataggaggctctgagacctttcaggacaaggtgaactttttccagcragagcttcggcaggtacatatgaaaagaccacattccaaagtcaccctgaaggtcagcagacatgccttgttggaatcgtctctgaaagccactcggaat

SEQ ID NO: 60886 - DNA, 201 bp, Homo sapiens
cataaccatcagccagaagatgccgcatgctcccctgtgtctggaggattttgtcacctacaagccttgtctttacctcacctgctccctgcccatatctmccacaggccactttggcatgaaattcaatatagaaaatttggaaataagaaaaagaacaagggaaataggcaggccagagagaatgagtactcaagacac

SEQ ID NO: 60887 - DNA, 201 bp, Homo sapiens
ttttctactcttgtattgacctgtgggcagccgcacacccttcaaatagtaccccgagatgagtatgataatcccaccaacaattccatgtccttgagagwtgagcacaattacaccttgtccattcatgagctcggccctcaagaagaagagagtactggtgtctcatttgagaaatcagtaacatccaacaggcagact

SEQ ID NO: 60888 - DNA, 201 bp, Homo sapiens; identical to SEQ ID NO: 60884

SEQ ID NO: 60889 - DNA, 201 bp, Homo sapiens
gtcttctgctgagtgctgccgccccttcccaggacagcggaggtggaacttcgtcgcgctgcaacccccggctcgggatcctggggcgtcctttggcagtygattgcaccctgcactagagagaagtccaggaatgatatattcttgggctgtatttctctaccctggagttcatccagttcatcccagaaacactgacct

SEQ ID NO: 60890 - DNA, 201 bp, Homo sapiens
caaggtgaaaggggccaaaagttacctgctttggtgaataggagtgctctacttggttctcagaacatgggccctcgtttaaagctgcagctgtgatcctyggctgtctgttggcattgacgggacctgatgttttacgttattggtggaatcacagtgtctgtggttgcattcttcttcacaattaagttcctctttgag

SEQ ID NO: 60891 - DNA, 201 bp, Homo sapiens; identical to SEQ ID NO: 60887

SEQ ID NO: 60892 - DNA, 183 bp, Homo sapiens
agcccggaagcggaaactccttggggaaagggcaatcccccgagccggttcccaggccgggtggagaccaactctggggtctsttggtgggagagtggggagcccgtcttctgctgagtgctgccgccccttcccaggacagcggaggtggaacttcgtcgcgctgcaacccccggctcggga

SEQ ID NO: 60893 - DNA, 201 bp, Homo sapiens
aagctctagtcatagcactttttcagagcatcttaggcaccattgcaacccaaccagggaagctgcatccctgtggtggtccttaggcaccagtctttgtkaaacaaaaccctttggcactattgtggttttctattctctgtctgaactctattcaaaagtatctttgctctcttgggccttttcttttactgttttgtt

SEQ ID NO: 60894 - DNA, 201 bp, Homo sapiens; identical to SEQ ID NO: 60884

SEQ ID NO: 60895 - DNA, 201 bp, Homo sapiens
cataaccatcagccagaagatgccgcatgctcccctgtgtctggaggattttgtcacctacaagccttgtctttacctcacctgctccctgcccatatctmccacaggccactttggcatggtatgtaagctgagctcttcattctgtcatgagaagaggaccatgctgctatcatttatttggtcctttgaagatctcag

SEQ ID NO: 60896 - DNA, 201 bp, Homo sapiens
acaaaaccctttggcactattgtggttttctattctctgtctgaactctattcaaaagtatctttgctctcttgggccttttcttttactgttttgttttktttttttctaatcctgctttcatactagccagtgtggggaaaaggtacaatatgtcaaagagatgagagagtgttatttcttgggcaattttctattagt

SEQ ID NO: 60897 - DNA, 201 bp, Homo sapiens; identical to SEQ ID NO: 60889

SEQ ID NO: 60898 - DNA, 201 bp, Homo sapiens; identical to SEQ ID NO: 60887

SEQ ID NO: 60899 - DNA, 183 bp, Homo sapiens; identical to SEQ ID NO: 60892

SEQ ID NO: 60900 - DNA, 201 bp, Homo sapiens; identical to SEQ ID NO: 60885

SEQ ID NO: 60901 - DNA, 201 bp, Homo sapiens
cattttaagctctagtcatagcactttttcagagcatcttaggcaccattgcaacccaaccagggaagctgcatccctgtggtggtccttaggcaccagtytttgttaaacaaaaccctttggcactattgtggttttctattctctgtctgaactctattcaaaagtatctttgctctcttgggccttttcttttactgt

SEQ ID NO: 60902 - DNA, 201 bp, Homo sapiens
gtgttatttcttgggcaattttctattagtgtttcttattttggccagttcttttatttatgtccttgtgacccaggtacttggggggccagctacccttytggccttttagcgtctttgaaggagaccagacatgagtgaatacctaggagagtgtcagcatgtttctggaaaattggcagagaccaagccctgctgcag

SEQ ID NO: 60903 - DNA, 201 bp, Homo sapiens; identical to SEQ ID NO: 60890

SEQ ID NO: 60904 - DNA, 201 bp, Homo sapiens
ctacagttcctgcctgacctcagtctttcgcagtcatcatttgtcctttcttggcacatgggtgctgacctcactcatccttggggtccgggatccagcaycagggtctctataccccaggatcctccatgccacatggtcactgctctcctcagggaccaggacaaggtgctgctgcttgcccaaatgttttcccatggg

SEQ ID NO: 60905 - DNA, 201 bp, Homo sapiens
gtgacccaggtacttggggggccagctacccttctggccttttagcgtctttgaaggagaccagacatgagtgaatacctaggagagtgtcagcatgtttytggaaaattggcagagaccaagccctgctgcagattcgtcaggccaggtgaaagggccaggcagttgcagctgatgatgtaaatattttgtacagtagat

SEQ ID NO: 60906 - DNA, 201 bp, Homo sapiens
cagttcctgcctgacctcagtctttcgcagtcatcatttgtcctttcttggcacatgggtgctgacctcactcatccttggggtccgggatccagcatcakggtctctataccccaggatcctccatgccacatggtcactgctctcctcagggaccaggacaaggtgctgctgcttgcccaaatgttttcccatgggata

SEQ ID NO: 60907 - DNA, 201 bp, Homo sapiens
tcccaatggggcagtcaactctgagaatattacaagccatctttattgccaaaaccagcaagtacacagagtcctgaaacaaggcaggactttggcaatgscttggcctcctggaagcatgtctgagccctcctgttcgcagggatcatgaggaacaagccctcctgagctgctacagttcctgcctgacctcagtctttc

SEQ ID NO: 60908 - DNA, 201 bp, Homo sapiens
ccctgtcccctcatgggtcccgggttagcctggtgacaggcagacacatgctgttggcctcaagcaaggaagcagagcactgtgtaaccagcagtcacagstcttttcttggcgttcctgccaggctctccctctctgcacctgtctcatagcctcgaatatcttaattccttaggcttaagagagagagccttaatggat

SEQ ID NO: 60909 - DNA, 201 bp, Homo sapiens
ggtctgcgttcagaacatcgggagaaaatgaacaggatgcggcagcgcattgctcagcgtctgaaggaggcccagaatacatgtgcaatgctgacaacttwtaatgagattgacatgagtaacatccaggagatgagggctcggcacaaagaggcttttttgaagaaacataacctcaaactaggcttcatgtcggcattt

SEQ ID NO: 60910 - DNA, 201 bp, Homo sapiens
aactgaaaaccagtcttctccctgtcccctcatgggtcccgggttagcctggtgacaggcagacacatgctgttggcctcaagcaaggaagcagagcactrtgtaaccagcagtcacaggtcttttcttggcgttcctgccaggctctccctctctgcacctgtctcatagcctcgaatatcttaattccttaggcttaag

SEQ ID NO: 60911 - DNA, 201 bp, Homo sapiens
cgtggcactgacctatgatcaccggctgattgatggcagagaggctgtgactttcctccgcaaaatcaaggcagcggtagaggatcccagagtcctcctcytggatctttaggaggaacccacacaccctacaagttgatcatgcaggaactgaaaaccagtcttctccctgtcccctcatgggtcccgggttagcctggt

SEQ ID NO: 60912 - DNA, 201 bp, Homo sapiens
tggcactgacctatgatcaccggctgattgatggcagagaggctgtgactttcctccgcaaaatcaaggcagcggtagaggatcccagagtcctcctcctkgatctttaggaggaacccacacaccctacaagttgatcatgcaggaactgaaaaccagtcttctccctgtcccctcatgggtcccgggttagcctggtga

SEQ ID NO: 60913 - DNA, 201 bp, Homo sapiens
agagtcctcctcctggatctttaggaggaacccacacaccctacaagttgatcatgcaggaactgaaaaccagtcttctccctgtcccctcatgggtcccrggttagcctggtgacaggcagacacatgctgttggcctcaagcaaggaagcagagcactgtgtaaccagcagtcacaggtcttttcttggcgttcctgcc

SEQ ID NO: 60914 - DNA, 201 bp, Homo sapiens
acaggatgcggcagcgcattgctcagcgtctgaaggaggcccagaatacatgtgcaatgctgacaacttttaatgagattgacatgagtaacatccaggaratgagggctcggcacaaagaggcttttttgaagaaacataacctcaaactaggcttcatgtcggcatttgtgaaggcctcagcctttgccttgcaggaac

SEQ ID NO: 60915 - DNA, 201 bp, Homo sapiens
tgttggcctcaagcaaggaagcagagcactgtgtaaccagcagtcacaggtcttttcttggcgttcctgccaggctctccctctctgcacctgtctcatascctcgaatatcttaattccttaggcttaagagagagagccttaatggatgctcattcatattcctgcctttcttccatcagctctctgcaaagatgattt

SEQ ID NO: 60916 - DNA, 201 bp, Homo sapiens
ttatagcggggccttgtctcttcctctgcaggacacagatctggaggacgtggactggggtaggaaaccaccctgagggtgttagtacctagtggtgaaayggatgaggtcatttctaaggtgtgttgcccgtggatctgggcacaatcattggaattccttggaccaatactgagtgcctgcagcatctactactctgtc

SEQ ID NO: 60917 - DNA, 201 bp, Homo sapiens
gctgtgactttcctccgcaaaatcaaggcagcggtagaggatcccagagtcctcctcctggatctttaggaggaacccacacaccctacaagttgatcatscaggaactgaaaaccagtcttctccctgtcccctcatgggtcccgggttagcctggtgacaggcagacacatgctgttggcctcaagcaaggaagcagag

SEQ ID NO: 60918 - DNA, 201 bp, Homo sapiens
tggatgctcattcatattcctgcctttcttccatcagctctctgcaaagatgattttgcttttccctagtgctggtatactatagagaaacccctggggaycatgtgattaagttcctatcttttgaaagtttgttctgcagagacttctaggaggatgctgtgcctcccaagctcagagcagcctctgtcctggctgtgc

SEQ ID NO: 60919 - DNA, 201 bp, Homo sapiens
tactatagagaaacccctggggaccatgtgattaagttcctatcttttgaaagtttgttctgcagagacttctaggaggatgctgtgcctcccaagctcakagcagcctctgtcctggctgtgcacattctcccttgattccacttgtgtggagggattgaacacaggcaaagaggtgctgctttgcttcttcaatggcac

SEQ ID NO: 60920 - DNA, 201 bp, Homo sapiens
gcagagacttctaggaggatgctgtgcctcccaagctcagagcagcctctgtcctggctgtgcacattctcccttgattccacttgtgtggagggattgarcacaggcaaagaggtgctgctttgcttcttcaatggcaccttcattctccgttgtcattgacttcaagatgcctcttctacctcttccaggaagcacagg

SEQ ID NO: 60921 - DNA, 201 bp, Homo sapiens
tctaggaggatgctgtgcctcccaagctcagagcagcctctgtcctggctgtgcacattctcccttgattccacttgtgtggagggattgaacacaggcamagaggtgctgctttgcttcttcaatggcaccttcattctccgttgtcattgacttcaagatgcctcttctacctcttccaggaagcacaggccaggggat

SEQ ID NO: 60922 - DNA, 201 bp, Homo sapiens
gtaagcacctgggctgaggaggcagtttttgttccttcctgcgttatagcggggccttgtctcttcctctgcaggacacagatctggaggacgtggactgsggtaggaaaccaccctgagggtgttagtacctagtggtgaaacggatgaggtcatttctaaggtgtgttgcccgtggatctgggcacaatcattggaatt

SEQ ID NO: 60923 - DNA, 201 bp, Homo sapiens
aatatcttaattccttaggcttaagagagagagccttaatggatgctcattcatattcctgcctttcttccatcagctctctgcaaagatgattttgcttytccctagtgctggtatactatagagaaacccctggggaccatgtgattaagttcctatcttttgaaagtttgttctgcagagacttctaggaggatgctg

SEQ ID NO: 60924 - DNA, 201 bp, Homo sapiens
catacccactcagatgccaccggtgccctcgccctcacagcctccttctggcaaacctgtgtctgcagtaaaacccactgttgccccaccactagctgagscaggagctggcaaaggtctgcgttcagaacatcgggagaaaatgaacaggatgcggcagcgcattgctcagcgtctgaaggaggcccagaatacatgtgc

SEQ ID NO: 60925 - DNA, 201 bp, Homo sapiens
catgctgttggcctcaagcaaggaagcagagcactgtgtaaccagcagtcacaggtcttttcttggcgttcctgccaggctctccctctctgcacctgtckcatagcctcgaatatcttaattccttaggcttaagagagagagccttaatggatgctcattcatattcctgcctttcttccatcagctctctgcaaagat

SEQ ID NO: 60926 - DNA, 201 bp, Homo sapiens
ccatacccactcagatgccaccggtgccctcgccctcacagcctccttctggcaaacctgtgtctgcagtaaaacccactgttgccccaccactagctgasccaggagctggcaaaggtctgcgttcagaacatcgggagaaaatgaacaggatgcggcagcgcattgctcagcgtctgaaggaggcccagaatacatgtg

SEQ ID NO: 60927 - DNA, 201 bp, Homo sapiens
tcccgggttagcctggtgacaggcagacacatgctgttggcctcaagcaaggaagcagagcactgtgtaaccagcagtcacaggtcttttcttggcgttcstgccaggctctccctctctgcacctgtctcatagcctcgaatatcttaattccttaggcttaagagagagagccttaatggatgctcattcatattcctg

SEQ ID NO: 60928 - DNA, 201 bp, Homo sapiens
gtcccgggttagcctggtgacaggcagacacatgctgttggcctcaagcaaggaagcagagcactgtgtaaccagcagtcacaggtcttttcttggcgttsctgccaggctctccctctctgcacctgtctcatagcctcgaatatcttaattccttaggcttaagagagagagccttaatggatgctcattcatattcct

SEQ ID NO: 60929 - DNA, 201 bp, Homo sapiens
ttcttagagcagattctagcacatcatggcagtgggaccaagcgtggtcccgaggaagggccagagcctggtagagactagggaagggaggtctcctctaractgactcacattgccttgagcttttcagttaagttgctgtaagcacctgggctgaggaggcagtttttgttccttcctgcgttatagcggggccttgtc

SEQ ID NO: 60930 - DNA, 201 bp, Homo sapiens
ctgggcctcattctagcaccttgttcttagagcagattctagcacatcatggcagtgggaccaagcgtggtcccgaggaagggccagagcctggtagagaytagggaagggaggtctcctctagactgactcacattgccttgagcttttcagttaagttgctgtaagcacctgggctgaggaggcagtttttgttccttc

SEQ ID NO: 60931 - DNA, 201 bp, Homo sapiens
ggcttcatgtcggcatttgtgaaggcctcagcctttgccttgcaggaacagcctgttgtaaatgcagtgattgacgacacaaccaaagaggtggtgtatasggattatattgacatcagtgttgcagtggccaccccacggggtctggtggttccagtcatcaggaatgtggaagctatgaattttgcagatattgaacgg

SEQ ID NO: 60932 - DNA, 201 bp, Homo sapiens
ccacttttcacactcaggaaaactggtgctgctcctgctaaggccaagccggctgaagctcctgctgctgcagccccaaaagcagaacctacagcagcggsagttcctccccctgcagcacccatacccactcagatgccaccggtgccctcgccctcacagcctccttctggcaaacctgtgtctgcagtaaaacccact

SEQ ID NO: 60933 - DNA, 201 bp, Homo sapiens
ggcagagaggctgtgactttcctccgcaaaatcaaggcagcggtagaggatcccagagtcctcctcctggatctttaggaggaacccacacaccctacaarttgatcatgcaggaactgaaaaccagtcttctccctgtcccctcatgggtcccgggttagcctggtgacaggcagacacatgctgttggcctcaagcaag

SEQ ID NO: 60934 - DNA, 201 bp, Homo sapiens
ctgtcccctcatgggtcccgggttagcctggtgacaggcagacacatgctgttggcctcaagcaaggaagcagagcactgtgtaaccagcagtcacaggtyttttcttggcgttcctgccaggctctccctctctgcacctgtctcatagcctcgaatatcttaattccttaggcttaagagagagagccttaatggatgc

SEQ ID NO: 60935 - DNA, 201 bp, Homo sapiens
ggttagcctggtgacaggcagacacatgctgttggcctcaagcaaggaagcagagcactgtgtaaccagcagtcacaggtcttttcttggcgttcctgccwggctctccctctctgcacctgtctcatagcctcgaatatcttaattccttaggcttaagagagagagccttaatggatgctcattcatattcctgccttt

SEQ ID NO: 60936 - DNA, 201 bp, Homo sapiens
tgtctgcagtaaaacccactgttgccccaccactagctgagccaggagctggcaaaggtctgcgttcagaacatcgggagaaaatgaacaggatgcggcarcgcattgctcagcgtctgaaggaggcccagaatacatgtgcaatgctgacaacttttaatgagattgacatgagtaacatccaggagatgagggctcggc

SEQ ID NO: 60937 - DNA, 201 bp, Homo sapiens
ctgctgctgcagccccaaaagcagaacctacagcagcggcagttcctccccctgcagcacccatacccactcagatgccaccggtgccctcgccctcacarcctccttctggcaaacctgtgtctgcagtaaaacccactgttgccccaccactagctgagccaggagctggcaaaggtctgcgttcagaacatcgggaga

SEQ ID NO: 60938 - DNA, 201 bp, Homo sapiens
ccttaatggatgctcattcatattcctgcctttcttccatcagctctctgcaaagatgattttgcttttccctagtgctggtatactatagagaaaccccyggggaccatgtgattaagttcctatcttttgaaagtttgttctgcagagacttctaggaggatgctgtgcctcccaagctcagagcagcctctgtcctgg

SEQ ID NO: 60939 - DNA, 201 bp, Homo sapiens
ggaatgtggaagctatgaattttgcagatattgaacggaccatcactgaactgggagagaaggcccgaaagaatgaacttgccattgaagatatggatggyggtaccttcaccattagcaatggaggcgtttttggctcgctctttggaacacccattatcaacccccctcagtctgccatcctggggatgcatggcatct

SEQ ID NO: 60940 - DNA, 201 bp, Homo sapiens; identical to SEQ ID NO: 60908

SEQ ID NO: 60941 - DNA, 201 bp, Homo sapiens; identical to SEQ ID NO: 60909

SEQ ID NO: 60942 - DNA, 201 bp, Homo sapiens; identical to SEQ ID NO: 60910

SEQ ID NO: 60943 - DNA, 201 bp, Homo sapiens; identical to SEQ ID NO: 60911

SEQ ID NO: 60944 - DNA, 201 bp, Homo sapiens; identical to SEQ ID NO: 60912

SEQ ID NO: 60945 - DNA, 201 bp, Homo sapiens; identical to SEQ ID NO: 60913

SEQ ID NO: 60946 - DNA, 201 bp, Homo sapiens; identical to SEQ ID NO: 60914

SEQ ID NO: 60947 - DNA, 201 bp, Homo sapiens; identical to SEQ ID NO: 60915

SEQ ID NO: 60948 - DNA, 201 bp, Homo sapiens
ttatagcggggccttgtctcttcctctgcaggacacagatctggaggacgtggactggggtaggaaaccaccctgagggtgttagtacctagtggtgaaayggatgaggtcatttctaaggtgtgttgcccgtggatctgggcacaatcattggaattccttggagccactgggattcatggctttgtatccaactgcatc

SEQ ID NO: 60949 - DNA, 201 bp, Homo sapiens; identical to SEQ ID NO: 60917

SEQ ID NO: 60950 - DNA, 201 bp, Homo sapiens; identical to SEQ ID NO: 60918

SEQ ID NO: 60951 - DNA, 201 bp, Homo sapiens; identical to SEQ ID NO: 60919

SEQ ID NO: 60952 - DNA, 201 bp, Homo sapiens; identical to SEQ ID NO: 60920

SEQ ID NO: 60953 - DNA, 201 bp, Homo sapiens; identical to SEQ ID NO: 60921

SEQ ID NO: 60954 - DNA, 201 bp, Homo sapiens; identical to SEQ ID NO: 60922

SEQ ID NO: 60955 - DNA, 201 bp, Homo sapiens; identical to SEQ ID NO: 60923

SEQ ID NO: 60956 - DNA, 201 bp, Homo sapiens; identical to SEQ ID NO: 60924

SEQ ID NO: 60957 - DNA, 201 bp, Homo sapiens; identical to SEQ ID NO: 60925

SEQ ID NO: 60958 - DNA, 201 bp, Homo sapiens; identical to SEQ ID NO: 60926

SEQ ID NO: 60959 - DNA, 201 bp, Homo sapiens; identical to SEQ ID NO: 60927

SEQ ID NO: 60960 - DNA, 201 bp, Homo sapiens; identical to SEQ ID NO: 60928

SEQ ID NO: 60961 - DNA, 201 bp, Homo sapiens; identical to SEQ ID NO: 60929

SEQ ID NO: 60962 - DNA, 201 bp, Homo sapiens; identical to SEQ ID NO: 60930

SEQ ID NO: 60963 - DNA, 201 bp, Homo sapiens; identical to SEQ ID NO: 60931

SEQ ID NO: 60964 - DNA, 201 bp, Homo sapiens; identical to SEQ ID NO: 60932

SEQ ID NO: 60965 - DNA, 201 bp, Homo sapiens; identical to SEQ ID NO: 60933

SEQ ID NO: 60966 - DNA, 201 bp, Homo sapiens; identical to SEQ ID NO: 60934

SEQ ID NO: 60967 - DNA, 201 bp, Homo sapiens; identical to SEQ ID NO: 60935

SEQ ID NO: 60968 - DNA, 201 bp, Homo sapiens; identical to SEQ ID NO: 60936

SEQ ID NO: 60969 - DNA, 201 bp, Homo sapiens; identical to SEQ ID NO: 60937

SEQ ID NO: 60970 - DNA, 201 bp, Homo sapiens; identical to SEQ ID NO: 60938

SEQ ID NO: 60971 - DNA, 201 bp, Homo sapiens; identical to SEQ ID NO: 60939

SEQ ID NO: 60972 - DNA, 201 bp, Homo sapiens
ctgactctctgaggctcattttgcagttgttgaaattgtccccgcagttttcaatcatgtctgaaccaatcagagtccttgtgactggagcagctggtcarattgcatattcactgctgtacagtattggaaatggatctgtctttggtaaagatcagcctataattcttgtgctgttggatatcacccccatgatgggtg

SEQ ID NO: 60973 - DNA, 201 bp, Homo sapiens; identical to SEQ ID NO: 60972

SEQ ID NO: 60974 - DNA, 131 bp, Homo sapiens
ataatgctatacttaaattacttgtgaaaaacaacacattttaaagattacgtgcttcttggtacaggtttgtgaatgacagtttatcgtcatgctgttastgtgcattctaaataaatatatattcaaat

SEQ ID NO: 60975 - DNA, 201 bp, Homo sapiens
aagtttgttgaaggtctccctattaatgatttctcacgtgagaagatggatcttactgcaaaggaactgacagaagaaaaagaaagtgcttttgaatttcyttcctctgcctgactagacaatgatgttactaaataataataatgctatacttaaattacttgtgaaaaacaacacattttaaagattacgtgcttcttg

SEQ ID NO: 60976 - DNA, 201 bp, Homo sapiens
gactctctgaggctcattttgcagttgttgaaattgtccccgcatctttttcattacagtctgaaccaatcagagtccttgtgactggagcagctggtcarattgcatattcactgctgtacagtattggaaatggatctgtctttggtaaagatcagcctataattcttgtgctgttggatatcacccccatgatgggtg

SEQ ID NO: 60977 - DNA, 201 bp, Homo sapiens
aaatgcgacgctgcagctattttccaaaggacgttacggtgtttgataaggacgataagtctgaaccaatcagagtccttgtgactggagcagctggtcarattgcatattcactgctgtacagtattggaaatggatctgtctttggtaaagatcagcctataattcttgtgctgttggatatcacccccatgatgggtg

SEQ ID NO: 60978 - DNA, 201 bp, Homo sapiens
ggaactgacagaagaaaaagaaagtgcttttgaatttctttcctctgcctgactagacaatgatgttactaaatgcttcaaagctgaagaatctaaatgtygtctttgactcaagtaccaaataataataatgctatacttaaattacttgtgaaaaacaacacattttaaagattacgtgcttcttggtacaggtttgtg

SEQ ID NO: 60979 - DNA, 135 bp, Homo sapiens
ataatgctatacttaaattacttgtgaaaaacaacacattttaaagattacgtgcttcttggtacaggtttgtgaatgacagtttatcgtcatgctgttastgtgcattctaaataaatatatattcaaatgaaa

SEQ ID NO: 60980 - DNA, 201 bp, Homo sapiens; identical to SEQ ID NO: 60972

SEQ ID NO: 60981 - DNA, 201 bp, Homo sapiens
aagtttgttgaaggtctccctattaatgatttctcacgtgagaagatggatcttactgcaaaggaactgacagaagaaaaagaaagtgcttttgaatttcyttcctctgcctgactagacaatgatgttactaaatgcttcaaagctgaagaatctaaatgtcgtctttgactcaagtaccaaataataataatgctatac

SEQ ID NO: 60982 - DNA, 201 bp, Homo sapiens
tgcttgatacctttataggagaaggcaaagagtatatttttgtgtctaacatagataatctgggtgccacagtggatctgtatattcttaatcatctaatsaacccacccaatggaaaacgctgtgaatttgtcatggaagtcacaaataaaacacgtgcagatgtaaagggcgggacactcactcaatatgaaggcaaac

SEQ ID NO: 60983 - DNA, 201 bp, Homo sapiens
cccagctgctaaaggaagaggaagcaggagaggaagagagacctgccctgtagcgtgactcctctagaaaaaaaaaaaaaaagccggagtattttactaascccctaaaatgtcgagatttgtacaagatcttagcaaagcaatgtctcaagatggtgcttctcagttccaagaagtcattcggcaagagctagaattatc

SEQ ID NO: 60984 - DNA, 201 bp, Homo sapiens; identical to SEQ ID NO: 60982

SEQ ID NO: 60985 - DNA, 201 bp, Homo sapiens; identical to SEQ ID NO: 60982

SEQ ID NO: 60986 - DNA, 201 bp, Homo sapiens; identical to SEQ ID NO: 60983

SEQ ID NO: 60987 - DNA, 201 bp, Homo sapiens; identical to SEQ ID NO: 60982

SEQ ID NO: 60988 - DNA, 177 bp, Homo sapiens
caggagaggaagagagacctgccctgtagcgtgactcctctagaaaaaaaaaaaaaaagccggagtattttactaascccctaaaatgtcgagatttgtacaagatcttagcaaagcaatgtctcaagatggtgcttctcagttccaagaagtcattcggcaagagctagaattatc

SEQ ID NO: 60989 - DNA, 201 bp, Homo sapiens
tgcttgatacctttataggagaaggcaaagagtatatttttgtgtctaacatagataatctgggtgccacagtggatctgtatattcttaatcatctaatsaacccacccaatggaaaacgctgtgaatttgtcatggaagtcacaaataaaacacgtgcagatgtaaaggtaaataccgagaggaagcagtttagggctt

SEQ ID NO: 60990 - DNA, 201 bp, Homo sapiens
gaaagaatacatcggttgttaaagcaggagaggaagagagacctgccctgtagcgtgactcctctagaaaaaaaaaaaaaaagccggagtattttactaascccctaaaatgtcgagatttgtacaagatcttagcaaagcaatgtctcaagatggtgcttctcagttccaagaagtcattcggcaagagctagaattatc

SEQ ID NO: 60991 - DNA, 110 bp, Homo sapiens
gtggttttaycttttccgggagtctccagctggccctcatttgtgtccggagctcaggagttcccaaaccgactcagtcgcaccaagtttccgtcttttggaattgggga

SEQ ID NO: 60992 - DNA, 201 bp, Homo sapiens
catctggacatgtggcagagctggggcctggctgccagggacactggaagatcggggacacagccatggctctgctccccggtgggggccaggctcagtaygtcactgtccccgaagggctcctcatgcctatcccagagggattgaccctgacccaggctgcagccatcccagaggcctggctcaccgccttccagctgt

SEQ ID NO: 60993 - DNA, 201 bp, Homo sapiens
tcaccagtttgctgaggtctagggacaataagtacaagcaaatgctggtgaatgctttcacggagcaaattctgcctcacttctccacggagggcccccarcgtctgctgccggttctggacagaatctacccagtgaccgaaatccaggaggcccataagtacatggaggccaacaagaacataggcaagatcgtcctgg

SEQ ID NO: 60994 - DNA, 201 bp, Homo sapiens
ccggcagggggcgctgcggtgccagcctgaggctgggctgctccgcgaggatacagcggcccctgccctgtcctgtcctgccctgccctgtcctgtcctgycctgccctgccctgtcctgtcctgccctgccctgccctgtgtcctcagacaatatgttagccgtgcactttgacaagccgggaggaccggaaaacctcta

SEQ ID NO: 60995 - DNA, 201 bp, Homo sapiens
cgaaatccaggaggcccataagtacatggaggccaacaagaacataggcaagatcgtcctggaactgccccagtgaaggaggatggggcaggacaggacgyggccaccccaggcctttccagagcaaacctggagaagattcacaatagacaggccaagaaacccggtgcttcctccagagccgtttaaagctgatatgag

SEQ ID NO: 60996 - DNA, 201 bp, Homo sapiens
gccagcctgaggctgggctgctccgcgaggatacagcggcccctgccctgtcctgtcctgccctgccctgtcctgtcctgccctgccctgccctgtcctgycctgccctgccctgccctgtgtcctcagacaatatgttagccgtgcactttgacaagccgggaggaccggaaaacctctacgtgaaggaggtggccaagc

SEQ ID NO: 60997 - DNA, 201 bp, Homo sapiens
gaaagagggggagggtggttctgcttagccccacccctccggctaccccaggtccagccgtccattccggtggaggcagaggcagtcctggggctctgggkctcgggctttgtcaccgggacccgcaggagccagaaccactcggcgccgcctggtgcatgggaggggagccgggccaggagtaagtaactcatacgggcg

SEQ ID NO: 60998 - DNA, 201 bp, Homo sapiens
gcagcgaggcgctggccggcagggggcgctgcggtgccagcctgaggctgggctgctccgcgaggatacagcggcccctgccctgtcctgtcctgccctgycctgtcctgtcctgccctgccctgccctgtcctgtcctgccctgccctgccctgtgtcctcagacaatatgttagccgtgcactttgacaagccgggagg

SEQ ID NO: 60999 - DNA, 201 bp, Homo sapiens
gcagaccagggcagcgaggcgctggccggcagggggcgctgcggtgccagcctgaggctgggctgctccgcgaggatacagcggcccctgccctgtcctgycctgccctgccctgtcctgtcctgccctgccctgccctgtcctgtcctgccctgccctgccctgtgtcctcagacaatatgttagccgtgcactttgaca

SEQ ID NO: 61000 - DNA, 201 bp, Homo sapiens
gggtcgggctgggggcttccaactcagagggagtgtgatttgcctgatcctcttcggcgttgtcctgctctgccgcatccagccctgtaccgccatcccamttcccgccgttcccatctgtgttccgggtgggatcggtctggaggcggccgaggacttcccaggcaggagctcggggcggaggccgggtccgcggcagac

SEQ ID NO: 61001 - DNA, 201 bp, Homo sapiens
gcgctgcggtgccagcctgaggctgggctgctccgcgaggatacagcggcccctgccctgtcctgtcctgccctgccctgtcctgtcctgccctgccctgycctgtcctgtcctgccctgccctgccctgtgtcctcagacaatatgttagccgtgcactttgacaagccgggaggaccggaaaacctctacgtgaaggag

SEQ ID NO: 61002 - DNA, 201 bp, Homo sapiens
cagaccagggcagcgaggcgctggccggcagggggcgctgcggtgccagcctgaggctgggctgctccgcgaggatacagcggcccctgccctgtcctgtsctgccctgccctgtcctgtcctgccctgccctgccctgtcctgtcctgccctgccctgccctgtgtcctcagacaatatgttagccgtgcactttgacaa

SEQ ID NO: 61003 - DNA, 201 bp, Homo sapiens
accgggcggacttaatgcagagacaaggccagtatgacccacctccaggagccagcaacattttgggacttgaggcatctggacatgtggcagagctgggrcctggctgccagggacactggaagatcggggacacagccatggctctgctccccggtgggggccaggctcagtacgtcactgtccccgaagggctcctca

SEQ ID NO: 61004 - DNA, 201 bp, Homo sapiens; identical to SEQ ID NO: 60993

SEQ ID NO: 61005 - DNA, 201 bp, Homo sapiens; identical to SEQ ID NO: 60994

SEQ ID NO: 61006 - DNA, 201 bp, Homo sapiens; identical to SEQ ID NO: 60995

SEQ ID NO: 61007 - DNA, 201 bp, Homo sapiens; identical to SEQ ID NO: 60996

SEQ ID NO: 61008 - DNA, 201 bp, Homo sapiens; identical to SEQ ID NO: 60997

SEQ ID NO: 61009 - DNA, 201 bp, Homo sapiens; identical to SEQ ID NO: 60998

SEQ ID NO: 61010 - DNA, 201 bp, Homo sapiens; identical to SEQ ID NO: 60999

SEQ ID NO: 61011 - DNA, 201 bp, Homo sapiens; identical to SEQ ID NO: 61001

SEQ ID NO: 61012 - DNA, 201 bp, Homo sapiens; identical to SEQ ID NO: 61000

SEQ ID NO: 61013 - DNA, 201 bp, Homo sapiens; identical to SEQ ID NO: 61002

SEQ ID NO: 61014 - DNA, 201 bp, Homo sapiens
accgggcggacttaatgcagagacaaggccagtatgacccacctccaggagccagcaacattttgggacttgaggcatctggacatgtggcagagctgggrcctggctgccagggacactggaagatcggggacacagccatggctctgctccccggtgggggccaggctcagaaatgttcaggctggagactatgtgcta

SEQ ID NO: 61015 - DNA, 201 bp, Homo sapiens; identical to SEQ ID NO: 60992

SEQ ID NO: 61016 - DNA, 201 bp, Homo sapiens; identical to SEQ ID NO: 60993

SEQ ID NO: 61017 - DNA, 201 bp, Homo sapiens; identical to SEQ ID NO: 60995

SEQ ID NO: 61018 - DNA, 201 bp, Homo sapiens
gaaagagggggagggtggttctgcttagccccacccctccggctaccccaggtccagccgtccattccggtggaggcagaggcagtcctggggctctgggkctcgggctttgtcaccgggacccgcaggagccagaaccactcggcgccgcctggtgcatgggaggggagccgggccaggaacaatatgttagccgtgcac

SEQ ID NO: 61019 - DNA, 201 bp, Homo sapiens; identical to SEQ ID NO: 61003

SEQ ID NO: 61020 - DNA, 201 bp, Homo sapiens; identical to SEQ ID NO: 60992

SEQ ID NO: 61021 - DNA, 201 bp, Homo sapiens; identical to SEQ ID NO: 60993

SEQ ID NO: 61022 - DNA, 201 bp, Homo sapiens
gcagaccagggcagcgaggcgctggccggcagggggcgctgcggtgccagcctgaggctgggctgctccgcgaggatacagcggcccctgccctgtcctgycctgccctgccctgtcctgtcctgccctgccctgccctgtgtcctcagacaatatgttagccgtgcactttgacaagccgggaggaccggaaaacctcta

SEQ ID NO: 61023 - DNA, 201 bp, Homo sapiens; identical to SEQ ID NO: 60995

SEQ ID NO: 61024 - DNA, 201 bp, Homo sapiens
gctggccggcagggggcgctgcggtgccagcctgaggctgggctgctccgcgaggatacagcggcccctgccctgtcctgccctgccctgccctgtcctgycctgccctgccctgccctgtgtcctcagacaatatgttagccgtgcactttgacaagccgggaggaccggaaaacctctacgtgaaggaggtggccaagc

SEQ ID NO: 61025 - DNA, 201 bp, Homo sapiens; identical to SEQ ID NO: 60997

SEQ ID NO: 61026 - DNA, 201 bp, Homo sapiens; identical to SEQ ID NO: 61000

SEQ ID NO: 61027 - DNA, 201 bp, Homo sapiens
gcagcgaggcgctggccggcagggggcgctgcggtgccagcctgaggctgggctgctccgcgaggatacagcggcccctgccctgtcctgccctgccctgycctgtcctgtcctgccctgccctgccctgtgtcctcagacaatatgttagccgtgcactttgacaagccgggaggaccggaaaacctctacgtgaaggag

SEQ ID NO: 61028 - DNA, 201 bp, Homo sapiens; identical to SEQ ID NO: 61003

SEQ ID NO: 61029 - DNA, 136 bp, Homo sapiens
agcaccatgagggccctggtgcttctgctgtccctrttcctgctgggtggccaggcccagcatgtgtctgactggacctactcagaaggggcactggacgaagcgcactggccacagcactaccccgcctgtgggg

SEQ ID NO: 61030 - DNA, 201 bp, Homo sapiens
gactggacctactcagaaggggcactggacgaagcgcactggccacagcactaccccgcctgtgggggccagagacagtcgcctatcaacctacagaggaygaaggtgcggtacaacccctccttgaaggggctcaatatgacaggctatgagacccaggcaggggagttccccatggtcaacaatggccacacagtgcag

SEQ ID NO: 61031 - DNA, 201 bp, Homo sapiens
ctggccacagcactaccccgcctgtgggggccagagacagtcgcctatcaacctacagaggacgaaggtgcggtacaacccctccttgaaggggctcaatmtgacaggctatgagacccaggcaggggagttccccatggtcaacaatggccacacagtgcagatcggcctgccctccaccatgcgcatgacagtggctga

SEQ ID NO: 61032 - DNA, 201 bp, Homo sapiens
attaaaagaggggaaacgatcatcctggacaggaagtgagatggcttcagttcatgagacgggatctgagttagacatcaccagtggaaattgattggaayagaaacttaaaggaaatggaaccctaactattctcccatcaaatcatatatgttgacctgtctgaattataaaccagcctgacctttcctttagcattag

SEQ ID NO: 61033 - DNA, 201 bp, Homo sapiens
ggtgcggtacaacccctccttgaaggggctcaatatgacaggctatgagacccaggcaggggagttccccatggtcaacaatggccacacagtgcagatcrgcctgccctccaccatgcgcatgacagtggctgacggcactgtatacatagcccagcagatgcactttcactggggaggtgcgtcctcggagatcagcgg

SEQ ID NO: 61034 - DNA, 201 bp, Homo sapiens
gaattccagttttacctacataagattgaggaaattcttgactacttaagaagagcattgaactgaggaaagctaagaggaagattcaatattaactagcytgaagcctgacctagccagaagaagtgcctgtccgctgcagccgcaccctaccttgtctaagaaaccatgtgtgtctggaacacgctgctccccctgggg

SEQ ID NO: 61035 - DNA, 201 bp, Homo sapiens
agcactaccccgcctgtgggggccagagacagtcgcctatcaacctacagaggacgaaggtgcggtacaacccctccttgaaggggctcaatatgacaggytatgagacccaggcaggggagttccccatggtcaacaatggccacacagtgcagatcggcctgccctccaccatgcgcatgacagtggctgacggcactg

SEQ ID NO: 61036 - DNA, 201 bp, Homo sapiens
aacgattaccgcaggacccagcccctgaaccacagagtggtggaatccaacttcccgaatcaggaatacactctaggctctgaattccagttttacctacrtaagattgaggaaattcttgactacttaagaagagcattgaactgaggaaagctaagaggaagattcaatattaactagcttgaagcctgacctagccag

SEQ ID NO: 61037 - DNA, 201 bp, Homo sapiens
ctactcagaaggggcactggacgaagcgcactggccacagcactaccccgcctgtgggggccagagacagtcgcctatcaacctacagaggacgaaggtgyggtacaacccctccttgaaggggctcaatatgacaggctatgagacccaggcaggggagttccccatggtcaacaatggccacacagtgcagatcggcct

SEQ ID NO: 61038 - DNA, 201 bp, Homo sapiens
cctgcactgagaacgtccactggtttgtgctggcagattttgtcaagctctccaggacacaggtttggaagctggagaattccttactggatcaccgcaayaagaccatccacaacgattaccgcaggacccagcccctgaaccacagagtggtggaatccaacttcccgaatcaggaatacactctaggctctgaattcc

SEQ ID NO: 61039 - DNA, 201 bp, Homo sapiens
ggggccagagacagtcgcctatcaacctacagaggacgaaggtgcggtacaacccctccttgaaggggctcaatatgacaggctatgagacccaggcaggsgagttccccatggtcaacaatggccacacagtgcagatcggcctgccctccaccatgcgcatgacagtggctgacggcactgtatacatagcccagcaga

SEQ ID NO: 61040 - DNA, 201 bp, Homo sapiens
cccagcccctgaaccacagagtggtggaatccaacttcccgaatcaggaatacactctaggctctgaattccagttttacctacataagattgaggaaatycttgactacttaagaagagcattgaactgaggaaagctaagaggaagattcaatattaactagcttgaagcctgacctagccagaagaagtgcctgtccg

SEQ ID NO: 61041 - DNA, 201 bp, Homo sapiens
cagcactaccccgcctgtgggggccagagacagtcgcctatcaacctacagaggacgaaggtgcggtacaacccctccttgaaggggctcaatatgacagsctatgagacccaggcaggggagttccccatggtcaacaatggccacacagtgcagatcggcctgccctccaccatgcgcatgacagtggctgacggcact

SEQ ID NO: 61042 - DNA, 201 bp, Homo sapiens
tggaacacgctgctccccctggggcagctgttgggattctgattaaaagaggggaaacgatcatcctggacaggaagtgagatggcttcagttcatgagamgggatctgagttagacatcaccagtggaaattgattggaatagaaacttaaaggaaatggaaccctaactattctcccatcaaatcatatatgttgacct

SEQ ID NO: 61043 - DNA, 201 bp, Homo sapiens
ctggtgcttctgctgtccctgttcctgctgggtggccaggcccagcatgtgtctgactggacctactcagaaggggcactggacgaagcgcactggccacwgcactaccccgcctgtgggggccagagacagtcgcctatcaacctacagaggacgaaggtgcggtacaacccctccttgaaggggctcaatatgacaggc

SEQ ID NO: 61044 - DNA, 201 bp, Homo sapiens
caaccctgactggccttgacgttcaggacatgctgcccaggaacctccagcactactacacctaccatggctcactcaccacgcctccctgcactgagaaygtccactggtttgtgctggcagattttgtcaagctctccaggacacaggtttggaagctggagaattccttactggatcaccgcaataagaccatccaca

SEQ ID NO: 61045 - DNA, 201 bp, Homo sapiens
atgaggccctagagctccgggacaatgataagactcgctatatggggaagggtgtctcaaaggctgttgagcacatcaataaaactattgcgcctgccctrgttagcaagaaactgaacgtcacagaacaagagaagattgacaaactgatgatcgagatggatggaacagaaaataaatctaagtttggtgcgaacgcca

SEQ ID NO: 61046 - DNA, 201 bp, Homo sapiens
aaccagctcctcagaattgaagaggagctgggcagcaaggctaagtttgccggcaggaacttcagaaaccccttggccaagtaagctgtgggcaggcaagsccttcggtcacctgttggctacacagacccctcccctcgtgtcagctcaggcagctcgaggcccccgaccaacacttgcaggggtccctgctagttagcg

SEQ ID NO: 61047 - DNA, 201 bp, Homo sapiens
ttgaccaggatgactggggagcttggcagaagttcacagccagtgcaggaatccaggtagtgggggatgatctcacagtgaccaacccaaagaggatcgcmaaggccgtgaacgagaagtcctgcaactgcctcctgctcaaagtcaaccagattggctccgtgaccgagtctcttcaggcgtgcaagctggcccaggcca

SEQ ID NO: 61048 - DNA, 201 bp, Homo sapiens
tggccaagtaagctgtgggcaggcaagcccttcggtcacctgttggctacacagacccctcccctcgtgtcagctcaggcagctcgaggcccccgaccaamacttgcaggggtccctgctagttagcgccccaccgccgtggagttcgtaccgcttccttagaacttctacagaagccaagctccctggagccctgttggc

SEQ ID NO: 61049 - DNA, 201 bp, Homo sapiens
gctcaaagtcaaccagattggctccgtgaccgagtctcttcaggcgtgcaagctggcccaggccaatggttggggcgtcatggtgtctcatcgttcggggragactgaagataccttcatcgctgacctggttgtggggctgtgcactgggcagatcaagactggtgccccttgccgatctgagcgcttggccaagtacaa

SEQ ID NO: 61050 - DNA, 175 bp, Homo sapiens
ttggcagctctagctttgcagtcgtgtaattggcccaagtcattgtttttctcgcctcactttccaccaagtgtctagagtcatgtgagcctcgtgtcatytccggggtggccacaggctagatccccggtggttttgtgctcaaaataaaaagcctcagtgacccatgagaata

SEQ ID NO: 61051 - DNA, 201 bp, Homo sapiens
gaacttctacagaagccaagctccctggagccctgttggcagctctagctttgcagtcgtgtaattggcccaagtcattgtttttctcgcctcactttccmccaagtgtctagagtcatgtgagcctcgtgtcatctccggggtggccacaggctagatccccggtggttttgtgctcaaaataaaaagcctcagtgaccc

SEQ ID NO: 61052 - DNA, 198 bp, Homo sapiens
aagccaagctccctggagccctgttggcagctctagctttgcagtcgtgtaattggcccaagtcattgtttttctcgcctcactttccaccaagtgtctaragtcatgtgagcctcgtgtcatctccggggtggccacaggctagatccccggtggttttgtgctcaaaataaaaagcctcagtgacccatgagaata

SEQ ID NO: 61053 - DNA, 178 bp, Homo sapiens
ctgttggcagctctagctttgcagtcgtgtaattggcccaagtcattgtttttctcgcctcactttccaccaagtgtctagagtcatgtgagcctcgtgtyatctccggggtggccacaggctagatccccggtggttttgtgctcaaaataaaaagcctcagtgacccatgagaata

SEQ ID NO: 61054 - DNA, 201 bp, Homo sapiens
cttgccgatctgagcgcttggccaagtacaaccagctcctcagaattgaagaggagctgggcagcaaggctaagtttgccggcaggaacttcagaaacccyttggccaagtaagctgtgggcaggcaagcccttcggtcacctgttggctacacagacccctcccctcgtgtcagctcaggcagctcgaggcccccgacca

SEQ ID NO: 61055 - DNA, 201 bp, Homo sapiens
ggtttgctcccaacatcctggagaataaagaaggcctggagctgctgaagactgctattgggaaagctggctacactgataaggtggtcatcggcatggaygtagcggcctccgagttcttcaggtctgggaagtatgacctggacttcaagtctcccgatgaccccagcaggtacatctcgcctgaccagctggctgacc

SEQ ID NO: 61056 - DNA, 201 bp, Homo sapiens
cggtcacctgttggctacacagacccctcccctcgtgtcagctcaggcagctcgaggcccccgaccaacacttgcaggggtccctgctagttagcgccccmccgccgtggagttcgtaccgcttccttagaacttctacagaagccaagctccctggagccctgttggcagctctagctttgcagtcgtgtaattggccca

SEQ ID NO: 61057 - DNA, 201 bp, Homo sapiens
ctagttagcgccccaccgccgtggagttcgtaccgcttccttagaacttctacagaagccaagctccctggagccctgttggcagctctagctttgcagtygtgtaattggcccaagtcattgtttttctcgcctcactttccaccaagtgtctagagtcatgtgagcctcgtgtcatctccggggtggccacaggctaga

SEQ ID NO: 61058 - DNA, 162 bp, Homo sapiens
ctttgcagtcgtgtaattggcccaagtcattgtttttctcgcctcactttccaccaagtgtctagagtcatgtgagcctcgtgtcatctccggggtggccmcaggctagatccccggtggttttgtgctcaaaataaaaagcctcagtgacccatgagaata

SEQ ID NO: 61059 - DNA, 102 bp, Homo sapiens
tctagagtcatgtgagcctcgtgtcatctccggggtggccacaggctagatccccggtggttttgtgctcaaaataaaaagcctcagtgacccatgagaawa

SEQ ID NO: 61060 - DNA, 201 bp, Homo sapiens
ggctaagtttgccggcaggaacttcagaaaccccttggccaagtaagctgtgggcaggcaagcccttcggtcacctgttggctacacagacccctcccctsgtgtcagctcaggcagctcgaggcccccgaccaacacttgcaggggtccctgctagttagcgccccaccgccgtggagttcgtaccgcttccttagaact

SEQ ID NO: 61061 - DNA, 201 bp, Homo sapiens
ttccttagaacttctacagaagccaagctccctggagccctgttggcagctctagctttgcagtcgtgtaattggcccaagtcattgtttttctcgcctcmctttccaccaagtgtctagagtcatgtgagcctcgtgtcatctccggggtggccacaggctagatccccggtggttttgtgctcaaaataaaaagcctca

SEQ ID NO: 61062 - DNA, 189 bp, Homo sapiens
aggaaaatcagatgttttagttctcttacagaccagcagtaatgttgaaaaatataaaagtagccgtaacagaaaacgaagtgatcatytcagccctcccttggagtggggggatatattgcggagctgagttttaatggctatcagttcttgatcagaaaagtgaaatcactccaactccttccgtat

SEQ ID NO: 61063 - DNA, 201 bp, Homo sapiens; identical to SEQ ID NO: 61045

SEQ ID NO: 61064 - DNA, 201 bp, Homo sapiens; identical to SEQ ID NO: 61046

SEQ ID NO: 61065 - DNA, 201 bp, Homo sapiens; identical to SEQ ID NO: 61047

SEQ ID NO: 61066 - DNA, 201 bp, Homo sapiens
tggccaagtaagctgtgggcaggcaagcccttcggtcacctgttggctacacagacccctcccctcgtgtcagctcaggcagctcgaggcccccgaccaamacttgcaggggtccctgctagttagcgccccaccgccgtggagttcgtaccgcttccttagaacttctacagaagccaagctccctggagcccggcccaa

SEQ ID NO: 61067 - DNA, 201 bp, Homo sapiens; identical to SEQ ID NO: 61049

SEQ ID NO: 61068 - DNA, 201 bp, Homo sapiens
cggtcacctgttggctacacagacccctcccctcgtgtcagctcaggcagctcgaggcccccgaccaacacttgcaggggtccctgctagttagcgccccmccgccgtggagttcgtaccgcttccttagaacttctacagaagccaagctccctggagcccggcccaagtcattgtttttctcgcctcactttccaccaa

SEQ ID NO: 61069 - DNA, 113 bp, Homo sapiens
acttctacagaagccaagctccctggagcccggcccaagtcattgtttttctcgcctcactttccaccaagtgtctagagtcatgtgagcctcgtgtcatytccggggtggcc

SEQ ID NO: 61070 - DNA, 148 bp, Homo sapiens
ccccaccgccgtggagttcgtaccgcttccttagaacttctacagaagccaagctccctggagcccggcccaagtcattgtttttctcgcctcactttccmccaagtgtctagagtcatgtgagcctcgtgtcatctccggggtggcc

SEQ ID NO: 61071 - DNA, 136 bp, Homo sapiens
ggagttcgtaccgcttccttagaacttctacagaagccaagctccctggagcccggcccaagtcattgtttttctcgcctcactttccaccaagtgtctaragtcatgtgagcctcgtgtcatctccggggtggcc

SEQ ID NO: 61072 - DNA, 116 bp, Homo sapiens
agaacttctacagaagccaagctccctggagcccggcccaagtcattgtttttctcgcctcactttccaccaagtgtctagagtcatgtgagcctcgtgtyatctccggggtggcc

SEQ ID NO: 61073 - DNA, 201 bp, Homo sapiens; identical to SEQ ID NO: 61054

SEQ ID NO: 61074 - DNA, 201 bp, Homo sapiens; identical to SEQ ID NO: 61055

SEQ ID NO: 61075 - DNA, 155 bp, Homo sapiens
gttagcgccccaccgccgtggagttcgtaccgcttccttagaacttctacagaagccaagctccctggagcccggcccaagtcattgtttttctcgcctcmctttccaccaagtgtctagagtcatgtgagcctcgtgtcatctccggggtggcc

SEQ ID NO: 61076 - DNA, 201 bp, Homo sapiens; identical to SEQ ID NO: 61060

SEQ ID NO: 61077 - DNA, 189 bp, Homo sapiens; identical to SEQ ID NO: 61062

SEQ ID NO: 61078 - DNA, 201 bp, Homo sapiens; identical to SEQ ID NO: 61045

SEQ ID NO: 61079 - DNA, 201 bp, Homo sapiens; identical to SEQ ID NO: 61046

SEQ ID NO: 61080 - DNA, 201 bp, Homo sapiens; identical to SEQ ID NO: 61047

SEQ ID NO: 61081 - DNA, 201 bp, Homo sapiens; identical to SEQ ID NO: 61048

SEQ ID NO: 61082 - DNA, 201 bp, Homo sapiens; identical to SEQ ID NO: 61056

SEQ ID NO: 61083 - DNA, 201 bp, Homo sapiens; identical to SEQ ID NO: 61049

SEQ ID NO: 61084 - DNA, 201 bp, Homo sapiens; identical to SEQ ID NO: 61057

SEQ ID NO: 61085 - DNA, 162 bp, Homo sapiens; identical to SEQ ID NO: 61058

SEQ ID NO: 61086 - DNA, 175 bp, Homo sapiens; identical to SEQ ID NO: 61050

SEQ ID NO: 61087 - DNA, 201 bp, Homo sapiens; identical to SEQ ID NO: 61051

SEQ ID NO: 61088 - DNA, 198 bp, Homo sapiens; identical to SEQ ID NO: 61052

SEQ ID NO: 61089 - DNA, 178 bp, Homo sapiens; identical to SEQ ID NO: 61053

SEQ ID NO: 61090 - DNA, 201 bp, Homo sapiens; identical to SEQ ID NO: 61054

SEQ ID NO: 61091 - DNA, 102 bp, Homo sapiens; identical to SEQ ID NO: 61059

SEQ ID NO: 61092 - DNA, 201 bp, Homo sapiens; identical to SEQ ID NO: 61061

SEQ ID NO: 61093 - DNA, 201 bp, Homo sapiens; identical to SEQ ID NO: 61060

SEQ ID NO: 61094 - DNA, 201 bp, Homo sapiens; identical to SEQ ID NO: 61055

SEQ ID NO: 61095 - DNA, 201 bp, Homo sapiens
gtccggcgacttcctaatggcacagaactccgaggccgcatcgtggagaccgaggcatacctggggccagaggatgaagccgcccactcaaggggtggccrgcagaccccccgcaaccgaggcatgttcatgaagccggggaccctgtacgtgtacatcatttacggcatgtacttctgcatgaacatctccagccagggg

SEQ ID NO: 61096 - DNA, 201 bp, Homo sapiens
ggggttggagttcttcgaccagccggcagtccccctggcccgggcatttctgggacaggtcctagtccggcgacttcctaatggcacagaactccgaggcygcatcgtggagaccgaggcatacctggggccagaggatgaagccgcccactcaaggggtggccggcagaccccccgcaaccgaggcatgttcatgaagcc

SEQ ID NO: 61097 - DNA, 201 bp, Homo sapiens
tgcacaggtgacagggcttctccagcctagcagggccagcccaggccctcgtgccccagatggtcaggaccaggtcacagcttggctatgagcctgtttgyggcttctgtggactgtggtgaggactgggccaggaaaggctcagggtagcctgggaggaagaagcgcatggcagacagaggtgctggggagggggccaca

SEQ ID NO: 61098 - DNA, 201 bp, Homo sapiens
cggccatgcaggggagtgggcccggaaacccctccgcttctatgtccggggcagcccctgggtcagtgtggtcgacagagtggctgagcaggacacacagkcctgagcaaagggcctgcccagacaagattttttaattgtttaaaaaccgaataaatgttttatttctagaaaactgtgccttagccagagctcctctag

SEQ ID NO: 61099 - DNA, 201 bp, Homo sapiens
ctggccatcaacaagagctttgaccagagggacctggcacaggatgaagctgtatggctggagcgtggtcccctggagcccagtgagccggctgtagtggyagcagcccgggtgggcgtcggccatgcaggggagtgggcccggaaacccctccgcttctatgtccggggcagcccctgggtcagtgtggtcgacagagtg

SEQ ID NO: 61100 - DNA, 201 bp, Homo sapiens
tctgcatgaacatctccagccagggggacggggcttgcgtcttgctgcgagcactggagcccctggaaggtctggagaccatgcgtcagcttcgcagcacyctccggaaaggcaccgccagccgtgtcctcaaggaccgcgagctctgcagtggcccctccaagctgtgccaggccctggccatcaacaagagctttgacc

SEQ ID NO: 61101 - DNA, 201 bp, Homo sapiens
agcccaggcacctgcagagcagccacacagctcgtccgatgcagcccaggcaccttgccccagggagcgctgcttgggaccgcccaccactccgggcccayaccgcagcatctatttctcaagcccaaagggccaccttacccgactggggttggagttcttcgaccagccggcagtccccctggcccgggcatttctggg

SEQ ID NO: 61102 - DNA, 201 bp, Homo sapiens
cccataccgcagcatctatttctcaagcccaaagggccaccttacccgactggggttggagttcttcgaccagccggcagtccccctggcccgggcatttytgggacaggtcctagtccggcgacttcctaatggcacagaactccgaggccgcatcgtggagaccgaggcatacctggggccagaggatgaagccgccca

SEQ ID NO: 61103 - DNA, 201 bp, Homo sapiens
cccccgctttgcagatgaagaaaccaaagcagttttgccgacggatggggcaaaagaagcagcgaccagctagagcagggcagccacacagctcgtccgaygcagcccaggcacctgcagagcagccacacagctcgtccgatgcagcccaggcaccttgccccagggagcgctgcttgggaccgcccaccactccgggcc

SEQ ID NO: 61104 - DNA, 201 bp, Homo sapiens
cgctgcttgggaccgcccaccactccgggcccataccgcagcatctatttctcaagcccaaagggccaccttacccgactggggttggagttcttcgaccrgccggcagtccccctggcccgggcatttctgggacaggtcctagtccggcgacttcctaatggcacagaactccgaggccgcatcgtggagaccgaggca

SEQ ID NO: 61105 - DNA, 201 bp, Homo sapiens
gacggatggggcaaaagaagcagcgaccagctagagcagggcagccacacagctcgtccgacgcagcccaggcacctgcagagcagccacacagctcgtcsgatgcagcccaggcaccttgccccagggagcgctgcttgggaccgcccaccactccgggcccataccgcagcatctatttctcaagcccaaagggccacc

SEQ ID NO: 61106 - DNA, 201 bp, Homo sapiens
ccagggagcgctgcttgggaccgcccaccactccgggcccataccgcagcatctatttctcaagcccaaagggccaccttacccgactggggttggagttyttcgaccagccggcagtccccctggcccgggcatttctgggacaggtcctagtccggcgacttcctaatggcacagaactccgaggccgcatcgtggaga

SEQ ID NO: 61107 - DNA, 201 bp, Homo sapiens
ccgacgcagcccaggcacctgcagagcagccacacagctcgtccgatgcagcccaggcaccttgccccagggagcgctgcttgggaccgcccaccactccrggcccataccgcagcatctatttctcaagcccaaagggccaccttacccgactggggttggagttcttcgaccagccggcagtccccctggcccgggcat

SEQ ID NO: 61108 - DNA, 201 bp, Homo sapiens
tatgtggggcagagcagccaccctgcccccagcagcagccgtccatcgtcagacgtgatcatttcctgaggcctcgagtgtgtcagggtgtttgtgcctcrtaacaacccacaggatggtcacccccgctttgcagatgaagaaaccaaagcagttttgccgacggatggggcaaaagaagcagcgaccagctagagcagg

SEQ ID NO: 61109 - DNA, 201 bp, Homo sapiens
gggctccgcgccggggtccgacagcctgggcccccatgccgtgcagctcgcacatatgtggggcagagcagccaccctgcccccagcagcagccgtccatygtcagacgtgatcatttcctgaggcctcgagtgtgtcagggtgtttgtgcctcataacaacccacaggatggtcacccccgctttgcagatgaagaaacc

SEQ ID NO: 61110 - DNA, 201 bp, Homo sapiens
tgcgagcactggagcccctggaaggtctggagaccatgcgtcagcttcgcagcaccctccggaaaggcaccgccagccgtgtcctcaaggaccgcgagctytgcagtggcccctccaagctgtgccaggccctggccatcaacaagagctttgaccagagggacctggcacaggatgaagctgtatggctggagcgtggtc

SEQ ID NO: 61111 - DNA, 189 bp, Homo sapiens
gggcttctccagcctagcagggccagcccaggccctcgtgccccagatggtcaggaccaggtcacagcttggctatgagcctgtttgtggcttctgtggaytgtggtgaggactgggccaggaaaggctcagggtagcctgggaggaagaagcgcatggcagacagaggtgctggggagggggccacag

SEQ ID NO: 61112 - DNA, 201 bp, Homo sapiens
ctcgcacatatgtggggcagagcagccaccctgcccccagcagcagccgtccatcgtcagacgtgatcatttcctgaggcctcgagtgtgtcagggtgtttgtgcctcataacaacccacaggatggtcacccccgctttgcagatgaagaaaccaaagcagttttgccgacggatggggcaaaagaagcagcgaccagct

SEQ ID NO: 61113 - DNA, 201 bp, Homo sapiens
aaaaaccgaataaatgttttatttctagaaaactgtgccttagccagagctcctctaggtgatcaacccatgtctggagctagctcttcctccaggacacragagctgggggcctgagtacgtagcgccaggcccggtgtggatgctggggagaatcatcagtgtgggagccgaaagcccccgagggtggggtcctgcaca

SEQ ID NO: 61114 - DNA, 201 bp, Homo sapiens
gcatcgtggagaccgaggcatacctggggccagaggatgaagccgcccactcaaggggtggccggcagaccccccgcaaccgaggcatgttcatgaagccrgggaccctgtacgtgtacatcatttacggcatgtacttctgcatgaacatctccagccagggggacggggcttgcgtcttgctgcgagcactggagcccc

SEQ ID NO: 61115 - DNA, 201 bp, Homo sapiens
gcttgggaccgcccaccactccgggcccataccgcagcatctatttctcaagcccaaagggccaccttacccgactggggttggagttcttcgaccagccrgcagtccccctggcccgggcatttctgggacaggtcctagtccggcgacttcctaatggcacagaactccgaggccgcatcgtggagaccgaggcatacc

SEQ ID NO: 61116 - DNA, 201 bp, Homo sapiens
cgagggtggggtcctgcacagtgggccatgcctccaccagcaagatgtgcacaggtgacagggcttctccagcctagcagggccagcccaggccctcgtgmcccagatggtcaggaccaggtcacagcttggctatgagcctgtttgtggcttctgtggactgtggtgaggactgggccaggaaaggctcagggtagcctg

SEQ ID NO: 61117 - DNA, 201 bp, Homo sapiens
ccacacagctcgtccgacgcagcccaggcacctgcagagcagccacacagctcgtccgatgcagcccaggcaccttgccccagggagcgctgcttgggacygcccaccactccgggcccataccgcagcatctatttctcaagcccaaagggccaccttacccgactggggttggagttcttcgaccagccggcagtcccc

SEQ ID NO: 61118 - DNA, 201 bp, Homo sapiens; identical to SEQ ID NO: 61095

SEQ ID NO: 61119 - DNA, 201 bp, Homo sapiens; identical to SEQ ID NO: 61096

SEQ ID NO: 61120 - DNA, 201 bp, Homo sapiens; identical to SEQ ID NO: 61097

SEQ ID NO: 61121 - DNA, 201 bp, Homo sapiens; identical to SEQ ID NO: 61098

SEQ ID NO: 61122 - DNA, 201 bp, Homo sapiens; identical to SEQ ID NO: 61099

SEQ ID NO: 61123 - DNA, 201 bp, Homo sapiens; identical to SEQ ID NO: 61100

SEQ ID NO: 61124 - DNA, 201 bp, Homo sapiens; identical to SEQ ID NO: 61101

SEQ ID NO: 61125 - DNA, 201 bp, Homo sapiens; identical to SEQ ID NO: 61102

SEQ ID NO: 61126 - DNA, 201 bp, Homo sapiens; identical to SEQ ID NO: 61103

SEQ ID NO: 61127 - DNA, 201 bp, Homo sapiens; identical to SEQ ID NO: 61104

SEQ ID NO: 61128 - DNA, 201 bp, Homo sapiens; identical to SEQ ID NO: 61105

SEQ ID NO: 61129 - DNA, 201 bp, Homo sapiens; identical to SEQ ID NO: 61106

SEQ ID NO: 61130 - DNA, 201 bp, Homo sapiens; identical to SEQ ID NO: 61107

SEQ ID NO: 61131 - DNA, 201 bp, Homo sapiens; identical to SEQ ID NO: 61108

SEQ ID NO: 61132 - DNA, 180 bp, Homo sapiens
cagcctgggcccccatgccgtgcagctcgcacatatgtggggcagagcagccaccctgcccccagcagcagccgtccatygtcagacgtgatcatttcctgaggcctcgagtgtgtcagggtgtttgtgcctcataacaacccacaggatggtcacccccgctttgcagatgaagaaacc

SEQ ID NO: 61133 - DNA, 201 bp, Homo sapiens; identical to SEQ ID NO: 61110

SEQ ID NO: 61134 - DNA, 189 bp, Homo sapiens; identical to SEQ ID NO: 61111

SEQ ID NO: 61135 - DNA, 201 bp, Homo sapiens; identical to SEQ ID NO: 61112

SEQ ID NO: 61136 - DNA, 201 bp, Homo sapiens; identical to SEQ ID NO: 61113

SEQ ID NO: 61137 - DNA, 201 bp, Homo sapiens; identical to SEQ ID NO: 61114

SEQ ID NO: 61138 - DNA, 201 bp, Homo sapiens; identical to SEQ ID NO: 61115

SEQ ID NO: 61139 - DNA, 201 bp, Homo sapiens; identical to SEQ ID NO: 61116

SEQ ID NO: 61140 - DNA, 201 bp, Homo sapiens; identical to SEQ ID NO: 61117

SEQ ID NO: 61141 - DNA, 201 bp, Homo sapiens; identical to SEQ ID NO: 61095

SEQ ID NO: 61142 - DNA, 201 bp, Homo sapiens; identical to SEQ ID NO: 61096

SEQ ID NO: 61143 - DNA, 201 bp, Homo sapiens; identical to SEQ ID NO: 61097

SEQ ID NO: 61144 - DNA, 201 bp, Homo sapiens; identical to SEQ ID NO: 61098

SEQ ID NO: 61145 - DNA, 201 bp, Homo sapiens; identical to SEQ ID NO: 61099

SEQ ID NO: 61146 - DNA, 201 bp, Homo sapiens; identical to SEQ ID NO: 61100

SEQ ID NO: 61147 - DNA, 201 bp, Homo sapiens; identical to SEQ ID NO: 61101

SEQ ID NO: 61148 - DNA, 201 bp, Homo sapiens; identical to SEQ ID NO: 61102

SEQ ID NO: 61149 - DNA, 201 bp, Homo sapiens
ccgctttgcagatgaagaaaccaaagcaggtgttttgccgacggatggggcaaaagaagcagcgaccagctagagcagggcagccacacagctcgtccgaygcagcccaggcacctgcagagcagccacacagctcgtccgatgcagcccaggcaccttgccccagggagcgctgcttgggaccgcccaccactccgggcc

SEQ ID NO: 61150 - DNA, 201 bp, Homo sapiens; identical to SEQ ID NO: 61104

SEQ ID NO: 61151 - DNA, 201 bp, Homo sapiens; identical to SEQ ID NO: 61105

SEQ ID NO: 61152 - DNA, 201 bp, Homo sapiens; identical to SEQ ID NO: 61106

SEQ ID NO: 61153 - DNA, 201 bp, Homo sapiens; identical to SEQ ID NO: 61107

SEQ ID NO: 61154 - DNA, 201 bp, Homo sapiens; identical to SEQ ID NO: 61110

SEQ ID NO: 61155 - DNA, 189 bp, Homo sapiens; identical to SEQ ID NO: 61111

SEQ ID NO: 61156 - DNA, 201 bp, Homo sapiens; identical to SEQ ID NO: 61113

SEQ ID NO: 61157 - DNA, 201 bp, Homo sapiens; identical to SEQ ID NO: 61114

SEQ ID NO: 61158 - DNA, 201 bp, Homo sapiens; identical to SEQ ID NO: 61115

SEQ ID NO: 61159 - DNA, 201 bp, Homo sapiens; identical to SEQ ID NO: 61116

SEQ ID NO: 61160 - DNA, 201 bp, Homo sapiens; identical to SEQ ID NO: 61117

SEQ ID NO: 61161 - DNA, 201 bp, Homo sapiens; identical to SEQ ID NO: 61095

SEQ ID NO: 61162 - DNA, 201 bp, Homo sapiens; identical to SEQ ID NO: 61096

SEQ ID NO: 61163 - DNA, 201 bp, Homo sapiens; identical to SEQ ID NO: 61097

SEQ ID NO: 61164 - DNA, 201 bp, Homo sapiens; identical to SEQ ID NO: 61098

SEQ ID NO: 61165 - DNA, 201 bp, Homo sapiens; identical to SEQ ID NO: 61099

SEQ ID NO: 61166 - DNA, 201 bp, Homo sapiens; identical to SEQ ID NO: 61100

SEQ ID NO: 61167 - DNA, 201 bp, Homo sapiens; identical to SEQ ID NO: 61101

SEQ ID NO: 61168 - DNA, 201 bp, Homo sapiens; identical to SEQ ID NO: 61102

SEQ ID NO: 61169 - DNA, 201 bp, Homo sapiens
gcggtgctgggctccgcgccggggtccgacagttttgccgacggatggggcaaaagaagcagcgaccagctagagcagggcagccacacagctcgtccgaygcagcccaggcacctgcagagcagccacacagctcgtccgatgcagcccaggcaccttgccccagggagcgctgcttgggaccgcccaccactccgggcc

SEQ ID NO: 61170 - DNA, 201 bp, Homo sapiens; identical to SEQ ID NO: 61104

SEQ ID NO: 61171 - DNA, 201 bp, Homo sapiens; identical to SEQ ID NO: 61105

SEQ ID NO: 61172 - DNA, 201 bp, Homo sapiens; identical to SEQ ID NO: 61106

SEQ ID NO: 61173 - DNA, 201 bp, Homo sapiens; identical to SEQ ID NO: 61107

SEQ ID NO: 61174 - DNA, 201 bp, Homo sapiens; identical to SEQ ID NO: 61110

SEQ ID NO: 61175 - DNA, 189 bp, Homo sapiens; identical to SEQ ID NO: 61111

SEQ ID NO: 61176 - DNA, 201 bp, Homo sapiens; identical to SEQ ID NO: 61113

SEQ ID NO: 61177 - DNA, 201 bp, Homo sapiens; identical to SEQ ID NO: 61114

SEQ ID NO: 61178 - DNA, 201 bp, Homo sapiens; identical to SEQ ID NO: 61115

SEQ ID NO: 61179 - DNA, 201 bp, Homo sapiens; identical to SEQ ID NO: 61116

SEQ ID NO: 61180 - DNA, 201 bp, Homo sapiens; identical to SEQ ID NO: 61117

SEQ ID NO: 61181 - DNA, 201 bp, Homo sapiens
tgtccttcctcgggagcaaactctccacgtgcgaacagctccggcaccggctggagcacctcacgctaatcttcagtacacggaaggcggagaaccctgcycagctgatgaggaaggccaacacggtggcctctgtgctgctggacgtggccctgggcctcatgctgctgtcctggctccacgggagaagccgcatcgggc

SEQ ID NO: 61182 - DNA, 201 bp, Homo sapiens
tccaccacagcagccccaggtggagggctggtctccctgggggctccccagtggctctgccctggctgtgggggtggagggaccttgccaggatgaacccyccagtcccaggcaccctctagctccctcagccgaacagcaccctgcatctgggggattgaagcagtcgctgacccccgtccccagcgggcccgggccctc

SEQ ID NO: 61183 - DNA, 201 bp, Homo sapiens
cagcaggtcctgcggccaaatctgtctcccttcatgggcctcccagggaaggaggaagccctgctgtgcagacacctctgtggccccccaggggtgtgagyggcctggggagggggccgtggcactgaggccgaaagtgcctgccagacggcacggtctgggtgcgggtgttccctgtgagcccgagtccgcttcaggagg

SEQ ID NO: 61184 - DNA, 201 bp, Homo sapiens
ccccgtagcagcaggtcctgcggccaaatctgtctcccttcatgggcctcccagggaaggaggaagccctgctgtgcagacacctctgtggccccccaggrgtgtgagcggcctggggagggggccgtggcactgaggccgaaagtgcctgccagacggcacggtctgggtgcgggtgttccctgtgagcccgagtccgct

SEQ ID NO: 61185 - DNA, 201 bp, Homo sapiens
ggatgttccctggagaggtcgctttgtgaagaaaccatcagcaggctgtgagcatcgccaggctgctgtgggggcgggagcagcctcagtgtcaagggccygcccactgacccagccgtacctattcgtccacggtgccccgtagcagcaggtcctgcggccaaatctgtctcccttcatgggcctcccagggaaggagga

SEQ ID NO: 61186 - DNA, 201 bp, Homo sapiens
gggtgttccctgtgagcccgagtccgcttcaggaggggagcctgcaggtgccggctggtgaggggatgacgcgctgtgggtgggaggaggcagcgcccatytcagcagcaccaggactgcctgggactccctggcaacccagcaccggggaagccgtcagctgctgtgacaataaaacctgccccgtgtctggagcgcagg

SEQ ID NO: 61187 - DNA, 201 bp, Homo sapiens
cccaaccccatccggaccccgccgcccgagcgcgcggccccggaagcacccgcctcccggcatggtgctcaaggccttcttccccacgtgctgcgtctcgrcggacagcgggctgctggtgggacggtgggtgccggagcagagcagcgccgtggtcctggcggtcctgcactttcccttcatccccatccaggtcaagca

SEQ ID NO: 61188 - DNA, 201 bp, Homo sapiens
agcaggactgagggaactgctggctcgcctggcaccaccacacggccacagccagccatctgctctgccagggtggcaccagctcagctggcgcatgtccygtgctttgtggacgctgctgtgtgctcctgaacacggcaggccctgctatcacaccttgggcttggaggtcattgggagtgagcagatgtgggggtggcc

SEQ ID NO: 61189 - DNA, 201 bp, Homo sapiens
gcactgcctgccttgggacccgcttcccacctgctgcggtcaccatggtggcgagcacagcaaccccaggtgtccagagcactgccccatgcccaccctgyatacccaggtccagagggtccgtccaccacagcagccccaggtggagggctggtctccctgggggctccccagtggctctgccctggctgtgggggtgga

SEQ ID NO: 61190 - DNA, 201 bp, Homo sapiens
cccaccggcaagcgcccactgcccccggtgcccctggtgaggaccaggtcatgctcatcttctatgaccagcgccaggtgttgctgtcacagctacacctrcccaccgtcctgcccgaccgccaggctggagccaccactgccagcacggggggcctggctgccgtcttcgacacggtagcacgcagtgaggtgctcttcc

SEQ ID NO: 61191 - DNA, 201 bp, Homo sapiens
cactgcctgccttgggacccgcttcccacctgctgcggtcaccatggtggcgagcacagcaaccccaggtgtccagagcactgccccatgcccaccctgcrtacccaggtccagagggtccgtccaccacagcagccccaggtggagggctggtctccctgggggctccccagtggctctgccctggctgtgggggtggag

SEQ ID NO: 61192 - DNA, 201 bp, Homo sapiens
caggctgctgtgggggcgggagcagcctcagtgtcaagggcccgcccactgacccagccgtacctattcgtccacggtgccccgtagcagcaggtcctgcrgccaaatctgtctcccttcatgggcctcccagggaaggaggaagccctgctgtgcagacacctctgtggccccccaggggtgtgagcggcctggggaggg

SEQ ID NO: 61193 - DNA, 201 bp, Homo sapiens
gctttgatgagggccccgtgcggctgagccactggcagtcggagggcgtggaggccagcatcctcgcggagctggccaggcgagcctcgggacccatttgyctgctgttggccagcctgctgtcgctggtctcagctgtcagtgcctgccgagtgttcaagctctggcccctgtccttcctcgggagcaaactctccacgt

SEQ ID NO: 61194 - DNA, 201 bp, Homo sapiens
ccatcctgctcttcctcctgcctaccacagccctgtactacctggtgttcaccctgctccggctcctggtggtcgccgtgcagggcctgatccatctgctsgtggacctcatcaactccctgccgctgtactcactgggtcttcggctctgccggccctacaggctggcggataaacccactgccctacagccgcgtggtg

SEQ ID NO: 61195 - DNA, 201 bp, Homo sapiens; identical to SEQ ID NO: 61181

SEQ ID NO: 61196 - DNA, 201 bp, Homo sapiens; identical to SEQ ID NO: 61183

SEQ ID NO: 61197 - DNA, 201 bp, Homo sapiens; identical to SEQ ID NO: 61184

SEQ ID NO: 61198 - DNA, 201 bp, Homo sapiens; identical to SEQ ID NO: 61182

SEQ ID NO: 61199 - DNA, 201 bp, Homo sapiens; identical to SEQ ID NO: 61185

SEQ ID NO: 61200 - DNA, 201 bp, Homo sapiens
cctcatcaactccctgccgctgtactcactgggtcttcggctctgccggccctacaggctggcggctggcgtgaagttccgtgtcctccggcacgaggccrgcaggcccctccgcctcctgatgcagataaacccactgccctacagccgcgtggtgcacacctaccgcctccccagctgtggctgccaccccaagcactc

SEQ ID NO: 61201 - DNA, 201 bp, Homo sapiens; identical to SEQ ID NO: 61186

SEQ ID NO: 61202 - DNA, 201 bp, Homo sapiens
gagccaggcggggtccgggttccacgaaggccaggtccagtcagtttctcagcctcccggcatggtgctcaaggccttcttccccacgtgctgcgtctcgrcggacagcgggctgctggtgggacggtgggtgccggagcagagcagcgccgtggtcctggcggtcctgcactttcccttcatccccatccaggtcaagca

SEQ ID NO: 61203 - DNA, 201 bp, Homo sapiens; identical to SEQ ID NO: 61188

SEQ ID NO: 61204 - DNA, 201 bp, Homo sapiens; identical to SEQ ID NO: 61189

SEQ ID NO: 61205 - DNA, 201 bp, Homo sapiens; identical to SEQ ID NO: 61190

SEQ ID NO: 61206 - DNA, 201 bp, Homo sapiens; identical to SEQ ID NO: 61191

SEQ ID NO: 61207 - DNA, 201 bp, Homo sapiens; identical to SEQ ID NO: 61192

SEQ ID NO: 61208 - DNA, 201 bp, Homo sapiens; identical to SEQ ID NO: 61193

SEQ ID NO: 61209 - DNA, 201 bp, Homo sapiens
ccatcctgctcttcctcctgcctaccacagccctgtactacctggtgttcaccctgctccggctcctggtggtcgccgtgcagggcctgatccatctgctsgtggacctcatcaactccctgccgctgtactcactgggtcttcggctctgccggccctacaggctggcggctggcgtgaagttccgtgtcctccggcacg

SEQ ID NO: 61210 - DNA, 201 bp, Homo sapiens
tgtccttcctcgggagcaaactctccacgtgcgaacagctccggcaccggctggagcacctcacgctaatcttcagtacacggaaggcggagaaccctgcycagctgatgaggtgtgggcctgccctggtctctgcagggctgggtgcgtgccctctggccccttctccatccccctctgcaccacgctgacccctccggc

SEQ ID NO: 61211 - DNA, 201 bp, Homo sapiens
ccaggaaggccaacacggtggcctctgtgctgctggacgtggccctgggcctcatgctgctgtcctggctccacgggagaagccgcatcgggcatctggccgacgccctcgttcctgtggctgacgtgagtggactggggtggagcccggtgtcccgggtgggcgtggggacccctcctgggcagcagagccttcccgggc

SEQ ID NO: 61212 - DNA, 185 bp, Homo sapiens
gtggctgacgtgagtggactggggtggagcccggtgtcccgggtgggcgtggggacccctcctgggcagcagagccttcccgggccagagccaccgccccmcaaagccagttctaccttctccatgctctggagacacggccctcccctgaaccagaagcaggaactccaggggcgctggggcct

SEQ ID NO: 61213 - DNA, 201 bp, Homo sapiens; identical to SEQ ID NO: 61193

SEQ ID NO: 61214 - DNA, 201 bp, Homo sapiens; identical to SEQ ID NO: 61202

SEQ ID NO: 61215 - DNA, 201 bp, Homo sapiens; identical to SEQ ID NO: 61190

SEQ ID NO: 61216 - DNA, 201 bp, Homo sapiens; identical to SEQ ID NO: 61181

SEQ ID NO: 61217 - DNA, 201 bp, Homo sapiens; identical to SEQ ID NO: 61182

SEQ ID NO: 61218 - DNA, 201 bp, Homo sapiens; identical to SEQ ID NO: 61183

SEQ ID NO: 61219 - DNA, 201 bp, Homo sapiens; identical to SEQ ID NO: 61184

SEQ ID NO: 61220 - DNA, 201 bp, Homo sapiens; identical to SEQ ID NO: 61185

SEQ ID NO: 61221 - DNA, 201 bp, Homo sapiens; identical to SEQ ID NO: 61186

SEQ ID NO: 61222 - DNA, 185 bp, Homo sapiens
cctgagcctccagtagcttctctgggcctggcagagcctcccggcatggtgctcaaggccttcttccccacgtgctgcgtctcgrcggacagcgggctgctggtgggacggtgggtgccggagcagagcagcgccgtggtcctggcggtcctgcactttcccttcatccccatccaggtcaagca

SEQ ID NO: 61223 - DNA, 201 bp, Homo sapiens; identical to SEQ ID NO: 61188

SEQ ID NO: 61224 - DNA, 201 bp, Homo sapiens; identical to SEQ ID NO: 61189

SEQ ID NO: 61225 - DNA, 201 bp, Homo sapiens; identical to SEQ ID NO: 61190

SEQ ID NO: 61226 - DNA, 201 bp, Homo sapiens; identical to SEQ ID NO: 61191

SEQ ID NO: 61227 - DNA, 113 bp, Homo sapiens
cctgagcctccaktagcttctctgggcctggcagagcctcccggcatggtgctcaaggccttcttccccacgtgctgcgtctcgacggacagcgggctgctggtgggacggtg

SEQ ID NO: 61228 - DNA, 201 bp, Homo sapiens; identical to SEQ ID NO: 61192

SEQ ID NO: 61229 - DNA, 201 bp, Homo sapiens; identical to SEQ ID NO: 61193

SEQ ID NO: 61230 - DNA, 201 bp, Homo sapiens; identical to SEQ ID NO: 61194

SEQ ID NO: 61231 - DNA, 201 bp, Homo sapiens; identical to SEQ ID NO: 61181

SEQ ID NO: 61232 - DNA, 201 bp, Homo sapiens; identical to SEQ ID NO: 61183

SEQ ID NO: 61233 - DNA, 201 bp, Homo sapiens; identical to SEQ ID NO: 61184

SEQ ID NO: 61234 - DNA, 201 bp, Homo sapiens; identical to SEQ ID NO: 61182

SEQ ID NO: 61235 - DNA, 201 bp, Homo sapiens; identical to SEQ ID NO: 61185

SEQ ID NO: 61236 - DNA, 201 bp, Homo sapiens; identical to SEQ ID NO: 61200

SEQ ID NO: 61237 - DNA, 201 bp, Homo sapiens; identical to SEQ ID NO: 61186

SEQ ID NO: 61238 - DNA, 201 bp, Homo sapiens; identical to SEQ ID NO: 61187

SEQ ID NO: 61239 - DNA, 201 bp, Homo sapiens; identical to SEQ ID NO: 61188

SEQ ID NO: 61240 - DNA, 201 bp, Homo sapiens; identical to SEQ ID NO: 61189

SEQ ID NO: 61241 - DNA, 201 bp, Homo sapiens; identical to SEQ ID NO: 61190

SEQ ID NO: 61242 - DNA, 201 bp, Homo sapiens; identical to SEQ ID NO: 61191

SEQ ID NO: 61243 - DNA, 201 bp, Homo sapiens; identical to SEQ ID NO: 61192

SEQ ID NO: 61244 - DNA, 201 bp, Homo sapiens; identical to SEQ ID NO: 61193

SEQ ID NO: 61245 - DNA, 201 bp, Homo sapiens; identical to SEQ ID NO: 61209

SEQ ID NO: 61246 - DNA, 201 bp, Homo sapiens; identical to SEQ ID NO: 61183

SEQ ID NO: 61247 - DNA, 201 bp, Homo sapiens; identical to SEQ ID NO: 61181

SEQ ID NO: 61248 - DNA, 201 bp, Homo sapiens; identical to SEQ ID NO: 61184

SEQ ID NO: 61249 - DNA, 201 bp, Homo sapiens; identical to SEQ ID NO: 61182

SEQ ID NO: 61250 - DNA, 201 bp, Homo sapiens; identical to SEQ ID NO: 61185

SEQ ID NO: 61251 - DNA, 201 bp, Homo sapiens; identical to SEQ ID NO: 61200

SEQ ID NO: 61252 - DNA, 201 bp, Homo sapiens; identical to SEQ ID NO: 61186

SEQ ID NO: 61253 - DNA, 185 bp, Homo sapiens; identical to SEQ ID NO: 61222

SEQ ID NO: 61254 - DNA, 201 bp, Homo sapiens; identical to SEQ ID NO: 61188

SEQ ID NO: 61255 - DNA, 201 bp, Homo sapiens; identical to SEQ ID NO: 61189

SEQ ID NO: 61256 - DNA, 201 bp, Homo sapiens; identical to SEQ ID NO: 61190

SEQ ID NO: 61257 - DNA, 201 bp, Homo sapiens; identical to SEQ ID NO: 61191

SEQ ID NO: 61258 - DNA, 201 bp, Homo sapiens; identical to SEQ ID NO: 61192

SEQ ID NO: 61259 - DNA, 113 bp, Homo sapiens; identical to SEQ ID NO: 61227

SEQ ID NO: 61260 - DNA, 201 bp, Homo sapiens; identical to SEQ ID NO: 61209

SEQ ID NO: 61261 - DNA, 201 bp, Homo sapiens; identical to SEQ ID NO: 61193

SEQ ID NO: 61262 - DNA, 201 bp, Homo sapiens
agatcgtgggccgggagggggtgtctctgaccgctgtgctgaccacccaccatcactgggaccacgcgcggggaaacccggagctggcgcggcttcgtccsgggctggcggtgctgggcgcggacgagcgcatcttctcgctgacgcgcaggctggcgcacggcgaggagctgcgggtgagcgcgcgctcccgggaggggc

SEQ ID NO: 61263 - DNA, 201 bp, Homo sapiens
tcctggaggcgctatgcaaggagcgggcgcgcttcgaacaggcgggcgagccgcggcagccacaggcgcgggccctccttgcgctgcagtgggggctcctsagtgcagccccacacgactgagccacccagaccctcggagggtgggcaacctggtgcttcccgggtggacacacaggaccactcagtggggcctgtgtgg

SEQ ID NO: 61264 - DNA, 126 bp, Homo sapiens
gcaacctggtgcttcccgggtggacacacaggaccactcagtggggcctgtgtgggcgccgagacctgggtgtctgggaagtggggcacacggggcctccsaactatgaataaagctttgaaaggc

SEQ ID NO: 61265 - DNA, 201 bp, Homo sapiens
cgcgcgaggcggtggccgtggacgtggctgtgcccaagaggctgctggagatcgtgggccgggagggggtgtctctgaccgctgtgctgaccacccaccaycactgggaccacgcgcggggaaacccggagctggcgcggcttcgtcccgggctggcggtgctgggcgcggacgagcgcatcttctcgctgacgcgcaggc

SEQ ID NO: 61266 - DNA, 201 bp, Homo sapiens
ggcggttggcggctcccgagcccagcgccgcgctcagtccggaccccgtgaccggcggccgaggccccgcctccgtcagtctgtccttcgggtcctcagcrcagccgtgccgcccttcctagggtgtggagagcgggccccgccctgaaggggcaccgtgggctggggggcctgttttggagcaggcaccggtggccgagc

SEQ ID NO: 61267 - DNA, 201 bp, Homo sapiens
cggaggggggcggttggcggctcccgagcccagcgccgcgctcagtccggaccccgtgaccggcggccgaggccccgcctccgtcagtctgtccttcgggycctcagcacagccgtgccgcccttcctagggtgtggagagcgggccccgccctgaaggggcaccgtgggctggggggcctgttttggagcaggcaccggt

SEQ ID NO: 61268 - DNA, 201 bp, Homo sapiens
agatcgtgggccgggagggggtgtctctgaccgctgtgctgaccacccaccatcactgggaccacgcgcggggaaacccggagctggcgcggcttcgtccsgggctggcggtgctgggcgcggacgagcgcatcttctcgctgacgcgcaggctggcgcacggcgaggagctgcggttcggggccatccacgtgcgttgcc

SEQ ID NO: 61269 - DNA, 201 bp, Homo sapiens
tcctggaggcgctatgcaaggagcgggcgcgcttcgaacaggcgggcgagccgcggcagccacaggcgcgggccctccttgcgctgcagtgggggctcctsagtgcagccccacacgactgagccacccagaccctcacagggctggggcctgcgtccctcctcgtgacctcggccagctggacccacatgagggccacct

SEQ ID NO: 61270 - DNA, 129 bp, Homo sapiens
gcaacctggtgcttcccgggtggacacacaggaccactcagtggggcctgtgtgggcgccgagacctgggtgtctgggaagtggggcacacggggcctccsaactatgaataaagctttgaaaggccgt

SEQ ID NO: 61271 - DNA, 201 bp, Homo sapiens; identical to SEQ ID NO: 61265

SEQ ID NO: 61272 - DNA, 201 bp, Homo sapiens; identical to SEQ ID NO: 61266

SEQ ID NO: 61273 - DNA, 201 bp, Homo sapiens; identical to SEQ ID NO: 61267

SEQ ID NO: 61274 - DNA, 201 bp, Homo sapiens; identical to SEQ ID NO: 61268

SEQ ID NO: 61275 - DNA, 201 bp, Homo sapiens; identical to SEQ ID NO: 61263

SEQ ID NO: 61276 - DNA, 126 bp, Homo sapiens; identical to SEQ ID NO: 61264

SEQ ID NO: 61277 - DNA, 201 bp, Homo sapiens; identical to SEQ ID NO: 61265

SEQ ID NO: 61278 - DNA, 201 bp, Homo sapiens; identical to SEQ ID NO: 61266

SEQ ID NO: 61279 - DNA, 201 bp, Homo sapiens; identical to SEQ ID NO: 61267

SEQ ID NO: 61280 - DNA, 201 bp, Homo sapiens; identical to SEQ ID NO: 61268

SEQ ID NO: 61281 - DNA, 201 bp, Homo sapiens; identical to SEQ ID NO: 61269

SEQ ID NO: 61282 - DNA, 129 bp, Homo sapiens; identical to SEQ ID NO: 61270

SEQ ID NO: 61283 - DNA, 201 bp, Homo sapiens; identical to SEQ ID NO: 61265

SEQ ID NO: 61284 - DNA, 201 bp, Homo sapiens
ggcggttggcggctcccgagcccagcgccgcgctcagtccggaccccgtgaccggcggccgaggccccgcctccgtcagtctgtccttcgggtcctcagcrcagccgtgccggtgaggcgggcggcgggggaacgcggctgtcccgggtcaggggtcttgcggcggcagggcggggggccgaggggcggggcctgggagga

SEQ ID NO: 61285 - DNA, 201 bp, Homo sapiens
cggaggggggcggttggcggctcccgagcccagcgccgcgctcagtccggaccccgtgaccggcggccgaggccccgcctccgtcagtctgtccttcgggycctcagcacagccgtgccggtgaggcgggcggcgggggaacgcggctgtcccgggtcaggggtcttgcggcggcagggcggggggccgaggggcggggcc

SEQ ID NO: 61286 - DNA, 201 bp, Homo sapiens; identical to SEQ ID NO: 61268

SEQ ID NO: 61287 - DNA, 201 bp, Homo sapiens; identical to SEQ ID NO: 61263

SEQ ID NO: 61288 - DNA, 126 bp, Homo sapiens; identical to SEQ ID NO: 61264

SEQ ID NO: 61289 - DNA, 201 bp, Homo sapiens; identical to SEQ ID NO: 61265

SEQ ID NO: 61290 - DNA, 201 bp, Homo sapiens; identical to SEQ ID NO: 61266

SEQ ID NO: 61291 - DNA, 201 bp, Homo sapiens; identical to SEQ ID NO: 61267

SEQ ID NO: 61292 - DNA, 201 bp, Homo sapiens; identical to SEQ ID NO: 61268

SEQ ID NO: 61293 - DNA, 127 bp, Homo sapiens
gcaacctggtgcttcccgggtggacacacaggaccactcagtggggcctgtgtgggcgccgagacctgggtgtctgggaagtggggcacacggggcctccsaactatgaataaagctttgaaaggcc

SEQ ID NO: 61294 - DNA, 201 bp, Homo sapiens; identical to SEQ ID NO: 61269

SEQ ID NO: 61295 - DNA, 201 bp, Homo sapiens; identical to SEQ ID NO: 61265

SEQ ID NO: 61296 - DNA, 105 bp, Homo sapiens
cagcrcagccgtgccggtgaggcgggcggcgggggaacgcggctgtcccggcccttcctagggtgtggagagcgggccccgccctgaaggggcaccgtgggctgg

SEQ ID NO: 61297 - DNA, 201 bp, Homo sapiens
gaatatgtttccttcaagcagtatgtgggcaagcacatcctcttcgtcaacgtggccacctactgtggtctgacagcgcaatatcctgaactaaatgcacyccaggaggagctgaagccctatggtctagttgtgttgggctttccctgcaaccaatttggaaagcaagaaccaggagataacaaagagattcttcctggg

SEQ ID NO: 61298 - DNA, 201 bp, Homo sapiens
tctcctagcctgctttgtgcaaacaagtcccaagcaggagaagatgaagatggattgccacaaagacgagaaaggcaccatctatgactatgaggccatcrcacttaataagaatgaatatgtttccttcaagcagtatgtgggcaagcacatcctcttcgtcaacgtggccacctactgtggtctgacagcgcaatatcc

SEQ ID NO: 61299 - DNA, 201 bp, Homo sapiens
tgaatatgtttccttcaagcagtatgtgggcaagcacatcctcttcgtcaacgtggccacctactgtggtctgacagcgcaatatcctgaactaaatgcastccaggaggagctgaagccctatggtctagttgtgttgggctttccctgcaaccaatttggaaagcaagaaccaggagataacaaagagattcttcctgg

SEQ ID NO: 61300 - DNA, 201 bp, Homo sapiens; identical to SEQ ID NO: 61298

SEQ ID NO: 61301 - DNA, 201 bp, Homo sapiens
ccgcttcccgcggatcacatcccagtacctgggtcatccgcgggcggatactgcacctccggaagagggccttccagacttccaccctcctccactgcccmaggaagacccctactgcctggatgatgcaccccccaacctggattacttggtccacatgcaggggggcatcctctttgtgtatgataacaagaagatgct

SEQ ID NO: 61302 - DNA, 201 bp, Homo sapiens
agccaagagtctggccaaggccctaatgatccgggagaagtatgcgcggctcgcctaccaccgcttcccgcggatcacatcccagtacctgggtcatccgygggcggatactgcacctccggaagagggccttccagacttccaccctcctccactgccccaggaagacccctactgcctggatgatgcaccccccaacct

SEQ ID NO: 61303 - DNA, 201 bp, Homo sapiens
attagaccccacaaatgttagttgtgtgtgtgtgtgtgtgtgtttttaatcactgtaaccgggtgcatttttttaaggcaaaatttctcccttatctactrtgatgacttcagaagatacaatggtcccaggggccaagtagaaagcatttttaaagattaatctgaattaagctttatcagtgtactctttatctgtgtt

SEQ ID NO: 61304 - DNA, 201 bp, Homo sapiens
ctccggaagagggccttccagacttccaccctcctccactgccccaggaagacccctactgcctggatgatgcaccccccaacctggattacttggtccayatgcaggggggcatcctctttgtgtatgataacaagaagatgctggagcaccaggagccgcacagcctaccctaccccgacctggagacctacacggtgg

SEQ ID NO: 61305 - DNA, 201 bp, Homo sapiens
ctattctgagtcttggtttcttcacctagaaagtgagggtttggactagatgagtggctttcagggtgttctgtgaatctcctcatgaatactttagggtrggggagggaagggagtgagtgatgctcaggggctgtcaaagtgactgcgttcatcagttttacactggggctgctacataatattttcatttgaacgaag

SEQ ID NO: 61306 - DNA, 201 bp, Homo sapiens
caaggaggttgcccgggagctggaggagagcaagtaccagtactcagagccacggctctccatctacggccgcagtcctgaggagtggcccaacctggccyactggttcatccagcacaaggtctactctcccaacatgcgctggatcatccaggtgccccggatttatgacatatttaggtcaaagaagctgctgccaaa

SEQ ID NO: 61307 - DNA, 201 bp, Homo sapiens
tatgccattgcagctcaagtgtggaagctgagcacctgcgacctgtgtgagatcgccaggaacagcgtgctgcagagcggcctctcgcatcaggaaaagcmaaagtttctgggacaaaattattataaagaaggacctgaaggaaatgatattcgaaagacaaatgtggctcagatccggatggcattccgatatgagacc

SEQ ID NO: 61308 - DNA, 201 bp, Homo sapiens
aagtaataggcctaaactggatttccttattccaaatcctgtcttttccccactattccattagaccccacaaatgttagttgtgtgtgtgtgtgtgtgtktttttaatcactgtaaccgggtgcatttttttaaggcaaaatttctcccttatctactgtgatgacttcagaagatacaatggtcccaggggccaagtag

SEQ ID NO: 61309 - DNA, 201 bp, Homo sapiens
tgtcttttccccactattccattagaccccacaaatgttagttgtgtgtgtgtgtgtgtgtgtttttaatcactgtaaccgggtgcatttttttaaggcaraatttctcccttatctactgtgatgacttcagaagatacaatggtcccaggggccaagtagaaagcatttttaaagattaatctgaattaagctttatca

SEQ ID NO: 61310 - DNA, 201 bp, Homo sapiens
ccctaatgatccgggagaagtatgcgcggctcgcctaccaccgcttcccgcggatcacatcccagtacctgggtcatccgcgggcggatactgcacctccrgaagagggccttccagacttccaccctcctccactgccccaggaagacccctactgcctggatgatgcaccccccaacctggattacttggtccacatgc

SEQ ID NO: 61311 - DNA, 201 bp, Homo sapiens
caaagagttgaagagtaacccccaccgggacttctataacgtgagaaaggtggacacacacatccatgcggccgcctgcatgaaccaaaagcatctgctgygcttcatcaagcacacataccagacggagcctgacaggactgtggcagagaagcggggccggaagatcaccctgcggcaggtgtttgacggcctgcacat

SEQ ID NO: 61312 - DNA, 201 bp, Homo sapiens
cctcactgtggactcactggatgtccacgcgggccggcagacattccaccgctttgacaagttcaactccaaatacaaccctgtgggggccagtgagctgygtgacctgtatttgaaaactgaaaactatctgggaggagagtactttgctcggatggtcaaggaggttgcccgggagctggaggagagcaagtaccagta

SEQ ID NO: 61313 - DNA, 201 bp, Homo sapiens
ctttgctcggatggtcaaggaggttgcccgggagctggaggagagcaagtaccagtactcagagccacggctctccatctacggccgcagtcctgaggagwggcccaacctggcctactggttcatccagcacaaggtctactctcccaacatgcgctggatcatccaggtgccccggatttatgacatatttaggtcaaa

SEQ ID NO: 61314 - DNA, 201 bp, Homo sapiens
caagagcccaaacccggacgtctggaccagtgagcagaacccaccctacagctactacctgtactacatgtacgccaacatcatggtgctcaacaacctcygcagggagcgcggcctgagcacgttcctgttccggccgcactgtggggaagccggctccatcacccacctggtgtctgccttcctcactgctgacaacat

SEQ ID NO: 61315 - DNA, 201 bp, Homo sapiens
ccaagcacagcgaccacatgttttccgacaagagcccaaacccggacgtctggaccagtgagcagaacccaccctacagctactacctgtactacatgtaygccaacatcatggtgctcaacaacctccgcagggagcgcggcctgagcacgttcctgttccggccgcactgtggggaagccggctccatcacccacctgg

SEQ ID NO: 61316 - DNA, 201 bp, Homo sapiens
cagtctttttactaggcagatatatatgctatcttacagctaattatgaaattgaatgaaaatccattgttatcttagggattagttttgaaaagcccccrtttatatacatttgccctaacataggaagtattgtgtagtttctcattgtcattttatctgtatcaagtatctttttttaaattgttaaataaagtcagc

SEQ ID NO: 61317 - DNA, 201 bp, Homo sapiens
tttccttattccaaatcctgtcttttccccactattccattagaccccacaaatgttagttgtgtgtgtgtgtgtgtgtgtttttaatcactgtaaccggrtgcatttttttaaggcaaaatttctcccttatctactgtgatgacttcagaagatacaatggtcccaggggccaagtagaaagcatttttaaagattaat

SEQ ID NO: 61318 - DNA, 201 bp, Homo sapiens; identical to SEQ ID NO: 61301

SEQ ID NO: 61319 - DNA, 201 bp, Homo sapiens; identical to SEQ ID NO: 61302

SEQ ID NO: 61320 - DNA, 201 bp, Homo sapiens; identical to SEQ ID NO: 61303

SEQ ID NO: 61321 - DNA, 201 bp, Homo sapiens; identical to SEQ ID NO: 61304

SEQ ID NO: 61322 - DNA, 201 bp, Homo sapiens; identical to SEQ ID NO: 61305

SEQ ID NO: 61323 - DNA, 201 bp, Homo sapiens; identical to SEQ ID NO: 61306

SEQ ID NO: 61324 - DNA, 201 bp, Homo sapiens; identical to SEQ ID NO: 61307

SEQ ID NO: 61325 - DNA, 201 bp, Homo sapiens; identical to SEQ ID NO: 61308

SEQ ID NO: 61326 - DNA, 201 bp, Homo sapiens; identical to SEQ ID NO: 61309

SEQ ID NO: 61327 - DNA, 201 bp, Homo sapiens; identical to SEQ ID NO: 61310

SEQ ID NO: 61328 - DNA, 201 bp, Homo sapiens; identical to SEQ ID NO: 61311

SEQ ID NO: 61329 - DNA, 201 bp, Homo sapiens; identical to SEQ ID NO: 61312

SEQ ID NO: 61330 - DNA, 201 bp, Homo sapiens; identical to SEQ ID NO: 61313

SEQ ID NO: 61331 - DNA, 201 bp, Homo sapiens; identical to SEQ ID NO: 61314

SEQ ID NO: 61332 - DNA, 201 bp, Homo sapiens; identical to SEQ ID NO: 61315

SEQ ID NO: 61333 - DNA, 153 bp, Homo sapiens
aacagcaccacagaaatagccattttgctcatggttatttcccaggaccacasgatttgcctaagtcactgggaggctatgtgtctgttctgagccttcccactctcctaaagggcagatgaagatcagagctttgcaccctgtgatgccatt

SEQ ID NO: 61334 - DNA, 201 bp, Homo sapiens
tctgagccttcccactctcctaaagggcagatgaagatcagagctttgcaccctgtgatgccattttaatcaaccctgcttggttttagaggattgctccygtgggtcacttgaggcaggctccaccttccccaggaggagtggcagagtccagccagcgctcggagctggaggcccacgtgggagcagtgagcggctctg

SEQ ID NO: 61335 - DNA, 201 bp, Homo sapiens; identical to SEQ ID NO: 61316

SEQ ID NO: 61336 - DNA, 201 bp, Homo sapiens; identical to SEQ ID NO: 61317

SEQ ID NO: 61337 - DNA, 201 bp, Homo sapiens; identical to SEQ ID NO: 61301

SEQ ID NO: 61338 - DNA, 201 bp, Homo sapiens; identical to SEQ ID NO: 61302

SEQ ID NO: 61339 - DNA, 201 bp, Homo sapiens; identical to SEQ ID NO: 61303

SEQ ID NO: 61340 - DNA, 201 bp, Homo sapiens; identical to SEQ ID NO: 61304

SEQ ID NO: 61341 - DNA, 201 bp, Homo sapiens; identical to SEQ ID NO: 61305

SEQ ID NO: 61342 - DNA, 201 bp, Homo sapiens; identical to SEQ ID NO: 61306

SEQ ID NO: 61343 - DNA, 201 bp, Homo sapiens; identical to SEQ ID NO: 61307

SEQ ID NO: 61344 - DNA, 201 bp, Homo sapiens; identical to SEQ ID NO: 61308

SEQ ID NO: 61345 - DNA, 201 bp, Homo sapiens; identical to SEQ ID NO: 61309

SEQ ID NO: 61346 - DNA, 201 bp, Homo sapiens; identical to SEQ ID NO: 61310

SEQ ID NO: 61347 - DNA, 201 bp, Homo sapiens; identical to SEQ ID NO: 61311

SEQ ID NO: 61348 - DNA, 201 bp, Homo sapiens; identical to SEQ ID NO: 61312

SEQ ID NO: 61349 - DNA, 201 bp, Homo sapiens; identical to SEQ ID NO: 61313

SEQ ID NO: 61350 - DNA, 201 bp, Homo sapiens; identical to SEQ ID NO: 61314

SEQ ID NO: 61351 - DNA, 201 bp, Homo sapiens; identical to SEQ ID NO: 61315

SEQ ID NO: 61352 - DNA, 201 bp, Homo sapiens; identical to SEQ ID NO: 61316

SEQ ID NO: 61353 - DNA, 201 bp, Homo sapiens; identical to SEQ ID NO: 61317

SEQ ID NO: 61354 - DNA, 201 bp, Homo sapiens
tggctgggaaagtggcttatccaatggttgctgcctattctgcaagcaagtttgctttggatgggttcttctcctccatcagaaaggaatattcagtgtcyagggtcaatgtatcaatcactctctgtgttcttggcctcatagacacagaaacagccatgaaggcagtttctgggatagtccatatgcaagcagctccaa

SEQ ID NO: 61355 - DNA, 201 bp, Homo sapiens
atggaaggagttcctctaacatttgcaaaatggaaatgtaataataatgaatgtcatgcaccgctgcagccagcagttgtaaaattgttagtaaacatagrtataattaccagatagttatattaaatttatatcttatatataataatatgtgatgattaatacaatattaattataataaaggtcacataaactttata

SEQ ID NO: 61356 - DNA, 201 bp, Homo sapiens
aatatctcctccccattctggggctcttcatggcctactactactattctgcaaacgaggaattcagaccagagatgctccaaggaaagaaagtgattgtyacaggggccagcaaagggatcggaagagagatggcttatcatctggcgaagatgggagcccatgtggtggtgacagcgaggtcaaaagaaactctacaga

SEQ ID NO: 61357 - DNA, 201 bp, Homo sapiens; identical to SEQ ID NO: 61354

SEQ ID NO: 61358 - DNA, 201 bp, Homo sapiens; identical to SEQ ID NO: 61355

SEQ ID NO: 61359 - DNA, 201 bp, Homo sapiens; identical to SEQ ID NO: 61356

SEQ ID NO: 61360 - DNA, 154 bp, Homo sapiens
gcggccgcccgcgagcggggcggtgccacgtacggctccggaagaagcgacggmatctgctagggcacaagagagacgggcgctcgggctctcgcagtcctcttccgtcagtgtcttttgcttcgactcccggcggagcgcgcaacgtggagtg

SEQ ID NO: 61361 - DNA, 155 bp, Homo sapiens
gcggccgcccgcgagcggggcggtgccacgtacggctccggaagaagcgacggamtctgctagggcacaagagagacgggcgctcgggctctcgcagtcctcttccgtcagtgtcttttgcttcgactcccggcggagcgcgcaacgtggagtga

SEQ ID NO: 61362 - DNA, 187 bp, Homo sapiens
gcggccgcccgcgagcggggcggtgccacgtacggctccggaagaagcgacggaatctgctagggcacaagagagacgggcgctcgsgctctcgcagtcctcttccgtcagtgtcttttgcttcgactcccggcggagcgcgcaacgtggagtgacgtgcaggggccaagtgcaacccaggcagcca

SEQ ID NO: 61363 - DNA, 201 bp, Homo sapiens
ccgtcagtgtcttttgcttcgactcccggcggagcgcgcaacgtggagtgacgtgcaggggccaagtgcaacccaggcagccacggctgtttcggagctcrggactctaaaatggcagagcagctttctccaggaaaggcggtggatcaggtgtgcaccttccttttcaaaaagcctgggcggaaaggggctgctggacgc

SEQ ID NO: 61364 - DNA, 201 bp, Homo sapiens
acagtggtaaacagaaggcggcttacggcgacttgagcagcgaagaggaagaggaaaatgagcccgagagtctcggcgtggtttataaatccacccgttcsgcgaaacccgtgggaccagaggatatgggagcgacagctgtctatgagctggacacagagaaagagcgcgatgcacaagccatctttgagcgcagccaga

SEQ ID NO: 61365 - DNA, 201 bp, Homo sapiens
aagcactggctcatccgccctacttcccatcccacacaaacccaattgtaaataacatatgacttctgagtacttttgggggcacaactgttttctgtttkctgtttttttgttttgttttttttctccagagcactttggtctagactaggctttgggtggttccaattggtggagagaagctctgaggcacgtcatgca

SEQ ID NO: 61366 - DNA, 201 bp, Homo sapiens
cgcagcggaaaacccgaagaagaagaagcttttgattggacagtcgctagtccgacctcagagaactcagccaatcataatgcttatatgctcccaaggtycccgcctcttcctcgaggtaacctttggtggcgggaagagttcggaagttttcgcgccggggtggagtcatcctgggaacctccacgcgactttggtgga

SEQ ID NO: 61367 - DNA, 201 bp, Homo sapiens
aagaagggaggctacacctctgggaccttcaggactgtcctgattgcctgtaatgttaagcagatgagcaaggatgctcagccctctttctctgctgaggwtatagccaagatcaagaagttcagtaaaacccgatccaaggatatctttgaccagctggccaagtcattggccccaagtatccatgggcatgactatgtc

SEQ ID NO: 61368 - DNA, 201 bp, Homo sapiens
  misc_feature (1)...(201): n = A,T,C or G
gttgaaggcattcaaggtggccctcttggatgtgttccgggaagctcatgcgcagtcaatcggcatgaatcgcctcacagaatccatcaaccgggacagcnaagagcccttctcttcagttgagatccaggctgctctgagcaagatgcaggatgacaatcaggtcatggtgtctgagggcatcatcttcctcatctgagg

SEQ ID NO: 61369 - DNA, 201 bp, Homo sapiens
tgggaccttcaggactgtcctgattgcctgtaatgttaagcagatgagcaaggatgctcagccctctttctctgctgaggatatagccaagatcaagaagytcagtaaaacccgatccaaggatatctttgaccagctggccaagtcattggccccaagtatccatgggcatgactatgtcaagaaagcaatcctctgctt

SEQ ID NO: 61370 - DNA, 201 bp, Homo sapiens
aaacccgatccaaggatatctttgaccagctggccaagtcattggccccaagtatccatgggcatgactatgtcaagaaagcaatcctctgcttgctcttrggaggggtggaacgagacctagaaaatggcagccacatccgtggggacatcaatattcttctaataggagacccatccgttgccaagtctcagcttctgc

SEQ ID NO: 61371 - DNA, 201 bp, Homo sapiens
agatgccggagaaggccccagccggccagctcccccgctctgtggacgtcattctggatgatgacttggtggataaagcgaagcctggtgaccgggttcargtggtgggaacctaccgttgccttcctggaaagaagggaggctacacctctgggaccttcaggactgtcctgattgcctgtaatgttaagcagatgagca

SEQ ID NO: 61372 - DNA, 201 bp, Homo sapiens
catacaaatttggacgtgcgatgatcttttagtcattatggtttcagatttgctgttagttactgattgatatttaatcaaagtgacgtgaaacactttttcccctcttgagctgatcgttcagtaagctaagttacttaaaaggatcttgtgatctttttataagaccagaaagcctttaatttacctgttattaagtaa

SEQ ID NO: 61373 - DNA, 201 bp, Homo sapiens
caatccccttgagacagaatatggcctttctgtctacaaggatcaccagaccatcaccatccaggagatgccggagaaggccccagccggccagctccccmgctctgtggacgtcattctggatgatgacttggtggataaagcgaagcctggtgaccgggttcaggtggtgggaacctaccgttgccttcctggaaagaa

SEQ ID NO: 61374 - DNA, 201 bp, Homo sapiens
tgaatccaggttgaaggcattcaaggtggccctcttggatgtgttccgggaagctcatgcgcagtcaatcggcatgaatcgcctcacagaatccatcaacygggacagcgaagagcccttctcttcagttgagatccaggctgctctgagcaagatgcaggatgacaatcaggtcatggtgtctgagggcatcatcttcct

SEQ ID NO: 61375 - DNA, 201 bp, Homo sapiens
gttttctgtttgctgtttttttgttttgttttttttctccagagcactttggtctagactaggctttgggtggttccaattggtggagagaagctctgagkcacgtcatgcaggtcaagaaagctttctttgcagtagcaccagttaaggtgaatatgtattgtatcacaaaacaaacccaatatccagatgaatatccga

SEQ ID NO: 61376 - DNA, 201 bp, Homo sapiens
acaaacatacaaatttggacgtgcgatgatcttttagtcattatggtttcagatttgctgttagttactgattgatatttaatcaaagtgacgtgaaacactttttcccctcttgagctgatcgttcagtaagctaagttacttaaaaggatcttgtgatctttttataagaccagaaagcctttaatttacctgttatta

SEQ ID NO: 61377 - DNA, 201 bp, Homo sapiens
ggagctggttgccttccagcgggccttaaaggattttgtggcctccattgatgctacctatgccaagcagtatgaggagttctacgtaggactggaaggcrgctttggctccaagcacgtctccccgcggactcttacctcctgcttcctcagctgtgtggtctgtgtggagggcattgtcactaaatgttctctagttcg

SEQ ID NO: 61378 - DNA, 201 bp, Homo sapiens
ataccggctgattgtcaatgtgaatgacctgcgcaggaaaaacgagaagagggctaaccggcttctgaacaatgcctttgaggagctggttgccttccagmgggccttaaaggattttgtggcctccattgatgctacctatgccaagcagtatgaggagttctacgtaggactggaaggcagctttggctccaagcacgt

SEQ ID NO: 61379 - DNA, 201 bp, Homo sapiens
gagaacatgacgctggtagaggccatccagacggtgcaggcccaccgcaatatctgccctaactcaggcttcctccggcagctccaggttctggacaaccractggggcgggagacggggcggttctgatctggcaggcagccaggatccctgacccttggcccaaccccaccagcctggccctgggaacagcaggctctg

SEQ ID NO: 61380 - DNA, 201 bp, Homo sapiens
tgccacacttgtcctggccttcctcatgatctgtgagaacatgacgctggtagaggccatccagacggtgcaggcccaccgcaatatctgccctaactcargcttcctccggcagctccaggttctggacaaccgactggggcgggagacggggcggttctgatctggcaggcagccaggatccctgacccttggcccaac

SEQ ID NO: 61381 - DNA, 169 bp, Homo sapiens
tgggcgggctggcccatggctgagacctctctcccagagctggggggagaggacaaagccacgccttgycccagcatcctggagctggaggagctcctgcgggcagggaagtcttcttgcagccgtgtggacgaagtttggcccaaccttttcataggagatgcaaaca

SEQ ID NO: 61382 - DNA, 201 bp, Homo sapiens
cagggaagtcttcttgcagccgtgtggacgaagtttggcccaaccttttcataggagatgcaaacagcatcaagtgtgcggagacaggcggctgaaagccrgcagcacgaactgcccgtcagagaagtgcacagcctgggccagatactcccacaggatggactcactgcagaagcaggacctccggaggcccaagatcca

SEQ ID NO: 61383 - DNA, 201 bp, Homo sapiens
agctgggaatcacccacgttgtgaatgccgctgcaggcaagttccaggtggacacaggtgccaaattctaccgtggaatgtccctggagtactatggcatygaggcggacgacaaccccttcttcgacctcagtgtctactttctgcctgttgctcgatacatccgagctgccctcagtgttccccaaggccgcgtgctgg

SEQ ID NO: 61384 - DNA, 201 bp, Homo sapiens
atccgagctgccctcagtgttccccaaggccgcgtgctggtacactgtgccatgggggtaagccgctctgccacacttgtcctggccttcctcatgatctrtgagaacatgacgctggtagaggccatccagacggtgcaggcccaccgcaatatctgccctaactcaggcttcctccggcagctccaggttctggacaac

SEQ ID NO: 61385 - DNA, 112 bp, Homo sapiens
tgggcgggctggcccatggctgagacctctctcccagagctggggggagaggacaaagccacgccttgccccagcatcctggagctggaggagctcctgcgggcagggaagt

SEQ ID NO: 61386 - DNA, 102 bp, Homo sapiens
trggcgggctggcccatggctgagacctctctcccagagctggggggagaggacaaagccacgccttgccccagcatcctggagctggaggagctcctgcgg

SEQ ID NO: 61387 - DNA, 201 bp, Homo sapiens
ggaatcacccacgttgtgaatgccgctgcaggcaagttccaggtggacacaggtgccaaattctaccgtggaatgtccctggagtactatggcatcgaggyggacgacaaccccttcttcgacctcagtgtctactttctgcctgttgctcgatacatccgagctgccctcagtgttccccaaggccgcgtgctggtacac

SEQ ID NO: 61388 - DNA, 201 bp, Homo sapiens
ccacactgaaccatatcgatgaggtctggcccagcctcttcctgggagatgcgtacgcagcccgggacaagagcaagctgatccagctgggaatcacccaygttgtgaatgccgctgcaggcaagttccaggtggacacaggtgccaaattctaccgtggaatgtccctggagtactatggcatcgaggcggacgacaacc

SEQ ID NO: 61389 - DNA, 201 bp, Homo sapiens
tcacccacgttgtgaatgccgctgcaggcaagttccaggtggacacaggtgccaaattctaccgtggaatgtccctggagtactatggcatcgaggcggaygacaaccccttcttcgacctcagtgtctactttctgcctgttgctcgatacatccgagctgccctcagtgttccccaaggccgcgtgctggtacactgtg

SEQ ID NO: 61390 - DNA, 201 bp, Homo sapiens
tgagaacatgacgctggtagaggccatccagacggtgcaggcccaccgcaatatctgccctaactcaggcttcctccggcagctccaggttctggacaacsgactggggcgggagacggggcggttctgatctggcaggcagccaggatccctgacccttggcccaaccccaccagcctggccctgggaacagcaggctct

SEQ ID NO: 61391 - DNA, 133 bp, Homo sapiens
gtgaccacagaggcagaggggtgggcgggctggcccatggctgagacctctctcccagagctggggggagaggacaaagccacgccttgccccagcatcctggagctggaggagctcctgcgggcagggaagt

SEQ ID NO: 61392 - DNA, 123 bp, Homo sapiens
gtgaccacagaggcagaggggtrggcgggctggcccatggctgagacctctctcccagagctggggggagaggacaaagccacgccttgccccagcatcctggagctggaggagctcctgcgg

SEQ ID NO: 61393 - DNA, 190 bp, Homo sapiens
gtgaccacagaggcagaggggtgggcgggctggcccatggctgagacctctctcccagagctggggggagaggacaaagccacgccttgycccagcatcctggagctggaggagctcctgcgggcagggaagtcttcttgcagccgtgtggacgaagtttggcccaaccttttcataggagatgcggcca

SEQ ID NO: 61394 - DNA, 133 bp, Homo sapiens; identical to SEQ ID NO: 61391

SEQ ID NO: 61395 - DNA, 123 bp, Homo sapiens; identical to SEQ ID NO: 61392

SEQ ID NO: 61396 - DNA, 190 bp, Homo sapiens; identical to SEQ ID NO: 61393

SEQ ID NO: 61397 - DNA, 201 bp, Homo sapiens; identical to SEQ ID NO: 61379

SEQ ID NO: 61398 - DNA, 201 bp, Homo sapiens; identical to SEQ ID NO: 61380

SEQ ID NO: 61399 - DNA, 201 bp, Homo sapiens; identical to SEQ ID NO: 61384

SEQ ID NO: 61400 - DNA, 201 bp, Homo sapiens; identical to SEQ ID NO: 61383

SEQ ID NO: 61401 - DNA, 201 bp, Homo sapiens; identical to SEQ ID NO: 61387

SEQ ID NO: 61402 - DNA, 201 bp, Homo sapiens; identical to SEQ ID NO: 61388

SEQ ID NO: 61403 - DNA, 201 bp, Homo sapiens; identical to SEQ ID NO: 61389

SEQ ID NO: 61404 - DNA, 201 bp, Homo sapiens; identical to SEQ ID NO: 61390

SEQ ID NO: 61405 - DNA, 201 bp, Homo sapiens; identical to SEQ ID NO: 61379

SEQ ID NO: 61406 - DNA, 201 bp, Homo sapiens; identical to SEQ ID NO: 61380

SEQ ID NO: 61407 - DNA, 169 bp, Homo sapiens
tgggcgggctggcccatggctgagacctctctcccagagctggggggagaggacaaagccacgccttgycccagcatcctggagctggaggagctcctgcgggcagggaagtcttcttgcagccgtgtggacgaagtttggcccaaccttttcataggagatgcagctg

SEQ ID NO: 61408 - DNA, 201 bp, Homo sapiens
ctccatctggctcctcctggcgcctacaccccctctcagccactgtcttcagtctccacagaaacagcatcaagtgtgcggagacaggcggctgaaagccrgcagcacgaactgcccgtcagagaagtgcacagcctgggccagatactcccacaggatggactcactgcagaagcaggacctccggaggcccaagatcca

SEQ ID NO: 61409 - DNA, 201 bp, Homo sapiens; identical to SEQ ID NO: 61383

SEQ ID NO: 61410 - DNA, 201 bp, Homo sapiens; identical to SEQ ID NO: 61384

SEQ ID NO: 61411 - DNA, 112 bp, Homo sapiens; identical to SEQ ID NO: 61385

SEQ ID NO: 61412 - DNA, 102 bp, Homo sapiens; identical to SEQ ID NO: 61386

SEQ ID NO: 61413 - DNA, 201 bp, Homo sapiens; identical to SEQ ID NO: 61387

SEQ ID NO: 61414 - DNA, 201 bp, Homo sapiens; identical to SEQ ID NO: 61388

SEQ ID NO: 61415 - DNA, 201 bp, Homo sapiens; identical to SEQ ID NO: 61389

SEQ ID NO: 61416 - DNA, 201 bp, Homo sapiens; identical to SEQ ID NO: 61390

SEQ ID NO: 61417 - DNA, 201 bp, Homo sapiens
tattttcatcctccttgtggttgcttttcttgtttctcttccattgtacatgtgggttatataccatatgttaaatatgcaataaagtgtttacaggatgyccttctgaagggtagtcctttgtaaagctgtacagactttgcagtttaagcacaatgtgcacatgttagttttatatacagcaaaacttgattttttgca

SEQ ID NO: 61418 - DNA, 201 bp, Homo sapiens
ttccagtgacaaagcaatccagtttccacggcgttcgagtagtggcttcagagtggatgggtttgaaaaaagagcagcagcatctgagagtaacaactatrtgaaccacgtggccaaacaacagtctgaggaagcattccctcaggaacagcagaaagcaccccctgttgttgggggcttcaatagcaatgtgggaagtaa

SEQ ID NO: 61419 - DNA, 201 bp, Homo sapiens
gtaaatatgtacttgtagcctggatagcagactgtgttcaactttttaaaaagatgtttcctttctatagattaatttcttgggagcaaatgagtatttgytgcatttgttcaatttgttgtatatggtgaatatttaattatggttttcttgaaacgtgtaaattaaaaacacaatcagtgttcaggcttcagttatata

SEQ ID NO: 61420 - DNA, 201 bp, Homo sapiens
cggactttaaaaaaaataatgtgctgtaacacagtaaatatgtacttgtagcctggatagcagactgtgttcaactttttaaaaagatgtttcctttctawagattaatttcttgggagcaaatgagtatttgttgcatttgttcaatttgttgtatatggtgaatatttaattatggttttcttgaaacgtgtaaattaa

SEQ ID NO: 61421 - DNA, 201 bp, Homo sapiens
gatgggtttgaaaaaagagcagcagcatctgagagtaacaactatatgaaccacgtggccaaacaacagtctgaggaagcattccctcaggaacagcagaragcaccccctgttgttgggggcttcaatagcaatgtgggaagtaaggtgttagggctcaaatatgaagaaattgactgtctcataaatgatgaacacaca

SEQ ID NO: 61422 - DNA, 201 bp, Homo sapiens
ttcagagcccccatacaatgggcagtgtctgctatagggcttcaggcattaaataaaaccgagggttgttgattttgctgtgacagtacactaaatcaatrctatatcttatacagtttgaaaatatgataccctacactttcaggggaccgagtctgacaaacacaatacatttatctgtgacctatatcaagtacacat

SEQ ID NO: 61423 - DNA, 201 bp, Homo sapiens
tcacttcatgcttggcatcgctcctaacctggctcgctgggactatcataccacccacatcaatcagttgcagctactcagtaccattgatgagtccccartcttcaaagaatttgtcaagaggtggaaaagctaccttaaaggcagcagggcaaagcacaactagagctcacaaccaaaactgcacttcagcctctgctg

SEQ ID NO: 61424 - DNA, 201 bp, Homo sapiens
tttctacattagtcagggcctatctgttaacaaaagaccatatattcctcaattcagctttaagggcaacagccccttataagtttctatctgagcagcayggagttaaagctgtgtttatgaataaacatgactggtatgaagaatatccaaccacacctagctcttttgttttaaatggctttatgtattctttaattg

SEQ ID NO: 61425 - DNA, 201 bp, Homo sapiens
tcccaattgatgtgaccacactcttcttaattttgttcacagtaaaaacacttttttgagttattaggcttacccctagcttttgacctttgcatttcatrtatgttagatgtctcagcaagaatatctggtctcccctaatttttattcccagtgccgatgttcaaaataaactttctccagtctgggaaccttttttac

SEQ ID NO: 61426 - DNA, 201 bp, Homo sapiens
gtgcctgcttgaatttcttgaaactgtgcaaaataaaatattacaattattgccttattcacaatgtacagagggattttatcatacaaactggcgatcckacagggactggccgtggaggagagtctatctttggccaactgtatggtgatcaagcaagcttttttgaggcagaaaaagtcccaagaattaagcacaaga

SEQ ID NO: 61427 - DNA, 201 bp, Homo sapiens
acccagtgaccacagatgaggatctggaaataatattctctagatttgggccaataagaagttgtgaagttatccgagactggaagacaggagagtccctstgttacgcttttattgaatttgaaaaggaagaagattgtgagaaagcattcttcaaaatggacaatgtgcttatagatgacagaagaatacatgtggatt

SEQ ID NO: 61428 - DNA, 201 bp, Homo sapiens; identical to SEQ ID NO: 61426

SEQ ID NO: 61429 - DNA, 201 bp, Homo sapiens; identical to SEQ ID NO: 61427

SEQ ID NO: 61430 - DNA, 103 bp, Homo sapiens
atraatgatggatagctctctgaagcatgttagggatttgggctcagtccaaaagacagtggaaagccattgaaggctattattattaatttattttatttta

SEQ ID NO: 61431 - DNA, 201 bp, Homo sapiens
agtgctgggattacaggcgtacacaccatcacacccagctaatttttgtgtttttagtagaaacagtgtcaaccttgttggccaggctggtttggtactcytggcctcaagtgatctgcccgccttggcctcccagagtgctgggattactggcatgagccaccatgcatagccaccattgaagggttttaagcagaggag

SEQ ID NO: 61432 - DNA, 201 bp, Homo sapiens
ccacttgctactctagctaggaagatctgcctcccttagctgaagtctaagatgtgtagcttattgatgcctctcctcttcttgttctgctgttgctgaakataatggggatgccagggcagacataccattcaacttgaatcttccttacccactttgtatagtcttacatgtcattgataccttgttttctggtacgcc

SEQ ID NO: 61433 - DNA, 201 bp, Homo sapiens
gaatggctgccgttttttcaaagcaatatgaatttgatgagtttgttttatgccattaggtggcgccagaggtcagaacatgtctattttgaattggatcrttacaaatgagcatatttgatgcggaaatttctgggagaaaaaaaattgaggaaataaagttaaaaaattgacattcattgagccaaaagagatgtggag

SEQ ID NO: 61434 - DNA, 201 bp, Homo sapiens
gtgggttattcacgttgagaatgttatttgaagaatgcctgtgaagccaggtgtgggttctactcagtgccatagatagactgagtcttctctcgtaggtyaccattacatagtaattttgattctgaatttcacattaaattatttgagtttatacagacctaaattttaaaatctgtacatatattattttgatgtatt

SEQ ID NO: 61435 - DNA, 201 bp, Homo sapiens
gccagttttttgtatttttagtagaaacagggtgttaccatgttggccaggctggtctctaactctgggtctgaagtgatccacccgccttggccttccaragtgctgggattacaggcgtacacaccatcacacccagctaatttttgtgtttttagtagaaacagtgtcaaccttgttggccaggctggtttggtactc

SEQ ID NO: 61436 - DNA, 201 bp, Homo sapiens
taaaaattcaattatccgattgtatttaacatctttaagagcatgatcataaagagctatttttgacaccccccccccacttttttaacatttagagttartaagggttttatatctcttctgtccatattgttttcaaaggaatgaggtgtttaggtggctggaaaagcatttgtaggaagttagatttgaatatagaca

SEQ ID NO: 61437 - DNA, 201 bp, Homo sapiens
tcattggatatgaggccatggagcagtgtctggctaggtggatggatgttggtgctgtttagttaaataggaaactggaagagaagcaggcttgcaagaakggtaatattttggacgtgtaacttgtctggcaagatgttgaagaggtaaaggaggcagcacagcatcatgggccttggaggcagaagccgctttgattta

SEQ ID NO: 61438 - DNA, 201 bp, Homo sapiens
ctcctcttcttgttctgctgttgctgaatataatggggatgccagggcagacataccattcaacttgaatcttccttacccactttgtatagtcttacatrtcattgataccttgttttctggtacgcctaaaaggagtagaacttcaagtggtatttaaaagctttaagaaaagtcaaatttttacttttttcttcccat

SEQ ID NO: 61439 - DNA, 201 bp, Homo sapiens
gaaacagggtgttaccatgttggccaggctggtctctaactctgggtctgaagtgatccacccgccttggccttccagagtgctgggattacaggcgtacrcaccatcacacccagctaatttttgtgtttttagtagaaacagtgtcaaccttgttggccaggctggtttggtactcctggcctcaagtgatctgcccgc

SEQ ID NO: 61440 - DNA, 103 bp, Homo sapiens; identical to SEQ ID NO: 61430

SEQ ID NO: 61441 - DNA, 201 bp, Homo sapiens; identical to SEQ ID NO: 61431

SEQ ID NO: 61442 - DNA, 201 bp, Homo sapiens; identical to SEQ ID NO: 61432

SEQ ID NO: 61443 - DNA, 201 bp, Homo sapiens; identical to SEQ ID NO: 61434

SEQ ID NO: 61444 - DNA, 201 bp, Homo sapiens; identical to SEQ ID NO: 61435

SEQ ID NO: 61445 - DNA, 201 bp, Homo sapiens; identical to SEQ ID NO: 61436

SEQ ID NO: 61446 - DNA, 201 bp, Homo sapiens; identical to SEQ ID NO: 61437

SEQ ID NO: 61447 - DNA, 201 bp, Homo sapiens; identical to SEQ ID NO: 61438

SEQ ID NO: 61448 - DNA, 201 bp, Homo sapiens; identical to SEQ ID NO: 61439

SEQ ID NO: 61449 - DNA, 201 bp, Homo sapiens
ctgtccatattgcgttgagaatgttatttgaagaatgcctgtgaagccaggtgtgggttctactcagtgccatagatagactgagtcttctctcgtaggtyaccattacatagtaattttgattctgaatttcacattaaattatttgagtttatacagacctaaattttaaaatctgtacatatattattttgatgtatt

SEQ ID NO: 61450 - DNA, 201 bp, Homo sapiens
taaaaattcaattatccgattgtatttaacatctttaagagcatgatcataaagagctatttttgacaccccccccccacttttttaacatttagagttartaagggttttatatctcttctgtccatattgcgttgagaatgttatttgaagaatgcctgtgaagccaggtgtgggttctactcagtgccatagatagac

SEQ ID NO: 61451 - DNA, 201 bp, Homo sapiens; identical to SEQ ID NO: 61433

SEQ ID NO: 61452 - DNA, 103 bp, Homo sapiens; identical to SEQ ID NO: 61430

SEQ ID NO: 61453 - DNA, 201 bp, Homo sapiens; identical to SEQ ID NO: 61431

SEQ ID NO: 61454 - DNA, 201 bp, Homo sapiens; identical to SEQ ID NO: 61432

SEQ ID NO: 61455 - DNA, 201 bp, Homo sapiens; identical to SEQ ID NO: 61449

SEQ ID NO: 61456 - DNA, 201 bp, Homo sapiens; identical to SEQ ID NO: 61435

SEQ ID NO: 61457 - DNA, 201 bp, Homo sapiens; identical to SEQ ID NO: 61450

SEQ ID NO: 61458 - DNA, 201 bp, Homo sapiens; identical to SEQ ID NO: 61437

SEQ ID NO: 61459 - DNA, 201 bp, Homo sapiens; identical to SEQ ID NO: 61438

SEQ ID NO: 61460 - DNA, 201 bp, Homo sapiens; identical to SEQ ID NO: 61439

SEQ ID NO: 61461 - DNA, 201 bp, Homo sapiens; identical to SEQ ID NO: 61434

SEQ ID NO: 61462 - DNA, 201 bp, Homo sapiens; identical to SEQ ID NO: 61436

SEQ ID NO: 61463 - DNA, 201 bp, Homo sapiens; identical to SEQ ID NO: 61433

SEQ ID NO: 61464 - DNA, 201 bp, Homo sapiens
cgggacggagactcattctgtcgcccaggctggagtgcattggcgcgatctccgctcactgccaacctcagcctccggagttcaagcgattctcctgcctyggcctccggagtagctgggactacaagcgtgggccaccacgccccattaatttttgtatttttggtagagacagggtatcaccatgttggccagggtggt

SEQ ID NO: 61465 - DNA, 201 bp, Homo sapiens
cttgccatacttcattaaatgggccagatataatttttttatcatcttatatcctgttggagttgctggtgaacttcttacaatatacgctgccttgccgyatgtgaagaaaacaggaatgttttcaataagacttcctaacaaatacaatgtctcttttgactactattattttcttcttataaccatggcatcatatat

SEQ ID NO: 61466 - DNA, 201 bp, Homo sapiens
acttgccatacttcattaaatgggccagatataatttttttatcatcttatatcctgttggagttgctggtgaacttcttacaatatacgctgccttgccrcatgtgaagaaaacaggaatgttttcaataagacttcctaacaaatacaatgtctcttttgactactattattttcttcttataaccatggcatcatata

SEQ ID NO: 61467 - DNA, 201 bp, Homo sapiens
caacggtttcgctctttggaaaatacggcatgtttcgccaagggatgcatgacttgaaagtctggcctaatgtagaagcagatggatcagaacccacaaawactcctggcagaacaagtagcactctctcagaagatcagatgagccgtcttgccaagctcaccaaagctcatcgacaaggacacatggtgaaagtagatt

SEQ ID NO: 61468 - DNA, 107 bp, Homo sapiens
tccgtgytgtggggctcagctggttcatttatgttgtttttcctgtacctaagttcccgctgtaggtggtacctttgcagacggtgcgatgggggaagcagagaagt

SEQ ID NO: 61469 - DNA, 201 bp, Homo sapiens
tttgctgcagtggtggaacagattcacaagtttgcccagtactggagaaaatgaaactgggattgacccatcaagatgcttggctcaataagaaaaccackttaggagcaacctttgtatattggagacttcagagtaaccagcaaggaagagaaatcttaatcttcaagttaccatattttccaaatattacatggtacc

SEQ ID NO: 61470 - DNA, 201 bp, Homo sapiens
gctgtcctggaagacccaatgttgaagttctcaggactatatcaagagacatgctctgatctttatgttacttgtcaagtttttgcagaagggaagccttyggccttgccagtgagaacatcctacaaagcatttagtacaagatggaactggaatgaatggctgaaactaccagtaaaataccctgacctgcccaggaat

SEQ ID NO: 61471 - DNA, 201 bp, Homo sapiens
tgattgatgagagtgtccatgctctttttgctgcagtggtggaacagattcacaagtttgcccagtactggagaaaatgaaactgggattgacccatcaakatgcttggctcaataagaaaaccacgttaggagcaacctttgtatattggagacttcagagtaaccagcaaggaagagaaatcttaatcttcaagttacc

SEQ ID NO: 61472 - DNA, 201 bp, Homo sapiens
aagaaaaagccttgacaaaattcttgaaatgtgttaattgggatctacctcaagaggccaaacaggccttggaacttctgggaaaatggaagccgatggaygtagaggactccttggagctgttatcctctcattacaccaacccaactgtgaggcgttatgctgttgcccggttgcgacaggccgatgatgaggatttgt

SEQ ID NO: 61473 - DNA, 201 bp, Homo sapiens
gtacctaagttcccgctgtaggtggtacctttgcagacggtgcgatgggggaagcagagaagtttcactacatctatagttgtgacctggatatcaacgtycagcttaagataggaagcttggaagggaagagagaacaaaagagttataaagctgtcctggaagacccaatgttgaagttctcaggactatatcaagaga

SEQ ID NO: 61474 - DNA, 201 bp, Homo sapiens
tgggcttcaacctgactttccacctttcctacaaattccgattactgttgctgttgactttgtgcctgacagtggttgggtgggccaccagtaactacttygtgggtgccattcaagagattcctaaagcaaaggagttcatggctaatttccataagaccctcattttggggaagggaaaaactctgactaatgaagcat

SEQ ID NO: 61475 - DNA, 201 bp, Homo sapiens
cggtccccgagctgctttccgcgttctcccctctccgcgggcagtgctagctcgccgcggccgcctccggggaccacctggcttcatgtgtggatttccayggctcttgcccagaggcgggtacactgtgttccaatgtgccacggaactcacgcagtggcactttgtggcttcatgaaggaagaggcaggccacgcaaca

SEQ ID NO: 61476 - DNA, 201 bp, Homo sapiens
agatgggttgagtagttgttcttataaattagtatctgtggaacacaatcctttatatatcaacatcacagtggatttctggtttggtgcatgaccctggrtcttttggtgatgtttggaagaactgattctttgtttgcaataattttggcctagagacttcaaatagtagcacacattaagaacctgttacagctcatt

SEQ ID NO: 61477 - DNA, 201 bp, Homo sapiens
agacagctttcttagtcattttgatcatgagggttaaatattgtaatatggatacttgaaggactttatataaaaggatgactcaaaggataaaatgaacrctatttgaggactctggttgaaggagatttatttaaatttgaagtaatatattatgggataaaaggccacaggaaataagactgctgaatgtctgagaga

SEQ ID NO: 61478 - DNA, 201 bp, Homo sapiens
tggtgtcaggtgagaaggcgtccacaaaagaggggagaaaaggcgacgaatcaggacacagtgaacttgggaatgaagaggtagcaggagggtggagtgtyggctgcaaaggcagcagtagctgagctggttgcagctgctgatagccttcaggggaggacctgcccaggtatgccttccagtgatgcccaccagagaata

SEQ ID NO: 61479 - DNA, 201 bp, Homo sapiens
aactactgagaaaaaccaggcattgtatcttcagttgtcatcaagttcgcaatcagattggaaaagctcaacttgaagctttcttgcctgcagtgaagcakagagatagatattattcacgtaataaaaaacatgggcttcaacctgactttccacctttcctacaaattccgattactgttgctgttgactttgtgcctg

SEQ ID NO: 61480 - DNA, 201 bp, Homo sapiens
tcattttgatcatgagggttaaatattgtaatatggatacttgaaggactttatataaaaggatgactcaaaggataaaatgaacgctatttgaggactcyggttgaaggagatttatttaaatttgaagtaatatattatgggataaaaggccacaggaaataagactgctgaatgtctgagagaaccagagttgttctc

SEQ ID NO: 61481 - DNA, 201 bp, Homo sapiens
aggtacgaagatacaatactgttattcatttatcctgtacaatcatctgtgaagtggtggtgtcaggtgagaaggcgtccacaaaagaggggagaaaaggygacgaatcaggacacagtgaacttgggaatgaagaggtagcaggagggtggagtgtcggctgcaaaggcagcagtagctgagctggttgcagctgctgat

SEQ ID NO: 61482 - DNA, 201 bp, Homo sapiens
gcaaaggcagcagtagctgagctggttgcagctgctgatagccttcaggggaggacctgcccaggtatgccttccagtgatgcccaccagagaatacattmtctattagtttttaaagagtttttgtaaaatgattttgtacaagtaggatatgaattagcagtttacaagtttacatattaactaataataaatatgtct

SEQ ID NO: 61483 - DNA, 201 bp, Homo sapiens
tttggtgatgtttggaagaactgattctttgtttgcaataattttggcctagagacttcaaatagtagcacacattaagaacctgttacagctcattgttkagctgaatttttcctttttgtattttcttagcagagctcctggtgatgtagagtataaaacagttgtaacaagacagctttcttagtcattttgatcatg

SEQ ID NO: 61484 - DNA, 201 bp, Homo sapiens
ttacctcagaggccagagcaagctcattttcaaaccagatctcactttggaagaggtacaggcagaaaatcccaaagtgtccagaggccggtatcgccctsaggaatgtaaagctttacagagggtcgccatcctcgttccccaccggaacagagagaaacacctgatgtacctgctggaacatctgcatcccttcctgca

SEQ ID NO: 61485 - DNA, 201 bp, Homo sapiens
caaaggagttcatggctaatttccataagaccctcattttggggaagggaaaaactctgactaatgaagcatccacgaagaaggtagaacttgacaactgyccttctgtgtctccttacctcagaggccagagcaagctcattttcaaaccagatctcactttggaagaggtacaggcagaaaatcccaaagtgtccagag

SEQ ID NO: 61486 - DNA, 201 bp, Homo sapiens
gaaaaggcgacgaatcaggacacagtgaacttgggaatgaagaggtagcaggagggtggagtgtcggctgcaaaggcagcagtagctgagctggttgcagvtgctgatagccttcaggggaggacctgcccaggtatgccttccagtgatgcccaccagagaatacattctctattagtttttaaagagtttttgtaaaat

SEQ ID NO: 61487 - DNA, 201 bp, Homo sapiens; identical to SEQ ID NO: 61474

SEQ ID NO: 61488 - DNA, 130 bp, Homo sapiens
gaccacctggcttcatgtgtggatttccayggctcttgcccagaggcgggtacactgtgttccaatgtgccacggaactcacgcagtggcactttgtggcttcatgaaggaagaggcaggccacgcaaca

SEQ ID NO: 61489 - DNA, 201 bp, Homo sapiens; identical to SEQ ID NO: 61476

SEQ ID NO: 61490 - DNA, 201 bp, Homo sapiens; identical to SEQ ID NO: 61477

SEQ ID NO: 61491 - DNA, 201 bp, Homo sapiens; identical to SEQ ID NO: 61478

SEQ ID NO: 61492 - DNA, 201 bp, Homo sapiens; identical to SEQ ID NO: 61479

SEQ ID NO: 61493 - DNA, 201 bp, Homo sapiens; identical to SEQ ID NO: 61480

SEQ ID NO: 61494 - DNA, 201 bp, Homo sapiens; identical to SEQ ID NO: 61481

SEQ ID NO: 61495 - DNA, 201 bp, Homo sapiens; identical to SEQ ID NO: 61482

SEQ ID NO: 61496 - DNA, 201 bp, Homo sapiens; identical to SEQ ID NO: 61483

SEQ ID NO: 61497 - DNA, 201 bp, Homo sapiens; identical to SEQ ID NO: 61484

SEQ ID NO: 61498 - DNA, 201 bp, Homo sapiens; identical to SEQ ID NO: 61485

SEQ ID NO: 61499 - DNA, 201 bp, Homo sapiens; identical to SEQ ID NO: 61486

SEQ ID NO: 61500 - DNA, 201 bp, Homo sapiens; identical to SEQ ID NO: 61474

SEQ ID NO: 61501 - DNA, 201 bp, Homo sapiens
ccaaggagaagtatcacttttagaggcagaggagcggaaggcagtgggtgtgaccaaaagtgccatttgttaaagcttatcttccttgccagattttaaamactattatggaaaatctcaagcattcacaaaagtagagagaaagaaaggactctcagactgttggagcagaactactgagaaaaaccaggcattgtatct

SEQ ID NO: 61502 - DNA, 201 bp, Homo sapiens; identical to SEQ ID NO: 61475

SEQ ID NO: 61503 - DNA, 201 bp, Homo sapiens; identical to SEQ ID NO: 61476

SEQ ID NO: 61504 - DNA, 201 bp, Homo sapiens; identical to SEQ ID NO: 61477

SEQ ID NO: 61505 - DNA, 201 bp, Homo sapiens; identical to SEQ ID NO: 61478

SEQ ID NO: 61506 - DNA, 201 bp, Homo sapiens; identical to SEQ ID NO: 61479

SEQ ID NO: 61507 - DNA, 201 bp, Homo sapiens; identical to SEQ ID NO: 61480

SEQ ID NO: 61508 - DNA, 201 bp, Homo sapiens; identical to SEQ ID NO: 61481

SEQ ID NO: 61509 - DNA, 201 bp, Homo sapiens; identical to SEQ ID NO: 61482

SEQ ID NO: 61510 - DNA, 201 bp, Homo sapiens; identical to SEQ ID NO: 61483

SEQ ID NO: 61511 - DNA, 201 bp, Homo sapiens; identical to SEQ ID NO: 61484

SEQ ID NO: 61512 - DNA, 201 bp, Homo sapiens; identical to SEQ ID NO: 61485

SEQ ID NO: 61513 - DNA, 201 bp, Homo sapiens; identical to SEQ ID NO: 61486

SEQ ID NO: 61514 - DNA, 201 bp, Homo sapiens
cctcaatccacatcattggtgttagcctgggggcccacgttgggggcatggtgggacagctcttcggaggccagctgggacagatcacaggcctggacccygctggacctgagtacaccagggccagtgtggaagagcgcttggatgctggagatgccctcttcgtggaagccatccacacagacaccgacaatttgggta

SEQ ID NO: 61515 - DNA, 201 bp, Homo sapiens
gtgacctccaaaactctgggttcaatgccactctgggaaccaaactaattatccatggattcagggttttaggaacaaagccttcctggattgacacattyattagaacccttctgcgtgcaacgaatgctaatgtgattgccgtggactggatttatgggtctacaggagtctacttctcagctgtgaaaaatgtgatta

SEQ ID NO: 61516 - DNA, 201 bp, Homo sapiens
tttcctgcccaaggataggactggtggaacaaggtggtgtcaagatagagccgctccccaaggaagtgaaagtctacctcctgactacttccagtgctccrtactgcatgcatcacagcctcgtggagtttcacttgaaggaactgagaaacaaggacaccaacatcgaggttaccttccttagcagtaacatcacctctt

SEQ ID NO: 61517 - DNA, 197 bp, Homo sapiens
ataccagctctgagatttccagctcagcgatgcccccaggtccctgggagagctgcttctgggtggggggcctcattttgtggctcagcgttggaakttcaggggatgcacctcctaccccacagccaaagtgcgctgacttccagagcgccaacctttttgaaggcaccgatctcaaagtccagtttctcctcttt

SEQ ID NO: 61518 - DNA, 182 bp, Homo sapiens
attttacagaacttggtttcctttgccgatcttatgtacatacccattttagctttcccatgcatacttaactgcacttgctttatctccttgggcattcktacttaggattcaatagaaacatgtacagggtaaacaattttttaaaaataaaacttcatggagtatctgaatcatttaat

SEQ ID NO: 61519 - DNA, 201 bp, Homo sapiens
taaggagaaaagcaaagctctttcttattttcctcataatcagctaccctggaggggagggagaactcattttacagaacttggtttcctttgccgatctyatgtacatacccattttagctttcccatgcatacttaactgcacttgctttatctccttgggcattcgtacttaggattcaatagaaacatgtacagggt

SEQ ID NO: 61520 - DNA, 201 bp, Homo sapiens
ttattttcctcataatcagctaccctggaggggagggagaactcattttacagaacttggtttcctttgccgatcttatgtacatacccattttagctttyccatgcatacttaactgcacttgctttatctccttgggcattcgtacttaggattcaatagaaacatgtacagggtaaacaattttttaaaaataaaact

SEQ ID NO: 61521 - DNA, 201 bp, Homo sapiens
gcaggttatagttatctgatctgtgatcacatgagggctgtgcacctctacatcagcgccctggagaattcctgtccactgatggcctttccctgtgccarctacaaggccttccttgctggacgctgtctggattgctttaacccttttctgctttcctgcccaaggataggactggtggaacaaggtggtgtcaagata

SEQ ID NO: 61522 - DNA, 201 bp, Homo sapiens
gggttcaatgccactctgggaaccaaactaattatccatggattcagggttttaggaacaaagccttcctggattgacacatttattagaacccttctgcrtgcaacgaatgctaatgtgattgccgtggactggatttatgggtctacaggagtctacttctcagctgtgaaaaatgtgattaagttgagcctcgagatc

SEQ ID NO: 61523 - DNA, 201 bp, Homo sapiens
gtgttagcctgggggcccacgttgggggcatggtgggacagctcttcggaggccagctgggacagatcacaggcctggaccccgctggacctgagtacacsagggccagtgtggaagagcgcttggatgctggagatgccctcttcgtggaagccatccacacagacaccgacaatttgggtattcggattcccgttggac

SEQ ID NO: 61524 - DNA, 201 bp, Homo sapiens
aagaagaagctctacgaggagattgaccagaatgtgggtttcagccgcacaccaactatcagtgaccgtaaccgtctcctcctgctggaggccaccatccragaggtgcttcgcctcaggcccgtggcccctatgctcatcccccacaaggccaacgttgactccagcatcggtgagtttgctgtggacaagggcacagaa

SEQ ID NO: 61525 - DNA, 201 bp, Homo sapiens
caacggacagtccatagacatctcctttcctgtcttcgtggcggtaaccaatgtcatctccttgatctgcttcaatacctcctacaagaatggggaccctkagttgaatgtcatacagaattacaatgaaggcatcatagacaacctgagcaaagacagcctggtggacctagtcccctggttgaagattttccccaacaa

SEQ ID NO: 61526 - DNA, 201 bp, Homo sapiens
ctctgtggttaaatggaccctggccttcctgctgcacaatcctcaggtgaagaagaagctctacgaggagattgaccagaatgtgggtttcagccgcacamcaactatcagtgaccgtaaccgtctcctcctgctggaggccaccatccgagaggtgcttcgcctcaggcccgtggcccctatgctcatcccccacaaggc

SEQ ID NO: 61527 - DNA, 201 bp, Homo sapiens
accgtcagtaagctatttgcccttcggagcaggacctcgctcctgtataggtgagatcctggcccgccaggagctcttcctcatcatggcctggctgctgyagaggttcgacctggaggtgccagatgatgggcagctgccctccctggaaggcatccccaaggtggtctttctgatcgactctttcaaagtgaagatcaa

SEQ ID NO: 61528 - DNA, 201 bp, Homo sapiens
acaaggagaaattccggagtgactctatcaccaacatgctggacacactgatgcaagccaagatgaactcagataatggcaatgctggcccagatcaagaytcagagctgctttcagataaccacattctcaccaccataggggacatctttggggctggcgtggagaccaccacctctgtggttaaatggaccctggcct

SEQ ID NO: 61529 - DNA, 201 bp, Homo sapiens
ttcgacctggaggtgccagatgatgggcagctgccctccctggaaggcatccccaaggtggtctttctgatcgactctttcaaagtgaagatcaaggtgcrccaggcctggagggaagcccaggctgagggtagcacctaaaggctgtaactcacagcccctgtccaccctatgtggccccacaacacagatttagagata

SEQ ID NO: 61530 - DNA, 201 bp, Homo sapiens
gaagatcatttgtcaggaaatcagtacattgtgtgatatgctggccacccacaacggacagtccatagacatctcctttcctgtcttcgtggcggtaaccratgtcatctccttgatctgcttcaatacctcctacaagaatggggaccctgagttgaatgtcatacagaattacaatgaaggcatcatagacaacctgag

SEQ ID NO: 61531 - DNA, 201 bp, Homo sapiens
tatggccccatctattcggttcgtatgggcaccaagactacagtgattgtcggccaccaccagctggccaaggaggtgcttattaagaagggcaaggactkctctgggcggcctcaaatggcaactctagacatcgcgtccaacaaccgtaagggtatcgccttcgctgactctggcgcacactggcagctgcatcgaagg

SEQ ID NO: 61532 - DNA, 201 bp, Homo sapiens
catctattcggttcgtatgggcaccaagactacagtgattgtcggccaccaccagctggccaaggaggtgcttattaagaagggcaaggacttctctgggyggcctcaaatggcaactctagacatcgcgtccaacaaccgtaagggtatcgccttcgctgactctggcgcacactggcagctgcatcgaaggctggcgat

SEQ ID NO: 61533 - DNA, 201 bp, Homo sapiens
tacagtgattgtcggccaccaccagctggccaaggaggtgcttattaagaagggcaaggacttctctgggcggcctcaaatggcaactctagacatcgcgyccaacaaccgtaagggtatcgccttcgctgactctggcgcacactggcagctgcatcgaaggctggcgatggccacctttgccctgttcaaggatggcga

SEQ ID NO: 61534 - DNA, 201 bp, Homo sapiens
cgcacaccaactatcagtgaccgtaaccgtctcctcctgctggaggccaccatccgagaggtgcttcgcctcaggcccgtggcccctatgctcatcccccwcaaggccaacgttgactccagcatcggtgagtttgctgtggacaagggcacagaagttatcatcaatctgtgggcgctgcatcacaatgagaaggagtgg

SEQ ID NO: 61535 - DNA, 201 bp, Homo sapiens
aacgttgactccagcatcggtgagtttgctgtggacaagggcacagaagttatcatcaatctgtgggcgctgcatcacaatgagaaggagtggcaccagcsggatcagttcatgcctgagcgtttcttgaatccagcggggacccagctcatctcaccgtcagtaagctatttgcccttcggagcaggacctcgctcctgt

SEQ ID NO: 61536 - DNA, 201 bp, Homo sapiens
tgagtttgctgtggacaagggcacagaagttatcatcaatctgtgggcgctgcatcacaatgagaaggagtggcaccagccggatcagttcatgcctgagygtttcttgaatccagcggggacccagctcatctcaccgtcagtaagctatttgcccttcggagcaggacctcgctcctgtataggtgagatcctggcccg

SEQ ID NO: 61537 - DNA, 201 bp, Homo sapiens
tttgctgtggacaagggcacagaagttatcatcaatctgtgggcgctgcatcacaatgagaaggagtggcaccagccggatcagttcatgcctgagcgttkcttgaatccagcggggacccagctcatctcaccgtcagtaagctatttgcccttcggagcaggacctcgctcctgtataggtgagatcctggcccgccag

SEQ ID NO: 61538 - DNA, 201 bp, Homo sapiens
ctcctgtccctgcccctggtgggcagcctgccattcctccccagacacggccatatgcataacaacttcttcaagctgcagaaaaaatatggccccatctmttcggttcgtatgggcaccaagactacagtgattgtcggccaccaccagctggccaaggaggtgcttattaagaagggcaaggacttctctgggcggcct

SEQ ID NO: 61539 - DNA, 201 bp, Homo sapiens
gttcgacctggaggtgccagatgatgggcagctgccctccctggaaggcatccccaaggtggtctttctgatcgactctttcaaagtgaagatcaaggtgygccaggcctggagggaagcccaggctgagggtagcacctaaaggctgtaactcacagcccctgtccaccctatgtggccccacaacacagatttagagat

SEQ ID NO: 61540 - DNA, 201 bp, Homo sapiens
atctgtgggcgctgcatcacaatgagaaggagtggcaccagccggatcagttcatgcctgagcgtttcttgaatccagcggggacccagctcatctcaccrtcagtaagctatttgcccttcggagcaggacctcgctcctgtataggtgagatcctggcccgccaggagctcttcctcatcatggcctggctgctgcaga

SEQ ID NO: 61541 - DNA, 201 bp, Homo sapiens
tccacaaggcaagagataacacaaagtcaaggtgaagatcagggtagccctttaaaaggcctccttgtgccctagagttgccacagctcttctactccacygctgtctatcttgcctgccggcacccagccaccatgtgggagctcgtggctctcttgctgcttaccctagcttatttgttttggcccaagagaaggtgcc

SEQ ID NO: 61542 - DNA, 201 bp, Homo sapiens
tgtccctgcccctggtgggcagcctgccattcctccccagacacggccatatgcataacaacttcttcaagctgcagaaaaaatatggccccatctattckgttcgtatgggcaccaagactacagtgattgtcggccaccaccagctggccaaggaggtgcttattaagaagggcaaggacttctctgggcggcctcaaa

SEQ ID NO: 61543 - DNA, 201 bp, Homo sapiens
cttatttgttttggcccaagagaaggtgccctggtgccaagtaccccaagagcctcctgtccctgcccctggtgggcagcctgccattcctccccagacayggccatatgcataacaacttcttcaagctgcagaaaaaatatggccccatctattcggttcgtatgggcaccaagactacagtgattgtcggccaccacc

SEQ ID NO: 61544 - DNA, 201 bp, Homo sapiens
ctgctgtctatcttgcctgccggcacccagccaccatgtgggagctcgtggctctcttgctgcttaccctagcttatttgttttggcccaagagaaggtgscctggtgccaagtaccccaagagcctcctgtccctgcccctggtgggcagcctgccattcctccccagacacggccatatgcataacaacttcttcaagc

SEQ ID NO: 61545 - DNA, 201 bp, Homo sapiens
caccagccggatcagttcatgcctgagcgtttcttgaatccagcggggacccagctcatctcaccgtcagtaagctatttgcccttcggagcaggacctcrctcctgtataggtgagatcctggcccgccaggagctcttcctcatcatggcctggctgctgcagaggttcgacctggaggtgccagatgatgggcagctg

SEQ ID NO: 61546 - DNA, 201 bp, Homo sapiens
accctggccttcctgctgcacaatcctcaggtgaagaagaagctctacgaggagattgaccagaatgtgggtttcagccgcacaccaactatcagtgaccrtaaccgtctcctcctgctggaggccaccatccgagaggtgcttcgcctcaggcccgtggcccctatgctcatcccccacaaggccaacgttgactccagc

SEQ ID NO: 61547 - DNA, 201 bp, Homo sapiens
agctcttctactccactgctgtctatcttgcctgccggcacccagccaccatgtgggagctcgtggctctcttgctgcttaccctagcttatttgttttgrcccaagagaaggtgccctggtgccaagtaccccaagagcctcctgtccctgcccctggtgggcagcctgccattcctccccagacacggccatatgcata

SEQ ID NO: 61548 - DNA, 201 bp, Homo sapiens; identical to SEQ ID NO: 61524

SEQ ID NO: 61549 - DNA, 201 bp, Homo sapiens; identical to SEQ ID NO: 61525

SEQ ID NO: 61550 - DNA, 201 bp, Homo sapiens; identical to SEQ ID NO: 61526

SEQ ID NO: 61551 - DNA, 201 bp, Homo sapiens; identical to SEQ ID NO: 61527

SEQ ID NO: 61552 - DNA, 201 bp, Homo sapiens; identical to SEQ ID NO: 61528

SEQ ID NO: 61553 - DNA, 201 bp, Homo sapiens
ttcgacctggaggtgccagatgatgggcagctgccctccctggaaggcatccccaaggtggtctttctgatcgactctttcaaagtgaagatcaaggtgcrccaggcctggagggaagcccaggctgagggtagcacctaaagatacaaccccccacccttctccgccattcttccctactcccaacccactctgccttct

SEQ ID NO: 61554 - DNA, 201 bp, Homo sapiens; identical to SEQ ID NO: 61530

SEQ ID NO: 61555 - DNA, 201 bp, Homo sapiens; identical to SEQ ID NO: 61531

SEQ ID NO: 61556 - DNA, 201 bp, Homo sapiens; identical to SEQ ID NO: 61532

SEQ ID NO: 61557 - DNA, 201 bp, Homo sapiens; identical to SEQ ID NO: 61533

SEQ ID NO: 61558 - DNA, 201 bp, Homo sapiens; identical to SEQ ID NO: 61534

SEQ ID NO: 61559 - DNA, 201 bp, Homo sapiens; identical to SEQ ID NO: 61535

SEQ ID NO: 61560 - DNA, 201 bp, Homo sapiens; identical to SEQ ID NO: 61536

SEQ ID NO: 61561 - DNA, 201 bp, Homo sapiens; identical to SEQ ID NO: 61537

SEQ ID NO: 61562 - DNA, 201 bp, Homo sapiens; identical to SEQ ID NO: 61538

SEQ ID NO: 61563 - DNA, 201 bp, Homo sapiens
gttcgacctggaggtgccagatgatgggcagctgccctccctggaaggcatccccaaggtggtctttctgatcgactctttcaaagtgaagatcaaggtgygccaggcctggagggaagcccaggctgagggtagcacctaaagatacaaccccccacccttctccgccattcttccctactcccaacccactctgccttc

SEQ ID NO: 61564 - DNA, 201 bp, Homo sapiens; identical to SEQ ID NO: 61540

SEQ ID NO: 61565 - DNA, 201 bp, Homo sapiens; identical to SEQ ID NO: 61541

SEQ ID NO: 61566 - DNA, 201 bp, Homo sapiens; identical to SEQ ID NO: 61542

SEQ ID NO: 61567 - DNA, 201 bp, Homo sapiens; identical to SEQ ID NO: 61543

SEQ ID NO: 61568 - DNA, 201 bp, Homo sapiens; identical to SEQ ID NO: 61544

SEQ ID NO: 61569 - DNA, 201 bp, Homo sapiens; identical to SEQ ID NO: 61545

SEQ ID NO: 61570 - DNA, 201 bp, Homo sapiens; identical to SEQ ID NO: 61546

SEQ ID NO: 61571 - DNA, 201 bp, Homo sapiens; identical to SEQ ID NO: 61547

SEQ ID NO: 61572 - DNA, 201 bp, Homo sapiens
acacagcacgatatggataacatcctcagcctaaacaggaatctccgactggccatgttccccataactaaaaatcacaaagactatcctttccacatagratactgaggacgcttccccttccttgtttctgctcagcccagatgcacagacactattggcaatgttgaccctcctctgtcatcacagcgccagggcagc

SEQ ID NO: 61573 - DNA, 201 bp, Homo sapiens
agtgaccgaggcagtgaaagaggccattgacgcagggtaccggcacttcgactgtgcttacttttaccacaatgagagggaggttggagcagggatccgtkgcaagatcaaggaaggcgctgtaagacgggaggatctgttcattgccactaagctgtggtgcacctgccataagaagtccttggtggaaacagcatgcag

SEQ ID NO: 61574 - DNA, 201 bp, Homo sapiens
gggagatatcccagccgtgggcctcagctcctggaaggcttctccagggaaagtgaccgaggcagtgaaagaggccattgacgcagggtaccggcacttcractgtgcttacttttaccacaatgagagggaggttggagcagggatccgttgcaagatcaaggaaggcgctgtaagacgggaggatctgttcattgccac

SEQ ID NO: 61575 - DNA, 201 bp, Homo sapiens
ggagttatttaagccatctacagagctgaggaaacagtgtaatgtgtctctgccccattgcgcagctccacccattgtgccccaggccagcccgcgtcacmtacacttccttctgtgccctgccagtgacccccaggttattctaaagcagagtccttcccttcccccagtgagaaggaaaatgggataagtctgggacac

SEQ ID NO: 61576 - DNA, 201 bp, Homo sapiens
ccagggaaagtgaccgaggcagtgaaagaggccattgacgcagggtaccggcacttcgactgtgcttacttttaccacaatgagagggaggttggagcagkgatccgttgcaagatcaaggaaggcgctgtaagacgggaggatctgttcattgccactaagctgtggtgcacctgccataagaagtccttggtggaaaca

SEQ ID NO: 61577 - DNA, 201 bp, Homo sapiens
tgttccccataactaaaaatcacaaagactatcctttccacatagaatactgaggacgcttccccttccttgtttctgctcagcccagatgcacagacacyattggcaatgttgaccctcctctgtcatcacagcgccagggcagctgtgcctgggacaggagccacacagtcagagggggatgtaagagccaccttctct

SEQ ID NO: 61578 - DNA, 201 bp, Homo sapiens
aagatcaaggaaggcgctgtaagacgggaggatctgttcattgccactaagctgtggtgcacctgccataagaagtccttggtggaaacagcatgcagaargagtctcaaggccttgaagctgaactatttggacctctacctcatacactggcccatgggtttcaagcctcctcatccagaatggatcatgagctgcagt

SEQ ID NO: 61579 - DNA, 201 bp, Homo sapiens
agggggttgacctgatagacaaccctgtgatcaagaggattgcaaaggagcacggcaagtctcctgctcagattttgatccgatttcaaatccagaggaaygtgatagtgatccccggatctatcaccccaagtcacattaaagagaatatccaggtgtttgattttgaattaacacagcacgatatggataacatcctca

SEQ ID NO: 61580 - DNA, 201 bp, Homo sapiens
ggcggccggcggcggccatgggagatatcccagccgtgggcctcagctcctggaaggcttctccagggaaagtgaccgaggcagtgaaagaggccattgaygcagggtaccggcacttcgactgtgcttacttttaccacaatgagagggaggttggagcagggatccgttgcaagatcaaggaaggcgctgtaagacggg

SEQ ID NO: 61581 - DNA, 201 bp, Homo sapiens
atctatcaccccaagtcacattaaagagaatatccaggtgtttgattttgaattaacacagcacgatatggataacatcctcagcctaaacaggaatctcygactggccatgttccccataactaaaaatcacaaagactatcctttccacatagaatactgaggacgcttccccttccttgtttctgctcagcccagatg

SEQ ID NO: 61582 - DNA, 201 bp, Homo sapiens
gcgtgcggggcggcggggcggcggggcggccggcggcggccatgggagatatcccagccgtgggcctcagctcctggaaggcttctccagggaaagtgacmgaggcagtgaaagaggccattgacgcagggtaccggcacttcgactgtgcttacttttaccacaatgagagggaggttggagcagggatccgttgcaaga

SEQ ID NO: 61583 - DNA, 201 bp, Homo sapiens
gagcaacatggttattcccagtgacacggacttcctggacacgtgggaggccatggaggacctggtgatcaccgggctggtgaagaacatcggggtgtcaracttcaaccatgaacagcttgagaggcttttgaataagcctgggttgaggttcaagccactaaccaaccagattgagtgccacccatatcttactcagaa

SEQ ID NO: 61584 - DNA, 201 bp, Homo sapiens
acatcggggtgtcaaacttcaaccatgaacagcttgagaggcttttgaataagcctgggttgaggttcaagccactaaccaaccagattgagtgccacccrtatcttactcagaagaatctgatcagtttttgccaatccagagatgtgtccgtgactgcttaccgtcctcttggtggctcgtgtgagggggttgacctga

SEQ ID NO: 61585 - DNA, 120 bp, Homo sapiens
acggcgggtcgccagcgcckcagtagctcgcgcggtgcctgtcggtagtcgcgtgcggggcggcggggcggcggggcggccggcggcggccatgggagatatcccagccgtgggcctcag

SEQ ID NO: 61586 - DNA, 201 bp, Homo sapiens
aaacagtgtaatgtgtctctgccccattgcgcagctccacccattgtgccccaggccagcccgcgtcacctacacttccttctgtgccctgccagtgaccyccaggttattctaaagcagagtccttcccttcccccagtgagaaggaaaatgggataagtctgggacactgtttcagttcaataaagaggcttttttctt

SEQ ID NO: 61587 - DNA, 201 bp, Homo sapiens
gataacatcctcagcctaaacaggaatctccgactggccatgttccccataactaaaaatcacaaagactatcctttccacatagaatactgaggacgctwccccttccttgtttctgctcagcccagatgcacagacactattggcaatgttgaccctcctctgtcatcacagcgccagggcagctgtgcctgggacagg

SEQ ID NO: 61588 - DNA, 201 bp, Homo sapiens
atcctcgagtgcaggacttgcctctggacgagagcaacatggttattcccagtgacacggacttcctggacacgtgggaggccatggaggacctggtgatyaccgggctggtgaagaacatcggggtgtcaaacttcaaccatgaacagcttgagaggcttttgaataagcctgggttgaggttcaagccactaaccaacc

SEQ ID NO: 61589 - DNA, 201 bp, Homo sapiens
atatggctccttctttttaaaacagagggaagaatatacagattgaatgattggtgtctgaatagaactaaaaatcacaaagactatcctttccacatagratactgaggacgcttccccttccttgtttctgctcagcccagatgcacagacactattggcaatgttgaccctcctctgtcatcacagcgccagggcagc

SEQ ID NO: 61590 - DNA, 201 bp, Homo sapiens; identical to SEQ ID NO: 61573

SEQ ID NO: 61591 - DNA, 201 bp, Homo sapiens; identical to SEQ ID NO: 61574

SEQ ID NO: 61592 - DNA, 201 bp, Homo sapiens; identical to SEQ ID NO: 61575

SEQ ID NO: 61593 - DNA, 201 bp, Homo sapiens; identical to SEQ ID NO: 61576

SEQ ID NO: 61594 - DNA, 201 bp, Homo sapiens
gtctgaatagaactaaaaatcacaaagactatcctttccacatagaatactgaggacgcttccccttccttgtttctgctcagcccagatgcacagacacyattggcaatgttgaccctcctctgtcatcacagcgccagggcagctgtgcctgggacaggagccacacagtcagagggggatgtaagagccaccttctct

SEQ ID NO: 61595 - DNA, 201 bp, Homo sapiens
taacatcctcagcctaaacaggaatctccgactggccatgttccccatgtaaatatggctccttctttttaaaacagagggaagaatatacagattgaatkattggtgtctgaatagaactaaaaatcacaaagactatcctttccacatagaatactgaggacgcttccccttccttgtttctgctcagcccagatgcac

SEQ ID NO: 61596 - DNA, 201 bp, Homo sapiens; identical to SEQ ID NO: 61578

SEQ ID NO: 61597 - DNA, 201 bp, Homo sapiens; identical to SEQ ID NO: 61579

SEQ ID NO: 61598 - DNA, 201 bp, Homo sapiens
atctatcaccccaagtcacattaaagagaatatccaggtgtttgattttgaattaacacagcacgatatggataacatcctcagcctaaacaggaatctcygactggccatgttccccatgtaaatatggctccttctttttaaaacagagggaagaatatacagattgaatgattggtgtctgaatagaactaaaaatca

SEQ ID NO: 61599 - DNA, 201 bp, Homo sapiens; identical to SEQ ID NO: 61580

SEQ ID NO: 61600 - DNA, 201 bp, Homo sapiens; identical to SEQ ID NO: 61583

SEQ ID NO: 61601 - DNA, 201 bp, Homo sapiens; identical to SEQ ID NO: 61582

SEQ ID NO: 61602 - DNA, 201 bp, Homo sapiens; identical to SEQ ID NO: 61584

SEQ ID NO: 61603 - DNA, 120 bp, Homo sapiens; identical to SEQ ID NO: 61585

SEQ ID NO: 61604 - DNA, 201 bp, Homo sapiens; identical to SEQ ID NO: 61586

SEQ ID NO: 61605 - DNA, 201 bp, Homo sapiens
tttaaaacagagggaagaatatacagattgaatgattggtgtctgaatagaactaaaaatcacaaagactatcctttccacatagaatactgaggacgctwccccttccttgtttctgctcagcccagatgcacagacactattggcaatgttgaccctcctctgtcatcacagcgccagggcagctgtgcctgggacagg

SEQ ID NO: 61606 - DNA, 201 bp, Homo sapiens; identical to SEQ ID NO: 61588

SEQ ID NO: 61607 - DNA, 201 bp, Homo sapiens
taccctctggcctccaaggattcccacaagcagctactgcgtggggcagctgtgggcacccctgaggatgacaaataccgcctggacttgctcacccaggygggggtagacgtcgtagtcttggacttgtcccaagggaactcggtgtatcagattgccacggtgcattacatcaaacagaagtacccccacctccaggtg

SEQ ID NO: 61608 - DNA, 199 bp, Homo sapiens
ggtgattgggatgacagccgcccaggccaaaaacctgattgacgctgcggtggacgggctgcgcataggtatgggctgcggctccatctgcatcacccagraagtgatggcctgcggtgggccccagggcactgcattgtacaaggtggccgagtatgccctgtgctttggtgtgtccatcatagccgatggcggcatc

SEQ ID NO: 61609 - DNA, 201 bp, Homo sapiens
acccccacctccaggtgattgggatgacagccgcccaggccaaaaacctgattgacgctgcggtggacgggctgcgcataggtatgggctgcggctccatstgcatcacccaggaagtgatggcctgcggtgggccccagggcactgcattgtacaaggtggccgagtatgccctgtgctttggtgtgtccatcatagccg

SEQ ID NO: 61610 - DNA, 113 bp, Homo sapiens
tctgcatcacccaggaagtgatggcctgcggtgggccccagggcactgcattgtacaaggtggccgagtatgccctgtgctttggtgtgtccatcatagcmgatggcggcatc

SEQ ID NO: 61611 - DNA, 101 bp, Homo sapiens
aggaagtgatggcctgcggtgggccccagggcactgcattgtacaaggtggccgagtatgccctgtgctttggtgtgtccatcatagccgatggcggcatm

SEQ ID NO: 61612 - DNA, 201 bp, Homo sapiens
ataaggtgaagatcgcgcagggtgtcttgggctccatccaggacaaaggatccattcataagttcgtgtcctacctcatagcgggcatccagcctggctgycaggatattgggccgcagcctgtctgtccttcagtccatgatgtactcaggagaactgaattttgagaagcaaaccatgtcggcccagatcaagggtggc

SEQ ID NO: 61613 - DNA, 201 bp, Homo sapiens; identical to SEQ ID NO: 61607

SEQ ID NO: 61614 - DNA, 201 bp, Homo sapiens
ggtgattgggatgacagccgcccaggccaaaaacctgattgacgctgcggtggacgggctgcgcataggtatgggctgcggctccatctgcatcacccagraagtgatggcctgcggtgggccccagggcactgcattgtacaaggtggccgagtatgccctgtgctttggtgtgtccatcatagccgatggcggcatcta

SEQ ID NO: 61615 - DNA, 201 bp, Homo sapiens; identical to SEQ ID NO: 61609

SEQ ID NO: 61616 - DNA, 201 bp, Homo sapiens
tctgcatcacccaggaagtgatggcctgcggtgggccccagggcactgcattgtacaaggtggccgagtatgccctgtgctttggtgtgtccatcatagcmgatggcggcatctagaccgtggggcacgtggttaaggccctggcccttggagcctccacagtgatgatgggctccctgctggccaccaccacgtaggacc

SEQ ID NO: 61617 - DNA, 201 bp, Homo sapiens
aggaagtgatggcctgcggtgggccccagggcactgcattgtacaaggtggccgagtatgccctgtgctttggtgtgtccatcatagccgatggcggcatmtagaccgtggggcacgtggttaaggccctggcccttggagcctccacagtgatgatgggctccctgctggccaccaccacgtaggaccccggcgagtatt

SEQ ID NO: 61618 - DNA, 201 bp, Homo sapiens
atgctgaagcccagggatggcgtccgcctgaaggtgcagtaccgccctgaggagttcacgaaggccaagggcctgcctggtgacagcttctacatcagggycctgtacgaccggctggcagatgtggagcaagagttgagctttaagaaggacgacatcctctacgtggatgacaccttaccccagggcacgttcgggtcc

SEQ ID NO: 61619 - DNA, 201 bp, Homo sapiens
agcggctccacgaggaggaccagaaggagatcggtgacctccgtgcccagcagcagcaggtgttgaagcacaacgggtcatccgagattctcaacaaactrtatgacacggccatggacaagttggaggtggtcaagaaggactatgacgcccttcggaagaggtacagtgagaaagtcgccatccacaatgcagacctga

SEQ ID NO: 61620 - DNA, 201 bp, Homo sapiens
ggtacccactccactctccagggcagtggcaccaccaccccggagcatccatctgtcatcgacccactgatggagcaggacgaggggcctagcaccccccmagccaagcagagcagctccaggattgcgggagatgccaacaagaagaccctggagccacgcgttgtcttcatcaaaaagtcccagctggagcttggggtg

SEQ ID NO: 61621 - DNA, 201 bp, Homo sapiens
cccgctctaggagaatgctgtgctgtggatgactgcagctggccgcctgaggggacgccagactcagctcttttctagcgactgaaagtagaagtctgtcygtctatgaacatgcgggggaaggatccggaaccaggacccagaagcacctcctttgtagacagagggccacggctgcgtgcgatccaggcccaggcccac

SEQ ID NO: 61622 - DNA, 201 bp, Homo sapiens
ggaggaagtccctgggtgggaaggtggtcacgccgctgcacatcaacctcagtggacagaaagacagtggcatcagtctggagaatggagtgtatgctgcygctgtgctgcctggaagccctgccgctaaagaagggtcccttgctgtgggagacaggatcgttgcgatcaatggcattgcactggacaacaagtctctga

SEQ ID NO: 61623 - DNA, 201 bp, Homo sapiens
atggtcaatcaagaacaaaataaagtcctgtggattccagcctgcccgctctaggagaatgctgtgctgtggatgactgcagctggccgcctgaggggacrccagactcagctcttttctagcgactgaaagtagaagtctgtctgtctatgaacatgcgggggaaggatccggaaccaggacccagaagcacctcctttg

SEQ ID NO: 61624 - DNA, 201 bp, Homo sapiens
tgctgtgctgtggatgactgcagctggccgcctgaggggacgccagactcagctcttttctagcgactgaaagtagaagtctgtctgtctatgaacatgcrggggaaggatccggaaccaggacccagaagcacctcctttgtagacagagggccacggctgcgtgcgatccaggcccaggcccacacactctgcccgtgt

SEQ ID NO: 61625 - DNA, 201 bp, Homo sapiens
agcagcagcaggtgttgaagcacaacgggtcatccgagattctcaacaaactgtatgacacggccatggacaagttggaggtggtcaagaaggactatgaygcccttcggaagaggtacagtgagaaagtcgccatccacaatgcagacctgagccgcctggagcagctgggggaggagaaccagcggttgctgaagcaga

SEQ ID NO: 61626 - DNA, 201 bp, Homo sapiens
agttcacgaaggccaagggcctgcctggtgacagcttctacatcagggccctgtacgaccggctggcagatgtggagcaagagttgagctttaagaaggaygacatcctctacgtggatgacaccttaccccagggcacgttcgggtcctggatggcttggcagctggacgagaatgcccagaagatccagcgcgggcaga

SEQ ID NO: 61627 - DNA, 189 bp, Homo sapiens
atgccctcagactcagaaagcagcagctccctcagcagtgtgggcactaccgggaaggcgccgtccccaccacccctcctcactgaccrgcaagtgaatgagaaggtggagaacctctccattcagctgcggctgatgacccgggagagaaacgagctccgcaagcgcctggcctttgctacgcatggc

SEQ ID NO: 61628 - DNA, 201 bp, Homo sapiens
tgtctgtctatgaacatgcgggggaaggatccggaaccaggacccagaagcacctcctttgtagacagagggccacggctgcgtgcgatccaggcccaggmccacacactctgcccgtgtcacacgtgtgctttaacacaaaacagataacactaaagacgggttcagcacccacctttctttagccagctgatcagagat

SEQ ID NO: 61629 - DNA, 179 bp, Homo sapiens
tcgcagaccctctgggggtaggggctgttttctaagttacaggcagagtgggactgagatggtacagtgtgcacagacaggtactgagctgacagactggrattttctgtactaaaatgttactttgtatcaaaagttaaacaggctttagtacaacaaataaaggtcaatttctgtaa

SEQ ID NO: 61630 - DNA, 201 bp, Homo sapiens
ttttacaggtacaagttttctagctcagacaaactatgaaaaactgtagactattctcaaggtattaactcgcagaccctctgggggtaggggctgttttytaagttacaggcagagtgggactgagatggtacagtgtgcacagacaggtactgagctgacagactgggattttctgtactaaaatgttactttgtatca

SEQ ID NO: 61631 - DNA, 201 bp, Homo sapiens
ttgtcatcttcatccactacaagagcgccaagcacatcaaggagcagagagaccccatctacctgagggacaaggtgactcagaggcattccaaagagcartttgaggcggcgcagaagcttgagcaggagtacagcaggtacttcacaggggtcatccagggaggagccctgtcaagcatttgcactcagatcttggcaa

SEQ ID NO: 61632 - DNA, 201 bp, Homo sapiens
tgtagactattctcaaggtattaactcgcagaccctctgggggtaggggctgttttctaagttacaggcagagtgggactgagatggtacagtgtgcacaracaggtactgagctgacagactgggattttctgtactaaaatgttactttgtatcaaaagttaaacaggctttagtacaacaaataaaggtcaatttctg

SEQ ID NO: 61633 - DNA, 201 bp, Homo sapiens
cctccagcgcccgcctgggttcttcgagtaacttgcagttcaaggcggaacgcattaaaatcccatcaacaccaagatatccgcggagtgtcgtgggctcygagagaggttcagtgtcacattctgaatgcagcactcctccacagtcacccctgaacatcgacaccctgtcctcttgtagccagtcccagacctcagcct

SEQ ID NO: 61634 - DNA, 201 bp, Homo sapiens
gagaactctccccggagctccaggagtgggcaccttactcgcctgggcattccagccggcacagcaaccccccgctataccctagcaggccgtctgtgggyactgttccccggagtttgacccccagcaccactgtgagctccatcctgcggaaccccatctacactgtgcgcagtcacagggtcggcccctgcagctctc

SEQ ID NO: 61635 - DNA, 201 bp, Homo sapiens
ccctcctcactgaccggcaagtgaatgagaaggtggagaacctctccattcagctgcggctgatgacccgggagagaaacgagctccgcaagcgcctggcstttgctacgcatggcacggcctttgacaagaggccctaccacaggctgaatcctgactatgagaggctgaagatccagtgcgtgcgagccatgtcggacc

SEQ ID NO: 61636 - DNA, 201 bp, Homo sapiens
ccgctaaagaagggtcccttgctgtgggagacaggatcgttgcgatcaatggcattgcactggacaacaagtctctgaatgaatgtgaatctctgctgcgsagctgccaggactccctgaccctgtccctcctgaaggtattccctcagagctcctcgtggagtggccagaacatttttgaaaatatcaaagactctgata

SEQ ID NO: 61637 - DNA, 201 bp, Homo sapiens
tggagcagctgggggaggagaaccagcggttgctgaagcagacagagatgctgacccagcagagggacacggccatccagctgcagcaccagtgcgccctytccctgaggaggtttgaggcgatccaccatgagctgaacaaggccacggcgcagaacaaggacctgcagtgggagatggagctgctgcagtcagagctga

SEQ ID NO: 61638 - DNA, 201 bp, Homo sapiens
gcaaatatgtgatggaccaagaattctccaggaggctcagcatgtctgaagtcaaagatgacaatagcgccacaaagacgctgtcagcggctgcacgccgrtccttttttcggaggaaacacaagcacaaacgcagcgggtccaaggacgggaaagacctgctcgccttggatgccttttccagtgactccattccactct

SEQ ID NO: 61639 - DNA, 201 bp, Homo sapiens
gaacctcaatgggggctgctttgctttgggaggttcttgttggtgggaccagagctttgacaaacctcctgctccttggtggcacctctcctggaaggacrtcacaactccaggtgctcagactgcctgtggcagcagaaccagtgcctttggcattttcctcccacaatggggaaggtgactttggcattcttacaaact

SEQ ID NO: 61640 - DNA, 201 bp, Homo sapiens; identical to SEQ ID NO: 61626

SEQ ID NO: 61641 - DNA, 179 bp, Homo sapiens; identical to SEQ ID NO: 61629

SEQ ID NO: 61642 - DNA, 201 bp, Homo sapiens; identical to SEQ ID NO: 61628

SEQ ID NO: 61643 - DNA, 201 bp, Homo sapiens; identical to SEQ ID NO: 61631

SEQ ID NO: 61644 - DNA, 201 bp, Homo sapiens; identical to SEQ ID NO: 61632

SEQ ID NO: 61645 - DNA, 201 bp, Homo sapiens; identical to SEQ ID NO: 61630

SEQ ID NO: 61646 - DNA, 201 bp, Homo sapiens; identical to SEQ ID NO: 61633

SEQ ID NO: 61647 - DNA, 201 bp, Homo sapiens; identical to SEQ ID NO: 61634

SEQ ID NO: 61648 - DNA, 201 bp, Homo sapiens; identical to SEQ ID NO: 61618

SEQ ID NO: 61649 - DNA, 201 bp, Homo sapiens; identical to SEQ ID NO: 61638

SEQ ID NO: 61650 - DNA, 201 bp, Homo sapiens; identical to SEQ ID NO: 61620

SEQ ID NO: 61651 - DNA, 201 bp, Homo sapiens; identical to SEQ ID NO: 61621

SEQ ID NO: 61652 - DNA, 201 bp, Homo sapiens; identical to SEQ ID NO: 61639

SEQ ID NO: 61653 - DNA, 201 bp, Homo sapiens; identical to SEQ ID NO: 61623

SEQ ID NO: 61654 - DNA, 201 bp, Homo sapiens; identical to SEQ ID NO: 61624

SEQ ID NO: 61655 - DNA, 201 bp, Homo sapiens
acgggaagccgctcggccgcgtggtgctggagctgaaggcagatgtcgtcccaaagacagctgagaacttcagagccctgtgcactggtgagaagggcttyggctacaaaggctccaccttccacagggtgatcccttccttcatgtgccaggcgggcgacttcaccaaccacaatggcacaggcgggaagtccatctacg

SEQ ID NO: 61656 - DNA, 201 bp, Homo sapiens
gctccgtgccgctgcgcctccccgcggcccgcgcctgcagcaagggctccggcgacccgtcctcttcctcctcctccgggaacccgctcgtgtacctggaygtggacgccaacgggaagccgctcggccgcgtggtgctggagctgaaggcagatgtcgtcccaaagacagctgagaacttcagagccctgtgcactggtg

SEQ ID NO: 61657 - DNA, 201 bp, Homo sapiens
aataaaggctgcggcgcgcggctgcgcgggactcggccttctgggcgcgcgcgacgtcagtttgagttctgtgttctccccgcccgtgtcccgcccgaccsgcgcccgcgatgctggcgctgcgctgcggctcccgctggctcggcctgctctccgtcccgcgctccgtgccgctgcgcctccccgcggcccgcgcctgca

SEQ ID NO: 61658 - DNA, 201 bp, Homo sapiens
gccagggtgctggcatggtggcagctgcaaatgtccatgcacccaggtggccgcgttgggctgtcagccaaggtgcctgaaacgatacgtgtgcccactcyactgtcacagtgtgcctgaggaaggctgctagggatgttagacctcggccaggacccaccacattgcttcctaatacccacccttcctcacgacctcatt

SEQ ID NO: 61659 - DNA, 201 bp, Homo sapiens
gctcctgtgctccggagggaagcatttcctggtaggctttgatttttctgtgtgttaaagaaattcaatctactcatgatgtgttatgcataaaacatttytggaacatggatttgtgttcaccttaaatgtgaaaataaatcctattttctatggaagactggtacctggtttctggaagaggggtctgtgacttggagc

SEQ ID NO: 61660 - DNA, 201 bp, Homo sapiens
tcttcatctgcaccataaagacagactggttggatggcaagcatgttgtgttcggtcacgtcaaagagggcatggacgtcgtgaagaaaatagaatctttyggctctaagagtgggaggacatccaagaagattgtcatcacagactgtggccagttgagctaatctgtggccagggtgctggcatggtggcagctgcaaa

SEQ ID NO: 61661 - DNA, 201 bp, Homo sapiens
gggccgggaacctgggcaagccaataaaggctgcggcgcgcggctgcgcgggactcggccttctgggcgcgcgcgacgtcagtttgagttctgtgttctcyccgcccgtgtcccgcccgacccgcgcccgcgatgctggcgctgcgctgcggctcccgctggctcggcctgctctccgtcccgcgctccgtgccgctgcgc

SEQ ID NO: 61662 - DNA, 154 bp, Homo sapiens
ttgtgtggcacctccccctgcccccttcttgctcctgctttcaccatgtgacatgcctgatcccccttcaccttttgccatggtcataagcttcctgaggsctccctggaagctgagcagatgccagcaccatgcttcctgtacatcctgcaga

SEQ ID NO: 61663 - DNA, 199 bp, Homo sapiens
ctgttttcttgatggtgaattattgcaagatacggtcatttaaaattgtgtggcacctccccctgcccccttcttgctcctgctttcaccatgtgacatgyctgatcccccttcaccttttgccatggtcataagcttcctgaggcctccctggaagctgagcagatgccagcaccatgcttcctgtacatcctgcaga

SEQ ID NO: 61664 - DNA, 201 bp, Homo sapiens
cttttccttgaccaagggggacagtcagttttgcaaaaggactctaatacctttaattaacaagattgactagaagtgaaactgcaacactaacttccccrtgctgtggtgtgacctgagttggtgacacaggccacagaccccagagcttggcttttgaaacacaactcagggcttttgtgaaggttcccccgctgagat

SEQ ID NO: 61665 - DNA, 201 bp, Homo sapiens
gtgtgcctgaggaaggctgctagggatgttagacctcggccaggacccaccacattgcttcctaatacccacccttcctcacgacctcatttctgggcatytttgtggacatgatgtcacccaccccttgtcaagcattgcctgtgattgcccagcccagattcatctgtgccttggacatggtgatggtgatgggttgcc

SEQ ID NO: 61666 - DNA, 201 bp, Homo sapiens
tgtttccctcagctgcataaggaggcgatatagtttgaatatttgtccccagccaaatctcatgttgaactgtaatccccagtgctggaggtggggcctgstacgaggtgtttggatcatggggacgggtatttcatggcttggtgctgttttcttgatggtgaattattgcaagatacggtcatttaaaattgtgtggca

SEQ ID NO: 61667 - DNA, 201 bp, Homo sapiens; identical to SEQ ID NO: 61655

SEQ ID NO: 61668 - DNA, 201 bp, Homo sapiens; identical to SEQ ID NO: 61656

SEQ ID NO: 61669 - DNA, 201 bp, Homo sapiens; identical to SEQ ID NO: 61657

SEQ ID NO: 61670 - DNA, 201 bp, Homo sapiens; identical to SEQ ID NO: 61658

SEQ ID NO: 61671 - DNA, 201 bp, Homo sapiens; identical to SEQ ID NO: 61659

SEQ ID NO: 61672 - DNA, 201 bp, Homo sapiens; identical to SEQ ID NO: 61660

SEQ ID NO: 61673 - DNA, 201 bp, Homo sapiens; identical to SEQ ID NO: 61661

SEQ ID NO: 61674 - DNA, 187 bp, Homo sapiens
ttgtgtggcacctccccctgcccccttcttgctcctgctttcaccatgtgacatgcctgatcccccttcaccttttgccatggtcataagcttcctgaggsctccctggaagctgagcagatgccagcaccatgcttcctgtacatcctgcagaaccataagccaattaaacctttttaataataaa

SEQ ID NO: 61675 - DNA, 201 bp, Homo sapiens
ctgttttcttgatggtgaattattgcaagatacggtcatttaaaattgtgtggcacctccccctgcccccttcttgctcctgctttcaccatgtgacatgyctgatcccccttcaccttttgccatggtcataagcttcctgaggcctccctggaagctgagcagatgccagcaccatgcttcctgtacatcctgcagaac

SEQ ID NO: 61676 - DNA, 201 bp, Homo sapiens
ttgcaaaaggactctaatacctgtttaatattgtcttcctaattgggataatttaattaacaagattgactagaagtgaaactgcaacactaacttccccrtgctgtggtgtgacctgagttggtgacacaggccacagaccccagagcttggcttttgaaacacaactcagggcttttgtgaaggttcccccgctgagat

SEQ ID NO: 61677 - DNA, 201 bp, Homo sapiens; identical to SEQ ID NO: 61665

SEQ ID NO: 61678 - DNA, 201 bp, Homo sapiens; identical to SEQ ID NO: 61666

SEQ ID NO: 61679 - DNA, 201 bp, Homo sapiens; identical to SEQ ID NO: 61655

SEQ ID NO: 61680 - DNA, 201 bp, Homo sapiens; identical to SEQ ID NO: 61656

SEQ ID NO: 61681 - DNA, 201 bp, Homo sapiens; identical to SEQ ID NO: 61657

SEQ ID NO: 61682 - DNA, 201 bp, Homo sapiens; identical to SEQ ID NO: 61658

SEQ ID NO: 61683 - DNA, 201 bp, Homo sapiens; identical to SEQ ID NO: 61659

SEQ ID NO: 61684 - DNA, 201 bp, Homo sapiens; identical to SEQ ID NO: 61661

SEQ ID NO: 61685 - DNA, 201 bp, Homo sapiens
aactttacactgaagcacgtggggccaggttggatggcaagcatgttgtgttcggtcacgtcaaagagggcatggacgtcgtgaagaaaatagaatctttyggctctaagagtgggaggacatccaagaagattgtcatcacagactgtggccagttgagctaatctgtggccagggtgctggcatggtggcagctgcaaa

SEQ ID NO: 61686 - DNA, 154 bp, Homo sapiens; identical to SEQ ID NO: 61662

SEQ ID NO: 61687 - DNA, 199 bp, Homo sapiens; identical to SEQ ID NO: 61663

SEQ ID NO: 61688 - DNA, 201 bp, Homo sapiens; identical to SEQ ID NO: 61664

SEQ ID NO: 61689 - DNA, 201 bp, Homo sapiens; identical to SEQ ID NO: 61665

SEQ ID NO: 61690 - DNA, 201 bp, Homo sapiens; identical to SEQ ID NO: 61666

SEQ ID NO: 61691 - DNA, 201 bp, Homo sapiens
atccctctctgggcctcaacgttggctctgccctcctctctcatagtagctgggagcctcagagccagtggaaggcacatgtaaatttcccggagacttcyccactcctggtgcccagtgaggcagggtgatgggcacacagcccttgagtccgtgccctgctggccagcacagccatgagcctgtactcttgtcacagtg

SEQ ID NO: 61692 - DNA, 201 bp, Homo sapiens
tcacctgcctctccaatgaccatcctcttttgtccttcttctcccccaacagctgaaggcagatgtcgtcccaaagacagctggtaagacagggcctgggrccttctgagatgggtctagagggaagggggccaggcagggcaaggtgggtggcgtgatgagaagagtcggggctcagagacccctgacagatgggagctc

SEQ ID NO: 61693 - DNA, 201 bp, Homo sapiens
acagctggtaagacagggcctggggccttctgagatgggtctagagggaagggggccaggcagggcaaggtgggtggcgtgatgagaagagtcggggctcrgagacccctgacagatgggagctccatgtgtggctcagccattgggtgctctggggcagccctgccatccctctctgggcctcaacgttggctctgccct

SEQ ID NO: 61694 - DNA, 201 bp, Homo sapiens
cccaaagacagctggtaagacagggcctggggccttctgagatgggtctagagggaagggggccaggcagggcaaggtgggtggcgtgatgagaagagtcrgggctcagagacccctgacagatgggagctccatgtgtggctcagccattgggtgctctggggcagccctgccatccctctctgggcctcaacgttggct

SEQ ID NO: 61695 - DNA, 201 bp, Homo sapiens
gctccgtgccgctgcgcctccccgcggcccgcgcctgcagcaagggctccggcgacccgtcctcttcctcctcctccgggaacccgctcgtgtacctggaygtggacgccaacgggaagccgctcggccgcgtggtgctggaggtgagaccgctcgcagggccggcctgggcgcgggacacgggcccggggagagccctgg

SEQ ID NO: 61696 - DNA, 201 bp, Homo sapiens
gagggtagaggctggctgggatggggcttcagccttccctccccacaccctcatgcctctccctgggcctcagtttcccaaccccgaatggaggagctggyctggcttctaccttagacacactctcttgtccctgaatttctgatgctttgggcccagctgtgggagcactgccagctgtgtccacagaagtaggccaag

SEQ ID NO: 61697 - DNA, 201 bp, Homo sapiens
aaatagggacacccttcctgcttccatttggttccagggtgggtcttgcagcttcgagggtagaggctggctgggatggggcttcagccttccctccccayaccctcatgcctctccctgggcctcagtttcccaaccccgaatggaggagctggtctggcttctaccttagacacactctcttgtccctgaatttctgat

SEQ ID NO: 61698 - DNA, 201 bp, Homo sapiens
gaaggcagatgtcgtcccaaagacagctggtaagacagggcctggggccttctgagatgggtctagagggaagggggccaggcagggcaaggtgggtggcstgatgagaagagtcggggctcagagacccctgacagatgggagctccatgtgtggctcagccattgggtgctctggggcagccctgccatccctctctgg

SEQ ID NO: 61699 - DNA, 155 bp, Homo sapiens
gcgcgcgacgtcagtttgagttctgtgttctccccgcccgtgtcccgcccgaccsgcgcccgcgatgctggcgctgcgctgcggctcccgctggctcggcctgctctccgtcccgcgctccgtgccgctgcgcctccccgcggcccgcgcctgca

SEQ ID NO: 61700 - DNA, 133 bp, Homo sapiens
gcgcgcgacgtcagtttgagttctgtgttctcyccgcccgtgtcccgcccgacccgcgcccgcgatgctggcgctgcgctgcggctcccgctggctcggcctgctctccgtcccgcgctccgtgccgctgcgc

SEQ ID NO: 61701 - DNA, 201 bp, Homo sapiens
gccatgcagttcttcaccaagggctaccaggagaccatctcagatgtcctaaacgatgctatatttgatgaagatcatgatgagatggtgattgtgaaggwcatagacatgttttccatgtgtgagcatcacttggttccatttgttggaaaggtccatattggttatcttcctaacaagcaagtccttggcctcagcaaa

SEQ ID NO: 61702 - DNA, 201 bp, Homo sapiens
gaggaggataacgagctgaacctccctaacctggcagccgcctactcgtccatcctgagctcgctgggcgagaacccccagcggcaagggctgctcaagamgccctggagggcggcctcggccatgcagttcttcaccaagggctaccaggagaccatctcagatgtcctaaacgatgctatatttgatgaagatcatgat

SEQ ID NO: 61703 - DNA, 201 bp, Homo sapiens
aaggtccatattggttatcttcctaacaagcaagtccttggcctcagcaaacttgcgaggattgtagaaatctatagtagaagactacaagttcaggagcrccttacaaaacaaattgctgtagcaatcacggaagccttgcggcctgctggagtcggggtagtggttgaagcaacgaagtcaaataaatataataaaggg

SEQ ID NO: 61704 - DNA, 201 bp, Homo sapiens
gggcgccaggtgcagcaatgggttccccgagcgggatccgccgcggcccgggcccagcaggccggcggagaagcccccgcggcccgaggccaagagcgcgyagcccgcggacggctggaagggcgagcggccccgcagcgaggaggataacgagctgaacctccctaacctggcagccgcctactcgtccatcctgagctc

SEQ ID NO: 61705 - DNA, 201 bp, Homo sapiens
gtccatattggttatcttcctaacaagcaagtccttggcctcagcaaacttgcgaggattgtagaaatctatagtagaagactacaagttcaggagcgccktacaaaacaaattgctgtagcaatcacggaagccttgcggcctgctggagtcggggtagtggttgaagcaacgaagtcaaataaatataataaagggttg

SEQ ID NO: 61706 - DNA, 201 bp, Homo sapiens
ccccgagcgggatccgccgcggcccgggcccagcaggccggcggagaagcccccgcggcccgaggccaagagcgcgcagcccgcggacggctggaagggckagcggccccgcagcgaggaggataacgagctgaacctccctaacctggcagccgcctactcgtccatcctgagctcgctgggcgagaacccccagcggca

SEQ ID NO: 61707 - DNA, 201 bp, Homo sapiens
gcggacggctggaagggcgagcggccccgcagcgaggaggataacgagctgaacctccctaacctggcagccgcctactcgtccatcctgagctcgctggscgagaacccccagcggcaagggctgctcaagacgccctggagggcggcctcggccatgcagttcttcaccaagggctaccaggagaccatctcagatgtc

SEQ ID NO: 61708 - DNA, 201 bp, Homo sapiens
catattggttatcttcctaacaagcaagtccttggcctcagcaaacttgcgaggattgtagaaatctatagtagaagactacaagttcaggagcgccttamaaaacaaattgctgtagcaatcacggaagccttgcggcctgctggagtcggggtagtggttgaagcaacgaagtcaaataaatataataaagggttgagc

SEQ ID NO: 61709 - DNA, 201 bp, Homo sapiens
aagcccccgcggcccgaggccaagagcgcgcagcccgcggacggctggaagggcgagcggccccgcagcgaggaggataacgagctgaacctccctaaccwggcagccgcctactcgtccatcctgagctcgctgggcgagaacccccagcggcaagggctgctcaagacgccctggagggcggcctcggccatgcagttc

SEQ ID NO: 61710 - DNA, 201 bp, Homo sapiens
gaggattgtagaaatctatagtagaagactacaagttcaggagcgccttacaaaacaaattgctgtagcaatcacggaagccttgcggcctgctggagtcrgggtagtggttgaagcaacgaagtcaaataaatataataaagggttgagccctctactttcttcttgccacctttttgtggcaatattaaagtgaactgc

SEQ ID NO: 61711 - DNA, 201 bp, Homo sapiens
ataacgagctgaacctccctaacctggcagccgcctactcgtccatcctgagctcgctgggcgagaacccccagcggcaagggctgctcaagacgccctgragggcggcctcggccatgcagttcttcaccaagggctaccaggagaccatctcagatgtcctaaacgatgctatatttgatgaagatcatgatgagatgg

SEQ ID NO: 61712 - DNA, 201 bp, Homo sapiens
atgcagttcttcaccaagggctaccaggagaccatctcagatgtcctaaacgatgctatatttgatgaagatcatgatgagatggtgattgtgaaggacawagacatgttttccatgtgtgagcatcacttggttccatttgttggaaaggtccatattggttatcttcctaacaagcaagtccttggcctcagcaaactt

SEQ ID NO: 61713 - DNA, 201 bp, Homo sapiens
cggccacagcccattgtccgcggccaccggcggagtttagccgcagacctcgaagcgccccggggtccttcccgaacggcagcggctgcggcgggtccatsgagaagggccctgtgcgggcaccggcggagaagccgcggggcgccaggtgcagcaatgggttccccgagcgggatccgccgcggcccgggcccagcaggc

SEQ ID NO: 61714 - DNA, 201 bp, Homo sapiens
gggcgagcggccccgcagcgaggaggataacgagctgaacctccctaacctggcagccgcctactcgtccatcctgagctcgctgggcgagaacccccagyggcaagggctgctcaagacgccctggagggcggcctcggccatgcagttcttcaccaagggctaccaggagaccatctcagatgtcctaaacgatgctat

SEQ ID NO: 61715 - DNA, 201 bp, Homo sapiens
ccgaggccaagagcgcgcagcccgcggacggctggaagggcgagcggccccgcagcgaggaggataacgagctgaacctccctaacctggcagccgcctamtcgtccatcctgagctcgctgggcgagaacccccagcggcaagggctgctcaagacgccctggagggcggcctcggccatgcagttcttcaccaagggct

SEQ ID NO: 61716 - DNA, 201 bp, Homo sapiens
agcgcgcagcccgcggacggctggaagggcgagcggccccgcagcgaggaggataacgagctgaacctccctaacctggcagccgcctactcgtccatccygagctcgctgggcgagaacccccagcggcaagggctgctcaagacgccctggagggcggcctcggccatgcagttcttcaccaagggctaccaggagacc

SEQ ID NO: 61717 - DNA, 201 bp, Homo sapiens
tccttcccgaacggcagcggctgcggcgggtccatggagaagggccctgtgcgggcaccggcggagaagccgcggggcgccaggtgcagcaatgggttccycgagcgggatccgccgcggcccgggcccagcaggccggcggagaagcccccgcggcccgaggccaagagcgcgcagcccgcggacggctggaagggcgag

SEQ ID NO: 61718 - DNA, 201 bp, Homo sapiens
ggcgagcggccccgcagcgaggaggataacgagctgaacctccctaacctggcagccgcctactcgtccatcctgagctcgctgggcgagaacccccagcsgcaagggctgctcaagacgccctggagggcggcctcggccatgcagttcttcaccaagggctaccaggagaccatctcagatgtcctaaacgatgctata

SEQ ID NO: 61719 - DNA, 162 bp, Homo sapiens
aggcgcggccgggctttccagcctgtggccgctcccggctcggagtgtgatctaagcaggtygcgtaccttcctcaggtgactccggccacagcccattgtccgcggccaccggcggagtttagccgcagacctcgaagcgccccggggtccttcccgaacg

SEQ ID NO: 61720 - DNA, 201 bp, Homo sapiens
cggcccgaggccaagagcgcgcagcccgcggacggctggaagggcgagcggccccgcagcgaggaggataacgagctgaacctccctaacctggcagccgyctactcgtccatcctgagctcgctgggcgagaacccccagcggcaagggctgctcaagacgccctggagggcggcctcggccatgcagttcttcaccaag

SEQ ID NO: 61721 - DNA, 201 bp, Homo sapiens
gcccagcaggccggcggagaagcccccgcggcccgaggccaagagcgcgcagcccgcggacggctggaagggcgagcggccccgcagcgaggaggataackagctgaacctccctaacctggcagccgcctactcgtccatcctgagctcgctgggcgagaacccccagcggcaagggctgctcaagacgccctggagggc

SEQ ID NO: 61722 - DNA, 201 bp, Homo sapiens
cgagcggccccgcagcgaggaggataacgagctgaacctccctaacctggcagccgcctactcgtccatcctgagctcgctgggcgagaacccccagcggyaagggctgctcaagacgccctggagggcggcctcggccatgcagttcttcaccaagggctaccaggagaccatctcagatgtcctaaacgatgctatatt

SEQ ID NO: 61723 - DNA, 201 bp, Homo sapiens
cggccccgcagcgaggaggataacgagctgaacctccctaacctggcagccgcctactcgtccatcctgagctcgctgggcgagaacccccagcggcaagkgctgctcaagacgccctggagggcggcctcggccatgcagttcttcaccaagggctaccaggagaccatctcagatgtcctaaacgatgctatatttgat

SEQ ID NO: 61724 - DNA, 201 bp, Homo sapiens
gccgcggcccgggcccagcaggccggcggagaagcccccgcggcccgaggccaagagcgcgcagcccgcggacggctggaagggcgagcggccccgcagckaggaggataacgagctgaacctccctaacctggcagccgcctactcgtccatcctgagctcgctgggcgagaacccccagcggcaagggctgctcaagac

SEQ ID NO: 61725 - DNA, 201 bp, Homo sapiens; identical to SEQ ID NO: 61702

SEQ ID NO: 61726 - DNA, 201 bp, Homo sapiens
tgtagcaatcacggaagccttgcggcctgctggagtcggggtagtggttgaagcaacacacatgtgtatggtaatgcgaggtgtacagaaaatgaacagcwaaactgtgaccagcacaatgttgggtgtgttccgggaggatccaaagactcgggaagagttcctgactctcattaggagctgagcttcattcagtgtgtg

SEQ ID NO: 61727 - DNA, 201 bp, Homo sapiens
agcaacacacatgtgtatggtaatgcgaggtgtacagaaaatgaacagcaaaactgtgaccagcacaatgttgggtgtgttccgggaggatccaaagactygggaagagttcctgactctcattaggagctgagcttcattcagtgtgtgtgcgttggttgccgatcgtactgccagtagcattgtctgtctgtccggtct

SEQ ID NO: 61728 - DNA, 201 bp, Homo sapiens; identical to SEQ ID NO: 61713

SEQ ID NO: 61729 - DNA, 201 bp, Homo sapiens; identical to SEQ ID NO: 61715

SEQ ID NO: 61730 - DNA, 162 bp, Homo sapiens; identical to SEQ ID NO: 61719

SEQ ID NO: 61731 - DNA, 201 bp, Homo sapiens; identical to SEQ ID NO: 61721

SEQ ID NO: 61732 - DNA, 201 bp, Homo sapiens
tttctaggaagtcaaataaatataataaagggttgagccctctactttcttcttgccacctttttgtggcaatattaaagtgaactgctaatagtgtaagyacgtgcacaaaaccactgccagataaccagaggggcctgggaagggagaagaattagtgtatttttttcaaatagtacagtaatttgcctcataagcata

SEQ ID NO: 61733 - DNA, 201 bp, Homo sapiens; identical to SEQ ID NO: 61724

SEQ ID NO: 61734 - DNA, 201 bp, Homo sapiens; identical to SEQ ID NO: 61701

SEQ ID NO: 61735 - DNA, 201 bp, Homo sapiens; identical to SEQ ID NO: 61704

SEQ ID NO: 61736 - DNA, 201 bp, Homo sapiens
aaggtccatattggttatcttcctaacaagcaagtccttggcctcagcaaacttgcgaggattgtagaaatctatagtagaagactacaagttcaggagcrccttacaaaacaaattgctgtagcaatcacggaagccttgcggcctgctggagtcggggtagtggttgaagcaacacacatgtgtatggtaatgcgaggt

SEQ ID NO: 61737 - DNA, 201 bp, Homo sapiens; identical to SEQ ID NO: 61706

SEQ ID NO: 61738 - DNA, 201 bp, Homo sapiens
gtccatattggttatcttcctaacaagcaagtccttggcctcagcaaacttgcgaggattgtagaaatctatagtagaagactacaagttcaggagcgccktacaaaacaaattgctgtagcaatcacggaagccttgcggcctgctggagtcggggtagtggttgaagcaacacacatgtgtatggtaatgcgaggtgta

SEQ ID NO: 61739 - DNA, 201 bp, Homo sapiens
catattggttatcttcctaacaagcaagtccttggcctcagcaaacttgcgaggattgtagaaatctatagtagaagactacaagttcaggagcgccttamaaaacaaattgctgtagcaatcacggaagccttgcggcctgctggagtcggggtagtggttgaagcaacacacatgtgtatggtaatgcgaggtgtacag

SEQ ID NO: 61740 - DNA, 201 bp, Homo sapiens; identical to SEQ ID NO: 61707

SEQ ID NO: 61741 - DNA, 201 bp, Homo sapiens
gaggattgtagaaatctatagtagaagactacaagttcaggagcgccttacaaaacaaattgctgtagcaatcacggaagccttgcggcctgctggagtcrgggtagtggttgaagcaacacacatgtgtatggtaatgcgaggtgtacagaaaatgaacagcaaaactgtgaccagcacaatgttgggtgtgttccggga

SEQ ID NO: 61742 - DNA, 201 bp, Homo sapiens; identical to SEQ ID NO: 61709

SEQ ID NO: 61743 - DNA, 201 bp, Homo sapiens; identical to SEQ ID NO: 61711

SEQ ID NO: 61744 - DNA, 201 bp, Homo sapiens
gactacaagttcaggagcgccttacaaaacaaattgctgtagcaatcacggaagccttgcggcctgctggagtcggggtagtggttgaagcaacacacatrtgtatggtaatgcgaggtgtacagaaaatgaacagcaaaactgtgaccagcacaatgttgggtgtgttccgggaggatccaaagactcgggaagagttcc

SEQ ID NO: 61745 - DNA, 201 bp, Homo sapiens
aagactacaagttcaggagcgccttacaaaacaaattgctgtagcaatcacggaagccttgcggcctgctggagtcggggtagtggttgaagcaacacacrtgtgtatggtaatgcgaggtgtacagaaaatgaacagcaaaactgtgaccagcacaatgttgggtgtgttccgggaggatccaaagactcgggaagagtt

SEQ ID NO: 61746 - DNA, 201 bp, Homo sapiens
acaagttcaggagcgccttacaaaacaaattgctgtagcaatcacggaagccttgcggcctgctggagtcggggtagtggttgaagcaacacacatgtgtrtggtaatgcgaggtgtacagaaaatgaacagcaaaactgtgaccagcacaatgttgggtgtgttccgggaggatccaaagactcgggaagagttcctgac

SEQ ID NO: 61747 - DNA, 201 bp, Homo sapiens; identical to SEQ ID NO: 61712

SEQ ID NO: 61748 - DNA, 201 bp, Homo sapiens
ggagcgccttacaaaacaaattgctgtagcaatcacggaagccttgcggcctgctggagtcggggtagtggttgaagcaacacacatgtgtatggtaatgygaggtgtacagaaaatgaacagcaaaactgtgaccagcacaatgttgggtgtgttccgggaggatccaaagactcgggaagagttcctgactctcattag

SEQ ID NO: 61749 - DNA, 201 bp, Homo sapiens
gaggtgtacagaaaatgaacagcaaaactgtgaccagcacaatgttgggtgtgttccgggaggatccaaagactcgggaagagttcctgactctcattagsagctgagcttcattcagtgtgtgtgcgttggttgccgatcgtactgccagtagcattgtctgtctgtccggtcttgtttgtacattccattttcaattgt

SEQ ID NO: 61750 - DNA, 201 bp, Homo sapiens; identical to SEQ ID NO: 61714

SEQ ID NO: 61751 - DNA, 201 bp, Homo sapiens; identical to SEQ ID NO: 61716

SEQ ID NO: 61752 - DNA, 201 bp, Homo sapiens; identical to SEQ ID NO: 61718

SEQ ID NO: 61753 - DNA, 201 bp, Homo sapiens; identical to SEQ ID NO: 61717

SEQ ID NO: 61754 - DNA, 201 bp, Homo sapiens
gtagcaatcacggaagccttgcggcctgctggagtcggggtagtggttgaagcaacacacatgtgtatggtaatgcgaggtgtacagaaaatgaacagcaraactgtgaccagcacaatgttgggtgtgttccgggaggatccaaagactcgggaagagttcctgactctcattaggagctgagcttcattcagtgtgtgt

SEQ ID NO: 61755 - DNA, 201 bp, Homo sapiens; identical to SEQ ID NO: 61720

SEQ ID NO: 61756 - DNA, 201 bp, Homo sapiens
ggagtcggggtagtggttgaagcaacacacatgtgtatggtaatgcgaggtgtacagaaaatgaacagcaaaactgtgaccagcacaatgttgggtgtgtyccgggaggatccaaagactcgggaagagttcctgactctcattaggagctgagcttcattcagtgtgtgtgcgttggttgccgatcgtactgccagtagc

SEQ ID NO: 61757 - DNA, 201 bp, Homo sapiens
tctaggaagtcaaataaatataataaagggttgagccctctactttcttcttgccacctttttgtggcaatattaaagtgaactgctaatagtgtaagtaygtgcacaaaaccactgccagataaccagaggggcctgggaagggagaagaattagtgtatttttttcaaatagtacagtaatttgcctcataagcatagg

SEQ ID NO: 61758 - DNA, 201 bp, Homo sapiens; identical to SEQ ID NO: 61723

SEQ ID NO: 61759 - DNA, 201 bp, Homo sapiens; identical to SEQ ID NO: 61722

SEQ ID NO: 61760 - DNA, 201 bp, Homo sapiens; identical to SEQ ID NO: 61702

SEQ ID NO: 61761 - DNA, 201 bp, Homo sapiens; identical to SEQ ID NO: 61726

SEQ ID NO: 61762 - DNA, 201 bp, Homo sapiens; identical to SEQ ID NO: 61727

SEQ ID NO: 61763 - DNA, 201 bp, Homo sapiens; identical to SEQ ID NO: 61713

SEQ ID NO: 61764 - DNA, 201 bp, Homo sapiens; identical to SEQ ID NO: 61715

SEQ ID NO: 61765 - DNA, 162 bp, Homo sapiens; identical to SEQ ID NO: 61719

SEQ ID NO: 61766 - DNA, 201 bp, Homo sapiens; identical to SEQ ID NO: 61721

SEQ ID NO: 61767 - DNA, 201 bp, Homo sapiens; identical to SEQ ID NO: 61732

SEQ ID NO: 61768 - DNA, 201 bp, Homo sapiens; identical to SEQ ID NO: 61724

SEQ ID NO: 61769 - DNA, 201 bp, Homo sapiens; identical to SEQ ID NO: 61701

SEQ ID NO: 61770 - DNA, 201 bp, Homo sapiens; identical to SEQ ID NO: 61704

SEQ ID NO: 61771 - DNA, 201 bp, Homo sapiens; identical to SEQ ID NO: 61736

SEQ ID NO: 61772 - DNA, 201 bp, Homo sapiens; identical to SEQ ID NO: 61706

SEQ ID NO: 61773 - DNA, 201 bp, Homo sapiens; identical to SEQ ID NO: 61738

SEQ ID NO: 61774 - DNA, 201 bp, Homo sapiens; identical to SEQ ID NO: 61739

SEQ ID NO: 61775 - DNA, 201 bp, Homo sapiens; identical to SEQ ID NO: 61707

SEQ ID NO: 61776 - DNA, 201 bp, Homo sapiens; identical to SEQ ID NO: 61741

SEQ ID NO: 61777 - DNA, 201 bp, Homo sapiens; identical to SEQ ID NO: 61709

SEQ ID NO: 61778 - DNA, 201 bp, Homo sapiens; identical to SEQ ID NO: 61711

SEQ ID NO: 61779 - DNA, 201 bp, Homo sapiens; identical to SEQ ID NO: 61744

SEQ ID NO: 61780 - DNA, 201 bp, Homo sapiens; identical to SEQ ID NO: 61745

SEQ ID NO: 61781 - DNA, 201 bp, Homo sapiens; identical to SEQ ID NO: 61746

SEQ ID NO: 61782 - DNA, 201 bp, Homo sapiens; identical to SEQ ID NO: 61712

SEQ ID NO: 61783 - DNA, 201 bp, Homo sapiens; identical to SEQ ID NO: 61748

SEQ ID NO: 61784 - DNA, 201 bp, Homo sapiens; identical to SEQ ID NO: 61749

SEQ ID NO: 61785 - DNA, 201 bp, Homo sapiens; identical to SEQ ID NO: 61714

SEQ ID NO: 61786 - DNA, 201 bp, Homo sapiens; identical to SEQ ID NO: 61716

SEQ ID NO: 61787 - DNA, 201 bp, Homo sapiens; identical to SEQ ID NO: 61718

SEQ ID NO: 61788 - DNA, 201 bp, Homo sapiens; identical to SEQ ID NO: 61717

SEQ ID NO: 61789 - DNA, 201 bp, Homo sapiens; identical to SEQ ID NO: 61754

SEQ ID NO: 61790 - DNA, 201 bp, Homo sapiens; identical to SEQ ID NO: 61720

SEQ ID NO: 61791 - DNA, 201 bp, Homo sapiens; identical to SEQ ID NO: 61756

SEQ ID NO: 61792 - DNA, 201 bp, Homo sapiens; identical to SEQ ID NO: 61757

SEQ ID NO: 61793 - DNA, 201 bp, Homo sapiens; identical to SEQ ID NO: 61723

SEQ ID NO: 61794 - DNA, 201 bp, Homo sapiens; identical to SEQ ID NO: 61722

SEQ ID NO: 61795 - DNA, 201 bp, Homo sapiens
atttgatgaaggctccatcgtctttaatcagttcaagtctgtcatctcgtataagactgaagaaaagcccatctttttccttaataccattgcaagtgccragagcatgagtatctactataatattgatgctgaggtgctgcaaaattaccaggaatacagtctggccaacagcatctactactctctgaaggagtccac

SEQ ID NO: 61796 - DNA, 201 bp, Homo sapiens
attaaaagaagtgagaagaaatccccctgcttttggaaatgtgtcagtcattgcccttgaattactaaattctggatatgaatttgatgaaggctccatcrtctttaatcagttcaagtctgtcatctcgtataagactgaagaaaagcccatctttttccttaataccattgcaagtgccaagagcatgagtatctacta

SEQ ID NO: 61797 - DNA, 201 bp, Homo sapiens; identical to SEQ ID NO: 61795

SEQ ID NO: 61798 - DNA, 201 bp, Homo sapiens; identical to SEQ ID NO: 61796

SEQ ID NO: 61799 - DNA, 201 bp, Homo sapiens
aataggtactgtcagaacaaagctacctggaaacagcatagagtgaagcctttcgtgagggcttgcaggccgctgctgagtggcagtttacagaagaggtygcggggtgagcctcttagcaggacagaaaacaaggcagcagcgcacctgccaccccttcacgagctgctccttgagcctaaaaagtaggctttattcatc

SEQ ID NO: 61800 - DNA, 201 bp, Homo sapiens
aggctttattcatcccttctgttcatttaccaacctgggggattgatacgaccggggaaaatgttcctaaaccaggaagctgcgttagccgatcaggcttkgtaagatctcgccaacagctagctgcttaggagtacccccacgatacgcacagcacaccactgtcccttcactgcactttcttcctgccttaggtagttg

SEQ ID NO: 61801 - DNA, 201 bp, Homo sapiens
caccctagtttgcttttgtagtggtttggcaaggttagaaggcctcggcctctctgtcatgctgggaagtgcctactctctgggccactgctgcagaggcygtggcacttgtcatgggtttggaagacccagccatctgcagcagaggcagcctatcccattgcaaggagaggaactgaacggagtaattattctactctt

SEQ ID NO: 61802 - DNA, 201 bp, Homo sapiens
agattacctggctcagtgtcacagggctgctgatggtggtcttcggagaatgtctgaggaaggcggccatgtttacagctggctccaatttcaaccacgtrgtacagaatgaaaaatcagatacacatactctggtgaccagtggagtgtacgcttggtttcggcatccttcttacgtcgggtggttttactggagtattg

SEQ ID NO: 61803 - DNA, 201 bp, Homo sapiens
ataagtagcagtacacattcaaaggggtattcctagctcaatgcttggtgttctagttcaacttttatcctgcagcaagtaagcctagataactctacacratttggctgagtggctttgtgtgaccgtggccccaggccaaggggatcatggccctggctggctttcccgggggtctcagctcctgttgtcagtgatagg

SEQ ID NO: 61804 - DNA, 201 bp, Homo sapiens
tactcagatgtgggagcgacatcaatgaaatctgtactgtatgaaagctacacaaaaatgggcagacatttggttaattgtgccagatacctaaaatgtaygttcagaaaagcattttatcaactcagaaatatgacttatttctagatttcatggcttaatgaattttttcattgttatatataccaaagaggcttacgg

SEQ ID NO: 61805 - DNA, 201 bp, Homo sapiens
gggccactgctgcagaggccgtggcacttgtcatgggtttggaagacccagccatctgcagcagaggcagcctatcccattgcaaggagaggaactgaacrgagtaattattctactcttctttttacataaatgtttatttaaatattctaaattggattttctttcacagatactgattattctttccagttcttaaat

SEQ ID NO: 61806 - DNA, 201 bp, Homo sapiens
ctccagagttacctggggaggaccgaggccacacgccactgcccccgaggccagagtgtaagtaaaggataaccaggactcgctgggagagatggactctktcctcagcaacactccacagcagaaaggggtagcaggtaccccttcttatcagcggtaaaaatgcatttacaacctttcatttaaccgaaaaacacagac

SEQ ID NO: 61807 - DNA, 201 bp, Homo sapiens
aggcagcctatcccattgcaaggagaggaactgaacggagtaattattctactcttctttttacataaatgtttatttaaatattctaaattggattttcwttcacagatactgattattctttccagttcttaaataaaactgcacttgatttcactcaaccacagtgtgattgtctgggatgtgaaactctgaggtcac

SEQ ID NO: 61808 - DNA, 201 bp, Homo sapiens
ccttgagcctaaaaagtaggctttattcatcccttctgttcatttaccaacctgggggattgatacgaccggggaaaatgttcctaaaccaggaagctgcrttagccgatcaggctttgtaagatctcgccaacagctagctgcttaggagtacccccacgatacgcacagcacaccactgtcccttcactgcactttctt

SEQ ID NO: 61809 - DNA, 201 bp, Homo sapiens
ctgtcctcagcaacactccacagcagaaaggggtagcaggtaccccttcttatcagcggtaaaaatgcatttacaacctttcatttaaccgaaaaacacaraccgctttaacctctttatttctgtcccccactgcatgaacatctatacaattttaaaaatacttcctcataggatgctttggcccttcatctatttaat

SEQ ID NO: 61810 - DNA, 201 bp, Homo sapiens; identical to SEQ ID NO: 61799

SEQ ID NO: 61811 - DNA, 201 bp, Homo sapiens; identical to SEQ ID NO: 61800

SEQ ID NO: 61812 - DNA, 201 bp, Homo sapiens; identical to SEQ ID NO: 61801

SEQ ID NO: 61813 - DNA, 201 bp, Homo sapiens; identical to SEQ ID NO: 61802

SEQ ID NO: 61814 - DNA, 201 bp, Homo sapiens; identical to SEQ ID NO: 61803

SEQ ID NO: 61815 - DNA, 201 bp, Homo sapiens; identical to SEQ ID NO: 61804

SEQ ID NO: 61816 - DNA, 201 bp, Homo sapiens; identical to SEQ ID NO: 61805

SEQ ID NO: 61817 - DNA, 201 bp, Homo sapiens; identical to SEQ ID NO: 61806

SEQ ID NO: 61818 - DNA, 201 bp, Homo sapiens; identical to SEQ ID NO: 61807

SEQ ID NO: 61819 - DNA, 201 bp, Homo sapiens; identical to SEQ ID NO: 61808

SEQ ID NO: 61820 - DNA, 201 bp, Homo sapiens; identical to SEQ ID NO: 61809

SEQ ID NO: 61821 - DNA, 201 bp, Homo sapiens
gctttgtgcacggaggtgtgaccatgaagctcatggatgaggtcgccgggatcgtggctgcacgccactgcaagaccaacatcgtcacagcttccgtggaygccattaattttcatgacaagatcagaaaaggctgcgtcatcaccatctcgggacgcatgaccttcacgagcaataagtccatggagatcgaggtgttgg

SEQ ID NO: 61822 - DNA, 201 bp, Homo sapiens
agctctcagaagcgctaccgggccgccagtgccttcttcacctacgtgtcgctgagccaggaaggcaggtcgctgcctgtgccccagctggtgcccgagaycgaggacgagaagaagcgctttgaggaaggcaaagggcggtacctgcagatgaaggcgaagcgacagggccacgcggagcctcagccctagactccctcc

SEQ ID NO: 61823 - DNA, 201 bp, Homo sapiens
gctctcagaagcgctaccgggccgccagtgccttcttcacctacgtgtcgctgagccaggaaggcaggtcgctgcctgtgccccagctggtgcccgagacygaggacgagaagaagcgctttgaggaaggcaaagggcggtacctgcagatgaaggcgaagcgacagggccacgcggagcctcagccctagactccctcct

SEQ ID NO: 61824 - DNA, 201 bp, Homo sapiens
tatcaatgctacacagtgttgtcccgagcgccgggaggcgttgggcagaaaccctcgggaatgcttccgagcacgctgtagggtatgggaagaacccagcmccactaataaagctgctgcttggctggacccacgtgtcctgggtggtcatttgtcttgggggggctgctttcccagggggtgtgggacattggggctccc

SEQ ID NO: 61825 - DNA, 201 bp, Homo sapiens; identical to SEQ ID NO: 61821

SEQ ID NO: 61826 - DNA, 201 bp, Homo sapiens; identical to SEQ ID NO: 61822

SEQ ID NO: 61827 - DNA, 201 bp, Homo sapiens; identical to SEQ ID NO: 61823

SEQ ID NO: 61828 - DNA, 201 bp, Homo sapiens; identical to SEQ ID NO: 61824

SEQ ID NO: 61829 - DNA, 201 bp, Homo sapiens
agactccattcaagggcacatcttgtgcagtaaaacacgcatgtttcagggctcctcactgcaacacgtgcacctccaggctggcgctcagcgctcccagwaaaagctgcaggcggcggtgtagatagtcgccggcctttcctcctccccacctcgtgacgctttgtgctgcggaagcaaaggcccgttccattccccgtg

SEQ ID NO: 61830 - DNA, 201 bp, Homo sapiens; identical to SEQ ID NO: 61821

SEQ ID NO: 61831 - DNA, 201 bp, Homo sapiens; identical to SEQ ID NO: 61822

SEQ ID NO: 61832 - DNA, 201 bp, Homo sapiens; identical to SEQ ID NO: 61823

SEQ ID NO: 61833 - DNA, 201 bp, Homo sapiens; identical to SEQ ID NO: 61824

SEQ ID NO: 61834 - DNA, 201 bp, Homo sapiens; identical to SEQ ID NO: 61821

SEQ ID NO: 61835 - DNA, 201 bp, Homo sapiens; identical to SEQ ID NO: 61822

SEQ ID NO: 61836 - DNA, 201 bp, Homo sapiens; identical to SEQ ID NO: 61823

SEQ ID NO: 61837 - DNA, 201 bp, Homo sapiens; identical to SEQ ID NO: 61824

SEQ ID NO: 61838 - DNA, 201 bp, Homo sapiens
ggtcatgtcactagttaggaagaaggttcaggagtttgagcatgtcaacgggaagtacagcaccccagacttgatccctgaggggcccgaggggaagaagycgggcgaggtgatctcctcggaccccaacacaccagtgcccgccagccctgcccacctcctgccagccccgctgggcctgccagacaaaatggaagccca

SEQ ID NO: 61839 - DNA, 201 bp, Homo sapiens
cggggccctggaccgggagggattgtcaactacaaccagatgcccctggggccctatgtgaccgatatctagccgtcctcgagacttccctgtgttgcagygctcatttccagctgagccacgcctgccgggccacctgcccgacccacatgggagagaaaagctgccacctttttaggagccagcgccaccttgggacaa

SEQ ID NO: 61840 - DNA, 201 bp, Homo sapiens
ccatcatcaactgggaacgcgagtttgagatgtgggcgcccgacttctacgtggtcacctacacgggggacaaggagagccgctcggtgattcgggagaaygagttttcctttgaggacaacgccattcggagtgggaagaaggtattccgtatgaagaaagaagtgcagatcaaattccacgtgctgctcacctcctatg

SEQ ID NO: 61841 - DNA, 201 bp, Homo sapiens
ggaaaaagacggccgggctcaagttccgcttcggggggatcagcaacaagaggaagaaaggctcctcgagtgaagaagatgagagggaggagtcggacttygacagcgccagcatccacagtgcctccgtgcgctccgaatgctctgcagccctgggcaagaagagcaagaggaggcgcaagaagaagaggattgatgatg

SEQ ID NO: 61842 - DNA, 201 bp, Homo sapiens
catggaggacgaggcccagctcagctgggccagagcccagaagtgccacctcatcataattcaagtgttcttccacacagcgttgcccccacaaccacgcyggacgtgccccctcgccaccttttccagacgacttcttagaagagatttcatttatttgtacatcttttgcactttcctattgaagacttgaacacgttt

SEQ ID NO: 61843 - DNA, 201 bp, Homo sapiens
tccctgtgttgcagcgctcatttccagctgagccacgcctgccgggccacctgcccgacccacatgggagagaaaagctgccacctttttaggagccagcrccaccttgggacaaaaagggaaacctagtaatgccatcacatggaggacgaggcccagctcagctgggccagagcccagaagtgccacctcatcataatt

SEQ ID NO: 61844 - DNA, 201 bp, Homo sapiens
cggggcctgacgtggagcccagcctccctccacctaagcccctggagggcatccctgagagagagttctttgtcaagtgggcagggctgtcctactggcaytgctcctgggtgaaggagctacagctggagctgtaccacacggtgatgtatcgcaactaccaaagaaagaacgacatggatgagccgcccccctttgact

SEQ ID NO: 61845 - DNA, 201 bp, Homo sapiens
gtgacggctatgagacagaccaccaggattactgtgaggtgtgccagcagggtggggagatcatcctgtgcgacacctgcccgagggcctaccatctcgtrtgcctggacccagagctggagaaggctcccgagggcaagtggagctgcccccactgtgagaaggaggggatccagtgggagccgaaggacgacgacgatg

SEQ ID NO: 61846 - DNA, 201 bp, Homo sapiens
ggcaggaggcaatcgacagattcaatgcccccggggcccagcagttctgcttcctcctctcaacccgggcaggtggtctgggcatcaacctggccacggcrgacactgtcatcatctacgactcggactggaacccgcacaatgacatccaggccttcagccgcgcccaccgcatcggccagaacaagaaggtgatgatct

SEQ ID NO: 61847 - DNA, 201 bp, Homo sapiens
aggacaacgccattcggagtgggaagaaggtattccgtatgaagaaagaagtgcagatcaaattccacgtgctgctcacctcctatgagctcatcaccatygaccaggccatcctgggctccatcgagtgggcctgcctggtggtagatgaggcccaccgcctcaagaacaaccagtccaagttttttagggtcttaaaca

SEQ ID NO: 61848 - DNA, 201 bp, Homo sapiens
ccctcaacttcctcaaggcccacttctccccaagcaacatcatcctggacttccctgcagctgggtcagctgcccggagggatgtgcagaatgtggcagcmgccccagagctggcgatgggagccctggagctggaaagccggaattcaactctggaccctgggaagcctgagatgatgaagtcccccacaaacaccaccc

SEQ ID NO: 61849 - DNA, 201 bp, Homo sapiens
gccaatgtggtgagaaagtttggtgtcaccgacttcccctcttgctacctgctgttccggaatggctctgtctcccgagtccccgtgctcatggaatccakgtccttctataccgcttacctgcagagactctctgggctcaccagggaggctgcccagaccacagttgcaccaaccactgctaacaagatagctcccact

SEQ ID NO: 61850 - DNA, 201 bp, Homo sapiens
tccagccttgaagagaatggactctggaatctgacgtctgggtttgaatccagcttccaacactcactggctgtgtgactttgggcaagataacttatccycttgtccccatgtgtcattggagataaactacccacctaccagattgttgtaccatgctgggcaaacactaagtgcttaataatggtagcccactgctca

SEQ ID NO: 61851 - DNA, 201 bp, Homo sapiens
tctcctgtcttgatacctgaaaactcaaggggccctgttgtgcttggaggggggtgccgttcccacaggatattctgtgaagggtgtccctggagctgggyctccaggtggcaagccccaagccaccccggcaggtgccactggccagagttgaactgaggtgttgagtggaaagtgcctccccacccccatctgccacag

SEQ ID NO: 61852 - DNA, 201 bp, Homo sapiens
ccactggagcctgccaagctggaggagattgatggattctttgcgagaaataacgaagagtacctggctctgatctttgaaaagggaggctcctacctggstagagaggtggctctggacctgtcccagcacaaaggcgtggcggtgcgcagggtgctgaacacagaggccaatgtggtgagaaagtttggtgtcaccgac

SEQ ID NO: 61853 - DNA, 201 bp, Homo sapiens
aaggcgctggccgaagacgtcaaagcctggaggccggccctgtatctcgccgccctggactgtgctgaggagaccaacagtgcagtctgcagagacttcarcatccctggcttcccgactgtgaggttcttcaaggcctttaccaagaacggctcgggagcagtatttccagtggctggtgctgacgtgcagacgctgcgg

SEQ ID NO: 61854 - DNA, 201 bp, Homo sapiens
ttccacttcttgactgtgcaggcagctcggcaaaatgtagaccactcacaggaagcagccaaggccaaggaggtcctcccagccatccgaggctacgtgcrctacttcttcggctgccgagactgcgctagccacttcgagcagatggctgctgcctccatgcaccgggtggggagtcccaacgccgctgtcctctggctc

SEQ ID NO: 61855 - DNA, 201 bp, Homo sapiens
gagtggcttgcttggtgggacctgacgagttggtggcatgggaaggatgtgggtctctagtgccttgccctggcttagctgcaggagaagatggctgcttycacttccccccattgagctctgctccctctgagcctggtcttttgtccttttttattttggtctccaagatgaatgctcatctttggagggtgccaggta

SEQ ID NO: 61856 - DNA, 201 bp, Homo sapiens
tgtggcagccgccccagagctggcgatgggagccctggagctggaaagccggaattcaactctggaccctgggaagcctgagatgatgaagtcccccacamacaccaccccacatgtgccggctgagggacctgagcttatttgaagtcctgcctcattctcactggagcctcagtctctcctgcttggtcttggccctca

SEQ ID NO: 61857 - DNA, 201 bp, Homo sapiens
ttggtggcatgggaaggatgtgggtctctagtgccttgccctggcttagctgcaggagaagatggctgctttcacttccccccattgagctctgctccctytgagcctggtcttttgtccttttttattttggtctccaagatgaatgctcatctttggagggtgccaggtagaagctagggaggggagtgtcttctctct

SEQ ID NO: 61858 - DNA, 201 bp, Homo sapiens
acttcaacatccctggcttcccgactgtgaggttcttcaaggcctttaccaagaacggctcgggagcagtatttccagtggctggtgctgacgtgcagacrctgcgggagaggctcattgacgccctggagtcccatcatgacacgtggcccccagcctgtcccccactggagcctgccaagctggaggagattgatggat

SEQ ID NO: 61859 - DNA, 201 bp, Homo sapiens
aaattccctacagtttctttaaaactgccctggacgacaggaaagagggtgccgttcttgccaagaaggtgaactggattggctgccaggggagtgagccrcatttccggggctttccctgctccctgtgggtcctcttccacttcttgactgtgcaggcagctcggcaaaatgtagaccactcacaggaagcagccaagg

SEQ ID NO: 61860 - DNA, 201 bp, Homo sapiens
cacttccccccattgagctctgctccctctgagcctggtcttttgtccttttttattttggtctccaagatgaatgctcatctttggagggtgccaggtaraagctagggaggggagtgtcttctctctccaggtttcaccttccagtgtgcagaagttagaagggtctggcgggggcagtgccttacacatgcttgattc

SEQ ID NO: 61861 - DNA, 201 bp, Homo sapiens
tgtctgcacccaaaccccatggccttttcatgcacggagacaggcctctggatgtgcagccttgccaccccctgccccaatcctccctgagagctcctgcstcagtgccctgggctggtgagggagaagcctgtctgcacctgcctaattccagctcctccaggaagcaagggcttgtttgtcagagctgcagggttggcc

SEQ ID NO: 61862 - DNA, 201 bp, Homo sapiens
gtcttttgtccttttttattttggtctccaagatgaatgctcatctttggagggtgccaggtagaagctagggaggggagtgtcttctctctccaggtttyaccttccagtgtgcagaagttagaagggtctggcgggggcagtgccttacacatgcttgattcccacgctaccccctgccttgggaggtgtgtggaataa

SEQ ID NO: 61863 - DNA, 201 bp, Homo sapiens
tcttttgtccttttttattttggtctccaagatgaatgctcatctttggagggtgccaggtagaagctagggaggggagtgtcttctctctccaggtttcmccttccagtgtgcagaagttagaagggtctggcgggggcagtgccttacacatgcttgattcccacgctaccccctgccttgggaggtgtgtggaataaa

SEQ ID NO: 61864 - DNA, 201 bp, Homo sapiens
tattttggtctccaagatgaatgctcatctttggagggtgccaggtagaagctagggaggggagtgtcttctctctccaggtttcaccttccagtgtgcaraagttagaagggtctggcgggggcagtgccttacacatgcttgattcccacgctaccccctgccttgggaggtgtgtggaataaattatttttgttaagg

SEQ ID NO: 61865 - DNA, 201 bp, Homo sapiens
gtctccaagatgaatgctcatctttggagggtgccaggtagaagctagggaggggagtgtcttctctctccaggtttcaccttccagtgtgcagaagttaraagggtctggcgggggcagtgccttacacatgcttgattcccacgctaccccctgccttgggaggtgtgtggaataaattatttttgttaaggcaagcat

SEQ ID NO: 61866 - DNA, 201 bp, Homo sapiens
gggtgctgaacacagaggccaatgtggtgagaaagtttggtgtcaccgacttcccctcttgctacctgctgttccggaatggctctgtctcccgagtcccygtgctcatggaatccaggtccttctataccgcttacctgcagagactctctgggctcaccagggaggctgcccagaccacagttgcaccaaccactgcta

SEQ ID NO: 61867 - DNA, 201 bp, Homo sapiens
cagatggctgctgcctccatgcaccgggtggggagtcccaacgccgctgtcctctggctctggtctagccacaacagggtcaatgctcgccttgcaggtgmccccagcgaggacccccagttccccaaggtgcagtggccaccccgtgaactttgttctgcctgccacaatgaacgcctggatgtgcccgtgtgggacgtg

SEQ ID NO: 61868 - DNA, 201 bp, Homo sapiens
cagcgaggacccccagttccccaaggtgcagtggccaccccgtgaactttgttctgcctgccacaatgaacgcctggatgtgcccgtgtgggacgtggaarccaccctcaacttcctcaaggcccacttctccccaagcaacatcatcctggacttccctgcagctgggtcagctgcccggagggatgtgcagaatgtggc

SEQ ID NO: 61869 - DNA, 201 bp, Homo sapiens
caactggggcaagtgaagccagaggagggtcccccagctgggtgggctggaatggaactcctcactagctgctggggctccgcccaccctgctcccttccrgacaatgaagaagcctttgcaccctgggaggaaggaccaccccgggccctctatgcctggccagcctccagctcctcagacctcctgggtggggtttggc

SEQ ID NO: 61870 - DNA, 201 bp, Homo sapiens
acgacaggaaagagggtgccgttcttgccaagaaggtgaactggattggctgccaggggagtgagccgcatttccggggctttccctgctccctgtgggtyctcttccacttcttgactgtgcaggcagctcggcaaaatgtagaccactcacaggaagcagccaaggccaaggaggtcctcccagccatccgaggctacg

SEQ ID NO: 61871 - DNA, 201 bp, Homo sapiens
acaggaaagagggtgccgttcttgccaagaaggtgaactggattggctgccaggggagtgagccgcatttccggggctttccctgctccctgtgggtcctyttccacttcttgactgtgcaggcagctcggcaaaatgtagaccactcacaggaagcagccaaggccaaggaggtcctcccagccatccgaggctacgtgc

SEQ ID NO: 61872 - DNA, 201 bp, Homo sapiens
tcatctttggagggtgccaggtagaagctagggaggggagtgtcttctctctccaggtttcaccttccagtgtgcagaagttagaagggtctggcgggggyagtgccttacacatgcttgattcccacgctaccccctgccttgggaggtgtgtggaataaattatttttgttaaggcaagcattggtgtgttctttaact

SEQ ID NO: 61873 - DNA, 201 bp, Homo sapiens
ttcatgcacggagacaggcctctggatgtgcagccttgccaccccctgccccaatcctccctgagagctcctgcctcagtgccctgggctggtgagggagragcctgtctgcacctgcctaattccagctcctccaggaagcaagggcttgtttgtcagagctgcagggttggccactcggtggggaggagtcagccagga

SEQ ID NO: 61874 - DNA, 201 bp, Homo sapiens
gctagggaggggagtgtcttctctctccaggtttcaccttccagtgtgcagaagttagaagggtctggcgggggcagtgccttacacatgcttgattcccmcgctaccccctgccttgggaggtgtgtggaataaattatttttgttaaggcaagcattggtgtgttctttaacttgctacttggagacctagtgtccagt

SEQ ID NO: 61875 - DNA, 201 bp, Homo sapiens
tagaattagcgccatgttggaaacactgtcgcagcagcccgggctgcacagtgtgtagcccagcctccaggtccacggagtggtgtggacctcccacctcmcagctgcctctggcagccaagcctcttttcgcccggccccagcccctctggttgataaacgggtgggcctcctcagcagcgtggctgcctttcaccttga

SEQ ID NO: 61876 - DNA, 201 bp, Homo sapiens
cgcttacctgcagagactctctgggctcaccagggaggctgcccagaccacagttgcaccaaccactgctaacaagatagctcccactgtttggaaattgkcagatcgctccaagatctacatggctgacctggaatctgcactgcactacatcctgcggatagaagtgggcaggttcccggtcctggaagggcagcgcct

SEQ ID NO: 61877 - DNA, 201 bp, Homo sapiens
ggcacttgagcaagcgagacacaggggctgcattgctggctgagtccagggctgagaagaaccgcctctggggccctttggaggtcaggcgcgtgggccgmagctccaagcagctggtcgacatccctgagggccagctggaggcccgagctggacggggccgaggccagtggctgcaggtgctgggagggggcttctctt

SEQ ID NO: 61878 - DNA, 201 bp, Homo sapiens; identical to SEQ ID NO: 61848

SEQ ID NO: 61879 - DNA, 201 bp, Homo sapiens; identical to SEQ ID NO: 61849

SEQ ID NO: 61880 - DNA, 201 bp, Homo sapiens; identical to SEQ ID NO: 61850

SEQ ID NO: 61881 - DNA, 201 bp, Homo sapiens; identical to SEQ ID NO: 61851

SEQ ID NO: 61882 - DNA, 201 bp, Homo sapiens; identical to SEQ ID NO: 61852

SEQ ID NO: 61883 - DNA, 201 bp, Homo sapiens; identical to SEQ ID NO: 61853

SEQ ID NO: 61884 - DNA, 201 bp, Homo sapiens; identical to SEQ ID NO: 61854

SEQ ID NO: 61885 - DNA, 201 bp, Homo sapiens; identical to SEQ ID NO: 61855

SEQ ID NO: 61886 - DNA, 201 bp, Homo sapiens
tgtggcagccgccccagagctggcgatgggagccctggagctggaaagccggaattcaactctggaccctgggaagcctgagatgatgaagtcccccacamacaccaccccacatgtgccggctgagggacctgaggcaagtcgacccccgaagctgcaccctggcctcagagctgcaccaggccaggagcctcctgagca

SEQ ID NO: 61887 - DNA, 201 bp, Homo sapiens; identical to SEQ ID NO: 61857

SEQ ID NO: 61888 - DNA, 201 bp, Homo sapiens; identical to SEQ ID NO: 61858

SEQ ID NO: 61889 - DNA, 201 bp, Homo sapiens; identical to SEQ ID NO: 61859

SEQ ID NO: 61890 - DNA, 201 bp, Homo sapiens; identical to SEQ ID NO: 61860

SEQ ID NO: 61891 - DNA, 201 bp, Homo sapiens; identical to SEQ ID NO: 61861

SEQ ID NO: 61892 - DNA, 201 bp, Homo sapiens; identical to SEQ ID NO: 61862

SEQ ID NO: 61893 - DNA, 201 bp, Homo sapiens; identical to SEQ ID NO: 61863

SEQ ID NO: 61894 - DNA, 201 bp, Homo sapiens; identical to SEQ ID NO: 61864

SEQ ID NO: 61895 - DNA, 201 bp, Homo sapiens; identical to SEQ ID NO: 61865

SEQ ID NO: 61896 - DNA, 201 bp, Homo sapiens; identical to SEQ ID NO: 61866

SEQ ID NO: 61897 - DNA, 201 bp, Homo sapiens; identical to SEQ ID NO: 61867

SEQ ID NO: 61898 - DNA, 201 bp, Homo sapiens; identical to SEQ ID NO: 61868

SEQ ID NO: 61899 - DNA, 201 bp, Homo sapiens; identical to SEQ ID NO: 61869

SEQ ID NO: 61900 - DNA, 201 bp, Homo sapiens; identical to SEQ ID NO: 61870

SEQ ID NO: 61901 - DNA, 201 bp, Homo sapiens; identical to SEQ ID NO: 61871

SEQ ID NO: 61902 - DNA, 201 bp, Homo sapiens; identical to SEQ ID NO: 61872

SEQ ID NO: 61903 - DNA, 201 bp, Homo sapiens; identical to SEQ ID NO: 61873

SEQ ID NO: 61904 - DNA, 201 bp, Homo sapiens; identical to SEQ ID NO: 61874

SEQ ID NO: 61905 - DNA, 201 bp, Homo sapiens; identical to SEQ ID NO: 61875

SEQ ID NO: 61906 - DNA, 201 bp, Homo sapiens; identical to SEQ ID NO: 61876

SEQ ID NO: 61907 - DNA, 103 bp, Homo sapiens
ccygccgccacgccgcctacaaacaggtgctgatccggcacggcgaggttgcgtggaacctggagaaccgcttcggtggctggtacgatgccaacctgaaccc

SEQ ID NO: 61908 - DNA, 145 bp, Homo sapiens
gcagctgaacctgccgactggtattcccattgtctatgaattggacaagagctcgaagcccatcaagcccatacagttcctgggggatgaagagaccgtgygtgaagccatggaagctgtggctgcccagggcaaggccaagaag

SEQ ID NO: 61909 - DNA, 201 bp, Homo sapiens
atacaataatcagtctataaacctgcttgacgtcttgcacatcagactacttgttggatctcagattgcagcagagatgcgggaagccatgtataatcagytggggctcactggctgtgctggagtggcttctaataaactgttggcaaaattagtttctggtgtctttaaaccaaatcaacaaacagtcttattacctga

SEQ ID NO: 61910 - DNA, 201 bp, Homo sapiens
aactgttggcaaaattagtttctggtgtctttaaaccaaatcaacaaacagtcttattacctgaaagttgtcaacatcttattcatagtttgaatcacatraaggaaatacctggtattggctataaaactgccaaatgtcttgaagcactgggtatcaatagtgtgcgtgatctccaaaccttttcacccaaaattttag

SEQ ID NO: 61911 - DNA, 129 bp, Homo sapiens
aagcgaaagccactttctttctgctcctcccccacctccctaaccccagaaaccactaattctgttcatctttatcattttgtcatttcaaaaatgttaartaaatggaagaatccactatttaacctt

SEQ ID NO: 61912 - DNA, 201 bp, Homo sapiens
cggttggcagcggcgggatggagaagctgggggtggagccggaggaggaaggcggcggcgacgacgaggaagacgccgaggcctgggccatggaactggcrgacgtgggggcggcagccagctcgcagggagttcatgatcaagtgttgcccacaccaaatgcttcatccagagtcatagtacatgtggatctggattgct

SEQ ID NO: 61913 - DNA, 201 bp, Homo sapiens
atctccaaaccttttcacccaaaattttagaaaaagaattaggaatttcagttgctcagcgtatccaaaagctcagttttggagaggataactcccctgtsatactctcaggaccacctcagtcctttagtgaagaagattcatttaaaaaatgttcatctgaagttgaagctaaaaataagattgaagaactacttgcta

SEQ ID NO: 61914 - DNA, 201 bp, Homo sapiens
ttgctagtcttttaaacagagtatgccaagatggaaggaagcctcatacagtgagattaataatccgtcggtattcctctgagaagcactatggtcgtgaragtcgtcagtgccctattccttcacatgtaattcagaaattagggacaggtctccagtccccagatttctgtgcatcctctctcatgcaaagaaggctgg

SEQ ID NO: 61915 - DNA, 201 bp, Homo sapiens
gtttcaaattcatgtgaccacgccacagtcaacacacagaacaggtttatcacaaggatccctcctgccaccctttcaaagcgaaagccactttctttctkctcctcccccacctccctaaccccagaaaccactaattctgttcatctttatcattttgtcatttcaaaaatgttaaataaatggaagaatccactattt

SEQ ID NO: 61916 - DNA, 201 bp, Homo sapiens; identical to SEQ ID NO: 61909

SEQ ID NO: 61917 - DNA, 201 bp, Homo sapiens; identical to SEQ ID NO: 61910

SEQ ID NO: 61918 - DNA, 201 bp, Homo sapiens; identical to SEQ ID NO: 61912

SEQ ID NO: 61919 - DNA, 201 bp, Homo sapiens; identical to SEQ ID NO: 61913

SEQ ID NO: 61920 - DNA, 201 bp, Homo sapiens
tgttgatgagaaaattactttcccttctgacattgatcctcaagttttctatgaactaccagaagcagtacaaaaggaactgctggcagagtggaagagarcaggatcagatttccacattggacataaataagcatattcagcaaaaaggtctgaaaagcaagggaataccattattttcggattagcggtttattaagc

SEQ ID NO: 61921 - DNA, 201 bp, Homo sapiens
actagggagtctccactagataccacaaatttttctaaagaaaaagacattaatgaattcccactctgttcacttcctgaaggtgttgaccaagaagtctycaagcagcttccagtagatattcaagaagaaatcctttctggaaaatctagggaaaaatttcaagggaaaggaagtgtgagttgtccattacatgcctct

SEQ ID NO: 61922 - DNA, 201 bp, Homo sapiens
ttgctagtcttttaaacagagtatgccaagatggaaggaagcctcatacagtgagattaataatccgtcggtattcctctgagaagcactatggtcgtgaragtcgtcagtgccctattccttcacatgtaattcagaaattagggacaggaaattatgatgtgatgaccccaatggttgatatacttatgaaactttttc

SEQ ID NO: 61923 - DNA, 201 bp, Homo sapiens
tttttaaaaattgtgttaagtctatgtataatactactgtgagtaaaagtaatactttaataatgtggtacaaattttaaagtttaatattgaataaaaggaggattatcaaattcatatatgataaaagtgaatgttctaagtctctcaaactagcgttttatgtaataatatgtaatataaataaaactatggtaaatg

SEQ ID NO: 61924 - DNA, 201 bp, Homo sapiens
ccagttagatttgaatttcagataaacaattagttttttaatattttacatggaatatttggaaaatacttatactaaaaaattatttgtttgaaattcamatttaactgggagtcttgtattttatctggcaatcctaaaatacattggtatgaaacaaatcacttttagaagtatattgctattttgattgggttgttt

SEQ ID NO: 61925 - DNA, 201 bp, Homo sapiens
cacacaaactaaaggaggactttcgactgcattttagaaatatttcaagaattatggattgtgttggttgttttaaatgtcgtctgtggggaaagcttcakactcagggtttgggcactgctctgaagatcttattttctgagaaattgatagcaaatatgccagaaagtggacctagttatgaattccatctaaccagac

SEQ ID NO: 61926 - DNA, 201 bp, Homo sapiens
ataacttctgtgaagctgatgacattcagtcccctgaagctgaatatgtagatttgcttcttaatcctgagcgctacactggttacaagggaccagatgcytggaaaatatggaatgtcatctacgaagaaaactgttttaagccacagacaattaaaagacctttaaatcctttggcttctggtcaagagaacacttttt

SEQ ID NO: 61927 - DNA, 201 bp, Homo sapiens
catttttaaaaattgtgttaagtctatgtataatactactgtgagtaaaagtaatactttaataatgtggtacaaattttaaagtttaatattgaataaaaggaggattatcaaattcatatatgataaaagtgaatgttctaagtctctcaaactagcgttttatgtaataatatgtaatataaataaaactatggtaaa

SEQ ID NO: 61928 - DNA, 201 bp, Homo sapiens
gtcgtctgtggggaaagcttcagactcagggtttgggcactgctctgaagatcttattttctgagaaattgatagcaaatatgccagaaagtggacctagytatgaattccatctaaccagacaagaaatagtatcattattcaacgcatttggaagaatttctacaagtgtgaaagaattagaaaacttcaggaacttgt

SEQ ID NO: 61929 - DNA, 201 bp, Homo sapiens
gaccagatgcttggaaaatatggaatgtcatctacgaagaaaactgttttaagccacagacaattaaaagacctttaaatcctttggcttctggtcaagaraacactttttacagttggctagaaggtctctgtgtagaaaaaagagcattctacagacttatatctggcctacatgcaagcattaatgtgcatttgagtg

SEQ ID NO: 61930 - DNA, 201 bp, Homo sapiens
atttttaaaaattgtgttaagtctatgtataatactactgtgagtaaaagtaatactttaataatgtggtacaaattttaaagtttaatattgaataaaaggaggattatcaaattcatatatgataaaagtgaatgttctaagtctctcaaactagcgttttatgtaataatatgtaatataaataaaactatggtaaat

SEQ ID NO: 61931 - DNA, 201 bp, Homo sapiens
ctcttcatttataaagctatttgaaggggtttaggaatttatatcacatggtaattgtagagaaaaagaagctatatacctcaaaatcgtgccctctttamatatgtcttatcaggtataacatgttgaaatgtcacattagtagtaaagtggggtttatttatatagtggttaagaaatgtcagtttacactgctgtata

SEQ ID NO: 61932 - DNA, 201 bp, Homo sapiens; identical to SEQ ID NO: 61924

SEQ ID NO: 61933 - DNA, 201 bp, Homo sapiens
ttggaaaatatggaatgtcatctacgaagaaaactgttttaagccacagacaattaaaagacctttaaatcctttggcttctggtcaaggtaaattacttrtagaacactttttacagttggctagaaggtctctgtgtagaaaaaagagcattctacagacttatatctggcctacatgcaagcattaatgtgcatttga

SEQ ID NO: 61934 - DNA, 201 bp, Homo sapiens
ataacttctgtgaagctgatgacattcagtcccctgaagctgaatatgtagatttgcttcttaatcctgagcgctacactggttacaagggaccagatgcytggaaaatatggaatgtcatctacgaagaaaactgttttaagccacagacaattaaaagacctttaaatcctttggcttctggtcaaggtaaattactta

SEQ ID NO: 61935 - DNA, 201 bp, Homo sapiens; identical to SEQ ID NO: 61927

SEQ ID NO: 61936 - DNA, 201 bp, Homo sapiens
gaaaatatggaatgtcatctacgaagaaaactgttttaagccacagacaattaaaagacctttaaatcctttggcttctggtcaaggtaaattacttataraacactttttacagttggctagaaggtctctgtgtagaaaaaagagcattctacagacttatatctggcctacatgcaagcattaatgtgcatttgagtg

SEQ ID NO: 61937 - DNA, 201 bp, Homo sapiens; identical to SEQ ID NO: 61930

SEQ ID NO: 61938 - DNA, 201 bp, Homo sapiens; identical to SEQ ID NO: 61923

SEQ ID NO: 61939 - DNA, 201 bp, Homo sapiens
aaggtaaattacttatagaacactttttacagttggctagaaggtctctgtgtagaaaaaagagcattctacagacttatatctggcctacatgcaagcaktaatgtgcatttgagtgcaagatatcttttacaagagacctggttagaaaagaaatggggacacaacattacagaatttcaacagcgatttgatggaatt

SEQ ID NO: 61940 - DNA, 201 bp, Homo sapiens
gctccactcaaggagagtcatctaacttccactttcgtgtcaccactgtaattacaacctacctctattgtatgtcacttaaatcgtactgtattgttttwtttttcaaaagtctttactagaatgtgagctccttaagggcaggaaaaggaacctttttattttttgcatctccatagcatagtttttggcatatgaatg

SEQ ID NO: 61941 - DNA, 201 bp, Homo sapiens
cctccaccgaatgttctggtgaaacagacttacacttcttcagaagccacatttggccaggcctcccgccttggtaaatgctgtactctttgcatcaagtrtgctagtcatccttccccacttggaaaattcctatgcatcttgcaggcctgacataagcatttcctctgtgaaacctcctttgctccactcaaggagagt

SEQ ID NO: 61942 - DNA, 201 bp, Homo sapiens; identical to SEQ ID NO: 61928

SEQ ID NO: 61943 - DNA, 201 bp, Homo sapiens
agggcaaagccaggtccctctcatttagcctgtcctgtcatcatcatggccagctggaggcaggggcttcctggtgctggaggttggatcttgatgctgartgcatttggagggagtgagtggccctttcggatccagggaggctggtcctatggcctcatgttaaataggcggggcttgccttctggtgttggacaagct

SEQ ID NO: 61944 - DNA, 201 bp, Homo sapiens
ctttggagcagcaatccccagatattgcccagtgcgtccatctggacagaaatgaggaggatgtgggggcaggagatcagggtttgatgttcggctatgcyaccgacgagacagaggagtgcatgcccctcaccatcatccttgctcacaagctcaacgcccggatggcagacctcaggcgctccggcctcctcccctggc

SEQ ID NO: 61945 - DNA, 201 bp, Homo sapiens
gctgctggatgtggtgcataagaacttcgacctccggccgggcgtcattgtcagggatttggacttgaagaagcccatctaccagaagacagcatgctacrgccatttcggaagaagcgagttcccatgggaggttcccaggaagcttgtattttagagccagggggagctgggcctggtctcaccctggaggcacctggt

SEQ ID NO: 61946 - DNA, 173 bp, Homo sapiens
tgatgctgagtgcatttggagggagtgagtggccctttcggatccagggaggctggtcctatggcctcatgttaaataggcggggcttgccttctggtgtyggacaagcttctgagacgtcatgaggagattctgcctttgccaggtgaaaggaaattaaggcaacaaaagaa

SEQ ID NO: 61947 - DNA, 201 bp, Homo sapiens
agagccagggggagctgggcctggtctcaccctggaggcacctggtggccatgctcctcttccccagacgcctggctgctgatcgccttccccacccaccwaccctcagggcaaagccaggtccctctcatttagcctgtcctgtcatcatcatggccagctggaggcaggggcttcctggtgctggaggttggatcttga

SEQ ID NO: 61948 - DNA, 201 bp, Homo sapiens
gtcgctcaggagcaagctgtggcaagctggagggagggacacatcccgtgttccatccactccctcccttctcagcagtcctcgcctgttctcacgtgctyacaggcagttaggcagaagtgatccccgtggctctgccaaagacaagcctgttgggttgaaagaagaagaagaagaagaagaagaaaaaaaaactcaggc

SEQ ID NO: 61949 - DNA, 201 bp, Homo sapiens
agctgctggatgtggtgcataagaacttcgacctccggccgggcgtcattgtcagggatttggacttgaagaagcccatctaccagaagacagcatgctayggccatttcggaagaagcgagttcccatgggaggttcccaggaagcttgtattttagagccagggggagctgggcctggtctcaccctggaggcacctgg

SEQ ID NO: 61950 - DNA, 201 bp, Homo sapiens
tcggagtctgtgggagagggacacccggataagatctgtgaccagatcagtgatgcagtgctggatgcccatctcaagcaagaccccaatgccaaggtggmctgtgagacagtgtgcaagaccggcatggtgctgctgtgtggtgagatcacctcaatggccatggtggactaccagcgggtggtgagggacaccatcaag

SEQ ID NO: 61951 - DNA, 201 bp, Homo sapiens
agacctcaggcgctccggcctcctcccctggctgcggcctgactctaagactcaggtgacagttcagtacatgcaggacaatggcgcagtcatccctgtgygcatccacaccatcgtcatctctgtgcagcacaacgaagacatcacgctggaggagatgcgcagggccctgaaggagcaagtcatcagggccgtggtgcc

SEQ ID NO: 61952 - DNA, 201 bp, Homo sapiens
ggtgccggccaagtacctggacgaagacaccgtctaccacctgcagcccagtgggcggtttgtcatcggaggtccccagggggatgcgggtgtcactggcygtaagattattgtggacacctatggcggctggggggctcatggtggtggggccttctctgggaaggactacaccaaggtagaccgctcagctgcatatgc

SEQ ID NO: 61953 - DNA, 201 bp, Homo sapiens
aggtagaccgctcagctgcatatgctgcccgctgggtggccaagtctctggtgaaagcagggctctgccggagagtgcttgtccaggtttcctatgccatkggtgtggccgagccgctgtccatttccatcttcacctacggaacctctcagaagacagagcgagagctgctggatgtggtgcataagaacttcgacctcc

SEQ ID NO: 61954 - DNA, 201 bp, Homo sapiens
ggtgatcacagacccctgctctccaaggtgggttgtgaactctggagcactaccaagattggctaagagctgaaggagagtcccaaaggagcttcaattcygcagaactatacagccttctttaccttaccttgaccaggtgcttagagtttggaaagtcagggataagaattgaaattcctccaggtaagaagacccccc

SEQ ID NO: 61955 - DNA, 201 bp, Homo sapiens
ggtgtggccgagccgctgtccatttccatcttcacctacggaacctctcagaagacagagcgagagctgctggatgtggtgcataagaacttcgacctccrgccgggcgtcattgtcagggatttggacttgaagaagcccatctaccagaagacagcatgctacggccatttcggaagaagcgagttcccatgggaggtt

SEQ ID NO: 61956 - DNA, 201 bp, Homo sapiens
gtggccgagccgctgtccatttccatcttcacctacggaacctctcagaagacagagcgagagctgctggatgtggtgcataagaacttcgacctccggcygggcgtcattgtcagggatttggacttgaagaagcccatctaccagaagacagcatgctacggccatttcggaagaagcgagttcccatgggaggttccc

SEQ ID NO: 61957 - DNA, 201 bp, Homo sapiens
tgccggagagtgcttgtccaggtttcctatgccattggtgtggccgagccgctgtccatttccatcttcacctacggaacctctcagaagacagagcgagmgctgctggatgtggtgcataagaacttcgacctccggccgggcgtcattgtcagggatttggacttgaagaagcccatctaccagaagacagcatgctac

SEQ ID NO: 61958 - DNA, 201 bp, Homo sapiens
ccaagtctctggtgaaagcagggctctgccggagagtgcttgtccaggtttcctatgccattggtgtggccgagccgctgtccatttccatcttcacctayggaacctctcagaagacagagcgagagctgctggatgtggtgcataagaacttcgacctccggccgggcgtcattgtcagggatttggacttgaagaagc

SEQ ID NO: 61959 - DNA, 201 bp, Homo sapiens
caagtctctggtgaaagcagggctctgccggagagtgcttgtccaggtttcctatgccattggtgtggccgagccgctgtccatttccatcttcacctacrgaacctctcagaagacagagcgagagctgctggatgtggtgcataagaacttcgacctccggccgggcgtcattgtcagggatttggacttgaagaagcc

SEQ ID NO: 61960 - DNA, 201 bp, Homo sapiens
tggtgccggccaagtacctggacgaagacaccgtctaccacctgcagcccagtgggcggtttgtcatcggaggtccccagggggatgcgggtgtcactggycgtaagattattgtggacacctatggcggctggggggctcatggtggtggggccttctctgggaaggactacaccaaggtagaccgctcagctgcatatg

SEQ ID NO: 61961 - DNA, 201 bp, Homo sapiens
cccatgggaggttcccaggaagcttgtattttagagccagggggagctgggcctggtctcaccctggaggcacctggtggccatgctcctcttccccagaygcctggctgctgatcgccttccccacccaccaaccctcagggcaaagccaggtccctctcatttagcctgtcctgtcatcatcatggccagctggaggca

SEQ ID NO: 61962 - DNA, 201 bp, Homo sapiens
ggaggttcccaggaagcttgtattttagagccagggggagctgggcctggtctcaccctggaggcacctggtggccatgctcctcttccccagacgcctgkctgctgatcgccttccccacccaccaaccctcagggcaaagccaggtccctctcatttagcctgtcctgtcatcatcatggccagctggaggcaggggct

SEQ ID NO: 61963 - DNA, 201 bp, Homo sapiens
tcactggccgtaagattattgtggacacctatggcggctggggggctcatggtggtggggccttctctgggaaggactacaccaaggtagaccgctcagcygcatatgctgcccgctgggtggccaagtctctggtgaaagcagggctctgccggagagtgcttgtccaggtttcctatgccattggtgtggccgagccgc

SEQ ID NO: 61964 - DNA, 201 bp, Homo sapiens
gggatgcgggtgtcactggccgtaagattattgtggacacctatggcggctggggggctcatggtggtggggccttctctgggaaggactacaccaaggtrgaccgctcagctgcatatgctgcccgctgggtggccaagtctctggtgaaagcagggctctgccggagagtgcttgtccaggtttcctatgccattggtg

SEQ ID NO: 61965 - DNA, 201 bp, Homo sapiens
gcagaagcagcaacttgtcctagcacagatggccagccccttagacagaggccctcaagtctttctctttccctggtcccttgtatcccctgcaggctgartgcatttggagggagtgagtggccctttcggatccagggaggctggtcctatggcctcatgttaaataggcggggcttgccttctggtgttggacaagct

SEQ ID NO: 61966 - DNA, 201 bp, Homo sapiens; identical to SEQ ID NO: 61944

SEQ ID NO: 61967 - DNA, 201 bp, Homo sapiens
attccttcccatggagggagggagtggtttgcaggtggccaagttcctctaacttggctcacactcgacatgaaaattcagaattttatactttccctacyctctagagaaataagatcttttttgtcagtttgtttgtatgaaactaaagcctttatttgttaatagttcctgctaaaacaatgaataaaaactcaagga

SEQ ID NO: 61968 - DNA, 201 bp, Homo sapiens
gtgaagacagaaccacagggctattttgtttgcttcatgtgtcccagaagatgactgagggtgagttggcttacctggcccatcagggtaggctggagttwgggactgaccagcagctttagaatcccagccccctgaccactcagagacatgcagagattgggtttttggacttctggggtaagtggtctaagtccagtc

SEQ ID NO: 61969 - DNA, 201 bp, Homo sapiens; identical to SEQ ID NO: 61945

SEQ ID NO: 61970 - DNA, 201 bp, Homo sapiens
gcaggctgagtgcatttggagggagtgagtggccctttcggatccagggaggctggtcctatggcctcatgttaaataggcggggcttgccttctggtgtyggacaagcttctgagacgtcatgaggagattctgcctttgccaggtgactgtctggggagcgggtctgctcccaaggggcctgagcagtccttggcctgc

SEQ ID NO: 61971 - DNA, 201 bp, Homo sapiens; identical to SEQ ID NO: 61947

SEQ ID NO: 61972 - DNA, 201 bp, Homo sapiens; identical to SEQ ID NO: 61948

SEQ ID NO: 61973 - DNA, 201 bp, Homo sapiens; identical to SEQ ID NO: 61949

SEQ ID NO: 61974 - DNA, 201 bp, Homo sapiens; identical to SEQ ID NO: 61950

SEQ ID NO: 61975 - DNA, 201 bp, Homo sapiens
ctgtctggggagcgggtctgctcccaaggggcctgagcagtccttggcctgctaaggtcttggaacttgcctgcctttccatccatggccagcagcacctsccctacctgccccacttgtccttagcctggacctctgacagcagcatctctaccttctccccagctcccaggaccacaggctcaggcaggggcctccatg

SEQ ID NO: 61976 - DNA, 201 bp, Homo sapiens; identical to SEQ ID NO: 61951

SEQ ID NO: 61977 - DNA, 201 bp, Homo sapiens; identical to SEQ ID NO: 61952

SEQ ID NO: 61978 - DNA, 201 bp, Homo sapiens; identical to SEQ ID NO: 61953

SEQ ID NO: 61979 - DNA, 201 bp, Homo sapiens; identical to SEQ ID NO: 61954

SEQ ID NO: 61980 - DNA, 201 bp, Homo sapiens; identical to SEQ ID NO: 61955

SEQ ID NO: 61981 - DNA, 201 bp, Homo sapiens; identical to SEQ ID NO: 61956

SEQ ID NO: 61982 - DNA, 201 bp, Homo sapiens; identical to SEQ ID NO: 61958

SEQ ID NO: 61983 - DNA, 201 bp, Homo sapiens; identical to SEQ ID NO: 61957

SEQ ID NO: 61984 - DNA, 201 bp, Homo sapiens
gagccagggtctccagaaagccccacccaggccaggcatgtggcaggggttagagcaggactgatgtctcctaagcacctgtaatgtgcgagggacccagytaataactgatctcgttttttcttcactgcaacatgatgaggtagtaccttttatatcccatttatagatgggggaaagcaaagcacagagagtctggat

SEQ ID NO: 61985 - DNA, 201 bp, Homo sapiens
cagcagctttagaatcccagccccctgaccactcagagacatgcagagattgggtttttggacttctggggtaagtggtctaagtccagtccagtcctatstgggcttcctggagcagaagcagcaacttgtcctagcacagatggccagccccttagacagaggccctcaagtctttctctttccctggtcccttgtatc

SEQ ID NO: 61986 - DNA, 201 bp, Homo sapiens; identical to SEQ ID NO: 61959

SEQ ID NO: 61987 - DNA, 201 bp, Homo sapiens; identical to SEQ ID NO: 61960

SEQ ID NO: 61988 - DNA, 201 bp, Homo sapiens; identical to SEQ ID NO: 61961

SEQ ID NO: 61989 - DNA, 201 bp, Homo sapiens; identical to SEQ ID NO: 61962

SEQ ID NO: 61990 - DNA, 201 bp, Homo sapiens; identical to SEQ ID NO: 61963

SEQ ID NO: 61991 - DNA, 201 bp, Homo sapiens; identical to SEQ ID NO: 61964

SEQ ID NO: 61992 - DNA, 201 bp, Homo sapiens
tgctgcttggtggtagtgttttctctggaagtacagattcctgacattctgggtggaggggagcccaagtgagcctgaaggagttctgattatagagtccygagcctcagtttctgactgcagaagagccagagatgttcatttcattgttgaccaccctagtgcttggtggactgtgcccttagctatcccactgtggct

SEQ ID NO: 61993 - DNA, 201 bp, Homo sapiens
aagccggtgctcaccaagatcagttcaggatcaatcattatccttgtagtcatgccttgatcagttctgagatgaagcagggaatgcaggcctgggttagyatcctgaggacacagggcccctggccttgatggcactgggccgtgctcaggtgaagcccacccgtgtctgggagagccttggcttttcagtgggcagcat

SEQ ID NO: 61994 - DNA, 201 bp, Homo sapiens
cttgtagtcatgccttgatcagttctgagatgaagcagggaatgcaggcctgggttagcatcctgaggacacagggcccctggccttgatggcactgggcygtgctcaggtgaagcccacccgtgtctgggagagccttggcttttcagtgggcagcatgctcaactttacttgaagctcccaggtgccaaaccatttagt

SEQ ID NO: 61995 - DNA, 201 bp, Homo sapiens
aaaggcagtgggttaaacaacgggatgtctgtgggacaggccagggaaggagggcagagacagggtctccagttcaccttgccgcagaactagcctaatcrtccctgcttctggtcttggccacttggcaatcatggggaagttgactccccgcctcacttgggcttggagctggatactcgtggccacgcccaggatagg

SEQ ID NO: 61996 - DNA, 201 bp, Homo sapiens
gccgcagaactagcctaatcgtccctgcttctggtcttggccacttggcaatcatggggaagttgactccccgcctcacttgggcttggagctggatactygtggccacgcccaggataggttgccagagtttcattaggccgctgggtcgggctggaggcttgtgtacacctcggagcagtcgggcagcaggagggccgg

SEQ ID NO: 61997 - DNA, 114 bp, Homo sapiens
tttaagatgcttgctcctctcccttttctttttaccaccctacctttattgttagtggttacaaagtgaccacatattatgtactttgctgtaaataaagmcagacaaaaaggc

SEQ ID NO: 61998 - DNA, 201 bp, Homo sapiens
aaattaggtaaaatctcaactcaaaaatcaaactcagggaagaggcccactgaggagaacaagtcttctgcattttcttcctgccctgctcccaccttctygcctctggctgcttggatagcttggtgactccttcctcaccctcctgcttctctgtctctccaagaagccagagctgcctctttccttccctggaagaga

SEQ ID NO: 61999 - DNA, 201 bp, Homo sapiens
tttgtggatacagatgcggacacccggctctcacgcagagtattaagggacatcagcgagagaggcagggatcttgagcagattttatctcagtacattaygttcgtcaagcctgcctttgaggaattctgcttgccaacaaagaagtatgctgatgtgatcatccctagaggtgcagataatctggtggccatcaacctc

SEQ ID NO: 62000 - DNA, 201 bp, Homo sapiens
ccttcacactaatgagccttctactgacccaagtttctttttctcgggcagcctgggaccactatgagcagagagatgggagtctgtgtaagaaggatgcragtatcctttgatttggagtggacagagcaggtccttgcaaaggcagtgggttaaacaacgggatgtctgtgggacaggccagggaaggagggcagagac

SEQ ID NO: 62001 - DNA, 201 bp, Homo sapiens
cattactgtatttaagaaaacaccatggagatgaaatgcctttgattttttttttctttttgtactttggaacgacaaaatgaaacagaacttgaccctgrgcttaaataacaaaactgtgccaactactactggtgatgcctaattatgaatccaacgtgtaaccagttataaatacatatatatataaaaaaggatcta

SEQ ID NO: 62002 - DNA, 201 bp, Homo sapiens
cctgcagaagaatgtaaaggagggaggaagagcaggggattcagagcaggaaggaggagacagttactgtctatcccgcagacgtggtgctctttgaaggratcctggccttctactcccaggaggtacgagacctgttccagatgaagctttttgtggatacagatgcggacacccggctctcacgcagagtattaaggg

SEQ ID NO: 62003 - DNA, 101 bp, Homo sapiens
ctcctctcccttttctttttaccaccctacctttattgttagtggttacaaagtgaccacatattatgtactttgctgtaaataaagacagacaaaaaggm

SEQ ID NO: 62004 - DNA, 201 bp, Homo sapiens
gtcttttttttttttcttttctttttttttttgagttgaaattaggtaaaatctcaactcaaaaatcaaactcagggaagaggcccactgaggagaacaartcttctgcattttcttcctgccctgctcccaccttctcgcctctggctgcttggatagcttggtgactccttcctcaccctcctgcttctctgtctctcc

SEQ ID NO: 62005 - DNA, 201 bp, Homo sapiens
gctcagtcccctttaatcttttgtctctgggcgttctgctgccttcctcataccggggactggcattccaggtcagcttggctgtggtcttagaggcaggragtgcctacccagtcctgcctcaggagcagggtgagtagctaaatacagacttaggcttttttttccccccttttaagatgcttgctcctctcccttttc

SEQ ID NO: 62006 - DNA, 201 bp, Homo sapiens
gagagtaactttggtcagggattctcactagcagcgtcatggccaggatgctttacttatttgcaataccacctagtggatatggcaactgcagagcatamaaggggctcggaaaagcagtttttacaaagtatttaaaaggagagtatttaaatcataggtacctaagttggagcctgaggttgaaatatttggggtgga

SEQ ID NO: 62007 - DNA, 201 bp, Homo sapiens
cagggtggggaggctcgggcatctgtgagagacagggagggtggctaaggtccagttgcttttgagtgccccgtggaacttgatgggaatggggttggaamaccttgattgcctcctctgtcacatgccactcttggagctggagcttagtgatatgtcaatgagagatactcttgtcttttttttttttcttttcttttt

SEQ ID NO: 62008 - DNA, 201 bp, Homo sapiens; identical to SEQ ID NO: 61992

SEQ ID NO: 62009 - DNA, 201 bp, Homo sapiens; identical to SEQ ID NO: 61993

SEQ ID NO: 62010 - DNA, 201 bp, Homo sapiens; identical to SEQ ID NO: 61994

SEQ ID NO: 62011 - DNA, 201 bp, Homo sapiens; identical to SEQ ID NO: 61995

SEQ ID NO: 62012 - DNA, 201 bp, Homo sapiens; identical to SEQ ID NO: 61996

SEQ ID NO: 62013 - DNA, 114 bp, Homo sapiens; identical to SEQ ID NO: 61997

SEQ ID NO: 62014 - DNA, 201 bp, Homo sapiens; identical to SEQ ID NO: 61998

SEQ ID NO: 62015 - DNA, 201 bp, Homo sapiens; identical to SEQ ID NO: 61999

SEQ ID NO: 62016 - DNA, 201 bp, Homo sapiens; identical to SEQ ID NO: 62000

SEQ ID NO: 62017 - DNA, 201 bp, Homo sapiens; identical to SEQ ID NO: 62001

SEQ ID NO: 62018 - DNA, 201 bp, Homo sapiens
aagggaaaacagtccagatccccgtgtatgactttgtctcccattcccggaaggaggagacagttactgtctatcccgcagacgtggtgctctttgaaggratcctggccttctactcccaggaggtacgagacctgttccagatgaagctttttgtggatacagatgcggacacccggctctcacgcagagtattaaggg

SEQ ID NO: 62019 - DNA, 101 bp, Homo sapiens; identical to SEQ ID NO: 62003

SEQ ID NO: 62020 - DNA, 201 bp, Homo sapiens; identical to SEQ ID NO: 62004

SEQ ID NO: 62021 - DNA, 201 bp, Homo sapiens; identical to SEQ ID NO: 62005

SEQ ID NO: 62022 - DNA, 201 bp, Homo sapiens; identical to SEQ ID NO: 62006

SEQ ID NO: 62023 - DNA, 201 bp, Homo sapiens; identical to SEQ ID NO: 62007

SEQ ID NO: 62024 - DNA, 201 bp, Homo sapiens
tgctgcttggtggtagtgttttctctggaagtacagattcctgacattctgggtggaggggagcccaagtgagcctgaaggagttctgattatagagtccygagcctcagtttctgactgcagaagagccagagatgttcatttcattgttgaccaccctagtgcttggtggactgtgcccttagctatcccactcatttg

SEQ ID NO: 62025 - DNA, 201 bp, Homo sapiens; identical to SEQ ID NO: 62001

SEQ ID NO: 62026 - DNA, 201 bp, Homo sapiens; identical to SEQ ID NO: 62018

SEQ ID NO: 62027 - DNA, 201 bp, Homo sapiens; identical to SEQ ID NO: 61995

SEQ ID NO: 62028 - DNA, 201 bp, Homo sapiens; identical to SEQ ID NO: 61996

SEQ ID NO: 62029 - DNA, 114 bp, Homo sapiens; identical to SEQ ID NO: 61997

SEQ ID NO: 62030 - DNA, 201 bp, Homo sapiens; identical to SEQ ID NO: 61998

SEQ ID NO: 62031 - DNA, 101 bp, Homo sapiens; identical to SEQ ID NO: 62003

SEQ ID NO: 62032 - DNA, 201 bp, Homo sapiens; identical to SEQ ID NO: 61999

SEQ ID NO: 62033 - DNA, 201 bp, Homo sapiens; identical to SEQ ID NO: 62005

SEQ ID NO: 62034 - DNA, 201 bp, Homo sapiens; identical to SEQ ID NO: 62004

SEQ ID NO: 62035 - DNA, 201 bp, Homo sapiens; identical to SEQ ID NO: 62006

SEQ ID NO: 62036 - DNA, 201 bp, Homo sapiens; identical to SEQ ID NO: 62000

SEQ ID NO: 62037 - DNA, 201 bp, Homo sapiens; identical to SEQ ID NO: 62007

SEQ ID NO: 62038 - DNA, 159 bp, Homo sapiens
tacaatcccaacactttgggaggctgaggaaggggcatcacttgaaccaggagttcagtactaacctgggcaacaaagaggcccctgtctctgataaaaaraaaaaaaatgaaaaaataaaaatgaacaggtataaaaagagaatatggtacaaagtca

SEQ ID NO: 62039 - DNA, 201 bp, Homo sapiens
ttggcggctgatcctggactgggtaccttacatcaatggcaagtttaagaaggataattaattacacaaacccttcacagactgctctggtgcctggtggygctagctcctcccacctcagcacctgctgcatctggagcagcccaagcctcaggatggacaagaggaaacccacagctcagcttcaggcttcttatgttt

SEQ ID NO: 62040 - DNA, 201 bp, Homo sapiens
ttcacagactgctctggtgcctggtggtgctagctcctcccacctcagcacctgctgcatctggagcagcccaagcctcaggatggacaagaggaaacccmcagctcagcttcaggcttcttatgtttctgaaaacagcttggatattttaatgcacgttgcattaaacctcactgaaacctgctccgtgcccggatgttg

SEQ ID NO: 62041 - DNA, 201 bp, Homo sapiens
cctggtggtgctagctcctcccacctcagcacctgctgcatctggagcagcccaagcctcaggatggacaagaggaaacccacagctcagcttcaggcttyttatgtttctgaaaacagcttggatattttaatgcacgttgcattaaacctcactgaaacctgctccgtgcccggatgttgatcatgctggtggcttggt

SEQ ID NO: 62042 - DNA, 201 bp, Homo sapiens
caatggcaagtttaagaaggataattaattacacaaacccttcacagactgctctggtgcctggtggtgctagctcctcccacctcagcacctgctgcatytggagcagcccaagcctcaggatggacaagaggaaacccacagctcagcttcaggcttcttatgtttctgaaaacagcttggatattttaatgcacgttg

SEQ ID NO: 62043 - DNA, 201 bp, Homo sapiens
ttttgaagggaagaatatcagaattggtagacatttcaaactgtcacattagggatacaaaaatgaacaggctgggagtggtggctcagcctacaatcccracactttgggaggctgaggaaggggcatcacttgaaccaggagttcagtactaacctgggcaacaaagaggcccctgtctctgataaaaagaaaaaaaat

SEQ ID NO: 62044 - DNA, 201 bp, Homo sapiens
tggacaagaggaaacccacagctcagcttcaggcttcttatgtttctgaaaacagcttggatattttaatgcacgttgcattaaacctcactgaaacctgmtccgtgcccggatgttgatcatgctggtggcttggttactgtgactgtagctggagtggcacaggtgacccaggcgtcctttcagctccagaatgttgca

SEQ ID NO: 62045 - DNA, 201 bp, Homo sapiens
ccaaagtgctgggattagaggcgtgagccactgcacccagcctggaagggacacttctactcaccctgcctcgtctgctctccctccaggtgcctggtggygctagctcctcccacctcagcacctgctgcatctggagcagcccaagcctcaggatggacaagaggaaacccacagctcagcttcaggcttcttatgttt

SEQ ID NO: 62046 - DNA, 201 bp, Homo sapiens
tctgctctccctccaggtgcctggtggtgctagctcctcccacctcagcacctgctgcatctggagcagcccaagcctcaggatggacaagaggaaacccmcagctcagcttcaggcttcttatgtttctgaaaacagcttggatattttaatgcacgttgcattaaacctcactgaaacctgctccgtgcccggatgttg

SEQ ID NO: 62047 - DNA, 201 bp, Homo sapiens; identical to SEQ ID NO: 62041

SEQ ID NO: 62048 - DNA, 201 bp, Homo sapiens
cacccagcctggaagggacacttctactcaccctgcctcgtctgctctccctccaggtgcctggtggtgctagctcctcccacctcagcacctgctgcatytggagcagcccaagcctcaggatggacaagaggaaacccacagctcagcttcaggcttcttatgtttctgaaaacagcttggatattttaatgcacgttg

SEQ ID NO: 62049 - DNA, 191 bp, Homo sapiens
ttttgaagggaagaatatcagaattggtagacatttcaaactgtcacattagggatacaaaaatgaacaggctgggagtggtggctcagcctacaatcccracactttgggaggctgaggaaggggcatcacttgaaccaggagttcagtactaacctgggcaacaaagaggcccctgtctctgataaaaa

SEQ ID NO: 62050 - DNA, 201 bp, Homo sapiens; identical to SEQ ID NO: 62044

SEQ ID NO: 62051 - DNA, 201 bp, Homo sapiens
tggccaccggccacgactgcagctgcgcggacaaccccctcctgcacgccgtcatggtgtgcgtggacctcgtggcgcgcggccagggccgcggcacctaygacttcagacccttccccgcctgctccttcgccccggccgctgccccccaggccgtccgcgcaggcgccgtgcgtaaactggacgcagacgaggacggcc

SEQ ID NO: 62052 - DNA, 201 bp, Homo sapiens
ccgcctgctccttcgccccggccgctgccccccaggccgtccgcgcaggcgccgtgcgtaaactggacgcagacgaggacggcctcccctacctgtgcacyggctacgacctgtacgtgacccgcgagccctgcgccatgtgcgccatggccctggtgcacgcacgcatcctgcgcgtcttctacggtgcgccctcgcccg

SEQ ID NO: 62053 - DNA, 179 bp, Homo sapiens
tagtccttgccccaccttggcctggcgaagatcccgcccctggaactacgctcccgtcgtgctccgcggctccaggcgragacgaggcggggtgaggtgggttgggccgggccggttgctaagacttggcgaagcgctgcgctcgcgcccggatccctcaggggttagcaggacatgag

SEQ ID NO: 62054 - DNA, 201 bp, Homo sapiens
aagatcccgcccctggaactacgctcccgtcgtgctccgcggctccaggcggagacgaggcggggtgaggtgggttgggccgggccggttgctaagacttkgcgaagcgctgcgctcgcgcccggatccctcaggggttagcaggacatgagggagtgtagctctgatgcggtgacctgggccggagccctcggactagcc

SEQ ID NO: 62055 - DNA, 201 bp, Homo sapiens; identical to SEQ ID NO: 62051

SEQ ID NO: 62056 - DNA, 201 bp, Homo sapiens; identical to SEQ ID NO: 62052

SEQ ID NO: 62057 - DNA, 201 bp, Homo sapiens; identical to SEQ ID NO: 62051

SEQ ID NO: 62058 - DNA, 201 bp, Homo sapiens; identical to SEQ ID NO: 62052

SEQ ID NO: 62059 - DNA, 170 bp, Homo sapiens
aagaggcacccccttccccagcctctcgcctgcactgatgcagacaaaatctcacctggcaggcccaacccccccccacccctcccccgccgtgtgtggcycctcgccgcatcgttggggttttgttatgtgaaaatatcctggaaataaatacatgtttctgcacttag

SEQ ID NO: 62060 - DNA, 201 bp, Homo sapiens
tccggcctgtctacaaggccttccgagccgacagctcctttaatttcatggcgtttttcttcatcttcggagcccagtttgtcctgaccgtcatccaggcrattggcttctccggctggggcgcgtgcggctggctgtcggcaattggattcttccagtacagcccgggcgctgccgtggtcatgctgcttccagccatca

SEQ ID NO: 62061 - DNA, 142 bp, Homo sapiens
cctgcactgatgcagacaaaatctcacctggcaggcccaacccccccccacccctcccccgccgtgtgtggcccctcgccgcatcgttggggttttgttaygtgaaaatatcctggaaataaatacatgtttctgcacttag

SEQ ID NO: 62062 - DNA, 185 bp, Homo sapiens
cccggccagtctgccaagaggcacccccttccccagcctctcgcctgcactgatgcagacaaaatctcacctggcaggcccaacccccccccacccctccmccgccgtgtgtggcccctcgccgcatcgttggggttttgttatgtgaaaatatcctggaaataaatacatgtttctgcacttag

SEQ ID NO: 62063 - DNA, 133 bp, Homo sapiens
ggtgggttgggccgggccggttgctaagacttkgcgaagcgctgcgctcgcgcccggatccctcaggcggctgcaggcttcagcctgcgctggttggtgaaacagagatgtcagaaaaggagaacaacttccc

SEQ ID NO: 62064 - DNA, 201 bp, Homo sapiens
acccgccgtccactgcacggctggtacggccttgtcttcaggtctcgaggcctgactccgggggacaggtggcagcaggtcggccgccctcccgtcctccmagagctgctggcgctgaggtcagagcgggtctgatggggagctccgtctcaccggccacccgccgtcaccatggcagatgcccttggccggaactaataa

SEQ ID NO: 62065 - DNA, 201 bp, Homo sapiens
tctccggctggggcgcgtgcggctggctgtcggcaattggattcttccagtacagcccgggcgctgccgtggtcatgctgcttccagccatcatgttctcygtgtcggctgccatgatggccatcgcgatcatgaaggtgcacaggatctaccgaggggctggcggaagcttccagaaggcacagacggagtggaacacgg

SEQ ID NO: 62066 - DNA, 201 bp, Homo sapiens
ccctgtgaagccctgcttctaccagaacttctccgacgagatcccagtggagcaccaggtcctggtgaagaggatctaccggctgtggatgttttactgcrccaccctcggcgtcaacctcattgcctgcctggcctggtggatcggcggaggctcggggaccaacttcggcctggccttcgtgtggctgctcctgttcac

SEQ ID NO: 62067 - DNA, 170 bp, Homo sapiens; identical to SEQ ID NO: 62059

SEQ ID NO: 62068 - DNA, 201 bp, Homo sapiens; identical to SEQ ID NO: 62060

SEQ ID NO: 62069 - DNA, 142 bp, Homo sapiens; identical to SEQ ID NO: 62061

SEQ ID NO: 62070 - DNA, 185 bp, Homo sapiens; identical to SEQ ID NO: 62062

SEQ ID NO: 62071 - DNA, 129 bp, Homo sapiens
ggttgggccgggccggttgctaagacttkgcgaagcgctgcgctcgcgcccggatccctcagaaaaggagaacaacttcccgccactgcccaagttcatccctgtgaagccctgcttctaccagaactt

SEQ ID NO: 62072 - DNA, 201 bp, Homo sapiens; identical to SEQ ID NO: 62064

SEQ ID NO: 62073 - DNA, 201 bp, Homo sapiens; identical to SEQ ID NO: 62065

SEQ ID NO: 62074 - DNA, 201 bp, Homo sapiens; identical to SEQ ID NO: 62066

SEQ ID NO: 62075 - DNA, 201 bp, Homo sapiens
tccacacgctgtttgttggggtagcttccatcggcagtctggcccattgtcagtcatgcttcttctggccggggagattatagagagattgtttgaagatygggttattattgaaagtctttttttttgtttgttttgttttggtttgtttgtttatctacacttgtttatgctgtgagccaaacctctatttaaaaagtt

SEQ ID NO: 62076 - DNA, 201 bp, Homo sapiens
gaattctgatacatcctgccaacactgtgtgtgtgtgtgtgtgtgtgtgtgtgtgtgtgtgtgtgtgtgaaagagagacagaagggaatggtttgagaggktgcttgtgtgcatgtgtgtgcatatgtaaagagatttttgtggtttaagtaactcagaatagctgtagcaaatgactgaatacatgtgaacaaacagaag

SEQ ID NO: 62077 - DNA, 201 bp, Homo sapiens
ttctgggtccatatctcccagatgaaaaactgttaaccaataccatattttatagttggtgtccatttctttccaacactgtttgttatgattcttccttsagtacttatatacagacctgctcattatctaaacaatcttaccttctaagtaaaccttgattgtgatttccagtttttattttctctgacgtagtagaaa

SEQ ID NO: 62078 - DNA, 201 bp, Homo sapiens
catgtgaacaaacagaaggaagttcactctggagtgtctttgggaggcagccattccaaatgccctcctccatttagcttcaataaagggccttttgctgrtggagggcactcaagggctgggtgagagggccacgtgtttggtattacattactgctatgcaccacttgaaggagctctatcaccagcctcaaacccgaa

SEQ ID NO: 62079 - DNA, 201 bp, Homo sapiens
acctcctggcagacccttctcttccaccaaacgtgtgcacatccttgagagccgtgagcaacttgctcagcacacagctcaccttccaggccattcacaascccagagtgaatcccgttacttcgctcagtgaaaactatacctgttctgactctgaagagagctctgaaaaagacaagcttgctattccaaagcgcctga

SEQ ID NO: 62080 - DNA, 201 bp, Homo sapiens
gcgaggagataccaacccaaaagccagaccagtgacaatggatagaatgggctgtgtttccaaacagattgacttgtcaaagactctcttcaagccagcayaacatttagacacaacactgtagaaatttgagatgggcaaatggctattgcattttgggattcttcgcattttgtgtgtatatttttacagtgaggtaca

SEQ ID NO: 62081 - DNA, 201 bp, Homo sapiens
ctcttccaccaaacgtgtgcacatccttgagagccgtgagcaacttgctcagcacacagctcaccttccaggccattcacaagcccagagtgaatcccgtyacttcgctcagtgaaaactatacctgttctgactctgaagagagctctgaaaaagacaagcttgctattccaaagcgcctgagaaggagtttgcctcctg

SEQ ID NO: 62082 - DNA, 201 bp, Homo sapiens
cctatgctatttctgcagctaaccatgtaaaggctaaaaagcaaagtcgaccaggtgccctcgctaaaatttcacctctttcatcgccctgctcctcacckctccaagggactcctgccagcagcctggtcagcaaaatttctgcagtgcagtttccagaatctgctgacacaactgccaaacaaagcctaggttctcaca

SEQ ID NO: 62083 - DNA, 201 bp, Homo sapiens
accatcgtgcggaccccgcatcgccgcgggactcgggctgccgtggctgctggggagacctggtgctgcagccgctccggagctctcggaaactttcctcygcgctgtgcgcgggctccctgtcctttctgctggcgctgctggtgaggctggtccgcggggaggtcggctgtgacctggagcagtgtaaggaggcggcgg

SEQ ID NO: 62084 - DNA, 156 bp, Homo sapiens
agtgaagagggcaccctataccatggcagtgcccggcgacgctgcacgagtcaggracaagcccgtccacagtggggtgagtcaagcccccacggcgggccgggactgccaccatcgtgcggaccccgcatcgccgcgggactcgggctgccgtgg

SEQ ID NO: 62085 - DNA, 201 bp, Homo sapiens
ccacacgctgtttgttggggtagcttccatcggcagtctggcccattgtcagtcatgcttcttctggccggggagattatagagagattgtttgaagattsggttattattgaaagtctttttttttgtttgttttgttttggtttgtttgtttatctacacttgtttatgctgtgagccaaacctctatttaaaaagttg

SEQ ID NO: 62086 - DNA, 201 bp, Homo sapiens
tattacattactgctatgcaccacttgaaggagctctatcaccagcctcaaacccgaaagactgaggcattttccagtctacttgcctaatgaatgtatargaactgtctatgagtatggatgtcactcaactaagatcaaatcaccatttaaggggatggcattctttatacctaaacacctaagagctgaagtcaggtc

SEQ ID NO: 62087 - DNA, 201 bp, Homo sapiens
cactccccgccgcgggggtggtgctcagctgcttggccgccgcgacatggctggtgctgaggctgaggctgggcgtcctcatgatcgccttgactagcgckgtcaggaccgtgtccctcatttccttagagaggttcaaggtcgcctggagaccttacctggcgtacctggccggcgtgctggggatcctcttggccaggt

SEQ ID NO: 62088 - DNA, 201 bp, Homo sapiens
atgcagtcctttgacgtggaacggctcaccaacatccttgatggaggtgcccagaacactgcactccgcaggaaagttgagagcatcatccacagttaccyggagtttagctgtaaggacaattatttcatgacccagaatgagcgttataaggctgccatgcggagggcattccacatccggttgatagctcggcgcctg

SEQ ID NO: 62089 - DNA, 201 bp, Homo sapiens
agctccacgcactgagcacgggcatgaaggccatgatgtcagaattctgcacccagggagctgagatgtgccgcagggcctgtggcggacatggctactcraagctgagtggcctgccatcactggtcaccaaattgtcggcctcctgcacctacgagggtgagaacacagtgctctacctgcaggtggccaggttcctgg

SEQ ID NO: 62090 - DNA, 201 bp, Homo sapiens
atgccttccatttcctggcagtcagcctcttggagttcttccagcactcctacactgccattctgaaccaagacttcagcttcctgcctgagctccacgcrctgagcacgggcatgaaggccatgatgtcagaattctgcacccagggagctgagatgtgccgcagggcctgtggcggacatggctactcgaagctgagtg

SEQ ID NO: 62091 - DNA, 201 bp, Homo sapiens
gcacccagggagctgagatgtgccgcagggcctgtggcggacatggctactcgaagctgagtggcctgccatcactggtcaccaaattgtcggcctcctgyacctacgagggtgagaacacagtgctctacctgcaggtggccaggttcctggtgaagagctacctgcagactcagatgtcccctggctccacgccacaga

SEQ ID NO: 62092 - DNA, 201 bp, Homo sapiens
aagccacctatgacgcagccacccaggagtttgtgatacacagccccacgctgactgccaccaaatggtggcctggagacttgggacggtcagccacccaygccctggtccaggcccagctgatctgctcaggagccaggcggggcatgcacgcttttattgtgccaatccggagtcttcaggaccacaccccactgccag

SEQ ID NO: 62093 - DNA, 166 bp, Homo sapiens
gttctttgcactgaccaatgctgagagcagaccctcggagcagccgggttggaagtgtctctccayagtcaccagacagatccaggataggatgggcagcccagtgcaccgagtgtcattgggggatacctggagcaggcaaatgcaccccgacatagagagcgag

SEQ ID NO: 62094 - DNA, 201 bp, Homo sapiens
ggctgccatgcggagggcattccacatccggttgatagctcggcgcctgggttggttagaagatggtcgtgaattaggctacgcttacagagccctttctrgagacgtggccttaaatatacacagagtcttcgtgagagccctcaggagcctgggctcagaggagcagattgccaaatgggacccactctgcaaaaacat

SEQ ID NO: 62095 - DNA, 201 bp, Homo sapiens
caggcccagctgatctgctcaggagccaggcggggcatgcacgcttttattgtgccaatccggagtcttcaggaccacaccccactgccaggaatcatcaytggggacatcggacccaagatggactttgatcaaacagacaatggcttcctgcagctgaaccatgtgcgggtccccagggagaacatgctgagtcgcttt

SEQ ID NO: 62096 - DNA, 162 bp, Homo sapiens
ggtatgtctagtctggatcccttttgttgtaattggttgtgttgctaccactccctccaccycacagcacagaatagcaagggctgcctgaaccctctgtgaacactcagctcggccatttcacttcatacctcagcttcctcagctacaaaatgggtgtgg

SEQ ID NO: 62097 - DNA, 201 bp, Homo sapiens
taattggttgtgttgctaccactccctccacctcacagcacagaatagcaagggctgcctgaaccctctgtgaacactcagctcggccatttcacttcatmcctcagcttcctcagctacaaaatgggtgtggcagaagtggcctttcagtgtggtgtggagggtgaaatgcagtaaggcacattaagtcctcagcccagg

SEQ ID NO: 62098 - DNA, 201 bp, Homo sapiens; identical to SEQ ID NO: 62088

SEQ ID NO: 62099 - DNA, 201 bp, Homo sapiens; identical to SEQ ID NO: 62089

SEQ ID NO: 62100 - DNA, 201 bp, Homo sapiens; identical to SEQ ID NO: 62090

SEQ ID NO: 62101 - DNA, 201 bp, Homo sapiens; identical to SEQ ID NO: 62091

SEQ ID NO: 62102 - DNA, 201 bp, Homo sapiens; identical to SEQ ID NO: 62092

SEQ ID NO: 62103 - DNA, 201 bp, Homo sapiens
gcctacagtgcggacacaggacagaggggagccaggttctttgcactgaccaatgctgagagcagaccctcggagcagccgggttggaagtgtctctccayagtcaccagacagatccaggataggatgggcagcccagtgcaccgagtgtcattgggggatacctggagcaggcaaatgcaccccgacatagagagcgag

SEQ ID NO: 62104 - DNA, 201 bp, Homo sapiens; identical to SEQ ID NO: 62094

SEQ ID NO: 62105 - DNA, 201 bp, Homo sapiens; identical to SEQ ID NO: 62095

SEQ ID NO: 62106 - DNA, 201 bp, Homo sapiens; identical to SEQ ID NO: 62088

SEQ ID NO: 62107 - DNA, 201 bp, Homo sapiens; identical to SEQ ID NO: 62089

SEQ ID NO: 62108 - DNA, 201 bp, Homo sapiens; identical to SEQ ID NO: 62090

SEQ ID NO: 62109 - DNA, 201 bp, Homo sapiens; identical to SEQ ID NO: 62091

SEQ ID NO: 62110 - DNA, 201 bp, Homo sapiens; identical to SEQ ID NO: 62092

SEQ ID NO: 62111 - DNA, 201 bp, Homo sapiens; identical to SEQ ID NO: 62103

SEQ ID NO: 62112 - DNA, 201 bp, Homo sapiens; identical to SEQ ID NO: 62094

SEQ ID NO: 62113 - DNA, 201 bp, Homo sapiens; identical to SEQ ID NO: 62095

SEQ ID NO: 62114 - DNA, 201 bp, Homo sapiens
attcggataaggtgagctaaagcttcaatgccttgaggggcttggcagggctcgggctcatcccggagaagcagccccgctttccagactagcagttcccrgggatgggtgtgtgctaatcgcaggccaacaagcccagcgcggtacagaggtcccattgtgaccggaggcgagaaaccccgcctcggcaccctgacgcag

SEQ ID NO: 62115 - DNA, 201 bp, Homo sapiens
agatgggaaagtatttctctctcattcccacaggatttgcagatgaagacattaataaaaggttcctaagtgatatcccaagctctcagattctccaggargagatgacttggatgaaggagattctttccaacctgggctcacctgttgtgctttgccataatgacctattgtgtaagaatataatctacaatgagaaac

SEQ ID NO: 62116 - DNA, 201 bp, Homo sapiens; identical to SEQ ID NO: 62114

SEQ ID NO: 62117 - DNA, 201 bp, Homo sapiens
ggccaagctcttcatggtggccgtgaagcaggagttgagccaagccaactttgccaccttcacccaggccctgcaggactacaagggttccgatgactttrccgccctggccgcctgtctcggccccctctttgctgaggaccccaagaagcacaacctgctccaaggcttctaccagtttgtgcggccccaccataagca

SEQ ID NO: 62118 - DNA, 201 bp, Homo sapiens
aatggcatcctggagagccctacgggtacagggaagacgctgtgcctgctgtgcaccacgctggcctggcgagaacacctccgagacggcatctctgccckcaagattgccgagagggcgcaaggagagcttttcccggatcgggccttgtcatcctggggcaacgctgctgctgctgctggagaccccatagcttgctac

SEQ ID NO: 62119 - DNA, 201 bp, Homo sapiens
cattccccgaaggcagcgggcacagccggtcctggaccccactggaagaacggcgccggatcccaagctgaccgtgtccacggctgcagcccagcagctgracccccaagagcacctgaaccagggcaggccccacctgtcgcccaggccacccccaacaggagaccctggcagccaaccacagtgggggtctggagtgcc

SEQ ID NO: 62120 - DNA, 201 bp, Homo sapiens
acctccccacgggcctgcagcatctgagtggggcctctaggatgtgcccagcctgccacaccgcctccaggaagcagagcgtcatgcaggtcttctggccrgagccccacaaggaccatgagggcgctggaggggccaggcctgtcgctgctgtgcctggtgttggcgctgcctgccctgctgccggtgccggctgtacgc

SEQ ID NO: 62121 - DNA, 201 bp, Homo sapiens
cttccccctgctgcacagcaaggttcagcatgtttgtgcgtccacaccacaagcagcgcttctcacagacgtgcacagacctgaccggccggccctacccrggcatggagccaccgggaccccaggaggagaggcttgccgtgcctcctgtgcttacccacagggctccccaaccaggcccctcacggtccgagaagaccg

SEQ ID NO: 62122 - DNA, 201 bp, Homo sapiens
ccacactaaccccccacttatgaattcctcccactcccaactcacaggggatttcccgagaggggacctgccaaagacctcctccaggcctcccatgcttyccgggaagtgaagcttctccccctctggggcaggctctgaagcctcccgatgcacccagagcaaccagggggctgcaccagccactcgcctccccagcac

SEQ ID NO: 62123 - DNA, 201 bp, Homo sapiens
acgcatcgtgtccacctggtgccggcgtgattgccccgggcacccccagccagaacacgcagtgccagccgtgccccccaggcaccttctcagccagcagytccagctcagagcagtgccagccccaccgcaactgcacggccctgggcctggccctcaatgtgccaggctcttcctcccatgacacgctgtgcaccagct

SEQ ID NO: 62124 - DNA, 201 bp, Homo sapiens
ccacggctgcagcccagcagctggacccccaagagcacctgaaccagggcaggccccacctgtcgcccaggccacccccaacaggagaccctggcagccamccacagtgggggtctggagtgcccagagcagggaagcagggccagcacgccgtgagcgcctacctggctgatgcccgcagggccctggggtccgcgggct

SEQ ID NO: 62125 - DNA, 201 bp, Homo sapiens
aattcctcccactcccaactcacaggggatttcccgagaggggacctgccaaagacctcctccaggcctcccatgcttcccgggaagtgaagcttctcccyctctggggcaggctctgaagcctcccgatgcacccagagcaaccagggggctgcaccagccactcgcctccccagcacggccaggttcccggggctggag

SEQ ID NO: 62126 - DNA, 201 bp, Homo sapiens
tctcagccagcagctccagctcagagcagtgccagccccaccgcaactgcacggccctgggcctggccctcaatgtgccaggctcttcctcccatgacacsctgtgcaccagctgcactggcttccccctcagcaccagggtaccaggagctgaggagtgtgagcgtgccgtcatcgactttgtggctttccaggacatct

SEQ ID NO: 62127 - DNA, 201 bp, Homo sapiens
ctgccaaagacctcctccaggcctcccatgcttcccgggaagtgaagcttctccccctctggggcaggctctgaagcctcccgatgcacccagagcaaccrgggggctgcaccagccactcgcctccccagcacggccaggttcccggggctggaggtcccccccaggtcctgggaaccaacctgcagaacacacacaggg

SEQ ID NO: 62128 - DNA, 201 bp, Homo sapiens
cgatggaagtgaggttcactggccagcggagccggacacagaacgcgcaaaacgccgtgtaggcctggaggagccgaagagcaggcggaccccctccgcgsgggaacagtttccgccgggagcacaaagcaacggaccggaagtggggggcggaagtgcagtgggctcagcgccgactgcgcgcctctgcccgcgaaaact

SEQ ID NO: 62129 - DNA, 201 bp, Homo sapiens
gtgagccccacccggagttcagcgcggactcccccagcccagggctgaacatggagctggaagacattgcaaagctgaagatgatcctgctgcgcctggarggggccatcgatgctgttgagctgcctggagacgacagcggtgtcaccaagccagggagctacatctttgagctgtttgctgaagcccagatcacgtttc

SEQ ID NO: 62130 - DNA, 201 bp, Homo sapiens
ttcgccgcggagacaagtgagcagtctgtgccatagggattctcgaagagaacagcgttgtgtcccagtgcacatgctcgcatcgcttaccaggagtgccygagaccctaagatgttcggagtggttttttcgcccagacccgaatagcctgcccctcagccacgctctgtgcccttctgagaacaggctgatatgcccaa

SEQ ID NO: 62131 - DNA, 201 bp, Homo sapiens
cagggctgaacatggagctggaagacattgcaaagctgaagatgatcctgctgcgcctggagggggccatcgatgctgttgagctgcctggagacgacagyggtgtcaccaagccagggagctacatctttgagctgtttgctgaagcccagatcacgtttcagaccaagggctgcatcctggactcgctggaccagatca

SEQ ID NO: 62132 - DNA, 201 bp, Homo sapiens
acagctgctccaccctgtccctcctgtctgagaagaggccggcagaagaaccgcgaggagggaggaagaagatccggctggtcagccacccggaggagccygtggctggtgcacagacggacagggccaagctcttcatggtggccgtgaagcaggagttgagccaagccaactttgccaccttcacccaggccctgcagg

SEQ ID NO: 62133 - DNA, 201 bp, Homo sapiens
acgctgctgctgctgctggagaccccatagcttgctacacggacatcccaaagattatttacgcctccaggacccactcgcaactcacacaggtcatcaaygagcttcggaacacctcctaccggcctaaggtgtgtgtgctgggctcccgggagcagctgtgcatccatcctgaggtgaagaaacaagagagtaaccatc

SEQ ID NO: 62134 - DNA, 201 bp, Homo sapiens
gccccccaggcacctttgtgcagcggccgtgccgccgagacagccccacgacgtgtggcccgtgtccaccgcgccactacacgcagttctggaactacctrgagcgctgccgctactgcaacgtcctctgcggggagcgtgaggaggaggcacgggcttgccacgccacccacaaccgtgcctgccgctgccgcaccggct

SEQ ID NO: 62135 - DNA, 201 bp, Homo sapiens
  misc_feature (1)...(201): n = A,T,C or G
cgcatggacccccgggttgtcctcaagatgcagttcctggatgagatgaagggccagggtggggctgggggccagttcctctctgggcaggagtggtaccngcagcaggcgtccagggctgtgaaccaggccatcgggcgagtgatccggcaccgccaggactacggagctgtcttcctctgtgaccacaggttcgccttt

SEQ ID NO: 62136 - DNA, 201 bp, Homo sapiens
cctcctgggtgcgtccccacgtcagggtgtatgacaactttggccatgtcatccgagacgtggcccagttcttccgtgttgccgagcgaactatgccagcrccggccccccgggctacagcacccagtgtgcgtggagaagatgctgtcagcgaggccaagtcgcctggccccttcttctccaccaggaaagctaagagtc

SEQ ID NO: 62137 - DNA, 201 bp, Homo sapiens
gggccaagctcttcatggtggccgtgaagcaggagttgagccaagccaactttgccaccttcacccaggccctgcaggactacaagggttccgatgacttygccgccctggccgcctgtctcggccccctctttgctgaggaccccaagaagcacaacctgctccaaggcttctaccagtttgtgcggccccaccataagc

SEQ ID NO: 62138 - DNA, 201 bp, Homo sapiens
cgggaccccagatttctgcctgtgggcgatggaagtgaggttcactggccagcggagccggacacagaacgcgcaaaacgccgtgtaggcctggaggagcmgaagagcaggcggaccccctccgcgggggaacagtttccgccgggagcacaaagcaacggaccggaagtggggggcggaagtgcagtgggctcagcgccg

SEQ ID NO: 62139 - DNA, 201 bp, Homo sapiens
tggcgctgcctgccctgctgccggtgccggctgtacgcggagtggcagaaacacccacctacccctggcgggacgcagagacaggggagcggctggtgtgygcccagtgccccccaggcacctttgtgcagcggccgtgccgccgagacagccccacgacgtgtggcccgtgtccaccgcgccactacacgcagttctgga

SEQ ID NO: 62140 - DNA, 201 bp, Homo sapiens
gcctgtgtgtggagtatgagcaggagccagttcctgcccggcagaggcccagggggctgctggccgccctggagcacagcgaacagcgggcggggagcccyggcgaggagcaggcccacagctgctccaccctgtccctcctgtctgagaagaggccggcagaagaaccgcgaggagggaggaagaagatccggctggtca

SEQ ID NO: 62141 - DNA, 201 bp, Homo sapiens
acacgcagttctggaactacctggagcgctgccgctactgcaacgtcctctgcggggagcgtgaggaggaggcacgggcttgccacgccacccacaaccgygcctgccgctgccgcaccggcttcttcgcgcacgctggtttctgcttggagcacgcatcgtgtccacctggtgccggcgtgattgccccgggcaccccca

SEQ ID NO: 62142 - DNA, 201 bp, Homo sapiens
agggattctcgaagagaacagcgttgtgtcccagtgcacatgctcgcatcgcttaccaggagtgcccgagaccctaagatgttcggagtggttttttcgcmcagacccgaatagcctgcccctcagccacgctctgtgcccttctgagaacaggctgatatgcccaagatagtcctgaatggtgtgaccgtagacttccct

SEQ ID NO: 62143 - DNA, 201 bp, Homo sapiens
gggctgggggccagttcctctctgggcaggagtggtaccggcagcaggcgtccagggctgtgaaccaggccatcgggcgagtgatccggcaccgccaggaytacggagctgtcttcctctgtgaccacaggttcgcctttgccgacgcaagagcccaactgccctcctgggtgcgtccccacgtcagggtgtatgacaact

SEQ ID NO: 62144 - DNA, 201 bp, Homo sapiens
gccaagccaactttgccaccttcacccaggccctgcaggactacaagggttccgatgactttgccgccctggccgcctgtctcggccccctctttgctgasgaccccaagaagcacaacctgctccaaggcttctaccagtttgtgcggccccaccataagcagcagtttgaggaggtctgtatccagctgacaggacgag

SEQ ID NO: 62145 - DNA, 201 bp, Homo sapiens
aacgctgctgctgctgctggagaccccatagcttgctacacggacatcccaaagattatttacgcctccaggacccactcgcaactcacacaggtcatcarcgagcttcggaacacctcctaccggcctaaggtgtgtgtgctgggctcccgggagcagctgtgcatccatcctgaggtgaagaaacaagagagtaaccat

SEQ ID NO: 62146 - DNA, 201 bp, Homo sapiens; identical to SEQ ID NO: 62117

SEQ ID NO: 62147 - DNA, 201 bp, Homo sapiens; identical to SEQ ID NO: 62118

SEQ ID NO: 62148 - DNA, 201 bp, Homo sapiens; identical to SEQ ID NO: 62119

SEQ ID NO: 62149 - DNA, 201 bp, Homo sapiens
gctgccaagcctgctggcaacggcaccttcaggcctctaggatgtgcccagcctgccacaccgcctccaggaagcagagcgtcatgcaggtcttctggccrgagccccagtgagtgcccacggaggcccccagcacacccaacgtggcttgatcacctgcctgtccagctctggtgggccaagaacccacccaacagaata

SEQ ID NO: 62150 - DNA, 201 bp, Homo sapiens
aggacttccccctgctgcacaggttcagcatgtttgtgcgtccacaccacaagcagcgcttctcacagacgtgcacagacctgaccggccggccctacccrggcatggagccaccgggaccccaggaggagaggcttgccgtgcctcctgtgcttacccacagggctccccaaccaggcccctcacggtccgagaagaccg

SEQ ID NO: 62151 - DNA, 201 bp, Homo sapiens
gcgccaggggacacgcccacaccccactgggcccctggactctccttccccacatgaggccccgtctcctccagagcctctccggctactcggggtcagcrtggggcccctgcagcagatgagggtcttcacttcggtgaactgaacccttgaagcggctgtgggcagggcagcagggctatggccaccccccaggttcgc

SEQ ID NO: 62152 - DNA, 201 bp, Homo sapiens; identical to SEQ ID NO: 62124

SEQ ID NO: 62153 - DNA, 201 bp, Homo sapiens
tggaaggttcgccgcggagacaagtctgtgccatagggattctcgaagagaacagcgttgtgtcccagtgcacatgctcgcatcgcttaccaggagtgccygagaccctaagatgttcggagtggttttttcgcccagacccgaatagcctgcccctcagccacgctctgtgcccttctgagaacaggctgatatgcccaa

SEQ ID NO: 62154 - DNA, 201 bp, Homo sapiens
tagaccaggtgctggaggagcagaccaaggcagcgcagcaggggctgaacatggagctggaagacattgcaaagctgaagatgatcctgctgcgcctggarggggccatcgatgctgttgagctgcctggagacgacagcggtgtcaccaagccagggagctacatctttgagctgtttgctgaagcccagatcacgtttc

SEQ ID NO: 62155 - DNA, 201 bp, Homo sapiens
aggggctgaacatggagctggaagacattgcaaagctgaagatgatcctgctgcgcctggagggggccatcgatgctgttgagctgcctggagacgacagyggtgtcaccaagccagggagctacatctttgagctgtttgctgaagcccagatcacgtttcagaccaagggctgcatcctggactcgctggaccagatca

SEQ ID NO: 62156 - DNA, 201 bp, Homo sapiens; identical to SEQ ID NO: 62133

SEQ ID NO: 62157 - DNA, 201 bp, Homo sapiens; identical to SEQ ID NO: 62132

SEQ ID NO: 62158 - DNA, 201 bp, Homo sapiens
  misc_feature (1)...(201): n = A,T,C or G
ctcccgtaccccccacgcatggacccccgggttgtcctcaagatgcagttcctggatgagatgaagggccagggtggggctgggggccaggagtggtaccngcagcaggcgtccagggctgtgaaccaggccatcgggcgagtgatccggcaccgccaggactacggagctgtcttcctctgtgaccacaggtgcgtgcag

SEQ ID NO: 62159 - DNA, 119 bp, Homo sapiens
ggtgccacaggggcaccccagctgagcccctcaccgggaaggaggagacccccgtgggcacgtgtccacttttaatcaggggacagggctctctaataaarctgctggcagtgcccagg

SEQ ID NO: 62160 - DNA, 201 bp, Homo sapiens; identical to SEQ ID NO: 62136

SEQ ID NO: 62161 - DNA, 201 bp, Homo sapiens; identical to SEQ ID NO: 62137

SEQ ID NO: 62162 - DNA, 201 bp, Homo sapiens; identical to SEQ ID NO: 62140

SEQ ID NO: 62163 - DNA, 201 bp, Homo sapiens; identical to SEQ ID NO: 62142

SEQ ID NO: 62164 - DNA, 201 bp, Homo sapiens
tgaagggccagggtggggctgggggccaggagtggtaccggcagcaggcgtccagggctgtgaaccaggccatcgggcgagtgatccggcaccgccaggaytacggagctgtcttcctctgtgaccacaggtgcgtgcagtccggtggcaggcgcggcgccaggggacacgcccacaccccactgggcccctggactctcc

SEQ ID NO: 62165 - DNA, 201 bp, Homo sapiens; identical to SEQ ID NO: 62145

SEQ ID NO: 62166 - DNA, 201 bp, Homo sapiens; identical to SEQ ID NO: 62144

SEQ ID NO: 62167 - DNA, 201 bp, Homo sapiens; identical to SEQ ID NO: 62117

SEQ ID NO: 62168 - DNA, 201 bp, Homo sapiens; identical to SEQ ID NO: 62118

SEQ ID NO: 62169 - DNA, 201 bp, Homo sapiens; identical to SEQ ID NO: 62119

SEQ ID NO: 62170 - DNA, 201 bp, Homo sapiens; identical to SEQ ID NO: 62120

SEQ ID NO: 62171 - DNA, 201 bp, Homo sapiens; identical to SEQ ID NO: 62122

SEQ ID NO: 62172 - DNA, 201 bp, Homo sapiens; identical to SEQ ID NO: 62123

SEQ ID NO: 62173 - DNA, 201 bp, Homo sapiens; identical to SEQ ID NO: 62121

SEQ ID NO: 62174 - DNA, 201 bp, Homo sapiens; identical to SEQ ID NO: 62151

SEQ ID NO: 62175 - DNA, 201 bp, Homo sapiens; identical to SEQ ID NO: 62125

SEQ ID NO: 62176 - DNA, 201 bp, Homo sapiens
tctcagccagcagctccagctcagagcagtgccagccccaccgcaactgcacggccctgggcctggccctcaatgtgccaggctcttcctcccatgacacsctgtgcaccagctgcactggcttccccctcagcaccagggtaccagcaggagctgaggagtgtgagcgtgccgtcatcgactttgtggctttccaggaca

SEQ ID NO: 62177 - DNA, 201 bp, Homo sapiens; identical to SEQ ID NO: 62124

SEQ ID NO: 62178 - DNA, 201 bp, Homo sapiens; identical to SEQ ID NO: 62127

SEQ ID NO: 62179 - DNA, 201 bp, Homo sapiens; identical to SEQ ID NO: 62129

SEQ ID NO: 62180 - DNA, 201 bp, Homo sapiens; identical to SEQ ID NO: 62153

SEQ ID NO: 62181 - DNA, 201 bp, Homo sapiens; identical to SEQ ID NO: 62132

SEQ ID NO: 62182 - DNA, 201 bp, Homo sapiens; identical to SEQ ID NO: 62131

SEQ ID NO: 62183 - DNA, 201 bp, Homo sapiens
acgctgctgctgctgctggagaccccatagcttgctacacggacatcccaaagattatttacgcctccaggacccactcgcaactcacacaggtcatcaaygagcttcggaacacctcctaccgctccctcctacgcccgggccacgtttcagttatgctcacttcctctgaccgccgaggctcctgcgtgtctccataca

SEQ ID NO: 62184 - DNA, 201 bp, Homo sapiens; identical to SEQ ID NO: 62134

SEQ ID NO: 62185 - DNA, 201 bp, Homo sapiens; identical to SEQ ID NO: 62158
  misc_feature (1)...(201): n = A,T,C or G

SEQ ID NO: 62186 - DNA, 201 bp, Homo sapiens; identical to SEQ ID NO: 62139

SEQ ID NO: 62187 - DNA, 201 bp, Homo sapiens; identical to SEQ ID NO: 62136

SEQ ID NO: 62188 - DNA, 201 bp, Homo sapiens; identical to SEQ ID NO: 62137

SEQ ID NO: 62189 - DNA, 201 bp, Homo sapiens; identical to SEQ ID NO: 62141

SEQ ID NO: 62190 - DNA, 201 bp, Homo sapiens; identical to SEQ ID NO: 62140

SEQ ID NO: 62191 - DNA, 201 bp, Homo sapiens; identical to SEQ ID NO: 62142

SEQ ID NO: 62192 - DNA, 201 bp, Homo sapiens; identical to SEQ ID NO: 62164

SEQ ID NO: 62193 - DNA, 201 bp, Homo sapiens
aacgctgctgctgctgctggagaccccatagcttgctacacggacatcccaaagattatttacgcctccaggacccactcgcaactcacacaggtcatcarcgagcttcggaacacctcctaccgctccctcctacgcccgggccacgtttcagttatgctcacttcctctgaccgccgaggctcctgcgtgtctccatac

SEQ ID NO: 62194 - DNA, 201 bp, Homo sapiens; identical to SEQ ID NO: 62144

SEQ ID NO: 62195 - DNA, 201 bp, Homo sapiens; identical to SEQ ID NO: 62117

SEQ ID NO: 62196 - DNA, 201 bp, Homo sapiens; identical to SEQ ID NO: 62118

SEQ ID NO: 62197 - DNA, 159 bp, Homo sapiens
ctgacaggacgaggctgtggctatcggcctgagcacagcattccccgaaggcagcgggcacagccggtcctggaccccactgggaactttccagatgctcycgaccagctttgtggctctacatctcttcatcaggaagaacggcgccggatcccaagc

SEQ ID NO: 62198 - DNA, 201 bp, Homo sapiens; identical to SEQ ID NO: 62133

SEQ ID NO: 62199 - DNA, 201 bp, Homo sapiens; identical to SEQ ID NO: 62132

SEQ ID NO: 62200 - DNA, 201 bp, Homo sapiens; identical to SEQ ID NO: 62131

SEQ ID NO: 62201 - DNA, 201 bp, Homo sapiens; identical to SEQ ID NO: 62135
  misc_feature (1)...(201): n = A,T,C or G

SEQ ID NO: 62202 - DNA, 201 bp, Homo sapiens; identical to SEQ ID NO: 62137

SEQ ID NO: 62203 - DNA, 201 bp, Homo sapiens; identical to SEQ ID NO: 62136

SEQ ID NO: 62204 - DNA, 201 bp, Homo sapiens; identical to SEQ ID NO: 62140

SEQ ID NO: 62205 - DNA, 201 bp, Homo sapiens; identical to SEQ ID NO: 62142

SEQ ID NO: 62206 - DNA, 201 bp, Homo sapiens; identical to SEQ ID NO: 62153

SEQ ID NO: 62207 - DNA, 201 bp, Homo sapiens; identical to SEQ ID NO: 62129

SEQ ID NO: 62208 - DNA, 201 bp, Homo sapiens; identical to SEQ ID NO: 62143

SEQ ID NO: 62209 - DNA, 201 bp, Homo sapiens; identical to SEQ ID NO: 62144

SEQ ID NO: 62210 - DNA, 201 bp, Homo sapiens; identical to SEQ ID NO: 62145

SEQ ID NO: 62211 - DNA, 201 bp, Homo sapiens; identical to SEQ ID NO: 62120

SEQ ID NO: 62212 - DNA, 201 bp, Homo sapiens; identical to SEQ ID NO: 62123

SEQ ID NO: 62213 - DNA, 201 bp, Homo sapiens; identical to SEQ ID NO: 62134

SEQ ID NO: 62214 - DNA, 201 bp, Homo sapiens; identical to SEQ ID NO: 62150

SEQ ID NO: 62215 - DNA, 201 bp, Homo sapiens; identical to SEQ ID NO: 62122

SEQ ID NO: 62216 - DNA, 201 bp, Homo sapiens; identical to SEQ ID NO: 62126

SEQ ID NO: 62217 - DNA, 117 bp, Homo sapiens
gagaccctggcagccamccacagtgggggtctggagtgcccagagcagggaagcagggccagcacgccgtgagcgcctacctggctgatgcccgcagggccctggggtccgcgggct

SEQ ID NO: 62218 - DNA, 201 bp, Homo sapiens; identical to SEQ ID NO: 62125

SEQ ID NO: 62219 - DNA, 201 bp, Homo sapiens; identical to SEQ ID NO: 62127

SEQ ID NO: 62220 - DNA, 201 bp, Homo sapiens; identical to SEQ ID NO: 62139

SEQ ID NO: 62221 - DNA, 201 bp, Homo sapiens; identical to SEQ ID NO: 62141

SEQ ID NO: 62222 - DNA, 201 bp, Homo sapiens; identical to SEQ ID NO: 62117

SEQ ID NO: 62223 - DNA, 201 bp, Homo sapiens; identical to SEQ ID NO: 62118

SEQ ID NO: 62224 - DNA, 201 bp, Homo sapiens; identical to SEQ ID NO: 62119

SEQ ID NO: 62225 - DNA, 201 bp, Homo sapiens
acctccccacgggcctgcagcatctgagtggggcctctaggatgtgcccagcctgccacaccgcctccaggaagcagagcgtcatgcaggtcttctggccrgagccccagtgagtgcccacggaggcccccagcacacccaacgtggcttgatcacctgcctgtccagctctggtgggccaagaacccacccaacagaata

SEQ ID NO: 62226 - DNA, 201 bp, Homo sapiens; identical to SEQ ID NO: 62150

SEQ ID NO: 62227 - DNA, 201 bp, Homo sapiens; identical to SEQ ID NO: 62124

SEQ ID NO: 62228 - DNA, 201 bp, Homo sapiens; identical to SEQ ID NO: 62128

SEQ ID NO: 62229 - DNA, 201 bp, Homo sapiens; identical to SEQ ID NO: 62130

SEQ ID NO: 62230 - DNA, 201 bp, Homo sapiens; identical to SEQ ID NO: 62129

SEQ ID NO: 62231 - DNA, 201 bp, Homo sapiens; identical to SEQ ID NO: 62131

SEQ ID NO: 62232 - DNA, 201 bp, Homo sapiens; identical to SEQ ID NO: 62132

SEQ ID NO: 62233 - DNA, 201 bp, Homo sapiens; identical to SEQ ID NO: 62133

SEQ ID NO: 62234 - DNA, 116 bp, Homo sapiens
ggtgccacaggggcaccccagctgagcccctcaccgggaaggaggagacccccgtgggcacgtgtccacttttaatcaggggacagggctctctaataaarctgctggcagtgccc

SEQ ID NO: 62235 - DNA, 201 bp, Homo sapiens; identical to SEQ ID NO: 62135
  misc_feature (1)...(201): n = A,T,C or G

SEQ ID NO: 62236 - DNA, 201 bp, Homo sapiens; identical to SEQ ID NO: 62138

SEQ ID NO: 62237 - DNA, 201 bp, Homo sapiens; identical to SEQ ID NO: 62137

SEQ ID NO: 62238 - DNA, 201 bp, Homo sapiens; identical to SEQ ID NO: 62136

SEQ ID NO: 62239 - DNA, 201 bp, Homo sapiens; identical to SEQ ID NO: 62140

SEQ ID NO: 62240 - DNA, 201 bp, Homo sapiens; identical to SEQ ID NO: 62142

SEQ ID NO: 62241 - DNA, 201 bp, Homo sapiens; identical to SEQ ID NO: 62143

SEQ ID NO: 62242 - DNA, 201 bp, Homo sapiens; identical to SEQ ID NO: 62144

SEQ ID NO: 62243 - DNA, 201 bp, Homo sapiens; identical to SEQ ID NO: 62145

SEQ ID NO: 62244 - DNA, 201 bp, Homo sapiens; identical to SEQ ID NO: 62117

SEQ ID NO: 62245 - DNA, 201 bp, Homo sapiens; identical to SEQ ID NO: 62118

SEQ ID NO: 62246 - DNA, 201 bp, Homo sapiens; identical to SEQ ID NO: 62119

SEQ ID NO: 62247 - DNA, 201 bp, Homo sapiens; identical to SEQ ID NO: 62120

SEQ ID NO: 62248 - DNA, 201 bp, Homo sapiens; identical to SEQ ID NO: 62150

SEQ ID NO: 62249 - DNA, 201 bp, Homo sapiens; identical to SEQ ID NO: 62122

SEQ ID NO: 62250 - DNA, 201 bp, Homo sapiens; identical to SEQ ID NO: 62123

SEQ ID NO: 62251 - DNA, 201 bp, Homo sapiens; identical to SEQ ID NO: 62124

SEQ ID NO: 62252 - DNA, 201 bp, Homo sapiens; identical to SEQ ID NO: 62125

SEQ ID NO: 62253 - DNA, 201 bp, Homo sapiens; identical to SEQ ID NO: 62126

SEQ ID NO: 62254 - DNA, 201 bp, Homo sapiens; identical to SEQ ID NO: 62127

SEQ ID NO: 62255 - DNA, 201 bp, Homo sapiens; identical to SEQ ID NO: 62154

SEQ ID NO: 62256 - DNA, 201 bp, Homo sapiens; identical to SEQ ID NO: 62153

SEQ ID NO: 62257 - DNA, 201 bp, Homo sapiens; identical to SEQ ID NO: 62155

SEQ ID NO: 62258 - DNA, 201 bp, Homo sapiens; identical to SEQ ID NO: 62132

SEQ ID NO: 62259 - DNA, 201 bp, Homo sapiens; identical to SEQ ID NO: 62133

SEQ ID NO: 62260 - DNA, 201 bp, Homo sapiens; identical to SEQ ID NO: 62134

SEQ ID NO: 62261 - DNA, 201 bp, Homo sapiens; identical to SEQ ID NO: 62135
  misc_feature (1)...(201): n = A,T,C or G

SEQ ID NO: 62262 - DNA, 201 bp, Homo sapiens; identical to SEQ ID NO: 62136

SEQ ID NO: 62263 - DNA, 201 bp, Homo sapiens; identical to SEQ ID NO: 62137

SEQ ID NO: 62264 - DNA, 201 bp, Homo sapiens; identical to SEQ ID NO: 62139

SEQ ID NO: 62265 - DNA, 201 bp, Homo sapiens; identical to SEQ ID NO: 62140

SEQ ID NO: 62266 - DNA, 201 bp, Homo sapiens; identical to SEQ ID NO: 62141

SEQ ID NO: 62267 - DNA, 201 bp, Homo sapiens; identical to SEQ ID NO: 62142

SEQ ID NO: 62268 - DNA, 201 bp, Homo sapiens; identical to SEQ ID NO: 62143

SEQ ID NO: 62269 - DNA, 201 bp, Homo sapiens; identical to SEQ ID NO: 62144

SEQ ID NO: 62270 - DNA, 201 bp, Homo sapiens; identical to SEQ ID NO: 62145

SEQ ID NO: 62271 - DNA, 201 bp, Homo sapiens; identical to SEQ ID NO: 62123

SEQ ID NO: 62272 - DNA, 201 bp, Homo sapiens; identical to SEQ ID NO: 62134

SEQ ID NO: 62273 - DNA, 201 bp, Homo sapiens; identical to SEQ ID NO: 62122

SEQ ID NO: 62274 - DNA, 201 bp, Homo sapiens; identical to SEQ ID NO: 62126

SEQ ID NO: 62275 - DNA, 201 bp, Homo sapiens; identical to SEQ ID NO: 62125

SEQ ID NO: 62276 - DNA, 201 bp, Homo sapiens; identical to SEQ ID NO: 62127

SEQ ID NO: 62277 - DNA, 201 bp, Homo sapiens; identical to SEQ ID NO: 62139

SEQ ID NO: 62278 - DNA, 201 bp, Homo sapiens; identical to SEQ ID NO: 62141

SEQ ID NO: 62279 - DNA, 201 bp, Homo sapiens; identical to SEQ ID NO: 62117

SEQ ID NO: 62280 - DNA, 201 bp, Homo sapiens; identical to SEQ ID NO: 62118

SEQ ID NO: 62281 - DNA, 201 bp, Homo sapiens; identical to SEQ ID NO: 62119

SEQ ID NO: 62282 - DNA, 201 bp, Homo sapiens
gctgccaagcctgctggcaacggcaccttcaggcctctaggatgtgcccagcctgccacaccgcctccaggaagcagagcgtcatgcaggtcttctggccrgagccccacaaggaccatgagggcgctggaggggccaggcctgtcgctgctgtgcctggtgttggcgctgcctgccctgctgccggtgccggctgtacgc

SEQ ID NO: 62283 - DNA, 201 bp, Homo sapiens; identical to SEQ ID NO: 62150

SEQ ID NO: 62284 - DNA, 201 bp, Homo sapiens; identical to SEQ ID NO: 62122

SEQ ID NO: 62285 - DNA, 201 bp, Homo sapiens; identical to SEQ ID NO: 62123

SEQ ID NO: 62286 - DNA, 201 bp, Homo sapiens; identical to SEQ ID NO: 62124

SEQ ID NO: 62287 - DNA, 201 bp, Homo sapiens; identical to SEQ ID NO: 62125

SEQ ID NO: 62288 - DNA, 201 bp, Homo sapiens; identical to SEQ ID NO: 62126

SEQ ID NO: 62289 - DNA, 201 bp, Homo sapiens; identical to SEQ ID NO: 62127

SEQ ID NO: 62290 - DNA, 201 bp, Homo sapiens; identical to SEQ ID NO: 62129

SEQ ID NO: 62291 - DNA, 201 bp, Homo sapiens; identical to SEQ ID NO: 62153

SEQ ID NO: 62292 - DNA, 201 bp, Homo sapiens; identical to SEQ ID NO: 62131

SEQ ID NO: 62293 - DNA, 201 bp, Homo sapiens; identical to SEQ ID NO: 62132

SEQ ID NO: 62294 - DNA, 201 bp, Homo sapiens; identical to SEQ ID NO: 62133

SEQ ID NO: 62295 - DNA, 201 bp, Homo sapiens; identical to SEQ ID NO: 62134

SEQ ID NO: 62296 - DNA, 201 bp, Homo sapiens; identical to SEQ ID NO: 62135
  misc_feature (1)...(201): n = A,T,C or G

SEQ ID NO: 62297 - DNA, 201 bp, Homo sapiens; identical to SEQ ID NO: 62139

SEQ ID NO: 62298 - DNA, 201 bp, Homo sapiens; identical to SEQ ID NO: 62136

SEQ ID NO: 62299 - DNA, 201 bp, Homo sapiens; identical to SEQ ID NO: 62137

SEQ ID NO: 62300 - DNA, 201 bp, Homo sapiens; identical to SEQ ID NO: 62140

SEQ ID NO: 62301 - DNA, 201 bp, Homo sapiens; identical to SEQ ID NO: 62141

SEQ ID NO: 62302 - DNA, 201 bp, Homo sapiens; identical to SEQ ID NO: 62142

SEQ ID NO: 62303 - DNA, 201 bp, Homo sapiens; identical to SEQ ID NO: 62143

SEQ ID NO: 62304 - DNA, 201 bp, Homo sapiens; identical to SEQ ID NO: 62145

SEQ ID NO: 62305 - DNA, 201 bp, Homo sapiens; identical to SEQ ID NO: 62144

SEQ ID NO: 62306 - DNA, 201 bp, Homo sapiens; identical to SEQ ID NO: 62117

SEQ ID NO: 62307 - DNA, 201 bp, Homo sapiens; identical to SEQ ID NO: 62118

SEQ ID NO: 62308 - DNA, 201 bp, Homo sapiens; identical to SEQ ID NO: 62119

SEQ ID NO: 62309 - DNA, 201 bp, Homo sapiens; identical to SEQ ID NO: 62120

SEQ ID NO: 62310 - DNA, 201 bp, Homo sapiens; identical to SEQ ID NO: 62121

SEQ ID NO: 62311 - DNA, 201 bp, Homo sapiens; identical to SEQ ID NO: 62122

SEQ ID NO: 62312 - DNA, 201 bp, Homo sapiens; identical to SEQ ID NO: 62123

SEQ ID NO: 62313 - DNA, 201 bp, Homo sapiens; identical to SEQ ID NO: 62124

SEQ ID NO: 62314 - DNA, 201 bp, Homo sapiens; identical to SEQ ID NO: 62125

SEQ ID NO: 62315 - DNA, 201 bp, Homo sapiens; identical to SEQ ID NO: 62126

SEQ ID NO: 62316 - DNA, 201 bp, Homo sapiens; identical to SEQ ID NO: 62127

SEQ ID NO: 62317 - DNA, 201 bp, Homo sapiens; identical to SEQ ID NO: 62129

SEQ ID NO: 62318 - DNA, 201 bp, Homo sapiens; identical to SEQ ID NO: 62153

SEQ ID NO: 62319 - DNA, 201 bp, Homo sapiens; identical to SEQ ID NO: 62131

SEQ ID NO: 62320 - DNA, 201 bp, Homo sapiens; identical to SEQ ID NO: 62132

SEQ ID NO: 62321 - DNA, 201 bp, Homo sapiens; identical to SEQ ID NO: 62133

SEQ ID NO: 62322 - DNA, 201 bp, Homo sapiens; identical to SEQ ID NO: 62134

SEQ ID NO: 62323 - DNA, 201 bp, Homo sapiens
  misc_feature (1)...(201): n = A,T,C or G
atcagtgcttactatgcaagggttgccgcccctgggtccaccggcgccaccttcctggcggtctgccggggcaagttcctctctgggcaggagtggtaccngcagcaggcgtccagggctgtgaaccaggccatcgggcgagtgatccggcaccgccaggactacggagctgtcttcctctgtgaccacaggttcgccttt

SEQ ID NO: 62324 - DNA, 201 bp, Homo sapiens; identical to SEQ ID NO: 62136

SEQ ID NO: 62325 - DNA, 201 bp, Homo sapiens; identical to SEQ ID NO: 62137

SEQ ID NO: 62326 - DNA, 201 bp, Homo sapiens; identical to SEQ ID NO: 62139

SEQ ID NO: 62327 - DNA, 201 bp, Homo sapiens; identical to SEQ ID NO: 62140

SEQ ID NO: 62328 - DNA, 201 bp, Homo sapiens; identical to SEQ ID NO: 62141

SEQ ID NO: 62329 - DNA, 201 bp, Homo sapiens; identical to SEQ ID NO: 62142

SEQ ID NO: 62330 - DNA, 201 bp, Homo sapiens
tctgccggggcaagttcctctctgggcaggagtggtaccggcagcaggcgtccagggctgtgaaccaggccatcgggcgagtgatccggcaccgccaggaytacggagctgtcttcctctgtgaccacaggttcgcctttgccgacgcaagagcccaactgccctcctgggtgcgtccccacgtcagggtgtatgacaact

SEQ ID NO: 62331 - DNA, 201 bp, Homo sapiens; identical to SEQ ID NO: 62144

SEQ ID NO: 62332 - DNA, 201 bp, Homo sapiens; identical to SEQ ID NO: 62145

SEQ ID NO: 62333 - DNA, 201 bp, Homo sapiens
tgtgccagggctgtggggcagaggacgtggtgcccttccagtgccctgcctgtgacttccagcgctgccaagcctgctggcaacggcaccttcaggcctcraggatgtgcccagcctgccacaccgcctccaggaagcagagcgtcatgcaggtcttctggccagagccccagtgagtgcccacggaggcccccagcacac

SEQ ID NO: 62334 - DNA, 201 bp, Homo sapiens
ccagttcttccgtgttgccgagcgaactatgccagcgccggccccccgggctacagcacccagtgtgcgtggagaagatgctgtcagcgaggccaagtcgyctggccccttcttctccaccaggaaagctaagagtctggacctgcatgtccccagcctgaagcagaggtcctcagggtcaccagctgccggggaccccga

SEQ ID NO: 62335 - DNA, 201 bp, Homo sapiens
ccataagcagcagtttgaggaggtctgtatccagctgacaggacgaggctgtggctatcggcctgagcacagcattccccgaaggcagcgggcacagccgrtcctggaccccactggaagaacggcgccggatcccaagctgaccgtgtccacggctgcagcccagcagctggacccccaagagcacctgaaccagggcag

SEQ ID NO: 62336 - DNA, 201 bp, Homo sapiens
ggccccccgggctacagcacccagtgtgcgtggagaagatgctgtcagcgaggccaagtcgcctggccccttcttctccaccaggaaagctaagagtctgsacctgcatgtccccagcctgaagcagaggtcctcagggtcaccagctgccggggaccccgagagtagcctgtgtgtggagtatgagcaggagccagttcc

SEQ ID NO: 62337 - DNA, 201 bp, Homo sapiens; identical to SEQ ID NO: 62117

SEQ ID NO: 62338 - DNA, 201 bp, Homo sapiens; identical to SEQ ID NO: 62118

SEQ ID NO: 62339 - DNA, 201 bp, Homo sapiens; identical to SEQ ID NO: 62119

SEQ ID NO: 62340 - DNA, 201 bp, Homo sapiens; identical to SEQ ID NO: 62282

SEQ ID NO: 62341 - DNA, 201 bp, Homo sapiens; identical to SEQ ID NO: 62150

SEQ ID NO: 62342 - DNA, 201 bp, Homo sapiens; identical to SEQ ID NO: 62122

SEQ ID NO: 62343 - DNA, 201 bp, Homo sapiens; identical to SEQ ID NO: 62123

SEQ ID NO: 62344 - DNA, 201 bp, Homo sapiens; identical to SEQ ID NO: 62124

SEQ ID NO: 62345 - DNA, 201 bp, Homo sapiens; identical to SEQ ID NO: 62125

SEQ ID NO: 62346 - DNA, 201 bp, Homo sapiens; identical to SEQ ID NO: 62126

SEQ ID NO: 62347 - DNA, 201 bp, Homo sapiens; identical to SEQ ID NO: 62127

SEQ ID NO: 62348 - DNA, 201 bp, Homo sapiens; identical to SEQ ID NO: 62129

SEQ ID NO: 62349 - DNA, 178 bp, Homo sapiens
gtctgtgccatagggattctcgaagagaacagcgttgtgtcccagtgcacatgctcgcatcgcttaccaggagtgccygagaccctaagatgttcggagtggttttttcgcccagacccgaatagcctgcccctcagccacgctctgtgcccttctgagaacaggctgatatgcccaa

SEQ ID NO: 62350 - DNA, 201 bp, Homo sapiens; identical to SEQ ID NO: 62131

SEQ ID NO: 62351 - DNA, 201 bp, Homo sapiens; identical to SEQ ID NO: 62132

SEQ ID NO: 62352 - DNA, 201 bp, Homo sapiens; identical to SEQ ID NO: 62133

SEQ ID NO: 62353 - DNA, 201 bp, Homo sapiens; identical to SEQ ID NO: 62134

SEQ ID NO: 62354 - DNA, 201 bp, Homo sapiens; identical to SEQ ID NO: 62135
  misc_feature (1)...(201): n = A,T,C or G

SEQ ID NO: 62355 - DNA, 201 bp, Homo sapiens; identical to SEQ ID NO: 62139

SEQ ID NO: 62356 - DNA, 201 bp, Homo sapiens; identical to SEQ ID NO: 62136

SEQ ID NO: 62357 - DNA, 201 bp, Homo sapiens; identical to SEQ ID NO: 62137

SEQ ID NO: 62358 - DNA, 201 bp, Homo sapiens; identical to SEQ ID NO: 62140

SEQ ID NO: 62359 - DNA, 201 bp, Homo sapiens; identical to SEQ ID NO: 62141

SEQ ID NO: 62360 - DNA, 201 bp, Homo sapiens; identical to SEQ ID NO: 62142

SEQ ID NO: 62361 - DNA, 201 bp, Homo sapiens; identical to SEQ ID NO: 62143

SEQ ID NO: 62362 - DNA, 201 bp, Homo sapiens; identical to SEQ ID NO: 62145

SEQ ID NO: 62363 - DNA, 201 bp, Homo sapiens; identical to SEQ ID NO: 62144

SEQ ID NO: 62364 - DNA, 201 bp, Homo sapiens
tgctgcgtacaagcaagcgtaccatctacaccgccgggcggccgccctggtacaatgaacacggcacgcaatccaaagaggccttcgccatcggcttgggrggcggcagtgcctctgggaagaccactgtggccagaatgatcatcgaggccctggatgtgccctgggtggtcttgctgtccatggactccttctacaagg

SEQ ID NO: 62365 - DNA, 201 bp, Homo sapiens
tcgaccacccagatgcctttgacttcgacctcatcatttccaccctcaagaagctgaagcaggggaagagtgtcaaggtgcccatttatgacttcaccacrcacagccggaagaaggactggaaaacactgtatggtgcaaacgtcatcatctttgagggcatcatggcctttgctgacaagacactgttggagctcctgg

SEQ ID NO: 62366 - DNA, 201 bp, Homo sapiens
accaggccggcaggctgagaaaagcgagaccgcgtgcgaggaccgcagcaatgcagagtccctggacaggctcctgccacctgtgggcactgggcgctctycccggaagcggaccaccagccagtgcaagtcagagcctcccctgctgcgtacaagcaagcgtaccatctacaccgccgggcggccgccctggtacaatga

SEQ ID NO: 62367 - DNA, 201 bp, Homo sapiens
cgtacaagcaagcgtaccatctacaccgccgggcggccgccctggtacaatgaacacggcacgcaatccaaagaggccttcgccatcggtgagagcagcgkgggggtgggacctgctgccggacgcctgcctccggctcccctccagtgcctgtggagcaggagaaggaagccgggcaaccgcaggcagcggcagcgggat

SEQ ID NO: 62368 - DNA, 201 bp, Homo sapiens
taatatcaggcatacacaagcccccagctgggtgatcctcttatgcctgtggccttggcctctgaggacggcagtgagtgctgttccctcagtacggtggrggcttcaagggcctcctagctgctgtgcctctgctgacatttggcaggcagcttctgccagccaagggtctcaccccagccacccggctctgcacccact

SEQ ID NO: 62369 - DNA, 201 bp, Homo sapiens
gttccctcagtacggtggaggcttcaagggcctcctagctgctgtgcctctgctgacatttggcaggcagcttctgccagccaagggtctcaccccagccmcccggctctgcacccactgtgctgcccacaggagtggtcctgcccatggaagggccagttcaggtggccggagctcctgagctgccctaggggactgctg

SEQ ID NO: 62370 - DNA, 201 bp, Homo sapiens
atatcaggcatacacaagcccccagctgggtgatcctcttatgcctgtggccttggcctctgaggacggcagtgagtgctgttccctcagtacggtggagrcttcaagggcctcctagctgctgtgcctctgctgacatttggcaggcagcttctgccagccaagggtctcaccccagccacccggctctgcacccactgt

SEQ ID NO: 62371 - DNA, 201 bp, Homo sapiens
tcaggcatacacaagcccccagctgggtgatcctcttatgcctgtggccttggcctctgaggacggcagtgagtgctgttccctcagtacggtggaggctycaagggcctcctagctgctgtgcctctgctgacatttggcaggcagcttctgccagccaagggtctcaccccagccacccggctctgcacccactgtgct

SEQ ID NO: 62372 - DNA, 201 bp, Homo sapiens
cgcaggcagcggcagcgggatgggcacctctgggacctatctgtgccggcagcctgcctgttcctcacagagggtctccactcccgccggcaggcttgggrggcggcagtgcctctgggaagaccactgtggccagaatgatcatcgaggccctggatgtgccctgggtggtcttgctgtccatggactccttctacaagg

SEQ ID NO: 62373 - DNA, 201 bp, Homo sapiens
tggcatcaggatctcagggtgccgggcccttggagcagaaggcagcagcaatgcagagtccctggacaggctcctgccacctgtgggcactgggcgctctycccggaagcggaccaccagccagtgcaagtcagagcctcccctgctgcgtacaagcaagcgtaccatctacaccgccgggcggccgccctggtacaatga

SEQ ID NO: 62374 - DNA, 201 bp, Homo sapiens; identical to SEQ ID NO: 62365

SEQ ID NO: 62375 - DNA, 201 bp, Homo sapiens; identical to SEQ ID NO: 62364

SEQ ID NO: 62376 - DNA, 201 bp, Homo sapiens; identical to SEQ ID NO: 62365

SEQ ID NO: 62377 - DNA, 201 bp, Homo sapiens; identical to SEQ ID NO: 62366

SEQ ID NO: 62378 - DNA, 201 bp, Homo sapiens
agtactacacgggacccagcaatgcaacggcagggatggagacggagggcagctgcctggagaaccccaagtattacaactatgtggccgtgctgtccctmatcgccaccatcatgctggtgcaggtcagccacatggtgaagctcacgctcatgctgctcgtcgcaggcgccgtggccaccatcaacctctatgcctggc

SEQ ID NO: 62379 - DNA, 201 bp, Homo sapiens
gtgagcaggagggtggcagagctgggacaaagctgcctttgccgctgggctttccgggactgtggagggagcacaggcggggaagctccacttcagacagsgcttggtggggcaggacatggctcccattttgaagggaggtctccatgtggtccgagtgaggtgagacggccctcgtcctggtgttcctgatcatcttga

SEQ ID NO: 62380 - DNA, 201 bp, Homo sapiens
ctgacgagatgctgaaagacatgaagaaagacgagagccagaaggaccagcagcagttcaacaccatgtacatgtaccgtcacgagaacgtcagcatcctytttgccgacatcgtgggctttacccagctgtcttctgcctgcagtgcccaggagcttgtgaagctgctcaacgagctctttgcccgctttgacaagctgg

SEQ ID NO: 62381 - DNA, 201 bp, Homo sapiens
tccttcttcatcacgctgcccctcagcctcagccccatcgtgatcatctccgtggtctcctgtgtggtgcacacgttggtcctgggggtcaccgtggcccmgcagcagcaggaggagctcaaggggatgcagctgctgcgggagatcctggccaacgtcttcctctacctgtgcgccatcgctgtgggcatcatgtcctac

SEQ ID NO: 62382 - DNA, 201 bp, Homo sapiens
tcaacgagctctttgcccgctttgacaagctggcagctaaataccaccagctgcggattaagatcctgggcgactgctactactgcatctgcggcttgccygactaccgggaggaccacgccgtctgctccatcctcatggggctggccatggtggaggccatctcgtatgtgcgggagaagaccaagactggggtggaca

SEQ ID NO: 62383 - DNA, 201 bp, Homo sapiens
gcgccacgagaccctgctggtgctggtggtctttgcagccctctttgactgctacgtggtggtcatgtgtgctgtggtcttctccagcgacaagctggctyccctcgccgtggctggaattggactggtgttggacatcatcctcttcgtgctctgcaaaaaggggctgctcccggaccgggtcacccgcagagtgctgcc

SEQ ID NO: 62384 - DNA, 201 bp, Homo sapiens
gattgaagtgcacactcatggactttaggtttagaaacctcctcagccttcatttgttcgtggatgtgtgagctctgagggtggccctgctattcctctgygtgcctgtagtgtccccagcataggggtcttaggcatagggctgaacagtccttccagagccctcgttccaatccctgccgtccttgcccctgaggggcc

SEQ ID NO: 62385 - DNA, 201 bp, Homo sapiens
ctggattgaagtgcacactcatggactttaggtttagaaacctcctcagccttcatttgttcgtggatgtgtgagctctgagggtggccctgctattcctstgtgtgcctgtagtgtccccagcataggggtcttaggcatagggctgaacagtccttccagagccctcgttccaatccctgccgtccttgcccctgaggg

SEQ ID NO: 62386 - DNA, 201 bp, Homo sapiens
agccagaaggaccagcagcagttcaacaccatgtacatgtaccgtcacgagaacgtcagcatcctctttgccgacatcgtgggctttacccagctgtcttytgcctgcagtgcccaggagcttgtgaagctgctcaacgagctctttgcccgctttgacaagctggcagctaaataccaccagctgcggattaagatcctg

SEQ ID NO: 62387 - DNA, 201 bp, Homo sapiens
tcgccgtggctggaattggactggtgttggacatcatcctcttcgtgctctgcaaaaaggggctgctcccggaccgggtcacccgcagagtgctgccctaygtgctgtggctgctcataaccgcccagatcttctcctacctgggcctgaacttcgcgcgtgcccacgcggctagtgacacggtgggctggcaggtcttct

SEQ ID NO: 62388 - DNA, 201 bp, Homo sapiens
tcatgtttgcctccctgcccaactttgctgacttctacacagaggagagcatcaacaatggtggtattgagtgtctgcgtttcctcaatgaaatcatctcrgattttgactctctcctggacaatcccaagttccgggtgatcaccaagatcaaaaccattggcagcacgtatatggcggcttcaggagtcacccccgatg

SEQ ID NO: 62389 - DNA, 201 bp, Homo sapiens
ctaaataccaccagctgcggattaagatcctgggcgactgctactactgcatctgcggcttgcccgactaccgggaggaccacgccgtctgctccatcctsatggggctggccatggtggaggccatctcgtatgtgcgggagaagaccaagactggggtggacatgcgtgtgggggtgcacacgggcaccgtgctggggg

SEQ ID NO: 62390 - DNA, 201 bp, Homo sapiens
ctcataaccgcccagatcttctcctacctgggcctgaacttcgcgcgtgcccacgcggctagtgacacggtgggctggcaggtcttctttgtcttctcctycttcatcacgctgcccctcagcctcagccccatcgtgatcatctccgtggtctcctgtgtggtgcacacgttggtcctgggggtcaccgtggcccagcag

SEQ ID NO: 62391 - DNA, 201 bp, Homo sapiens
ccatgctcgccatcttcatcctggtgatggcaaatgtcgtggacatgctcagctgtctccagtactacacgggacccagcaatgcaacggcagggatggaracggagggcagctgcctggagaaccccaagtattacaactatgtggccgtgctgtccctcatcgccaccatcatgctggtgcaggtcagccacatggtga

SEQ ID NO: 62392 - DNA, 201 bp, Homo sapiens; identical to SEQ ID NO: 62378

SEQ ID NO: 62393 - DNA, 201 bp, Homo sapiens; identical to SEQ ID NO: 62379

SEQ ID NO: 62394 - DNA, 201 bp, Homo sapiens; identical to SEQ ID NO: 62380

SEQ ID NO: 62395 - DNA, 201 bp, Homo sapiens; identical to SEQ ID NO: 62381

SEQ ID NO: 62396 - DNA, 201 bp, Homo sapiens; identical to SEQ ID NO: 62382

SEQ ID NO: 62397 - DNA, 201 bp, Homo sapiens; identical to SEQ ID NO: 62383

SEQ ID NO: 62398 - DNA, 201 bp, Homo sapiens; identical to SEQ ID NO: 62384

SEQ ID NO: 62399 - DNA, 201 bp, Homo sapiens; identical to SEQ ID NO: 62385

SEQ ID NO: 62400 - DNA, 201 bp, Homo sapiens; identical to SEQ ID NO: 62386

SEQ ID NO: 62401 - DNA, 201 bp, Homo sapiens; identical to SEQ ID NO: 62387

SEQ ID NO: 62402 - DNA, 201 bp, Homo sapiens; identical to SEQ ID NO: 62388

SEQ ID NO: 62403 - DNA, 201 bp, Homo sapiens; identical to SEQ ID NO: 62389

SEQ ID NO: 62404 - DNA, 201 bp, Homo sapiens; identical to SEQ ID NO: 62390

SEQ ID NO: 62405 - DNA, 201 bp, Homo sapiens; identical to SEQ ID NO: 62391

SEQ ID NO: 62406 - DNA, 201 bp, Homo sapiens
tcaacaatggtggtattgagtgtctgcgtttcctcaatgaaatcatctcggattttgactctgtgagtgcccatcccaccctgcactctggccatgaagcyggcccattccacatcacatcctacaataggctgcagaggccagagaaactggcttcattttcccagataagccccttccgcaatacatggacttctgcag

SEQ ID NO: 62407 - DNA, 201 bp, Homo sapiens; identical to SEQ ID NO: 62381

SEQ ID NO: 62408 - DNA, 201 bp, Homo sapiens; identical to SEQ ID NO: 62382

SEQ ID NO: 62409 - DNA, 201 bp, Homo sapiens; identical to SEQ ID NO: 62383

SEQ ID NO: 62410 - DNA, 201 bp, Homo sapiens; identical to SEQ ID NO: 62385

SEQ ID NO: 62411 - DNA, 201 bp, Homo sapiens
tcatgtttgcctccctgcccaactttgctgacttctacacagaggagagcatcaacaatggtggtattgagtgtctgcgtttcctcaatgaaatcatctcrgattttgactctgtgagtgcccatcccaccctgcactctggccatgaagccggcccattccacatcacatcctacaataggctgcagaggccagagaaac

SEQ ID NO: 62412 - DNA, 201 bp, Homo sapiens
cttccgcaatacatggacttctgcagccacctggaactgctgggctggggaaggggaggtgaggtgggagcccgggaaatcacccacagggtcacaggatraggataaggactggccaagcaacatctcgagacctctctgtcctgggactgtctcctcaaattcagagccggtcagcattgactgggtgacctgtatacc

SEQ ID NO: 62413 - DNA, 201 bp, Homo sapiens; identical to SEQ ID NO: 62378

SEQ ID NO: 62414 - DNA, 201 bp, Homo sapiens; identical to SEQ ID NO: 62379

SEQ ID NO: 62415 - DNA, 201 bp, Homo sapiens; identical to SEQ ID NO: 62380

SEQ ID NO: 62416 - DNA, 201 bp, Homo sapiens; identical to SEQ ID NO: 62384

SEQ ID NO: 62417 - DNA, 201 bp, Homo sapiens; identical to SEQ ID NO: 62387

SEQ ID NO: 62418 - DNA, 201 bp, Homo sapiens; identical to SEQ ID NO: 62386

SEQ ID NO: 62419 - DNA, 201 bp, Homo sapiens; identical to SEQ ID NO: 62389

SEQ ID NO: 62420 - DNA, 201 bp, Homo sapiens; identical to SEQ ID NO: 62390

SEQ ID NO: 62421 - DNA, 201 bp, Homo sapiens; identical to SEQ ID NO: 62391

SEQ ID NO: 62422 - DNA, 201 bp, Homo sapiens; identical to SEQ ID NO: 62378

SEQ ID NO: 62423 - DNA, 201 bp, Homo sapiens; identical to SEQ ID NO: 62379

SEQ ID NO: 62424 - DNA, 201 bp, Homo sapiens; identical to SEQ ID NO: 62380

SEQ ID NO: 62425 - DNA, 201 bp, Homo sapiens; identical to SEQ ID NO: 62381

SEQ ID NO: 62426 - DNA, 201 bp, Homo sapiens; identical to SEQ ID NO: 62382

SEQ ID NO: 62427 - DNA, 201 bp, Homo sapiens; identical to SEQ ID NO: 62383

SEQ ID NO: 62428 - DNA, 201 bp, Homo sapiens; identical to SEQ ID NO: 62384

SEQ ID NO: 62429 - DNA, 201 bp, Homo sapiens; identical to SEQ ID NO: 62385

SEQ ID NO: 62430 - DNA, 201 bp, Homo sapiens; identical to SEQ ID NO: 62386

SEQ ID NO: 62431 - DNA, 201 bp, Homo sapiens; identical to SEQ ID NO: 62387

SEQ ID NO: 62432 - DNA, 201 bp, Homo sapiens; identical to SEQ ID NO: 62388

SEQ ID NO: 62433 - DNA, 201 bp, Homo sapiens; identical to SEQ ID NO: 62389

SEQ ID NO: 62434 - DNA, 201 bp, Homo sapiens; identical to SEQ ID NO: 62390

SEQ ID NO: 62435 - DNA, 201 bp, Homo sapiens; identical to SEQ ID NO: 62391

SEQ ID NO: 62436 - DNA, 201 bp, Homo sapiens
aaaaatagtaacaataccttgcagaggaaaggtgggagagaggaaaaaaggaaattctatagaaatctatatattgggttgtttttttttttgttttttgttttttttttttgggtttttttttttactatatatcttttttttgttgtctctagcctgatcagataggagcacaagcaggggacggaaagagagagacac

SEQ ID NO: 62437 - DNA, 201 bp, Homo sapiens
aaaatagtaacaataccttgcagaggaaaggtgggagagaggaaaaaaggaaattctatagaaatctatatattgggttgtttttttttttgttttttgttttttttttttgggtttttttttttactatatatcttttttttgttgtctctagcctgatcagataggagcacaagcaggggacggaaagagagagacact

SEQ ID NO: 62438 - DNA, 201 bp, Homo sapiens
agcgagatgagtaaaaacatcagcttccacgttgccttctgcgcaaagggtttcaccaaggatggagaaagggagacagcttgcagatggcgcgttctcayggtgggctcttccccttggtttgtaacgaagtgaaggaggagaacttgggagccaggttctccctgccaaaaagggggctagatgaggtggtcgggcccg

SEQ ID NO: 62439 - DNA, 201 bp, Homo sapiens
gtcaaccctgctcgcaagggcctctacgagggcactggccggctcttctttgagttctaccgcctcctgcatgatgcgcggcccaaggagggagatgatcsccccttcttctggctctttgagaatgtggtggccatgggcgttagtgacaagagggacatctcgcgatttctcgagtccaaccctgtgatgattgatgcc

SEQ ID NO: 62440 - DNA, 201 bp, Homo sapiens
acagcgatgagagtgacactgccaaggccgtggaggtgcagaacaagcccatgattgaatgggccctggggggcttccagccttctggccctaagggcctrgagccaccagaagaagagaagaatccctacaaagaagtgtacacggacatgtgggtggaacctgaggcagctgcctacgcaccacctccaccagccaaaa

SEQ ID NO: 62441 - DNA, 201 bp, Homo sapiens
tcctgctgtgcagcagcccactgaccccgcatcccccactgtggctaccacgcctgagcccgtggggtccgatgctggggacaagaatgccaccaaagcargcgatgacgagccagagtacgaggacggccggggctttggcattggggagctggtgtgggggaaactgcggggcttctcctggtggccaggccgcattgt

SEQ ID NO: 62442 - DNA, 201 bp, Homo sapiens; identical to SEQ ID NO: 62436

SEQ ID NO: 62443 - DNA, 201 bp, Homo sapiens; identical to SEQ ID NO: 62437

SEQ ID NO: 62444 - DNA, 201 bp, Homo sapiens; identical to SEQ ID NO: 62438

SEQ ID NO: 62445 - DNA, 201 bp, Homo sapiens; identical to SEQ ID NO: 62439

SEQ ID NO: 62446 - DNA, 201 bp, Homo sapiens; identical to SEQ ID NO: 62440

SEQ ID NO: 62447 - DNA, 201 bp, Homo sapiens; identical to SEQ ID NO: 62441

SEQ ID NO: 62448 - DNA, 201 bp, Homo sapiens; identical to SEQ ID NO: 62436

SEQ ID NO: 62449 - DNA, 201 bp, Homo sapiens; identical to SEQ ID NO: 62437

SEQ ID NO: 62450 - DNA, 201 bp, Homo sapiens; identical to SEQ ID NO: 62438

SEQ ID NO: 62451 - DNA, 201 bp, Homo sapiens; identical to SEQ ID NO: 62439

SEQ ID NO: 62452 - DNA, 201 bp, Homo sapiens; identical to SEQ ID NO: 62440

SEQ ID NO: 62453 - DNA, 201 bp, Homo sapiens; identical to SEQ ID NO: 62441

SEQ ID NO: 62454 - DNA, 201 bp, Homo sapiens
cccaatgccacgcttgtatttgaggtggagttgtttgagtttaagggagaagatctgacggaagaggaagatggcggaatcattcgcagaatacagactcrcggtgaaggctatgctaagcccaatgagggtgctatcgtggaggttgcactggaagggtactacaaggacaagctctttgaccagcgggagctccgcttt

SEQ ID NO: 62455 - DNA, 133 bp, Homo sapiens
cgcggcggggcgggaccaatcgctccccgagcygctcctgacccacctaccccagctctcgcgccgcgtgcagaggtgctcaagcctcctcgcggtccgcagtcagtgccgccgcgcccggcctcccgcacgc

SEQ ID NO: 62456 - DNA, 201 bp, Homo sapiens
gtttgagaggctggctgaggaggagaacaaggccaaggcagaggcttcctcaggagaccatcccactgacacagagatgaaggaggagcagaagagcaacmcggcagggagccagtctcaggtggagacagaagcatagcccctctccaccagccctactcctgcggctgcctgccccccagtctccccactccaccctgt

SEQ ID NO: 62457 - DNA, 201 bp, Homo sapiens
gccgcgcccggcctcccgcacgccccgcaggtagcgcccccgcccgcggcccagagtgcgctcgcgccggcaccagctcccggataaacggcgcgccgcgmggagatgacagccgaggagatgaaggcgaccgagagcggggcgcagtcggcgccgctgcccatggagggagtggacatcagccccaaacaggacgaaggc

SEQ ID NO: 62458 - DNA, 201 bp, Homo sapiens
aggagaacaaggccaaggcagaggcttcctcaggagaccatcccactgacacagagatgaaggaggagcagaagagcaacacggcagggagccagtctcasgtggagacagaagcatagcccctctccaccagccctactcctgcggctgcctgccccccagtctccccactccaccctgttagttttgtaaaaactgaag

SEQ ID NO: 62459 - DNA, 201 bp, Homo sapiens
acgggctgatttccagaaggtcctgcagctctaccccaacaacaaagccgccaagacccagctggctgtgtgccagcagcggatccgaaggcagcttgccygggagaagaagctctatgccaatatgtttgagaggctggctgaggaggagaacaaggccaaggcagaggcttcctcaggagaccatcccactgacacaga

SEQ ID NO: 62460 - DNA, 201 bp, Homo sapiens
aggagcagaagagcaacacggcagggagccagtctcaggtggagacagaagcatagcccctctccaccagccctactcctgcggctgcctgccccccagtytccccactccaccctgttagttttgtaaaaactgaagaattttgagtgaattagacctttatttttctatctggttggatggtggctttaggggaagggg

SEQ ID NO: 62461 - DNA, 201 bp, Homo sapiens
agcaacacggcagggagccagtctcaggtggagacagaagcatagcccctctccaccagccctactcctgcggctgcctgccccccagtctccccactccmccctgttagttttgtaaaaactgaagaattttgagtgaattagacctttatttttctatctggttggatggtggctttaggggaagggggaaaggtgtag

SEQ ID NO: 62462 - DNA, 201 bp, Homo sapiens
ccaatgagggtgctatcgtggaggttgcactggaagggtactacaaggacaagctctttgaccagcgggagctccgctttgagattggcgagggggagaamctggatctgccttatggtctggagagggccattcagcgcatggagaaaggagaacattccatcgtgtacctcaagcccagctatgcttttggcagtgttg

SEQ ID NO: 62463 - DNA, 201 bp, Homo sapiens
gagcggggcgcagtcggcgccgctgcccatggagggagtggacatcagccccaaacaggacgaaggcgtgctgaaggtcatcaagagagagggcacaggtwcagagatgcccatgattggggaccgagtctttgtccactacactggctggctattagatggcacaaagtttgactccagtctggatcgcaaggacaaatt

SEQ ID NO: 62464 - DNA, 178 bp, Homo sapiens
ccactgctatgccatttcttctctctgttcccttcctcacccccgacggtgtggctgatgatgtcttctggtgtcatggtgaccaccccctgttccctgtyctggtatttccccggcttgcctcaagttccatgcttgagcaataaagtggaaacaataaaacctgggtgtcagacaa

SEQ ID NO: 62465 - DNA, 201 bp, Homo sapiens
gcagcttgcccgggagaagaagctctatgccaatatgtttgagaggctggctgaggaggagaacaaggccaaggcagaggcttcctcaggagaccatcccmctgacacagagatgaaggaggagcagaagagcaacacggcagggagccagtctcaggtggagacagaagcatagcccctctccaccagccctactcctgc

SEQ ID NO: 62466 - DNA, 189 bp, Homo sapiens
catgggaaaaaccactgctatgccatttcttctctctgttcccttcctcacccccgacggtgtggctgatgatgtcttctggtgtcatggtgaccaccccmtgttccctgttctggtatttccccggcttgcctcaagttccatgcttgagcaataaagtggaaacaataaaacctgggtgtcagacaa

SEQ ID NO: 62467 - DNA, 201 bp, Homo sapiens
tagggatgaggtctgataagaacccagggtggagagggagactcctgggcagccgttttcctcatcctttccctctcccagtccatttccaaatgtggcckccatgtgggtgctagggacatgggaaaaaccactgctatgccatttcttctctctgttcccttcctcacccccgacggtgtggctgatgatgtcttctgg

SEQ ID NO: 62468 - DNA, 201 bp, Homo sapiens
caaacaggacgaaggcgtgctgaaggtcatcaagagagagggcacaggtacagagatgcccatgattggggaccgagtctttgtccactacactggctggytattagatggcacaaagtttgactccagtctggatcgcaaggacaaattctcctttgacctgggaaaaggggaggtcatcaaggcttgggacattgccat

SEQ ID NO: 62469 - DNA, 201 bp, Homo sapiens
tcgctccccgagccgctcctgacccacctaccccagctctcgcgccgcgtgcagaggtgctcaagcctcctcgcggtccgcagtcagtgccgccgcgcccrgcctcccgcacgccccgcaggtagcgcccccgcccgcggcccagagtgcgctcgcgccggcaccagctcccggataaacggcgcgccgcgcggagatgac

SEQ ID NO: 62470 - DNA, 201 bp, Homo sapiens; identical to SEQ ID NO: 62456

SEQ ID NO: 62471 - DNA, 201 bp, Homo sapiens; identical to SEQ ID NO: 62458

SEQ ID NO: 62472 - DNA, 201 bp, Homo sapiens; identical to SEQ ID NO: 62460

SEQ ID NO: 62473 - DNA, 190 bp, Homo sapiens
tcttctggtgtcatggtgaccaccccctgttccctgttctggtatttcccctgtcagtttcccctctcggccaggttgtgtcccaaaatcccctcagcctyttctctgcacgttgctgaaggtccaggcttgcctcaagttccatgcttgagcaataaagtggaaacaataaaacctgggtgtcagacaa

SEQ ID NO: 62474 - DNA, 201 bp, Homo sapiens; identical to SEQ ID NO: 62461

SEQ ID NO: 62475 - DNA, 201 bp, Homo sapiens; identical to SEQ ID NO: 62463

SEQ ID NO: 62476 - DNA, 201 bp, Homo sapiens; identical to SEQ ID NO: 62462

SEQ ID NO: 62477 - DNA, 201 bp, Homo sapiens; identical to SEQ ID NO: 62465

SEQ ID NO: 62478 - DNA, 201 bp, Homo sapiens
ccactgctatgccatttcttctctctgttcccttcctcacccccgacggtgtggctgatgatgtcttctggtgtcatggtgaccaccccctgttccctgtyctggtatttcccctgtcagtttcccctctcggccaggttgtgtcccaaaatcccctcagcctcttctctgcacgttgctgaaggtccaggcttgcctcaa

SEQ ID NO: 62479 - DNA, 201 bp, Homo sapiens
catgggaaaaaccactgctatgccatttcttctctctgttcccttcctcacccccgacggtgtggctgatgatgtcttctggtgtcatggtgaccaccccmtgttccctgttctggtatttcccctgtcagtttcccctctcggccaggttgtgtcccaaaatcccctcagcctcttctctgcacgttgctgaaggtccag

SEQ ID NO: 62480 - DNA, 201 bp, Homo sapiens; identical to SEQ ID NO: 62467

SEQ ID NO: 62481 - DNA, 201 bp, Homo sapiens; identical to SEQ ID NO: 62454

SEQ ID NO: 62482 - DNA, 133 bp, Homo sapiens; identical to SEQ ID NO: 62455

SEQ ID NO: 62483 - DNA, 201 bp, Homo sapiens; identical to SEQ ID NO: 62457

SEQ ID NO: 62484 - DNA, 201 bp, Homo sapiens; identical to SEQ ID NO: 62459

SEQ ID NO: 62485 - DNA, 170 bp, Homo sapiens
caccccctgttccctgttctggtatttcccctgtcagtttcccctctcggccaggttgtgtcccaaaatcccctcagcctcttctctgcacgttgctgaargtccaggcttgcctcaagttccatgcttgagcaataaagtggaaacaataaaacctgggtgtcagacaa

SEQ ID NO: 62486 - DNA, 201 bp, Homo sapiens; identical to SEQ ID NO: 62468

SEQ ID NO: 62487 - DNA, 201 bp, Homo sapiens; identical to SEQ ID NO: 62469

SEQ ID NO: 62488 - DNA, 201 bp, Homo sapiens
ggccctgcaggctgagaaactggaccaccatcctgaatggtttaacgtgtacaacaaggtccacatcacgctgagcacccatgagtgtgccggcctttcakaacgggacataaacctggccagcttcatcgaacaagtagcagtgtccatgacatagaccctgcccttcctctttgaattcttccgggggaaggggtgact

SEQ ID NO: 62489 - DNA, 201 bp, Homo sapiens
gcctttgggttcatgacaagagtggccctgcaggctgagaaactggaccaccatcctgaatggtttaacgtgtacaacaaggtccacatcacgctgagcayccatgagtgtgccggcctttcagaacgggacataaacctggccagcttcatcgaacaagtagcagtgtccatgacatagaccctgcccttcctctttgaa

SEQ ID NO: 62490 - DNA, 201 bp, Homo sapiens
ctgcaggctgagaaactggaccaccatcctgaatggtttaacgtgtacaacaaggtccacatcacgctgagcacccatgagtgtgccggcctttcagaacrggacataaacctggccagcttcatcgaacaagtagcagtgtccatgacatagaccctgcccttcctctttgaattcttccgggggaaggggtgactgaac

SEQ ID NO: 62491 - DNA, 201 bp, Homo sapiens
gcctttcagaacgggacataaacctggccagcttcatcgaacaagtagcagtgtccatgacatagaccctgcccttcctctttgaattcttccgggggaargggtgactgaactgggagtccagggagggagctgaggagcccttaccctcccaccactcccctcccaagacccagccgccgccgttgagggctgagtcct

SEQ ID NO: 62492 - DNA, 201 bp, Homo sapiens
tcctgaatggtttaacgtgtacaacaaggtccacatcacgctgagcacccatgagtgtgccggcctttcagaacgggacataaacctggccagcttcatcraacaagtagcagtgtccatgacatagaccctgcccttcctctttgaattcttccgggggaaggggtgactgaactgggagtccagggagggagctgagga

SEQ ID NO: 62493 - DNA, 201 bp, Homo sapiens
tgaatggtttaacgtgtacaacaaggtccacatcacgctgagcacccatgagtgtgccggcctttcagaacgggacataaacctggccagcttcatcgaayaagtagcagtgtccatgacatagaccctgcccttcctctttgaattcttccgggggaaggggtgactgaactgggagtccagggagggagctgaggagcc

SEQ ID NO: 62494 - DNA, 201 bp, Homo sapiens
ataaactctcccctttctttgcaacttcccagcaacaataatgattttcttgccaggccgtctcttgctccctaattcatttcccaggaagctgtgatacrgggtgaaataaagtcttgtcttagaaaccaggaccctaaaccccacactatgtaatagaaacacatgtgtttttatgtctcaaataaaactattatatca

SEQ ID NO: 62495 - DNA, 176 bp, Homo sapiens
gctggcaaagcacacaggctgagcgctgaggagagggaccagctgctgccaaacctgagggctgtggggtggaatkagctggaaggccgtgatgccatcttcaagcagtttcatttcaaagacttcaacagggcctttgggttcatgacaagagtggccctgcaggctgagaaact

SEQ ID NO: 62496 - DNA, 201 bp, Homo sapiens; identical to SEQ ID NO: 62488

SEQ ID NO: 62497 - DNA, 201 bp, Homo sapiens; identical to SEQ ID NO: 62489

SEQ ID NO: 62498 - DNA, 201 bp, Homo sapiens; identical to SEQ ID NO: 62490

SEQ ID NO: 62499 - DNA, 201 bp, Homo sapiens; identical to SEQ ID NO: 62491

SEQ ID NO: 62500 - DNA, 129 bp, Homo sapiens
ccgccccgggacggcagcctgcgcgcccrgccgccgcctgccctctccgctggccacctgctgccgcccgcgccatggctggcaaagcacacaggctgagcgctgaggagagggaccagctgctgccaa

SEQ ID NO: 62501 - DNA, 201 bp, Homo sapiens; identical to SEQ ID NO: 62492

SEQ ID NO: 62502 - DNA, 201 bp, Homo sapiens; identical to SEQ ID NO: 62493

SEQ ID NO: 62503 - DNA, 201 bp, Homo sapiens; identical to SEQ ID NO: 62494

SEQ ID NO: 62504 - DNA, 201 bp, Homo sapiens
gccacctgctgccgcccgcgccatggctggcaaagcacacaggctgagcgctgaggagagggaccagctgctgccaaacctgagggctgtggggtggaatkagctggaaggccgtgatgccatcttcaagcagtttcatttcaaagacttcaacagggcctttgggttcatgacaagagtggccctgcaggctgagaaact

SEQ ID NO: 62505 - DNA, 201 bp, Homo sapiens
ctgcaggctgagaaactggaccaccatcctgaatggtttaacgtgtacaacaaggtctcaaggctacaagcctccggtgtgcaacaataccatctgctttsctggttctccagcttgccaactacagatcttgggacttgtcagcctccataatcacatgagccaattccttataagaaatctctttgtgtgtattggttc

SEQ ID NO: 62506 - DNA, 129 bp, Homo sapiens; identical to SEQ ID NO: 62500

SEQ ID NO: 62507 - DNA, 201 bp, Homo sapiens; identical to SEQ ID NO: 62504

SEQ ID NO: 62508 - DNA, 149 bp, Homo sapiens
ccaacttttgcaggctccacccaggatgtgcgcctcgctccacccaggmtgtgcgcctctctccacccctaggcgaaggcactagaatttcccaaattaagaacgaagaggaagtttggaccttttcggccaccgctcgcttcaatatg

SEQ ID NO: 62509 - DNA, 201 bp, Homo sapiens
agctctgaagaaagcaaatggtgatgccactttgaaatttgaaccatttgttcttcatgtgcagtgtcgacaattgcaggatgcacagattctgcattccrtggcaatagattctggtttcaggaactctggcataacggtgggaaagagaggaaaaactatgttggctgtccggagtacacatggcttagaagttccatt

SEQ ID NO: 62510 - DNA, 201 bp, Homo sapiens
atgcacagattctgcattccatggcaatagattctggtttcaggaactctggcataacggtgggaaagagaggaaaaactatgttggctgtccggagtacwcatggcttagaagttccattaagccataagggaaaactgatggtgacagaggaatatattgacttcctgttaaatgtggcaaatcaaaaaatggaggaaa

SEQ ID NO: 62511 - DNA, 201 bp, Homo sapiens
acaaaactgttgctggctactggttacacacaaactttgtgtaaaagatgatgtgattgtagctctgaagaaagcaaatggtgatgccactttgaaatttkaaccatttgttcttcatgtgcagtgtcgacaattgcaggatgcacagattctgcattccatggcaatagattctggtttcaggaactctggcataacggt

SEQ ID NO: 62512 - DNA, 126 bp, Homo sapiens
ccaacttttgcaggctccacccaggmtgtgcgcctcgctccacccaggctgtgcgcctctctccacccctaggcgaaggcactagaatttcccaaattaagaacgaagaggaagtttggacctttt

SEQ ID NO: 62513 - DNA, 201 bp, Homo sapiens
ttgtgcagtttctgaacatgcgagatcagtttttcaccaccagctcctgcgctggccgcatcctactccttgaccggggtataaatggttttgaggttcaraaacaaaactgttgctggctactggttacacacaaactttgtgtaaaagatgatgtgattgtagctctgaagaaagcaaatggtgatgccactttgaaat

SEQ ID NO: 62514 - DNA, 160 bp, Homo sapiens
ccaacttttgcaggctccacccaggatgtgcgcctcgctccacccaggctgtgcgcctckctccacccctaggcgaaggcactagaatttcccaaattaagaacgaagaggaagtttggaccttttcggccaccgctcgcttcaatatggctgcccccag

SEQ ID NO: 62515 - DNA, 201 bp, Homo sapiens
cacaaactttgtgtaaaagatgatgtgattgtagctctgaagaaagcaaatggtgatgccactttgaaatttgaaccatttgttcttcatgtgcagtgtcracaattgcaggatgcacagattctgcattccatggcaatagattctggtttcaggaactctggcataacggtgggaaagagaggaaaaactatgttggct

SEQ ID NO: 62516 - DNA, 201 bp, Homo sapiens
gaatgttcagcctgagctagtgagctagattcattgaattgaaagttgcatagtatagttttgccattttaacatttctgtatttgaagtgcttatcgaawctaaaagtgactactgttaatattttgtatattgtgttaaattaattttaataaattatataattatacatattgtaaaataaagaccggtattttattt

SEQ ID NO: 62517 - DNA, 201 bp, Homo sapiens
gtcaagatgaagaaacggggggatttgcagacaggccaggagatatggcaagtggatccttttcataccttatttggaattgctggattgtcacttttggkagaagaacagattaaacctgttaatcctgtcttttgcatgcctgaagaagtgcttcagagagtgaatgttcagcctgagctagtgagctagattcattga

SEQ ID NO: 62518 - DNA, 201 bp, Homo sapiens
gcttgcaagttaagggttagatttttttattttttaaaaatatgctttctgccacatgtaaaccgtaagttgtcctgaaatgataagctttgatattctayggtgtttattttttacttatctttttgaatgaaaagtgaacaacaagaaatgctggtggtaattttttgggtcaatgatgagttggcatgtattctgaat

SEQ ID NO: 62519 - DNA, 201 bp, Homo sapiens
agttagttacaatttttaaatggaacgttttcctattacaagatgaaatcaagtgaaaattgagatgtatgttgaatctatgctgtggggcagaagaacgytgtagaggtaaacattgatgagattaccactttattttgaaagggcactccacagaaggatgttattatcaagtcagatgcaccggacactttgttattg

SEQ ID NO: 62520 - DNA, 201 bp, Homo sapiens
cgggctcaatggaaggccggagaagttaccagatgtatgctactcatggtgggtcctggcttccctaaagataattggaagacttcattggattgatagaragaaactgcgtaatttcattttagcatgtcaagatgaagaaacggggggatttgcagacaggccaggagatatggcaagtggatccttttcataccttat

SEQ ID NO: 62521 - DNA, 201 bp, Homo sapiens
agaagaacgttgtagaggtaaacattgatgagattaccactttattttgaaagggcactccacagaaggatgttattatcaagtcagatgcaccggacacwttgttattggagaaacatgcagattatatcgcatcctatggctcaaagaaagatgattatgaatactgtatgtctgagtatttgagaatgagtggcatct

SEQ ID NO: 62522 - DNA, 201 bp, Homo sapiens
tgtatacttctgtgtctgttatgttcaataactgagctaacataaaataactctaggtttctacttgatttttcccccatgtatacctttcatctgttctrtagcaagttgatgtaaattggtttgtcaacaagaatgttaactgatgaaagtggatagaacccatacatgaattaaatgatgcacaaaataaatggctgt

SEQ ID NO: 62523 - DNA, 201 bp, Homo sapiens
ccggtcgcccaggatggagtgcagtgacacaacctcagttcactgcagccttaatttccctggctcaagcgatcttctacctcagcctccctagttagttacaatttttaaatggaacgttttcctattacaagatgaaatcaagtgaaaattgagatgtatgttgaatctatgctgtggggcagaagaacgttgtagagg

SEQ ID NO: 62524 - DNA, 201 bp, Homo sapiens
aatttgttttatcctgtatgaactttgacggtggatttggttgcagaccaggttctgaatcccatgctgggcagatctattgttgcacaggatttctggcwattacaagtcagttgcatcaagtaaattctgatttacttggctggtggctttgtgaacgacaattaccctcaggcgggctcaatggaaggccggagaagt

SEQ ID NO: 62525 - DNA, 201 bp, Homo sapiens
aattcgcttgcaagttaagggttagatttttttattttttaaaaatatgctttctgccacatgtaaaccgtaagttgtcctgaaatgataagctttgataktctatggtgtttattttttacttatctttttgaatgaaaagtgaacaacaagaaatgctggtggtaattttttgggtcaatgatgagttggcatgtattc

SEQ ID NO: 62526 - DNA, 201 bp, Homo sapiens
accggtattttattttctgctttttattctgaagtcctgttattctgactacagttctttgtgtatacttctgtgtctgttatgttcaataactgagctarcataaaataactctaggtttctacttgatttttcccccatgtatacctttcatctgttctatagcaagttgatgtaaattggtttgtcaacaagaatgtt

SEQ ID NO: 62527 - DNA, 201 bp, Homo sapiens; identical to SEQ ID NO: 62516

SEQ ID NO: 62528 - DNA, 201 bp, Homo sapiens
gcatgtcaagatgaagaaacggggggatttgcagacaggccaggagatatggtggatccttttcataccttatttggaattgctggattgtcacttttggkagaagaacagattaaacctgttaatcctgtcttttgcatgcctgaagaagtgcttcagagagtgaatgttcagcctgagctagtgagctagattcattga

SEQ ID NO: 62529 - DNA, 201 bp, Homo sapiens
cgggctcaatggaaggccggagaagttaccagatgtatgctactcatggtgggtcctggcttccctaaagataattggaagacttcattggattgatagaragaaactgcgtaatttcattttagcatgtcaagatgaagaaacggggggatttgcagacaggccaggagatatggtggatccttttcataccttatttgg

SEQ ID NO: 62530 - DNA, 201 bp, Homo sapiens; identical to SEQ ID NO: 62524

SEQ ID NO: 62531 - DNA, 201 bp, Homo sapiens
tcctaagtctacccaggaactgaccctgctctctcctttccctgttagacatgggcactccacagaaggatgttattatcaagtcagatgcaccggacacwttgttattggagaaacatgcagattatatcgcatcctatggctcaaagaaagatgattatgaatactgtatgtctgagtatttgagaatgagtggcatct

SEQ ID NO: 62532 - DNA, 201 bp, Homo sapiens; identical to SEQ ID NO: 62522

SEQ ID NO: 62533 - DNA, 201 bp, Homo sapiens; identical to SEQ ID NO: 62526

SEQ ID NO: 62534 - DNA, 201 bp, Homo sapiens
ctgattggtggcttttttttttcttggagagggggtgtcaaagatttctttaaaatcgttagtgatgtggtctcgctttaagatttttaatgggatcagargaaaattcggtacttaatcacttccggtaatcttcatgacctgttatagtgactgcagtgtactctcaatgaggaagatatagatacgaaaagaactaga

SEQ ID NO: 62535 - DNA, 201 bp, Homo sapiens; identical to SEQ ID NO: 62516

SEQ ID NO: 62536 - DNA, 201 bp, Homo sapiens; identical to SEQ ID NO: 62528

SEQ ID NO: 62537 - DNA, 201 bp, Homo sapiens; identical to SEQ ID NO: 62529

SEQ ID NO: 62538 - DNA, 201 bp, Homo sapiens
actagagccgcatcacatggggacttctgcaaatacagagactcggattaaagggcactccacagaaggatgttattatcaagtcagatgcaccggacacwttgttattggagaaacatgcagattatatcgcatcctatggctcaaagaaagatgattatgaatactgtatgtctgagtatttgagaatgagtggcatct

SEQ ID NO: 62539 - DNA, 201 bp, Homo sapiens; identical to SEQ ID NO: 62522

SEQ ID NO: 62540 - DNA, 201 bp, Homo sapiens
aagtctacccaggaactgaccctgctctctcctttccctgttagacatggtaagtgtgagtttagcgctgctgtccggatgggttggtagcagacagggtrgagtagggttaagcacactggtcaccttaggattggtttcctggtgctggagaatggttaggacacaggccttggaaggttttttgagtgtgaaatatta

SEQ ID NO: 62541 - DNA, 201 bp, Homo sapiens; identical to SEQ ID NO: 62524

SEQ ID NO: 62542 - DNA, 201 bp, Homo sapiens
ttggaaggttttttgagtgtgaaatattactcagcgttttctgcagacctcgcgggcaatgccgcttctaattttatccaggccttcttctgtagggaggrcctgttaagagttgagcagcccgatttctgaacccctctaaaaagctgtggctgattggtggcttttttttttcttggagagggggtgtcaaagatttct

SEQ ID NO: 62543 - DNA, 201 bp, Homo sapiens
tgaaatattactcagcgttttctgcagacctcgcgggcaatgccgcttctaattttatccaggccttcttctgtagggagggcctgttaagagttgagcarcccgatttctgaacccctctaaaaagctgtggctgattggtggcttttttttttcttggagagggggtgtcaaagatttctttaaaatcgttagtgatgt

SEQ ID NO: 62544 - DNA, 201 bp, Homo sapiens; identical to SEQ ID NO: 62526

SEQ ID NO: 62545 - DNA, 154 bp, Homo sapiens
gcacagcctagagcccgcctccgtgaaagactgccgggcgcatgcggtcggggktgttcactggctgtccggggctccgcgcgcgtcgccggcccagctctgtcgctgacgggaggatctgaagccggccgcaggtcaaagagtaaaatgaagt

SEQ ID NO: 62546 - DNA, 201 bp, Homo sapiens
tctatggagacgcagactacttggaagagaggcaccgccaccgatttgaggtgaatccagtctggaaaaagtgtttggaagaacaaggcttgaagtttgtyggccaagatgttgaaggagagagaatggaaattgtggagttagaagatcatcccttttttgttggggttcagtaccaccctgagttcctgtccaggccta

SEQ ID NO: 62547 - DNA, 201 bp, Homo sapiens
atgaagatggcctggaacctcaagtgtgtgttattgagcttggtggaaccgtgggggacatagaaagcatgccctttattgaggccttccgtcagttccarttcaaggtcaaaagagagaacttttgtaacatccacgtcagtctagttccccagccaagttcaacaggggaacagaagactaaacctacccagaatagtg

SEQ ID NO: 62548 - DNA, 201 bp, Homo sapiens
ctgcagaccatctggaaggaagagcccatcccctgcacagcccactggcacttcgggcaataactctgtggcacgtgggcatcacgtaagcagcacactasgaggcccaggcgcaggcaaagagaagatggtgctgtcatgaaataaaattacaacatagctacctggggatacttttttctttctgttttttgtttgttt

SEQ ID NO: 62549 - DNA, 110 bp, Homo sapiens
atttaatgaagtacatgaatgagtgtcttcagaattgtacacagtgagatcaaatattttaataatgagcttgttatgttgaattctattctgaccatcaytcactgaga

SEQ ID NO: 62550 - DNA, 107 bp, Homo sapiens
ctcagaytactgacttggaccagcaggggaatggctgtgacaataaataagattgggaaaacaagaagataagggcctcgctctgttacccaggctggagtgctgtg

SEQ ID NO: 62551 - DNA, 201 bp, Homo sapiens
ggatttcatgtttttttatggctgcatagtattccatggcgtccgtgtaccacactttctttatccagtccactgttgatgggcacctgggttgattccaygtctttgctactgtaaatagttctgtgatgaacatacaagtgcaggcatcttttcatagaatgattttttttttccttttggtagatacccagtaatggg

SEQ ID NO: 62552 - DNA, 201 bp, Homo sapiens
agcaaaggtctctggctagcgacatcactgatgagcagaaaaaggttcgggaggctgacctagtgatatttcagttcccgctgtactggttcagcgtgccrgccatcctgaagggctggatggatagggtgctgtgccagggctttgcctttgacatcccaggattctacgattccggtttgctccagggtaaactagcgc

SEQ ID NO: 62553 - DNA, 201 bp, Homo sapiens
ggaacccaagtctttcaacggatccttgaagaatgtggctgtagatgaactgagcaggcagggctgcaccgtcacagtgtctgatttgtatgccatgaacyttgagccgagggccacagacaaagatatcactggtactctttctaatcctgaggttttcaattatggagtggaaacccacgaagcctacaagcaaaggtc

SEQ ID NO: 62554 - DNA, 201 bp, Homo sapiens
ggaaagccccagccacccatcaaatcagagagaaggaatccaccttcttacgctatggcaggtaagaaagtactcattgtctatgcacaccaggaacccargtctttcaacggatccttgaagaatgtggctgtagatgaactgagcaggcagggctgcaccgtcacagtgtctgatttgtatgccatgaactttgagccg

SEQ ID NO: 62555 - DNA, 201 bp, Homo sapiens
tactgcaaaggacaggatttcatgtttttttatggctgcatagtattccatggcgtccgtgtaccacactttctttatccagtccactgttgatgggcacstgggttgattccatgtctttgctactgtaaatagttctgtgatgaacatacaagtgcaggcatcttttcatagaatgattttttttttccttttggtaga

SEQ ID NO: 62556 - DNA, 201 bp, Homo sapiens
cagctgcatccacgttactgcaaaggacaggatttcatgtttttttatggctgcatagtattccatggcgtccgtgtaccacactttctttatccagtccrctgttgatgggcacctgggttgattccatgtctttgctactgtaaatagttctgtgatgaacatacaagtgcaggcatcttttcatagaatgattttttt

SEQ ID NO: 62557 - DNA, 201 bp, Homo sapiens
cagtccactgttgatgggcacctgggttgattccatgtctttgctactgtaaatagttctgtgatgaacatacaagtgcaggcatcttttcatagaatgattttttttttccttttggtagatacccagtaatgggattgctgggttgaagggtaattctatttttagcaaactagaaatatttaatgaagtacatgaatg

SEQ ID NO: 62558 - DNA, 201 bp, Homo sapiens
tcccgctgtactggttcagcgtgccagccatcctgaagggctggatggatagggtgctgtgccagggctttgcctttgacatcccaggattctacgattcyggtttgctccagggtaaactagcgctcctttccgtaaccacgggaggcacggccgagatgtacacgaagacaggagtcaatggagattctcgatacttcc

SEQ ID NO: 62559 - DNA, 201 bp, Homo sapiens
gtggctgtagatgaactgagcaggcagggctgcaccgtcacagtgtctgatttgtatgccatgaactttgagccgagggccacagacaaagatatcactgrtactctttctaatcctgaggttttcaattatggagtggaaacccacgaagcctacaagcaaaggtctctggctagcgacatcactgatgagcagaaaaag

SEQ ID NO: 62560 - DNA, 201 bp, Homo sapiens
tgaagggctggatggatagggtgctgtgccagggctttgcctttgacatcccaggattctacgattccggtttgctccagggtaaactagcgctcctttcygtaaccacgggaggcacggccgagatgtacacgaagacaggagtcaatggagattctcgatacttcctgtggccactccagcatggcacattacacttct

SEQ ID NO: 62561 - DNA, 201 bp, Homo sapiens; identical to SEQ ID NO: 62548

SEQ ID NO: 62562 - DNA, 201 bp, Homo sapiens
gcgtcagcgagtgcgcggtccagtgcggccggaacctggcgcaactcctagagcggtccttggggagacgcgggtcccagtcctgcggctcctactggggmgtgcgctggtcggaagctttaggttcacccctgtaagtgttgctggtgtcagaataggaacctccctgcgctttgaagggatgaatgtgacctctcccac

SEQ ID NO: 62563 - DNA, 110 bp, Homo sapiens; identical to SEQ ID NO: 62549

SEQ ID NO: 62564 - DNA, 103 bp, Homo sapiens
gcrgtcccgcggcgcggggcaggttccgggctgcttaggttggcaccggtccgtggtccccgggggcgcagtcgcagcgctcccgccctccaggcgtcagcga

SEQ ID NO: 62565 - DNA, 201 bp, Homo sapiens; identical to SEQ ID NO: 62551

SEQ ID NO: 62566 - DNA, 201 bp, Homo sapiens; identical to SEQ ID NO: 62552

SEQ ID NO: 62567 - DNA, 201 bp, Homo sapiens; identical to SEQ ID NO: 62553

SEQ ID NO: 62568 - DNA, 201 bp, Homo sapiens; identical to SEQ ID NO: 62554

SEQ ID NO: 62569 - DNA, 201 bp, Homo sapiens; identical to SEQ ID NO: 62555

SEQ ID NO: 62570 - DNA, 201 bp, Homo sapiens; identical to SEQ ID NO: 62556

SEQ ID NO: 62571 - DNA, 201 bp, Homo sapiens; identical to SEQ ID NO: 62557

SEQ ID NO: 62572 - DNA, 201 bp, Homo sapiens; identical to SEQ ID NO: 62558

SEQ ID NO: 62573 - DNA, 201 bp, Homo sapiens; identical to SEQ ID NO: 62559

SEQ ID NO: 62574 - DNA, 201 bp, Homo sapiens; identical to SEQ ID NO: 62560

SEQ ID NO: 62575 - DNA, 201 bp, Homo sapiens; identical to SEQ ID NO: 62548

SEQ ID NO: 62576 - DNA, 201 bp, Homo sapiens
gcgtcagcgagtgcgcggtccagtgcggccggaacctggcgcaactcctagagcggtccttggggagacgcgggtcccagtcctgcggctcctactggggmgtgcgctggtcggaagattgctggactcgctgaagagagactacgcaggaaagccccagccacccatcaaatcagagagaaggaatccaccttcttacgc

SEQ ID NO: 62577 - DNA, 110 bp, Homo sapiens; identical to SEQ ID NO: 62549

SEQ ID NO: 62578 - DNA, 114 bp, Homo sapiens
taaagaggcctgcrgtcccgcggcgcggggcaggttccgggctgcttaggttggcaccggtccgtggtccccgggggcgcagtcgcagcgctcccgccctccaggcgtcagcga

SEQ ID NO: 62579 - DNA, 201 bp, Homo sapiens; identical to SEQ ID NO: 62551

SEQ ID NO: 62580 - DNA, 201 bp, Homo sapiens; identical to SEQ ID NO: 62552

SEQ ID NO: 62581 - DNA, 201 bp, Homo sapiens; identical to SEQ ID NO: 62553

SEQ ID NO: 62582 - DNA, 201 bp, Homo sapiens; identical to SEQ ID NO: 62554

SEQ ID NO: 62583 - DNA, 201 bp, Homo sapiens; identical to SEQ ID NO: 62555

SEQ ID NO: 62584 - DNA, 201 bp, Homo sapiens; identical to SEQ ID NO: 62556

SEQ ID NO: 62585 - DNA, 201 bp, Homo sapiens; identical to SEQ ID NO: 62557

SEQ ID NO: 62586 - DNA, 201 bp, Homo sapiens; identical to SEQ ID NO: 62558

SEQ ID NO: 62587 - DNA, 201 bp, Homo sapiens; identical to SEQ ID NO: 62559

SEQ ID NO: 62588 - DNA, 201 bp, Homo sapiens; identical to SEQ ID NO: 62560

SEQ ID NO: 62589 - DNA, 112 bp, Homo sapiens
ccatgttttgtttattaaaatttatttaagatttattttattatttttatagatgaggtctcactctgttgccccagctgggtgcagtggcatgatcatasctcactaggct

SEQ ID NO: 62590 - DNA, 201 bp, Homo sapiens
ccatctccctatattcaagcttcatgtaattttattttctggtaattctctgagcatagagctggatttgctagtttttttattttatgactcaacatgasagtttctatttttcatagaaaagttgaatctgggcctgttgcttaattttcttctttgtctttttaaatttacattaggactatgaagttttaattgaac

SEQ ID NO: 62591 - DNA, 201 bp, Homo sapiens
tctattctgaccatcactcactgagatttcttttctttcttttttaaagagacagagtttcactatgttgcccgggctggtctcaaaccccttgcctcaartaatcttcccaccttgggcctcccaaagtgctgggattgcaggtgtgagccaccacacctggcccagattttctttaatatttgtctaatatctttccat

SEQ ID NO: 62592 - DNA, 201 bp, Homo sapiens
tttaataatgagcttgttatgttgaattctattctgaccatcactcactgagatttcttttctttcttttttaaagagacagagtttcactatgttgcccrggctggtctcaaaccccttgcctcaagtaatcttcccaccttgggcctcccaaagtgctgggattgcaggtgtgagccaccacacctggcccagattttc

SEQ ID NO: 62593 - DNA, 201 bp, Homo sapiens
atttaatgaagtacatgaatgagtgtcttcagaattgtacacagtgagatcaaatattttaataatgagcttgttatgttgaattctattctgaccatcaytcactgagatttcttttctttcttttttaaagagacagagtttcactatgttgcccgggctggtctcaaaccccttgcctcaagtaatcttcccaccttg

SEQ ID NO: 62594 - DNA, 107 bp, Homo sapiens; identical to SEQ ID NO: 62550

SEQ ID NO: 62595 - DNA, 201 bp, Homo sapiens; identical to SEQ ID NO: 62553

SEQ ID NO: 62596 - DNA, 201 bp, Homo sapiens; identical to SEQ ID NO: 62560

SEQ ID NO: 62597 - DNA, 201 bp, Homo sapiens; identical to SEQ ID NO: 62548

SEQ ID NO: 62598 - DNA, 201 bp, Homo sapiens; identical to SEQ ID NO: 62551

SEQ ID NO: 62599 - DNA, 201 bp, Homo sapiens; identical to SEQ ID NO: 62552

SEQ ID NO: 62600 - DNA, 201 bp, Homo sapiens; identical to SEQ ID NO: 62554

SEQ ID NO: 62601 - DNA, 201 bp, Homo sapiens; identical to SEQ ID NO: 62555

SEQ ID NO: 62602 - DNA, 201 bp, Homo sapiens; identical to SEQ ID NO: 62556

SEQ ID NO: 62603 - DNA, 201 bp, Homo sapiens; identical to SEQ ID NO: 62557

SEQ ID NO: 62604 - DNA, 201 bp, Homo sapiens; identical to SEQ ID NO: 62558

SEQ ID NO: 62605 - DNA, 201 bp, Homo sapiens
gtaattctctgagcatagagctggatttgctagtttttttattttatgactcaacatgacagtttctatttttcatagaaaagttgaatctgggcctgttkcttaattttcttctttgtctttttaaatttacattaggactatgaagttttaattgaacagccattaacatatatggttatatgttgcatgatgtttcaa

SEQ ID NO: 62606 - DNA, 201 bp, Homo sapiens; identical to SEQ ID NO: 62559

SEQ ID NO: 62607 - DNA, 201 bp, Homo sapiens
gatgctaacaacacaccccaggcaggcgaaggggcatgcttttccatactcttccttttgactggcttgatcacagactgctgctccaaagctggtgttaygcacagctcctcgtcccctccctgcctgcccagggccagcatcaggggctgtcatcactgggggatgcagagctacctgtaacagcaacaaggaccattg

SEQ ID NO: 62608 - DNA, 201 bp, Homo sapiens
agatgctaacaacacaccccaggcaggcgaaggggcatgcttttccatactcttccttttgactggcttgatcacagactgctgctccaaagctggtgttrcgcacagctcctcgtcccctccctgcctgcccagggccagcatcaggggctgtcatcactgggggatgcagagctacctgtaacagcaacaaggaccatt

SEQ ID NO: 62609 - DNA, 110 bp, Homo sapiens; identical to SEQ ID NO: 62549

SEQ ID NO: 62610 - DNA, 201 bp, Homo sapiens; identical to SEQ ID NO: 62553

SEQ ID NO: 62611 - DNA, 201 bp, Homo sapiens; identical to SEQ ID NO: 62560

SEQ ID NO: 62612 - DNA, 201 bp, Homo sapiens; identical to SEQ ID NO: 62548

SEQ ID NO: 62613 - DNA, 201 bp, Homo sapiens
acaccccaggcaggcgaaggggcatgcttttccatactcttccttttgactggcttgatcacagactgctgctccaaagctggtgttacgcacagctcctygtcccctccctgcctgcccagggccagcatcaggggctgtcatcactgggggatgcagagctacctgtaacagcaacaaggaccattgtcaactccgttc

SEQ ID NO: 62614 - DNA, 201 bp, Homo sapiens; identical to SEQ ID NO: 62576

SEQ ID NO: 62615 - DNA, 114 bp, Homo sapiens; identical to SEQ ID NO: 62578

SEQ ID NO: 62616 - DNA, 201 bp, Homo sapiens; identical to SEQ ID NO: 62551

SEQ ID NO: 62617 - DNA, 201 bp, Homo sapiens
tcaccagataaactaaactaggaaacctgaggcgagccgcagcctcagtttctctttggtgttgccgcccacagttcccgctgtactggttcagcgtgccrgccatcctgaagggctggatggatagggtgctgtgccagggctttgcctttgacatcccaggattctacgattccggtttgctccagggtaaactagcgc

SEQ ID NO: 62618 - DNA, 201 bp, Homo sapiens; identical to SEQ ID NO: 62554

SEQ ID NO: 62619 - DNA, 201 bp, Homo sapiens; identical to SEQ ID NO: 62555

SEQ ID NO: 62620 - DNA, 201 bp, Homo sapiens; identical to SEQ ID NO: 62556

SEQ ID NO: 62621 - DNA, 201 bp, Homo sapiens; identical to SEQ ID NO: 62557

SEQ ID NO: 62622 - DNA, 201 bp, Homo sapiens; identical to SEQ ID NO: 62558

SEQ ID NO: 62623 - DNA, 201 bp, Homo sapiens; identical to SEQ ID NO: 62559

SEQ ID NO: 62624 - DNA, 201 bp, Homo sapiens; identical to SEQ ID NO: 62548

SEQ ID NO: 62625 - DNA, 110 bp, Homo sapiens; identical to SEQ ID NO: 62549

SEQ ID NO: 62626 - DNA, 201 bp, Homo sapiens; identical to SEQ ID NO: 62551

SEQ ID NO: 62627 - DNA, 201 bp, Homo sapiens; identical to SEQ ID NO: 62552

SEQ ID NO: 62628 - DNA, 201 bp, Homo sapiens; identical to SEQ ID NO: 62553

SEQ ID NO: 62629 - DNA, 201 bp, Homo sapiens; identical to SEQ ID NO: 62554

SEQ ID NO: 62630 - DNA, 201 bp, Homo sapiens; identical to SEQ ID NO: 62555

SEQ ID NO: 62631 - DNA, 201 bp, Homo sapiens; identical to SEQ ID NO: 62556

SEQ ID NO: 62632 - DNA, 201 bp, Homo sapiens; identical to SEQ ID NO: 62557

SEQ ID NO: 62633 - DNA, 201 bp, Homo sapiens; identical to SEQ ID NO: 62558

SEQ ID NO: 62634 - DNA, 201 bp, Homo sapiens; identical to SEQ ID NO: 62559

SEQ ID NO: 62635 - DNA, 201 bp, Homo sapiens; identical to SEQ ID NO: 62560

SEQ ID NO: 62636 - DNA, 201 bp, Homo sapiens
agccctaagtcttctctttgcttgctgatctcgtaccttaatgtgcaaaagaatcacgttgggaactgaaaattcagaatcctgggcctcactcccagagratctgatctacatgtgtggagatgcccaggaatctgctttattctcttttgtcctcccacctgtccccccatttcagcacctcggtaacctctgccaaag

SEQ ID NO: 62637 - DNA, 201 bp, Homo sapiens
ggggacggtctacgcgggtgccggcggttccaggactgcgaaaccacgagccgagtttcgaaatcagcctgagcctgagtaccgctaaggctttaatcacsggtcccgagagccctaagtcttctctttgcttgctgatctcgtaccttaatgtgcaaaagaatcacgttgggaactgaaaattcagaatcctgggcctca

SEQ ID NO: 62638 - DNA, 201 bp, Homo sapiens
acataaaaaaaaataaaaaaggaataaagcctctaacttcaatagctatgaaaattaaatccgattttctaagatgaagttgtgacaagttataccattgycttaacaggtgaattcctgccataatttattttcaaataaattttaggtggagaatgtgtagtgttaatgttggagattttaagacatcttgaatttgta

SEQ ID NO: 62639 - DNA, 201 bp, Homo sapiens
tcgctgaggcgacgagcgagggcggggcagcgccgacggggacactcatcccgggagccagagccagcaccgagaggggacggtctacgcgggtgccggcsgttccaggactgcgaaaccacgagccgagtttcgaaatcagcctgagcctgagtaccgctaaggctttaatcacgggtcccgagagccctaagtcttctc

SEQ ID NO: 62640 - DNA, 103 bp, Homo sapiens
ccsacgcagcgagggcgctatggctggcggcctcgcctcctggaaaggccatggtcgctgaggcgacgagcgagggcggggcagcgccgacggggacactcat

SEQ ID NO: 62641 - DNA, 201 bp, Homo sapiens
gctgcatttgatgccagaaggcaaacacaacctgcatttgcgttttgcagatgaattcaacaagttagcagaagacttcctacaatgagaatgcacactcsagtcttggtggttccttcgtgtggggcttgatcgtgttgctgcctgttaacatgatgcctttgaaactctccgcctttgaaactttctacccctcccttc

SEQ ID NO: 62642 - DNA, 201 bp, Homo sapiens
ggagactccggctctacaaaaaagagtttttcaaaattagccaggcgaagtggcacacatctgtggtcccaggtgctcaggaagctgaggtgggaggatcrcttgagcccaattcaaagctgcagtgagctgtaattgcatcactgcactccaacctgggcaacagagtaagaccttgtcttaaaaaaaaataaaaacata

SEQ ID NO: 62643 - DNA, 201 bp, Homo sapiens
gagttcaagaccagcttgtgcaatatagggagactccggctctacaaaaaagagtttttcaaaattagccaggcgaagtggcacacatctgtggtcccagstgctcaggaagctgaggtgggaggatcacttgagcccaattcaaagctgcagtgagctgtaattgcatcactgcactccaacctgggcaacagagtaaga

SEQ ID NO: 62644 - DNA, 201 bp, Homo sapiens
aaaaaaataaaaaaggaataaagcctctaacttcaatagctatgaaaattaaatccgattttctaagatgaagttgtgacaagttataccattgtcttaayaggtgaattcctgccataatttattttcaaataaattttaggtggagaatgtgtagtgttaatgttggagattttaagacatcttgaatttgtactgtac

SEQ ID NO: 62645 - DNA, 201 bp, Homo sapiens
ctccagtcttggtggttccttcgtgtggggcttgatcgtgttgctgcctgttaacatgatgcctttgaaactctccgcctttgaaactttctacccctccyttcaatcttatcctaaccaaatgagaataatgacatattgaaaacagcctctagcttcaggctgggcacggtggctcacagctataatctcagcactttg

SEQ ID NO: 62646 - DNA, 201 bp, Homo sapiens
gccccgggtccagtgccccgccttgattgtgcacggtgagaaggatcctctggtcccacggtttcatgccgacttcattcataagcacgtgaaaggctcayggctgcatttgatgccagaaggcaaacacaacctgcatttgcgttttgcagatgaattcaacaagttagcagaagacttcctacaatgagaatgcacact

SEQ ID NO: 62647 - DNA, 201 bp, Homo sapiens
gaagttgtgacaagttataccattgtcttaacaggtgaattcctgccataatttattttcaaataaattttaggtggagaatgtgtagtgttaatgttggmgattttaagacatcttgaatttgtactgtaccttttatctgagaggttcaagcttcacttgtgtttttatttgtgtttatctatcatattcaaagagaag

SEQ ID NO: 62648 - DNA, 201 bp, Homo sapiens
tgggatcctcgaggctatggacattccaggcccccagatcgcgatttcccagcagacttttttgaaagggatgcaaaagatgctgttgatttgatgaaggygctgaagtttaagaaggtttctctgctggggtggagtgatgggggcataaccgcactcattgctgctgcaaaatatccatcttacatccacaagatggtg

SEQ ID NO: 62649 - DNA, 201 bp, Homo sapiens
aaggatcctctggtcccacggtttcatgccgacttcattcataagcacgtgaaaggctcacggctgcatttgatgccagaaggcaaacacaacctgcattygcgttttgcagatgaattcaacaagttagcagaagacttcctacaatgagaatgcacactccagtcttggtggttccttcgtgtggggcttgatcgtgtt

SEQ ID NO: 62650 - DNA, 201 bp, Homo sapiens
cctgggatcctcgaggctatggacattccaggcccccagatcgcgatttcccagcagacttttttgaaagggatgcaaaagatgctgttgatttgatgaaygcgctgaagtttaagaaggtttctctgctggggtggagtgatgggggcataaccgcactcattgctgctgcaaaatatccatcttacatccacaagatgg

SEQ ID NO: 62651 - DNA, 201 bp, Homo sapiens
caagttataccattgtcttaacaggtgaattcctgccataatttattttcaaataaattttaggtggagaatgtgtagtgttaatgttggagattttaagmcatcttgaatttgtactgtaccttttatctgagaggttcaagcttcacttgtgtttttatttgtgtttatctatcatattcaaagagaagtagggagagt

SEQ ID NO: 62652 - DNA, 201 bp, Homo sapiens
agatggtgatctggggcgccaacgcctacgtcactgacgaagacagcatgatatatgagggcatccgagatgtttccaaatggagtgagagaacaagaaarcctctagaagccctctatgggtatgactactttgccagaacctgtgaaaagtgggtggatggcataagacagtttaaacatctcccagatggtaacatct

SEQ ID NO: 62653 - DNA, 201 bp, Homo sapiens
tgttaggaagtggagagactgattttggacctcagctcaagaacctcaataagaagctcttcacggtggtcgcctgggatcctcgaggctatggacattcmaggcccccagatcgcgatttcccagcagacttttttgaaagggatgcaaaagatgctgttgatttgatgaaggcgctgaagtttaagaaggtttctctgc

SEQ ID NO: 62654 - DNA, 201 bp, Homo sapiens
atccctctcctggttcacttttgagagatgaatactttgggccagtaaaggtgaacaaaatatgtattttcatcactctgtactaaaaggacaggaatgtwattaattaaaacactaaagcagaaatcctacattgctattaaaattaaactttgattaccacaataaaaacagtagcaagttaaaccttgacactttata

SEQ ID NO: 62655 - DNA, 201 bp, Homo sapiens; identical to SEQ ID NO: 62636

SEQ ID NO: 62656 - DNA, 201 bp, Homo sapiens
tctctcagcgctgaagcccgggatccacgtcccacgggccggacccgcggccgcgttcggaaatcagcctgagcctgagtaccgctaaggctttaatcacsggtcccgagagccctaagtcttctctttgcttgctgatctcgtaccttaatgtgcaaaagaatcacgttgggaactgaaaattcagaatcctgggcctca

SEQ ID NO: 62657 - DNA, 201 bp, Homo sapiens; identical to SEQ ID NO: 62638

SEQ ID NO: 62658 - DNA, 201 bp, Homo sapiens
cttcggggcagagtgggccgggtaccgcgcttggtcttagcgcatgcgcgctcccggcagctacgcgacctgtgaccatggtggctgtgctgggcggccgkggcgtgttgcgcctgcggctgcttctctcagcgctgaagcccgggatccacgtcccacgggccggacccgcggccgcgttcggaaatcagcctgagcctg

SEQ ID NO: 62659 - DNA, 201 bp, Homo sapiens
ggcggagcaggatggagaggcgaggtgggcggagcagagggcgtggcttcggggcagagtgggccgggtaccgcgcttggtcttagcgcatgcgcgctccyggcagctacgcgacctgtgaccatggtggctgtgctgggcggccggggcgtgttgcgcctgcggctgcttctctcagcgctgaagcccgggatccacgtc

SEQ ID NO: 62660 - DNA, 201 bp, Homo sapiens
tcgctgaggcgacgagcgagggcggggcagcgccgacggggacactcatcccgggagccagagccagcaccgagaggggacggtctacgcgggtgccggcsgttccaggactgcgaaaccacgagccgagtttcggtcgcccatgggaaagcacccggcagggcgtggcttcggggcggggcgggcagagggcggagcagg

SEQ ID NO: 62661 - DNA, 201 bp, Homo sapiens
cagagggcggagcaggatggagaggcgaggtgggcggagcagagggcgtggcttcggggcagagtgggccgggtaccgcgcttggtcttagcgcatgcgcrctcccggcagctacgcgacctgtgaccatggtggctgtgctgggcggccggggcgtgttgcgcctgcggctgcttctctcagcgctgaagcccgggatcc

SEQ ID NO: 62662 - DNA, 106 bp, Homo sapiens
acgccsacgcagcgagggcgctatggctggcggcctcgcctcctggaaaggccatggtcgctgaggcgacgagcgagggcggggcagcgccgacggggacactcat

SEQ ID NO: 62663 - DNA, 201 bp, Homo sapiens; identical to SEQ ID NO: 62642

SEQ ID NO: 62664 - DNA, 201 bp, Homo sapiens; identical to SEQ ID NO: 62641

SEQ ID NO: 62665 - DNA, 201 bp, Homo sapiens; identical to SEQ ID NO: 62643

SEQ ID NO: 62666 - DNA, 201 bp, Homo sapiens; identical to SEQ ID NO: 62644

SEQ ID NO: 62667 - DNA, 201 bp, Homo sapiens; identical to SEQ ID NO: 62645

SEQ ID NO: 62668 - DNA, 201 bp, Homo sapiens; identical to SEQ ID NO: 62646

SEQ ID NO: 62669 - DNA, 201 bp, Homo sapiens; identical to SEQ ID NO: 62647

SEQ ID NO: 62670 - DNA, 201 bp, Homo sapiens; identical to SEQ ID NO: 62648

SEQ ID NO: 62671 - DNA, 201 bp, Homo sapiens; identical to SEQ ID NO: 62649

SEQ ID NO: 62672 - DNA, 201 bp, Homo sapiens; identical to SEQ ID NO: 62652

SEQ ID NO: 62673 - DNA, 201 bp, Homo sapiens; identical to SEQ ID NO: 62651

SEQ ID NO: 62674 - DNA, 201 bp, Homo sapiens; identical to SEQ ID NO: 62650

SEQ ID NO: 62675 - DNA, 201 bp, Homo sapiens; identical to SEQ ID NO: 62653

SEQ ID NO: 62676 - DNA, 201 bp, Homo sapiens; identical to SEQ ID NO: 62654

SEQ ID NO: 62677 - DNA, 201 bp, Homo sapiens; identical to SEQ ID NO: 62638

SEQ ID NO: 62678 - DNA, 201 bp, Homo sapiens
cttcggggcagagtgggccgggtaccgcgcttggtcttagcgcatgcgcgctcccggcagctacgcgacctgtgaccatggtggctgtgctgggcggccgkggcgtgttgcgcctgcggctgcttctctcagcgctgaagcccgggatccacgtcccacgggccggacccgcggccgcgttcggcacctcggtaacctctg

SEQ ID NO: 62679 - DNA, 201 bp, Homo sapiens; identical to SEQ ID NO: 62660

SEQ ID NO: 62680 - DNA, 201 bp, Homo sapiens; identical to SEQ ID NO: 62659

SEQ ID NO: 62681 - DNA, 105 bp, Homo sapiens
cgccsacgcagcgagggcgctatggctggcggcctcgcctcctggaaaggccatggtcgctgaggcgacgagcgagggcggggcagcgccgacggggacactcat

SEQ ID NO: 62682 - DNA, 201 bp, Homo sapiens; identical to SEQ ID NO: 62661

SEQ ID NO: 62683 - DNA, 201 bp, Homo sapiens; identical to SEQ ID NO: 62641

SEQ ID NO: 62684 - DNA, 201 bp, Homo sapiens; identical to SEQ ID NO: 62642

SEQ ID NO: 62685 - DNA, 201 bp, Homo sapiens; identical to SEQ ID NO: 62643

SEQ ID NO: 62686 - DNA, 201 bp, Homo sapiens; identical to SEQ ID NO: 62644

SEQ ID NO: 62687 - DNA, 201 bp, Homo sapiens; identical to SEQ ID NO: 62645

SEQ ID NO: 62688 - DNA, 201 bp, Homo sapiens; identical to SEQ ID NO: 62646

SEQ ID NO: 62689 - DNA, 201 bp, Homo sapiens; identical to SEQ ID NO: 62647

SEQ ID NO: 62690 - DNA, 201 bp, Homo sapiens; identical to SEQ ID NO: 62648

SEQ ID NO: 62691 - DNA, 201 bp, Homo sapiens; identical to SEQ ID NO: 62649

SEQ ID NO: 62692 - DNA, 201 bp, Homo sapiens; identical to SEQ ID NO: 62652

SEQ ID NO: 62693 - DNA, 201 bp, Homo sapiens; identical to SEQ ID NO: 62651

SEQ ID NO: 62694 - DNA, 201 bp, Homo sapiens; identical to SEQ ID NO: 62650

SEQ ID NO: 62695 - DNA, 201 bp, Homo sapiens; identical to SEQ ID NO: 62653

SEQ ID NO: 62696 - DNA, 201 bp, Homo sapiens; identical to SEQ ID NO: 62654

SEQ ID NO: 62697 - DNA, 201 bp, Homo sapiens
gagctggtttcaaagttgcaatgggagcttttgataaaaccagacctgtagtagctgctggtgctgttggattagcacaaagagctttggatgaagctacyaagtatgccctggaaaggaaaactttcggaaagctacttgtagagcaccaagcaatatcatttatgctggctgaaatggcaatgaaagttgaactagcta

SEQ ID NO: 62698 - DNA, 201 bp, Homo sapiens
tgggagaaaggaattaaacatgggccagcgatgttcagatactagaggaattgtcttcgaagatgtgaaagtgcctaaagaaaatgttttaattggtgacrgagctggtttcaaagttgcaatgggagcttttgataaaaccagacctgtagtagctgctggtgctgttggattagcacaaagagctttggatgaagctac

SEQ ID NO: 62699 - DNA, 201 bp, Homo sapiens
aggattaggatttagttttgagttcaccgaacagcagaaagaatttcaagctactgctcgtaaatttgccagagaggaaatcatcccagtggctgcagaayatgataaaactggtgaatatccagtccccctaattagaagagcctgggaacttggtttaatgaacacacacattccagagaactgtggaggtcttggact

SEQ ID NO: 62700 - DNA, 201 bp, Homo sapiens
atatcatttatgctggctgaaatggcaatgaaagttgaactagctagaatgagttaccagagagcagcttgggaggttgattctggtcgtcgaaatacctrttatgcttctattgcaaaggcatttgctggagatattgcaaatcagttagctactgatgctgtgcagatacttggaggcaatggatttaatacagaatat

SEQ ID NO: 62701 - DNA, 201 bp, Homo sapiens
cagaaagaatttcaagctactgctcgtaaatttgccagagaggaaatcatcccagtggctgcagaatatgataaaactggtgaatatccagtccccctaaytagaagagcctgggaacttggtttaatgaacacacacattccagagaactgtggaggtcttggacttggaacttttgatgcttgtttaattagtgaagaa

SEQ ID NO: 62702 - DNA, 201 bp, Homo sapiens
ccctggaaaggaaaactttcggaaagctacttgtagagcaccaagcaatatcatttatgctggctgaaatggcaatgaaagttgaactagctagaatgagwtaccagagagcagcttgggaggttgattctggtcgtcgaaatacctattatgcttctattgcaaaggcatttgctggagatattgcaaatcagttagcta

SEQ ID NO: 62703 - DNA, 201 bp, Homo sapiens
gaacttggtttaatgaacacacacattccagagaactgtggaggtcttggacttggaacttttgatgcttgtttaattagtgaagaattggcttatggatrtacaggggttcagactgctattgaaggaaattctttggggcaaatgcctattattattgctggaaatgatcaacaaaagaagaagtatttggggagaatg

SEQ ID NO: 62704 - DNA, 201 bp, Homo sapiens
gcaccaagcaatatcatttatgctggctgaaatggcaatgaaagttgaactagctagaatgagttaccagagagcagcttgggaggttgattctggtcgtygaaatacctattatgcttctattgcaaaggcatttgctggagatattgcaaatcagttagctactgatgctgtgcagatacttggaggcaatggatttaa

SEQ ID NO: 62705 - DNA, 201 bp, Homo sapiens
gtacttcacaaattcaaagacttattgtagcccgtgaacacattgacaagtacaaaaattaaaaaaattactgtagaaatattgaataactagaacacaarccactgtttcagctccagaaaaaagaaagggctttaacgttttttccagtgaaaacaaatcctcttatattaaatctaagcaactgcttattatagtagt

SEQ ID NO: 62706 - DNA, 201 bp, Homo sapiens
tacctattatgcttctattgcaaaggcatttgctggagatattgcaaatcagttagctactgatgctgtgcagatacttggaggcaatggatttaatacakaatatcctgtagaaaaactaatgagggatgccaaaatctatcagatttatgaaggtacttcacaaattcaaagacttattgtagcccgtgaacacattga

SEQ ID NO: 62707 - DNA, 201 bp, Homo sapiens
tcctaaagctcctgctaataaagcctttactggattcattgtggaagcagataccccaggaattcagattgggagaaaggaattaaacatgggccagcgaygttcagatactagaggaattgtcttcgaagatgtgaaagtgcctaaagaaaatgttttaattggtgacggagctggtttcaaagttgcaatgggagcttt

SEQ ID NO: 62708 - DNA, 201 bp, Homo sapiens
cttctattgcaaaggcatttgctggagatattgcaaatcagttagctactgatgctgtgcagatacttggaggcaatggatttaatacagaatatcctgtrgaaaaactaatgagggatgccaaaatctatcagatttatgaaggtacttcacaaattcaaagacttattgtagcccgtgaacacattgacaagtacaaaa

SEQ ID NO: 62709 - DNA, 201 bp, Homo sapiens
tttggatgaagctaccaagtatgccctggaaaggaaaactttcggaaagctacttgtagagcaccaagcaatatcatttatgctggctgaaatggcaatgraagttgaactagctagaatgagttaccagagagcagcttgggaggttgattctggtcgtcgaaatacctattatgcttctattgcaaaggcatttgctgg

SEQ ID NO: 62710 - DNA, 201 bp, Homo sapiens
tgggaggttgattctggtcgtcgaaatacctattatgcttctattgcaaaggcatttgctggagatattgcaaatcagttagctactgatgctgtgcagayacttggaggcaatggatttaatacagaatatcctgtagaaaaactaatgagggatgccaaaatctatcagatttatgaaggtacttcacaaattcaaaga

SEQ ID NO: 62711 - DNA, 201 bp, Homo sapiens; identical to SEQ ID NO: 62698

SEQ ID NO: 62712 - DNA, 201 bp, Homo sapiens; identical to SEQ ID NO: 62704

SEQ ID NO: 62713 - DNA, 201 bp, Homo sapiens; identical to SEQ ID NO: 62706

SEQ ID NO: 62714 - DNA, 127 bp, Homo sapiens
atagtgtatatttcttgtatttactatgatgaaaaaaggtcgttttaattttgaattgaataaagttacctgttcattttttattagatattttaaagacytcagaaaatataaatatgaaataatt

SEQ ID NO: 62715 - DNA, 201 bp, Homo sapiens
tgtgtttaaaatgttcagaataagaaattggaacaaaggagacatgaatagacaattcctaatcatctttaagagtccgctttgtgttttacttaccaccwccactttgaaggctttcttgcctataccaggacaaactcagctctttatcccttttccgaattttcctggtactttcactttgaatacagcgcttaatta

SEQ ID NO: 62716 - DNA, 201 bp, Homo sapiens; identical to SEQ ID NO: 62710

SEQ ID NO: 62717 - DNA, 201 bp, Homo sapiens; identical to SEQ ID NO: 62697

SEQ ID NO: 62718 - DNA, 201 bp, Homo sapiens
aaccgcctcttcccgccccgccccatcccgcccacgggctccagtgggcgggaccagaggagtcccgcgttcggggagtatgtcaaggccgtgacccgtgyattattgtccgagtggccggaacgggagccaacatggcagcggggttcgggcgatgctgcagggtcctgagaagtatttctcgttttcattggagatcac

SEQ ID NO: 62719 - DNA, 201 bp, Homo sapiens; identical to SEQ ID NO: 62699

SEQ ID NO: 62720 - DNA, 201 bp, Homo sapiens; identical to SEQ ID NO: 62700

SEQ ID NO: 62721 - DNA, 201 bp, Homo sapiens; identical to SEQ ID NO: 62701

SEQ ID NO: 62722 - DNA, 201 bp, Homo sapiens; identical to SEQ ID NO: 62702

SEQ ID NO: 62723 - DNA, 201 bp, Homo sapiens; identical to SEQ ID NO: 62703

SEQ ID NO: 62724 - DNA, 201 bp, Homo sapiens
cctctaacccaggttcccgtcctgcaccgcgccgcaagtccccccaccgttcagcgcaaccgggccctcccagccccgccgccgtccccctcccccgcccyggctctctttccgcgctgcggtcagcctcggcgtcccacagagagggccagaggtggaaacgcagaaaaccaaaccaggactatcagagattgcccggag

SEQ ID NO: 62725 - DNA, 201 bp, Homo sapiens
ctcactggaagagaaagtgactccaggtagaattcctcagggagacattcacttccatcattcgctgaaccaggagctttggacagcctcggattgcaccsgcatatccaaggacaccacatcagcggacaagtcataaacagccttgggaatacgcggaaaggtcaaatttacctaaacaattaaattctcttttaaatt

SEQ ID NO: 62726 - DNA, 201 bp, Homo sapiens
gacaaactcagctctttatcccttttccgaattttcctggtactttcactttgaatacagcgcttaattaacattctgccttgtacctaggactaacacastataaattcccagaagacaaagtaggggaatacaataacaggatatagaattttaacagctaaattagatgaatttatgggtgacctttattgggcaaaa

SEQ ID NO: 62727 - DNA, 201 bp, Homo sapiens
ttacttaccaccaccactttgaaggctttcttgcctataccaggacaaactcagctctttatcccttttccgaattttcctggtactttcactttgaatayagcgcttaattaacattctgccttgtacctaggactaacacagtataaattcccagaagacaaagtaggggaatacaataacaggatatagaattttaac

SEQ ID NO: 62728 - DNA, 201 bp, Homo sapiens
tatttcacttaccttatttaaaataaatcaataaagcttgccttaaattatttttatatgactgttggtctctaggtagcctttggtctattgtacacaayctcatttcatatgtttgcattttggcaaagaacttaataaaattgttcagtgcttattatcatatctttctgtattttttccaggaaatttcattacttc

SEQ ID NO: 62729 - DNA, 201 bp, Homo sapiens; identical to SEQ ID NO: 62705

SEQ ID NO: 62730 - DNA, 201 bp, Homo sapiens; identical to SEQ ID NO: 62707

SEQ ID NO: 62731 - DNA, 201 bp, Homo sapiens; identical to SEQ ID NO: 62708

SEQ ID NO: 62732 - DNA, 201 bp, Homo sapiens
gcatttgtgaaactttctgtttggcacagaaacagtcaaaattttgacattcatattctcctattttacagctacaagaactttcttgaaaatcttatttwattctgagcccatatttcacttaccttatttaaaataaatcaataaagcttgccttaaattatttttatatgactgttggtctctaggtagcctttggtc

SEQ ID NO: 62733 - DNA, 201 bp, Homo sapiens; identical to SEQ ID NO: 62709

SEQ ID NO: 62734 - DNA, 201 bp, Homo sapiens
tgtttgaagcgggatggatggcaagcggcggccaggcccagggcccggggtgcccccaaagcgggcccgtgggggcctctgggatgatgatgatgcacctyggccatcccaattcgaggaggacctggcactgatggaggagatggaggcagaacacaggctgcaggagcaggaggaggaggagctgcagtcagtcctgga

SEQ ID NO: 62735 - DNA, 201 bp, Homo sapiens
ggccctgtgcccccatcctgggtgccaaggtgcagagctacgagaaggaggaggacctgctgcaggcctggtccaccttcatccgtatcatggaccccgaygtgatcaccggttacaacatccagaacttcgaccttccgtacctcatctctcgggcccagaccctcaaggtacaaacattccctttcctgggccgtgtgg

SEQ ID NO: 62736 - DNA, 201 bp, Homo sapiens
cacatccacggcttcgctccctacttctacaccccagcgccccctggtttcgggcccgagcacatgggtgacctgcaacgggagctgaacttggccatcarccgggacagtcgcggggggagggagctgactgggccggccgtgctggctgtggaactgtgctcccgagagagcatgtttgggtaccacgggcacggcccc

SEQ ID NO: 62737 - DNA, 186 bp, Homo sapiens
agtcaggggtcacggcggcgtaggctgtggcgggaaacgctgtttgaagcgggatggatggcaagcggcggccaggcccagggccyggggtgcccccaaagcgggcccgtgggggcctctgggatgatgatgatgcacctcggccatcccaattcgaggaggacctggcactgatggaggagatgg

SEQ ID NO: 62738 - DNA, 201 bp, Homo sapiens
tgctgctgcgggagtacaagctccgctcctacacgctcaatgccgtgagcttccacttcctgggcgagcagaaggaggacgtgcagcacagcatcatcacygacctgcagaatgggaacgaccagacccgccgccgcctggctgtgtactgcctgaaggatgcctacctgccactgcggctgctggagcggctcatggtgc

SEQ ID NO: 62739 - DNA, 201 bp, Homo sapiens
acttcctgggcgagcagaaggaggacgtgcagcacagcatcatcaccgacctgcagaatgggaacgaccagacccgccgccgcctggctgtgtactgcctraaggatgcctacctgccactgcggctgctggagcggctcatggtgctggtgaacgccgtggagatggcgagggtcactggcgtgcccctcagctacctgc

SEQ ID NO: 62740 - DNA, 201 bp, Homo sapiens
aacagggcatccgtgtggcaggcctgggcacgcccagcttcgcgccctacgaggccaacgtcgactttgagatccggttcatggtggacacggacatcgtyggctgcaactggctggagctcccagctgggaaatacgccctgaggctgaaggagaaggctacgcagtgccagctggaggcggacgtgctgtggtctgacg

SEQ ID NO: 62741 - DNA, 201 bp, Homo sapiens
aggcagaacacaggctgcaggagcaggaggaggaggagctgcagtcagtcctggagggggttgcagacgggcaggtcccaccatcagccatagatcctcgstggcttcggcccacaccaccagcgctggacccccagacagagcccctcatcttccaacagttggagattgaccattatgtgggcccagcgcagcctgtgc

SEQ ID NO: 62742 - DNA, 201 bp, Homo sapiens
gcgctggacccccagacagagcccctcatcttccaacagttggagattgaccattatgtgggcccagcgcagcctgtgcctggggggcccccaccatcccrcggctccgtgcctgtgctccgcgccttcggggtcaccgatgaggggttctctgtctgctgccacatccacggcttcgctccctacttctacaccccagcg

SEQ ID NO: 62743 - DNA, 201 bp, Homo sapiens
tagatcctcgctggcttcggcccacaccaccagcgctggacccccagacagagcccctcatcttccaacagttggagattgaccattatgtgggcccagcrcagcctgtgcctggggggcccccaccatcccgcggctccgtgcctgtgctccgcgccttcggggtcaccgatgaggggttctctgtctgctgccacatcc

SEQ ID NO: 62744 - DNA, 201 bp, Homo sapiens
gtcacggcggcgtaggctgtggcgggaaacgctgtttgaagcgggatggatggcaagcggcggccaggcccagggcccggggtgcccccaaagcgggcccrtgggggcctctgggatgatgatgatgcacctcggccatcccaattcgaggaggacctggcactgatggaggagatggaggcagaacacaggctgcaggag

SEQ ID NO: 62745 - DNA, 201 bp, Homo sapiens
tcgagcccctcaaagggtactacgacgtccccatcgccaccctggacttctcctcgctgtacccgtccatcatgatggcccacaacctgtgttacaccacrctccttcggcccgggactgcacagaaactgggcctgactgaggatcagttcatcaggacccccaccggggacgagtttgtgaagacctcagtgcggaagg

SEQ ID NO: 62746 - DNA, 201 bp, Homo sapiens
ttcgctccctacttctacaccccagcgccccctggtttcgggcccgagcacatgggtgacctgcaacgggagctgaacttggccatcagccgggacagtcrcggggggagggagctgactgggccggccgtgctggctgtggaactgtgctcccgagagagcatgtttgggtaccacgggcacggcccctccccgttcctg

SEQ ID NO: 62747 - DNA, 108 bp, Homo sapiens
cgcttcggaccccctggacctgaggcctggtgaccttgcaagcatcccatggggcgggggcgggaccagggagaattaataaagttctggacttttgctayatggtgc

SEQ ID NO: 62748 - DNA, 201 bp, Homo sapiens
agatctcacagagcgtcacggggttcggacgtcagatgatcgagaaaaccaagcagctggtggagtctaagtacacagtggagaatggctacagcaccagygccaaggtggtgtatggtgacactgactccgtcatgtgccgattcggcgtgtcctcggtggctgaggcgatggccctggggcgggaggccgcggactggg

SEQ ID NO: 62749 - DNA, 201 bp, Homo sapiens
gcacgcccagcttcgcgccctacgaggccaacgtcgactttgagatccggttcatggtggacacggacatcgtcggctgcaactggctggagctcccagcygggaaatacgccctgaggctgaaggagaaggctacgcagtgccagctggaggcggacgtgctgtggtctgacgtggtcagtcacccaccggaagggccat

SEQ ID NO: 62750 - DNA, 201 bp, Homo sapiens
tgatcaccggttacaacatccagaacttcgaccttccgtacctcatctctcgggcccagaccctcaaggtacaaacattccctttcctgggccgtgtggcyggcctttgctccaacatccgggactcttcattccagtccaagcagacgggccggcgggacaccaaggttgtcagcatggtgggccgcgtgcagatggaca

SEQ ID NO: 62751 - DNA, 201 bp, Homo sapiens
actccggactcaggaaggcctcgtagcggctcctcaggaagcggcccagctccagctgctggcggaccccctcctggggacagaacagcctcagcctaccmctccccacccctcccacccttgccctcaccgcctacccgcttctcaccgtggtcagctggcccaggcctcgtggccacagggtggaggccacctccttgt

SEQ ID NO: 62752 - DNA, 201 bp, Homo sapiens
gctccagctgctggcggaccccctcctggggacagaacagcctcagcctaccactccccacccctcccacccttgccctcaccgcctacccgcttctcacygtggtcagctggcccaggcctcgtggccacagggtggaggccacctccttgtgtgggtccatggggtaggaggccagcggggcccggtcgccatggcgga

SEQ ID NO: 62753 - DNA, 201 bp, Homo sapiens
acagggtggtagatctctgtagaaatgtaaaagaaagaataacaagggaatgcaaagagaagggtgttcagtttgctcctttttctacatgcagggtgacrcagacttacgatgcaggtgcttgtatctacttctattttgcctttaactacaggggaattagtgacccactgaccgtatttgaacaaactgaggcagctg

SEQ ID NO: 62754 - DNA, 201 bp, Homo sapiens
gcgcgagctacgggtctgcagcggaccgggaccgggacccggacccggaccgcgccgggcggaggctgcgggttctctctggccatctgctgggccggccycgggaggctctgagtaccaatgagtgcaaagcgcggagagccgcgtcggcggccacggcagcgcccacggccactcccgccgcgcaggagtcgggcacca

SEQ ID NO: 62755 - DNA, 201 bp, Homo sapiens
ggaggctgcgggttctctctggccatctgctgggccggccccgggaggctctgagtaccaatgagtgcaaagcgcggagagccgcgtcggcggccacggcrgcgcccacggccactcccgccgcgcaggagtcgggcaccatcccaaagaagcggcaagaagttatgaaatggaatggatggggatataatgattctaaat

SEQ ID NO: 62756 - DNA, 201 bp, Homo sapiens
tttaccatgaaatgaatgcctttattcaacttagagtcctaatgtttctgatttcacattcttgttgctgaaatgcagaagaaacagctacagcaagagcrgaaggaaaactcttagacttaatgtctccaattgcaagaattgtttcactaaagaaacagtcatcattcaactactgaatttgaaagcctcagcagtttc

SEQ ID NO: 62757 - DNA, 201 bp, Homo sapiens
cctacttttttttttaaattagtatacatgcataaaaccttgtatcatcaatatacaaattattctgttaggggacatgtttttgttctccatgtttctgyttctattgtggtatgagttgtatttgtatcactgagataacctattgttatattctaattcattgataatatgttttgtaagaaaagctgacatccttca

SEQ ID NO: 62758 - DNA, 201 bp, Homo sapiens
tgatgtgtcctgcagatgagacaagaacaattatttctttggacacttcacaaatgaatcgaattctctgggttgatgagaacaatttgacagctcatgtrgaggctggcataacaggacaagagttggaaagacagcttaaagaaagtggttattgtacaggtcatgaaccagattccctggagttcagtactgtaggag

SEQ ID NO: 62759 - DNA, 201 bp, Homo sapiens
gagaaattgcaaaacagagatgtgctccggcatctattcgcctcatggacaacaagcagtttcagtttggtcatgctcttaaacctcaggtttcctctatytttacatcatttttggacggattaaaaaagttttatattacaaagtttaaaggatttgacccaaatcagctaagtgtagccacattactgtttgaggggg

SEQ ID NO: 62760 - DNA, 201 bp, Homo sapiens
gctcatgtagaggctggcataacaggacaagagttggaaagacagcttaaagaaagtggttattgtacaggtcatgaaccagattccctggagttcagtaytgtaggaggatgggtatctactcgcgcatcaggcatgaagaagaatatctatggcaatatcgaggacctggtggttcatataaaaatggtaacacctaga

SEQ ID NO: 62761 - DNA, 201 bp, Homo sapiens
taaaagaacgtttctgggaatcagatgtctagggaaggattccactgaggagtgatacacgtgtacattgtttaagagcatagtctagtgtgagtaggccrttaaggggaaggatattcatgaaagaatttaggcaacctgttatttagaaagccttcacgtctgtaaggtgcttggcctacttttttttttaaattagta

SEQ ID NO: 62762 - DNA, 201 bp, Homo sapiens
gtttcctctatttttacatcatttttggacggattaaaaaagttttatattacaaagtttaaaggatttgacccaaatcagctaagtgtagccacattacygtttgagggggatcgtgagaaggttcttcaacatgaaaaacaagtgtatgatattgctgcaaaatttggtgggttggcagctggagaagataatggacag

SEQ ID NO: 62763 - DNA, 201 bp, Homo sapiens; identical to SEQ ID NO: 62753

SEQ ID NO: 62764 - DNA, 201 bp, Homo sapiens; identical to SEQ ID NO: 62754

SEQ ID NO: 62765 - DNA, 201 bp, Homo sapiens; identical to SEQ ID NO: 62755

SEQ ID NO: 62766 - DNA, 201 bp, Homo sapiens; identical to SEQ ID NO: 62756

SEQ ID NO: 62767 - DNA, 201 bp, Homo sapiens; identical to SEQ ID NO: 62757

SEQ ID NO: 62768 - DNA, 201 bp, Homo sapiens; identical to SEQ ID NO: 62758

SEQ ID NO: 62769 - DNA, 201 bp, Homo sapiens; identical to SEQ ID NO: 62759

SEQ ID NO: 62770 - DNA, 201 bp, Homo sapiens; identical to SEQ ID NO: 62760

SEQ ID NO: 62771 - DNA, 201 bp, Homo sapiens; identical to SEQ ID NO: 62761

SEQ ID NO: 62772 - DNA, 201 bp, Homo sapiens; identical to SEQ ID NO: 62762

SEQ ID NO: 62773 - DNA, 201 bp, Homo sapiens
tcggcctgaagcattacagtgacttcctggaacgtatgcccagggaggaggctacagagattgagcagacagtccagaaagcagcccaggcctttaactcygggctgctgtgtgtggcatgtggttcataccgacggggaaaggcgacctgtggtgatgtcgacgtgctcatcactcacccagatggccggtcccaccggg

SEQ ID NO: 62774 - DNA, 201 bp, Homo sapiens
ggcctttaactctgggctgctgtgtgtggcatgtggttcataccgacggggaaaggcgacctgtggtgatgtcgacgtgctcatcactcacccagatggcyggtcccaccggggtatcttcagccgcctccttgacagtcttcggcaggaagggttcctcacagatgacttggtgagccaagaggagaatggtcagcaaca

SEQ ID NO: 62775 - DNA, 197 bp, Homo sapiens
gggagagggaagcagccgtgctgtcaacatcatccggcaccctctggggtaggagaacagccattccacatgtgttccctctatccgtcctgcttcctggkcagctggtggtgctgggaatggggtgccccagccttggtgaggacagtgttgggaggcccaggggcccagtaaagtgcatttgacattgaacctgc

SEQ ID NO: 62776 - DNA, 200 bp, Homo sapiens
caggggagagggaagcagccgtgctgtcaacatcatccggcaccctctggggtaggagaacagccattccacatgtgttccctctatccgtcctgcttccygggcagctggtggtgctgggaatggggtgccccagccttggtgaggacagtgttgggaggcccaggggcccagtaaagtgcatttgacattgaacctgc

SEQ ID NO: 62777 - DNA, 201 bp, Homo sapiens; identical to SEQ ID NO: 62773

SEQ ID NO: 62778 - DNA, 201 bp, Homo sapiens
cacccaagcccagcccatctctgatgatgaagccagtgatggggaagaaacccaggttagtgcagctgatctggaagccctcatcagtggccactaccccmcctcccttgagggagattgtgagcctagcccagcccctgctgtcctggataagtgggtctgtgcacagccctcaagccagaaggcgaccaatcacaacct

SEQ ID NO: 62779 - DNA, 201 bp, Homo sapiens; identical to SEQ ID NO: 62774

SEQ ID NO: 62780 - DNA, 197 bp, Homo sapiens; identical to SEQ ID NO: 62775

SEQ ID NO: 62781 - DNA, 200 bp, Homo sapiens; identical to SEQ ID NO: 62776

SEQ ID NO: 62782 - DNA, 201 bp, Homo sapiens
tcctggcacccatgaggccctgcttcagacagccctttctcctcctcctcctcccaccaggcctgtgtctcctccccaaaaggcaaaagaggcaccaaacmcccaagcccagcccatctctgatgatgaagccagtgatggggaagaaacccaggttagtgcagctgatctggaagccctcatcagtggccactaccccac

SEQ ID NO: 62783 - DNA, 201 bp, Homo sapiens; identical to SEQ ID NO: 62773

SEQ ID NO: 62784 - DNA, 201 bp, Homo sapiens; identical to SEQ ID NO: 62774

SEQ ID NO: 62785 - DNA, 197 bp, Homo sapiens; identical to SEQ ID NO: 62775

SEQ ID NO: 62786 - DNA, 200 bp, Homo sapiens; identical to SEQ ID NO: 62776

SEQ ID NO: 62787 - DNA, 201 bp, Homo sapiens; identical to SEQ ID NO: 62773

SEQ ID NO: 62788 - DNA, 201 bp, Homo sapiens; identical to SEQ ID NO: 62778

SEQ ID NO: 62789 - DNA, 201 bp, Homo sapiens; identical to SEQ ID NO: 62774

SEQ ID NO: 62790 - DNA, 197 bp, Homo sapiens; identical to SEQ ID NO: 62775

SEQ ID NO: 62791 - DNA, 200 bp, Homo sapiens; identical to SEQ ID NO: 62776

SEQ ID NO: 62792 - DNA, 201 bp, Homo sapiens; identical to SEQ ID NO: 62782

SEQ ID NO: 62793 - DNA, 201 bp, Homo sapiens
ggctcttcaaggtctttaccccagaagaagccgtgaacttcatcttgtcctgtctcgaggatgaaaagatccagacccgggaagggaagtccgcagccgaygcccgctacgaagcagcctgcaacaggctggccaacaaggcggtgcagcggggctcggccgacaacgtcactgtgatggtggtgcggatagggcactgag

SEQ ID NO: 62794 - DNA, 201 bp, Homo sapiens
ggaagggaagtccgcagccgacgcccgctacgaagcagcctgcaacaggctggccaacaaggcggtgcagcggggctcggccgacaacgtcactgtgatgrtggtgcggatagggcactgaggggtggcgcgcggccaggagcacgcatggtattgacttaaaaggttcattttgtgtgtgtgcacattgtgtgttttgtg

SEQ ID NO: 62795 - DNA, 201 bp, Homo sapiens
ctccggccagcagtactgactcaggatcagggggacctttgctttttgatgatctcccacccgctagcagtggcgattcaggttctcttgccacatcaatrtcccagatggtaaagactgaagggaaaggagcaaagagaaaaacctccgaggaagagaagaatggcagtgaagagcttgtggaaaagaaagtttgtaaag

SEQ ID NO: 62796 - DNA, 201 bp, Homo sapiens
aagaagctcagaaaggacccctgctctttgatgacctccctccggccagcagtactgactcaggatcagggggacctttgctttttgatgatctcccaccmgctagcagtggcgattcaggttctcttgccacatcaatatcccagatggtaaagactgaagggaaaggagcaaagagaaaaacctccgaggaagagaaga

SEQ ID NO: 62797 - DNA, 201 bp, Homo sapiens
agatccagacccgggaagggaagtccgcagccgacgcccgctacgaagcagcctgcaacaggctggccaacaaggcggtgcagcggggctcggccgacaaygtcactgtgatggtggtgcggatagggcactgaggggtggcgcgcggccaggagcacgcatggtattgacttaaaaggttcattttgtgtgtgtgcacat

SEQ ID NO: 62798 - DNA, 201 bp, Homo sapiens
gtcactcttttatcagtgggactgcgcccctcaaccaagagactgccgagttctttctaagcttggacatacctataggcgagttgtatgggttgagtgaragctcgggaccccacacgatatccaaccagaataactacaggcttctaagctgtggcaagatcttgactgggtgtaagaatatgctgttccagcagaaca

SEQ ID NO: 62799 - DNA, 201 bp, Homo sapiens
tgaacatcttgctggttgagaatgatcaacagttacagaaaatcctttcgattccacagagcagcctagagcccctaaaagcgatcatccagtacagactrccaatgaagaagaacaacaacttgtactcttgggatgatttcatggaacttggcagaagtatccctgacacccaactggagcaggtcatcgagagccaga

SEQ ID NO: 62800 - DNA, 201 bp, Homo sapiens
tttatcactgctgttggtgccatcctagccgggggtctttgtgttggtatttatgccaccaactctgccgaggtttgtcaatatgtcatcactcatgccaragtgaacatcttgctggttgagaatgatcaacagttacagaaaatcctttcgattccacagagcagcctagagcccctaaaagcgatcatccagtacaga

SEQ ID NO: 62801 - DNA, 201 bp, Homo sapiens
atcctggggtttaactctgcagagtggtttatcactgctgttggtgccatcctagccgggggtctttgtgttggtatttatgccaccaactctgccgaggyttgtcaatatgtcatcactcatgccaaagtgaacatcttgctggttgagaatgatcaacagttacagaaaatcctttcgattccacagagcagcctagag

SEQ ID NO: 62802 - DNA, 201 bp, Homo sapiens
atccttgatcaagctgggtttggagcgtttccacggagttggtatcctggggtttaactctgcagagtggtttatcactgctgttggtgccatcctagccrggggtctttgtgttggtatttatgccaccaactctgccgaggtttgtcaatatgtcatcactcatgccaaagtgaacatcttgctggttgagaatgatca

SEQ ID NO: 62803 - DNA, 201 bp, Homo sapiens
cagccctcgcatccaagaatggcaaaaagtgggaaattctgaatttcaaccagtactatgaggcttgtcggaaggctgcaaaatccttgatcaagctgggyttggagcgtttccacggagttggtatcctggggtttaactctgcagagtggtttatcactgctgttggtgccatcctagccgggggtctttgtgttggta

SEQ ID NO: 62804 - DNA, 201 bp, Homo sapiens
aagccatgaacaatgcacagaggattgaaaagtgggtcatcttggagaaggacttttccatctatggtggagagctaggtccaatgatgaaacttaagagmcattttgtagcccagaaatacaaaaaacaaattgatcacatgtaccactgactgctttgatggagctgctctcagctgttctgatgccttcagcaggaag

SEQ ID NO: 62805 - DNA, 201 bp, Homo sapiens
tcaatgctgtgaaccaggaagccatgaacaatgcacagaggattgaaaagtgggtcatcttggagaaggacttttccatctatggtggagagctaggtccratgatgaaacttaagagacattttgtagcccagaaatacaaaaaacaaattgatcacatgtaccactgactgctttgatggagctgctctcagctgttct

SEQ ID NO: 62806 - DNA, 201 bp, Homo sapiens
gactgagattgtgaagcagcaagaccccctggtctacaaggccatccagcaaggcatcaatgctgtgaaccaggaagccatgaacaatgcacagaggattsaaaagtgggtcatcttggagaaggacttttccatctatggtggagagctaggtccaatgatgaaacttaagagacattttgtagcccagaaatacaaaaa

SEQ ID NO: 62807 - DNA, 201 bp, Homo sapiens
gctctaggtagaagctctccctgctgtttttaagaagccacattcctcattggtcagtttcttgattgttcgtctgttggagaggtgctccctagaagaayctgccatacgtttcaaagcaataaaatcactgtatatctttctaaggaccttcaagtcatgactccagggaagcctattgggaagtctactaaaaactgc

SEQ ID NO: 62808 - DNA, 201 bp, Homo sapiens
accgtgactgagattgtgaagcagcaagaccccctggtctacaaggccatccagcaaggcatcaatgctgtgaaccaggaagccatgaacaatgcacagargattgaaaagtgggtcatcttggagaaggacttttccatctatggtggagagctaggtccaatgatgaaacttaagagacattttgtagcccagaaatac

SEQ ID NO: 62809 - DNA, 201 bp, Homo sapiens
ggagaacctctggacaagctgaacttcgaggccatcaacttctgtcggggtctgggcagccaggcatccaccgtgactgagattgtgaagcagcaagaccscctggtctacaaggccatccagcaaggcatcaatgctgtgaaccaggaagccatgaacaatgcacagaggattgaaaagtgggtcatcttggagaaggac

SEQ ID NO: 62810 - DNA, 201 bp, Homo sapiens
ctgaagtttctgagcatgttgctgacgctgaagtgtgagatgaatcagatgagcggagaacctctggacaagctgaacttcgaggccatcaacttctgtcrgggtctgggcagccaggcatccaccgtgactgagattgtgaagcagcaagaccccctggtctacaaggccatccagcaaggcatcaatgctgtgaaccag

SEQ ID NO: 62811 - DNA, 201 bp, Homo sapiens
ccatgttagtaggagataaactgaagtttctgagcatgttgctgacgctgaagtgtgagatgaatcagatgagcggagaacctctggacaagctgaacttygaggccatcaacttctgtcggggtctgggcagccaggcatccaccgtgactgagattgtgaagcagcaagaccccctggtctacaaggccatccagcaag

SEQ ID NO: 62812 - DNA, 201 bp, Homo sapiens; identical to SEQ ID NO: 62798

SEQ ID NO: 62813 - DNA, 201 bp, Homo sapiens; identical to SEQ ID NO: 62799

SEQ ID NO: 62814 - DNA, 201 bp, Homo sapiens; identical to SEQ ID NO: 62800

SEQ ID NO: 62815 - DNA, 201 bp, Homo sapiens; identical to SEQ ID NO: 62801

SEQ ID NO: 62816 - DNA, 201 bp, Homo sapiens; identical to SEQ ID NO: 62802

SEQ ID NO: 62817 - DNA, 201 bp, Homo sapiens; identical to SEQ ID NO: 62803

SEQ ID NO: 62818 - DNA, 201 bp, Homo sapiens; identical to SEQ ID NO: 62804

SEQ ID NO: 62819 - DNA, 201 bp, Homo sapiens; identical to SEQ ID NO: 62805

SEQ ID NO: 62820 - DNA, 201 bp, Homo sapiens; identical to SEQ ID NO: 62806

SEQ ID NO: 62821 - DNA, 201 bp, Homo sapiens; identical to SEQ ID NO: 62807

SEQ ID NO: 62822 - DNA, 201 bp, Homo sapiens; identical to SEQ ID NO: 62808

SEQ ID NO: 62823 - DNA, 201 bp, Homo sapiens; identical to SEQ ID NO: 62809

SEQ ID NO: 62824 - DNA, 201 bp, Homo sapiens; identical to SEQ ID NO: 62810

SEQ ID NO: 62825 - DNA, 201 bp, Homo sapiens; identical to SEQ ID NO: 62811

SEQ ID NO: 62826 - DNA, 116 bp, Homo sapiens
aggtcacagagcagtsataactacctgccagtgtctcttaggagtgaggtacctggagttcggggaccccaacctgtgacaatgacagcagacaaattggttttctttgtgaatgg

SEQ ID NO: 62827 - DNA, 201 bp, Homo sapiens
actaccagccattatcacaattgaggatgctataaagaacaactccttttatggacctgagctgaagatcgagaaaggggacctaaagaaggggttttccraagcagataatgttgtgtcaggggagatatacatcggtggccaagagcacttctacctggagactcactgcaccattgctgttccaaaaggcgaggcagg

SEQ ID NO: 62828 - DNA, 201 bp, Homo sapiens
ctcagaggcagctttccaagctctggaaggaggagctgctgcaggacgtgtgtgcaggactggcagaggagctgcatctgcctcccgatgcccctggtggsatggtggacttccggtgcaccctcaccctcagcttcttcttcaagttctacctgacagtccttcagaagctgggccaagagaacctggaagacaagtgtg

SEQ ID NO: 62829 - DNA, 201 bp, Homo sapiens
agtattatggaacgagctttattccacatggacaactgctataaaatccccaacatccggggcactgggcggctgtgcaaaaccaaccttccctccaacamggccttccggggctttggggggccccaggggatgctcattgccgagtgctggatgagtgaagttgcagtgacctgtgggatgcctgcagaggaggtgcgg

SEQ ID NO: 62830 - DNA, 201 bp, Homo sapiens
aaaagagaggattgtgcataattcccaccaagtttggaataagctttacagttccttttctgaatcaggcaggagccctacttcatgtgtacacagatggytctgtgctgctgacccacggggggactgagatgggccaaggccttcataccaaaatggtccaggtggccagtagagctctgaaaatccccacctctaaga

SEQ ID NO: 62831 - DNA, 201 bp, Homo sapiens
ccccacctctaagatttatatcagcgagacaagcactaacactgtgcccaacacctctcccacggctgcctctgtcagcgctgacctcaatggacaggccstctatgcggcttgtcagaccatcttgaaaaggctggaaccctacaagaagaagaatcccagtggctcctgggaagactgggtcacagctgcctacatgga

SEQ ID NO: 62832 - DNA, 201 bp, Homo sapiens
accaccctgtgtgtcactggtgtcccagaaaactgcaaaccctggtctgtgagggtctaaagagagagtcctcagcagagtcttcttgtgctgcctttggscttccatggagcaggaggaacataccacagaacatggatctattaaagtcacagaatgacagacctgtgatttgtcaagatgggatttggaagacaagtg

SEQ ID NO: 62833 - DNA, 201 bp, Homo sapiens
ctgcacccctggcatcgtcatgagtatgtacacactgctccggaatcagcccgagcccaccatggaggagattgagaatgccttccaaggaaatctgtgcygctgcacaggctacagacccatcctccagggcttccggacctttgccagggatggtggatgctgtggaggagatgggaataatccaaattgctgcatgaa

SEQ ID NO: 62834 - DNA, 201 bp, Homo sapiens
aaccccgtgttcatggccagtggggccaagctgacacttgtgtccagaggcaccaggagaactgtccagatggaccacaccttcttccctggctacagaawgaccctgctgagcccggaggagatactgctctccatagagatcccctacagcagggagggggagtatttctcagcattcaagcaggcctcccggagagaa

SEQ ID NO: 62835 - DNA, 201 bp, Homo sapiens
cagaatgacagacctgtgatttgtcaagatgggatttggaagacaagtgaatgcaatggaagattttgatcaaaaatgtaatttgtaaacacaatgataakcaaattcaaaactgttatgcctaaatggtgaatatgcaattaggatcattttctgtctgttttaatcatgtatctggaatagggtcgggaagggtttgtg

SEQ ID NO: 62836 - DNA, 201 bp, Homo sapiens
tggcgtccgttggagggaacatcatcactgccagccccatctccgacctcaaccccgtgttcatggccagtggggccaagctgacacttgtgtccagaggyaccaggagaactgtccagatggaccacaccttcttccctggctacagaaagaccctgctgagcccggaggagatactgctctccatagagatcccctaca

SEQ ID NO: 62837 - DNA, 201 bp, Homo sapiens
cctacagcagggagggggagtatttctcagcattcaagcaggcctcccggagagaagatgacattgccaaggtaaccagtggcatgagagttttattcaarccaggaaccacagaggtacaggagctggccctttgctatggtggaatggccaacagaaccatctcagccctcaagaccactcagaggcagctttccaagc

SEQ ID NO: 62838 - DNA, 201 bp, Homo sapiens
tgctgtggttgctgacaccccggaacacacacagagagctgcccaaggggtgaaaatcacctatgaagaactaccagccattatcacaattgaggatgctrtaaagaacaactccttttatggacctgagctgaagatcgagaaaggggacctaaagaaggggttttccgaagcagataatgttgtgtcaggggagatata

SEQ ID NO: 62839 - DNA, 201 bp, Homo sapiens
ctggtggcatggtggacttccggtgcaccctcaccctcagcttcttcttcaagttctacctgacagtccttcagaagctgggccaagagaacctggaagayaagtgtggtaaactggaccccactttcgccagtgcaactttactgtttcagaaagaccccccagccgatgtccagctcttccaagaggtgcccaagggtc

SEQ ID NO: 62840 - DNA, 201 bp, Homo sapiens
ctctataatacaaaaatccaaccaactcaattattgagcacgtacaatgttctagatttctttcccttcctctttgaagagaatatttgtattccaaatactctttgagtatttacaaaaaagattatgtttaatctttacatttgaagccaaagtaatttccacctagaaatgatgctatcagtcctggcatggtggctc

SEQ ID NO: 62841 - DNA, 201 bp, Homo sapiens
tctataatacaaaaatccaaccaactcaattattgagcacgtacaatgttctagatttctttcccttcctctttgaagagaatatttgtattccaaatactctttgagtatttacaaaaaagattatgtttaatctttacatttgaagccaaagtaatttccacctagaaatgatgctatcagtcctggcatggtggctca

SEQ ID NO: 62842 - DNA, 201 bp, Homo sapiens
agaacaactccttttatggacctgagctgaagatcgagaaaggggacctaaagaaggggttttccgaagcagataatgttgtgtcaggggagatatacatyggtggccaagagcacttctacctggagactcactgcaccattgctgttccaaaaggcgaggcaggggagatggagctctttgtgtctacacagaacacca

SEQ ID NO: 62843 - DNA, 201 bp, Homo sapiens
tggacctcaaggctcagcaccctgacgccaagctggtcgtggggaacacggagattggcattgagatgaagttcaagaatatgctgtttcctatgattgtytgcccagcctggatccctgagctgaattcggtagaacatggacccgacggtatctcctttggagctgcttgccccctgagcattgtggaaaaaaccctgg

SEQ ID NO: 62844 - DNA, 201 bp, Homo sapiens
  misc_feature (1)...(201): n = A,T,C or G
aagagaacaagggaagaacaaacatcccttttattgctccaaatggtgatttaatccctacatggtgctgggtggacaatgtgtcactgtcacatgccttnactgtataaatccaaccttctgccagagagaatctgtggttctggccatggagggaggatagtggaaatgatatagttggactggtgcttgatgtcacta

SEQ ID NO: 62845 - DNA, 201 bp, Homo sapiens
tgggtcacagctgcctacatggacacagtgagcttgtctgccactgggttttatagaacacccaatctgggctacagctttgagactaactcagggaaccscttccactacttcagctatggggtggcttgctctgaagtagaaatcgactgcctaacaggagatcataagaacctccgcacagatattgtcatggatgtt

SEQ ID NO: 62846 - DNA, 201 bp, Homo sapiens
tgaaagcctggccttcaaaccaatgaacagcaaagcataaccttgaatctatactcaaattttgcaatgaggcagtggggtaaggttaaatcctctaaccrtctttgaatcattggaaagaataaagaatgaaacaaattcaaggttaattggatctgattttgtgaagctgcataaagcaagattactctataatacaaa

SEQ ID NO: 62847 - DNA, 201 bp, Homo sapiens
cagcacacaggtaataacgtgaaggaactcttccggctagacagccctgccaccccggagaagatccgcaatgcctgcgtggacaagttcaccaccctgtrtgtcactggtgtcccagaaaactgcaaaccctggtctgtgagggtctaaagagagagtcctcagcagagtcttcttgtgctgcctttgggcttccatgga

SEQ ID NO: 62848 - DNA, 201 bp, Homo sapiens
tcttcaccctagaggagctacactattcccccgaggggagcctgcacacccgtggccctagcacctacaagatcccggcatttggcagcatccccattgarttcagggtgtccctgctccgcgactgccccaacaagaaggccatctatgcatcgaaggctgttggagagccgcccctcttcctggctgcttctatcttct

SEQ ID NO: 62849 - DNA, 201 bp, Homo sapiens
agtatcatgctcggaagagtgaggttgacaagttcaacaaggagaattgttggaaaaagagaggattgtgcataattcccaccaagtttggaataagcttyacagttccttttctgaatcaggcaggagccctacttcatgtgtacacagatggctctgtgctgctgacccacggggggactgagatgggccaaggccttc

SEQ ID NO: 62850 - DNA, 201 bp, Homo sapiens
tcagtctgaggaggacatggtgggccggcccctgccccacctggcagcggacatgcaggcctctggtgaggccgtgtactgtgacgacattcctcgctacragaatgagctgtctctccggctggtcaccagcacccgggcccacgccaagatcaagtccatagatacatcagaagctaagaaggttccagggtttgtttg

SEQ ID NO: 62851 - DNA, 201 bp, Homo sapiens
agagtattatggaacgagctttattccacatggacaactgctataaaatccccaacatccggggcactgggcggctgtgcaaaaccaaccttccctccaamacggccttccggggctttggggggccccaggggatgctcattgccgagtgctggatgagtgaagttgcagtgacctgtgggatgcctgcagaggaggtgc

SEQ ID NO: 62852 - DNA, 201 bp, Homo sapiens
ccgggcccacgccaagatcaagtccatagatacatcagaagctaagaaggttccagggtttgtttgtttcatttccgctgatgatgttcctgggagtaacrtaactggaatttgtaatgatgagacagtctttgcgaaggataaggttacttgtgttgggcatatcattggtgctgtggttgctgacaccccggaacacac

SEQ ID NO: 62853 - DNA, 201 bp, Homo sapiens
ctgattctgaagacagtcctcagactttacttttttctgcagctcgcccacagtgggtatgcaaagttgcaaaaaaatgagtgaaatccagatacgaacasattgatgtttttggaaaaatgactcaaaaggctgcagcttctgtggaacatttggccatccggtgtcattggtctcagaggccagcagttactggagatg

SEQ ID NO: 62854 - DNA, 201 bp, Homo sapiens
ggagtccgagagccagaagaaggagaggcagaagagctttatggatatcacagtttcggctaatggattatggacctgtacttcccttatatggtttttaygaagatttaaacaagataagctgaaaatacattacacagtgctggagtgacagaaggaagtcaagccaccattatgactcagatgagaaatcagaaacaa

SEQ ID NO: 62855 - DNA, 201 bp, Homo sapiens
taacttggcatgccgcaatggacatctccagtcagaaagtggagctgttccaaaaagaaaagaccccttaacacacactagtaattcactgcctcgttcawaaacagttatgaaaactggatctgcaggcctttcaggccaccatagagcacctagttacagtggtttatccatggtttctggagtgaaacagggatctgg

SEQ ID NO: 62856 - DNA, 201 bp, Homo sapiens
actaggtaagaactttataatgaagacatacattcttcttaattttactcttgctcttgttaaagatttgtttgaatatagaagatgcatgatttctgggkttttttttttttttgagacagagtttcgctcttgttgcccaggctggagtgcaatggcgcaatctcgactcaccacaacctccgcctcccaggttcaagc

SEQ ID NO: 62857 - DNA, 201 bp, Homo sapiens
ctgccagcgcttctcccgcgccctcatggcagccaagaggagctccggggccgcgccagcacctgcctcggcctcggccccggcgccggtgccgggcggckaggccgagcgcgtccgagtcttccacaaacaggccttcgagtacatctccattgccctgcgcatcgatgaggatgagaaagcaggacagaaggagcaagc

SEQ ID NO: 62858 - DNA, 201 bp, Homo sapiens
gattaacgttattgatacttggataactggctaatcatattaaaggactatgtggttccagctcaacttttaatatattgtctcctttaaaactatcatgrttataattctattgggaaagacttttagataacaaagatttcaaatgttaaaagagataaaagtcaggttaatactatcttaaacactgagtcagaaaat

SEQ ID NO: 62859 - DNA, 201 bp, Homo sapiens
aagaccccttaacacacactagtaattcactgcctcgttcaaaaacagttatgaaaactggatctgcaggcctttcaggccaccatagagcacctagttasagtggtttatccatggtttctggagtgaaacagggatctggtcctgctcctaccactcataagggtactccgaaaacaaataggacaaataaaccttcta

SEQ ID NO: 62860 - DNA, 201 bp, Homo sapiens
gagtacttgtaatgggtgcaactaataggccacaagagcttgatgaggctgttctcaggcgtttcatcaaacgggtatatgtgtctttaccaaatgaggasacaagactacttttgcttaaaaatctgttatgtaaacaaggaagtccattgacccaaaaagaactagcacaacttgctagaatgactgatggatactcag

SEQ ID NO: 62861 - DNA, 201 bp, Homo sapiens
gaaagtggagctgttccaaaaagaaaagaccccttaacacacactagtaattcactgcctcgttcaaaaacagttatgaaaactggatctgcaggcctttmaggccaccatagagcacctagttacagtggtttatccatggtttctggagtgaaacagggatctggtcctgctcctaccactcataagggtactccgaaa

SEQ ID NO: 62862 - DNA, 201 bp, Homo sapiens
tataatgacagtactaacttggcatgccgcaatggacatctccagtcagaaagtggagctgttccaaaaagaaaagaccccttaacacacactagtaattsactgcctcgttcaaaaacagttatgaaaactggatctgcaggcctttcaggccaccatagagcacctagttacagtggtttatccatggtttctggagtg

SEQ ID NO: 62863 - DNA, 201 bp, Homo sapiens
actaacttggcatgccgcaatggacatctccagtcagaaagtggagctgttccaaaaagaaaagaccccttaacacacactagtaattcactgcctcgttsaaaaacagttatgaaaactggatctgcaggcctttcaggccaccatagagcacctagttacagtggtttatccatggtttctggagtgaaacagggatct

SEQ ID NO: 62864 - DNA, 201 bp, Homo sapiens
tgcaaccttctttaatataagtgctgcaagtttaacttcaaaatacgtgggagaaggagagaaattggtgagggctctttttgctgtggctcgagaacttyaaccttctataatttttatagatgaagttgatagccttttgtgtgaaagaagagaaggggagcacgatgctagtagacgcctaaaaactgaatttctaat

SEQ ID NO: 62865 - DNA, 201 bp, Homo sapiens
gcgcttctcccgcgccctcatggcagccaagaggagctccggggccgcgccagcacctgcctcggcctcggccccggcgccggtgccgggcggcgaggcckagcgcgtccgagtcttccacaaacaggccttcgagtacatctccattgccctgcgcatcgatgaggatgagaaagcaggacagaaggagcaagctgtgga

SEQ ID NO: 62866 - DNA, 201 bp, Homo sapiens
ggaagtccattgacccaaaaagaactagcacaacttgctagaatgactgatggatactcaggaagtgacctaacagctttggcaaaagatgcagcactggytcctatccgagaactaaaaccagaacaggtgaagaatatgtctgccagtgagatgagaaatattcgattatctgacttcactgaatccttgaaaaaaata

SEQ ID NO: 62867 - DNA, 201 bp, Homo sapiens
ttgacccaaaaagaactagcacaacttgctagaatgactgatggatactcaggaagtgacctaacagctttggcaaaagatgcagcactgggtcctatccyagaactaaaaccagaacaggtgaagaatatgtctgccagtgagatgagaaatattcgattatctgacttcactgaatccttgaaaaaaataaaacgcagc

SEQ ID NO: 62868 - DNA, 201 bp, Homo sapiens
cattgcaagaaattgttattcttccttctctgaggcctgagttgttcacagggcttagagctcctgccagagggctgttactctttggtccacctgggaakgggaagacaatgctggctaaagcagtagctgcagaatcgaatgcaaccttctttaatataagtgctgcaagtttaacttcaaaatacgtgggagaaggag

SEQ ID NO: 62869 - DNA, 201 bp, Homo sapiens
ttatctgacttcactgaatccttgaaaaaaataaaacgcagcgtcagccctcaaactttagaagcgtacatacgttggaacaaggactttggagataccaytgtttaaggaaatacctttgtaaacctgcagaacattttacttaaaagaggaaacacaagatcttcaatgaacgtcatcggctacagaaacagcctaagt

SEQ ID NO: 62870 - DNA, 201 bp, Homo sapiens
ggctctgccagcgcttctcccgcgccctcatggcagccaagaggagctccggggccgcgccagcacctgcctcggcctcggccccggcgccggtgccgggmggcgaggccgagcgcgtccgagtcttccacaaacaggccttcgagtacatctccattgccctgcgcatcgatgaggatgagaaagcaggacagaaggagc

SEQ ID NO: 62871 - DNA, 201 bp, Homo sapiens
caagaaattgttattcttccttctctgaggcctgagttgttcacagggcttagagctcctgccagagggctgttactctttggtccacctgggaatgggargacaatgctggctaaagcagtagctgcagaatcgaatgcaaccttctttaatataagtgctgcaagtttaacttcaaaatacgtgggagaaggagagaaa

SEQ ID NO: 62872 - DNA, 201 bp, Homo sapiens
gctctgccagcgcttctcccgcgccctcatggcagccaagaggagctccggggccgcgccagcacctgcctcggcctcggccccggcgccggtgccgggcsgcgaggccgagcgcgtccgagtcttccacaaacaggccttcgagtacatctccattgccctgcgcatcgatgaggatgagaaagcaggacagaaggagca

SEQ ID NO: 62873 - DNA, 201 bp, Homo sapiens
aaaggctccggcggcgccagcaacccggtgcctcccaggcctccgcccccttgcctggcccccgcccctcccgccgccgggccggcccctccgcccgagtygccgcataagcggaacctgtactatttctcctacccgctgtttgtaggcttcgcgctgctgcgtttggtcgccttccacctggggctcctcttcgtgtgg

SEQ ID NO: 62874 - DNA, 201 bp, Homo sapiens
tgtaaacaaggaagtccattgacccaaaaagaactagcacaacttgctagaatgactgatggatactcaggaagtgacctaacagctttggcaaaagatgragcactgggtcctatccgagaactaaaaccagaacaggtgaagaatatgtctgccagtgagatgagaaatattcgattatctgacttcactgaatccttg

SEQ ID NO: 62875 - DNA, 201 bp, Homo sapiens
attgacccaaaaagaactagcacaacttgctagaatgactgatggatactcaggaagtgacctaacagctttggcaaaagatgcagcactgggtcctatcvgagaactaaaaccagaacaggtgaagaatatgtctgccagtgagatgagaaatattcgattatctgacttcactgaatccttgaaaaaaataaaacgcag

SEQ ID NO: 62876 - DNA, 201 bp, Homo sapiens
gtgttgcagatgaaagtattccaggaacagtgaatggtagaagacacaagaacatttgtttgtttgtcttctgatgttttttcttaaaatagtaatttctsctacttttcttttctactgttgtcttaactacaggtgattggaatgccaaacactcttaagtttattttcttttttcgttttataaattcagtgtgccaa

SEQ ID NO: 62877 - DNA, 201 bp, Homo sapiens
taaggaaatacctttgtaaacctgcagaacattttacttaaaagaggaaacacaagatcttcaatgaacgtcatcggctacagaaacagcctaagtttacrggactttttagagtcttacatatttgtgcaccaaacttgaagatgaaccagaaaacagacttaaacaaaatatacaatgcaaatgtaattttttgttgtt

SEQ ID NO: 62878 - DNA, 201 bp, Homo sapiens
tagaagcgtacatacgttggaacaaggactttggagataccactgtttaaggaaatacctttgtaaacctgcagaacattttacttaaaagaggaaacacragatcttcaatgaacgtcatcggctacagaaacagcctaagtttacaggactttttagagtcttacatatttgtgcaccaaacttgaagatgaaccagaa

SEQ ID NO: 62879 - DNA, 201 bp, Homo sapiens
tttggttatggccaaggaccgcttacaacttctagaaagtggagctgttccaaaaagaaaagaccccttaacacacactagtaattcactgcctcgttcawaaacagttatgaaaactggatctgcaggcctttcaggccaccatagagcacctagttacagtggtttatccatggtttctggagtgaaacagggatctgg

SEQ ID NO: 62880 - DNA, 201 bp, Homo sapiens; identical to SEQ ID NO: 62856

SEQ ID NO: 62881 - DNA, 201 bp, Homo sapiens; identical to SEQ ID NO: 62857

SEQ ID NO: 62882 - DNA, 201 bp, Homo sapiens; identical to SEQ ID NO: 62858

SEQ ID NO: 62883 - DNA, 201 bp, Homo sapiens; identical to SEQ ID NO: 62859

SEQ ID NO: 62884 - DNA, 201 bp, Homo sapiens; identical to SEQ ID NO: 62860

SEQ ID NO: 62885 - DNA, 201 bp, Homo sapiens; identical to SEQ ID NO: 62861

SEQ ID NO: 62886 - DNA, 201 bp, Homo sapiens
aaaatgatgactaatttggttatggccaaggaccgcttacaacttctagaaagtggagctgttccaaaaagaaaagaccccttaacacacactagtaattsactgcctcgttcaaaaacagttatgaaaactggatctgcaggcctttcaggccaccatagagcacctagttacagtggtttatccatggtttctggagtg

SEQ ID NO: 62887 - DNA, 201 bp, Homo sapiens
aatttggttatggccaaggaccgcttacaacttctagaaagtggagctgttccaaaaagaaaagaccccttaacacacactagtaattcactgcctcgttsaaaaacagttatgaaaactggatctgcaggcctttcaggccaccatagagcacctagttacagtggtttatccatggtttctggagtgaaacagggatct

SEQ ID NO: 62888 - DNA, 201 bp, Homo sapiens; identical to SEQ ID NO: 62864

SEQ ID NO: 62889 - DNA, 201 bp, Homo sapiens; identical to SEQ ID NO: 62865

SEQ ID NO: 62890 - DNA, 201 bp, Homo sapiens; identical to SEQ ID NO: 62866

SEQ ID NO: 62891 - DNA, 201 bp, Homo sapiens; identical to SEQ ID NO: 62867

SEQ ID NO: 62892 - DNA, 201 bp, Homo sapiens; identical to SEQ ID NO: 62868

SEQ ID NO: 62893 - DNA, 201 bp, Homo sapiens; identical to SEQ ID NO: 62869

SEQ ID NO: 62894 - DNA, 201 bp, Homo sapiens; identical to SEQ ID NO: 62870

SEQ ID NO: 62895 - DNA, 201 bp, Homo sapiens; identical to SEQ ID NO: 62871

SEQ ID NO: 62896 - DNA, 201 bp, Homo sapiens; identical to SEQ ID NO: 62872

SEQ ID NO: 62897 - DNA, 201 bp, Homo sapiens; identical to SEQ ID NO: 62873

SEQ ID NO: 62898 - DNA, 201 bp, Homo sapiens; identical to SEQ ID NO: 62874

SEQ ID NO: 62899 - DNA, 201 bp, Homo sapiens; identical to SEQ ID NO: 62875

SEQ ID NO: 62900 - DNA, 201 bp, Homo sapiens; identical to SEQ ID NO: 62876

SEQ ID NO: 62901 - DNA, 201 bp, Homo sapiens; identical to SEQ ID NO: 62877

SEQ ID NO: 62902 - DNA, 201 bp, Homo sapiens; identical to SEQ ID NO: 62878

SEQ ID NO: 62903 - DNA, 201 bp, Homo sapiens
cgccaaaaaggacatctttggagccagtgatccgtatgtgaaactttcattgtacgtagcggatgagaatagagaacttgctttggtccagacaaaaacamttaaaaagacactgaacccaaaatggaatgaagaattttatttcagggtaaacccatctaatcacagactcctatttgaagtatttgacgaaaatagact

SEQ ID NO: 62904 - DNA, 201 bp, Homo sapiens
cggttctcttaacatcagttatcacagctgcctgtgggtcccgggtatttccattcctgccccttgttggcccgaggaaggatgtggaaagagcacctggygggatgaaggtccaacagcctgtgcctctccactgctggccctggagccggcagcagtgaggcattcattgtctgtgttgcggtgtattcccagcttcag

SEQ ID NO: 62905 - DNA, 201 bp, Homo sapiens
gtctttccgttcgttggttttctgtgtgtaaggagtagcattgctgttggcgcctaacctcgcgtgcactgcattctcaaccccgtaccagtgcatcatcrgaagccttcctcgtgaccataactctgtgtctgcagatatgtgttcccgtgtaagccagttttccccttttactcagactgatttcacctagattgtcac

SEQ ID NO: 62906 - DNA, 201 bp, Homo sapiens
cctgttggcatgaaattttccaagcaaacctcattaaacatctgttgtttgttaaagatgttccactgaaagcaacgcatgtttcaaaggcacgtctttcygttcgttggttttctgtgtgtaaggagtagcattgctgttggcgcctaacctcgcgtgcactgcattctcaaccccgtaccagtgcatcatcagaagcct

SEQ ID NO: 62907 - DNA, 201 bp, Homo sapiens
tgacctcaggtgatcctcccgcctcagccttccaaagtgctgggattacaagcatgagccaccgcacccggcctcacagtgacagattctgagaaacagcrtgcaaaacatttgaaccattttctacatctcccattgttgcatagagagtgtgcaccgctgctatcttgccagatccacactggtcctcccgaaagccag

SEQ ID NO: 62908 - DNA, 201 bp, Homo sapiens
gaaattgccgtttttaccctgccctggctggcatgtgagaagccatggaaggttgtggttgtaaatgagttgtctaaaggggtgcagaggcctgaggtttytaaaagaaggtagatttctacagagctgagtgttggttcctttttcttattggttgaaaattacctggtagtgatcagaaaacttagatgctatgtaact

SEQ ID NO: 62909 - DNA, 201 bp, Homo sapiens
aaacctacagacaagtactttgagagaatttccaatataatattagacataatgataattttttccatactcagaatgaaaaactggatattacgtttttkttttggggtttttttgtacaaatttagctaatagctacaggctgagagaattgtaacatagcatgacaaattttgtgttgacttgaaaggaatcacacca

SEQ ID NO: 62910 - DNA, 201 bp, Homo sapiens
aaccctaattcaggcctctgtaatgaggatcatttgtcctacttcacttttattggaagagttgctggtctggccgtatttcatgggaagctcttagatgrtttcttcattagaccattttacaagatgatgttgggaaagcagataaccctgaatgacatggaatctgtggatagtgaatattacaactctttgaaatgg

SEQ ID NO: 62911 - DNA, 201 bp, Homo sapiens; identical to SEQ ID NO: 62903

SEQ ID NO: 62912 - DNA, 201 bp, Homo sapiens; identical to SEQ ID NO: 62909

SEQ ID NO: 62913 - DNA, 201 bp, Homo sapiens; identical to SEQ ID NO: 62910

SEQ ID NO: 62914 - DNA, 201 bp, Homo sapiens
cgaaccacaacttggactcgacctatcatgcagcttgcagaagatggtgcgtccggatcagccacaaacagtaacaaccatctaatcgagcctcagatccrccggcctcgtagcctcagctcgccaacagtaactttatctgccccgctggagggtgccaaggactcacccgtacgtcgggctgtgaaagacaccctttcc

SEQ ID NO: 62915 - DNA, 201 bp, Homo sapiens; identical to SEQ ID NO: 62904

SEQ ID NO: 62916 - DNA, 201 bp, Homo sapiens; identical to SEQ ID NO: 62905

SEQ ID NO: 62917 - DNA, 201 bp, Homo sapiens; identical to SEQ ID NO: 62906

SEQ ID NO: 62918 - DNA, 201 bp, Homo sapiens; identical to SEQ ID NO: 62907

SEQ ID NO: 62919 - DNA, 201 bp, Homo sapiens; identical to SEQ ID NO: 62908

SEQ ID NO: 62920 - DNA, 201 bp, Homo sapiens; identical to SEQ ID NO: 62914

SEQ ID NO: 62921 - DNA, 201 bp, Homo sapiens; identical to SEQ ID NO: 62903

SEQ ID NO: 62922 - DNA, 201 bp, Homo sapiens; identical to SEQ ID NO: 62910

SEQ ID NO: 62923 - DNA, 201 bp, Homo sapiens
caccactgggccagtgctacctggccagctctcagccttgggaggccacctgcccgtgtttgacctgggttaatgaccgccagttcctttcccttaatacractcatctgctctcctgcatgctcgctccttggggagagtcccgtattctcagagtaaaagttgtttctggaattgatctcgccaaaaaggacatctttg

SEQ ID NO: 62924 - DNA, 192 bp, Homo sapiens
cccagcccaagaggacagaacactgctgcccgcctcatcaccccagcccaagaggacagaacactgctgcccgcctcatcaccccagcccaaggggacagracactgctgcccgcctcatcaccccagcccaagaggacagaacactgctgcccacctcatcaccccagcccaaggggacagaacactgctg

SEQ ID NO: 62925 - DNA, 199 bp, Homo sapiens
tcatcaccccagcccaagaggacagaacactgctgcccgcctcatcaccccagcccaagaggacagaacactgctgcccgcctcatcaccccagcccaagrggacaggacactgctgcccgcctcatcaccccagcccaagaggacagaacactgctgcccacctcatcaccccagcccaaggggacagaacactgctg

SEQ ID NO: 62926 - DNA, 201 bp, Homo sapiens
cccagcccaaggggacagaacactgctgcccgcctcatcaccccagcccaagaggacagaacactgctgcccgcctcatcaccccagcccaagaggacagracactgctgcccgcctcatcaccccagcccaaggggacaggacactgctgcccgcctcatcaccccagcccaagaggacagaacactgctgcccacctca

SEQ ID NO: 62927 - DNA, 201 bp, Homo sapiens
tcatcaccccagcccaaggggacagaacactgctgcccgcctcatcaccccagcccaagaggacagaacactgctgcccgcctcatcaccccagcccaagrggacagaacactgctgcccgcctcatcaccccagcccaaggggacaggacactgctgcccgcctcatcaccccagcccaagaggacagaacactgctgcc

SEQ ID NO: 62928 - DNA, 201 bp, Homo sapiens
cccagcccaagaggacagaacactgctgcccgcctcatcaccccagcccaaggggacagaacactgctgcccgcctcatcaccccagcccaagaggacagracactgctgcccgcctcatcaccccagcccaagaggacagaacactgctgcccgcctcatcaccccagcccaaggggacaggacactgctgcccgcctca

SEQ ID NO: 62929 - DNA, 201 bp, Homo sapiens
taaacacatgacctgtgcccgtcccgtgttcttcgtccatgtccccagagaggccgtggatgggatggtgcaagaaacccatcaggaagcagaattaatcyttcctgcgggtggtccctgtgaagaagacacagcggccggtggtgtgacagcccacagctgtcgaaggaagggagaagagagggaccgagggccagcaat

SEQ ID NO: 62930 - DNA, 201 bp, Homo sapiens
tcatcaccccagcccaagaggacagaacactgctgcccgcctcatcaccccagcccaaggggacagaacactgctgcccgcctcatcaccccagcccaagrggacagaacactgctgcccgcctcatcaccccagcccaagaggacagaacactgctgcccgcctcatcaccccagcccaaggggacaggacactgctgcc

SEQ ID NO: 62931 - DNA, 201 bp, Homo sapiens
tcctgcgggtggtccctgtgaagaagacacagcggccggtggtgtgacagcccacagctgtcgaaggaagggagaagagagggaccgagggccagcaatarggttttacagctacgtgctagtcagggcccaacagagggacctcatgcgaggagttgctccacaggtgtggaggatgaaagaacaagttggggcgaccct

SEQ ID NO: 62932 - DNA, 201 bp, Homo sapiens; identical to SEQ ID NO: 62903

SEQ ID NO: 62933 - DNA, 201 bp, Homo sapiens; identical to SEQ ID NO: 62910

SEQ ID NO: 62934 - DNA, 201 bp, Homo sapiens
tttcagcagctttgaggaaaagtatagtgatccgtatgtgaaactttcattgtacgtagcggatgagaatagagaacttgctttggtccagacaaaaacamttaaaaagacactgaacccaaaatggaatgaagaattttatttcagggtaaacccatctaatcacagactcctatttgaagtatttgacgaaaatagact

SEQ ID NO: 62935 - DNA, 139 bp, Homo sapiens
acttgctggtattcccccggtatcagcagaggtgtgtaygggcactgctttaaaactgggaaggaggaagacgaggccagggagccggagggtcaccaaggtagatttccagcagcgctagtccagctgaacactttcc

SEQ ID NO: 62936 - DNA, 201 bp, Homo sapiens; identical to SEQ ID NO: 62909

SEQ ID NO: 62937 - DNA, 201 bp, Homo sapiens; identical to SEQ ID NO: 62910

SEQ ID NO: 62938 - DNA, 201 bp, Homo sapiens; identical to SEQ ID NO: 62914

SEQ ID NO: 62939 - DNA, 201 bp, Homo sapiens; identical to SEQ ID NO: 62904

SEQ ID NO: 62940 - DNA, 201 bp, Homo sapiens; identical to SEQ ID NO: 62905

SEQ ID NO: 62941 - DNA, 201 bp, Homo sapiens; identical to SEQ ID NO: 62906

SEQ ID NO: 62942 - DNA, 201 bp, Homo sapiens; identical to SEQ ID NO: 62907

SEQ ID NO: 62943 - DNA, 201 bp, Homo sapiens; identical to SEQ ID NO: 62908

SEQ ID NO: 62944 - DNA, 201 bp, Homo sapiens
ctcagagtaaaagttgtttctggaattgatctcgccaaaaaggacatctttggagccagcggatgagaatagagaacttgctttggtccagacaaaaacamttaaaaagacactgaacccaaaatggaatgaagaattttatttcagggtaaacccatctaatcacagactcctatttgaagtatttgacgaaaatagact

SEQ ID NO: 62945 - DNA, 201 bp, Homo sapiens; identical to SEQ ID NO: 62909

SEQ ID NO: 62946 - DNA, 201 bp, Homo sapiens; identical to SEQ ID NO: 62910

SEQ ID NO: 62947 - DNA, 201 bp, Homo sapiens
tcttcagaacttgctctgcccttgagttttccagctttcctttaatgcactaaacctttaatattgtattctcctaaatgagacgtctcgcatttgagcargtaacactcgggagagtcccgtattctcagagtaaaagttgtttctggaattgatctcgccaaaaaggacatctttggagccagcggatgagaatagaga

SEQ ID NO: 62948 - DNA, 201 bp, Homo sapiens; identical to SEQ ID NO: 62904

SEQ ID NO: 62949 - DNA, 201 bp, Homo sapiens; identical to SEQ ID NO: 62905

SEQ ID NO: 62950 - DNA, 201 bp, Homo sapiens; identical to SEQ ID NO: 62906

SEQ ID NO: 62951 - DNA, 201 bp, Homo sapiens; identical to SEQ ID NO: 62907

SEQ ID NO: 62952 - DNA, 201 bp, Homo sapiens; identical to SEQ ID NO: 62908

SEQ ID NO: 62953 - DNA, 201 bp, Homo sapiens; identical to SEQ ID NO: 62903

SEQ ID NO: 62954 - DNA, 201 bp, Homo sapiens; identical to SEQ ID NO: 62909

SEQ ID NO: 62955 - DNA, 201 bp, Homo sapiens; identical to SEQ ID NO: 62910

SEQ ID NO: 62956 - DNA, 201 bp, Homo sapiens; identical to SEQ ID NO: 62914

SEQ ID NO: 62957 - DNA, 201 bp, Homo sapiens
tcttcagaacttgctctgcccttgagttttccagctttcctttaatgcactaaacctttaatattgtattctcctaaatgagacgtctcgcatttgagcargtaacactcgggagagtcccgtattctcagagtaaaagttgtttctggaattgatctcgccaaaaaggacatctttggagccagtgatccgtatgtgaaa

SEQ ID NO: 62958 - DNA, 201 bp, Homo sapiens; identical to SEQ ID NO: 62904

SEQ ID NO: 62959 - DNA, 201 bp, Homo sapiens; identical to SEQ ID NO: 62905

SEQ ID NO: 62960 - DNA, 201 bp, Homo sapiens; identical to SEQ ID NO: 62906

SEQ ID NO: 62961 - DNA, 201 bp, Homo sapiens; identical to SEQ ID NO: 62907

SEQ ID NO: 62962 - DNA, 201 bp, Homo sapiens; identical to SEQ ID NO: 62908

SEQ ID NO: 62963 - DNA, 201 bp, Homo sapiens; identical to SEQ ID NO: 62903

SEQ ID NO: 62964 - DNA, 201 bp, Homo sapiens; identical to SEQ ID NO: 62914

SEQ ID NO: 62965 - DNA, 201 bp, Homo sapiens; identical to SEQ ID NO: 62910

SEQ ID NO: 62966 - DNA, 201 bp, Homo sapiens; identical to SEQ ID NO: 62914

SEQ ID NO: 62967 - DNA, 201 bp, Homo sapiens
agacgagctcttcctgcctggaatctgtgatccgtatgtgaaactttcattgtacgtagcggatgagaatagagaacttgctttggtccagacaaaaacamttaaaaagacactgaacccaaaatggaatgaagaattttatttcagggtaaacccatctaatcacagactcctatttgaagtatttgacgaaaatagact

SEQ ID NO: 62968 - DNA, 120 bp, Homo sapiens
ccgggtgggtggctgcgcavggccctacctgggcgggagcggctgcagagccctgtccacgcggtgcctccccagcacggcacctcccactccaggctgttggttacctggccgggagct

SEQ ID NO: 62969 - DNA, 201 bp, Homo sapiens
cctacctgggcgggagcggctgcagagccctgtccacgcggtgcctccccagcacggcacctcccactccaggctgttggttacctggccgggagctggcrgagaccaggatttctcctcgccgccgttgctgttgttaggggaaacagaccatctgcatctagacctgcctctctctccgctccccacttcagacgagct

SEQ ID NO: 62970 - DNA, 201 bp, Homo sapiens; identical to SEQ ID NO: 62910

SEQ ID NO: 62971 - DNA, 201 bp, Homo sapiens
ctgctgtctccagcgagtcattgcttctcttaatttatttacctggaatcaacttaatcctgtgtgttaggctgttcttgtgttgctataaagaagtacctgatcaggatctgggagaatttgaaaaaaaaagaaaaactagaaaaataaacaaaattaaaaagaaaaaaaaatacctgagactgagtaacttataaagaa

SEQ ID NO: 62972 - DNA, 201 bp, Homo sapiens
tgtttcctgatggacctgggcccaatggtcagaggttttgcatcaacagtgtggctttgaagttcaaaccaaggaaacactgaccatcttcaagagtcccrttcccttgccaccccttcacgtgcaccctcaatttccacaattcacttgaatgacttgttttatttgcaataaaactgggctgaatttgctgctgtctcc

SEQ ID NO: 62973 - DNA, 201 bp, Homo sapiens
gaactgcgcctcggcgggcggtgcggggccaagcgggcggcggcgggcccggcaccgggccgggactgggggaggcagggtctcttgcaacgtgtgagctkcctcttgccaagagtgagtggcaaaagaaactaaccccggagcagttctacgtcacaagagaaaagggaacggaaccgcctttcagtgggatctacctga

SEQ ID NO: 62974 - DNA, 201 bp, Homo sapiens
ctcggaactgcgcctcggcgggcggtgcggggccaagcgggcggcggcgggcccggcaccgggccgggactgggggaggcagggtctcttgcaacgtgtgrgctgcctcttgccaagagtgagtggcaaaagaaactaaccccggagcagttctacgtcacaagagaaaagggaacggaaccgcctttcagtgggatctac

SEQ ID NO: 62975 - DNA, 201 bp, Homo sapiens
ataacaaggaagcaggaatgtatcattgcgtgtgctgcgacagtccactcttcagttctgagaaaaagtactgctctggcactgggtggccttcgttttcygaggctcatggtacgtctggctctgatgaaagccacacagggatcctgagacgtctggatacctcgttaggatcagctcgcacagaggttgtctgcaagc

SEQ ID NO: 62976 - DNA, 201 bp, Homo sapiens; identical to SEQ ID NO: 62971

SEQ ID NO: 62977 - DNA, 201 bp, Homo sapiens; identical to SEQ ID NO: 62972

SEQ ID NO: 62978 - DNA, 201 bp, Homo sapiens; identical to SEQ ID NO: 62973

SEQ ID NO: 62979 - DNA, 201 bp, Homo sapiens; identical to SEQ ID NO: 62974

SEQ ID NO: 62980 - DNA, 201 bp, Homo sapiens
atcaaaggatcaagaagtccttccacttcgagaggcaatggcttcgatagtgaagttctgagaaaaagtactgctctggcactgggtggccttcgttttcygaggctcatggtacgtctggctctgatgaaagccacacagggatcctgagacgtctggatacctcgttaggatcagctcgcacagaggttgtctgcaagc

SEQ ID NO: 62981 - DNA, 201 bp, Homo sapiens; identical to SEQ ID NO: 62971

SEQ ID NO: 62982 - DNA, 201 bp, Homo sapiens; identical to SEQ ID NO: 62972

SEQ ID NO: 62983 - DNA, 201 bp, Homo sapiens
gaccctcggaactgcgcctcggcgggcggtgcggggccaagcgggcggcggcgggcccggcaccgggccgggactgggggagggtctcttgcaacgtgtgrgctgcctcttgccaagagtgagtggcaaaagaaactaaccccggagcagttctacgtcacaagagaaaagggaacggaaccgcctttcagtgggatctac

SEQ ID NO: 62984 - DNA, 201 bp, Homo sapiens
ctcggaactgcgcctcggcgggcggtgcggggccaagcgggcggcggcgggcccggcaccgggccgggactgggggagggtctcttgcaacgtgtgagctkcctcttgccaagagtgagtggcaaaagaaactaaccccggagcagttctacgtcacaagagaaaagggaacggaaccgcctttcagtgggatctacctga

SEQ ID NO: 62985 - DNA, 201 bp, Homo sapiens; identical to SEQ ID NO: 62975

SEQ ID NO: 62986 - DNA, 201 bp, Homo sapiens; identical to SEQ ID NO: 62971

SEQ ID NO: 62987 - DNA, 201 bp, Homo sapiens; identical to SEQ ID NO: 62972

SEQ ID NO: 62988 - DNA, 201 bp, Homo sapiens; identical to SEQ ID NO: 62973

SEQ ID NO: 62989 - DNA, 201 bp, Homo sapiens; identical to SEQ ID NO: 62974

SEQ ID NO: 62990 - DNA, 201 bp, Homo sapiens
caccgtgaacccagaacagtattcaaagcgctttttggactttattggccacatcttgacgtaacctcctgcgcagcctcggacagacatgaacattggakggacagaggtggcttcggtgtaggaaaaatgaaaaccaaactcagtgaagtactcatcttgcaggaagcaaacctccttgtttacatcttcaggccaaga

SEQ ID NO: 62991 - DNA, 201 bp, Homo sapiens
ggcatcacacaacaaactgtggatcagttttttttttttttttttttttttttggagttgaaagatgtgagacagtattcagaataatgaagataataatratgattattataataatgatgatgattccaaggaaaaaacctacagcgaatgttccatttctaccccgcacgcagacactctccctaacactgataacct

SEQ ID NO: 62992 - DNA, 201 bp, Homo sapiens
attattataataatgatgatgattccaaggaaaaaacctacagcgaatgttccatttctaccccgcacgcagacactctccctaacactgataacctgagmccccagcactggacggaagaatgctggcgtctccgtgtgtactggttcagggttctggccccagccttgtcaggaccccctggtgtccagagcccccacc

SEQ ID NO: 62993 - DNA, 201 bp, Homo sapiens
tcatggactacagtctgctggtgggaattcatgatgtggagagagccgaacaggaggaagtggagtgtgaggagaacgatggggaggaggagggcgagagygatggcacccacccggtgggaacccccccagatagccccgggaatacactgaacagctcaccacccctggctcccggggagttcgatccgaacatcgacg

SEQ ID NO: 62994 - DNA, 201 bp, Homo sapiens
tgctggtgggaattcatgatgtggagagagccgaacaggaggaagtggagtgtgaggagaacgatggggaggaggagggcgagagcgatggcacccacccrgtgggaacccccccagatagccccgggaatacactgaacagctcaccacccctggctcccggggagttcgatccgaacatcgacgtctatggaattaagt

SEQ ID NO: 62995 - DNA, 201 bp, Homo sapiens
tgaggagaacgatggggaggaggagggcgagagcgatggcacccacccggtgggaacccccccagatagccccgggaatacactgaacagctcaccacccmtggctcccggggagttcgatccgaacatcgacgtctatggaattaagtgccatgaaaactcgcctaggaaggaggtgtacttcatggcaattattgacat

SEQ ID NO: 62996 - DNA, 201 bp, Homo sapiens
gtttacatcttcaggccaagatgactgatttgggggctactcgctttacagctacctgattttcccagcatcgttctagctatttctgactttgtgtatatgtgtgtgtgtgtgtgttgggggggggtgagtgtgtgcgcgcgtgtgcattttaaaagtcataaattaattaaaacagatccacttcggtcagtatgtgtc

SEQ ID NO: 62997 - DNA, 201 bp, Homo sapiens
tttacatcttcaggccaagatgactgatttgggggctactcgctttacagctacctgattttcccagcatcgttctagctatttctgactttgtgtatatgtgtgtgtgtgtgtgttgggggggggtgagtgtgtgcgcgcgtgtgcattttaaaagtcataaattaattaaaacagatccacttcggtcagtatgtgtcc

SEQ ID NO: 62998 - DNA, 131 bp, Homo sapiens
gatgaatccttttttcctctgtcccaattgtgtgtctctgttccaaacacattttaaatactcggtcctgacagtgtctttagctaatccttgaagaaatraaagtggaattgaatctttttagtttctag

SEQ ID NO: 62999 - DNA, 201 bp, Homo sapiens
ttggcatcacacaacaaactgtggatcagttttttttttttttttttttttttttggagttgaaagatgtgagacagtattcagaataatgaagataataatgatgattattataataatgatgatgattccaaggaaaaaacctacagcgaatgttccatttctaccccgcacgcagacactctccctaacactgataac

SEQ ID NO: 63000 - DNA, 201 bp, Homo sapiens
tggcatcacacaacaaactgtggatcagttttttttttttttttttttttttttggagttgaaagatgtgagacagtattcagaataatgaagataataatgatgattattataataatgatgatgattccaaggaaaaaacctacagcgaatgttccatttctaccccgcacgcagacactctccctaacactgataacc

SEQ ID NO: 63001 - DNA, 201 bp, Homo sapiens
atattttgagacgtatcctgcagccatgtttttacgtgagtgttttagtcaaagtacatggtagacagtctttcacaataaaaggaaaaggattttttttcctccaaatgtacatttatcaacctaatgattgatttttttaaaaagagatttcgccccagtctggtttatgaaagttcattgccctaaactgtgctgatt

SEQ ID NO: 63002 - DNA, 201 bp, Homo sapiens
tagtggaatgtcatgggatcacccttcttccccagttcttgggcatgtaccggcttaatgttgatggagttgaaatatatgtgatagttacaagaaatgtrttcagccaccgtttgtctgtgtataggaaatacgacttaaagggctctacagtggctagagaagctagtgacaaagaaaaggccaaagaactgccaactc

SEQ ID NO: 63003 - DNA, 201 bp, Homo sapiens
gggccggggtgtagagagggcgggtccccggcctcgggagcacggcggtggaggggacataggaggcggccatggcgacccccggcaacctagggtcctcygtcctggcgagcaagaccaagaccaagaagaagcacttcgtagcgcagaaagtgaagctgtttcgggccagcgacccgctgctcagcgtcctcatgtggg

SEQ ID NO: 63004 - DNA, 201 bp, Homo sapiens
gatcagtttttgtgttgtgaagttctactgtggtttgacccaagaccacaaccatgagaccctgaagtaaagataaggtacacatacattatttgagtaaytgtttccttgggggccaatctgtgtatgcttttagaagtttacagaatgcttttatttttgtctataacaaacagtctgtcatttatttctgttgataaa

SEQ ID NO: 63005 - DNA, 201 bp, Homo sapiens
cccgcaacaagcagctgatgccccagtgattctctatacatttttcacctcggccaatatgtccaggaaaactgcttacttctcttttcttgcctggagcyttcattgttcacccttacgttgcaatataggaattaatgctacaaaataaaagtaaagcttacctgaaaagtgcatagtttggggcaatggtatctacat

SEQ ID NO: 63006 - DNA, 158 bp, Homo sapiens
aaataaagcacttttgatgactcacaagatgaatccttttttcctctgtcccaattgtgtgtctctgttccaaacacattttaaatactcggtcctgacastgtctttagctaatccttgaagaaataaaagtggaattgaatctttttagtttctag

SEQ ID NO: 63007 - DNA, 201 bp, Homo sapiens
gtactggttcagggttctggccccagccttgtcaggaccccctggtgtccagagcccccacccctcccgcaacaagcagctgatgccccagtgattctctmtacatttttcacctcggccaatatgtccaggaaaactgcttacttctcttttcttgcctggagccttcattgttcacccttacgttgcaatataggaatt

SEQ ID NO: 63008 - DNA, 201 bp, Homo sapiens
aaagcttacctgaaaagtgcatagtttggggcaatggtatctacatctcccactgtgggaaaaccagcaaagcatcaaaactctcaattctcctgttaccraatgcagatctgaattataagatgtttatgtttgaccattgtttcaacaatgggattttgttacgaattatccctttaactgaaaccctcagttttactg

SEQ ID NO: 63009 - DNA, 201 bp, Homo sapiens
gctagagaagctagtgacaaagaaaaggccaaagaactgccaactctgaaagataatgatttcattaatgagggccaaaagatttatattgatgacaacarcaagaaggtcttcctggaaaaactaaaaaaggatgttgagtttctggcccagctgaagctcatggactacagtctgctggtgggaattcatgatgtggag

SEQ ID NO: 63010 - DNA, 201 bp, Homo sapiens; identical to SEQ ID NO: 62990

SEQ ID NO: 63011 - DNA, 201 bp, Homo sapiens; identical to SEQ ID NO: 62991

SEQ ID NO: 63012 - DNA, 201 bp, Homo sapiens; identical to SEQ ID NO: 62992

SEQ ID NO: 63013 - DNA, 201 bp, Homo sapiens; identical to SEQ ID NO: 62993

SEQ ID NO: 63014 - DNA, 201 bp, Homo sapiens; identical to SEQ ID NO: 62994

SEQ ID NO: 63015 - DNA, 201 bp, Homo sapiens; identical to SEQ ID NO: 62995

SEQ ID NO: 63016 - DNA, 201 bp, Homo sapiens; identical to SEQ ID NO: 62996

SEQ ID NO: 63017 - DNA, 201 bp, Homo sapiens; identical to SEQ ID NO: 62997

SEQ ID NO: 63018 - DNA, 131 bp, Homo sapiens; identical to SEQ ID NO: 62998

SEQ ID NO: 63019 - DNA, 201 bp, Homo sapiens; identical to SEQ ID NO: 62999

SEQ ID NO: 63020 - DNA, 201 bp, Homo sapiens; identical to SEQ ID NO: 63000

SEQ ID NO: 63021 - DNA, 201 bp, Homo sapiens; identical to SEQ ID NO: 63001

SEQ ID NO: 63022 - DNA, 201 bp, Homo sapiens; identical to SEQ ID NO: 63002

SEQ ID NO: 63023 - DNA, 201 bp, Homo sapiens; identical to SEQ ID NO: 63003

SEQ ID NO: 63024 - DNA, 201 bp, Homo sapiens; identical to SEQ ID NO: 63004

SEQ ID NO: 63025 - DNA, 201 bp, Homo sapiens
cccgcaacaagcagctgatgccccagtgattctctatacatttttcacctcggccaatatgtccaggaaaactgcttacttctcttttcttgcctggagcyttcattgttcacccttacgttgcaatataggaattaatgctacaaaataaaagtaaagcttacctgaaaagtgcatagtctcctgttaccaaatgcagat

SEQ ID NO: 63026 - DNA, 158 bp, Homo sapiens; identical to SEQ ID NO: 63006

SEQ ID NO: 63027 - DNA, 201 bp, Homo sapiens; identical to SEQ ID NO: 63007

SEQ ID NO: 63028 - DNA, 201 bp, Homo sapiens
gcctggagccttcattgttcacccttacgttgcaatataggaattaatgctacaaaataaaagtaaagcttacctgaaaagtgcatagtctcctgttaccraatgcagatctgaattataagatgtttatgtttgaccattgtttcaacaatgggattttgttacgaattatccctttaactgaaaccctcagttttactg

SEQ ID NO: 63029 - DNA, 201 bp, Homo sapiens; identical to SEQ ID NO: 63009

SEQ ID NO: 63030 - DNA, 201 bp, Homo sapiens
gcccattctgacttgatgtgtacaggggataaggacgtggtgaatgagggccgaaagagcttccccagtggacattcttcctctgtgattgcactgtcccrcacatgtgactacaagcatcactggcaaggtctgggttctgtactaagtacatttaaaattataggaaagataagacaaaaagagtttaccaaagataaa

SEQ ID NO: 63031 - DNA, 201 bp, Homo sapiens
gggaagttacactgcttcacaccacaaggccgtgggaaatcttggaggttctgtgcctttctgtcacctctactttttgcagctgtgattgcactgtcccrcacatgtgactacaagcatcactggcaaggaccctttaaatggtgaaaatgggcagatgaatagcaataagtggacctttgttactcttctgagttagaa

SEQ ID NO: 63032 - DNA, 201 bp, Homo sapiens
gcccattctgacttgatgtgtacaggggataaggacgtggtgaatgagggccgaaagagcttccccagtggacattcttcctctgtgattgcactgtcccrcacatgtgactacaagcatcactggcaagatgtactagttggatccatgattggaatgacatttgcctatgtctgctatcggcagtattatcctcctctg

SEQ ID NO: 63033 - DNA, 167 bp, Homo sapiens
acaatggaatataaggaacaattatgggatgtcatcagaatggatgccataggacctacagctccctttctctttattgtgattatactttaaatatgacrttgtcttttatgtgtatgttcctatattttcaatgtatctttttccttcagtaaacctgatattca

SEQ ID NO: 63034 - DNA, 193 bp, Homo sapiens
gatgaatctttttctgccccttcttcacaatggaatataaggaacaattatgggatgtcatcagaatggatgccataggacctacagctccctttctcttkattgtgattatactttaaatatgacattgtcttttatgtgtatgttcctatattttcaatgtatctttttccttcagtaaacctgatattca

SEQ ID NO: 63035 - DNA, 201 bp, Homo sapiens
caaactccggcactgggtttgctccctgattaaagtgccttcagccaagaccatctctccctcctggtgaagtgtgacttcgaattagtttgcacttcctrttggaaggtagagcccactgctcattgtataagccccgaggcctagagtggcagccaagagccatctgaagccacctctctgcctgttcctcccaagagg

SEQ ID NO: 63036 - DNA, 201 bp, Homo sapiens
ttgctccctgattaaagtgccttcagccaagaccatctctccctcctggtgaagtgtgacttcgaattagtttgcacttcctattggaaggtagagcccamtgctcattgtataagccccgaggcctagagtggcagccaagagccatctgaagccacctctctgcctgttcctcccaagaggccagggtggccaggggtg

SEQ ID NO: 63037 - DNA, 201 bp, Homo sapiens
ggaccggctcaagaaatatgaagctgcctatggaaaacagttcaccccatgccagctgctagctgaccatgctaacagccctaacaagaagttctaccagygagcaggcctcatgcctcgctcagtcagtgcactaaccccagctgccggcagtgctggttctccaacagagtggtgtctagatttatcagagtaacgaga

SEQ ID NO: 63038 - DNA, 201 bp, Homo sapiens
tccaaagagagacaagggattggtggaaaaattgacagcgtatgccatgactattccatttgtcaggcaacaggtttacaaaaaagtggaagaaaaagtgygaaagcagactaaaggcctttatcctgcacctctgaaaataattgatgtggtaaagactggaattgagcaagggagtgatgccggttatctctgtgaatc

SEQ ID NO: 63039 - DNA, 201 bp, Homo sapiens
cgaattagtttgcacttcctattggaaggtagagcccactgctcattgtataagccccgaggcctagagtggcagccaagagccatctgaagccacctctytgcctgttcctcccaagaggccagggtggccaggggtggtgagggcagttctgcacccagccaaacacataacaataaaaaccaaactctgtgtcagcat

SEQ ID NO: 63040 - DNA, 201 bp, Homo sapiens
cagtgagcaggcctcatgcctcgctcagtcagtgcactaaccccagctgccggcagtgctggttctccaacagagtggtgtctagatttatcagagtaackagaagacaaactccggcactgggtttgctccctgattaaagtgccttcagccaagaccatctctccctcctggtgaagtgtgacttcgaattagtttgca

SEQ ID NO: 63041 - DNA, 201 bp, Homo sapiens
aagccccgaggcctagagtggcagccaagagccatctgaagccacctctctgcctgttcctcccaagaggccagggtggccaggggtggtgagggcagttytgcacccagccaaacacataacaataaaaaccaaactctgtgtcagcatctttgcccttctggtttaaacgcctccttcaaaaagcaatctggaagaaag

SEQ ID NO: 63042 - DNA, 201 bp, Homo sapiens
cccgaggcctagagtggcagccaagagccatctgaagccacctctctgcctgttcctcccaagaggccagggtggccaggggtggtgagggcagttctgcmcccagccaaacacataacaataaaaaccaaactctgtgtcagcatctttgcccttctggtttaaacgcctccttcaaaaagcaatctggaagaaagccct

SEQ ID NO: 63043 - DNA, 201 bp, Homo sapiens
gcagtgctccaggcgcctggctgccaggctacgggagaaaagtcctccgctcggccgcacccgttagaggcgctctccactgctgtcctcttcagctcaakatggtggcctgccgggcgattggcatcctcagccgcttttctgccttcaggatcctccgctcccgaggttatatatgccgcaattttacagggtcttctg

SEQ ID NO: 63044 - DNA, 201 bp, Homo sapiens
aagactggaattgagcaagggagtgatgccggttatctctgtgaatctcagaaatttggagagcttgtaatgaccaaagaatcaaaggccttgatgggacyctaccatggtcaggtcctgtgcaagaagaataaatttggagctccacagaaggatgttaagcatctggctattcttggtgcagggctgatgggagcaggc

SEQ ID NO: 63045 - DNA, 201 bp, Homo sapiens
attggaaggtagagcccactgctcattgtataagccccgaggcctagagtggcagccaagagccatctgaagccacctctctgcctgttcctcccaagagrccagggtggccaggggtggtgagggcagttctgcacccagccaaacacataacaataaaaaccaaactctgtgtcagcatctttgcccttctggtttaaa

SEQ ID NO: 63046 - DNA, 201 bp, Homo sapiens
cctattggaaggtagagcccactgctcattgtataagccccgaggcctagagtggcagccaagagccatctgaagccacctctctgcctgttcctcccaaraggccagggtggccaggggtggtgagggcagttctgcacccagccaaacacataacaataaaaaccaaactctgtgtcagcatctttgcccttctggttt

SEQ ID NO: 63047 - DNA, 201 bp, Homo sapiens
tgtgggtgccgccacactggtggatgaagttggtgtggatgtagcgaaacatgtggcggaagatctgggcaaagtctttggggagcggtttggaggtggaracccagaactgctgacacagatggtgtccaagggcttcctaggtcgtaaatctgggaagggcttttacatctatcaggagggtgtgaagaggaaggattt

SEQ ID NO: 63048 - DNA, 201 bp, Homo sapiens
gccatgactattccatttgtcaggcaacaggtttacaaaaaagtggaagaaaaagtgcgaaagcagactaaaggcctttatcctgcacctctgaaaataawtgatgtggtaaagactggaattgagcaagggagtgatgccggttatctctgtgaatctcagaaatttggagagcttgtaatgaccaaagaatcaaaggcc

SEQ ID NO: 63049 - DNA, 201 bp, Homo sapiens
tcagaaatttggagagcttgtaatgaccaaagaatcaaaggccttgatgggactctaccatggtcaggtcctgtgcaagaagaataaatttggagctccamagaaggatgttaagcatctggctattcttggtgcagggctgatgggagcaggcatcgcccaagtctccgtggataaggggctaaagactatacttaaaga

SEQ ID NO: 63050 - DNA, 201 bp, Homo sapiens
tggtcaggtcctgtgcaagaagaataaatttggagctccacagaaggatgttaagcatctggctattcttggtgcagggctgatgggagcaggcatcgccyaagtctccgtggataaggggctaaagactatacttaaagatgccaccctcactgcgctagaccgaggacagcaacaagtgttcaaaggattgaatgacaa

SEQ ID NO: 63051 - DNA, 201 bp, Homo sapiens
atctgctctcccaatcagtgaaatcgctgctgtcagcaaaagacctgagaaggtgattggcatgcactacttctctcccgtggacaagatgcagctgctgsagattatcacgaccgagaaaacttccaaagacaccagtgcttcagctgtagcagttggtctcaagcaggggaaggtcatcattgtggttaaggatggacc

SEQ ID NO: 63052 - DNA, 201 bp, Homo sapiens
tttgctccctgattaaagtgccttcagccaagaccatctctccctcctggtgaagtgtgacttcgaattagtttgcacttcctattggaaggtagagcccmctgctcattgtataagccccgaggcctagagtggcagccaagagccatctgaagccacctctctgcctgttcctcccaagaggccagggtggccaggggt

SEQ ID NO: 63053 - DNA, 201 bp, Homo sapiens; identical to SEQ ID NO: 63035

SEQ ID NO: 63054 - DNA, 201 bp, Homo sapiens; identical to SEQ ID NO: 63036

SEQ ID NO: 63055 - DNA, 201 bp, Homo sapiens; identical to SEQ ID NO: 63037

SEQ ID NO: 63056 - DNA, 201 bp, Homo sapiens; identical to SEQ ID NO: 63038

SEQ ID NO: 63057 - DNA, 201 bp, Homo sapiens; identical to SEQ ID NO: 63039

SEQ ID NO: 63058 - DNA, 201 bp, Homo sapiens; identical to SEQ ID NO: 63040

SEQ ID NO: 63059 - DNA, 201 bp, Homo sapiens; identical to SEQ ID NO: 63041

SEQ ID NO: 63060 - DNA, 201 bp, Homo sapiens; identical to SEQ ID NO: 63042

SEQ ID NO: 63061 - DNA, 201 bp, Homo sapiens; identical to SEQ ID NO: 63043

SEQ ID NO: 63062 - DNA, 201 bp, Homo sapiens; identical to SEQ ID NO: 63044

SEQ ID NO: 63063 - DNA, 201 bp, Homo sapiens; identical to SEQ ID NO: 63045

SEQ ID NO: 63064 - DNA, 201 bp, Homo sapiens; identical to SEQ ID NO: 63046

SEQ ID NO: 63065 - DNA, 201 bp, Homo sapiens; identical to SEQ ID NO: 63047

SEQ ID NO: 63066 - DNA, 201 bp, Homo sapiens; identical to SEQ ID NO: 63048

SEQ ID NO: 63067 - DNA, 201 bp, Homo sapiens; identical to SEQ ID NO: 63049

SEQ ID NO: 63068 - DNA, 201 bp, Homo sapiens; identical to SEQ ID NO: 63050

SEQ ID NO: 63069 - DNA, 201 bp, Homo sapiens; identical to SEQ ID NO: 63051

SEQ ID NO: 63070 - DNA, 201 bp, Homo sapiens; identical to SEQ ID NO: 63052

SEQ ID NO: 63071 - DNA, 201 bp, Homo sapiens
acactcacactaggcaatgccatttcaatgcattactaaatgacatttgtagttcctagctcctcttaggaaaacagttcttgtggccttctattaaatastttgcacttaagccttgccagtgttctgagcttttcaataatcagtttactgctctttcagggatttctaagccaccagaatctcacatgagatgtgtgg

SEQ ID NO: 63072 - DNA, 201 bp, Homo sapiens
gccggccccttagccctgcccctcgctcctggctaacatggccgaaaggtcgtattctccgggggaggacgggggcccggagaggagggggtggagtgccyggttttccagtcaggcggccggagggcagccctcaagaacggccctgaccgcccgcggggtgaggggccctttctgggcaggacccgccccttggtcccg

SEQ ID NO: 63073 - DNA, 156 bp, Homo sapiens
ccgggctggggcaggcggcagcgaaagggagacgcggctccggggccaccccagtmccggcaggagttctgcccggaggtctgggatgccctcggccaggcctcacctcgggagcggaggatcctgaaggcagaaaagcggctgaggatgccaatc

SEQ ID NO: 63074 - DNA, 201 bp, Homo sapiens
gtttctgagttctccaccagtgagaccatgggccactctgcagaccgactggccgctgcctttgctgtttctcggctggaacaggatgaatatgcactgcrctctcacagtctagccaagaaggcacaggatgaaggactcctttctgatgtggtacccttcaaagtaccaggaaaagatacagttaccaaagataatggc

SEQ ID NO: 63075 - DNA, 201 bp, Homo sapiens
cggaggtctgggatgccctcggccaggcctcacctcgggagcggaggatcctgaaggcagaaaagcggctgaggatgccaatcgcccggcaggccaccatmttgagctgaagaggacagcagtggagagcgcctctaacgggtgcggccgagcggaggacttttctcccgtagcctggcagccaggcgcctggagcactgc

SEQ ID NO: 63076 - DNA, 201 bp, Homo sapiens
tcctcttaggaaaacagttcttgtggccttctattaaatactttgcacttaagccttgccagtgttctgagcttttcaataatcagtttactgctctttcrgggatttctaagccaccagaatctcacatgagatgtgtgggtggttgtttttggtctctgttgtcactaaagactaaatgagggtttgcagttgggaaag

SEQ ID NO: 63077 - DNA, 201 bp, Homo sapiens
cagaccgactggccgctgcctttgctgtttctcggctggaacaggatgaatatgcactgcgctctcacagtctagccaagaaggcacaggatgaaggactyctttctgatgtggtacccttcaaagtaccaggaaaagatacagttaccaaagataatggcatccgtccttcctcactggagcagatggccaaactaaaac

SEQ ID NO: 63078 - DNA, 201 bp, Homo sapiens
ctgactaaaacccagatgccgagtggccgccggccccttagccctgcccctcgctcctggctaacatggccgaaaggtcgtattctccgggggaggacggrggcccggagaggagggggtggagtgcctggttttccagtcaggcggccggagggcagccctcaagaacggccctgaccgcccgcggggtgaggggccctt

SEQ ID NO: 63079 - DNA, 176 bp, Homo sapiens
ttatacttgttcttatctgtgtcctaaagatgtgttctctataaaatacaaaccaacgtgcctaattaattatggaaaaataattcagaatctaaacaccmctgaaaacttataaaaaatgtttagatacataaatatggtggtcagcgttaataaagtggagaaatattggagaa

SEQ ID NO: 63080 - DNA, 201 bp, Homo sapiens
ggcttgtatctctgccaaccaagccatgaccacaggtgttggcttgattgcttctggccagtgtgatgtgatcgtggcaggtggtgttgagttgatgtccratgtccctattcgtcactcaaggaaaatgagaaaactgatgcttgatctcaataaggccaaatctatgggccagcgactgtctttaatctctaaattccg

SEQ ID NO: 63081 - DNA, 201 bp, Homo sapiens
atgaatatgcactgcgctctcacagtctagccaagaaggcacaggatgaaggactcctttctgatgtggtacccttcaaagtaccaggaaaagatacagtyaccaaagataatggcatccgtccttcctcactggagcagatggccaaactaaaacctgcattcatcaagccctacggcacagtgacagctgcaaattctt

SEQ ID NO: 63082 - DNA, 179 bp, Homo sapiens
aaattatacttgttcttatctgtgtcctaaagatgtgttctctataaaatacaaaccaacgtgcctaattaattatggaaaaataattcagaatctaaacmccactgaaaacttataaaaaatgtttagatacataaatatggtggtcagcgttaataaagtggagaaatattggagaa

SEQ ID NO: 63083 - DNA, 201 bp, Homo sapiens
caaaataatagatccagaagaagtgacctgaagtttctgtgcaacactcacactaggcaatgccatttcaatgcattactaaatgacatttgtagttcctwgctcctcttaggaaaacagttcttgtggccttctattaaatactttgcacttaagccttgccagtgttctgagcttttcaataatcagtttactgctctt

SEQ ID NO: 63084 - DNA, 201 bp, Homo sapiens
ttgcctcctttggagaagtttaataactggggtggatctctgtccctgggacacccatttggagccactggctgcaggttggtcatggctgctgccaacarattacggaaagaaggaggccagtatggcttagtggctgcgtgtgcagctggagggcagggccatgctatgatagtggaagcttatccaaaataatagatc

SEQ ID NO: 63085 - DNA, 201 bp, Homo sapiens; identical to SEQ ID NO: 63071

SEQ ID NO: 63086 - DNA, 201 bp, Homo sapiens; identical to SEQ ID NO: 63072

SEQ ID NO: 63087 - DNA, 156 bp, Homo sapiens; identical to SEQ ID NO: 63073

SEQ ID NO: 63088 - DNA, 201 bp, Homo sapiens; identical to SEQ ID NO: 63074

SEQ ID NO: 63089 - DNA, 201 bp, Homo sapiens; identical to SEQ ID NO: 63075

SEQ ID NO: 63090 - DNA, 201 bp, Homo sapiens; identical to SEQ ID NO: 63076

SEQ ID NO: 63091 - DNA, 201 bp, Homo sapiens; identical to SEQ ID NO: 63077

SEQ ID NO: 63092 - DNA, 201 bp, Homo sapiens; identical to SEQ ID NO: 63078

SEQ ID NO: 63093 - DNA, 176 bp, Homo sapiens; identical to SEQ ID NO: 63079

SEQ ID NO: 63094 - DNA, 201 bp, Homo sapiens; identical to SEQ ID NO: 63080

SEQ ID NO: 63095 - DNA, 201 bp, Homo sapiens; identical to SEQ ID NO: 63081

SEQ ID NO: 63096 - DNA, 179 bp, Homo sapiens; identical to SEQ ID NO: 63082

SEQ ID NO: 63097 - DNA, 201 bp, Homo sapiens; identical to SEQ ID NO: 63083

SEQ ID NO: 63098 - DNA, 201 bp, Homo sapiens
ttactgtggcattcaatcaacctgttaagctttattccatgaaatttcaagggccagataatggtcagggccctaaatatgtaaaaatttttatcaacctrccccgatctatggattttgaagaggcagaaagaagtgaaccaactcaagctctggaactgacagaggatgatattaaagaagatggcattgttccacttc

SEQ ID NO: 63099 - DNA, 201 bp, Homo sapiens
tagcatttgctccatgataatctgagacctgccccgaatacagtacaggagcatcttcaaagtacttccagtgggtgccctggacagcagctaagaacccyggggtaaaacgagtttcctctctactgttacaaatcagaaacctcctccgtaaaagcctcagatctgggaaacgcggatgcatatgccaacttttgagtc

SEQ ID NO: 63100 - DNA, 201 bp, Homo sapiens
ccctcggccgctccgctccctggcgtgactcggcactgagagtcccgggagaagactcggcggtcgccacctcttctgtccaggcctcggccttcctgagyatctctccttcctctcccagatcgtcttctccttcagtttcaaagccagtggcgtcgcggccaccctgccgggctctctgtgaggatggtgggggtgaag

SEQ ID NO: 63101 - DNA, 125 bp, Homo sapiens
gagcgaaggatgaagtagcaagtgyacgtctttcttgggagcaggatgttgcgcaagtttacacttctgaccccatcacactgcttcccactgagatgcaagagaggattcctcatcttccagat

SEQ ID NO: 63102 - DNA, 201 bp, Homo sapiens
accggacgacgcggaaatgacgtcacgccgggggccctgccgcgcggtggctgctgggtgccgcacgccttcccatcctcctcctctcccctcccccatcyctccccgccccctcggccgctccgctccctggcgtgactcggcactgagagtcccgggagaagactcggcggtcgccacctcttctgtccaggcctcggc

SEQ ID NO: 63103 - DNA, 201 bp, Homo sapiens
ggattgggcgctgaaggccaaaccggacgacgcggaaatgacgtcacgccgggggccctgccgcgcggtggctgctgggtgccgcacgccttcccatcctyctcctctcccctcccccatccctccccgccccctcggccgctccgctccctggcgtgactcggcactgagagtcccgggagaagactcggcggtcgccac

SEQ ID NO: 63104 - DNA, 201 bp, Homo sapiens
tgcgccgctcaagttagcgcgaggctactcagtcgagggtgggactacgcttcgcgttttgggattgggcgctgaaggccaaaccggacgacgcggaaatracgtcacgccgggggccctgccgcgcggtggctgctgggtgccgcacgccttcccatcctcctcctctcccctcccccatccctccccgccccctcggcc

SEQ ID NO: 63105 - DNA, 201 bp, Homo sapiens
acccggatttccagccagagctgagcggcgcgggctccagactcgccgtggtcaagttcaccatgagagggtgtgggccatgtttgaggattgccccagcrttcagttctatgagtaataaatatccacaggctgttttcttggaagtcgatgtacatcagtgtcagggaacagctgccaccaacaatatatcagcaacac

SEQ ID NO: 63106 - DNA, 201 bp, Homo sapiens
taaaacgagtttcctctctactgttacaaatcagaaacctcctccgtaaaagcctcagatctgggaaacgcggatgcatatgccaacttttgagtctcagkctgcgcctgcgcacgtgacctctacacgtctcctctgcgcctgcgccgctcaagttagcgcgaggctactcagtcgagggtgggactacgcttcgcgttt

SEQ ID NO: 63107 - DNA, 201 bp, Homo sapiens
attgcttttgttcagatggtatcactagtgtttccattgtaatcttgacacatgcaattgtaaataaaagtcaccacttttgccaagcttaatttttgtcwttctaaatcagtattttctctttccatgtatttgaaaactggttaacttctgattttagtagagacttaagtgtctggtagtatattgattgaaagccag

SEQ ID NO: 63108 - DNA, 201 bp, Homo sapiens; identical to SEQ ID NO: 63098

SEQ ID NO: 63109 - DNA, 201 bp, Homo sapiens; identical to SEQ ID NO: 63099

SEQ ID NO: 63110 - DNA, 201 bp, Homo sapiens; identical to SEQ ID NO: 63100

SEQ ID NO: 63111 - DNA, 201 bp, Homo sapiens; identical to SEQ ID NO: 63102

SEQ ID NO: 63112 - DNA, 125 bp, Homo sapiens; identical to SEQ ID NO: 63101

SEQ ID NO: 63113 - DNA, 201 bp, Homo sapiens; identical to SEQ ID NO: 63103

SEQ ID NO: 63114 - DNA, 201 bp, Homo sapiens; identical to SEQ ID NO: 63104

SEQ ID NO: 63115 - DNA, 201 bp, Homo sapiens
ccagagactgtcaatgtttcattcattgccattaccaataaatcattgcttttgttcagatggtatcactagtgtttccattgtaatcttgacacatgcawttgtaaataaaagtcaccacttttgccaagcttaatttttgtcattctaaatcagtattttctctttccatgtatttgaaaactggttaacttctgattt

SEQ ID NO: 63116 - DNA, 201 bp, Homo sapiens; identical to SEQ ID NO: 63106

SEQ ID NO: 63117 - DNA, 201 bp, Homo sapiens; identical to SEQ ID NO: 63105

SEQ ID NO: 63118 - DNA, 201 bp, Homo sapiens; identical to SEQ ID NO: 63107

SEQ ID NO: 63119 - DNA, 201 bp, Homo sapiens; identical to SEQ ID NO: 63098

SEQ ID NO: 63120 - DNA, 175 bp, Homo sapiens
acctgccccgaatacagtacaggagcatcttcaaagtacttccagtgggtgccctggacagcagctaagaacccyggggtaaaacgagtttcctctctactgttacaaatcagaaacctcctccgtaaaagcctcagatctgggaaacgcggatgcatatgccaacttttgagtc

SEQ ID NO: 63121 - DNA, 201 bp, Homo sapiens; identical to SEQ ID NO: 63100

SEQ ID NO: 63122 - DNA, 201 bp, Homo sapiens; identical to SEQ ID NO: 63102

SEQ ID NO: 63123 - DNA, 201 bp, Homo sapiens; identical to SEQ ID NO: 63103

SEQ ID NO: 63124 - DNA, 201 bp, Homo sapiens; identical to SEQ ID NO: 63104

SEQ ID NO: 63125 - DNA, 201 bp, Homo sapiens; identical to SEQ ID NO: 63115

SEQ ID NO: 63126 - DNA, 201 bp, Homo sapiens; identical to SEQ ID NO: 63106

SEQ ID NO: 63127 - DNA, 201 bp, Homo sapiens; identical to SEQ ID NO: 63105

SEQ ID NO: 63128 - DNA, 201 bp, Homo sapiens; identical to SEQ ID NO: 63098

SEQ ID NO: 63129 - DNA, 201 bp, Homo sapiens; identical to SEQ ID NO: 63099

SEQ ID NO: 63130 - DNA, 201 bp, Homo sapiens; identical to SEQ ID NO: 63100

SEQ ID NO: 63131 - DNA, 125 bp, Homo sapiens; identical to SEQ ID NO: 63101

SEQ ID NO: 63132 - DNA, 201 bp, Homo sapiens; identical to SEQ ID NO: 63102

SEQ ID NO: 63133 - DNA, 201 bp, Homo sapiens; identical to SEQ ID NO: 63103

SEQ ID NO: 63134 - DNA, 201 bp, Homo sapiens; identical to SEQ ID NO: 63104

SEQ ID NO: 63135 - DNA, 201 bp, Homo sapiens; identical to SEQ ID NO: 63105

SEQ ID NO: 63136 - DNA, 201 bp, Homo sapiens; identical to SEQ ID NO: 63106

SEQ ID NO: 63137 - DNA, 201 bp, Homo sapiens
ggcagagatgtggttcgagattctccccggactctccgtcatgggcgtgtgcttgttgattccaggactggctactgcgtacatccacaggttcactaacsggggcaaggaaaaaagggttgctcattttgggtatcactggagtctgatggaaagagataggcgcatctctggagttgatcgttactatgtgtcaaaggg

SEQ ID NO: 63138 - DNA, 201 bp, Homo sapiens
cctagcagattccgtcgcttcttccggagccgtacgtggcaccgccccgctcgcgggcggccgcggggcttgctgggaagagaggcgaagccaggtcaccyttcaaggacccagaagtagggttttggcctaggtaacggggcagagatgtggttcgagattctccccggactctccgtcatgggcgtgtgcttgttgatt

SEQ ID NO: 63139 - DNA, 201 bp, Homo sapiens
gcgggcggccgcggggcttgctgggaagagaggcgaagccaggtcacctttcaaggacccagaagtagggttttggcctaggtaacggggcagagatgtgrttcgagattctccccggactctccgtcatgggcgtgtgcttgttgattccaggactggctactgcgtacatccacaggttcactaacgggggcaaggaaa

SEQ ID NO: 63140 - DNA, 201 bp, Homo sapiens
cactccacgttgcgcgctccgccgggagtcgaagcaaaagacactgacggaagaggactgcgagagcccgagcgcccgtctctcttgtgccctagcagatkccgtcgcttcttccggagccgtacgtggcaccgccccgctcgcgggcggccgcggggcttgctgggaagagaggcgaagccaggtcacctttcaaggacc

SEQ ID NO: 63141 - DNA, 201 bp, Homo sapiens
tcactccacgttgcgcgctccgccgggagtcgaagcaaaagacactgacggaagaggactgcgagagcccgagcgcccgtctctcttgtgccctagcagaktccgtcgcttcttccggagccgtacgtggcaccgccccgctcgcgggcggccgcggggcttgctgggaagagaggcgaagccaggtcacctttcaaggac

SEQ ID NO: 63142 - DNA, 201 bp, Homo sapiens
tggctgcctgggttgcacttggcccctgcacgtcactccacgttgcgcgctccgccgggagtcgaagcaaaagacactgacggaagaggactgcgagagcscgagcgcccgtctctcttgtgccctagcagattccgtcgcttcttccggagccgtacgtggcaccgccccgctcgcgggcggccgcggggcttgctggga

SEQ ID NO: 63143 - DNA, 201 bp, Homo sapiens
gcgtccagcagcccctttccgcccaggctttttgaaaaggaaggtgcacacctgatccaccgcctttcctggagaaagctgctctgccattttagagtccygagctccgaaacagccgtggctgcctgggttgcacttggcccctgcacgtcactccacgttgcgcgctccgccgggagtcgaagcaaaagacactgacgg

SEQ ID NO: 63144 - DNA, 201 bp, Homo sapiens
tgctgcagagaggtgtggacgtgaacacccgggacacggatggcttcagcccgctgctgctggccgtgcggggcaggcatccgggtgtcattgggttgctscgggaagccggggcctccctgtccacccaggagctggaggaagcagggacggagctgtgcaggctggcatacagggccgacctcgaaggcctgcaggtgt

SEQ ID NO: 63145 - DNA, 201 bp, Homo sapiens
tgaggacactgcccatgttccatgacgaggagcacgcccgagcccgcggcctctctgaggacaccctggtgctacccccggccagccgcaaccagaggatyctctacaccgtgctggagtgccagcccctcttcgactccagtgacatgaccatcgctgagtgggtttgccttgcccagaccatcaagaggcactacgagc

SEQ ID NO: 63146 - DNA, 201 bp, Homo sapiens
ccgtgctggagtgccagcccctcttcgactccagtgacatgaccatcgctgagtgggtttgccttgcccagaccatcaagaggcactacgagcagtaccayggctttgtggtcatccacggcaccgacaccatggcctttgctgcctcgatgctgtccttcatgctggagaacctgcagaagactgtcatcctcactgggg

SEQ ID NO: 63147 - DNA, 201 bp, Homo sapiens
ggtgctacccccggccagccgcaaccagaggattctctacaccgtgctggagtgccagcccctcttcgactccagtgacatgaccatcgctgagtgggttygccttgcccagaccatcaagaggcactacgagcagtaccacggctttgtggtcatccacggcaccgacaccatggcctttgctgcctcgatgctgtcctt

SEQ ID NO: 63148 - DNA, 201 bp, Homo sapiens
aagcccgacctgctgcaggagctgcgggtggccaccgagcgcggcctggtcatcgtcaactgtacccactgcctccagggggctgtgaccacagactatgmagctggcatggccatggcgggagccggcgtcatctcaggcttcgacatgacatcggaggccgccctggccaagctatcgtatgtgctgggccagccaggg

SEQ ID NO: 63149 - DNA, 201 bp, Homo sapiens
gctacccccggccagccgcaaccagaggattctctacaccgtgctggagtgccagcccctcttcgactccagtgacatgaccatcgctgagtgggtttgcsttgcccagaccatcaagaggcactacgagcagtaccacggctttgtggtcatccacggcaccgacaccatggcctttgctgcctcgatgctgtccttcat

SEQ ID NO: 63150 - DNA, 201 bp, Homo sapiens
acgggcctggctgccatcctgaggacactgcccatgttccatgacgaggagcacgcccgagcccgcggcctctctgaggacaccctggtgctacccccggmcagccgcaaccagaggattctctacaccgtgctggagtgccagcccctcttcgactccagtgacatgaccatcgctgagtgggtttgccttgcccagacc

SEQ ID NO: 63151 - DNA, 201 bp, Homo sapiens
cgatgctgtccttcatgctggagaacctgcagaagactgtcatcctcactggggcccaggtgcccatccatgccctgtggagcgacggccgtgagaacctkctgggggcactgctcatggctggccagtatgtgatcccagaggtctgccttttcttccagaatcagctgtttcggggcaaccgggcaaccaaggtagacg

SEQ ID NO: 63152 - DNA, 201 bp, Homo sapiens
gcggcaccattggcatgcggagtgagctcggcgtgcttgtgcccgggacgggcctggctgccatcctgaggacactgcccatgttccatgacgaggagcaygcccgagcccgcggcctctctgaggacaccctggtgctacccccggccagccgcaaccagaggattctctacaccgtgctggagtgccagcccctcttcg

SEQ ID NO: 63153 - DNA, 201 bp, Homo sapiens
gcatggccatggcgggagccggcgtcatctcaggcttcgacatgacatcggaggccgccctggccaagctatcgtatgtgctgggccagccagggctgagsctggatgtcaggaaggagctgctgaccaaggaccttcggggggagatgacgccaccctcggtggaagagcgccggccctcactgcagggcaacacgctgg

SEQ ID NO: 63154 - DNA, 201 bp, Homo sapiens
tgatttcctggctggccaactggtggccagtgggaggtgatggtggacctagactgcttttctgtcttgttcagccttgacccaccttgagagacagccaycaggaaggcgcatcttagcagatgggaggaactgctgagagaagataggcagagagctggagcccctggagttgactgtgtctatgtctgtgactgattg

SEQ ID NO: 63155 - DNA, 201 bp, Homo sapiens
caaaaatgatttcctggctggccaactggtggccagtgggaggtgatggtggacctagactgcttttctgtcttgttcagccttgacccaccttgagagasagccatcaggaaggcgcatcttagcagatgggaggaactgctgagagaagataggcagagagctggagcccctggagttgactgtgtctatgtctgtgac

SEQ ID NO: 63156 - DNA, 201 bp, Homo sapiens
agtggatggacagtaagtccattgttacatgaaagtgatagatagcaacaagttttggagaagagagagggagataaaagggggagacaaaagatgtacaraaatgatttcctggctggccaactggtggccagtgggaggtgatggtggacctagactgcttttctgtcttgttcagccttgacccaccttgagagacag

SEQ ID NO: 63157 - DNA, 201 bp, Homo sapiens
tttttacttgatcttaatggcaagaaggccacagaggtacttttccttttttagctcaggaaaatatgtcaggctcaaaccacttctcaggcagtttagtkgatggacagtaagtccattgttacatgaaagtgatagatagcaacaagttttggagaagagagagggagataaaagggggagacaaaagatgtacaaaaa

SEQ ID NO: 63158 - DNA, 201 bp, Homo sapiens
cttctcaggcagtttagtggatggacagtaagtccattgttacatgaaagtgatagatagcaacaagttttggagaagagagagggagataaaagggggakacaaaagatgtacaaaaatgatttcctggctggccaactggtggccagtgggaggtgatggtggacctagactgcttttctgtcttgttcagccttgacc

SEQ ID NO: 63159 - DNA, 201 bp, Homo sapiens
tgcttttctgtcttgttcagccttgacccaccttgagagacagccatcaggaaggcgcatcttagcagatgggaggaactgctgagagaagataggcagaragctggagcccctggagttgactgtgtctatgtctgtgactgattgctggctgtgtcttgggtgggcagacactcgaacttgctatgtaatttgtgtcta

SEQ ID NO: 63160 - DNA, 201 bp, Homo sapiens
ccgggagaatgacatcaagagctactttggccgtaaggtggccattgatgcctctatgagcacttatcagttcctgattgctgttcgccagggtggggatstgctgcagaacgaggagggtgagaccaccagccacctgataggcatgttctaccgcactattcgcgtgatggagaacggcatcaagcccatgtatgtctt

SEQ ID NO: 63161 - DNA, 201 bp, Homo sapiens
cctagactgcttttctgtcttgttcagccttgacccaccttgagagacagccatcaggaaggcgcatcttagcagatgggaggaactgctgagagaagatrggcagagagctggagcccctggagttgactgtgtctatgtctgtgactgattgctggctgtgtcttgggtgggcagacactcgaacttgctatgtaattt

SEQ ID NO: 63162 - DNA, 201 bp, Homo sapiens
gatcttaatggcaagaaggccacagaggtacttttccttttttagctcaggaaaatatgtcaggctcaaaccacttctcaggcagtttagtggatggacartaagtccattgttacatgaaagtgatagatagcaacaagttttggagaagagagagggagataaaagggggagacaaaagatgtacaaaaatgatttcct

SEQ ID NO: 63163 - DNA, 201 bp, Homo sapiens
ccttgatgcacccatcgaggcagaggccagctgtgctgccctggtgaaggctggcaaagtctatcctgtggctaccgaggacatggactgcttcaccttcrgcagccctgtgctaatgcaacacctgactgccagtgaagccaaaaagctgccaatccaggaattccacctgagctggattctgcaggagctagaaccagg

SEQ ID NO: 63164 - DNA, 156 bp, Homo sapiens
gctaagctgaggggggaaagtgggcttaggaccgcctgcccagggcaaccctgaaycaagctttagccgccgaggcctcgtgtcccaaaggccagtcatccctcctctgtgttgccatgggtattcaaggcctggccaaactaattgctgatgtgg

SEQ ID NO: 63165 - DNA, 201 bp, Homo sapiens
actattcgcgtgatggagaacggcatcaagcccatgtatgtctttgagggcacgccaccacagcacaagtcaggcgagctggccaaatgcagtgaactgcrgggctgaggcagagaagcagctacagcaggctcaggctgctggggccgagcaggtggtggaaaaattcactaagtggctggtgaaggtcactaagcagca

SEQ ID NO: 63166 - DNA, 201 bp, Homo sapiens
ttttacttgatcttaatggcaagaaggccacagaggtacttttccttttttagctcaggaaaatatgtcaggctcaaaccacttctcaggcagtttagtgratggacagtaagtccattgttacatgaaagtgatagatagcaacaagttttggagaagagagagggagataaaagggggagacaaaagatgtacaaaaat

SEQ ID NO: 63167 - DNA, 201 bp, Homo sapiens
ggaggaactgctgagagaagataggcagagagctggagcccctggagttgactgtgtctatgtctgtgactgattgctggctgtgtcttgggtgggcagamactcgaacttgctatgtaatttgtgtctagttattcagaggagtaagacggtgatgttcatctggcaatcagctgagttgagactttgggataagacact

SEQ ID NO: 63168 - DNA, 201 bp, Homo sapiens
cttgacccaccttgagagacagccatcaggaaggcgcatcttagcagatgggaggaactgctgagagaagataggcagagagctggagcccctggagttgrctgtgtctatgtctgtgactgattgctggctgtgtcttgggtgggcagacactcgaacttgctatgtaatttgtgtctagttattcagaggagtaagacg

SEQ ID NO: 63169 - DNA, 201 bp, Homo sapiens
tatctggagtattgggcccaagcgggctgtggatctaatccagaagcacaagagcatcgaggagatcgtgcagcgacttgaccccaacaagtaccctttgycagaaaatcggctccacaaggaggcttaccagctcttcttggaacctgaggtgctgggcccagagtctgtggagctgaagtggagcgagccaaatgaaga

SEQ ID NO: 63170 - DNA, 201 bp, Homo sapiens
atctggaaagtcagcgataacgagtcgtcatctaactatacctacaagatacatgtggcgggggagacagattcttccaatctcaacgtcagtgagcctcrcgctgtcatccccggactccgctccagcaccttctacaacatcacagtgtgtcctgtcctaggtgacatcgagggcacgccgggcttcctccaagtgcac

SEQ ID NO: 63171 - DNA, 201 bp, Homo sapiens
attggaagccatgaggagttgactcaagactcaagacttcaggtcaatatctcgggcctgaagccaggggttcaatacaacatcaacccgtatcttctacmatcaaataagacaaagggagaccccttgggcacagaaggtggcttggatgccagcaatacagagagaagccgggcagggagccccaccgcccctgtgcat

SEQ ID NO: 63172 - DNA, 201 bp, Homo sapiens
tacaatgggaagctggaacctctgggctcctaccgggcttgtgtggctggcttcaccaacattaccttccaccctcaaaacaaggggctcattgatggggytgagagctatgtgtccttcagtcgctactcagatgctgtttccttgccccaggatccaggtgtcatctgtggagcggtttttggctgtatctttggtgcc

SEQ ID NO: 63173 - DNA, 106 bp, Homo sapiens
aaagtccactggctttcgtctctctctgccgtgacacatatcggaatctactgtatatatatatatatatatatatatatatatatatatatatatatatrcacta

SEQ ID NO: 63174 - DNA, 201 bp, Homo sapiens
tcataaaagtcatcacagagccgatcccagtttctgatctccgtgttgccctcacgggtgtgaggaaggctgctctctcctggagcaatggcaatggcacygcctcctgccgggttcttcttgaaagcattggaagccatgaggagttgactcaagactcaagacttcaggtcaatatctcgggcctgaagccaggggttc

SEQ ID NO: 63175 - DNA, 201 bp, Homo sapiens
tcacaggcttacgtccagcgacttcatatgtattctccatcactccaggaataggcaatgagacttggggagatcccagagtcataaaagtcatcacagarccgatcccagtttctgatctccgtgttgccctcacgggtgtgaggaaggctgctctctcctggagcaatggcaatggcactgcctcctgccgggttcttc

SEQ ID NO: 63176 - DNA, 201 bp, Homo sapiens
gtagcttagcatcagaggtttgcttcctcagtaacatttctgttctcatttgatcaggggaggcctctttgccccgaccccgcttcccctgccccctgtasatttgtgctccattttttcttcccttttccctcccagttttctccaaagactcttctgttggcaacattttcaacccattggttgggtgagaatggcgac

SEQ ID NO: 63177 - DNA, 201 bp, Homo sapiens
tggaatatacggaatatttaaacagtagcttagcatcagaggtttgcttcctcagtaacatttctgttctcatttgatcaggggaggcctctttgccccgrccccgcttcccctgccccctgtacatttgtgctccattttttcttcccttttccctcccagttttctccaaagactcttctgttggcaacattttcaacc

SEQ ID NO: 63178 - DNA, 201 bp, Homo sapiens
cgcgctgtcatccccggactccgctccagcaccttctacaacatcacagtgtgtcctgtcctaggtgacatcgagggcacgccgggcttcctccaagtgcrcaccccccctgttccagtttctgacttccgagtgacagtggtcagcacgacggagatcggcttagcatggagcagccatgatgcagaatcatttcagatg

SEQ ID NO: 63179 - DNA, 201 bp, Homo sapiens
gccagcaatacagagagaagccgggcagggagccccaccgcccctgtgcatgatgagtccctcgtgggacctgtggacccatcctccggccagcagtcccragacacggaagtcctgcttgtcgggttagagcctggcacccgatacaatgccaccgtttattcccaagcagcgaatggcacagaaggacagccccaggcc

SEQ ID NO: 63180 - DNA, 201 bp, Homo sapiens
aaatggacctgccctcctggcgccaatgcaggctttgagctggaggtcagcagtggagcctggaacaatgcgacccacctggagagctgctcctctgagartggcactgagtatagaacggaagtcacgtatttgaatttttctacctcgtacaacatcagcatcaccactgtgtcctgtggaaagatggcagcccccacc

SEQ ID NO: 63181 - DNA, 201 bp, Homo sapiens
gtgacatcgagggcacgccgggcttcctccaagtgcacaccccccctgttccagtttctgacttccgagtgacagtggtcagcacgacggagatcggcttrgcatggagcagccatgatgcagaatcatttcagatgcatatcacacaggagggagctggcaattctcgggtagaaataaccaccaaccaaagtattatca

SEQ ID NO: 63182 - DNA, 201 bp, Homo sapiens
gatttgaagccagccacggacccatcaaagcctatgctgtcattctcaccaccggggaagctggtcacccttctgcagatgtcctgaaatacacgtatgasgatttcaaaaagggagcctcagatacttatgtgacatacctcataagaacagaagaaaagggacgttctcagagcttgtctgaagttttgaaatatgaaa

SEQ ID NO: 63183 - DNA, 201 bp, Homo sapiens
tcctggccagaccacggtgttcccgacaccactgacctgctcatcaacttccggtacctcgttcgtgactacatgaagcagagtcctcccgaatcgccgaytctggtgcattgcagtgctggggtcggaaggacgggcactttcattgccattgatcgtctcatctaccagatagagaatgagaacaccgtggatgtgtat

SEQ ID NO: 63184 - DNA, 201 bp, Homo sapiens
tcaatcagtgtgttttggatattgtcagatcccagaaagactcaaaagtagatcttatctaccagaacacaactgcaatgacaatctatgaaaaccttgcrcccgtgaccacatttggaaagaccaatggttacatcgcctaattccaaaggaataacctttctggagtgaaccagaccgtcgcacccacagcgaaggcac

SEQ ID NO: 63185 - DNA, 201 bp, Homo sapiens
aatgagaagacaattactgttgtgcatcaaccatggtgtaacatcacaggcttacgtccagcgacttcatatgtattctccatcactccaggaataggcartgagacttggggagatcccagagtcataaaagtcatcacagagccgatcccagtttctgatctccgtgttgccctcacgggtgtgaggaaggctgctctc

SEQ ID NO: 63186 - DNA, 201 bp, Homo sapiens
cacccgatacaatgccaccgtttattcccaagcagcgaatggcacagaaggacagccccaggccatagagttcaggacaaatgctattcaggtttttgacrtcaccgctgtgaacatcagtgccacaagcctgaccctgatctggaaagtcagcgataacgagtcgtcatctaactatacctacaagatacatgtggcggg

SEQ ID NO: 63187 - DNA, 201 bp, Homo sapiens
ctcgggcctgaagccaggggttcaatacaacatcaacccgtatcttctaccatcaaataagacaaagggagaccccttgggcacagaaggtggcttggatrccagcaatacagagagaagccgggcagggagccccaccgcccctgtgcatgatgagtccctcgtgggacctgtggacccatcctccggccagcagtccca

SEQ ID NO: 63188 - DNA, 201 bp, Homo sapiens
tgggtggggagcaaatcatctgcattcctgatgaccaatgggatgaggtcactttttttttttttcccccttgaggattgtggaaaaccaggaaaagggakctatgatttttttttccaaaacaatttcttttttaaaaaagactattttatatgattcacatgctaaagccaggattgtgttgggttgaatatattttaa

SEQ ID NO: 63189 - DNA, 201 bp, Homo sapiens
gggctgtcgggggctgtggatgggtggggagcaaatcatctgcattcctgatgaccaatgggatgaggtcactttttttttttttcccccttgaggattgyggaaaaccaggaaaagggagctatgatttttttttccaaaacaatttcttttttaaaaaagactattttatatgattcacatgctaaagccaggattgtg

SEQ ID NO: 63190 - DNA, 201 bp, Homo sapiens
aagactcaaaagtagatcttatctaccagaacacaactgcaatgacaatctatgaaaaccttgcgcccgtgaccacatttggaaagaccaatggttacatmgcctaattccaaaggaataacctttctggagtgaaccagaccgtcgcacccacagcgaaggcacatgccccgatgtcgacatgtttttatatgtctaata

SEQ ID NO: 63191 - DNA, 201 bp, Homo sapiens
gctcctaccgggcttgtgtggctggcttcaccaacattaccttccaccctcaaaacaaggggctcattgatggggctgagagctatgtgtccttcagtcgytactcagatgctgtttccttgccccaggatccaggtgtcatctgtggagcggtttttggctgtatctttggtgccctggttattgtgactgtgggaggct

SEQ ID NO: 63192 - DNA, 201 bp, Homo sapiens; identical to SEQ ID NO: 63170

SEQ ID NO: 63193 - DNA, 201 bp, Homo sapiens; identical to SEQ ID NO: 63171

SEQ ID NO: 63194 - DNA, 201 bp, Homo sapiens; identical to SEQ ID NO: 63172

SEQ ID NO: 63195 - DNA, 106 bp, Homo sapiens; identical to SEQ ID NO: 63173

SEQ ID NO: 63196 - DNA, 201 bp, Homo sapiens; identical to SEQ ID NO: 63174

SEQ ID NO: 63197 - DNA, 201 bp, Homo sapiens; identical to SEQ ID NO: 63175

SEQ ID NO: 63198 - DNA, 201 bp, Homo sapiens; identical to SEQ ID NO: 63176

SEQ ID NO: 63199 - DNA, 201 bp, Homo sapiens; identical to SEQ ID NO: 63177

SEQ ID NO: 63200 - DNA, 201 bp, Homo sapiens; identical to SEQ ID NO: 63178

SEQ ID NO: 63201 - DNA, 201 bp, Homo sapiens; identical to SEQ ID NO: 63179

SEQ ID NO: 63202 - DNA, 201 bp, Homo sapiens; identical to SEQ ID NO: 63180

SEQ ID NO: 63203 - DNA, 201 bp, Homo sapiens; identical to SEQ ID NO: 63181

SEQ ID NO: 63204 - DNA, 201 bp, Homo sapiens; identical to SEQ ID NO: 63182

SEQ ID NO: 63205 - DNA, 201 bp, Homo sapiens; identical to SEQ ID NO: 63183

SEQ ID NO: 63206 - DNA, 201 bp, Homo sapiens; identical to SEQ ID NO: 63185

SEQ ID NO: 63207 - DNA, 201 bp, Homo sapiens; identical to SEQ ID NO: 63184

SEQ ID NO: 63208 - DNA, 201 bp, Homo sapiens; identical to SEQ ID NO: 63186

SEQ ID NO: 63209 - DNA, 201 bp, Homo sapiens; identical to SEQ ID NO: 63189

SEQ ID NO: 63210 - DNA, 201 bp, Homo sapiens; identical to SEQ ID NO: 63188

SEQ ID NO: 63211 - DNA, 201 bp, Homo sapiens; identical to SEQ ID NO: 63187

SEQ ID NO: 63212 - DNA, 201 bp, Homo sapiens; identical to SEQ ID NO: 63190

SEQ ID NO: 63213 - DNA, 201 bp, Homo sapiens; identical to SEQ ID NO: 63191

SEQ ID NO: 63214 - DNA, 201 bp, Homo sapiens
tcaatcagtgtgttttggatattgtcagatcccagaaagactcaaaagtagatcttatctaccagaacacaactgcaatgacaatctatgaaaaccttgcrcccgtgaccacatttggaaagaccaatgaaaagcagctggtatgggtttgggtgtcaatgaaagggccaaagactggtggccagctggtttgggggattt

SEQ ID NO: 63215 - DNA, 118 bp, Homo sapiens
atgcctgggtacattgcrtgctctggggaccagtatgttttcctcaatcagtgtgttttggatattgtcagatcccagaaagactcaaaagtagatcttatctaccagaacacaactg

SEQ ID NO: 63216 - DNA, 201 bp, Homo sapiens; identical to SEQ ID NO: 63170

SEQ ID NO: 63217 - DNA, 201 bp, Homo sapiens; identical to SEQ ID NO: 63171

SEQ ID NO: 63218 - DNA, 201 bp, Homo sapiens; identical to SEQ ID NO: 63172

SEQ ID NO: 63219 - DNA, 106 bp, Homo sapiens; identical to SEQ ID NO: 63173

SEQ ID NO: 63220 - DNA, 201 bp, Homo sapiens; identical to SEQ ID NO: 63174

SEQ ID NO: 63221 - DNA, 201 bp, Homo sapiens; identical to SEQ ID NO: 63175

SEQ ID NO: 63222 - DNA, 201 bp, Homo sapiens; identical to SEQ ID NO: 63176

SEQ ID NO: 63223 - DNA, 201 bp, Homo sapiens; identical to SEQ ID NO: 63177

SEQ ID NO: 63224 - DNA, 201 bp, Homo sapiens; identical to SEQ ID NO: 63178

SEQ ID NO: 63225 - DNA, 201 bp, Homo sapiens; identical to SEQ ID NO: 63179

SEQ ID NO: 63226 - DNA, 201 bp, Homo sapiens; identical to SEQ ID NO: 63180

SEQ ID NO: 63227 - DNA, 201 bp, Homo sapiens; identical to SEQ ID NO: 63181

SEQ ID NO: 63228 - DNA, 201 bp, Homo sapiens; identical to SEQ ID NO: 63182

SEQ ID NO: 63229 - DNA, 201 bp, Homo sapiens; identical to SEQ ID NO: 63183

SEQ ID NO: 63230 - DNA, 201 bp, Homo sapiens; identical to SEQ ID NO: 63185

SEQ ID NO: 63231 - DNA, 201 bp, Homo sapiens; identical to SEQ ID NO: 63184

SEQ ID NO: 63232 - DNA, 201 bp, Homo sapiens; identical to SEQ ID NO: 63186

SEQ ID NO: 63233 - DNA, 201 bp, Homo sapiens; identical to SEQ ID NO: 63189

SEQ ID NO: 63234 - DNA, 201 bp, Homo sapiens; identical to SEQ ID NO: 63188

SEQ ID NO: 63235 - DNA, 201 bp, Homo sapiens; identical to SEQ ID NO: 63187

SEQ ID NO: 63236 - DNA, 201 bp, Homo sapiens; identical to SEQ ID NO: 63190

SEQ ID NO: 63237 - DNA, 201 bp, Homo sapiens; identical to SEQ ID NO: 63191

SEQ ID NO: 63238 - DNA, 201 bp, Homo sapiens; identical to SEQ ID NO: 63170

SEQ ID NO: 63239 - DNA, 201 bp, Homo sapiens; identical to SEQ ID NO: 63171

SEQ ID NO: 63240 - DNA, 201 bp, Homo sapiens
tgggaagctggaacctctgggctcctaccggtaatggcttgtgtggctggcttcaccaacattaccttccaccctcaaaacaaggggctcattgatggggytgagagctatgtgtccttcagtcgctactcagatgctgtttccttgccccaggatccaggtgtcatctgtggagcggtttttggctgtatctttggtgcc

SEQ ID NO: 63241 - DNA, 106 bp, Homo sapiens; identical to SEQ ID NO: 63173

SEQ ID NO: 63242 - DNA, 201 bp, Homo sapiens; identical to SEQ ID NO: 63174

SEQ ID NO: 63243 - DNA, 201 bp, Homo sapiens; identical to SEQ ID NO: 63175

SEQ ID NO: 63244 - DNA, 201 bp, Homo sapiens; identical to SEQ ID NO: 63176

SEQ ID NO: 63245 - DNA, 201 bp, Homo sapiens; identical to SEQ ID NO: 63177

SEQ ID NO: 63246 - DNA, 201 bp, Homo sapiens; identical to SEQ ID NO: 63178

SEQ ID NO: 63247 - DNA, 201 bp, Homo sapiens; identical to SEQ ID NO: 63179

SEQ ID NO: 63248 - DNA, 201 bp, Homo sapiens; identical to SEQ ID NO: 63180

SEQ ID NO: 63249 - DNA, 201 bp, Homo sapiens; identical to SEQ ID NO: 63181

SEQ ID NO: 63250 - DNA, 201 bp, Homo sapiens; identical to SEQ ID NO: 63182

SEQ ID NO: 63251 - DNA, 201 bp, Homo sapiens; identical to SEQ ID NO: 63183

SEQ ID NO: 63252 - DNA, 201 bp, Homo sapiens; identical to SEQ ID NO: 63185

SEQ ID NO: 63253 - DNA, 201 bp, Homo sapiens; identical to SEQ ID NO: 63184

SEQ ID NO: 63254 - DNA, 201 bp, Homo sapiens; identical to SEQ ID NO: 63186

SEQ ID NO: 63255 - DNA, 201 bp, Homo sapiens; identical to SEQ ID NO: 63189

SEQ ID NO: 63256 - DNA, 201 bp, Homo sapiens; identical to SEQ ID NO: 63188

SEQ ID NO: 63257 - DNA, 201 bp, Homo sapiens; identical to SEQ ID NO: 63187

SEQ ID NO: 63258 - DNA, 201 bp, Homo sapiens
taccggtaatggcttgtgtggctggcttcaccaacattaccttccaccctcaaaacaaggggctcattgatggggctgagagctatgtgtccttcagtcgytactcagatgctgtttccttgccccaggatccaggtgtcatctgtggagcggtttttggctgtatctttggtgccctggttattgtgactgtgggaggct

SEQ ID NO: 63259 - DNA, 201 bp, Homo sapiens; identical to SEQ ID NO: 63190

SEQ ID NO: 63260 - DNA, 201 bp, Homo sapiens
ctccgcagccatccacacgtaaggccaagaccatccccgtgcaggcctttgaggtgaagctagatgtgaccctgggtgacctgaccaagattgggaagtcrcagaagttcacgctgagcgtggatgtggagggtgggcggctggtgctgctgcggagacagcgggactcccaggaggactggaccaccttcacgcacgacc

SEQ ID NO: 63261 - DNA, 201 bp, Homo sapiens
ggtggggctgaggcccgtggcccaccacctcccaaggcccatccaaggcctccactgcccccaggcccctcaccagccagcactttcctgggggaagtggscagtggggatgaccggtcctgctcggtgctgcagatggccaagacgctgagcgaggtggactatgcccctgctgggcctgcacgctcagcgctcctccca

SEQ ID NO: 63262 - DNA, 201 bp, Homo sapiens
aggtgtttgaccagcagagctcgcccatggtgacccgccttttgcagcagcagaacctgccacagacaggggagcaggaactagagagcctggtgctgaakctgtcagtgctaaaggacttcctgtcaggcatccagaagaaggccctgaaggccctacaggacatgagctccacagcacccccagctccgcagccatcca

SEQ ID NO: 63263 - DNA, 201 bp, Homo sapiens
gagaatgatgcccagagcagtgacaacatcaacttcctcaaagtgcagtggtcttcacgccagctgcccacgctcaaaccaattctggctgatatcgagtmcctgcaggaccagcacctcctgctcacagtcaagtccatggatggctatgaatcctatggggagtgtgtggttgcactcaaatccatgatcggcagcacg

SEQ ID NO: 63264 - DNA, 201 bp, Homo sapiens
gaccaggcctacattgagtttgagagcatcgaggccattgtgaagacagccagccgcaccaagttcttcatcgagttctactctacctgcctggaggaatmcaagaagagctttgagaatgatgcccagagcagtgacaacatcaacttcctcaaagtgcagtggtcttcacgccagctgcccacgctcaaaccaattctg

SEQ ID NO: 63265 - DNA, 201 bp, Homo sapiens
aatgccctaattagggcatcctgcccctcgccttttaggctcaggacggaaggtcagttgccatggttaccgaggaccctggttactctggtgctgtcctsttttactggaccccgcctcccagccccaggggtgcctgtgggggtccatttgggtacgtctgggcccccactttcaccagtttctgcggccttccaccgg

SEQ ID NO: 63266 - DNA, 201 bp, Homo sapiens
cctgcctggaggaatacaagaagagctttgagaatgatgcccagagcagtgacaacatcaacttcctcaaagtgcagtggtcttcacgccagctgcccacsctcaaaccaattctggctgatatcgagtacctgcaggaccagcacctcctgctcacagtcaagtccatggatggctatgaatcctatggggagtgtgtgg

SEQ ID NO: 63267 - DNA, 201 bp, Homo sapiens
gtcaagtccatggatggctatgaatcctatggggagtgtgtggttgcactcaaatccatgatcggcagcacggcccaacagttcctgaccttcctatcccmccgtggcgaggagacaggcaatatcagaggctccatgaaggtgcgggtgcccacggagcgcctgggcacccgtgagcggctctacgagtggatcagcatt

SEQ ID NO: 63268 - DNA, 201 bp, Homo sapiens
atggttgcactgatgacatcgtcaccagcgaccattcccccgtgtttgggacatttgaggttggagttacctcccagttcatctccaagaaagggctctcraagacttcagaccaggcctacattgagtttgagagcatcgaggccattgtgaagacagccagccgcaccaagttcttcatcgagttctactctacctgcc

SEQ ID NO: 63269 - DNA, 201 bp, Homo sapiens
gagaagatttcttggctgtgcagacctcgcagggtgtgcctgtgcgccgcttccagaccctgggtgagctcatcggcctgtacgcccagcccaaccagggmcttgtgtgcgccctgcttcttcctgtagagggtgagcgagagccggacccaccggatgaccgggatgcctcagatggggaggatgagaagcccccgctgc

SEQ ID NO: 63270 - DNA, 201 bp, Homo sapiens
cctccagactttccacctccaccactgccggactcagccatcttcctgccccccagcctggatcctttaccagggccagtggtccggggccgtggtggggstgaggcccgtggcccaccacctcccaaggcccatccaaggcctccactgcccccaggcccctcaccagccagcactttcctgggggaagtggccagtggg

SEQ ID NO: 63271 - DNA, 201 bp, Homo sapiens
gggaggatgagaagcccccgctgcccccgcgctctggctccaccagcatttctgcccccactgggcccagcagtcccctgccagctcctgagactcccacrgctccagctgctgagagtgctcccaatgggctgagcaccgtctcgcacgactacctgaaaggcagctatgggctggacctggaagctgtgaggggtggag

SEQ ID NO: 63272 - DNA, 201 bp, Homo sapiens; identical to SEQ ID NO: 63260

SEQ ID NO: 63273 - DNA, 201 bp, Homo sapiens; identical to SEQ ID NO: 63261

SEQ ID NO: 63274 - DNA, 201 bp, Homo sapiens; identical to SEQ ID NO: 63262

SEQ ID NO: 63275 - DNA, 201 bp, Homo sapiens; identical to SEQ ID NO: 63263

SEQ ID NO: 63276 - DNA, 201 bp, Homo sapiens; identical to SEQ ID NO: 63264

SEQ ID NO: 63277 - DNA, 201 bp, Homo sapiens; identical to SEQ ID NO: 63265

SEQ ID NO: 63278 - DNA, 201 bp, Homo sapiens; identical to SEQ ID NO: 63266

SEQ ID NO: 63279 - DNA, 201 bp, Homo sapiens; identical to SEQ ID NO: 63267

SEQ ID NO: 63280 - DNA, 201 bp, Homo sapiens; identical to SEQ ID NO: 63268

SEQ ID NO: 63281 - DNA, 201 bp, Homo sapiens; identical to SEQ ID NO: 63269

SEQ ID NO: 63282 - DNA, 201 bp, Homo sapiens; identical to SEQ ID NO: 63270

SEQ ID NO: 63283 - DNA, 201 bp, Homo sapiens; identical to SEQ ID NO: 63271

SEQ ID NO: 63284 - DNA, 201 bp, Homo sapiens; identical to SEQ ID NO: 63260

SEQ ID NO: 63285 - DNA, 201 bp, Homo sapiens; identical to SEQ ID NO: 63261

SEQ ID NO: 63286 - DNA, 201 bp, Homo sapiens; identical to SEQ ID NO: 63262

SEQ ID NO: 63287 - DNA, 201 bp, Homo sapiens; identical to SEQ ID NO: 63263

SEQ ID NO: 63288 - DNA, 201 bp, Homo sapiens; identical to SEQ ID NO: 63264

SEQ ID NO: 63289 - DNA, 201 bp, Homo sapiens; identical to SEQ ID NO: 63265

SEQ ID NO: 63290 - DNA, 201 bp, Homo sapiens; identical to SEQ ID NO: 63266

SEQ ID NO: 63291 - DNA, 201 bp, Homo sapiens; identical to SEQ ID NO: 63267

SEQ ID NO: 63292 - DNA, 201 bp, Homo sapiens; identical to SEQ ID NO: 63268

SEQ ID NO: 63293 - DNA, 201 bp, Homo sapiens; identical to SEQ ID NO: 63269

SEQ ID NO: 63294 - DNA, 201 bp, Homo sapiens; identical to SEQ ID NO: 63270

SEQ ID NO: 63295 - DNA, 201 bp, Homo sapiens; identical to SEQ ID NO: 63271

SEQ ID NO: 63296 - DNA, 201 bp, Homo sapiens
aatatcctcttggttccgatagcatttaccagtgaccatattgaaacgctgtatgagctggacatcgagtactctcaagttttagccaaggagtgtggagktgaaaacatcagaagagctgagtctcttaatggaaatccattgttctctaaggccctggccgacttggtgcattcacacatccagtcaaacgagctgtgt

SEQ ID NO: 63297 - DNA, 201 bp, Homo sapiens
ccggtggttccatgaagaatttgtaaagatcactttctctttcctccaagccctgaaactttgttcttcaaaagagcgtttcttttttttttttttttttwaagccagtttataaagtggaagtattaggagattcataaatcttctatattgagaattggctatgttaataaatattacaacatcattaaggttttagct

SEQ ID NO: 63298 - DNA, 201 bp, Homo sapiens
agatctgtttagtctcgtgcatatagttgctgttttttaaatgaacacagttgagtatttgaagtgaatttgaaaaagaaatgttacttaatctttccctragcccatgggttacagaatgctagggaggcaatttggttacctgcaatggctgcttttgccagcgaggccaccattcattggtcatcttggtatttgtgt

SEQ ID NO: 63299 - DNA, 201 bp, Homo sapiens
acccatatcctcaggaggtaagcgccactgtccaaaaagtcatggaaaggctggagtactgcaacccctaccgactggtgtggcaatccaaggttggtccdatgccctggttgggtcctcaaacagacgaatctatcaaagggctttgtgagagggggaggaagaatatcctcttggttccgatagcatttaccagtgacc

SEQ ID NO: 63300 - DNA, 201 bp, Homo sapiens
gaatgccttctttctgaacatttgttttaagaattattttataaagtcaacaatactttgcttgaattctttcttaatttacgattttttattataaaaawgtatagtgatacaatgggacatgtgaagaatacagaaaagtaaccactttaatgcaataactgttatcataatattgtatttcgtggtagtcctttcctg

SEQ ID NO: 63301 - DNA, 201 bp, Homo sapiens
tggaatgtccatcaggacctttaataaatgagttaaaaatttgtcttatgagacacacctatttaagtacagattttggctttattgcccaaaaccctccygaaagggtacggagagtcccctctgtgggctggcagtgtgaatgagatctgtttagtctcgtgcatatagttgctgttttttaaatgaacacagttgagt

SEQ ID NO: 63302 - DNA, 201 bp, Homo sapiens
tccgctggcatccagcagctggagggtctgtcagccatggaggtggaagtcaggtgcagctgcagcggccgtcaccacagaaacagcccagcatgcccagkgtgcaaaacctcaagttcaaccgcagaagaggaagccgaaaactggaatattaatgctaaacatgggaggccctgaaactcttggagatgttcacgactt

SEQ ID NO: 63303 - DNA, 201 bp, Homo sapiens
gtattttctctctctaggtataagttactagtttggaatgtccatcaggacctttaataaatgagttaaaaatttgtcttatgagacacacctatttaagyacagattttggctttattgcccaaaaccctcctgaaagggtacggagagtcccctctgtgggctggcagtgtgaatgagatctgtttagtctcgtgcata

SEQ ID NO: 63304 - DNA, 201 bp, Homo sapiens
cttgagaagagaagcgaggtggtcattctgttttctgctcactcactgccgatgtctgtggtcaacagaggcgacccatatcctcaggaggtaagcgccaytgtccaaaaagtcatggaaaggctggagtactgcaacccctaccgactggtgtggcaatccaaggttggtccgatgccctggttgggtcctcaaacagac

SEQ ID NO: 63305 - DNA, 201 bp, Homo sapiens
ccgtggcgttaggcaaatgcccaacctccagatacctccgatgtggagagggtgttatttagagatcaaggaaggaagtcatccttccttgatatatatayagcctttgggtacaaattgtgtggtttcttgaggattggactcttgatggatttctatttttatataactatacagtaagcatttgtattttctctctct

SEQ ID NO: 63306 - DNA, 201 bp, Homo sapiens
cagaagaggaagccgaaaactggaatattaatgctaaacatgggaggccctgaaactcttggagatgttcacgacttccttctgagactcttcttggaccragacctcatgacacttcctattcagaataagctggcaccattcatcgccaaacgccgaacccccaagattcaagagcagtaccgcaggattggaggcgga

SEQ ID NO: 63307 - DNA, 201 bp, Homo sapiens
tttggaatgtccatcaggacctttaataaatgagttaaaaatttgtcttatgagacacacctatttaagtacagattttggctttattgcccaaaaccctyctgaaagggtacggagagtcccctctgtgggctggcagtgtgaatgagatctgtttagtctcgtgcatatagttgctgttttttaaatgaacacagttga

SEQ ID NO: 63308 - DNA, 201 bp, Homo sapiens
gcccaaaaccctcctgaaagggtacggagagtcccctctgtgggctggcagtgtgaatgagatctgtttagtctcgtgcatatagttgctgttttttaaawgaacacagttgagtatttgaagtgaatttgaaaaagaaatgttacttaatctttccctaagcccatgggttacagaatgctagggaggcaatttggttac

SEQ ID NO: 63309 - DNA, 201 bp, Homo sapiens
caccctggagctcctcccgggaccttgcaagcctctccatccagcatcttctctatcttagttgaatgccttctttctgaacatttgttttaagaattatyttataaagtcaacaatactttgcttgaattctttcttaatttacgattttttattataaaaatgtatagtgatacaatgggacatgtgaagaatacagaa

SEQ ID NO: 63310 - DNA, 201 bp, Homo sapiens
tggcaatccaaggttggtccgatgccctggttgggtcctcaaacagacgaatctatcaaagggctttgtgagagggggaggaagaatatcctcttggttcygatagcatttaccagtgaccatattgaaacgctgtatgagctggacatcgagtactctcaagttttagccaaggagtgtggagttgaaaacatcagaaga

SEQ ID NO: 63311 - DNA, 201 bp, Homo sapiens
ggaaatccattgttctctaaggccctggccgacttggtgcattcacacatccagtcaaacgagctgtgttccaagcagctgaccctgagctgtccgctctvtgtcaatcctgtctgcagggagactaaatccttcttcaccagccagcagctgtgacccccgccggtggaccccgtggcgttaggcaaatgcccaacctcc

SEQ ID NO: 63312 - DNA, 201 bp, Homo sapiens
gaattgtcccccaacacagcccctcacaaatactatattggatttcggtacgtccatcctttaacagaagaagcaattgaagagatggagagagatggcckagaaagggctattgctttcacacagtatccacagtacagctgctccaccacaggcagcagcttaaatgccatttacagatactataatcaagtgggacgg

SEQ ID NO: 63313 - DNA, 201 bp, Homo sapiens
tcatccagtgctttgcagatcatattctaaaggaactggaccattttccacttgagaagagaagcgaggtggtcattctgttttctgctcactcactgccsatgtctgtggtcaacagaggcgacccatatcctcaggaggtaagcgccactgtccaaaaagtcatggaaaggctggagtactgcaacccctaccgactgg

SEQ ID NO: 63314 - DNA, 201 bp, Homo sapiens
tctcaagttttagccaaggagtgtggagttgaaaacatcagaagagctgagtctcttaatggaaatccattgttctctaaggccctggccgacttggtgcmttcacacatccagtcaaacgagctgtgttccaagcagctgaccctgagctgtccgctctgtgtcaatcctgtctgcagggagactaaatccttcttcacc

SEQ ID NO: 63315 - DNA, 201 bp, Homo sapiens
ttggtgcattcacacatccagtcaaacgagctgtgttccaagcagctgaccctgagctgtccgctctgtgtcaatcctgtctgcagggagactaaatcctycttcaccagccagcagctgtgacccccgccggtggaccccgtggcgttaggcaaatgcccaacctccagatacctccgatgtggagagggtgttatttag

SEQ ID NO: 63316 - DNA, 201 bp, Homo sapiens
caagattcaagagcagtaccgcaggattggaggcggatcccccatcaagatatggacttccaagcagggagagggcatggtgaagctgctggatgaattgycccccaacacagcccctcacaaatactatattggatttcggtacgtccatcctttaacagaagaagcaattgaagagatggagagagatggcctagaaag

SEQ ID NO: 63317 - DNA, 201 bp, Homo sapiens
gaggtggtcattctgttttctgctcactcactgccgatgtctgtggtcaacagaggcgacccatatcctcaggaggtaagcgccactgtccaaaaagtcawggaaaggctggagtactgcaacccctaccgactggtgtggcaatccaaggttggtccgatgccctggttgggtcctcaaacagacgaatctatcaaaggg

SEQ ID NO: 63318 - DNA, 201 bp, Homo sapiens
cacctcctcatccagtgctttgcagatcatattctaaaggaactggaccattttccacttgagaagagaagcgaggtggtcattctgttttctgctcactyactgccgatgtctgtggtcaacagaggcgacccatatcctcaggaggtaagcgccactgtccaaaaagtcatggaaaggctggagtactgcaacccctac

SEQ ID NO: 63319 - DNA, 201 bp, Homo sapiens
tccagtgctttgcagatcatattctaaaggaactggaccattttccacttgagaagagaagcgaggtggtcattctgttttctgctcactcactgccgatrtctgtggtcaacagaggcgacccatatcctcaggaggtaagcgccactgtccaaaaagtcatggaaaggctggagtactgcaacccctaccgactggtgt

SEQ ID NO: 63320 - DNA, 201 bp, Homo sapiens
aacacagcccctcacaaatactatattggatttcggtacgtccatcctttaacagaagaagcaattgaagagatggagagagatggcctagaaagggctaytgctttcacacagtatccacagtacagctgctccaccacaggcagcagcttaaatgccatttacagatactataatcaagtgggacggaagcccacgatg

SEQ ID NO: 63321 - DNA, 201 bp, Homo sapiens
gaggattggactcttgatggatttctatttttatataactatacagtaagcatttgtattttctctctctaggtataagttactagtttggaatgtccatyaggacctttaataaatgagttaaaaatttgtcttatgagacacacctatttaagtacagattttggctttattgcccaaaaccctcctgaaagggtacgg

SEQ ID NO: 63322 - DNA, 201 bp, Homo sapiens
ctgtggtcaacagaggcgacccatatcctcaggaggtaagcgccactgtccaaaaagtcatggaaaggctggagtactgcaacccctaccgactggtgtgrcaatccaaggttggtccgatgccctggttgggtcctcaaacagacgaatctatcaaagggctttgtgagagggggaggaagaatatcctcttggttccga

SEQ ID NO: 63323 - DNA, 201 bp, Homo sapiens
tccggaagttgcctctgccctcaccaaagatggcggccccggcgccgctcgcccacctctcgtaaccaatggaaccgcggcgctcggccgattctcgcagrcgccctcagatctacgctctctgatgcaacgccggaatcgcggaaaccgccggtgcacgttggagtcataagacggcgtcggtgttgcagtctgtgtcct

SEQ ID NO: 63324 - DNA, 201 bp, Homo sapiens
tgagttgcccccaccatgtccttagatctaatctgtgctaccttattaactcacagcaggcttactgaatggcttcatttcagatttagttgatttctccmccaaatgcatgtcatgtattctcaataggctgtattcccagcagtcaataaatgaacacccgtaaaaactctttgctggcttaattttcttaaagctaaa

SEQ ID NO: 63325 - DNA, 201 bp, Homo sapiens
gattcttaacgtggattctgaataggtatcacatccgagacgtgtgcttataccctcgatttgtccagcgttgcacgccataaccattttctccagaagcrtggaggaaagattatgaaaggaacaggctctttaaaaaagaaaacaaaaagccagaatcttcctttttttgtttcattggggtttctctttctgtttttc

SEQ ID NO: 63326 - DNA, 201 bp, Homo sapiens
ccattaatgaaccaatcttgctgtgtcgatttcctgtggagatcaagtccttctacatgcagcgatgtcctgaggattcccgtcttactgaatctgtcgaygtgttgatgcccaatgttggtgagattgtgggaggctcaatgcgtatctttgatagtgaagaaatactggcaggttataaaagggaagggattgacccca

SEQ ID NO: 63327 - DNA, 201 bp, Homo sapiens
caggcagcgccttccgagctgcacaaacgcgtggggcggggcgtctctggatccggaagttgcctctgccctcaccaaagatggcggccccggcgccgctygcccacctctcgtaaccaatggaaccgcggcgctcggccgattctcgcaggcgccctcagatctacgctctctgatgcaacgccggaatcgcggaaaccg

SEQ ID NO: 63328 - DNA, 201 bp, Homo sapiens
agggtgcaaaagtgacactgtgccagggtctccagggccgcggagctccgggacaggcagcgccttccgagctgcacaaacgcgtggggcggggcgtctcyggatccggaagttgcctctgccctcaccaaagatggcggccccggcgccgctcgcccacctctcgtaaccaatggaaccgcggcgctcggccgattctcg

SEQ ID NO: 63329 - DNA, 201 bp, Homo sapiens
tggatccggaagttgcctctgccctcaccaaagatggcggccccggcgccgctcgcccacctctcgtaaccaatggaaccgcggcgctcggccgattctckcaggcgccctcagatctacgctctctgatgcaacgccggaatcgcggaaaccgccggtgcacgttggagtcataagacggcgtcggtgttgcagtctgtg

SEQ ID NO: 63330 - DNA, 201 bp, Homo sapiens
taagtaattaagaataaataagttccaaaagaaattgtagctggaatcttaataacaattgtgagtggctgtttgagttgcccccaccatgtccttagatytaatctgtgctaccttattaactcacagcaggcttactgaatggcttcatttcagatttagttgatttctccaccaaatgcatgtcatgtattctcaata

SEQ ID NO: 63331 - DNA, 201 bp, Homo sapiens
tttcctggtaattcctaagtaattaagaataaataagttccaaaagaaattgtagctggaatcttaataacaattgtgagtggctgtttgagttgcccccmccatgtccttagatctaatctgtgctaccttattaactcacagcaggcttactgaatggcttcatttcagatttagttgatttctccaccaaatgcatgt

SEQ ID NO: 63332 - DNA, 201 bp, Homo sapiens
attcattttattcaagttatatgtatgtataattcaacaattttagattatggtgtaagatactccagtaacttatctttctgtccttttaagtgtacctkgaattctttgatttattttattgcatcaatgaattaaaacaaaaatcttgggggaagaaattggcaatatcgtataaaaatctgctcatattagaacaca

SEQ ID NO: 63333 - DNA, 201 bp, Homo sapiens
attgcatcaatgaattaaaacaaaaatcttgggggaagaaattggcaatatcgtataaaaatctgctcatattagaacacagtataattcagcagtaaacmctagaatcaaatgaatagccttttgtatcagttattaatcttttctaactctgcttagctgctaataatcctgaggcatagaaattgaagaatttgtaaa

SEQ ID NO: 63334 - DNA, 201 bp, Homo sapiens
aacatgatgtaaagaaagaagatggaactttctatgaatttggagaagatatcccagaagctcctgagagactgatgacagacaccattaatgaaccaatyttgctgtgtcgatttcctgtggagatcaagtccttctacatgcagcgatgtcctgaggattcccgtcttactgaatctgtcgacgtgttgatgcccaatg

SEQ ID NO: 63335 - DNA, 201 bp, Homo sapiens
atctcaaatcacctgaacatcaagtgatattaaggttgtcatcttaagaaaaaatatccatttttttcttaagttcgggaaacaaagttcggggaaaatayctggcatgaaactgtagttagggatacatttcagcattttactcactttatccaagttattcattttattcaagttatatgtatgtataattcaacaatt

SEQ ID NO: 63336 - DNA, 201 bp, Homo sapiens
cctcgatttgtccagcgttgcacgccataaccattttctccagaagcgtggaggaaagattatgaaaggaacaggctctttaaaaaagaaaacaaaaagcyagaatcttcctttttttgtttcattggggtttctctttctgtttttctttctactaccataaaaactatctcaaatcacctgaacatcaagtgatattaa

SEQ ID NO: 63337 - DNA, 201 bp, Homo sapiens; identical to SEQ ID NO: 63323

SEQ ID NO: 63338 - DNA, 201 bp, Homo sapiens; identical to SEQ ID NO: 63324

SEQ ID NO: 63339 - DNA, 201 bp, Homo sapiens; identical to SEQ ID NO: 63325

SEQ ID NO: 63340 - DNA, 201 bp, Homo sapiens; identical to SEQ ID NO: 63326

SEQ ID NO: 63341 - DNA, 201 bp, Homo sapiens; identical to SEQ ID NO: 63327

SEQ ID NO: 63342 - DNA, 201 bp, Homo sapiens; identical to SEQ ID NO: 63328

SEQ ID NO: 63343 - DNA, 201 bp, Homo sapiens; identical to SEQ ID NO: 63329

SEQ ID NO: 63344 - DNA, 201 bp, Homo sapiens; identical to SEQ ID NO: 63330

SEQ ID NO: 63345 - DNA, 201 bp, Homo sapiens; identical to SEQ ID NO: 63331

SEQ ID NO: 63346 - DNA, 201 bp, Homo sapiens; identical to SEQ ID NO: 63332

SEQ ID NO: 63347 - DNA, 201 bp, Homo sapiens; identical to SEQ ID NO: 63333

SEQ ID NO: 63348 - DNA, 201 bp, Homo sapiens; identical to SEQ ID NO: 63334

SEQ ID NO: 63349 - DNA, 201 bp, Homo sapiens; identical to SEQ ID NO: 63335

SEQ ID NO: 63350 - DNA, 201 bp, Homo sapiens; identical to SEQ ID NO: 63336

SEQ ID NO: 63351 - DNA, 201 bp, Homo sapiens
accgagtcaacagggaagcagaggagaaccgggagccattcagaaaagaatgtacatggcaagtcaaagcaaacgatcgcaagtaccacgaacaacctcastttatgaacacaaaattcttgtgtattaaggagagtaaatatgcgaataatgcaattaaaacatacaagtacaacgcatttacctttataccaatgaatc

SEQ ID NO: 63352 - DNA, 201 bp, Homo sapiens
ttaccattgggctgtgaatgttcacaatatcagtcctgttgaattcctatgaggtaatcacaatgtgtatatgttcattttctaggtatgataaaagaatrtatggctttttattctgtggaagtaaaatcctgaacgtttacaacttttccttaacttgtaaataaaaaattgtaagttttttctttttttacagaaaac

SEQ ID NO: 63353 - DNA, 201 bp, Homo sapiens
ttttaatccagtctcaatccagggcaatagaattacaaagcatgttgtatttcagttcaaatggtattgtattataaaattacagttacattttcctttckgtgatcttcagcataatttcccagaggcccctttttcctccctataggccatcttattaacagattttaaaatttatagtaatgacaaatgacttatcag

SEQ ID NO: 63354 - DNA, 201 bp, Homo sapiens
agacctcactctttttcacttgtcttatgtcgagagaaaaggttattggcagccacattcctaagactggggaatggtgtgtccttttaaatttgaagatractttaggtaattatggaaactcctcaaagaggagaaagtaatttttttccagacatttttctcattctgtgtctttcacacactagtttccatagttcg

SEQ ID NO: 63355 - DNA, 201 bp, Homo sapiens
ccaccatctgctatggggaggatattaattctcttcttcatgcaaggatggaaaaccagaggaatagaggtggcgtctacgcaaagtttgcacctcctgtrcaggaatctttttttccacccggtggaaaccgtgccttaatcatcactggttcttggttgaatgaaattcttctcgagaaaaagaccaagagaaataaga

SEQ ID NO: 63356 - DNA, 201 bp, Homo sapiens
cggttacatcgaatgaatcctactaagcaagaaacacaggatgccctggatatctttgcaaatgaaactcttagaaccctatgcctttgctacaaggaaaytgaagaaaaagaatttacagaatggaataaaaagtttatggctgccagtgtggcctccaccaaccgggacgaagctctggataaagtatatgaggagatt

SEQ ID NO: 63357 - DNA, 201 bp, Homo sapiens
gtcatgtcgagtgactattcctttgctcagttccgatatctgcagaggctactgctggtgcatggccgatggtcttacataaggatgtgcaagttcctacratacttcttttacaaaaactttgcctttactttggttcatttctggtactccttcttcaatggctactctgcgcagactgcatacgaggattggttcatc

SEQ ID NO: 63358 - DNA, 201 bp, Homo sapiens
ttctgttagtttcagatttctctcctgtttttgcaaattgtgggaaagattgacaatgcaaatgtgtcaaagacatactgttgggtgcaatattaacaatwttaaatgcaaatttctttggataaattatttctatattctgtaaatctgagatttaatgtatattttgtttaaaaaaatgatttagtaaaatctttgaaa

SEQ ID NO: 63359 - DNA, 201 bp, Homo sapiens
ctttctgctggtcttgccatcggccatgcttattgggaagcacaggtgggcaattcctcttggtacctctatgatggagaagacgatacaccctcctaccrtggattcctcattttctggggctatatcattgttctcaacaccatggtacccatctctctctatgtcagcgtggaagtgattcgtcttggacagagtcac

SEQ ID NO: 63360 - DNA, 201 bp, Homo sapiens
tcattcgtctgaaaaaaaatgattttgttccagctgacattctcctgctgtctagctctgagcctaacagcctctgctatgtggaaacagcagaactggayggagaaaccaatttaaaatttaagatgtcacttgaaatcacagaccagtacctccaaagagaagatacattggctacatttgatggttttattgaatgtg

SEQ ID NO: 63361 - DNA, 201 bp, Homo sapiens
tttacaggaacactattttggagaaacacaagttttcctttggatgctgataaaattttgttacgtggctgtgtaattaggaacaccgatttctgccacgkcttagtcatttttgcaggtgctgacactaaaataatgaagaatagtgggaaaaccagatttaaaagaactaaaattgattacttgatgaactacatggtt

SEQ ID NO: 63362 - DNA, 201 bp, Homo sapiens
ttttaaaagtcctattattcggccgggcgtggtggctcaggtctgtaatcccagcactttaggaggctgaggaggggagatcacctgaggccaggagttcragaccagcccagccaacatggtgaaaccctgtctctaccataaattaaaaattagccgggcttggtggtgggcacccgtaatcccacctatttgagaagc

SEQ ID NO: 63363 - DNA, 201 bp, Homo sapiens
aaaatttaagatgtcacttgaaatcacagaccagtacctccaaagagaagatacattggctacatttgatggttttattgaatgtgaagaacccaataacmgactagataagtttacaggaacactattttggagaaacacaagttttcctttggatgctgataaaattttgttacgtggctgtgtaattaggaacaccga

SEQ ID NO: 63364 - DNA, 131 bp, Homo sapiens
tgttgggtgcaatattaacaattttaaatgcaaatttctttggataaattatttctatattctgtaaatctgagatttaatgtatattttgtttaaaaaaatgatttagtaaaatctttgaaaagtatgat

SEQ ID NO: 63365 - DNA, 201 bp, Homo sapiens
aaaaatttaaaaataggccgggcatggtggctcatgcctgtcatcctagcactttgggaggccaaggcaggtggatcacttgaggtcaggagaccagcccrgccaacatggtgaaaccccatctctactaaaaatacaaaaattagctggaaatcgcttgaacctgggaggtggaggttccagtgagccgagatcgtggca

SEQ ID NO: 63366 - DNA, 201 bp, Homo sapiens
ggggcgtgtcaacgcggcgctcggcctacgccttctcgcaccagcggggctacgcggacctcatctcctccgggcgcagcatccgcaagaagcgctcgccrcttgatgccatcgtggcggatggcaccgcggagtacaggcgcaccggggacagctgatcccttacccccaggctgggatgcggccacaaagcacgtctat

SEQ ID NO: 63367 - DNA, 201 bp, Homo sapiens
tagtgctggaatacatgttctctttccatctgcatttcaatttacaggcacagcttcaaacgctctgagacagccatacatttggttaactatcatcctgrctgttgctgtgtgcttactacccgtcgttgccattcgattcctgtcaatgaccatctggccatcagaaagtgataagatccagaagcatcgcaagcggtt

SEQ ID NO: 63368 - DNA, 201 bp, Homo sapiens
aactaccaggcagcctctcccgatgaaggtgccctggtaaacgctgccaggaactttggctttgccttcctcgccaggacccagaacaccatcaccatcartgaactgggcactgaaaggacttacaatgttcttgccattttggacttcaacagtgaccggaagcgaatgtctatcattgtaagaaccccagaaggcaat

SEQ ID NO: 63369 - DNA, 201 bp, Homo sapiens
tggtcagctcaactaccaggcagcctctcccgatgaaggtgccctggtaaacgctgccaggaactttggctttgccttcctcgccaggacccagaacaccrtcaccatcagtgaactgggcactgaaaggacttacaatgttcttgccattttggacttcaacagtgaccggaagcgaatgtctatcattgtaagaacccc

SEQ ID NO: 63370 - DNA, 201 bp, Homo sapiens
tttactactaggtgagatagcacattacatacttttactatcaaatattattttagcagcttcccatagtaccaaatgatttgattccctactctcatttyttaaagcatataaatatttatgggcttaaaaagggggtttttaaaaactgaggatatcagtaataaattgcagaatattttgcaaagctttcttttggaa

SEQ ID NO: 63371 - DNA, 201 bp, Homo sapiens
ggggctacgcggacctcatctcctccgggcgcagcatccgcaagaagcgctcgccgcttgatgccatcgtggcggatggcaccgcggagtacaggcgcacmggggacagctgatcccttacccccaggctgggatgcggccacaaagcacgtctatttttttatgaaagactctcaggactttgtgtgtgtgtgtgaattg

SEQ ID NO: 63372 - DNA, 201 bp, Homo sapiens
ctcaacaccatggtacccatctctctctatgtcagcgtggaagtgattcgtcttggacagagtcacttcatcaactgggacctgcaaatgtactatgctgmgaaggacacacccgcaaaagctagaaccaccacactcaatgaacagctcgggcagatccattatatcttctctgataagacggggacactcacacaaaat

SEQ ID NO: 63373 - DNA, 201 bp, Homo sapiens
acattggctacatttgatggttttattgaatgtgaagaacccaataaccgactagataagtttacaggaacactattttggagaaacacaagttttccttyggatgctgataaaattttgttacgtggctgtgtaattaggaacaccgatttctgccacggcttagtcatttttgcaggtgctgacactaaaataatgaag

SEQ ID NO: 63374 - DNA, 201 bp, Homo sapiens
acctggcctgcgagtgcagcgcagtcatctgctgccgcgtcacccccaagcagaaggccatggtggtggacctggtgaagaggtacaagaaagccatcackctggccatcggagatggggccaatgacgtgaacatgatcaaaactgcccacattggcgttggaataagtggacaagaaggaatgcaagctgtcatgtcga

SEQ ID NO: 63375 - DNA, 201 bp, Homo sapiens; identical to SEQ ID NO: 63351

SEQ ID NO: 63376 - DNA, 200 bp, Homo sapiens
gactccatctcaaaaaataaagcagcaaggttcaggaactcaggcttattttaaaaaaaagaaaatgaagaagaagaaagaaggaaaaggggctggatayggtagctcatgcctgtaatcccagtattttgtgaggccaaggagggaggattgcttgacctcaggagttcaagagcatcctgagcaaactagcaagacct

SEQ ID NO: 63377 - DNA, 201 bp, Homo sapiens; identical to SEQ ID NO: 63352

SEQ ID NO: 63378 - DNA, 201 bp, Homo sapiens; identical to SEQ ID NO: 63353

SEQ ID NO: 63379 - DNA, 201 bp, Homo sapiens; identical to SEQ ID NO: 63354

SEQ ID NO: 63380 - DNA, 201 bp, Homo sapiens; identical to SEQ ID NO: 63355

SEQ ID NO: 63381 - DNA, 201 bp, Homo sapiens; identical to SEQ ID NO: 63356

SEQ ID NO: 63382 - DNA, 201 bp, Homo sapiens; identical to SEQ ID NO: 63357

SEQ ID NO: 63383 - DNA, 201 bp, Homo sapiens; identical to SEQ ID NO: 63358

SEQ ID NO: 63384 - DNA, 201 bp, Homo sapiens; identical to SEQ ID NO: 63359

SEQ ID NO: 63385 - DNA, 201 bp, Homo sapiens; identical to SEQ ID NO: 63360

SEQ ID NO: 63386 - DNA, 201 bp, Homo sapiens; identical to SEQ ID NO: 63361

SEQ ID NO: 63387 - DNA, 201 bp, Homo sapiens; identical to SEQ ID NO: 63362

SEQ ID NO: 63388 - DNA, 201 bp, Homo sapiens; identical to SEQ ID NO: 63363

SEQ ID NO: 63389 - DNA, 131 bp, Homo sapiens; identical to SEQ ID NO: 63364

SEQ ID NO: 63390 - DNA, 201 bp, Homo sapiens; identical to SEQ ID NO: 63365

SEQ ID NO: 63391 - DNA, 201 bp, Homo sapiens; identical to SEQ ID NO: 63366

SEQ ID NO: 63392 - DNA, 201 bp, Homo sapiens; identical to SEQ ID NO: 63367

SEQ ID NO: 63393 - DNA, 201 bp, Homo sapiens; identical to SEQ ID NO: 63368

SEQ ID NO: 63394 - DNA, 201 bp, Homo sapiens; identical to SEQ ID NO: 63369

SEQ ID NO: 63395 - DNA, 201 bp, Homo sapiens; identical to SEQ ID NO: 63370

SEQ ID NO: 63396 - DNA, 201 bp, Homo sapiens; identical to SEQ ID NO: 63371

SEQ ID NO: 63397 - DNA, 201 bp, Homo sapiens; identical to SEQ ID NO: 63372

SEQ ID NO: 63398 - DNA, 201 bp, Homo sapiens; identical to SEQ ID NO: 63373

SEQ ID NO: 63399 - DNA, 201 bp, Homo sapiens; identical to SEQ ID NO: 63374

SEQ ID NO: 63400 - DNA, 155 bp, Homo sapiens
ggggcgtgtcaacgcggcgctcggcctacgccttctcgcaccagcggggctacgcggacctcatctcctccgggcgcagcatccgcaagaagcgctcgccrcttgatgccatcgtggcggatggcaccgcggagtacaggcgcaccggggacagc

SEQ ID NO: 63401 - DNA, 201 bp, Homo sapiens; identical to SEQ ID NO: 63355

SEQ ID NO: 63402 - DNA, 201 bp, Homo sapiens
aatatcaagctttactgtaaaggtgctgacactgttatttatgaacggttacatcgaatgaatcctactaagcaagaaacacaggatgccctggatgaaaytgaagaaaaagaatttacagaatggaataaaaagtttatggctgccagtgtggcctccaccaaccgggacgaagctctggataaagtatatgaggagatt

SEQ ID NO: 63403 - DNA, 201 bp, Homo sapiens; identical to SEQ ID NO: 63357

SEQ ID NO: 63404 - DNA, 110 bp, Homo sapiens
ggggctacgcggacctcatctcctccgggcgcagcatccgcaagaagcgctcgccgcttgatgccatcgtggcggatggcaccgcggagtacaggcgcacmggggacagc

SEQ ID NO: 63405 - DNA, 201 bp, Homo sapiens
tagtgctggaatacatgttctctttccatctgcatttcaatttacaggcacagcttcaaacgctctgagacagccatacatttggttaactatcatcctgrctgttgctgtgtgcttactacccgtcgttgccattcgattcctgtcaatgaccatctggccatcagaaagtgataagaaaccaaagcgtttcccaacagc

SEQ ID NO: 63406 - DNA, 201 bp, Homo sapiens; identical to SEQ ID NO: 63374

SEQ ID NO: 63407 - DNA, 201 bp, Homo sapiens
accaagaactttgcatggctctggcatatagaaacaatttattgccgggggcaataggggtaagagaagccagaaatttttgcagccagcacccaccccasccccaacttctactttacaaaagaaatttttacaatcaccagccctctgtacagagctcccccatccggatcccttctcactgtacacagctgcctggct

SEQ ID NO: 63408 - DNA, 201 bp, Homo sapiens; identical to SEQ ID NO: 63407

SEQ ID NO: 63409 - DNA, 201 bp, Homo sapiens
ctgccaacttcagccgcttcaccctgtggggtctggagaccatccctggcccggatgccaaagtgcgtggggccttaacttggcccagccttgcggcagckattcacgcacaggtgcccgaggactgagaaccagagcttgaaattcaaagctgcgatcccttcacagcagtaaaccagctctttggaaccgattccatca

SEQ ID NO: 63410 - DNA, 201 bp, Homo sapiens
tgcaccctgagatcaagggccagctggtgaagctgctgtcggtgcgcctgtgccccccagtgtctgggcaggccgccatggacattgtcgtgaacccccckgtggcaggagaggagtcctttgagcaattcagccgagagaaggagtcggtcctgggtaatctggccaaaaaagcaaagctgacggaagacctgtttaacc

SEQ ID NO: 63411 - DNA, 201 bp, Homo sapiens
gcctgtgccccccagtgtctgggcaggccgccatggacattgtcgtgaaccccccggtggcaggagaggagtcctttgagcaattcagccgagagaaggartcggtcctgggtaatctggccaaaaaagcaaagctgacggaagacctgtttaaccaagtcccaggaattcactgcaaccccttgcagggggccatgtacg

SEQ ID NO: 63412 - DNA, 201 bp, Homo sapiens
agcccttagcggtgtgaagcatccggtcctttgaacagaagggcctggaaggcccctggggctgagaaagggtccgcccggtggcctggaggcaggcgccrggagcgcagtagcacgtggactgggcaggatgttgcactagcttggggtagatgctgggggctgcggccacggtcagagggccccactgtgaggcgtggg

SEQ ID NO: 63413 - DNA, 131 bp, Homo sapiens
ggaacagatgcagatcaacctgtggctgttttcccgtctaggttctcacaggtatctcctgacagaggtacttaacaatggctctgctggaaatttctatraataaaatgtccaaaatggtgactgcgttt

SEQ ID NO: 63414 - DNA, 201 bp, Homo sapiens
ctggagaagtacgcgtgaggacgcctgagccccagcgggagacctgtccttggctcttcctcccaatgcccgtcaggctgaactcgcctcccccgtgactytgcctcgggcctcgcagaggccgctggtcacttcgtcatcattttgcccctggagacgtctttctttgtgccttgatgttgagagcgcctctcttttgag

SEQ ID NO: 63415 - DNA, 201 bp, Homo sapiens; identical to SEQ ID NO: 63410

SEQ ID NO: 63416 - DNA, 201 bp, Homo sapiens; identical to SEQ ID NO: 63411

SEQ ID NO: 63417 - DNA, 201 bp, Homo sapiens; identical to SEQ ID NO: 63412

SEQ ID NO: 63418 - DNA, 131 bp, Homo sapiens; identical to SEQ ID NO: 63413

SEQ ID NO: 63419 - DNA, 201 bp, Homo sapiens; identical to SEQ ID NO: 63414

SEQ ID NO: 63420 - DNA, 201 bp, Homo sapiens
gccgccgccgccgccgtccctgcgtccttcggtctctgctcccgggacccgggctccgccgcagccagccagcatgtcggggatcaagaagcaaaagacgragaaccagcagaaatccaccaatgtagtctatcaggcccaccatgtgagcaggaataagagagggcaagtggttggaacaaggggtgggttccgaggatg

SEQ ID NO: 63421 - DNA, 201 bp, Homo sapiens
tcattgtgtcttgcagaaaggatggccctgatgcagcagcagcgccagctgtaataaaaaataattcacactatcagactagcaaggcactagaactggaraagaccacagaaaacaaagaatccaaccctttcatcttacaggtgaacaaactgtgatgatgcacatgtatgtgttttgtaagctgtgagcaccgtaaca

SEQ ID NO: 63422 - DNA, 201 bp, Homo sapiens
tttctatttttatgattagatgctttgtattaaattgcttctcaatgatgcattttaatcttttataatgaagtaaaagttgtgtctataattaaaaaaawatatatatatatacacacacacatatacatacaaagtcaaactgaagaccaaatcttagcaggtaaaagcaatattcttatacatttcataataaaatta

SEQ ID NO: 63423 - DNA, 201 bp, Homo sapiens
cccgggaaggagagaatcccccagatggcttcatggcccccaaagcatggaaggtcctgacagattattacaggtccctggagaagaactaagcctttggstccagagtttctttctgaagtgctctttgattaccttttctatttttatgattagatgctttgtattaaattgcttctcaatgatgcattttaatctttt

SEQ ID NO: 63424 - DNA, 201 bp, Homo sapiens
tccagcatgtcttgacaacctgtactcttccaatgtcatttatcagttgtaaaatatatcagattgtgtcctcttctgtacaattgaccaaaaaaaaaaaatttttttttctcactctaaaagaggtgtggctcacatcaagattcttcctgatattttacctcatgctgtacaaagccttaatgttgtaatcatatctta

SEQ ID NO: 63425 - DNA, 201 bp, Homo sapiens
gagaataagttacacacaatggccacagcagtttgtctttaatagtatagtgcctatactcatgtaatcggttactcactactgcctttaaaaaaaaaaamcagcatatttattgaaaacatgagacaggattatagtgccttaaccgatatattttgtgacttaaaaaatacatttaaaactgctcttctgctctagtac

SEQ ID NO: 63426 - DNA, 201 bp, Homo sapiens
gtgaatatattttccagcatgtcttgacaacctgtactcttccaatgtcatttatcagttgtaaaatatatcagattgtgtcctcttctgtacaattgaccaaaaaaaaaaaatttttttttctcactctaaaagaggtgtggctcacatcaagattcttcctgatattttacctcatgctgtacaaagccttaatgttgt

SEQ ID NO: 63427 - DNA, 201 bp, Homo sapiens
caccctctgggcggctggaccaaggatgacgatgtgcctctagactggcggatgaagcagcacgcggctgtgctcgaggaaggggtcctggatcccaagtmaaccattgttgccatctttccgtctcccatgttatatgctggccccacagaggtccagtggcactgcaggtcccggatgattgcgggtgccaatttctac

SEQ ID NO: 63428 - DNA, 201 bp, Homo sapiens
ctagagaggggctacaagcacccggtcctcctactacaccctctgggcggctggaccaaggatgacgatgtgcctctagactggcggatgaagcagcacgyggctgtgctcgaggaaggggtcctggatcccaagtcaaccattgttgccatctttccgtctcccatgttatatgctggccccacagaggtccagtggcac

SEQ ID NO: 63429 - DNA, 201 bp, Homo sapiens; identical to SEQ ID NO: 63420

SEQ ID NO: 63430 - DNA, 201 bp, Homo sapiens; identical to SEQ ID NO: 63421

SEQ ID NO: 63431 - DNA, 201 bp, Homo sapiens; identical to SEQ ID NO: 63422

SEQ ID NO: 63432 - DNA, 201 bp, Homo sapiens; identical to SEQ ID NO: 63423

SEQ ID NO: 63433 - DNA, 201 bp, Homo sapiens; identical to SEQ ID NO: 63425

SEQ ID NO: 63434 - DNA, 201 bp, Homo sapiens
tgaggaagctcgcccgggaaggagagaatcccccagatggcttcatggcccccaaagcatggaaggtcctgacagattattacaggtccctggagaagaactaagcctttggctccagagtttctttctgaagtgctctttgattaccttttctatttttatgattagatgctttgtattaaattgcttctcaatgatgca

SEQ ID NO: 63435 - DNA, 201 bp, Homo sapiens; identical to SEQ ID NO: 63427

SEQ ID NO: 63436 - DNA, 201 bp, Homo sapiens; identical to SEQ ID NO: 63428

SEQ ID NO: 63437 - DNA, 201 bp, Homo sapiens; identical to SEQ ID NO: 63420

SEQ ID NO: 63438 - DNA, 201 bp, Homo sapiens; identical to SEQ ID NO: 63421

SEQ ID NO: 63439 - DNA, 201 bp, Homo sapiens; identical to SEQ ID NO: 63422

SEQ ID NO: 63440 - DNA, 201 bp, Homo sapiens; identical to SEQ ID NO: 63423

SEQ ID NO: 63441 - DNA, 201 bp, Homo sapiens; identical to SEQ ID NO: 63425

SEQ ID NO: 63442 - DNA, 201 bp, Homo sapiens; identical to SEQ ID NO: 63434

SEQ ID NO: 63443 - DNA, 201 bp, Homo sapiens; identical to SEQ ID NO: 63427

SEQ ID NO: 63444 - DNA, 201 bp, Homo sapiens; identical to SEQ ID NO: 63428

SEQ ID NO: 63445 - DNA, 201 bp, Homo sapiens
agtgtcccatttttaataactatattctattattttataaatgtgtaataaaggggtccctctttattggttgttctccacttaatctttggtctttttcrgtaattttaagttttctgggattttttttggtttataaaacttgtgtttagactttatcttgctatggagttttcacacttctatagcacatatcctagt

SEQ ID NO: 63446 - DNA, 201 bp, Homo sapiens
atagttgaattctagattctaagataattcattttgggtaatacttcagagtactggatctagaatcaggcttcctgaatttaaactcaggctccccatthactgtgtgtctgtgagcccagtttctcatctgtaaaatggggcaacagtggcactcatcttaaagggttggataataaaataatgcatgtaaggccctca

SEQ ID NO: 63447 - DNA, 201 bp, Homo sapiens; identical to SEQ ID NO: 54313

SEQ ID NO: 63448 - DNA, 201 bp, Homo sapiens; identical to SEQ ID NO: 54314

SEQ ID NO: 63449 - DNA, 201 bp, Homo sapiens; identical to SEQ ID NO: 63445

SEQ ID NO: 63450 - DNA, 201 bp, Homo sapiens; identical to SEQ ID NO: 63446

SEQ ID NO: 63451 - DNA, 201 bp, Homo sapiens; identical to SEQ ID NO: 54313

SEQ ID NO: 63452 - DNA, 201 bp, Homo sapiens; identical to SEQ ID NO: 54314

SEQ ID NO: 63453 - DNA, 201 bp, Homo sapiens; identical to SEQ ID NO: 63445

SEQ ID NO: 63454 - DNA, 201 bp, Homo sapiens; identical to SEQ ID NO: 63446

SEQ ID NO: 63455 - DNA, 201 bp, Homo sapiens; identical to SEQ ID NO: 54313

SEQ ID NO: 63456 - DNA, 201 bp, Homo sapiens; identical to SEQ ID NO: 54314

SEQ ID NO: 63457 - DNA, 201 bp, Homo sapiens; identical to SEQ ID NO: 63445

SEQ ID NO: 63458 - DNA, 201 bp, Homo sapiens; identical to SEQ ID NO: 63446

SEQ ID NO: 63459 - DNA, 201 bp, Homo sapiens; identical to SEQ ID NO: 54313

SEQ ID NO: 63460 - DNA, 201 bp, Homo sapiens; identical to SEQ ID NO: 54314

SEQ ID NO: 63461 - DNA, 201 bp, Homo sapiens
acctgtttttattcccctgagatctaaacctgtttatggaaaaagatggtctagttctgactggacattagatcctcaagaactggaaagtaaatttaatyccaaaaccaaagctattatactaaatactccacataacccacttggcaaggtgtataacagagaggaactgcaagtaattgctgacctttgcatcaaata

SEQ ID NO: 63462 - DNA, 201 bp, Homo sapiens
tactaaatactccacataacccacttggcaaggtgtataacagagaggaactgcaagtaattgctgacctttgcatcaaatatgacacactctgcatcagygatgaggtttatgaatggcttgtatattctggaaataagcacttaaaaatagctacttttccaggtatgtgggagagaacaataacaataggaagtgctg

SEQ ID NO: 63463 - DNA, 201 bp, Homo sapiens
ttctgctgaacattctgttgttttcctctgccatctagtggcaaaagaaagtaattttcctggttttttgaatggatagccataccttaaaaagcatccarattgcgcagtagtgctagcggcttcgcggttcagtcctcctaactgacagccgccactggtgctgagctgctaggaagcccctgtcggcgagcttgttgg

SEQ ID NO: 63464 - DNA, 201 bp, Homo sapiens
ctccgactcaccggcaaaaaaaaaaatggttgaagcagatcgcccaggaaagctcttcattggtgggcttaatacggaaacaaatgagaaagctcttgaarcagtatttggcaaatatggacgaatagtggaagtactcttgataaaagaccgtgaaaccaacaaatcaagaggatttgcttttgtcacctttgaaagccc

SEQ ID NO: 63465 - DNA, 201 bp, Homo sapiens
tgaactagcagacgtgtggaaaaagaatcagatcttgattcttctgggtttatactggttgtaaaacagaatgatattagaaaatgttttccttgtttaastggtagttgaacatagaacttgggtattatagatcacttttcactttttggaatgttttgtattgaaacttaatacaactttaacatggcaaaaaaaaaa

SEQ ID NO: 63466 - DNA, 201 bp, Homo sapiens
tggaaactattctatcataactacccaaggactactaaaaggaaaaattgtgttaccttttttaaattccctgttaagtcccttccgtaatttttatgttyttgtgaggaaaaaagtaaaacatgtttaattttatttgactttatgacattgcttttcaacaagcaaatgttaaatgtgttaagccttgtagtactagtg

SEQ ID NO: 63467 - DNA, 201 bp, Homo sapiens; identical to SEQ ID NO: 63461

SEQ ID NO: 63468 - DNA, 146 bp, Homo sapiens
aacattttcgggggatctgaccttttttttccagttgaaatgtattaacacaccttccacaatcattttataagagtcagcataacatagtggataagaamtgtgagatgtttaacctctcagtaactcggttctctcattataaa

SEQ ID NO: 63469 - DNA, 201 bp, Homo sapiens; identical to SEQ ID NO: 63462

SEQ ID NO: 63470 - DNA, 194 bp, Homo sapiens
gaacattctgttgttttcctctgccatctagtggcaaaagaaagtaattttcctggttttttgaatggatagccataccttaaaaagcatccarattgcgcagtagtgctagcggcttcgcggttcagtcctcctaactgacagccgccactggtgctgagctgctaggaagcccctgtcggcgagcttgttgg

SEQ ID NO: 63471 - DNA, 201 bp, Homo sapiens; identical to SEQ ID NO: 63464

SEQ ID NO: 63472 - DNA, 201 bp, Homo sapiens; identical to SEQ ID NO: 63465

SEQ ID NO: 63473 - DNA, 201 bp, Homo sapiens; identical to SEQ ID NO: 63466

SEQ ID NO: 63474 - DNA, 201 bp, Homo sapiens; identical to SEQ ID NO: 63461

SEQ ID NO: 63475 - DNA, 201 bp, Homo sapiens; identical to SEQ ID NO: 63462

SEQ ID NO: 63476 - DNA, 201 bp, Homo sapiens
cggataggaacattctgttgttttcctctgccatctagtggcaaaagaaagtaattttcctggttttttgaatggatagccataccttaaaaagcatccarattgcgcagtagtgctagcggcttcgcggttcagtcctcctaactgacagccgccactggtgctgagctgctaggaagcccctgtcggcgagcttgttgg

SEQ ID NO: 63477 - DNA, 201 bp, Homo sapiens; identical to SEQ ID NO: 63464

SEQ ID NO: 63478 - DNA, 201 bp, Homo sapiens; identical to SEQ ID NO: 63465

SEQ ID NO: 63479 - DNA, 201 bp, Homo sapiens; identical to SEQ ID NO: 63466

SEQ ID NO: 63480 - DNA, 201 bp, Homo sapiens
gtgggagttgggcgactggcagagcagcgggcacgacgggctctggcaggcctgatgccagaggtccaggtggaagggctcctgcatccctctccccgtawcccacaggccaacaagggctgggaggcagtggccaaggaaagattgaatgagctggggctgctgccactgctgttgaaatgagtgcccttggggccttgc

SEQ ID NO: 63481 - DNA, 201 bp, Homo sapiens
tgcagtgcctgtcatgtgacagcggcatggacatatgccccaggctttcctgctggggtccatccatgagcctgcaggtgccctcatggagccccagcccwgccctggaagcttggctgagagcttcctggaggaggagcttcggctcaatgctgagctgagccagctgcagttttcggagcctgtgggcatcatctacaa

SEQ ID NO: 63482 - DNA, 201 bp, Homo sapiens
tttcttcctcatcaagagactgctgcagtgcctgtcatgtgacagcggcatggacatatgccccaggctttcctgctggggtccatccatgagcctgcagktgccctcatggagccccagccctgccctggaagcttggctgagagcttcctggaggaggagcttcggctcaatgctgagctgagccagctgcagttttcg

SEQ ID NO: 63483 - DNA, 201 bp, Homo sapiens
ctgccactgctgttgaaatgagtgcccttggggccttgcatgggacacattcaagacctcgaagtcattcttggccaagcagatgacaacacatctcctgkactggagcaaaaggtccttctgtgcaccctggtcgctgggaaacgtattctttgatctgttgaactgtcttccaacctgccatggcagttttgacactac

SEQ ID NO: 63484 - DNA, 201 bp, Homo sapiens
ccatggcagttttgacactactcctgtttgccctcctgattcctgctttctttaccttttaacattgcccctttcaggggaccccactttgtagggaatcygcagaaggtgtgcttttgcacttgcagactgctctacctcagtgtttccttgggagactttattcagctgagagtgccctagacagtaacttctaaggtc

SEQ ID NO: 63485 - DNA, 201 bp, Homo sapiens
tgggactggagtgcccacagtcagaagtgagtggtgcccgattctggggctttttccggaacctctgtggacagcctgaggtcttcttccatcactgtttygtccacaatctatgccctctgcttttcctggctcccagcgggcgcaaccttactcctgctgagctgcctgccaagcagcgagaacagcttcttgggatct

SEQ ID NO: 63486 - DNA, 201 bp, Homo sapiens
caggggaccccactttgtagggaatctgcagaaggtgtgcttttgcacttgcagactgctctacctcagtgtttccttgggagactttattcagctgagartgccctagacagtaacttctaaggtcacgtttactatttcagaggaaatatcttgccaggatacctacccatccttatagaacagttacctttagctgac

SEQ ID NO: 63487 - DNA, 201 bp, Homo sapiens
attcagctgagagtgccctagacagtaacttctaaggtcacgtttactatttcagaggaaatatcttgccaggatacctacccatccttatagaacagttrcctttagctgacccctttcctcacagggaccaagacaaagcatgggacatgaaattaagagtgaacttcttatgggaggctgcagctggatcagaggaaa

SEQ ID NO: 63488 - DNA, 201 bp, Homo sapiens
ttacagaaagcctggcctacattttactctttttggatttcttcctcatcaagagactgctgcagtgcctgtcatgtgacagcggcatggacatatgcccyaggctttcctgctggggtccatccatgagcctgcaggtgccctcatggagccccagccctgccctggaagcttggctgagagcttcctggaggaggagct

SEQ ID NO: 63489 - DNA, 201 bp, Homo sapiens
cgattcttctgcctcagcctcccgacagattatgagcttacagaaagcctggcctacattttactctttttggatttcttcctcatcaagagactgctgcrgtgcctgtcatgtgacagcggcatggacatatgccccaggctttcctgctggggtccatccatgagcctgcaggtgccctcatggagccccagccctgcc

SEQ ID NO: 63490 - DNA, 201 bp, Homo sapiens; identical to SEQ ID NO: 63480

SEQ ID NO: 63491 - DNA, 201 bp, Homo sapiens; identical to SEQ ID NO: 63481

SEQ ID NO: 63492 - DNA, 201 bp, Homo sapiens; identical to SEQ ID NO: 63482

SEQ ID NO: 63493 - DNA, 201 bp, Homo sapiens; identical to SEQ ID NO: 63483

SEQ ID NO: 63494 - DNA, 201 bp, Homo sapiens; identical to SEQ ID NO: 63484

SEQ ID NO: 63495 - DNA, 201 bp, Homo sapiens; identical to SEQ ID NO: 63485

SEQ ID NO: 63496 - DNA, 201 bp, Homo sapiens; identical to SEQ ID NO: 63486

SEQ ID NO: 63497 - DNA, 201 bp, Homo sapiens; identical to SEQ ID NO: 63487

SEQ ID NO: 63498 - DNA, 201 bp, Homo sapiens; identical to SEQ ID NO: 63488

SEQ ID NO: 63499 - DNA, 201 bp, Homo sapiens
tcttctgcctcagcctcccgagtagcagattatgagcttacagaaagcctggcctacattttactctttttggatttcttcctcatcaagagactgctgcrgtgcctgtcatgtgacagcggcatggacatatgccccaggctttcctgctggggtccatccatgagcctgcaggtgccctcatggagccccagccctgcc

SEQ ID NO: 63500 - DNA, 201 bp, Homo sapiens; identical to SEQ ID NO: 63480

SEQ ID NO: 63501 - DNA, 201 bp, Homo sapiens; identical to SEQ ID NO: 63481

SEQ ID NO: 63502 - DNA, 201 bp, Homo sapiens; identical to SEQ ID NO: 63482

SEQ ID NO: 63503 - DNA, 201 bp, Homo sapiens; identical to SEQ ID NO: 63483

SEQ ID NO: 63504 - DNA, 201 bp, Homo sapiens; identical to SEQ ID NO: 63484

SEQ ID NO: 63505 - DNA, 201 bp, Homo sapiens; identical to SEQ ID NO: 63485

SEQ ID NO: 63506 - DNA, 201 bp, Homo sapiens; identical to SEQ ID NO: 63486

SEQ ID NO: 63507 - DNA, 201 bp, Homo sapiens; identical to SEQ ID NO: 63487

SEQ ID NO: 63508 - DNA, 201 bp, Homo sapiens; identical to SEQ ID NO: 63488

SEQ ID NO: 63509 - DNA, 176 bp, Homo sapiens
cagattatgagcttacagaaagcctggcctacattttactctttttggatttcttcctcatcaagagactgctgcrgtgcctgtcatgtgacagcggcatggacatatgccccaggctttcctgctggggtccatccatgagcctgcaggtgccctcatggagccccagccctgcc

SEQ ID NO: 63510 - DNA, 201 bp, Homo sapiens; identical to SEQ ID NO: 63480

SEQ ID NO: 63511 - DNA, 201 bp, Homo sapiens
gacattgctgagcaggtgacagcggcatggacatatgccccaggctttcctgctggggtccatccatgagcctgcaggtgccctcatggagccccagcccwgccctggaagcttggctgagagcttcctggaggaggagcttcggctcaatgctgagctgagccagctgcagttttcggagcctgtgggcatcatctacaa

SEQ ID NO: 63512 - DNA, 201 bp, Homo sapiens
aaacaaaagtgaaaaagaagatggacattgctgagcaggtgacagcggcatggacatatgccccaggctttcctgctggggtccatccatgagcctgcagktgccctcatggagccccagccctgccctggaagcttggctgagagcttcctggaggaggagcttcggctcaatgctgagctgagccagctgcagttttcg

SEQ ID NO: 63513 - DNA, 201 bp, Homo sapiens; identical to SEQ ID NO: 63483

SEQ ID NO: 63514 - DNA, 201 bp, Homo sapiens; identical to SEQ ID NO: 63484

SEQ ID NO: 63515 - DNA, 201 bp, Homo sapiens; identical to SEQ ID NO: 63485

SEQ ID NO: 63516 - DNA, 201 bp, Homo sapiens; identical to SEQ ID NO: 63486

SEQ ID NO: 63517 - DNA, 201 bp, Homo sapiens; identical to SEQ ID NO: 63487

SEQ ID NO: 63518 - DNA, 201 bp, Homo sapiens
ggcatgagccactgtgcccagcacagaaggtagttttaaacaaaagtgaaaaagaagatggacattgctgagcaggtgacagcggcatggacatatgcccyaggctttcctgctggggtccatccatgagcctgcaggtgccctcatggagccccagccctgccctggaagcttggctgagagcttcctggaggaggagct

SEQ ID NO: 63519 - DNA, 201 bp, Homo sapiens
gccagcgggcgcccccggaggttttcagattatgagcttacagaaagcctggcctacattttactctttttggatttcttcctcatcaagagactgctgcrgtgcctgtcatatggggtctcattatgtcagccaggctggtcttgaactcctggcctcaagcaattcttctgccttggcctctcaaagtgctgggattac

SEQ ID NO: 63520 - DNA, 201 bp, Homo sapiens; identical to SEQ ID NO: 63480

SEQ ID NO: 63521 - DNA, 201 bp, Homo sapiens
tgcccagcacagaaggtgacagcggcatggacatatgccccaggctttcctgctggggtccatccatgagcctgcaggtgccctcatggagccccagcccwgccctggaagcttggctgagagcttcctggaggaggagcttcggctcaatgctgagctgagccagctgcagttttcggagcctgtgggcatcatctacaa

SEQ ID NO: 63522 - DNA, 201 bp, Homo sapiens
gggattacaggcatgagccactgtgcccagcacagaaggtgacagcggcatggacatatgccccaggctttcctgctggggtccatccatgagcctgcagktgccctcatggagccccagccctgccctggaagcttggctgagagcttcctggaggaggagcttcggctcaatgctgagctgagccagctgcagttttcg

SEQ ID NO: 63523 - DNA, 201 bp, Homo sapiens; identical to SEQ ID NO: 63483

SEQ ID NO: 63524 - DNA, 201 bp, Homo sapiens; identical to SEQ ID NO: 63484

SEQ ID NO: 63525 - DNA, 201 bp, Homo sapiens; identical to SEQ ID NO: 63485

SEQ ID NO: 63526 - DNA, 201 bp, Homo sapiens; identical to SEQ ID NO: 63486

SEQ ID NO: 63527 - DNA, 201 bp, Homo sapiens; identical to SEQ ID NO: 63487

SEQ ID NO: 63528 - DNA, 201 bp, Homo sapiens
ctcaagcaattcttctgccttggcctctcaaagtgctgggattacaggcatgagccactgtgcccagcacagaaggtgacagcggcatggacatatgcccyaggctttcctgctggggtccatccatgagcctgcaggtgccctcatggagccccagccctgccctggaagcttggctgagagcttcctggaggaggagct

SEQ ID NO: 63529 - DNA, 201 bp, Homo sapiens; identical to SEQ ID NO: 63519

SEQ ID NO: 63530 - DNA, 201 bp, Homo sapiens
aggagtgcctccttggtgacagcggcatggacatatgccccaggctttcctgctggggtccatccatgagcctgcaggtgccctcatggagccccagcccwgccctggaagcttggctgagagcttcctggaggaggagcttcggctcaatgctgagctgagccagctgcagttttcggagcctgtgggcatcatctacaa

SEQ ID NO: 63531 - DNA, 201 bp, Homo sapiens
atagaagtggagaaggatccatcaggagtgcctccttggtgacagcggcatggacatatgccccaggctttcctgctggggtccatccatgagcctgcagktgccctcatggagccccagccctgccctggaagcttggctgagagcttcctggaggaggagcttcggctcaatgctgagctgagccagctgcagttttcg

SEQ ID NO: 63532 - DNA, 201 bp, Homo sapiens
gcaaagtgggcagctaagccttgagtgaactcaggatatagaagtggagaaggatccatcaggagtgcctccttggtgacagcggcatggacatatgcccyaggctttcctgctggggtccatccatgagcctgcaggtgccctcatggagccccagccctgccctggaagcttggctgagagcttcctggaggaggagct

SEQ ID NO: 63533 - DNA, 201 bp, Homo sapiens
tgagttcttatcttggagaagtcactcctgacccaggcagaaagttgagaggaaggaatgacaatggtccttgtcgcatgggaggcacacatatgatgggyacagacccagagtctggaaaacaagcagagtgcaaagtgggcagctaagccttgagtgaactcaggatatagaagtggagaaggatccatcaggagtgcc

SEQ ID NO: 63534 - DNA, 181 bp, Homo sapiens
tagcgccgggggttgggtttggggtgggggaaaggaaccggaaacgggatggggagctggaccaggctagggtgagaaaayaggtttatcgagctgttgtgtcaaccttgagttcttatcttggagaagtcactcctgacccaggcagaaagttgagaggaaggaatgacaatggtccttg

SEQ ID NO: 63535 - DNA, 201 bp, Homo sapiens; identical to SEQ ID NO: 63480

SEQ ID NO: 63536 - DNA, 201 bp, Homo sapiens; identical to SEQ ID NO: 63481

SEQ ID NO: 63537 - DNA, 201 bp, Homo sapiens; identical to SEQ ID NO: 63482

SEQ ID NO: 63538 - DNA, 201 bp, Homo sapiens; identical to SEQ ID NO: 63483

SEQ ID NO: 63539 - DNA, 201 bp, Homo sapiens; identical to SEQ ID NO: 63484

SEQ ID NO: 63540 - DNA, 201 bp, Homo sapiens; identical to SEQ ID NO: 63485

SEQ ID NO: 63541 - DNA, 201 bp, Homo sapiens; identical to SEQ ID NO: 63486

SEQ ID NO: 63542 - DNA, 201 bp, Homo sapiens; identical to SEQ ID NO: 63487

SEQ ID NO: 63543 - DNA, 201 bp, Homo sapiens; identical to SEQ ID NO: 63488

SEQ ID NO: 63544 - DNA, 201 bp, Homo sapiens
cggccggagccagcgggcgcccccggagattatgagcttacagaaagcctggcctacattttactctttttggatttcttcctcatcaagagactgctgcrgtgcctgtcatgtgacagcggcatggacatatgccccaggctttcctgctggggtccatccatgagcctgcaggtgccctcatggagccccagccctgcc

SEQ ID NO: 63545 - DNA, 148 bp, Homo sapiens
gggtcggcgctcctgcctccctgcagggagctgcttatgggacaccgmttcctgcgcggcctcttaacgctgctgctgccgccgccacccctgtatacccggcaccgcatgctcggtccagagtccgtcccgcccccaaaacgatccc

SEQ ID NO: 63546 - DNA, 147 bp, Homo sapiens
gggtcggcgctcctgcctccctgcagggagctgcttatgggacaccrcttcctgcgcggcctcttaacgctgctgctgccgccgccacccctgtatacccggcaccgcatgctcggtccagagtccgtcccgcccccaaaacgatcc

SEQ ID NO: 63547 - DNA, 201 bp, Homo sapiens
gaaaggtgcatgtccctggaaggagcatctctaccacctggaatctgggctgtcccctccagtggccatcttctttgttatctacactgaccaggctggamagtggcgaatacagtgtgtgcccaaggagccccactcattccaaagccggctgcccctgccagagccatggcggggtcttcgggacgaggccctggacca

SEQ ID NO: 63548 - DNA, 201 bp, Homo sapiens
cggctgcccctgccagagccatggcggggtcttcgggacgaggccctggaccaggtcagtgggatccctggctgcatcttcgtccatgcaagcggcttcaytggcggtcaccgcacccgagagggtgccttgagcatggcccgtgccaccttggcccagcgctcatacctcccacaaatctcctagtctaataaaaccttc

SEQ ID NO: 63549 - DNA, 201 bp, Homo sapiens
tgccagagccatggcggggtcttcgggacgaggccctggaccaggtcagtgggatccctggctgcatcttcgtccatgcaagcggcttcattggcggtcamcgcacccgagagggtgccttgagcatggcccgtgccaccttggcccagcgctcatacctcccacaaatctcctagtctaataaaaccttccatctcatac

SEQ ID NO: 63550 - DNA, 201 bp, Homo sapiens
ccagagccatggcggggtcttcgggacgaggccctggaccaggtcagtgggatccctggctgcatcttcgtccatgcaagcggcttcattggcggtcaccvcacccgagagggtgccttgagcatggcccgtgccaccttggcccagcgctcatacctcccacaaatctcctagtctaataaaaccttccatctcatactg

SEQ ID NO: 63551 - DNA, 148 bp, Homo sapiens; identical to SEQ ID NO: 63545

SEQ ID NO: 63552 - DNA, 147 bp, Homo sapiens; identical to SEQ ID NO: 63546

SEQ ID NO: 63553 - DNA, 201 bp, Homo sapiens; identical to SEQ ID NO: 63547

SEQ ID NO: 63554 - DNA, 201 bp, Homo sapiens; identical to SEQ ID NO: 63548

SEQ ID NO: 63555 - DNA, 201 bp, Homo sapiens; identical to SEQ ID NO: 63549

SEQ ID NO: 63556 - DNA, 201 bp, Homo sapiens; identical to SEQ ID NO: 63550

SEQ ID NO: 63557 - DNA, 201 bp, Homo sapiens
ctggaacaaccctccccttatttaaaaaaattccatagcaagtaaccatcagggctggagctccttccagtttttgaatcttgaacacaggtttcccccamcagaacgtcaagccctgtgacccaggggaggaaggaggggagaggatgggctagtagcgagagaggcgacacatgtcacactggcaggccctggccgtga

SEQ ID NO: 63558 - DNA, 201 bp, Homo sapiens
attcaagaactgcttgctttatttaggggtaagggcaaagagggaagtaaaatgatgaaagattggtttagaagggccaggcagaggcagggaagaagcaraaactcccctcttctcaggtgacagtcacaaaatcttacaaaggatcaaagctggaacaaccctccccttatttaaaaaaattccatagcaagtaaccat

SEQ ID NO: 63559 - DNA, 201 bp, Homo sapiens
agagaaattcaagaactgcttgctttatttaggggtaagggcaaagagggaagtaaaatgatgaaagattggtttagaagggccaggcagaggcagggaaraagcagaaactcccctcttctcaggtgacagtcacaaaatcttacaaaggatcaaagctggaacaaccctccccttatttaaaaaaattccatagcaagt

SEQ ID NO: 63560 - DNA, 201 bp, Homo sapiens
tggctgggggtagacttaataaagagagaaattcaagaactgcttgctttatttaggggtaagggcaaagagggaagtaaaatgatgaaagattggtttaraagggccaggcagaggcagggaagaagcagaaactcccctcttctcaggtgacagtcacaaaatcttacaaaggatcaaagctggaacaaccctcccctt

SEQ ID NO: 63561 - DNA, 201 bp, Homo sapiens
caaccctccccttatttaaaaaaattccatagcaagtaaccatcagggctggagctccttccagtttttgaatcttgaacacaggtttcccccaccagaaygtcaagccctgtgacccaggggaggaaggaggggagaggatgggctagtagcgagagaggcgacacatgtcacactggcaggccctggccgtgaagatct

SEQ ID NO: 63562 - DNA, 201 bp, Homo sapiens; identical to SEQ ID NO: 63557

SEQ ID NO: 63563 - DNA, 201 bp, Homo sapiens; identical to SEQ ID NO: 63558

SEQ ID NO: 63564 - DNA, 201 bp, Homo sapiens; identical to SEQ ID NO: 63559

SEQ ID NO: 63565 - DNA, 201 bp, Homo sapiens; identical to SEQ ID NO: 63560

SEQ ID NO: 63566 - DNA, 201 bp, Homo sapiens; identical to SEQ ID NO: 63561

SEQ ID NO: 63567 - DNA, 201 bp, Homo sapiens
tttcacctacctacctcagctcccacaaacacgagaagttccagcaagttcgccacttccggttctcctggctatccaatagcatcgagtggagcatcccsggaagtgaggcagcggaggacgacctttttccggttccggcctggcgagagtttgtgcggcgacatgaaactgcttacccacaatctgctgagctcgcat

SEQ ID NO: 63568 - DNA, 201 bp, Homo sapiens
cccgacaggtctttcacctacctacctcagctcccacaaacacgagaagttccagcaagttcgccacttccggttctcctggctatccaatagcatcgagwggagcatccccggaagtgaggcagcggaggacgacctttttccggttccggcctggcgagagtttgtgcggcgacatgaaactgcttacccacaatctgc

SEQ ID NO: 63569 - DNA, 201 bp, Homo sapiens
ctgtacagccaagggctctgggccctggcttgccccatgtccctgcgcctccctggccaaacccaaaaataaatatagtgttattgctctgcagggcataraggcagtgctctcctaccccctgaggaggctcgttgggagctgatggggaagccctggccaccccaggggtccaggggctggagtctgcttggagttatt

SEQ ID NO: 63570 - DNA, 201 bp, Homo sapiens
aatttgtggcaaaaaaaagctgggcgtgcgccgtaggaacctcctgctgagacgcttccggtagcggcgcgtgacccgacaggtctttcacctacctacckcagctcccacaaacacgagaagttccagcaagttcgccacttccggttctcctggctatccaatagcatcgagtggagcatccccggaagtgaggcagcg

SEQ ID NO: 63571 - DNA, 201 bp, Homo sapiens
tacctacctcagctcccacaaacacgagaagttccagcaagttcgccacttccggttctcctggctatccaatagcatcgagtggagcatccccggaagtkaggcagcggaggacgacctttttccggttccggcctggcgagagtttgtgcggcgacatgaaactgcttacccacaatctgctgagctcgcatgtgcggg

SEQ ID NO: 63572 - DNA, 201 bp, Homo sapiens
gatagggcggtatttctgccccttaaccgaaagtgggatacagaggacgacggtgttaggcgcctgtgtaggagtaaaatgtgtttattttgcattcaacragagctcctgcattgcagctattttgcatatgatttgcatcttacgaagaatttgtggcaaaaaaaagctgggcgtgcgccgtaggaacctcctgctgag

SEQ ID NO: 63573 - DNA, 201 bp, Homo sapiens
tttgagctcggtattatatatttttttctcattaaaggtttaaaaccaaaagcggtttctctttgcagcaaatatacattaaaatagagtctctgtacagycaagggctctgggccctggcttgccccatgtccctgcgcctccctggccaaacccaaaaataaatatagtgttattgctctgcagggcatagaggcagtg

SEQ ID NO: 63574 - DNA, 201 bp, Homo sapiens
tccggttctcctggctatccaatagcatcgagtggagcatccccggaagtgaggcagcggaggacgacctttttccggttccggcctggcgagagtttgtkcggcgacatgaaactgcttacccacaatctgctgagctcgcatgtgcggggggtggggtcccgtggcttccccctgcgcctccaggccaccgaggtccgt

SEQ ID NO: 63575 - DNA, 201 bp, Homo sapiens; identical to SEQ ID NO: 63567

SEQ ID NO: 63576 - DNA, 201 bp, Homo sapiens; identical to SEQ ID NO: 63568

SEQ ID NO: 63577 - DNA, 201 bp, Homo sapiens; identical to SEQ ID NO: 63569

SEQ ID NO: 63578 - DNA, 201 bp, Homo sapiens; identical to SEQ ID NO: 63570

SEQ ID NO: 63579 - DNA, 201 bp, Homo sapiens; identical to SEQ ID NO: 63571

SEQ ID NO: 63580 - DNA, 201 bp, Homo sapiens; identical to SEQ ID NO: 63572

SEQ ID NO: 63581 - DNA, 201 bp, Homo sapiens; identical to SEQ ID NO: 63573

SEQ ID NO: 63582 - DNA, 115 bp, Homo sapiens
gggaggagagggcgtggggcctgttcccaggggctgatggcattgccctggccctgccagcaggctgtggcactgcccagaccccagctccgccccagccmttggggctgacccc

SEQ ID NO: 63583 - DNA, 201 bp, Homo sapiens; identical to SEQ ID NO: 63574

SEQ ID NO: 63584 - DNA, 201 bp, Homo sapiens; identical to SEQ ID NO: 63567

SEQ ID NO: 63585 - DNA, 201 bp, Homo sapiens; identical to SEQ ID NO: 63568

SEQ ID NO: 63586 - DNA, 201 bp, Homo sapiens; identical to SEQ ID NO: 63569

SEQ ID NO: 63587 - DNA, 201 bp, Homo sapiens; identical to SEQ ID NO: 63570

SEQ ID NO: 63588 - DNA, 201 bp, Homo sapiens; identical to SEQ ID NO: 63571

SEQ ID NO: 63589 - DNA, 201 bp, Homo sapiens; identical to SEQ ID NO: 63572

SEQ ID NO: 63590 - DNA, 201 bp, Homo sapiens; identical to SEQ ID NO: 63573

SEQ ID NO: 63591 - DNA, 115 bp, Homo sapiens; identical to SEQ ID NO: 63582

SEQ ID NO: 63592 - DNA, 201 bp, Homo sapiens; identical to SEQ ID NO: 63574

SEQ ID NO: 63593 - DNA, 201 bp, Homo sapiens
caagttgaagtttgctgcctacctagagagggaatacaaagtccacatcaaccccaactcactcttcgacatccaggtgaagcggattcacgaatataaaygacagctcctcaactgcctccatgtcatcaccctgtacaaccgcatcaagagggagcccaataagttttttgtgcctcggactgtgatgattggagggaa

SEQ ID NO: 63594 - DNA, 201 bp, Homo sapiens
ctgccgcggcacctccagatcatctacgagatcaaccagcgcttcctcaaccgggtggcggccgcattcccaggggacgtagaccggctgcggcgcatgtygctggtggaggagggcgcagtgaagcgcatcaacatggcacacctgtgcatcgcggggtcgcacgccgtcaacggcgtggcgcgcatccactccgagatc

SEQ ID NO: 63595 - DNA, 201 bp, Homo sapiens
gcgtggcctggccggcgtggagaacgtgactgagctgaaaaagaacttcaaccggcacctgcatttcacactcgtaaaggaccgcaatgtggccaccccaygagactactactttgctctggcccataccgtgcgcgaccacctcgtggggcgctggatccgcacgcagcagcactactatgagaaggaccccaagaggat

SEQ ID NO: 63596 - DNA, 201 bp, Homo sapiens
actggccgagaaagtgatcccagctgcagacctctctgagcagatctccactgcgggcactgaagcctcaggcaccggcaacatgaagttcatgctcaacvgggctctgaccattggcaccatggacggggccaatgtggagatggcagaagaggcgggagaggaaaacttcttcatctttggcatgcgggtggaggatgt

SEQ ID NO: 63597 - DNA, 201 bp, Homo sapiens
ggcactgaagcctcaggcaccggcaacatgaagttcatgctcaacggggctctgaccattggcaccatggacggggccaatgtggagatggcagaagaggygggagaggaaaacttcttcatctttggcatgcgggtggaggatgtggataagcttgaccaaagagggtacaatgcccaggagtactacgatcgcattcct

SEQ ID NO: 63598 - DNA, 201 bp, Homo sapiens
agaagaccatcttcaaagacttctatgagctggagcctcataagttccagaataagaccaacggcatcacccctcggcgctggctggttctgtgtaacccygggctggcagaggtcattgctgagcgcatcggggaggacttcatctctgacctggaccagctgcgcaaactgctctcctttgtggatgatgaagctttca

SEQ ID NO: 63599 - DNA, 201 bp, Homo sapiens
gcttgaccaaagagggtacaatgcccaggagtactacgatcgcattcctgagcttcggcaggtcattgagcagctgagcagtggcttcttctcccccaaayagcccgacctgttcaaggacattgtcaatatgctcatgcaccatgaccggtttaaagtcttcgcagattatgaagactacattaaatgccaggagaaagt

SEQ ID NO: 63600 - DNA, 201 bp, Homo sapiens
gatcatcagactcgtcacagccatcggggatgtggtcaaccatgacccggcagtgggtgaccgcctccgtgtcatcttcctggagaactaccgagtctcastggccgagaaagtgatcccagctgcagacctctctgagcagatctccactgcgggcactgaagcctcaggcaccggcaacatgaagttcatgctcaacgg

SEQ ID NO: 63601 - DNA, 201 bp, Homo sapiens
gcactgaagcctcaggcaccggcaacatgaagttcatgctcaacggggctctgaccattggcaccatggacggggccaatgtggagatggcagaagaggcrggagaggaaaacttcttcatctttggcatgcgggtggaggatgtggataagcttgaccaaagagggtacaatgcccaggagtactacgatcgcattcctg

SEQ ID NO: 63602 - DNA, 201 bp, Homo sapiens
tcgctatgagtttgggatttttaaccagaagatctccgggggctggcagatggaggaggccgatgactggcttcgctacggcaacccctgggagaaggccyggcccgagttcacgctacctgtgcacttctacggccatgtggagcacaccagccagggtgccaagtgggtggacacacaggtggtactggccatgcccta

SEQ ID NO: 63603 - DNA, 201 bp, Homo sapiens
atctactacctgtctttagagttctatatgggacggacgctacagaacaccatggtgaacctggccttagagaatgcctgtgacgaggccacctaccagcygggcctggacatggaggagctggaggaaattgaggaggatgcggggctgggcaacgggggcctgggccggctggcagcctgctttcttgactccatggca

SEQ ID NO: 63604 - DNA, 201 bp, Homo sapiens
ctcactggccgagaaagtgatcccagctgcagacctctctgagcagatctccactgcgggcactgaagcctcaggcaccggcaacatgaagttcatgctcwacggggctctgaccattggcaccatggacggggccaatgtggagatggcagaagaggcgggagaggaaaacttcttcatctttggcatgcgggtggagga

SEQ ID NO: 63605 - DNA, 201 bp, Homo sapiens
aatgtcggtggctacatccaggctgtgttggaccgaaacctggcggagaacatctctcgtgtcctgtaccccaatgataatttcttcgaagggaaggagcygcggctgaagcaggagtatttcgtggtggctgccaccctccaggacatcatccgtcgcttcaagtcttccaagttcggctgccgtgatcccgtgcgcacg

SEQ ID NO: 63606 - DNA, 201 bp, Homo sapiens
gccttcccagataaggtggccatccagctcaatgacacccacccctccctggccatccccgagctgatgaggatcctggtggacctggaacggatggactrggacaaggcgtgggatgtgacagtgaggacctgtgcctacaccaaccacacggtgctgcccgaggccctggagcgctggccggtgcacctcttggagacg

SEQ ID NO: 63607 - DNA, 201 bp, Homo sapiens
caagttcggctgccgtgatcccgtgcgcacgaacttcgatgccttcccagataaggtggccatccagctcaatgacacccacccctccctggccatccccragctgatgaggatcctggtggacctggaacggatggactgggacaaggcgtgggatgtgacagtgaggacctgtgcctacaccaaccacacggtgctgcc

SEQ ID NO: 63608 - DNA, 201 bp, Homo sapiens
ctccgggggctggcagatggaggaggccgatgactggcttcgctacggcaacccctgggagaaggcccggcccgagttcacgctacctgtgcacttctacrgccatgtggagcacaccagccagggtgccaagtgggtggacacacaggtggtactggccatgccctacgatacgcccgtgcctggctatcgcaacaatgt

SEQ ID NO: 63609 - DNA, 201 bp, Homo sapiens
gaggacttcatctctgacctggaccagctgcgcaaactgctctcctttgtggatgatgaagctttcattcgggatgtggccaaagtgaagcaggaaaacamgttgaagtttgctgcctacctagagagggaatacaaagtccacatcaaccccaactcactcttcgacatccaggtgaagcggattcacgaatataaacga

SEQ ID NO: 63610 - DNA, 201 bp, Homo sapiens
cagactcgtcacagccatcggggatgtggtcaaccatgacccggcagtgggtgaccgcctccgtgtcatcttcctggagaactaccgagtctcactggccragaaagtgatcccagctgcagacctctctgagcagatctccactgcgggcactgaagcctcaggcaccggcaacatgaagttcatgctcaacggggctct

SEQ ID NO: 63611 - DNA, 201 bp, Homo sapiens
atcggggatgtggtcaaccatgacccggcagtgggtgaccgcctccgtgtcatcttcctggagaactaccgagtctcactggccgagaaagtgatcccagmtgcagacctctctgagcagatctccactgcgggcactgaagcctcaggcaccggcaacatgaagttcatgctcaacggggctctgaccattggcaccatg

SEQ ID NO: 63612 - DNA, 201 bp, Homo sapiens
tatgctcatgcaccatgaccggtttaaagtcttcgcagattatgaagactacattaaatgccaggagaaagtcagcgccttgtacaagaacccaagagagyggacgcggatggtgatccggaacatagccacctctggcaagttctccagtgaccgcaccattgcccagtatgcccgggagatctggggtgtggagccttc

SEQ ID NO: 63613 - DNA, 201 bp, Homo sapiens
ggcgtggcgcgcatccactccgagatcctcaagaagaccatcttcaaagacttctatgagctggagcctcataagttccagaataagaccaacggcatcamccctcggcgctggctggttctgtgtaaccccgggctggcagaggtcattgctgagcgcatcggggaggacttcatctctgacctggaccagctgcgcaaa

SEQ ID NO: 63614 - DNA, 201 bp, Homo sapiens
cctatggctacgggattcgctatgagtttgggatttttaaccagaagatctccgggggctggcagatggaggaggccgatgactggcttcgctacggcaamccctgggagaaggcccggcccgagttcacgctacctgtgcacttctacggccatgtggagcacaccagccagggtgccaagtgggtggacacacaggtgg

SEQ ID NO: 63615 - DNA, 201 bp, Homo sapiens
ccggcgtggagaacgtgactgagctgaaaaagaacttcaaccggcacctgcatttcacactcgtaaaggaccgcaatgtggccaccccacgagactactastttgctctggcccataccgtgcgcgaccacctcgtggggcgctggatccgcacgcagcagcactactatgagaaggaccccaagaggatctactacctgt

SEQ ID NO: 63616 - DNA, 201 bp, Homo sapiens
catcggggaggacttcatctctgacctggaccagctgcgcaaactgctctcctttgtggatgatgaagctttcattcgggatgtggccaaagtgaagcagkaaaacaagttgaagtttgctgcctacctagagagggaatacaaagtccacatcaaccccaactcactcttcgacatccaggtgaagcggattcacgaata

SEQ ID NO: 63617 - DNA, 201 bp, Homo sapiens
ggccgagaaagtgatcccagctgcagacctctctgagcagatctccactgcgggcactgaagcctcaggcaccggcaacatgaagttcatgctcaacgggsctctgaccattggcaccatggacggggccaatgtggagatggcagaagaggcgggagaggaaaacttcttcatctttggcatgcgggtggaggatgtgga

SEQ ID NO: 63618 - DNA, 201 bp, Homo sapiens
cttccgtcaggggacactgacttggctcctgcaccacagcctgcagggggtcctggttccttttgccacaacacatggcctcccatcctggttcagccacygacagacagctccccaatccagcactctgcctgctccttcttgtatccaaccctccaaaaggcagggacaagggacagaagaccatgtgcaaggcctgga

SEQ ID NO: 63619 - DNA, 201 bp, Homo sapiens
aaggcgtgggatgtgacagtgaggacctgtgcctacaccaaccacacggtgctgcccgaggccctggagcgctggccggtgcacctcttggagacgctgcygccgcggcacctccagatcatctacgagatcaaccagcgcttcctcaaccgggtggcggccgcattcccaggggacgtagaccggctgcggcgcatgtcg

SEQ ID NO: 63620 - DNA, 201 bp, Homo sapiens
gcatccctctccaaaaggtcacttcagggctccttgagggacagcaacagggggagcctagagctgctcagcttcggtgggggtggagtgagggctgtggmcctgcctcacacaacctccctcacaccacccctgcaatgcagggtcgtgggcccctttctcaaagacatccagtggcctctgctagttgcacctcttccg

SEQ ID NO: 63621 - DNA, 201 bp, Homo sapiens
tcacggccagggcctgccagtgtgacatgtgtcgcctctctcgctactagcccatcctctcccctccttcctcccctgggtcacagggcttgacgttctgktgggggaaacctgtgttcaagattcaaaaactggaaggagctccagccctgatggttacttgctatggaatttttttaaataaggggagggttgttccag

SEQ ID NO: 63622 - DNA, 201 bp, Homo sapiens
atggttacttgctatggaatttttttaaataaggggagggttgttccagctttgatcctttgtaagattttgtgactgtcacctgagaagaggggagtttytgcttcttccctgcctctgcctggcccttctaaaccaatctttcatcattttacttccctctttgcccttacccctaaataaagcaagcagttcttgaat

SEQ ID NO: 63623 - DNA, 201 bp, Homo sapiens
acttgctatggaatttttttaaataaggggagggttgttccagctttgatcctttgtaagattttgtgactgtcacctgagaagaggggagtttctgcttyttccctgcctctgcctggcccttctaaaccaatctttcatcattttacttccctctttgcccttacccctaaataaagcaagcagttcttgaatttctct

SEQ ID NO: 63624 - DNA, 201 bp, Homo sapiens
aaggggagggttgttccagctttgatcctttgtaagattttgtgactgtcacctgagaagaggggagtttctgcttcttccctgcctctgcctggcccttytaaaccaatctttcatcattttacttccctctttgcccttacccctaaataaagcaagcagttcttgaatttctctctttattaagtctacccccagcca

SEQ ID NO: 63625 - DNA, 201 bp, Homo sapiens
agatcttcacggccagggcctgccagtgtgacatgtgtcgcctctctcgctactagcccatcctctcccctccttcctcccctgggtcacagggcttgacrttctggtgggggaaacctgtgttcaagattcaaaaactggaaggagctccagccctgatggttacttgctatggaatttttttaaataaggggagggttg

SEQ ID NO: 63626 - DNA, 201 bp, Homo sapiens
agaaggtcaaagtacagctgcagtgtgtggggagccggagggaggagctcgagatcttcacggccagggcctgccagtgtgacatgtgtcgcctctctcgktactagcccatcctctcccctccttcctcccctgggtcacagggcttgacgttctggtgggggaaacctgtgttcaagattcaaaaactggaaggagctc

SEQ ID NO: 63627 - DNA, 201 bp, Homo sapiens
ttctggtgggggaaacctgtgttcaagattcaaaaactggaaggagctccagccctgatggttacttgctatggaatttttttaaataaggggagggttgytccagctttgatcctttgtaagattttgtgactgtcacctgagaagaggggagtttctgcttcttccctgcctctgcctggcccttctaaaccaatcttt

SEQ ID NO: 63628 - DNA, 201 bp, Homo sapiens
tgggggaaacctgtgttcaagattcaaaaactggaaggagctccagccctgatggttacttgctatggaatttttttaaataaggggagggttgttccagytttgatcctttgtaagattttgtgactgtcacctgagaagaggggagtttctgcttcttccctgcctctgcctggcccttctaaaccaatctttcatcat

SEQ ID NO: 63629 - DNA, 201 bp, Homo sapiens
caaaaactggaaggagctccagccctgatggttacttgctatggaatttttttaaataaggggagggttgttccagctttgatcctttgtaagattttgtyactgtcacctgagaagaggggagtttctgcttcttccctgcctctgcctggcccttctaaaccaatctttcatcattttacttccctctttgcccttacc

SEQ ID NO: 63630 - DNA, 201 bp, Homo sapiens
gcctgaagaaggtcaaagtacagctgcagtgtgtggggagccggagggaggagctcgagatcttcacggccagggcctgccagtgtgacatgtgtcgcctrtctcgctactagcccatcctctcccctccttcctcccctgggtcacagggcttgacgttctggtgggggaaacctgtgttcaagattcaaaaactggaag

SEQ ID NO: 63631 - DNA, 201 bp, Homo sapiens; identical to SEQ ID NO: 63626

SEQ ID NO: 63632 - DNA, 201 bp, Homo sapiens; identical to SEQ ID NO: 63627

SEQ ID NO: 63633 - DNA, 201 bp, Homo sapiens; identical to SEQ ID NO: 63628

SEQ ID NO: 63634 - DNA, 201 bp, Homo sapiens; identical to SEQ ID NO: 63629

SEQ ID NO: 63635 - DNA, 201 bp, Homo sapiens; identical to SEQ ID NO: 63630

SEQ ID NO: 63636 - DNA, 201 bp, Homo sapiens
cggcacttctacgtggccaagggcaaccccatccacgccaggggcaaggttccgccccacccccggcactacccgctcatgttctgccacgtggcgggcarcccagaccgggacatgtccatggcgtcctggctgaatctggctgagattgcgcaggtcgtcgagaaggtgcaggaggcctacaacacctggcccagctgc

SEQ ID NO: 63637 - DNA, 201 bp, Homo sapiens
agcctgcctcctggcctcaggatctccctggggcaggaagtgggtggacttggaggaggaacggcaagggccggtccccacactcttgctcctcctgggcrtctggggacaggaacacctctcagggtggccaagaggggcttccttgggaccagtgtaaggaagttctgctgtccctgggaagtctcagaaccaggaagg

SEQ ID NO: 63638 - DNA, 201 bp, Homo sapiens
tccacgagaactaccgctgcacggacgccattgtcagcttcatctcgcggcacttctacgtggccaagggcaaccccatccacgccaggggcaaggttccsccccacccccggcactacccgctcatgttctgccacgtggcgggcaacccagaccgggacatgtccatggcgtcctggctgaatctggctgagattgcgc

SEQ ID NO: 63639 - DNA, 201 bp, Homo sapiens
ccacacgggcagagctggcgcggcaccgcgtggtggtcaccaccacctcccaggcccgtgagctcagggtgccggtcggcttcttctcccacattctcatygatgaggcggcccagatgctggagtgcgaggccctcaccccgctggcctacgcctcgcacggcacccgcctcgtgctggcgggcgaccacatgcaggtca

SEQ ID NO: 63640 - DNA, 201 bp, Homo sapiens
ggccctcaccccgctggcctacgcctcgcacggcacccgcctcgtgctggcgggcgaccacatgcaggtcacaccccggctgttcagtgtggccagggccygggcggccgagcacacgctgctgcaccgcctcttcctgtgctaccagcaggagactcacgaggtggcgcggcagagccgcctggtcttccacgagaacta

SEQ ID NO: 63641 - DNA, 201 bp, Homo sapiens
gcgcgaaggcagggcgctgcgttctatgcccccggcagggagccagtgcccatgctgccggccagcctctgccaggacgtcctcagcctcctgcctggccrggaccgcctggccatctccctgttcctcaccatggagaaggccagtggccagctgaagagcctgcgctttgcaccctccgtggtccagtctgaccgccag

SEQ ID NO: 63642 - DNA, 201 bp, Homo sapiens
aggcttctactacccgctgggcatcgtccgggaggtgctgcctgaggccagcacctgggagcagggcctccgcatcctcggcctggagtacagcttgaggktgcccccgtcggaccaggccaccatcaccaaggtgctgcagaaataccacacggagcttggccgggttgccggccgccgagaggactgccgcgccttctt

SEQ ID NO: 63643 - DNA, 201 bp, Homo sapiens
gcatcctcggcctggagtacagcttgagggtgcccccgtcggaccaggccaccatcaccaaggtgctgcagaaataccacacggagcttggccgggttgcsggccgccgagaggactgccgcgccttcttgaccttcactgtggacccccagggcgcctgcaacctcgatgatgccctcagtgtccgagacctgggtccca

SEQ ID NO: 63644 - DNA, 201 bp, Homo sapiens
cagggcgcctgcaacctcgatgatgccctcagtgtccgagacctgggtcccaggtgcgaggtggctgtgcacatcactgatgtggccagcttcgtgcccarggacggggtgctggacgtggaggcgcgaaggcagggcgctgcgttctatgcccccggcagggagccagtgcccatgctgccggccagcctctgccaggac

SEQ ID NO: 63645 - DNA, 201 bp, Homo sapiens
acccgggtgccggccgtgagctgccggcccgcctggactccgtggacgcctgcgtcgtggccgcgtgctacttctctcggctgctgcgccggcaccgcctrcggtccgactgcttctatgagcagccggacgaggacggcaccctgggcttccgcgcggcccacatcatggtgaaggagtacatgattcagtttaataggc

SEQ ID NO: 63646 - DNA, 201 bp, Homo sapiens
gtcattcagggcccaccaggtacagggaagacgatcgtgggcctccacatcgtattctggtttcataaatcaaaccaggagcaggtgcagcccggaggccscccccgtggggagaagcggctggggggtccctgcatcttgtactgcggcccctccaacaagtcggtggatgtcctggcaggactgctcctgagaaggatg

SEQ ID NO: 63647 - DNA, 201 bp, Homo sapiens
ccgccttcctcgaggagaactgtgccgacatcaacttcagctgctgctacctctgcatccggctcgaggggctgccggctcccacggccagcccacgcccygggcccagcagcctcggccctggcctgaatgttgaccccggcacgtatacctgggtggcccacgggcagacgcaggactgggaccaggagcgccgggcag

SEQ ID NO: 63648 - DNA, 201 bp, Homo sapiens
gtggacttggtcaccacggacgacatgcacccattcctggctcctgcaggccgcgacctccgcaaggccctggagcgctcggcgttcggccgctgcgcccrgggccaccagcagcagggcggccactactcgctgcaggtggactggtacacgtgggccacctcgcccatccgcaggtacctggacgtggtgttgcagcgg

SEQ ID NO: 63649 - DNA, 201 bp, Homo sapiens
tgcttccggctgctcttccccagcaaccgggagacgctgcctgacccctgccccgtcccctacggctccctgcagctggccgagcacccccacgccctggyaggccggccgggcctgcggctcctgtggcggcgccgtgtctactcagcgcagggatccagcccgcccctgccactgcctggcactgtgccggacccacac

SEQ ID NO: 63650 - DNA, 201 bp, Homo sapiens
cggccgggcctgcggctcctgtggcggcgccgtgtctactcagcgcagggatccagcccgcccctgccactgcctggcactgtgccggacccacacaccckggccgtggagacggccctgtggaagcagctgctggagctggtggagctgcagcgctggccggaggcggctgctctcatccaggagaagggcgaggcgtcc

SEQ ID NO: 63651 - DNA, 201 bp, Homo sapiens
ctgcagggcgccttccgcctggaggccgccttcctcgaggagaactgtgccgacatcaacttcagctgctgctacctctgcatccggctcgaggggctgcyggctcccacggccagcccacgccctgggcccagcagcctcggccctggcctgaatgttgaccccggcacgtatacctgggtggcccacgggcagacgcag

SEQ ID NO: 63652 - DNA, 201 bp, Homo sapiens
gggacggggtgctggacgtggaggcgcgaaggcagggcgctgcgttctatgcccccggcagggagccagtgcccatgctgccggccagcctctgccaggaygtcctcagcctcctgcctggccgggaccgcctggccatctccctgttcctcaccatggagaaggccagtggccagctgaagagcctgcgctttgcaccct

SEQ ID NO: 63653 - DNA, 201 bp, Homo sapiens
gcgtggtggtcaccaccacctcccaggcccgtgagctcagggtgccggtcggcttcttctcccacattctcatcgatgaggcggcccagatgctggagtgygaggccctcaccccgctggcctacgcctcgcacggcacccgcctcgtgctggcgggcgaccacatgcaggtcacaccccggctgttcagtgtggccaggg

SEQ ID NO: 63654 - DNA, 201 bp, Homo sapiens
tccagtctgaccgccagctgtcctacgaggaggcggaggaggtgatcaggcagcacccgggtgccggccgtgagctgccggcccgcctggactccgtggaygcctgcgtcgtggccgcgtgctacttctctcggctgctgcgccggcaccgcctgcggtccgactgcttctatgagcagccggacgaggacggcaccctgg

SEQ ID NO: 63655 - DNA, 201 bp, Homo sapiens
ccctggggaggaccgtagagccccaggacatcgccgtcctcacgccctacaacgcgcaggcctctgagatcagcaaggcccttcggcgagagggcatcgcyggggtggccgtgtcctccatcaccaagagccaggggagcgagtggcgctatgtgctggtgagcaccgtccgcacctgtgccaagagcgacctggaccagc

SEQ ID NO: 63656 - DNA, 201 bp, Homo sapiens
gcaccgtccgcacctgtgccaagagcgacctggaccagcggcccaccaagagctggctcaagaagtttctgggcttcgttgtggaccccaaccaagtgaaygtggctgtcacgcgggcccaggaggggctctgcctgatcggagaccacctccttctgcgctgctgccccctctggcgtagcctcctggacttctgcgagg

SEQ ID NO: 63657 - DNA, 201 bp, Homo sapiens
gcggcgggagctggtgcaggtgcagcggagccactgtggccatttcctggaggtggcccgggagctgggcagtggggacaccctgcaggtgcagctcggcrccagcctgcagcacggcttcctggtaccgagccctcagctctggacggtggcaccgggcttcagcctctgcctggagcacgtggagcggcccggagactg

SEQ ID NO: 63658 - DNA, 201 bp, Homo sapiens
aaccattctgcgccctggagtcggccaccggcgcggttgccgagaatgactccgtcacacttcagcacctgagtgtctcctgggaggcgtcacggacgccrcaggggcagctgcagggcgccttccgcctggaggccgccttcctcgaggagaactgtgccgacatcaacttcagctgctgctacctctgcatccggctcg

SEQ ID NO: 63659 - DNA, 201 bp, Homo sapiens
tccggaagggccggctgcagcgtgtggggcttgagaggctcaccgccgaggcccggcacagccggctcttctgggtccaaattgtcctgtggcggcaaggsttctactacccgctgggcatcgtccgggaggtgctgcctgaggccagcacctgggagcagggcctccgcatcctcggcctggagtacagcttgagggtgc

SEQ ID NO: 63660 - DNA, 201 bp, Homo sapiens
ggggaggacgggctgctggacaccgtcgccaggcccgagtccctgcagcaggcccggctgtacgagaacctgcccccggctgcgctacggaagctgctgcrcgcggagcccgagcggtaccgccactgctctttcgtgccagagaccttcgagcgggcgtcagccatcccgctggacgatgcctcctcgggccccatccag

SEQ ID NO: 63661 - DNA, 106 bp, Homo sapiens
ctcacytctgacagccagacaagggctgtgctcaggggcagctcggctgggcacacagtaggtgctttagcggacagcactgaggcccccagcaagaagcccatga

SEQ ID NO: 63662 - DNA, 201 bp, Homo sapiens
acatgtccatggcgtcctggctgaatctggctgagattgcgcaggtcgtcgagaaggtgcaggaggcctacaacacctggcccagctgctggggcggccgygagcagaggtgcatctgtgtcgtttcccacggtgcccaggtcagtgcactgaggcaggagctgaggaggcgggacctaggccaggtgtctgtcggcagtt

SEQ ID NO: 63663 - DNA, 201 bp, Homo sapiens
gggacggggagctcaacgctgacgacgccatcctacgggagcttctggacgagagccagaaggtgatggtgaccgtcggggaggacgggctgctggacacygtcgccaggcccgagtccctgcagcaggcccggctgtacgagaacctgcccccggctgcgctacggaagctgctgcgcgcggagcccgagcggtaccgcc

SEQ ID NO: 63664 - DNA, 201 bp, Homo sapiens
agtcggtggatgtcctggcaggactgctcctgagaaggatggagctgaagcccctccgtgtgtacagtgagcaggctgaggccagcgagttcccagtgccrcgtgtgggcagcaggaagctgctcaggaagagcccccgggaggggaggccgaaccagagcctcaggagcatcaccctgcaccaccggatccggcaggccc

SEQ ID NO: 63665 - DNA, 201 bp, Homo sapiens
gtgccttcccctctgtggcgttctacaagagcaagctgaagacgtggcagggcctgaggaggccgcccagtgtcctgggccacgctggcaaggagagctgycctgtcatctttggccacgtgcagggccacgagcggagcctgctggtgtccacggacgaagggaatgagaactccaaggccaacctggaggaggtggctg

SEQ ID NO: 63666 - DNA, 201 bp, Homo sapiens
caggcatggccacggaacctgaaaccctcatccccctggtgcagttcccacaggccgagaaggtggttcttctcggagaccacaagcagctgcggcctgtrgtcaagaatgagcggctgcaaaacctgggtctggaccggtctctgttcgagcggtaccacgaggacgcacatatgctggacactcagtaccgcatgcatg

SEQ ID NO: 63667 - DNA, 201 bp, Homo sapiens
tgaccgccagctgtcctacgaggaggcggaggaggtgatcaggcagcacccgggtgccggccgtgagctgccggcccgcctggactccgtggacgcctgcrtcgtggccgcgtgctacttctctcggctgctgcgccggcaccgcctgcggtccgactgcttctatgagcagccggacgaggacggcaccctgggcttccg

SEQ ID NO: 63668 - DNA, 201 bp, Homo sapiens
gcaagctgaagacgtggcagggcctgaggaggccgcccagtgtcctgggccacgctggcaaggagagctgccctgtcatctttggccacgtgcagggccaygagcggagcctgctggtgtccacggacgaagggaatgagaactccaaggccaacctggaggaggtggctgaggtggtccgtatcaccaagcagctgaccc

SEQ ID NO: 63669 - DNA, 201 bp, Homo sapiens
gaagggcgaggcgtcccagcggcgggagctggtgcaggtgcagcggagccactgtggccatttcctggaggtggcccgggagctgggcagtggggacaccytgcaggtgcagctcggcaccagcctgcagcacggcttcctggtaccgagccctcagctctggacggtggcaccgggcttcagcctctgcctggagcacgt

SEQ ID NO: 63670 - DNA, 201 bp, Homo sapiens
gaggccgccttcctcgaggagaactgtgccgacatcaacttcagctgctgctacctctgcatccggctcgaggggctgccggctcccacggccagcccacrccctgggcccagcagcctcggccctggcctgaatgttgaccccggcacgtatacctgggtggcccacgggcagacgcaggactgggaccaggagcgccgg

SEQ ID NO: 63671 - DNA, 201 bp, Homo sapiens
tgcaggtggactggtacacgtgggccacctcgcccatccgcaggtacctggacgtggtgttgcagcggcagatcctgctggcgctgggccatgggggctcygcctactctgccagggacatcgatgggctctgccaggccttcagcctccagcacgcacttgcccagagctatcagcggcgggcgcgcagcctgcacctgg

SEQ ID NO: 63672 - DNA, 201 bp, Homo sapiens
tgcctgggccagcctgcctcctggcctcaggatctccctggggcaggaagtgggtggacttggaggaggaacggcaagggccggtccccacactcttgctyctcctgggcatctggggacaggaacacctctcagggtggccaagaggggcttccttgggaccagtgtaaggaagttctgctgtccctgggaagtctcaga

SEQ ID NO: 63673 - DNA, 201 bp, Homo sapiens
cggaagctgctgcgcgcggagcccgagcggtaccgccactgctctttcgtgccagagaccttcgagcgggcgtcagccatcccgctggacgatgcctcctygggccccatccaggtcaggggccgcctggactgtgggatggccttcgccggggatgaggtgctggtgcagctcctttcgggagacaaggcgcccgagggg

SEQ ID NO: 63674 - DNA, 201 bp, Homo sapiens
tgacccgcgcccagtcccagctggtggtagtgggggacgccgtggccctctgctccttcggggcctgcggcaagctctgggagagcttcatccgtgagtgygtggagcggcacagtgtctgccccgagggcctgtccatggagcaggtcgagcagggtgtggcgcagagacggcgctggcctccccgaggcacacaggctg

SEQ ID NO: 63675 - DNA, 201 bp, Homo sapiens
aggttcctggagcggcagacctacaacatccccggaggccgccacaagctgaaccccagccagaacgtggcggtcagggaggctctggagaagcctttcayggtcattcagggcccaccaggtacagggaagacgatcgtgggcctccacatcgtattctggtttcataaatcaaaccaggagcaggtgcagcccggaggc

SEQ ID NO: 63676 - DNA, 201 bp, Homo sapiens
gtgcccaggtcagtgcactgaggcaggagctgaggaggcgggacctaggccaggtgtctgtcggcagttttgagatcctgccagggcggcagttccgggtygtggtgctcagcactgtgcacacctgccagagcctgctcagccctggggcactggcccctgagttcttcaccgacgcccgcgtgctcaacaccgtcctga

SEQ ID NO: 63677 - DNA, 201 bp, Homo sapiens
gccggctcccacggccagcccacgccctgggcccagcagcctcggccctggcctgaatgttgaccccggcacgtatacctgggtggcccacgggcagacgsaggactgggaccaggagcgccgggcagaccggcaggaggctcccagacgggtgcacctcttcgtccaccacatgggcatggagaaggttccggaagaggt

SEQ ID NO: 63678 - DNA, 201 bp, Homo sapiens
ggaacggcaagggccggtccccacactcttgctcctcctgggcatctggggacaggaacacctctcagggtggccaagaggggcttccttgggaccagtgyaaggaagttctgctgtccctgggaagtctcagaaccaggaaggaaaccctgtggaggctgccctttgacctttggacgccacctgtaatcactctggatg

SEQ ID NO: 63679 - DNA, 201 bp, Homo sapiens
gccactcctctccgtgtgatgtacacggaccggccgctgagccagacggacccagtcacgctgcagtactgttgcctgaccgacgaccgccaggctttccrcccgcccacacgggcagagctggcgcggcaccgcgtggtggtcaccaccacctcccaggcccgtgagctcagggtgccggtcggcttcttctcccacatt

SEQ ID NO: 63680 - DNA, 201 bp, Homo sapiens
aggcccgtgagctcagggtgccggtcggcttcttctcccacattctcatcgatgaggcggcccagatgctggagtgcgaggccctcaccccgctggcctaygcctcgcacggcacccgcctcgtgctggcgggcgaccacatgcaggtcacaccccggctgttcagtgtggccagggcccgggcggccgagcacacgctgc

SEQ ID NO: 63681 - DNA, 201 bp, Homo sapiens
tggctcccggcctcccgccaggccggctctacgcacggggtgagcgcttccgtgtgcccagctccactgccgacttccaggtgggagtgcgtgtgcaggcygcctcgttcggcacctttgagcaatgggtggtcttcgactttggccgccggccggtgctgctacaaaagctggggctgcagctgggccaggggcgtcgcc

SEQ ID NO: 63682 - DNA, 201 bp, Homo sapiens; identical to SEQ ID NO: 63636

SEQ ID NO: 63683 - DNA, 201 bp, Homo sapiens
ggcccagggaggggcaggccgggcggccgacgccatccttacggagtttggcggccgcttcgagctgctttgctccctctgcttcaggcgctgtcccccaygcatctgtcgcgtggacccccaggggcagtgccctgagcacggagcctgcccctccctcctggcccacgtgagcgccgagggccgccgcaagcaacagtt

SEQ ID NO: 63684 - DNA, 201 bp, Homo sapiens; identical to SEQ ID NO: 63637

SEQ ID NO: 63685 - DNA, 201 bp, Homo sapiens; identical to SEQ ID NO: 63638

SEQ ID NO: 63686 - DNA, 201 bp, Homo sapiens
gcagcagtgaggtccttgtgctggcagagacccttgatggagtgcgtgtcacctgcaaccagcccctgatgtaccaggcccaggagaggaagacccagtayagctggacgtttgccgtccactctgaggagcccctgctacacgtggccctgctgaagcaggagccaggagccgacttctctctggtggctcccggcctcc

SEQ ID NO: 63687 - DNA, 201 bp, Homo sapiens; identical to SEQ ID NO: 63639

SEQ ID NO: 63688 - DNA, 201 bp, Homo sapiens; identical to SEQ ID NO: 63640

SEQ ID NO: 63689 - DNA, 201 bp, Homo sapiens; identical to SEQ ID NO: 63641

SEQ ID NO: 63690 - DNA, 201 bp, Homo sapiens; identical to SEQ ID NO: 63642

SEQ ID NO: 63691 - DNA, 201 bp, Homo sapiens; identical to SEQ ID NO: 63643

SEQ ID NO: 63692 - DNA, 201 bp, Homo sapiens; identical to SEQ ID NO: 63644

SEQ ID NO: 63693 - DNA, 201 bp, Homo sapiens; identical to SEQ ID NO: 63645

SEQ ID NO: 63694 - DNA, 201 bp, Homo sapiens
cctgtcccgcagcccctctgcagagggaagacgatcgtgggcctccacatcgtattctggtttcataaatcaaaccaggagcaggtgcagcccggaggccscccccgtggggagaagcggctggggggtccctgcatcttgtactgcggcccctccaacaagtcggtggatgtcctggcaggactgctcctgagaaggatg

SEQ ID NO: 63695 - DNA, 201 bp, Homo sapiens; identical to SEQ ID NO: 63647

SEQ ID NO: 63696 - DNA, 201 bp, Homo sapiens
tccactctgaggagcccctgctacacgtggccctgctgaagcaggagccaggagccgacttctctctggtggctcccggcctcccgccaggccggctctaygcacggggtgagcgcttccgtgtgcccagctccactgccgacttccaggtgggagtgcgtgtgcaggccgcctcgttcggcacctttgagcaatgggtgg

SEQ ID NO: 63697 - DNA, 201 bp, Homo sapiens; identical to SEQ ID NO: 63648

SEQ ID NO: 63698 - DNA, 201 bp, Homo sapiens; identical to SEQ ID NO: 63649

SEQ ID NO: 63699 - DNA, 201 bp, Homo sapiens; identical to SEQ ID NO: 63650

SEQ ID NO: 63700 - DNA, 201 bp, Homo sapiens; identical to SEQ ID NO: 63651

SEQ ID NO: 63701 - DNA, 201 bp, Homo sapiens; identical to SEQ ID NO: 63653

SEQ ID NO: 63702 - DNA, 201 bp, Homo sapiens; identical to SEQ ID NO: 63652

SEQ ID NO: 63703 - DNA, 201 bp, Homo sapiens
ggtgcagttccagattgacccgatgaccttccgcctctggcaccaggcagtggacacactgcctgaggagcagctggtggtgcccgacttgcccacctgcrccctgcccagaccttggtctgtcccacccttgcggcgtggcaaccgcaagcaggagctggccgtggcgctcatcgcgggctggggccctggggatgggag

SEQ ID NO: 63704 - DNA, 201 bp, Homo sapiens
gagtgcgtgtcacctgcaaccagcccctgatgtaccaggcccaggagaggaagacccagtacagctggacgtttgccgtccactctgaggagcccctgctrcacgtggccctgctgaagcaggagccaggagccgacttctctctggtggctcccggcctcccgccaggccggctctacgcacggggtgagcgcttccgtg

SEQ ID NO: 63705 - DNA, 201 bp, Homo sapiens
acgagcggagcctgctggtgtccacggacgaagggaatgagaactccaaggccaacctggaggaggtggctgaggtggcccttcggcgagagggcatcgcyggggtggccgtgtcctccatcaccaagagccaggggagcgagtggcgctatgtgctggtgagcaccgtccgcacctgtgccaagagcgacctggaccagc

SEQ ID NO: 63706 - DNA, 201 bp, Homo sapiens; identical to SEQ ID NO: 63654

SEQ ID NO: 63707 - DNA, 201 bp, Homo sapiens; identical to SEQ ID NO: 63656

SEQ ID NO: 63708 - DNA, 201 bp, Homo sapiens; identical to SEQ ID NO: 63657

SEQ ID NO: 63709 - DNA, 201 bp, Homo sapiens; identical to SEQ ID NO: 63658

SEQ ID NO: 63710 - DNA, 201 bp, Homo sapiens; identical to SEQ ID NO: 63659

SEQ ID NO: 63711 - DNA, 201 bp, Homo sapiens
caatgggtggtcttcgactttggccgccggccggtgctgctacaaaagctggggctgcagctgggccaggggcgtcgcccaggaccctgcaggaatctggygctcggccaccctgaggagatggagcgctggcacactggcaaccgccacgtggtgcctggcgtggagcggacggccgagcagacggccctgatggccaag

SEQ ID NO: 63712 - DNA, 201 bp, Homo sapiens
cttctctctggtggctcccggcctcccgccaggccggctctacgcacggggtgagcgcttccgtgtgcccagctccactgccgacttccaggtgggagtgygtgtgcaggccgcctcgttcggcacctttgagcaatgggtggtcttcgactttggccgccggccggtgctgctacaaaagctggggctgcagctgggcca

SEQ ID NO: 63713 - DNA, 201 bp, Homo sapiens; identical to SEQ ID NO: 63660

SEQ ID NO: 63714 - DNA, 201 bp, Homo sapiens
acatgtccatggcgtcctggctgaatctggctgagattgcgcaggtcgtcgagaaggtgcaggaggcctacaacacctggcccagctgctggggcggccgygagcagaggtgcatctgtgtcgtttcccacggtgcccagttccgggtcgtggtgctcagcactgtgcacacctgccagagcctgctcagccctggggcac

SEQ ID NO: 63715 - DNA, 201 bp, Homo sapiens; identical to SEQ ID NO: 63663

SEQ ID NO: 63716 - DNA, 201 bp, Homo sapiens; identical to SEQ ID NO: 63664

SEQ ID NO: 63717 - DNA, 201 bp, Homo sapiens; identical to SEQ ID NO: 63665

SEQ ID NO: 63718 - DNA, 201 bp, Homo sapiens; identical to SEQ ID NO: 63666

SEQ ID NO: 63719 - DNA, 201 bp, Homo sapiens; identical to SEQ ID NO: 63667

SEQ ID NO: 63720 - DNA, 201 bp, Homo sapiens
gcaagctgaagacgtggcagggcctgaggaggccgcccagtgtcctgggccacgctggcaaggagagctgccctgtcatctttggccacgtgcagggccaygagcggagcctgctggtgtccacggacgaagggaatgagaactccaaggccaacctggaggaggtggctgaggtggcccttcggcgagagggcatcgccg

SEQ ID NO: 63721 - DNA, 201 bp, Homo sapiens
gtggagcggacggccgagcagacggccctgatggccaagtacaagggccctgccctggccctggagttcaaccgcagcagcgtggcctcgggccccatctygccaaccaactatcggcagaggatgcaccagtttctctatgaggaggaggcggctcagcagcagctggtggccaagctgaccctgcggggccaggtgttc

SEQ ID NO: 63722 - DNA, 201 bp, Homo sapiens; identical to SEQ ID NO: 63669

SEQ ID NO: 63723 - DNA, 201 bp, Homo sapiens; identical to SEQ ID NO: 63671

SEQ ID NO: 63724 - DNA, 201 bp, Homo sapiens; identical to SEQ ID NO: 63670

SEQ ID NO: 63725 - DNA, 201 bp, Homo sapiens; identical to SEQ ID NO: 63673

SEQ ID NO: 63726 - DNA, 201 bp, Homo sapiens; identical to SEQ ID NO: 63672

SEQ ID NO: 63727 - DNA, 201 bp, Homo sapiens; identical to SEQ ID NO: 63674

SEQ ID NO: 63728 - DNA, 201 bp, Homo sapiens
tcgagaaggtgcaggaggcctacaacacctggcccagctgctggggcggccgcgagcagaggtgcatctgtgtcgtttcccacggtgcccagttccgggtygtggtgctcagcactgtgcacacctgccagagcctgctcagccctggggcactggcccctgagttcttcaccgacgcccgcgtgctcaacaccgtcctga

SEQ ID NO: 63729 - DNA, 201 bp, Homo sapiens; identical to SEQ ID NO: 63677

SEQ ID NO: 63730 - DNA, 201 bp, Homo sapiens; identical to SEQ ID NO: 63678

SEQ ID NO: 63731 - DNA, 201 bp, Homo sapiens; identical to SEQ ID NO: 63679

SEQ ID NO: 63732 - DNA, 201 bp, Homo sapiens
ggccgcggccccgggccggccagcctcctgcctactgcaggtttgtggggcgtgggcagccgtgctggcgtggggagtcccgctgccagtttgcacacagygccgtggagatggctgtgtgggaggccgagcagctgggtggcctccagcggggggacctgctcacaccccctgcccctgatggcgacgggcgcacggccc

SEQ ID NO: 63733 - DNA, 201 bp, Homo sapiens
tgcacacagcgccgtggagatggctgtgtgggaggccgagcagctgggtggcctccagcggggggacctgctcacaccccctgcccctgatggcgacgggygcacggccccccttggccagccccctggggcccagctgtactgcccggcctgcttggtcacctgccactctcaggaggccttcgagaaccactgcgcatc

SEQ ID NO: 63734 - DNA, 201 bp, Homo sapiens; identical to SEQ ID NO: 63680

SEQ ID NO: 63735 - DNA, 201 bp, Homo sapiens
tggagcggacggccgagcagacggccctgatggccaagtacaagggccctgccctggccctggagttcaaccgcagcagcgtggcctcgggccccatctcrccaaccaactatcggcagaggatgcaccagtttctctatgaggaggaggcggctcagcagcagctggtggccaagctgaccctgcggggccaggtgttcc

SEQ ID NO: 63736 - DNA, 201 bp, Homo sapiens
ggattggaacagacagcgtgattctgattaaatgtgatgagagagggaaaatgattccatctgatcttgaaagaaggattcttgaagccaaacagaaaggstttgttcctttcctcgtgagtgccacagctggaaccaccgtgtacggagcatttgaccccctcttagctgtcgctgacatttgcaaaaagtataagatct

SEQ ID NO: 63737 - DNA, 201 bp, Homo sapiens
acagcaaatactaacatgttcacctatgaaattgctccagtatttgtgcttttggaatatgtcacactaaagaaaatgagagaaatcattggctggccagrgggctctggcgatgggatattttctcccggtggcgccatatctaacatgtatgccatgatgatcgcacgctttaagatgttcccagaagtcaaggagaaa

SEQ ID NO: 63738 - DNA, 201 bp, Homo sapiens
cagtatgtggtgaaaagtttcgatagatcaaccaaagtgattgatttccattatcctaatgagcttctccaagaatataattgggaattggcagaccaacmacaaaatttggaggaaattttgatgcattgccaaacaactctaaaatatgcaattaaaacagggcatcctagatacttcaatcaactttctactggtttg

SEQ ID NO: 63739 - DNA, 201 bp, Homo sapiens
cacacacgcacagacacgcacgttttctgttcctgcgtgacacccgccctcgccgctcggccccgccggtccccgcgcggtgccctcctcccgccacacgrgcacgcacgcgcgcgcagggccaagcccgaggcagctcgcccgcagctcgcactcgcaggcgacctgctccagtctccaaagccgatggcatctccgggc

SEQ ID NO: 63740 - DNA, 201 bp, Homo sapiens
agagagggaaaatgattccatctgatcttgaaagaaggattcttgaagccaaacagaaagggtttgttcctttcctcgtgagtgccacagctggaaccacygtgtacggagcatttgaccccctcttagctgtcgctgacatttgcaaaaagtataagatctggatgcatgtggatggattgatgcagaattgcaaccaaa

SEQ ID NO: 63741 - DNA, 201 bp, Homo sapiens
gggattggaacagacagcgtgattctgattaaatgtgatgagagagggaaaatgattccatctgatcttgaaagaaggattcttgaagccaaacagaaagsgtttgttcctttcctcgtgagtgccacagctggaaccaccgtgtacggagcatttgaccccctcttagctgtcgctgacatttgcaaaaagtataagatc

SEQ ID NO: 63742 - DNA, 201 bp, Homo sapiens
ttaaaacagggcatcctagatacttcaatcaactttctactggtttggatatggttggattagcagcagactggctgacatcaacagcaaatactaacatrttcacctatgaaattgctccagtatttgtgcttttggaatatgtcacactaaagaaaatgagagaaatcattggctggccagggggctctggcgatggga

SEQ ID NO: 63743 - DNA, 201 bp, Homo sapiens
cgatgggatattttctcccggtggcgccatatctaacatgtatgccatgatgatcgcacgctttaagatgttcccagaagtcaaggagaaaggaatggctrctcttcccaggctcattgccttcacgtctgaacatagtcatttttctctcaagaagggagctgcagccttagggattggaacagacagcgtgattctgat

SEQ ID NO: 63744 - DNA, 201 bp, Homo sapiens
catccccactgggctccctttccctcaaatgctctggggctctccgcgctttcctgagtccgggctccgaggacccttaggtagtcccggtctcttttaargctccccggcttccaaagggttgccacgtccctaaaccctgtctccagctcgcatacacacacgcacagacacgcacgttttctgttcctgcgtgacacc

SEQ ID NO: 63745 - DNA, 201 bp, Homo sapiens; identical to SEQ ID NO: 63739

SEQ ID NO: 63746 - DNA, 201 bp, Homo sapiens; identical to SEQ ID NO: 63744

SEQ ID NO: 63747 - DNA, 201 bp, Homo sapiens; identical to SEQ ID NO: 63736

SEQ ID NO: 63748 - DNA, 201 bp, Homo sapiens; identical to SEQ ID NO: 63737

SEQ ID NO: 63749 - DNA, 201 bp, Homo sapiens; identical to SEQ ID NO: 63738

SEQ ID NO: 63750 - DNA, 201 bp, Homo sapiens; identical to SEQ ID NO: 63739

SEQ ID NO: 63751 - DNA, 201 bp, Homo sapiens
agagagggaaaatgattccatctgatcttgaaagaaggattcttgaagccaaacagaaagggtttgttcctttcctcgtgagtgccacagctggaaccacygtgtacggagcatttgaccccctcttagctgtcgctgacatttgcaaaaagtataagatctggatgcatgtggatgcagcttggggtgggggattactga

SEQ ID NO: 63752 - DNA, 201 bp, Homo sapiens; identical to SEQ ID NO: 63741

SEQ ID NO: 63753 - DNA, 201 bp, Homo sapiens; identical to SEQ ID NO: 63742

SEQ ID NO: 63754 - DNA, 201 bp, Homo sapiens; identical to SEQ ID NO: 63743

SEQ ID NO: 63755 - DNA, 201 bp, Homo sapiens; identical to SEQ ID NO: 63744

SEQ ID NO: 63756 - DNA, 201 bp, Homo sapiens
ctgtggagaaggccgataactttgaatacagcgacccagtggatggaagcatttcaagaaatcagggcttgcgcctcattttcacagatggttctcgaatygtcttccgactgagcggcactgggagtgccggggccaccattcggctgtacatcgatagctatgagaaggacgttgccaagattaaccaggacccccagg

SEQ ID NO: 63757 - DNA, 201 bp, Homo sapiens
aagtcatctgattgaagagcatgacagaaacaaaatcagtgcatttacaaggcactgccaaacaagatgcccttgggagctgtgagggaaagaggacctgygggcttagatcaatctcaattccttttcatgccctcctgcattgctgctgcgtgggtatttgtctccttagccatcaggtacagtttacactacaatgta

SEQ ID NO: 63758 - DNA, 201 bp, Homo sapiens
atcatcactggtggttggtggagatgggcggtactttaataaatcagcaatagaaacaatagtgcagatggcagctgccaatgggatcggtcgcttggttrtcggacagaatggaatcctctccacccctgctgtatcctgcatcattagaaaaatcaaagccattggtgggatcattctgacagccagtcacaacccagg

SEQ ID NO: 63759 - DNA, 201 bp, Homo sapiens
cccccttatttccattgctctgaaagtgtcccagctgcaggagaggacgggacgcactgcacccactgtcatcacctaagaagacaggcctgatgtggtaygtccctccacccccggacccatccaagtcatctgattgaagagcatgacagaaacaaaatcagtgcatttacaaggcactgccaaacaagatgcccttgg

SEQ ID NO: 63760 - DNA, 201 bp, Homo sapiens
cctgcatcattagaaaaatcaaagccattggtgggatcattctgacagccagtcacaacccagggggccccaatggagattttggaatcaaattcaatatytctaatggaggtcctgctccagaagcaataactgataaaattttccaaatcagcaagacaattgaagaatatgcagtttgccctgacctgaaagtagacc

SEQ ID NO: 63761 - DNA, 201 bp, Homo sapiens
tgctctgaaagtgtcccagctgcaggagaggacgggacgcactgcacccactgtcatcacctaagaagacaggcctgatgtggtacgtccctccacccccrgacccatccaagtcatctgattgaagagcatgacagaaacaaaatcagtgcatttacaaggcactgccaaacaagatgcccttgggagctgtgagggaaa

SEQ ID NO: 63762 - DNA, 138 bp, Homo sapiens
atgtaagctataggtggagcatcagcagtgagtgaggccattcttcatccttaggatgtggcaatgaaatgatggtgcaagttcctttctcttttgtgaawctttccccccatttcctgtttacatgtaacccaacaa

SEQ ID NO: 63763 - DNA, 201 bp, Homo sapiens
ctgaaagtgtcccagctgcaggagaggacgggacgcactgcacccactgtcatcacctaagaagacaggcctgatgtggtacgtccctccacccccggacycatccaagtcatctgattgaagagcatgacagaaacaaaatcagtgcatttacaaggcactgccaaacaagatgcccttgggagctgtgagggaaagagg

SEQ ID NO: 63764 - DNA, 201 bp, Homo sapiens
aattgtggattcggtagaagcttatgctacaatgctgagaagcatctttgatttcagtgcactgaaagaactactttctgggccaaaccgactgaagatcygtattgatgctatgcatggagttgtgggaccgtatgtaaagaagatcctctgtgaagaactcggtgcccctgcgaactcggcagttaactgcgttcctct

SEQ ID NO: 63765 - DNA, 201 bp, Homo sapiens
ccgtgagaaagatggactgtgggctgtccttgcctggctctccatcctagccacccgcaagcagagtgtggaggacattctcaaagatcattggcaaaagyatggccggaatttcttcaccaggtatgattacgaggaggtggaagctgagggcgcaaacaaaatgatgaaggacttggaggccctgatgtttgatcgctc

SEQ ID NO: 63766 - DNA, 201 bp, Homo sapiens
tgtggagaaggccgataactttgaatacagcgacccagtggatggaagcatttcaagaaatcagggcttgcgcctcattttcacagatggttctcgaatcrtcttccgactgagcggcactgggagtgccggggccaccattcggctgtacatcgatagctatgagaaggacgttgccaagattaaccaggacccccaggt

SEQ ID NO: 63767 - DNA, 201 bp, Homo sapiens; identical to SEQ ID NO: 63756

SEQ ID NO: 63768 - DNA, 201 bp, Homo sapiens
tttaggatttgactttttcactaaccagttgacgagcagtgcatttacaaggcactgccaaacaagatgcccttgggagctgtgagggaaagaggacctgygggcttagatcaatctcaattccttttcatgccctcctgcattgctgctgcgtgggtatttgtctccttagccatcaggtacagtttacactacaatgta

SEQ ID NO: 63769 - DNA, 201 bp, Homo sapiens
tcacctaagaagacaggcctgatgtggtacgtccctccacccccggacccatccaagtcatctgattgaagagcatgacagaaacaaaatgtattcaccamgcattttaggatttgactttttcactaaccagttgacgagcagtgcatttacaaggcactgccaaacaagatgcccttgggagctgtgagggaaagagga

SEQ ID NO: 63770 - DNA, 201 bp, Homo sapiens
ggccacgctggtggtgggcggggacggccggttctacatgaaggaggccatccagctcatcgctcgcatcgctgccgccaacgggatcggtcgcttggttrtcggacagaatggaatcctctccacccctgctgtatcctgcatcattagaaaaatcaaagccattggtgggatcattctgacagccagtcacaacccagg

SEQ ID NO: 63771 - DNA, 201 bp, Homo sapiens
cccccttatttccattgctctgaaagtgtcccagctgcaggagaggacgggacgcactgcacccactgtcatcacctaagaagacaggcctgatgtggtaygtccctccacccccggacccatccaagtcatctgattgaagagcatgacagaaacaaaatgtattcaccaagcattttaggatttgactttttcactaac

SEQ ID NO: 63772 - DNA, 201 bp, Homo sapiens; identical to SEQ ID NO: 63760

SEQ ID NO: 63773 - DNA, 201 bp, Homo sapiens
aaatgatggtgcaagttcctttctcttttgtgaatctttccccccatttcctgtttacatgtaacccaacaaaatgcaatttctagtgccttctgtccaaycagttctttcctctgagtgagacgtacttggctacagatttctgccttgttttgcgacattgtcccattcacacagatattttgggataataaaggaaaa

SEQ ID NO: 63774 - DNA, 201 bp, Homo sapiens
tgctctgaaagtgtcccagctgcaggagaggacgggacgcactgcacccactgtcatcacctaagaagacaggcctgatgtggtacgtccctccacccccrgacccatccaagtcatctgattgaagagcatgacagaaacaaaatgtattcaccaagcattttaggatttgactttttcactaaccagttgacgagcagt

SEQ ID NO: 63775 - DNA, 201 bp, Homo sapiens
atgtaagctataggtggagcatcagcagtgagtgaggccattcttcatccttaggatgtggcaatgaaatgatggtgcaagttcctttctcttttgtgaawctttccccccatttcctgtttacatgtaacccaacaaaatgcaatttctagtgccttctgtccaatcagttctttcctctgagtgagacgtacttggcta

SEQ ID NO: 63776 - DNA, 201 bp, Homo sapiens
aatgaaatgatggtgcaagttcctttctcttttgtgaatctttccccccatttcctgtttacatgtaacccaacaaaatgcaatttctagtgccttctgtmcaatcagttctttcctctgagtgagacgtacttggctacagatttctgccttgttttgcgacattgtcccattcacacagatattttgggataataaagg

SEQ ID NO: 63777 - DNA, 201 bp, Homo sapiens; identical to SEQ ID NO: 63764

SEQ ID NO: 63778 - DNA, 201 bp, Homo sapiens; identical to SEQ ID NO: 63765

SEQ ID NO: 63779 - DNA, 201 bp, Homo sapiens
ctgaaagtgtcccagctgcaggagaggacgggacgcactgcacccactgtcatcacctaagaagacaggcctgatgtggtacgtccctccacccccggacycatccaagtcatctgattgaagagcatgacagaaacaaaatgtattcaccaagcattttaggatttgactttttcactaaccagttgacgagcagtgcat

SEQ ID NO: 63780 - DNA, 201 bp, Homo sapiens
cacccccggacccatccaagtcatctgattgaagagcatgacagaaacaaaatgtattcaccaagcattttaggatttgactttttcactaaccagttgaygagcagtgcatttacaaggcactgccaaacaagatgcccttgggagctgtgagggaaagaggacctgcgggcttagatcaatctcaattccttttcatgc

SEQ ID NO: 63781 - DNA, 201 bp, Homo sapiens; identical to SEQ ID NO: 63766

SEQ ID NO: 63782 - DNA, 201 bp, Homo sapiens
gtaccaggtgttccgccgtgggcttagcatctcagggaatgggccctgtcttggtttcaggaagcctaagcagccttaccagtggctgtcctaccaggagrtggccgacagggctgaatttctggggtccggacttctccagcacaattgtaaagcatgcactgatcagtttattggtgtttttgcacaaaatcggccaga

SEQ ID NO: 63783 - DNA, 201 bp, Homo sapiens
acccattcgaagaagccctgaaagagagagggcagaagtgcggggtggtcattaagtccatgcaggccgtggaggactgtggccaagagaatcaccaggcycctgtgcccccgcagcctgatgacctctccattgtgtgtttcacaagcggcacgacagggaacccaaaaggtgcgatgctcacccatgggaacgtggtgg

SEQ ID NO: 63784 - DNA, 201 bp, Homo sapiens
tatgtgtgagaggaccaaatgtgttcaaaggctacttgaaagatccagacaggacgaaggaggccctggacagcgatggctggcttcacactggagacatyggaaaatggctgccggtgtgaactcttaaaattattgatcggaaaaagcatatatttaaacttgctcagggagaatatgttgcacccgagaagattgaga

SEQ ID NO: 63785 - DNA, 195 bp, Homo sapiens
actttgataaacctctttaaaatgccccaagaaaactttttaagtccatagacaaagaaatactgcctaatggcataattacattcctaaaatctttaagygtgccgaagtttaaccactaaaacctcctttcttgcattatgtatttagatgcaccctgtattggggtgtcaacaatttcttataattaaaggc

SEQ ID NO: 63786 - DNA, 201 bp, Homo sapiens; identical to SEQ ID NO: 63782

SEQ ID NO: 63787 - DNA, 201 bp, Homo sapiens
acccattcgaagaagccctgaaagagagagggcagaagtgcggggtggtcattaagtccatgcaggccgtggaggactgtggccaagagaatcaccaggcycctgtgcccccgcagcctgatgacctctccattgtgtgtttcacaagcggcacgacaggtaagcagaggcacgcagatccccagccatggctacctgcac

SEQ ID NO: 63788 - DNA, 201 bp, Homo sapiens; identical to SEQ ID NO: 63782

SEQ ID NO: 63789 - DNA, 201 bp, Homo sapiens; identical to SEQ ID NO: 63783

SEQ ID NO: 63790 - DNA, 201 bp, Homo sapiens; identical to SEQ ID NO: 63784

SEQ ID NO: 63791 - DNA, 201 bp, Homo sapiens; identical to SEQ ID NO: 63782

SEQ ID NO: 63792 - DNA, 201 bp, Homo sapiens; identical to SEQ ID NO: 63783

SEQ ID NO: 63793 - DNA, 201 bp, Homo sapiens; identical to SEQ ID NO: 63784

SEQ ID NO: 63794 - DNA, 195 bp, Homo sapiens; identical to SEQ ID NO: 63785

SEQ ID NO: 63795 - DNA, 201 bp, Homo sapiens; identical to SEQ ID NO: 63782

SEQ ID NO: 63796 - DNA, 201 bp, Homo sapiens; identical to SEQ ID NO: 63783

SEQ ID NO: 63797 - DNA, 201 bp, Homo sapiens
tatgtgtgagaggaccaaatgtgttcaaaggctacttgaaagatccagacaggacgaaggaggccctggacagcgatggctggcttcacactggagacatyggaaaatggctgccggcaggaactcttaaaattattgatcggaaaaagcatatatttaaacttgctcagggagaatatgttgcacccgagaagattgaga

SEQ ID NO: 63798 - DNA, 195 bp, Homo sapiens; identical to SEQ ID NO: 63785

SEQ ID NO: 63799 - DNA, 201 bp, Homo sapiens; identical to SEQ ID NO: 63782

SEQ ID NO: 63800 - DNA, 201 bp, Homo sapiens; identical to SEQ ID NO: 63783

SEQ ID NO: 63801 - DNA, 201 bp, Homo sapiens; identical to SEQ ID NO: 63797

SEQ ID NO: 63802 - DNA, 201 bp, Homo sapiens
accggccaaaggccttgcagccgccatgcaacctcctgatgcagtcagaagaagtagagacctgctgttccaagaggtggcaggctctggcccagcccagsgtagctcaaatagtgcttgaagaagaggtggagctgtgatactggagagtttgggtttgggcaccctggggaagggtgacagggtagaaggggaggaggc

SEQ ID NO: 63803 - DNA, 201 bp, Homo sapiens
tcccccattgcacatgaacataattcagcctgtcctccctccctagcctcctaggcttctgtgcctgggacagaaccttcagcacagtcctctaactcacwtcattatgtgaatgatgggtggcagccttcttagctaacaccacacccaactgatccttaactcaggggcatagcagtagatgatgggatgggagatacc

SEQ ID NO: 63804 - DNA, 201 bp, Homo sapiens
aagaagaggtggagctgtgatactggagagtttgggtttgggcaccctggggaagggtgacagggtagaaggggaggaggcaggagaaggctggctcctcrccctactcaccagcacagaggggtttgccaccttcccactctgcacccgtgccactttgggcccaggaacttgctgcctgcctctcctcccccattgcac

SEQ ID NO: 63805 - DNA, 195 bp, Homo sapiens; identical to SEQ ID NO: 63785

SEQ ID NO: 63806 - DNA, 201 bp, Homo sapiens; identical to SEQ ID NO: 63782

SEQ ID NO: 63807 - DNA, 201 bp, Homo sapiens; identical to SEQ ID NO: 63783

SEQ ID NO: 63808 - DNA, 201 bp, Homo sapiens; identical to SEQ ID NO: 63797

SEQ ID NO: 63809 - DNA, 195 bp, Homo sapiens; identical to SEQ ID NO: 63785

SEQ ID NO: 63810 - DNA, 201 bp, Homo sapiens
aagtcttcttggacacttaatgattgttggcaagaaatgtgctgctgatctgggcctgaataagggttatcgaatggtggtgaatgaaggttcagatggtrgacagtctgtctatcacgttcatctccatgttcttggaggtcggcaaatgcattggcctcctggttaagcacgttttggggataattttctcttctttag

SEQ ID NO: 63811 - DNA, 201 bp, Homo sapiens
ggcctggtggcgacacgatctttgggaagatcatccgcaaggaaataccagccaaaatcatttttgaggatgaccggtgccttgctttccatgacatttcycctcaagcaccaacacattttctggtgatacccaagaaacatatatcccagatttctgtggcagaagatgatgatgaaagtcttcttggacacttaatga

SEQ ID NO: 63812 - DNA, 201 bp, Homo sapiens
cttccgagcctctcctctggccgccgcgcgggagagaggccgagatggcagatgagattgccaaggctcaggtcgctcggcctggtggcgacacgatcttygggaagatcatccgcaaggaaataccagccaaaatcatttttgaggatgaccggtgccttgctttccatgacatttcccctcaagcaccaacacattttc

SEQ ID NO: 63813 - DNA, 201 bp, Homo sapiens
tgtaggaggctgggagaatgagaccatcgtgcagcggtttaaggagtatgcagatgtgctcttccagaggctgggagacaaggtgaagttttggatcacgytgaatgagccctttgtcattgcttaccagggctatggctacggaacagcagctccaggagtctccaataggcctggcactgccccctacattgttggcca

SEQ ID NO: 63814 - DNA, 201 bp, Homo sapiens
ccttcggggacctagttgggatctggttcaccttcagtgacttggaggaagtgatcaaggagcttccccaccaggaatcaagagcgtcacaactccagacyctcagtgatgcccacagaaaagcctatgagatttaccacgaaagctatgcttttcagggcggaaaactctctgttgtcctgcgagctgaagatatcccgg

SEQ ID NO: 63815 - DNA, 201 bp, Homo sapiens
actgcccactttcctgccagaatacttcagcagtctccatgccagtcagatcacccattataaggtatttctgtcatgggcacagctcctcccagcaggargcacccagaatccagacgagaaaacagtgcagtgctaccggcgactcctcaaggccctcaagactgcacggcttcagcccatggtcatcctgcaccacca

SEQ ID NO: 63816 - DNA, 201 bp, Homo sapiens
ctcacacaccactgagggttgagaacgatgccattggagacgtggcctgtgacagttatcacaagattgctgaggatctggtcaccctgcagaacctgggygtgtcccactaccgtttttccatctcctggtctcgcatcctccctgatggaaccaccaggtacatcaatgaagcgggcctgaactactacgtgaggctca

SEQ ID NO: 63817 - DNA, 201 bp, Homo sapiens
gcctggcactgccccctacattgttggccacaatctaataaaggctcatgctgaggcctggcatctgtacaacgatgtgtaccgcgccagtcaaggtggcrtgatttccatcaccatcagcagtgactgggctgaacccagagatccctctaaccaggaggatgtggaggcagccaggagatatgttcagttcatgggagg

SEQ ID NO: 63818 - DNA, 201 bp, Homo sapiens
atgcttttcagggcggaaaactctctgttgtcctgcgagctgaagatatcccggagctcctgctagaaccacccatatctgcgcttgcccaggacacggtsgatttcctctctcttgatttgtcttatgaatgccaaaatgaggcaagtctgcggcagaagctgagtaaattgcagaccattgagccaaaagtgaaagttt

SEQ ID NO: 63819 - DNA, 201 bp, Homo sapiens
cagaatacttcagcagtctccatgccagtcagatcacccattataaggtatttctgtcatgggcacagctcctcccagcaggaagcacccagaatccagaygagaaaacagtgcagtgctaccggcgactcctcaaggccctcaagactgcacggcttcagcccatggtcatcctgcaccaccagaccctccctgccagca

SEQ ID NO: 63820 - DNA, 201 bp, Homo sapiens
ttcgccttccactccttcggggacctagttgggatctggttcaccttcagtgacttggaggaagtgatcaaggagcttccccaccaggaatcaagagcgtyacaactccagaccctcagtgatgcccacagaaaagcctatgagatttaccacgaaagctatgcttttcagggcggaaaactctctgttgtcctgcgagct

SEQ ID NO: 63821 - DNA, 201 bp, Homo sapiens
aagcatgtcttgttctctgactggcagcctggcccttcagcctgaccagcagcaggaccacgagaccacggactcctctcctgcctctgcctatcagagartctgggaagcatttgccaatcagtccagggcggaaagggatgccttcctgcaggatactttccctgaaggcttcctctggggtgcctccacaggagcctt

SEQ ID NO: 63822 - DNA, 201 bp, Homo sapiens
gggaaaacacaacgaagccaacaggaattgagcccggtgtcttcattctgatgagttaccacctcaagttctatgaagcaggcctagtttcttcatctatstttaccggccaccaaacaccttagggtcttagactctgctgatactggacttctccataaagtcctgctgcaccgttagagatgactttaatcttgaatg

SEQ ID NO: 63823 - DNA, 201 bp, Homo sapiens
aggggtgagcatctgggatccacgcaggcccctgaacaccactgagggccaagcgacgctggaggtggccagcgacagttaccacaaggtagcctctgacrtcgccctgctttgcggcctccgggctcaggtgtacaagttctccatctcctggtcccggatcttccccatggggcacgggagcagccccagcctcccagg

SEQ ID NO: 63824 - DNA, 201 bp, Homo sapiens
atcatggtggatggcagaatgagagcgtggtggatgccttcctggactatgcggccttctgcttctccacatttggggaccgtgtgaagctgtgggtgacyttccatgagccgtgggtgatgagctacgcaggctatggcaccggccagcaccctcccggcatctctgacccaggagtggcctcttttaaggtggctcact

SEQ ID NO: 63825 - DNA, 201 bp, Homo sapiens
ggaatcaagagcgtcacaactccagaccctcagtgatgcccacagaaaagcctatgagatttaccacgaaagctatgcttttcagggcggaaaactctctrttgtcctgcgagctgaagatatcccggagctcctgctagaaccacccatatctgcgcttgcccaggacacggtcgatttcctctctcttgatttgtctta

SEQ ID NO: 63826 - DNA, 201 bp, Homo sapiens
tcgccctgctttgcggcctccgggctcaggtgtacaagttctccatctcctggtcccggatcttccccatggggcacgggagcagccccagcctcccaggmgttgcctactacaacaagctgattgacaggctacaggatgcgggcatcgagcccatggccacgctgttccactgggacctgcctcaggccctgcaggatc

SEQ ID NO: 63827 - DNA, 201 bp, Homo sapiens
atgccttcctggactatgcggccttctgcttctccacatttggggaccgtgtgaagctgtgggtgaccttccatgagccgtgggtgatgagctacgcaggstatggcaccggccagcaccctcccggcatctctgacccaggagtggcctcttttaaggtggctcacttggtcctcaaggctcatgccagaacttggcacc

SEQ ID NO: 63828 - DNA, 201 bp, Homo sapiens
agagatccctctaaccaggaggatgtggaggcagccaggagatatgttcagttcatgggaggctggtttgcacatcctattttcaagaatggagattacartgaggtgatgaagacgcggatccgtgacaggagcttggctgcaggcctcaacaagtctcggctgccagaatttacagagagtgagaagaggaggatcaac

SEQ ID NO: 63829 - DNA, 201 bp, Homo sapiens
tccccaaagcatcagcgaagttctacgcctctgtggtccgatgcaatggcttccctgaccccgctacagggcctcacgcttgtctccaccagccagatgcyggacccaccatcagccccgtgagacaggaggaggtgcagttcctggggctaatgctcggcaccacagaagcacagacagctttgtacgttctcttttctc

SEQ ID NO: 63830 - DNA, 201 bp, Homo sapiens
agaaaatggcagagttggtgctggatccaccttgcacttctatcaagccctgttctttttcctccagcctgaagtcttcggcaaatagctcagagggacayggtcttgcctctcagtgcttattttagtgggaaaaacaccagccagccacatttccctgtgtctggctagagccaccattagactcagacagaatgcttc

SEQ ID NO: 63831 - DNA, 201 bp, Homo sapiens
acaccagccagccacatttccctgtgtctggctagagccaccattagactcagacagaatgcttcaggaatcgttgtcaccccttcaactggagcaggacrgaaggttgtctgtacttgggagggagtggggagtggtgggaagggagttgcttgtcacacgaatcaggaaactgctctccctcagctgggctggggtctc

SEQ ID NO: 63832 - DNA, 201 bp, Homo sapiens
cgaacatctcgtggcagcctattcctgtgcacactgtgcccatcactgaggacaggctgctgaagttcccgttgggcccatgtccccgttatgagcagctrcagaacgagacccggcagacaccagagtatcagaatgagagttctcggaatgcacaatttctggacatggtggccaacgagacagggcttacagacctga

SEQ ID NO: 63833 - DNA, 201 bp, Homo sapiens
tagattacaacggtgatggcgggcaagcggtccggctggagccgggcggctctcctccagctccttctcggcgtgaacctggtggtgatgccgcccacccrggcccggagtctgcgcttcgttaccttgctgtaccgccatggagaccgttcaccagtgaagacatatcccaaggacccctatcaggaagaagaatggccc

SEQ ID NO: 63834 - DNA, 201 bp, Homo sapiens
gacactaccctggttgccctgcaaatggcactggatgtctacaatggtgaacaagccccctacgcctcctgccacatatttgaactgtaccaggaagattytgggaatttctcagtggagatgtactttcggaacgagagtgacaaggccccctggccgctcagcctgcctggctgccctcaccgctgcccactgcaggac

SEQ ID NO: 63835 - DNA, 201 bp, Homo sapiens
tggctagagccaccattagactcagacagaatgcttcaggaatcgttgtcaccccttcaactggagcaggacggaaggttgtctgtacttgggagggagtrgggagtggtgggaagggagttgcttgtcacacgaatcaggaaactgctctccctcagctgggctggggtctccagggacctgagctacatgcaggttgtg

SEQ ID NO: 63836 - DNA, 201 bp, Homo sapiens
ctccagatgagaatgtggtaacctaggaagagtgagaccagtctgacttacactttctgttaccaatctctcagagcctggggctggcccgcaaacctacratttggtaaagaaatactaggaaggccgggcgcggtggctcaagtctgtaatcccagcactttgggaggctgaggtgggcggatcacgaggtcaggagac

SEQ ID NO: 63837 - DNA, 201 bp, Homo sapiens
acaccttctttagtgtctctcacttccgtgtcctggcttcctcctggctccagatgagaatgtggtaacctaggaagagtgagaccagtctgacttacacyttctgttaccaatctctcagagcctggggctggcccgcaaacctacaatttggtaaagaaatactaggaaggccgggcgcggtggctcaagtctgtaatc

SEQ ID NO: 63838 - DNA, 201 bp, Homo sapiens
agttgcttgtcacacgaatcaggaaactgctctccctcagctgggctggggtctccagggacctgagctacatgcaggttgtgagctggaaaagaaagttytagactgtggcccagaatagggctggggcagctcccagagaatgaatagtgctgtttcctattggactgatagtgctgtttcctgtgctttttcttcatt

SEQ ID NO: 63839 - DNA, 201 bp, Homo sapiens
cagagcattaacataaaagtgtcccagtcccacagtgccccaggtcccagcacccctgctccaaccctaaccttggatacttttggccctttaacaaatcrccacctctgcttgcaggacttgatcccatgtgtgggctccaaggccttgtctggcccacaccttctttagtgtctctcacttccgtgtcctggcttcctc

SEQ ID NO: 63840 - DNA, 201 bp, Homo sapiens
cagccagccagccacatttccctgtgtctggctagagccaccattagactcagacagaatgcttcaggaatcgttgtcaccccttcaactggagcaggacrgaaggttgtctgtacttgggagggagtggggagtggtgggaagggagttgcttgtcacacgaatcaggaaactgctctccctcagctgggctggggtctc

SEQ ID NO: 63841 - DNA, 201 bp, Homo sapiens; identical to SEQ ID NO: 63832

SEQ ID NO: 63842 - DNA, 201 bp, Homo sapiens
gcgcggtggctcaagtctgtaatcccagcactttgggaggctgaggtgggcggatcacgaggtcaggagaccgagaccatcctggctaacacggtgaaacsctgtctctactaaaaatacaaaaaattagctgggcgtggtagcgggcacctgtagtcctagctactcgagaggttgaggcaggagaatggcgtgaaccca

SEQ ID NO: 63843 - DNA, 201 bp, Homo sapiens
agaaaatggcagagttggtgctggatccaccttgcacttctatcaagccctgttctttttcctccagcctgaagtcttcggcaaatagctcagagggacayggtcttgcctctcagtgcttattttagtgggaaaaacagctaataccaggggtacaaacattggctcccaaggaactggatcacccaacagccagccagc

SEQ ID NO: 63844 - DNA, 201 bp, Homo sapiens; identical to SEQ ID NO: 63833

SEQ ID NO: 63845 - DNA, 201 bp, Homo sapiens; identical to SEQ ID NO: 63834

SEQ ID NO: 63846 - DNA, 201 bp, Homo sapiens; identical to SEQ ID NO: 63835

SEQ ID NO: 63847 - DNA, 201 bp, Homo sapiens
atgcccttgcagatcttgttcctgtagatgtagttgtcaacatgagtcttgcggcagcctggtattccggagttaatagaccaagaaacatcatggtgtayaattgtacaacaggcagcactaatcctttccactggggtgaagttgagtaccatgtaatttccactttcaagaggaatcctctcgaacaggccttcagac

SEQ ID NO: 63848 - DNA, 201 bp, Homo sapiens
ccccagcattcctgtatgatatctacctcaggatgactggaagaagcccaaggatgatgaaaacaataactcgtcttcacaaagctatggtgtttcttgartatttcacaagtaattcttgggtttggaatactgagaatgtcaatatgttaatgaatcaactaaaccctgaagataaaaagaccttcaatattgatgtac

SEQ ID NO: 63849 - DNA, 201 bp, Homo sapiens
cggcgcagctattgctggacggccagtgggagagcgaggcctgagcctctgcgtctaggatcaaaatggtttcaatcccagaatactatgaaggcaagaaygtcctcctcacaggagctaccggttttctagggaaggtgcttctggaaaagttgctgaggtcttgtcctaaggtgaattcagtatatgttttggtgaggc

SEQ ID NO: 63850 - DNA, 201 bp, Homo sapiens
cattagttgaagtgggttttagttttgtttaaaattataaccagcgtattttcacatcattctgtaagttaaatgatatcaaacatgaaagagatgttctcatttttctttttctgattaaacgtctgatgcatatcatttttctataagtaatcagttgcttttaaaatcagaaggctatattattctaatgaccctatt

SEQ ID NO: 63851 - DNA, 201 bp, Homo sapiens
ctgtagatgtagttgtcaacatgagtcttgcggcagcctggtattccggagttaatagaccaagaaacatcatggtgtataattgtacaacaggcagcacyaatcctttccactggggtgaagttgagtaccatgtaatttccactttcaagaggaatcctctcgaacaggccttcagacggcccaatgtaaatctaacct

SEQ ID NO: 63852 - DNA, 201 bp, Homo sapiens
tcattagttgaagtgggttttagttttgtttaaaattataaccagcgtattttcacatcattctgtaagttaaatgatatcaaacatgaaagagatgttctcatttttctttttctgattaaacgtctgatgcatatcatttttctataagtaatcagttgcttttaaaatcagaaggctatattattctaatgaccctat

SEQ ID NO: 63853 - DNA, 201 bp, Homo sapiens
ttcattagttgaagtgggttttagttttgtttaaaattataaccagcgtattttcacatcattctgtaagttaaatgatatcaaacatgaaagagatgttctcatttttctttttctgattaaacgtctgatgcatatcatttttctataagtaatcagttgcttttaaaatcagaaggctatattattctaatgacccta

SEQ ID NO: 63854 - DNA, 201 bp, Homo sapiens; identical to SEQ ID NO: 63847

SEQ ID NO: 63855 - DNA, 201 bp, Homo sapiens; identical to SEQ ID NO: 63848

SEQ ID NO: 63856 - DNA, 201 bp, Homo sapiens; identical to SEQ ID NO: 63849

SEQ ID NO: 63857 - DNA, 201 bp, Homo sapiens; identical to SEQ ID NO: 63850

SEQ ID NO: 63858 - DNA, 201 bp, Homo sapiens; identical to SEQ ID NO: 63851

SEQ ID NO: 63859 - DNA, 201 bp, Homo sapiens; identical to SEQ ID NO: 63852

SEQ ID NO: 63860 - DNA, 201 bp, Homo sapiens; identical to SEQ ID NO: 63853

SEQ ID NO: 63861 - DNA, 201 bp, Homo sapiens
atgcccttgcagatcttgttcctgtagatgtagttgtcaacatgagtcttgcggcagcctggtattccggagttaatagaccaagaaacatcatggtgtayaattgtacaacaggcagcactaatcctttccactggggtgaagttggtatgattttacctgtgtttttgaatgttagaataaatcttaaagaaccaagtt

SEQ ID NO: 63862 - DNA, 201 bp, Homo sapiens; identical to SEQ ID NO: 63849

SEQ ID NO: 63863 - DNA, 188 bp, Homo sapiens
ctgtagatgtagttgtcaacatgagtcttgcggcagcctggtattccggagttaatagaccaagaaacatcatggtgtataattgtacaacaggcagcacyaatcctttccactggggtgaagttggtatgattttacctgtgtttttgaatgttagaataaatcttaaagaaccaagttccctgaag

SEQ ID NO: 63864 - DNA, 201 bp, Homo sapiens
gtttggtaaagaaatccaaagatgtagtagactacagtgaggaaaattttgcaattgtatttgctgctatgggtgtaaacatggaaactgcccggttcttyaaatctgactttgaagaaaatggctcaatggacaatgtctgcctctttttgaacttggctaatgacccaaccattgagcgaattatcactcctcgcctgg

SEQ ID NO: 63865 - DNA, 129 bp, Homo sapiens
aattcctgcgccttcctgacgtgagccctgagcgatcttctatgcagttctgccatgcgtcctgttggtctctctgtgttctttgttacttgggtgcaatrgcaacttccctaccccgtgcattccatc

SEQ ID NO: 63866 - DNA, 201 bp, Homo sapiens
cctcactatcacggttaatgaagtctgctattggagaagggatgaccaggaaggatcatgccgatgtatctaaccagctatatgcgtgctatgctattggraaggatgtgcaagccatgaaagctgtcgttggagaagaagcccttacctcagatgatcttctctacttggaatttctgcagaagtttgagaggaacttca

SEQ ID NO: 63867 - DNA, 201 bp, Homo sapiens
tcgggacagaggagacaagatggcgctgcgggcgatgcgggggattgtcaacggggccgcacccgagctacccgtgcccaccggtgggccggcggtgggakctcgggagcaggcgctggcagtcagtcggaactacctctcccagcctcgcctcacatacaagacagtatctggagtcaatggtccactagtgatcttaga

SEQ ID NO: 63868 - DNA, 201 bp, Homo sapiens
aatacacagaatcctgcaactttttgcacagctggtatctgtctggtagcagtgagaccccttgtcttggtgatccttactgggtttccaagcagaggagycacatgattacaattgccagtagagttgttgtttggggtacaagatgagaagaaagaaaaacctacagcctttctacattctgacatgctaacagtggtt

SEQ ID NO: 63869 - DNA, 201 bp, Homo sapiens; identical to SEQ ID NO: 63864

SEQ ID NO: 63870 - DNA, 201 bp, Homo sapiens
aattcctgcgccttcctgacgtgagccctgagcgatcttctatgcagttctgccatgcgtcctgttggtctctctgtgttctttgttacttgggtgcaatrgcaacttccctaccccgtgcattccatctttcatgttgtgtaaagttcttcacttttttctctgagggctgggggttgggggagtcagcatgattatatt

SEQ ID NO: 63871 - DNA, 201 bp, Homo sapiens
cgatcttctatgcagttctgccatgcgtcctgttggtctctctgtgttctttgttacttgggtgcaatagcaacttccctaccccgtgcattccatctttyatgttgtgtaaagttcttcacttttttctctgagggctgggggttgggggagtcagcatgattatattttaatgtagaaaatgtgacatctggatataaa

SEQ ID NO: 63872 - DNA, 201 bp, Homo sapiens; identical to SEQ ID NO: 63866

SEQ ID NO: 63873 - DNA, 201 bp, Homo sapiens; identical to SEQ ID NO: 63867

SEQ ID NO: 63874 - DNA, 201 bp, Homo sapiens; identical to SEQ ID NO: 63868

SEQ ID NO: 63875 - DNA, 201 bp, Homo sapiens
taagatgcccatttctaatacaatgtgtgtaggaattatttgtatgtatgaggtatgattgtaaagattgagcattggaaggggtatcagagaccatgtagttcaactttccactcaaagtaagatttatgaattatttaaatgatagttgttacttggaacagccacttgagaggctctcttggtattgtttggaattgt

SEQ ID NO: 63876 - DNA, 201 bp, Homo sapiens
cttttaatggtagtatgtttttaggtggaataaattaatatgtgattggtttcaaggaaatgtactctattatgtaatacttccattttataagatgcccrtttctaatacaatgtgtgtaggaattatttgtatgtatgaggtatgattgtaaagattgagcattggaaggggtatcagagaccatgtagttcaactttc

SEQ ID NO: 63877 - DNA, 201 bp, Homo sapiens
atttttcttaaaattaaaacgaatttttattttgaatttataactgcattttaaatatattggggacagattgcgctgagacctggttatgagcaagccartcttttgaatctagagaatggaattcttaggtttatatttctgttaagaaatactataaatatgactcttatgagaagactttgttgctctgtagtgttt

SEQ ID NO: 63878 - DNA, 201 bp, Homo sapiens
taacttctgaagtaatttgtaaaaaagatttgtagagtcaatcatgtgtttaaattattttatcacaaacttaacatggaagatattcctttttaactttstggtaacttctttgaagttatttagaaatatcctttggaacaattattttattgtctaataaatattgacttctcttgaattattttgcagactagtgag

SEQ ID NO: 63879 - DNA, 201 bp, Homo sapiens
cttctttgaagttatttagaaatatcctttggaacaattattttattgtctaataaatattgacttctcttgaattattttgcagactagtgagtctgtamcataagtattaatcacctccactcatattaaagtgatcattaagaatccagaagctggcttctgcatttgctcagttatacttttaatggtagtatgttt

SEQ ID NO: 63880 - DNA, 201 bp, Homo sapiens
tatgtccggccacgttcctggacttgtcgttacgtgttttagaagcttggactttgtttcctccttgtcactgaagattgggtagctccctgatttggagycagctgtttccagttgttactgaagttatctgtgttatttggaccactccaggctttacagatgactcactccattcctaggtcacttgaagccaaactg

SEQ ID NO: 63881 - DNA, 201 bp, Homo sapiens
agagattcaaatctgctgccatgttagctgtctttgctgtatctgctgtagtacacgaatatgccttggctgtttgcttgagctttttctatcccgtgctsttcgtgctcttcatgttctttggaatggctttcaacttcattgtcaatgatagtcggaaaaagccgatttggaatgttctgatgtggacttctcttttct

SEQ ID NO: 63882 - DNA, 201 bp, Homo sapiens; identical to SEQ ID NO: 63875

SEQ ID NO: 63883 - DNA, 201 bp, Homo sapiens; identical to SEQ ID NO: 63876

SEQ ID NO: 63884 - DNA, 201 bp, Homo sapiens; identical to SEQ ID NO: 63877

SEQ ID NO: 63885 - DNA, 201 bp, Homo sapiens; identical to SEQ ID NO: 63878

SEQ ID NO: 63886 - DNA, 201 bp, Homo sapiens; identical to SEQ ID NO: 63879

SEQ ID NO: 63887 - DNA, 201 bp, Homo sapiens; identical to SEQ ID NO: 63880

SEQ ID NO: 63888 - DNA, 201 bp, Homo sapiens; identical to SEQ ID NO: 63881

SEQ ID NO: 63889 - DNA, 201 bp, Homo sapiens; identical to SEQ ID NO: 63875

SEQ ID NO: 63890 - DNA, 201 bp, Homo sapiens; identical to SEQ ID NO: 63876

SEQ ID NO: 63891 - DNA, 201 bp, Homo sapiens; identical to SEQ ID NO: 63877

SEQ ID NO: 63892 - DNA, 201 bp, Homo sapiens; identical to SEQ ID NO: 63878

SEQ ID NO: 63893 - DNA, 201 bp, Homo sapiens; identical to SEQ ID NO: 63879

SEQ ID NO: 63894 - DNA, 201 bp, Homo sapiens; identical to SEQ ID NO: 63880

SEQ ID NO: 63895 - DNA, 201 bp, Homo sapiens; identical to SEQ ID NO: 63881

SEQ ID NO: 63896 - DNA, 201 bp, Homo sapiens; identical to SEQ ID NO: 63875

SEQ ID NO: 63897 - DNA, 201 bp, Homo sapiens; identical to SEQ ID NO: 63876

SEQ ID NO: 63898 - DNA, 201 bp, Homo sapiens; identical to SEQ ID NO: 63877

SEQ ID NO: 63899 - DNA, 201 bp, Homo sapiens; identical to SEQ ID NO: 63878

SEQ ID NO: 63900 - DNA, 201 bp, Homo sapiens; identical to SEQ ID NO: 63879

SEQ ID NO: 63901 - DNA, 201 bp, Homo sapiens; identical to SEQ ID NO: 63880

SEQ ID NO: 63902 - DNA, 201 bp, Homo sapiens; identical to SEQ ID NO: 63881

SEQ ID NO: 63903 - DNA, 201 bp, Homo sapiens
gggtggagaagtacacgatctcacaagaagcctacgaccagaggcaagacacggtccgctctttcctgaagcgcagcaagctcggccggtacaacgaggargagcgggctcagcaggaggccgaggccgcccagcgcctggccgaggagaaggcccaggccagctccatccccgtgggcagccgctgtgaggtgcgggcgg

SEQ ID NO: 63904 - DNA, 201 bp, Homo sapiens
ccaggccaagtatggcgcctttgtcaagccagcagtcgtgacggtgggggacttcccggaggaggactacgggttggacgagatatgacacctaaggaatkcccctgcttcagctcctagctcagccactgactgcccctcctgtgtgtgcccatggcccttttctcctgaccccattttaattttattcattttttcctt

SEQ ID NO: 63905 - DNA, 201 bp, Homo sapiens
gggaaaaatgatggcagtgtgaatgggaaacgctacttcgaatgccaggccaagtatggcgcctttgtcaagccagcagtcgtgacggtgggggacttccyggaggaggactacgggttggacgagatatgacacctaaggaattcccctgcttcagctcctagctcagccactgactgcccctcctgtgtgtgcccatgg

SEQ ID NO: 63906 - DNA, 201 bp, Homo sapiens
atccaggacagaagccaaggcgcttggcttggttgaaggccagtgcgcatgcgcgagtttacccttcgcggactgggcgagctcttgccactcctacctcsgggcttcagtcttcgccgcctgttctggtcctttcccgggccgctattggaagaaccgtgaactatggaaggcccctctggattggctgggctggcccaa

SEQ ID NO: 63907 - DNA, 201 bp, Homo sapiens
ggggaagggacggcggcgattggcggacgctcctggcaggagagcgcggattggtcaggcacggagcaggaggcggggctgatagcccagcagcagcagcrgcggcggcggctgcggagcgggtgtgaggcggctggaccgcgctgcaggcatccgcagggcgcggcaagatggaggtgacgggggtgtcggcacccacgg

SEQ ID NO: 63908 - DNA, 201 bp, Homo sapiens
ttggtgagtatgaggacgtgtcccgggtggagaagtacacgatctcacaagaagcctacgaccagaggcaagacacggtccgctctttcctgaagcgcagmaagctcggccggtacaacgaggaggagcgggctcagcaggaggccgaggccgcccagcgcctggccgaggagaaggcccaggccagctccatccccgtgg

SEQ ID NO: 63909 - DNA, 201 bp, Homo sapiens
ttgacgacaagttctacagcaagctggatcaagaggatgcgctcctgggctcctaccctgtagatgacggctgccgcatccacgtcattgaccacagtggygcccgccttggtgagtatgaggacgtgtcccgggtggagaagtacacgatctcacaagaagcctacgaccagaggcaagacacggtccgctctttcctga

SEQ ID NO: 63910 - DNA, 201 bp, Homo sapiens
gtgcgggcggcgggacaatcccctcgccggggcaccgtcatgtatgtaggtctcacagatttcaagcctggctactggattggtgtccgctatgatgagcmactggggaaaaatgatggcagtgtgaatgggaaacgctacttcgaatgccaggccaagtatggcgcctttgtcaagccagcagtcgtgacggtgggggac

SEQ ID NO: 63911 - DNA, 201 bp, Homo sapiens
tctggtcctttcccgggccgctattggaagaaccgtgaactatggaaggcccctctggattggctgggctggcccaagagtaaggagagccctcttcctgscggtggggaagggacggcggcgattggcggacgctcctggcaggagagcgcggattggtcaggcacggagcaggaggcggggctgatagcccagcagcag

SEQ ID NO: 63912 - DNA, 201 bp, Homo sapiens
taaaccgcaaaacactgagcatccaggacagaagccaaggcgcttggcttggttgaaggccagtgcgcatgcgcgagtttacccttcgcggactgggcgarctcttgccactcctacctccgggcttcagtcttcgccgcctgttctggtcctttcccgggccgctattggaagaaccgtgaactatggaaggcccctctg

SEQ ID NO: 63913 - DNA, 201 bp, Homo sapiens
cgcctcagtttacagaatagtatggatctggtgccagagccgggaaaacgatgcgcatcgtaaaccgcaaaacactgagcatccaggacagaagccaaggygcttggcttggttgaaggccagtgcgcatgcgcgagtttacccttcgcggactgggcgagctcttgccactcctacctccgggcttcagtcttcgccgcc

SEQ ID NO: 63914 - DNA, 201 bp, Homo sapiens; identical to SEQ ID NO: 63903

SEQ ID NO: 63915 - DNA, 201 bp, Homo sapiens; identical to SEQ ID NO: 63908

SEQ ID NO: 63916 - DNA, 201 bp, Homo sapiens; identical to SEQ ID NO: 63909

SEQ ID NO: 63917 - DNA, 201 bp, Homo sapiens; identical to SEQ ID NO: 63910

SEQ ID NO: 63918 - DNA, 201 bp, Homo sapiens; identical to SEQ ID NO: 63904

SEQ ID NO: 63919 - DNA, 201 bp, Homo sapiens; identical to SEQ ID NO: 63905

SEQ ID NO: 63920 - DNA, 201 bp, Homo sapiens
aagaagcctacgaccagaggcaaggtacgggcaggtgggcgtcgagggacacggtccgctctttcctgaagcgcagcaagctcggccggtacaacgaggargagcgggctcagcaggaggccgaggccgcccagcgcctggccgaggagaaggcccaggccagctccatccccgtgggcagccgctgtgaggtgcgggcgg

SEQ ID NO: 63921 - DNA, 201 bp, Homo sapiens; identical to SEQ ID NO: 63904

SEQ ID NO: 63922 - DNA, 201 bp, Homo sapiens; identical to SEQ ID NO: 63905

SEQ ID NO: 63923 - DNA, 201 bp, Homo sapiens; identical to SEQ ID NO: 63906

SEQ ID NO: 63924 - DNA, 201 bp, Homo sapiens; identical to SEQ ID NO: 63907

SEQ ID NO: 63925 - DNA, 201 bp, Homo sapiens
gggtggagaagtacacgatctcacaagaagcctacgaccagaggcaaggtacgggcaggtgggcgtcgagggacacggtccgctctttcctgaagcgcagmaagctcggccggtacaacgaggaggagcgggctcagcaggaggccgaggccgcccagcgcctggccgaggagaaggcccaggccagctccatccccgtgg

SEQ ID NO: 63926 - DNA, 201 bp, Homo sapiens
ttgacgacaagttctacagcaagctggatcaagaggatgcgctcctgggctcctaccctgtagatgacggctgccgcatccacgtcattgaccacagtggygcccgccttggtgagtatgaggacgtgtcccgggtggagaagtacacgatctcacaagaagcctacgaccagaggcaaggtacgggcaggtgggcgtcga

SEQ ID NO: 63927 - DNA, 201 bp, Homo sapiens; identical to SEQ ID NO: 63910

SEQ ID NO: 63928 - DNA, 201 bp, Homo sapiens; identical to SEQ ID NO: 63911

SEQ ID NO: 63929 - DNA, 201 bp, Homo sapiens; identical to SEQ ID NO: 63912

SEQ ID NO: 63930 - DNA, 201 bp, Homo sapiens; identical to SEQ ID NO: 63913

SEQ ID NO: 63931 - DNA, 201 bp, Homo sapiens
tcttccaggaggacaatgacatcccgttgtacctgaagggcggcatcgttgacaacatcctgtaccgagtgacaatgacgctgtgtctgggcggcactgtytacagcttgtactcccttggctgggcctccttccccaggaattaagaccaagaagcctggggggcctgagagacttgaacaagtgtcaataaacgctggc

SEQ ID NO: 63932 - DNA, 201 bp, Homo sapiens
agctcttccaggaggacaatgacatcccgttgtacctgaagggcggcatcgttgacaacatcctgtaccgagtgacaatgacgctgtgtctgggcggcacygtctacagcttgtactcccttggctgggcctccttccccaggaattaagaccaagaagcctggggggcctgagagacttgaacaagtgtcaataaacgct

SEQ ID NO: 63933 - DNA, 201 bp, Homo sapiens; identical to SEQ ID NO: 63931

SEQ ID NO: 63934 - DNA, 201 bp, Homo sapiens; identical to SEQ ID NO: 63932

SEQ ID NO: 63935 - DNA, 177 bp, Homo sapiens
gttacagatacggaaacaggctcggaggtgcaatctctggctgtgtagacagaacagggagttggaacacggccttmtgcgtttcctcactctcacataccagcgggcagggagagatccggggaggagttgcacttgcccccggcggaaatctccaaaaatctgcaaaaatgtatt

SEQ ID NO: 63936 - DNA, 201 bp, Homo sapiens
ttgctgagggtcacattgagctgcaggttgaatccggggtgcctttaggattcagcaccatggcggaagacatggagaccaaaatcaagaactacaagacygccccttttgacagccgcttccccaaccagaaccagactagaaactgctggcagaactacctggacttccaccgctgtcagaaggcaatgaccgctaaag

SEQ ID NO: 63937 - DNA, 201 bp, Homo sapiens
gtaccagtccctctgccccacatcctgggtcacagactgggatgagcaacgggctgaaggcacgtttcccgggaagatctgaactggctgcatctcccttwcctctgtcctccatccttctcccaggatggtgaagggggacctggtacccagtgatccccaccccaggatcctaaatcatgacttacctgctaataaaaa

SEQ ID NO: 63938 - DNA, 201 bp, Homo sapiens
ccgcctcgcccagcctgccccctactcagccatcaaggaggctgtaaaagcagcagccaaggggcccatggctggcatccttgcctacaccgaggatgagstcgtctctacggacttcctcggtgatacccactcgtccatcttcgatgctaaggccggcattgcgctcaatgacaatttcgtgaagctcatttcatggta

SEQ ID NO: 63939 - DNA, 201 bp, Homo sapiens
cggtgaccagagcaccgcccccacctgagcctaaggctgaagtagagccccagccacaaccagagcccacaccagtcagggaggaaataaagccaccaccrccaccactgcctcctcaccccgctactcctcctcctaagatggtgtctgtggcccgggagctgactgtgggcatcaatggatttggacgcatcggtcgcc

SEQ ID NO: 63940 - DNA, 119 bp, Homo sapiens
aggacccacagccctggcsctccgcacgcacctcggtaacatcacagcaggtccaggccaatgataaccttataagaggccatgtcgaagcgcgacatcgtcctcaccaatgtcaccgt

SEQ ID NO: 63941 - DNA, 201 bp, Homo sapiens
gcccctacgtggtggagtccacaggcgtgtacctctccatacaggcagcttcggaccacatctctgcaggtgctcaacgtgtggtcatctccgcgccctcrccggatgcaccaatgttcgtcatgggtgtcaatgaaaatgactataaccctggctccatgaacattgtgagcaacgcgtcctgcaccaccaactgtttgg

SEQ ID NO: 63942 - DNA, 201 bp, Homo sapiens
caggcgtgtacctctccatacaggcagcttcggaccacatctctgcaggtgctcaacgtgtggtcatctccgcgccctcaccggatgcaccaatgttcgtyatgggtgtcaatgaaaatgactataaccctggctccatgaacattgtgagcaacgcgtcctgcaccaccaactgtttggctcccctcgccaaagtcatcc

SEQ ID NO: 63943 - DNA, 201 bp, Homo sapiens
gactgtgggcatcaatggatttggacgcatcggtcgcctggtcctgcgcgcctgcatggagaagggtgttaaggtggtggctgtgaatgatccattcattracccggaatacatggtgtacatgtttaagtatgactccacccacggccgatacaagggaagtgtggaattcaggaatggacaactggtcgtggacaacca

SEQ ID NO: 63944 - DNA, 201 bp, Homo sapiens
tcctcaccccgctactcctcctcctaagatggtgtctgtggcccgggagctgactgtgggcatcaatggatttggacgcatcggtcgcctggtcctgcgckcctgcatggagaagggtgttaaggtggtggctgtgaatgatccattcattgacccggaatacatggtgtacatgtttaagtatgactccacccacggccg

SEQ ID NO: 63945 - DNA, 201 bp, Homo sapiens; identical to SEQ ID NO: 63938

SEQ ID NO: 63946 - DNA, 201 bp, Homo sapiens; identical to SEQ ID NO: 63939

SEQ ID NO: 63947 - DNA, 119 bp, Homo sapiens; identical to SEQ ID NO: 63940

SEQ ID NO: 63948 - DNA, 201 bp, Homo sapiens
gcccctacgtggtggagtccacaggcgtgtacctctccatacaggcagcttcggaccacatctctgcaggtgctcaacgtgtggtcatctccgcgccctcrccggatgcaccaatgttcgtcatgggtgtcaatgaaaatgactataaccctggctccatgaacattgtgagtgtccgtgcacaccttggctgtttcagca

SEQ ID NO: 63949 - DNA, 201 bp, Homo sapiens; identical to SEQ ID NO: 63944

SEQ ID NO: 63950 - DNA, 201 bp, Homo sapiens; identical to SEQ ID NO: 63943

SEQ ID NO: 63951 - DNA, 201 bp, Homo sapiens
caggcgtgtacctctccatacaggcagcttcggaccacatctctgcaggtgctcaacgtgtggtcatctccgcgccctcaccggatgcaccaatgttcgtyatgggtgtcaatgaaaatgactataaccctggctccatgaacattgtgagtgtccgtgcacaccttggctgtttcagcaacgcgtcctgcaccaccaact

SEQ ID NO: 63952 - DNA, 201 bp, Homo sapiens
cgtgtggtcatctccgcgccctcaccggatgcaccaatgttcgtcatgggtgtcaatgaaaatgactataaccctggctccatgaacattgtgagtgtccrtgcacaccttggctgtttcagcaacgcgtcctgcaccaccaactgtttggctcccctcgccaaagtcatccacgagcgatttgggatcgtggaagggttg

SEQ ID NO: 63953 - DNA, 201 bp, Homo sapiens
caaaaattggaagcaattactctaagatatcaaaagattgaagcaagccatgaaacctctgcgcggagagagccgagcccgaggcggcggggagccagcamgtgtgcgcagctccgccctcttttggcgaagcacctaggcctggcccctcccgcgacctgtagcgcggcggagcaagcgcggaaggctgggagggctgcg

SEQ ID NO: 63954 - DNA, 201 bp, Homo sapiens
gcgtcgccatggagcccgacgggacttacgagccgggcttcgtgggtattcgcttctgccaggaatgtaacaacatgctgtaccccaaggaagacaaggaraaccgcattctgctctacgcgtgccggaactgtgattaccagcaggaggccgacaacagctgcatctatgtcaacaagatcacgcacgaagtggacgaac

SEQ ID NO: 63955 - DNA, 201 bp, Homo sapiens
aggcggcggggagccagcacgtgtgcgcagctccgccctcttttggcgaagcacctaggcctggcccctcccgcgacctgtagcgcggcggagcaagcgcrgaaggctgggagggctgcgcgggctgcgcgtcgccatggagcccgacgggacttacgagccgggcttcgtgggtattcgcttctgccaggaatgtaacaa

SEQ ID NO: 63956 - DNA, 201 bp, Homo sapiens
ttgggccagcccagccaatccagaggggccttccatagttcacggttcttccaatagcggcccgggaaaggaccagaacaggcggcgaagactgaagcccsgaggtaggagtggcaagagctcgcccagtccgcgaagggtaaactcgcgcatgcgcactggccttcaaccaagccaagcgccttggcttctgtcctggat

SEQ ID NO: 63957 - DNA, 201 bp, Homo sapiens
ccgtgggtgccgacacccccgtcacctccatcttgccgcgccctgcggatgcctgcagcgcggtccagccgcctcacacccgctccgcagccgccgccgcygctgctgctgctgggctatcagccccgcctcctgctccgtgcctgaccaatccgcgctctcctgccaggagcgtccgccaatcgccgccgtcccttcccc

SEQ ID NO: 63958 - DNA, 201 bp, Homo sapiens
ctgctgctgggctatcagccccgcctcctgctccgtgcctgaccaatccgcgctctcctgccaggagcgtccgccaatcgccgccgtcccttccccaccgscaggaagagggctctccttactcttgggccagcccagccaatccagaggggccttccatagttcacggttcttccaatagcggcccgggaaaggaccaga

SEQ ID NO: 63959 - DNA, 201 bp, Homo sapiens
cagaggggccttccatagttcacggttcttccaatagcggcccgggaaaggaccagaacaggcggcgaagactgaagcccggaggtaggagtggcaagagytcgcccagtccgcgaagggtaaactcgcgcatgcgcactggccttcaaccaagccaagcgccttggcttctgtcctggatgctcagtgttttgcggttta

SEQ ID NO: 63960 - DNA, 201 bp, Homo sapiens
ggcggcgaagactgaagcccggaggtaggagtggcaagagctcgcccagtccgcgaagggtaaactcgcgcatgcgcactggccttcaaccaagccaagcrccttggcttctgtcctggatgctcagtgttttgcggtttacgatgcgcatcgttttcccggctctggcaccagatccatactattctgtaaactgaggcg

SEQ ID NO: 63961 - DNA, 201 bp, Homo sapiens
cgtgccggaactgtgattaccagcaggaggccgacaacagctgcatctatgtcaacaagatcacgcacgaagtggacgaactgacccagattatcgccgaygtgtcccaggaccccacgttgccgcggaccgaggaccacccgtgccaaaagtgcggccacaaggaggctgtgttcttccagtcacacagtgcgcgggccg

SEQ ID NO: 63962 - DNA, 201 bp, Homo sapiens
tgcgcagctccgccctcttttggcgaagcacctaggcctggcccctcccgcgacctgtagcgcggcggagcaagcgcggaaggctgggagggctgcgcggrctgcgcgtcgccatggagcccgacgggacttacgagccgggcttcgtgggtattcgcttctgccaggaatgtaacaacatgctgtaccccaaggaagaca

SEQ ID NO: 63963 - DNA, 201 bp, Homo sapiens
ccgcccgcacctcacagcggctgcccacggggatggagctggcctgggccttctcctcggccaggcgctgggcggcctcggcctcctgctgagcccgctcytcctcgttgtaccggccgagcttgctgcgcttcaggaaagagcggaccgtgtctgcttcttgtgagatcgtgtacttctccacccgggacacgtcctcat

SEQ ID NO: 63964 - DNA, 201 bp, Homo sapiens
aaggaaaaaatgaataaaattaaaatggggtcaggagaaaagggccatgggcacacacaggaggggcagtcagtggctgagctaggagctgaagcaggggmattccttaggtgtcatatctcgtccaacccgtagtcctcctccgggaagtcccccaccgtcacgactgctggcttgacaaaggcgccatacttggcctgg

SEQ ID NO: 63965 - DNA, 201 bp, Homo sapiens
ccatgggcacacacaggaggggcagtcagtggctgagctaggagctgaagcaggggaattccttaggtgtcatatctcgtccaacccgtagtcctcctccrggaagtcccccaccgtcacgactgctggcttgacaaaggcgccatacttggcctggcattcgaatgggaattcttgttacctgccatcatttttccccag

SEQ ID NO: 63966 - DNA, 201 bp, Homo sapiens; identical to SEQ ID NO: 63956

SEQ ID NO: 63967 - DNA, 201 bp, Homo sapiens; identical to SEQ ID NO: 63957

SEQ ID NO: 63968 - DNA, 201 bp, Homo sapiens
ccacggggatggagctggcctgggccttctcctcggccaggcgctgggcggcctcggcctcctgctgagcccgctcctcctcgttgtaccggccgagcttkctgcgcttcaggaaagagcggaccgtgtctgcttcttgtgagatcgtgtacttctccacccgggacacgtcctcatactcaccaaggcgggcgccactgt

SEQ ID NO: 63969 - DNA, 201 bp, Homo sapiens
gaagtcccccaccgtcacgactgctggcttgacaaaggcgccatacttggcctggcattcgaatgggaattcttgttacctgccatcatttttccccagtkgctcatcatagcggacaccaatccagtagccaggcttgaaatctccacgcacctacatacatgacggtgccccggcgaggggattgtcccgccgcccgca

SEQ ID NO: 63970 - DNA, 201 bp, Homo sapiens; identical to SEQ ID NO: 63958

SEQ ID NO: 63971 - DNA, 201 bp, Homo sapiens; identical to SEQ ID NO: 63959

SEQ ID NO: 63972 - DNA, 201 bp, Homo sapiens; identical to SEQ ID NO: 63960

SEQ ID NO: 63973 - DNA, 201 bp, Homo sapiens; identical to SEQ ID NO: 63961

SEQ ID NO: 63974 - DNA, 201 bp, Homo sapiens; identical to SEQ ID NO: 63953

SEQ ID NO: 63975 - DNA, 201 bp, Homo sapiens; identical to SEQ ID NO: 63954

SEQ ID NO: 63976 - DNA, 201 bp, Homo sapiens; identical to SEQ ID NO: 63955

SEQ ID NO: 63977 - DNA, 201 bp, Homo sapiens
cgagcttgctgcgcttcaggaaagagcggaccgtgtctgcttcttgtgagatcgtgtacttctccacccgggacacgtcctcatactcaccaaggcgggcrccactgtggtcaatgacctccgtcatctacagggtaggagcccaggagcgcatcctcttgatccagcttgctgtagaacttgtcgtcaactccatacagc

SEQ ID NO: 63978 - DNA, 201 bp, Homo sapiens; identical to SEQ ID NO: 63962

SEQ ID NO: 63979 - DNA, 201 bp, Homo sapiens
aaacgagaagacacccatcgctatcgagatcgagcattttgtggacatcatcgcgggcctggccattctcttcggtgccacattttttattgtggccatgkgcattggctacaccttcctgcgggccatggtcttcttcatggccatcgtggtggcctatgtgcctgaggggctgctggccactgtcacagtctgcctgtc

SEQ ID NO: 63980 - DNA, 201 bp, Homo sapiens
tctcggagctgacgctgggcaacgccatgggctaccgggaccgcttcccaaaagtctgcgagatacccttcaactccaccaacaagttccagctgtccatmcatacgctggaggacccgcgggacccgcgacacttgctggtgatgaagggcgcccccgagcgcgtgctggagcgctgcagctccatccttatcaagggcc

SEQ ID NO: 63981 - DNA, 201 bp, Homo sapiens
gactgatcttcgacaacctgaagaagtctattgcctacacattgaccaagaacatcccagagctgacaccctacctcatctacatcaccgtcagcgtgccyctgcccctcgggtgcatcaccatcctcttcatcgaactctgcactgacattttcccatctgtgtccctggcatatgaaaaggccgagagtgacatcatgc

SEQ ID NO: 63982 - DNA, 201 bp, Homo sapiens
gagtctgagccacagacccgctcacccgagtgcacgcacgagagccctctggagacccgcaacatcgccttcttctccaccatgtgccttgagggcaccgygcagggcctggtggtgaacacgggcgaccgcaccatcattgggcgcatcgcatcgctggcgtcgggggtggaaaacgagaagacacccatcgctatcgag

SEQ ID NO: 63983 - DNA, 201 bp, Homo sapiens
ccgcctacctcagcctgggaggcctgggcgaacgcgtgctcggcttctgccagctctacctgaatgagaaggactacccgcctggctatgccttcgacgtrgaggccatgaactttccatctagcggcctctgctttgcgggacttgtatccatgattgacccaccccgggccaccgtccctgatgctgtgctcaagtgtc

SEQ ID NO: 63984 - DNA, 201 bp, Homo sapiens
gaaggcagcgagacagtggaggacatcgctgcccgcctccgtgtgcccgtagaccaggttaatcgcaaggatgcccgtgcctgtgtgatcaatggcatgcwgctgaaggacatggacccatcggaactggtcgaggccctgcgcacccaccccgagatggtgtttgcgcgcaccagcccccagcagaagctggtgatcgtg

SEQ ID NO: 63985 - DNA, 201 bp, Homo sapiens
agatgaaaggtggggacagagtgcccgccgacatccgcatcctggcggcccagggctgcaaggtggacaactcctcgctgacaggggagtctgagccacaracccgctcacccgagtgcacgcacgagagccctctggagacccgcaacatcgccttcttctccaccatgtgccttgagggcaccgcgcagggcctggtgg

SEQ ID NO: 63986 - DNA, 201 bp, Homo sapiens
agaccagtgccaccaagggcctctctgcgagcctggctgctgagctgctgctgcgggatgggcccaacgcactgcggccaccacggggcaccccagagtaygtcaagttcgcgaggcagctggccgggggcctgcagtgcctcatgtgggttgccgccgccatctgcctcatcgcctttgccatccaggctagtgaggggg

SEQ ID NO: 63987 - DNA, 201 bp, Homo sapiens
tacctcagcctgggaggcctgggcgaacgcgtgctcggcttctgccagctctacctgaatgagaaggactacccgcctggctatgccttcgacgtagaggscatgaactttccatctagcggcctctgctttgcgggacttgtatccatgattgacccaccccgggccaccgtccctgatgctgtgctcaagtgtcgcacc

SEQ ID NO: 63988 - DNA, 201 bp, Homo sapiens
cgctgttgcccagggagctggtgggaccaggaactctactattagagggacgactgccttcaagcatccctgcaactgccacagcaggtgggggcagggcwcgtgggaccctctggacagccaccaagatatctgagcaaccaagagtcccagccccaccagtatctgcttctgtagcccacggcaccccaaacttggagg

SEQ ID NO: 63989 - DNA, 201 bp, Homo sapiens
gtgaccaccccatcaccgccaaggccattgcagccagtgtgggcatcatctcggaaggcagcgagacagtggaggacatcgctgcccgcctccgtgtgccygtagaccaggttaatcgcaaggatgcccgtgcctgtgtgatcaatggcatgcagctgaaggacatggacccatcggaactggtcgaggccctgcgcaccc

SEQ ID NO: 63990 - DNA, 201 bp, Homo sapiens
ccatgaactttccatctagcggcctctgctttgcgggacttgtatccatgattgacccaccccgggccaccgtccctgatgctgtgctcaagtgtcgcacygcaggcatccgggtgatcatggtaacgggtgaccaccccatcaccgccaaggccattgcagccagtgtgggcatcatctcggaaggcagcgagacagtgg

SEQ ID NO: 63991 - DNA, 201 bp, Homo sapiens
ccaccaagggcctctctgcgagcctggctgctgagctgctgctgcgggatgggcccaacgcactgcggccaccacggggcaccccagagtacgtcaagttygcgaggcagctggccgggggcctgcagtgcctcatgtgggttgccgccgccatctgcctcatcgcctttgccatccaggctagtgagggggacctcacca

SEQ ID NO: 63992 - DNA, 201 bp, Homo sapiens
tcaagaacctggaggcggtggagacattgggctccacttcggtgatctgctcggacaagacagggactctcactcagaaccgcatgactgtgtcccatctktggtttgacaaccacatccacacagctgacaccacggaagaccagtcagggcagacgtttgaccagtcctcggagacgtggcgggcgctgtgccgggtgc

SEQ ID NO: 63993 - DNA, 201 bp, Homo sapiens; identical to SEQ ID NO: 63979

SEQ ID NO: 63994 - DNA, 201 bp, Homo sapiens; identical to SEQ ID NO: 63980

SEQ ID NO: 63995 - DNA, 201 bp, Homo sapiens; identical to SEQ ID NO: 63981

SEQ ID NO: 63996 - DNA, 201 bp, Homo sapiens; identical to SEQ ID NO: 63982

SEQ ID NO: 63997 - DNA, 201 bp, Homo sapiens; identical to SEQ ID NO: 63983

SEQ ID NO: 63998 - DNA, 201 bp, Homo sapiens
gaaggcagcgagacagtggaggacatcgctgcccgcctccgtgtgcccgtagaccaggttaatcgcaaggatgcccgtgcctgtgtgatcaatggcatgcwgctgaaggacatggacccatcggaactggtcgaggccctgcgcacccaccccgagatggtgtttgcgcgcaccagcccccagcagaagctgggtgcgatt

SEQ ID NO: 63999 - DNA, 201 bp, Homo sapiens; identical to SEQ ID NO: 63985

SEQ ID NO: 64000 - DNA, 201 bp, Homo sapiens; identical to SEQ ID NO: 63986

SEQ ID NO: 64001 - DNA, 201 bp, Homo sapiens; identical to SEQ ID NO: 63987

SEQ ID NO: 64002 - DNA, 201 bp, Homo sapiens; identical to SEQ ID NO: 63988

SEQ ID NO: 64003 - DNA, 201 bp, Homo sapiens; identical to SEQ ID NO: 63989

SEQ ID NO: 64004 - DNA, 201 bp, Homo sapiens; identical to SEQ ID NO: 63990

SEQ ID NO: 64005 - DNA, 201 bp, Homo sapiens; identical to SEQ ID NO: 63991

SEQ ID NO: 64006 - DNA, 201 bp, Homo sapiens; identical to SEQ ID NO: 63992

SEQ ID NO: 64007 - DNA, 201 bp, Homo sapiens
cagaatccagctaagctctggagtccaatctagtcctgggacccaggccatcgcagcaatagaattaagctccacagccctgtctagttccgacagcaggyccagctccaggacccagcgctgcccaggagctcgaccagcctctgggactcaattcgcctctaaaaccctgccaggttctagataccagctccagaccac

SEQ ID NO: 64008 - DNA, 201 bp, Homo sapiens
gaaacccagaccggctcaagaattcagcccgactctggagcccaacttagttccagaacccagtccagctctgagaccgggctcagctctgaaacccagaycggctcaagaattcagcccagccctggagcccaccttagttctggaacccagcctgtttctggaacccaatccagttccagaactcacaccagttcaaga

SEQ ID NO: 64009 - DNA, 201 bp, Homo sapiens
aaacccagaccggctcaagaattcagcccgactctggagcccaacttagttccagaacccagtccagctctgagaccgggctcagctctgaaacccagacyggctcaagaattcagcccagccctggagcccaccttagttctggaacccagcctgtttctggaacccaatccagttccagaactcacaccagttcaagaa

SEQ ID NO: 64010 - DNA, 201 bp, Homo sapiens
tggagcccaccttagttctggaacccagcctgtttctggaacccaatccagttccagaactcacaccagttcaagaatctggctgagccctggaaatggamtctgcccacagacccctggccttgaccctagaatccagcttgaggcccctgccccagcccaacctcagcccccaggcccatcccccagagaccccacccc

SEQ ID NO: 64011 - DNA, 201 bp, Homo sapiens
agctccggaaccccagttaattttggaacccatgtgagattcatgaagcagcccagctctggaaccccagtcagctcaggattcagagacagctcccaaaycaaatcctattcaagaactcagaccagctcagaaacccaggtccacacggctgcccagtccagatcccaaccccagttgcatccaagtgcccatccccat

SEQ ID NO: 64012 - DNA, 201 bp, Homo sapiens
atttggagccccagcccaactccagaacccaacccttctctagaatccagcccagatctgaggccaagctatgtgctagagcccaggccagctctgagacyaagcccagcattgagaataagctctgttctaaaactcaggccagccctgagaccaagcccagctctagaactcagatgagctttgagaccatgcccagca

SEQ ID NO: 64013 - DNA, 201 bp, Homo sapiens
ccctgccccggccctgctccagaacccagcccagatcggaggacaagttcctctctagaacccaatccaatttggagccccagcccaactccagaacccarcccttctctagaatccagcccagatctgaggccaagctatgtgctagagcccaggccagctctgagaccaagcccagcattgagaataagctctgttcta

SEQ ID NO: 64014 - DNA, 201 bp, Homo sapiens
atgggctctgagaccatgcccagctctagaactcagatgggctctgagaccgagcccagctctagaactcagatgggctctgagaccgagcccagctctaraactcagatgggctctgagaccatgcccagctctagaactcagatgggctctgagaccgagcccagctctagaactcagatgggctctgagaccgagccc

SEQ ID NO: 64015 - DNA, 201 bp, Homo sapiens; identical to SEQ ID NO: 64012

SEQ ID NO: 64016 - DNA, 201 bp, Homo sapiens; identical to SEQ ID NO: 64013

SEQ ID NO: 64017 - DNA, 201 bp, Homo sapiens; identical to SEQ ID NO: 64014

SEQ ID NO: 64018 - DNA, 132 bp, Homo sapiens
atttggagccccagcccaactccagaacccaacccttctctagaatccagcccagatctgaggccaagctatgtgctagagcccaggccagctctgagacyaagcccagcattgagaataagctctgttcta

SEQ ID NO: 64019 - DNA, 201 bp, Homo sapiens; identical to SEQ ID NO: 64013

SEQ ID NO: 64020 - DNA, 132 bp, Homo sapiens; identical to SEQ ID NO: 64018

SEQ ID NO: 64021 - DNA, 201 bp, Homo sapiens; identical to SEQ ID NO: 64013

SEQ ID NO: 64022 - DNA, 201 bp, Homo sapiens
cggacccatccccgaggtccccagcgaggacacacactccacgagagcagcccctccactctgcccaggagaggggccgaccctcctcgggaaccggccasccgcgtggctcccagcatccatcaggacaagcccacgtggggtcctccctgcgtgctcagagggtctgtccagccctgggaagcgaccttggcctcagtt

SEQ ID NO: 64023 - DNA, 201 bp, Homo sapiens
tgtactccctgtgcaatgagccgctgatcgagctgtccaacccgggcgccagtggctccctcttctacgtcaccagcgacgacgagttcatcatcaagacygtcatgcacaaggaggccgagttcctgcagaagctgctccctggctactacatgaacctcaaccagaacccgcggacgctgctgcccaagttctatgggc

SEQ ID NO: 64024 - DNA, 201 bp, Homo sapiens
tgggaagaagttgggccatcgaggtgtggacgcatccggcgaaaccacctacaagaagaccacctcctccaccctgaagggtgccatccagctgggcatcrgctacaccgtgggccacctgagctccaagcccgaacgcgacgtgctcatgcaggacttctacgtggtggagagcatcttcttccccagcgaaggcagcaa

SEQ ID NO: 64025 - DNA, 201 bp, Homo sapiens
aggcagggctctgtgttttgtctgttacaacctccgtatgacgccacgccacccgctgttcacgtcccgtcggcctcctgcacagcccacacgctgcgccyggaaggcccctgctgtggagaagccggacccatccccgaggtccccagcgaggacacacactccacgagagcagcccctccactctgcccaggagagggg

SEQ ID NO: 64026 - DNA, 201 bp, Homo sapiens
acgtcccgtcggcctcctgcacagcccacacgctgcgcccggaaggcccctgctgtggagaagccggacccatccccgaggtccccagcgaggacacacactccacgagagcagcccctccactctgcccaggagaggggccgaccctcctcgggaaccggccagccgcgtggctcccagcatccatcaggacaagcccac

SEQ ID NO: 64027 - DNA, 201 bp, Homo sapiens
gtgcctgcctgtgtcctgaggaagaagccaggctgttcgcggtggcctctggggacctgagccccgggggccccatcggcctgcagaggggacggctgggrtcccgagcaactctgcctccatccacgtgggaagcggaccctcctgccctcagcttgggtttgggggcctcagtgcaggacatctggcctgaacatcgac

SEQ ID NO: 64028 - DNA, 201 bp, Homo sapiens
cacgtcccgtcggcctcctgcacagcccacacgctgcgcccggaaggcccctgctgtggagaagccggacccatccccgaggtccccagcgaggacacacactccacgagagcagcccctccactctgcccaggagaggggccgaccctcctcgggaaccggccagccgcgtggctcccagcatccatcaggacaagccca

SEQ ID NO: 64029 - DNA, 201 bp, Homo sapiens
tgtactccccgctccactatagcgcccaggcccccccggcctccgacggcgagagcgacacacccccgacccagagccgagctccacttctgctccggctkcccccgaaggcgctgcccaccccgctgaggcccagagctcgggagatgcccgcctcgccgccccaccggacctcgtcctccccctgcacggatgccgacg

SEQ ID NO: 64030 - DNA, 201 bp, Homo sapiens
cacgggacaccagtgcccggccgacgcgcctttgcaggagaaatgtgcaaacctctgtggataccatttcatttccattcttgtgttgtctccaaggcccytttggagatatacttggtgttggttgtgttttttggttccttttcagagaactgtaaaccgaggctgacgtgctccactgactgtgccgaggggcggggg

SEQ ID NO: 64031 - DNA, 201 bp, Homo sapiens
ccaggcctcggacgaggaggacgcgcccgccaccgacatctactttcccaccgatgagaggagctgggtgtactccccgctccactatagcgcccaggccyccccggcctccgacggcgagagcgacacacccccgacccagagccgagctccacttctgctccggctgcccccgaaggcgctgcccaccccgctgaggcc

SEQ ID NO: 64032 - DNA, 201 bp, Homo sapiens
tgatcgagctgtccaacccgggcgccagtggctccctcttctacgtcaccagcgacgacgagttcatcatcaagaccgtcatgcacaaggaggccgagttyctgcagaagctgctccctggctactacatgaacctcaaccagaacccgcggacgctgctgcccaagttctatgggctgtactgcgtgcagtcggggggca

SEQ ID NO: 64033 - DNA, 201 bp, Homo sapiens
gggtcccgagcaactctgcctccatccacgtgggaagcggaccctcctgccctcagcttgggtttgggggcctcagtgcaggacatctggcctgaacatcractgtggggacagccctcgccctgccaagcactgcggccactcagcagctatgttcccgccgcagtggggccctgacgcccacctcccaggtgcccctcg

SEQ ID NO: 64034 - DNA, 201 bp, Homo sapiens
gcggaccctcctgccctcagcttgggtttgggggcctcagtgcaggacatctggcctgaacatcgactgtggggacagccctcgccctgccaagcactgcrgccactcagcagctatgttcccgccgcagtggggccctgacgcccacctcccaggtgcccctcgagcaaaaacctctggcgcctccaatccagacccacc

SEQ ID NO: 64035 - DNA, 201 bp, Homo sapiens
ccgagttcctgcagaagctgctccctggctactacatgaacctcaaccagaacccgcggacgctgctgcccaagttctatgggctgtactgcgtgcagtcrgggggcaagaacatccgcgtcgtggtcatgaacaacatcctgccccgcgtggtcaagatgcacctcaagttcgacctcaagggctccacctacaagcggc

SEQ ID NO: 64036 - DNA, 201 bp, Homo sapiens
acctgccagccaggcctcggacgaggaggacgcgcccgccaccgacatctactttcccaccgatgagaggagctgggtgtactccccgctccactatagcrcccaggcccccccggcctccgacggcgagagcgacacacccccgacccagagccgagctccacttctgctccggctgcccccgaaggcgctgcccacccc

SEQ ID NO: 64037 - DNA, 201 bp, Homo sapiens
ttccgggtcgcgcgacgctgtgggccgctttcccctctccggagtgacctaacacaggataacgaaacctgcactgctccgagcgcttcctccccggcccstcgcgtctgcgaggcgaggccgggaggcgagggctctgcgcacgcgcggcgcaggcgcactgggcgccggtgctgttgccttcaggtgaccacggattcg

SEQ ID NO: 64038 - DNA, 201 bp, Homo sapiens
attcagttaagcctaagcagaagtgtccctgcctgtcaggtcccccggctcagtgagagaatcgcccccgtcattggcttaaaatgtgttctagccttggsgttcaaaaagaacaccactgactttgtggacgaagtaagagccatcatccccagagtccccagtttaagtgtaccatggcttcaagacagaattgaagat

SEQ ID NO: 64039 - DNA, 201 bp, Homo sapiens
acctctggaaagccaagacagagagcttttggacacttcatttgaagatctgtcaaaacctaagagaaagcttgctgacggtcggcaggcttctgtaacaytacaaccccttaaaataaagaaactgattccaaaccctaataagataaggaaaccacccaaaagtaaaaaagctactccaaagtaatcttgcataaactt

SEQ ID NO: 64040 - DNA, 201 bp, Homo sapiens
ttggacttcagaagattgaagataagaagaaaaagaacaaaacaccttttctgaaaaaagaaagcagagagaaatgcagcattgctgttgatattagtgakaatctgaaggagaagaaaacagatgctaagcagcaagtgtcagggtggacgcctgcacacgtcaggaagcagcttgccattggcgttaacgaagttacca

SEQ ID NO: 64041 - DNA, 201 bp, Homo sapiens
gccttggcgttcaaaaagaacaccactgactttgtggacgaagtaagagccatcatccccagagtccccagtttaagtgtaccatggcttcaagacagaaytgaagattctggggaaaatttagagactgaacctctggaaagccaagacagagagcttttggacacttcatttgaagatctgtcaaaacctaagagaaag

SEQ ID NO: 64042 - DNA, 201 bp, Homo sapiens
agcattgctgttgatattagtgagaatctgaaggagaagaaaacagatgctaagcagcaagtgtcagggtggacgcctgcacacgtcaggaagcagcttgycattggcgttaacgaagttaccagagccctggaaaggagggaactgctgttagttctggtgtgtaaatcagtcaagcctgccatgatcacctcacacttg

SEQ ID NO: 64043 - DNA, 201 bp, Homo sapiens
tgttgccttcaggtgaccacggattcgccatcgtgagttccaggattttcaaaatggctgcagctcctcaagcaccggggcggggatctctccgtaagacragacctctggttgtgaagacgtcgttgaacaacccatacatcatccgctggagcgctctggagagcgaggatatgcacttcatcctacagacgcttgagg

SEQ ID NO: 64044 - DNA, 201 bp, Homo sapiens
taaagctattggacttcagaagattgaagataagaagaaaaagaacaaaacaccttttctgaaaaaagaaagcagagagaaatgcagcattgctgttgatrttagtgagaatctgaaggagaagaaaacagatgctaagcagcaagtgtcagggtggacgcctgcacacgtcaggaagcagcttgccattggcgttaacga

SEQ ID NO: 64045 - DNA, 201 bp, Homo sapiens
tcatccgctggagcgctctggagagcgaggatatgcacttcatcctacagacgcttgaggacaggcttaaagctattggacttcagaagattgaagataaraagaaaaagaacaaaacaccttttctgaaaaaagaaagcagagagaaatgcagcattgctgttgatattagtgagaatctgaaggagaagaaaacagatg

SEQ ID NO: 64046 - DNA, 201 bp, Homo sapiens
cgcccccgtcattggcttaaaatgtgttctagccttggcgttcaaaaagaacaccactgactttgtggacgaagtaagagccatcatccccagagtccccmgtttaagtgtaccatggcttcaagacagaattgaagattctggggaaaatttagagactgaacctctggaaagccaagacagagagcttttggacacttc

SEQ ID NO: 64047 - DNA, 201 bp, Homo sapiens
ggaaaatttagagactgaacctctggaaagccaagacagagagcttttggacacttcatttgaagatctgtcaaaacctaagagaaagcttgctgacggtsggcaggcttctgtaacattacaaccccttaaaataaagaaactgattccaaaccctaataagataaggaaaccacccaaaagtaaaaaagctactccaaa

SEQ ID NO: 64048 - DNA, 201 bp, Homo sapiens; identical to SEQ ID NO: 64038

SEQ ID NO: 64049 - DNA, 201 bp, Homo sapiens; identical to SEQ ID NO: 64039

SEQ ID NO: 64050 - DNA, 201 bp, Homo sapiens; identical to SEQ ID NO: 64040

SEQ ID NO: 64051 - DNA, 201 bp, Homo sapiens; identical to SEQ ID NO: 64041

SEQ ID NO: 64052 - DNA, 201 bp, Homo sapiens; identical to SEQ ID NO: 64042

SEQ ID NO: 64053 - DNA, 158 bp, Homo sapiens
gattttcaaaatggctgcagctcctcaagcaccggggcggggatctctccgtaagacragacctctggttgtgaagacgtcgttgaacaacccatacatcatccgctggagcgctctggagagcgaggatatgcacttcatcctacagacgcttgagg

SEQ ID NO: 64054 - DNA, 201 bp, Homo sapiens; identical to SEQ ID NO: 64045

SEQ ID NO: 64055 - DNA, 201 bp, Homo sapiens; identical to SEQ ID NO: 64044

SEQ ID NO: 64056 - DNA, 201 bp, Homo sapiens; identical to SEQ ID NO: 64046

SEQ ID NO: 64057 - DNA, 201 bp, Homo sapiens; identical to SEQ ID NO: 64047

SEQ ID NO: 64058 - DNA, 201 bp, Homo sapiens
ttgcgtggccgcaggacccgccgccctcccggttgggccgcccagtcccgggccgggcgcgtgcacccagagcttccgcgtttctagtccggctcctctgytggattgcagcgccggctgggcaccaggagtacaaagcgaaaacccccgccggcccttctgttctccacggtctccaaggagacacggacaacagaacaa

SEQ ID NO: 64059 - DNA, 201 bp, Homo sapiens; identical to SEQ ID NO: 64038

SEQ ID NO: 64060 - DNA, 201 bp, Homo sapiens; identical to SEQ ID NO: 64039

SEQ ID NO: 64061 - DNA, 201 bp, Homo sapiens; identical to SEQ ID NO: 64040

SEQ ID NO: 64062 - DNA, 201 bp, Homo sapiens; identical to SEQ ID NO: 64041

SEQ ID NO: 64063 - DNA, 201 bp, Homo sapiens; identical to SEQ ID NO: 64042

SEQ ID NO: 64064 - DNA, 201 bp, Homo sapiens
agtgatcttcccacctcagcctcccaagtagctgggactacaggattttcaaaatggctgcagctcctcaagcaccggggcggggatctctccgtaagacragacctctggttgtgaagacgtcgttgaacaacccatacatcatccgctggagcgctctggagagcgaggatatgcacttcatcctacagacgcttgagg

SEQ ID NO: 64065 - DNA, 201 bp, Homo sapiens; identical to SEQ ID NO: 64044

SEQ ID NO: 64066 - DNA, 201 bp, Homo sapiens; identical to SEQ ID NO: 64045

SEQ ID NO: 64067 - DNA, 201 bp, Homo sapiens; identical to SEQ ID NO: 64046

SEQ ID NO: 64068 - DNA, 201 bp, Homo sapiens; identical to SEQ ID NO: 64047

SEQ ID NO: 64069 - DNA, 201 bp, Homo sapiens
gagaaagccgcctccgctggaggcccggtgtggttccgcctcggcgaggaaaagttattgtcagataccgctctttctccaactttccctctttctctgcsatcacacttgggccttcactgcagcgtggtgtggccaccgtccgtgtcctctcggccttcctccgagtccaggtggactctgtggatgtgtggatgtggc

SEQ ID NO: 64070 - DNA, 201 bp, Homo sapiens
tgcacacagcctggcaccccgtggacaatgtcattgccgtggctgccaccaataacttgtacatattccaggacaaaatcaactagagacgcgaacgtgasgaccaagtcttgtcttgcatagttaagccggacatttttctgtcagagaaaaggcatcattgtccgctccattaagaacagtgacgcacctgctacttcc

SEQ ID NO: 64071 - DNA, 201 bp, Homo sapiens
gccggtggagacccaccaggtccacgagtacctgcgcagcaagctctgctctctctatgagaacgactgcatctttgacaagtttgagtgttgctggaacrgttcggatagcgccatcatgaccgggtcctataacaacttcttcaggatgtttgatagagacacgcggagggatgtgaccctggaggcctcgagagagag

SEQ ID NO: 64072 - DNA, 201 bp, Homo sapiens
acagacactccaagttttttgaagagcctgaagatcccagcagtaggtccttcttctcagaaataatttcatccatatccgatgtaaaattcagtcatagkgggcggtacatgatgaccagagactacctgtcggtgaaggtgtgggacctcaacatggagagcaggccggtggagacccaccaggtccacgagtacctgc

SEQ ID NO: 64073 - DNA, 201 bp, Homo sapiens
tccgagccttcctttccaatttatagaccaaaaaattaacatccaagagaaaagttattgtcagataccgctctttctccaactttccctctttctctgcsatcacacttgggccttcactgcagcgtggtgtggccaccgtccgtgtcctctcggccttcctccgagtccaggtggactctgtggatgtgtggatgtggc

SEQ ID NO: 64074 - DNA, 201 bp, Homo sapiens; identical to SEQ ID NO: 64070

SEQ ID NO: 64075 - DNA, 201 bp, Homo sapiens; identical to SEQ ID NO: 64071

SEQ ID NO: 64076 - DNA, 201 bp, Homo sapiens; identical to SEQ ID NO: 64072

SEQ ID NO: 64077 - DNA, 160 bp, Homo sapiens
tcctcccacctcggcctcccaaaatgctgggaatacaagcatgagccatggcatgtggcygccacttgccttttttcattaagagtctataattggagatcttacagggaactgggctttctgctcagccatactcgagctcatttgacccccggccact

SEQ ID NO: 64078 - DNA, 201 bp, Homo sapiens; identical to SEQ ID NO: 64069

SEQ ID NO: 64079 - DNA, 201 bp, Homo sapiens; identical to SEQ ID NO: 64070

SEQ ID NO: 64080 - DNA, 201 bp, Homo sapiens
caagcatgagccatggcatgtggccgccacttgccttttttcattaagagtctataattggagatcttacagggaactgggctttctgctcagccatactygagctcatttgacccccggccactgccccttgagatcggacatcatttccaccgttgagtttaattactctggagatcttcttgcaacaggagacaaggg

SEQ ID NO: 64081 - DNA, 201 bp, Homo sapiens; identical to SEQ ID NO: 64071

SEQ ID NO: 64082 - DNA, 201 bp, Homo sapiens; identical to SEQ ID NO: 64072

SEQ ID NO: 64083 - DNA, 201 bp, Homo sapiens
cttttttcattaagagtctataattggagatcttacagggaactgggctttctgctcagccatactcgagctcatttgacccccggccactgccccttgaratcggacatcatttccaccgttgagtttaattactctggagatcttcttgcaacaggagacaagggcggcagagttgttatttttcagcgtgaacaagag

SEQ ID NO: 64084 - DNA, 201 bp, Homo sapiens; identical to SEQ ID NO: 64069

SEQ ID NO: 64085 - DNA, 201 bp, Homo sapiens; identical to SEQ ID NO: 64070

SEQ ID NO: 64086 - DNA, 201 bp, Homo sapiens; identical to SEQ ID NO: 64071

SEQ ID NO: 64087 - DNA, 201 bp, Homo sapiens; identical to SEQ ID NO: 64072

SEQ ID NO: 64088 - DNA, 201 bp, Homo sapiens
gtgtagcagaaggtggctcagactgtgctccagagaagctctggcttcaaatcccgttcttctgtggccatagctccgaatgctggaatgtgggaagcagrtgggctatggatcaagccaagtataacctaattaatgaatattttctggtgggagttactgaagaacttgaagattttatcatgttattggaggcagcat

SEQ ID NO: 64089 - DNA, 201 bp, Homo sapiens
catagggagataatttttttataatacaaaagtaaccacttggaattttaaagataatgttatgtgtgtatgtgaaatatatatacatatatatatatatwtcctaaaagaagaaaagatacctttctgttcaacttgtatcaactcctcttttctaattgctgtgaaatggcaactgttgataaattattgtgattgttt

SEQ ID NO: 64090 - DNA, 201 bp, Homo sapiens
cgagaaggggggtcgctgcggtggttctctcgctgtcgctctctctttgcctcgctcccggctcggcgggctcctcccggcgtctctctcgcctccggggycccgctccccgccccccgcggtatgtcttgatcccgagcagcgggtttcatggggctcctcaggattatgatgccgcccaagttgcagctgctggcggtg

SEQ ID NO: 64091 - DNA, 201 bp, Homo sapiens
gcgttggtgatagcgcctgggggagggggactggagaggcgagaaggggggtcgctgcggtggttctctcgctgtcgctctctctttgcctcgctcccggytcggcgggctcctcccggcgtctctctcgcctccggggtcccgctccccgccccccgcggtatgtcttgatcccgagcagcgggtttcatggggctcctc

SEQ ID NO: 64092 - DNA, 201 bp, Homo sapiens
tcaatatgtgtcctattggaaattcctcaaatcgttggtgccatcagtgatttacaaacaatattttgatattgcagatgacttgcttactgtatttgcaytgttagaaaacagtttgtagacaatgattcttttttaataaaatcaaataattctaaaagtgctagagaatttaactaaaagctggttcccaaatgcata

SEQ ID NO: 64093 - DNA, 201 bp, Homo sapiens
agatggagacctctacatcctcgcacaaaactttttctatgaaaagatttaccctaagtcgaactgagtataaggtgtgactattggattcttgaactaawatttgaccctgtcttcacctttgttctcagctccacagtctggattgctgacagtaggtgtatatgacaatttgtattgagccaaattaggaaacagaca

SEQ ID NO: 64094 - DNA, 201 bp, Homo sapiens
atgtaaacaaatgagcacagttatgttccaataaaactttatttacaaaaacagatgacatcccagatgcagaccatgggcaaccaaccattgcactggcyaaatcattatttatggagaaatcctctttgtgtctctactctagatgcctaaaagagtttatatacttctaaaagctcctaacttatatccaaagaattg

SEQ ID NO: 64095 - DNA, 201 bp, Homo sapiens; identical to SEQ ID NO: 64088

SEQ ID NO: 64096 - DNA, 201 bp, Homo sapiens
aaattagtgctgtttactttcagaggaagcagagaagttgctgttatgtttttgcatccgtttaccctatgcaaagttgctgtatgatgccaactaaactrctctttaggcagccttctgaggagaaaagcaaccctgtttcaaatccactgccaattcagctcctctggagtggagctttctgatttcttggagcaggaa

SEQ ID NO: 64097 - DNA, 201 bp, Homo sapiens
gaatttaactaaaagctggttcccaaatgcatagctggcattttaatttaaattcaaatctacatagagaacatctgtgtaaatcatctaactggattttyccattggtcattcccaaacacacctatggtcctagaatccttaagagaagcaccctgtaaccttttatgtggtttgcctttaagaggcccaggtgcttct

SEQ ID NO: 64098 - DNA, 201 bp, Homo sapiens
atcaaataattctaaaagtgctagagaatttaactaaaagctggttcccaaatgcatagctggcattttaatttaaattcaaatctacatagagaacatcygtgtaaatcatctaactggattttcccattggtcattcccaaacacacctatggtcctagaatccttaagagaagcaccctgtaaccttttatgtggttt

SEQ ID NO: 64099 - DNA, 201 bp, Homo sapiens
tgccgttcgagaaaaagatggagacctctacatcctcgcacaaaactttttctatgaaaagatttaccctaagtcgaactgagtataaggtgtgactattrgattcttgaactaaaatttgaccctgtcttcacctttgttctcagctccacagtctggattgctgacagtaggtgtatatgacaatttgtattgagccaa

SEQ ID NO: 64100 - DNA, 201 bp, Homo sapiens
ctctatcgcacaggaaagaaatctcatcttaggaaaaccacagagaagaaactccccactaaacaaaccattgcaaaactacagcaatctgatatttggamaatggagaatgagttctatgaatttgcactagagcagttccaattcatcagagcccatgccgttcgagaaaaagatggagacctctacatcctcgcacaa

SEQ ID NO: 64101 - DNA, 201 bp, Homo sapiens; identical to SEQ ID NO: 64089

SEQ ID NO: 64102 - DNA, 201 bp, Homo sapiens; identical to SEQ ID NO: 64092

SEQ ID NO: 64103 - DNA, 201 bp, Homo sapiens; identical to SEQ ID NO: 64093

SEQ ID NO: 64104 - DNA, 201 bp, Homo sapiens; identical to SEQ ID NO: 64094

SEQ ID NO: 64105 - DNA, 201 bp, Homo sapiens; identical to SEQ ID NO: 64088

SEQ ID NO: 64106 - DNA, 201 bp, Homo sapiens; identical to SEQ ID NO: 64096

SEQ ID NO: 64107 - DNA, 201 bp, Homo sapiens; identical to SEQ ID NO: 64097

SEQ ID NO: 64108 - DNA, 201 bp, Homo sapiens; identical to SEQ ID NO: 64098

SEQ ID NO: 64109 - DNA, 201 bp, Homo sapiens; identical to SEQ ID NO: 64099

SEQ ID NO: 64110 - DNA, 201 bp, Homo sapiens; identical to SEQ ID NO: 64100

SEQ ID NO: 64111 - DNA, 201 bp, Homo sapiens; identical to SEQ ID NO: 64090

SEQ ID NO: 64112 - DNA, 140 bp, Homo sapiens
gcgtgctgggctcgcgaggtcacggggcagaggttgcaagcaaaggaccttgtaattgccagctgagggaggctggccgggtagtgcgggaacgcgagtgmaaagcttcatcggagtacggaaatgagggtccggagatt

SEQ ID NO: 64113 - DNA, 201 bp, Homo sapiens; identical to SEQ ID NO: 64091

SEQ ID NO: 64114 - DNA, 201 bp, Homo sapiens
agttgcagctgctggcggtggtggccttcgcggtggcgatgctcttcttggaaaaccagatccagaaactggaggagtcccgctcgaagctaggtgaggarctgaactgccccgggctgagtgctgtggaaggggccgaggaggcgctgccgccggagcaagtgggcgttcatctaacctggggtctggctcgggggctga

SEQ ID NO: 64115 - DNA, 201 bp, Homo sapiens; identical to SEQ ID NO: 64089

SEQ ID NO: 64116 - DNA, 201 bp, Homo sapiens; identical to SEQ ID NO: 64090

SEQ ID NO: 64117 - DNA, 201 bp, Homo sapiens; identical to SEQ ID NO: 64091

SEQ ID NO: 64118 - DNA, 201 bp, Homo sapiens; identical to SEQ ID NO: 64092

SEQ ID NO: 64119 - DNA, 201 bp, Homo sapiens; identical to SEQ ID NO: 64093

SEQ ID NO: 64120 - DNA, 201 bp, Homo sapiens; identical to SEQ ID NO: 64094

SEQ ID NO: 64121 - DNA, 201 bp, Homo sapiens; identical to SEQ ID NO: 64088

SEQ ID NO: 64122 - DNA, 201 bp, Homo sapiens; identical to SEQ ID NO: 64096

SEQ ID NO: 64123 - DNA, 201 bp, Homo sapiens; identical to SEQ ID NO: 64097

SEQ ID NO: 64124 - DNA, 201 bp, Homo sapiens; identical to SEQ ID NO: 64098

SEQ ID NO: 64125 - DNA, 201 bp, Homo sapiens; identical to SEQ ID NO: 64099

SEQ ID NO: 64126 - DNA, 201 bp, Homo sapiens; identical to SEQ ID NO: 64100

SEQ ID NO: 64127 - DNA, 201 bp, Homo sapiens
tgacttctacaatggatatttgcacccctggtaccagaaaaattcccaagctcaaccaagccaatgcagatttcagactctcagacttccaacaaagaagmagcagaaaaaaactgttgctatgcaacaatgcattgagtagttaggaagaagatggataaaaacctattacatatttgtaatttattaaaaaccttattt

SEQ ID NO: 64128 - DNA, 201 bp, Homo sapiens
ttcgatcagtgatgctcaagaaatcactaacagctactgacttctacaatggatatttgcacccctggtaccagaaaaattcccaagctcaaccaagccartgcagatttcagactctcagacttccaacaaagaagaagcagaaaaaaactgttgctatgcaacaatgcattgagtagttaggaagaagatggataaaaa

SEQ ID NO: 64129 - DNA, 201 bp, Homo sapiens
tctcctgcctcagcctcctgagtagctgggattacaggcacacgccaccacacgcagctaatttttgtatttttagtagagatggggtttcaccatgttgktcaggctggtctcgaactcctgaccttgtgatctgcccacctcagcctcccaaagtgctatgattacagacgtgagccaccgtgcctggcctggaattat

SEQ ID NO: 64130 - DNA, 201 bp, Homo sapiens
ggagtgcagtggcgtgatgtcagctcactgcaagctccacctcccgggttcacaccattctcctgcctcagcctcccaagtagctgggactacaggcgtcygccaccatgcctggctaatttttttttttgtatttttagtagagatggggtttcactgtgttagccaggatggtcttgatctcctgacctcgtgatccac

SEQ ID NO: 64131 - DNA, 128 bp, Homo sapiens
cggcggccgaggcgatgagggtgttggygcggcgctgttggggtcctccgctggctcatggcgccaggcgtgggaggccgagtccccagtggcgagcactggcccgactcggctgggaggactgccgg

SEQ ID NO: 64132 - DNA, 201 bp, Homo sapiens
tcaaagaagatggcattattataagaagagaagattattgccgaaaagatggattgcctcactttccactttttatgtaacagtagttaaaaaacagcttyttttttacttgaattacaaaaaagtttaaataaaacttgtatttatgatacgaaactcaaggagattatctttccttaagaacaagggcaaccctaactg

SEQ ID NO: 64133 - DNA, 201 bp, Homo sapiens
gcagccaatggagggggcgacttacgcccctaagatttctgctggtaccagttgtataaaatgggaggaacaaacttcagaacaaatattcagactttacygtgccattggaaatataattccgttgcagacgctctggatggcgaataccattaaacttctggatttggtagaagttaacagttcagtccttgctgatcc

SEQ ID NO: 64134 - DNA, 201 bp, Homo sapiens
gaaatataattccgttgcagacgctctggatggcgaataccattaaacttctggatttggtagaagttaacagttcagtccttgctgatccaaaattaacrggacaggctcttattccaggatcagtaatataccacaaacagtcacaaatactattggtttattgcaaggatggttggattggtgttcgatcagtgatgc

SEQ ID NO: 64135 - DNA, 201 bp, Homo sapiens
tttattgcaaggatggttggattggtgttcgatcagtgatgctcaagaaatcactaacagctactgacttctacaatggatatttgcacccctggtaccaraaaaattcccaagctcaaccaagccaatgcagatttcagactctcagacttccaacaaagaagaagcagaaaaaaactgttgctatgcaacaatgcattg

SEQ ID NO: 64136 - DNA, 201 bp, Homo sapiens; identical to SEQ ID NO: 64127

SEQ ID NO: 64137 - DNA, 201 bp, Homo sapiens; identical to SEQ ID NO: 64128

SEQ ID NO: 64138 - DNA, 201 bp, Homo sapiens; identical to SEQ ID NO: 64129

SEQ ID NO: 64139 - DNA, 201 bp, Homo sapiens; identical to SEQ ID NO: 64130

SEQ ID NO: 64140 - DNA, 145 bp, Homo sapiens
tgcgcagggccggccgccggcggccgaggcgatgagggtgttggygcggcgctgttggggtcctccgctggctcatggcgccaggcgtgggaggccgagtccccagtggcgagcactggcccgactcggctgggaggactgccgg

SEQ ID NO: 64141 - DNA, 201 bp, Homo sapiens; identical to SEQ ID NO: 64132

SEQ ID NO: 64142 - DNA, 201 bp, Homo sapiens; identical to SEQ ID NO: 64133

SEQ ID NO: 64143 - DNA, 201 bp, Homo sapiens; identical to SEQ ID NO: 64134

SEQ ID NO: 64144 - DNA, 201 bp, Homo sapiens; identical to SEQ ID NO: 64135

SEQ ID NO: 64145 - DNA, 128 bp, Homo sapiens
ggcgcgtcactgcgcaggcgcggcccgsgagcgtggggtatctcgaggtgccgggttgcaggcgctcaggagcgctagggtttgaggcctgctttctgctcgcgccagcagagcactacctgaggcag

SEQ ID NO: 64146 - DNA, 201 bp, Homo sapiens
cgtggagctgagtgacgtacagaaccctgccatcagcatcactgaaaacgtgctgcatttcaaagctcaaggacatggtgccaaaggagacaatgtctatraatttcacctggagttcttagaccttgtgaaaccagagcctgtttacaaactgacccagaggcaggtaaacattacagtacagaagaaagtgagtcagtg

SEQ ID NO: 64147 - DNA, 201 bp, Homo sapiens
aatccttttatgacacattccatactgtggctgacatgatgtatttctgccagatgctggcagttgtggaaactatcaatgcagcaattggagtcactacrtcaccggtgctgccttctctgatccaggtggctcacgcctgtaatcccagcactttgggaggccgaggcgagcggattacctgtggtcaggagttcaaga

SEQ ID NO: 64148 - DNA, 128 bp, Homo sapiens; identical to SEQ ID NO: 64145

SEQ ID NO: 64149 - DNA, 201 bp, Homo sapiens; identical to SEQ ID NO: 64146

SEQ ID NO: 64150 - DNA, 134 bp, Homo sapiens
agtccttttatgacacattccatactgtggctgacatgatgtatttctgccagatgctggcagttgtggaaactatcaatgcagcaattggagtcactacrtcaccggtgctgccttctctgatccaggtattg

SEQ ID NO: 64151 - DNA, 201 bp, Homo sapiens
tactatattatatttgaaaaccttcaaattagaatacattgtacagttgaagaaattgacttggtacttaaaagaaagatttcccattgcacagaggttaytggagaaatttttccttttgttgcatttgtggaagttagttttctggaccgtggcctttaattttcttaacctaattacatcaggatagaggtagagttt

SEQ ID NO: 64152 - DNA, 201 bp, Homo sapiens
aggtccttaactattatagtctaaacaaatttatagatcactgtttgaggtaaataatatgagtgaatattttcaaatgtgataaaatagcacaagtggckggtgataaaatttgaaattatggttaacctcagctgtgatcttatgtatgtaaagcaaaatttaaatatataattataggttgattacaaaatccataat

SEQ ID NO: 64153 - DNA, 201 bp, Homo sapiens
gtaatcccagcactttgggaggctgaggtgggcggatcacaaggtcaggagtttgagaccagcctggccaacatggtgaaactccatctctactaaaaatmcaaaaaaaaaaaagctaagaatattgtacacaaagattcttgacgttcttgaggaaatccctaaaaatgcagcatatagaaagtatacagaacagattac

SEQ ID NO: 64154 - DNA, 201 bp, Homo sapiens; identical to SEQ ID NO: 64151

SEQ ID NO: 64155 - DNA, 201 bp, Homo sapiens; identical to SEQ ID NO: 64152

SEQ ID NO: 64156 - DNA, 201 bp, Homo sapiens
tcactaagctttatttattagacgtgttgagtgagtgctgagttccttgctgccacttttgttaccattgtcacacactatgtgtaaaccagtcccaccasttattactaataaaattttgactgataatttatatttgcacttacaatatatatatcctgtccttatatttctctagagtacattttccatcatgtttaa

SEQ ID NO: 64157 - DNA, 201 bp, Homo sapiens
gtgacatatttcagttaccaaagtggccaggaactttttgcttttatgaaaatagattcatattgtatttcccagtgtgtcttttatgtctttgaatgttwtggagaaaagtctatgcctgtctaaaaatgaatccagtgttgcctttctgagggatttctgctcaatgcaatacactgttcagtgctattctcccagcta

SEQ ID NO: 64158 - DNA, 201 bp, Homo sapiens
ttgtcagctaatgcaccacctcactgaaaaccacaagatatggaaggaaatcgtagaggaagaagaaaaatgtaaagctgatgggaataaactgcaggtgsagaattcctccttacctcaagcagatgagattcaggtaattgaagaggcagatgaagaggaatagcgacagtttgagtaaaagaaaagtcatattgaaga

SEQ ID NO: 64159 - DNA, 201 bp, Homo sapiens
ggaatagtttgccaactccacagctgaggagaagctcaggaacttcaggattgctacctgttgaacagtcttcaaggtgggatcgtaataatggcaaaagrcctcaccaagaatttggcatttcaagtcaaggatgctatctaaatgggccttttaattcaaatctactgactatcccgaagcaaaggtcatcttctgtat

SEQ ID NO: 64160 - DNA, 201 bp, Homo sapiens
aaagctgtttaggtttaacaatgaagggatttattctttagtcaaaattgttgtttttactctagctcaggattcgtatttttaaagatttagttaatatraacacagcacagatttgtcagaagaaaaaaaatttgctgtaataccaaaactaacctcatcaaagatacagaaaaaaagaaatatagtgagccctaaagg

SEQ ID NO: 64161 - DNA, 201 bp, Homo sapiens
aatgaagggatttattctttagtcaaaattgttgtttttactctagctcaggattcgtatttttaaagatttagttaatataaacacagcacagatttgtyagaagaaaaaaaatttgctgtaataccaaaactaacctcatcaaagatacagaaaaaaagaaatatagtgagccctaaaggacacatacattgaataaat

SEQ ID NO: 64162 - DNA, 201 bp, Homo sapiens; identical to SEQ ID NO: 64156

SEQ ID NO: 64163 - DNA, 201 bp, Homo sapiens; identical to SEQ ID NO: 64157

SEQ ID NO: 64164 - DNA, 201 bp, Homo sapiens; identical to SEQ ID NO: 64158

SEQ ID NO: 64165 - DNA, 201 bp, Homo sapiens; identical to SEQ ID NO: 64159

SEQ ID NO: 64166 - DNA, 201 bp, Homo sapiens; identical to SEQ ID NO: 64160

SEQ ID NO: 64167 - DNA, 201 bp, Homo sapiens
ttctgcaacgtggagctgcggccgccgccggcctctccccagcagccgcggcgctgctcccccttctgccgggcgcgcctctcgctgggcgccctggctgyctttgtcctcgccctgctgctgggcgcggaacccgagagctgggctgccggggccgcctggctgcggacgctgctgagcgtgtgttcgcacagcttgagc

SEQ ID NO: 64168 - DNA, 201 bp, Homo sapiens; identical to SEQ ID NO: 64161

SEQ ID NO: 64169 - DNA, 145 bp, Homo sapiens
gtgggccacgccttccgggccccgcggctggccggctcctcgcgycgtcccctctctcggccgctcttcgggccgcctctgcgtgtggggccgcccgcgccagtgtgagcctgagctgacggcggctccgggaggctcgcagaag

SEQ ID NO: 64170 - DNA, 189 bp, Homo sapiens
tttgcattaagtaatcctacagcacaggcagagtgcacggctgaagaagcatatacacttacagagggcaggtgtttgtttgccagtggcagtccatttgrgccagtgaaacttacagatgggcgagtctttacaccaggtcaaggaaacaatgtttatatttttccaggttacagaatacctatatgc

SEQ ID NO: 64171 - DNA, 155 bp, Homo sapiens
gtgggccacgccttccgggccccgcggctggccggctcctcgcgtcgtcccctcwctcggccgctcttcgggccgcctctgcgtgtggggccgcccgcgccagtgtgagcctgagctgacggcggctccgggaggctcgcagaaggggagggccg

SEQ ID NO: 64172 - DNA, 147 bp, Homo sapiens
gtgggccacgccttccgggccccgcggctggccggctcctcgcgtcstcccctctctcggccgctcttcgggccgcctctgcgtgtggggccgcccgcgccagtgtgagcctgagctgacggcggctccgggaggctcgcagaaggg

SEQ ID NO: 64173 - DNA, 201 bp, Homo sapiens
tttgcattaagtaatcctacagcacaggcagagtgcacggctgaagaagcatatacacttacagagggcaggtgtttgtttgccagtggcagtccatttgrgccagtgaaacttacagatgggcgagtctttacaccaggtcaaggaaacaatgtttatatttttccaggtgtggctttagctgttattctctgtaacacc

SEQ ID NO: 64174 - DNA, 155 bp, Homo sapiens; identical to SEQ ID NO: 64171

SEQ ID NO: 64175 - DNA, 147 bp, Homo sapiens; identical to SEQ ID NO: 64172

SEQ ID NO: 64176 - DNA, 201 bp, Homo sapiens
accccttttttcagacaagaagagataatgtcttcagttttatggtgttttctgtgttttgttctccctgaccactttggttgatgtattttttccatgcrtctccacatctgttggggtagacgtgttgattgattgcattgcccaccagcaccctacaatcagatagttgtgatgctttaattctaacatacagcccgt

SEQ ID NO: 64177 - DNA, 145 bp, Homo sapiens; identical to SEQ ID NO: 64169

SEQ ID NO: 64178 - DNA, 201 bp, Homo sapiens
gttctccctgaccactttggttgatgtattttttccatgcgtctccacatctgttggggtagacgtgttgattgattgcattgcccaccagcaccctacartcagatagttgtgatgctttaattctaacatacagcccgtaccacatccaggagatgtaaaaagtgtgtttgtgaatgtcttcacttgtactctaattca

SEQ ID NO: 64179 - DNA, 201 bp, Homo sapiens
gggtaatactcttctctggcctagttcttacagagctactaaaatagaaatttacttttatggatagaagtacagaattttgagaagaaactaaattttcmccaaattttaaggaaaaattgtcattatctaaaaatgttcttatatatctgcttcatcttaccttcatactctgaaattccctatagcagacagagctag

SEQ ID NO: 64180 - DNA, 201 bp, Homo sapiens
gccagatgtgtatgaatggccagaatctgcatcaagccctcctgtgataacagaatagaagcactcccctgataaatactttctgtgctccagggaacccyttttttcagacaagaagagataatgtcttcagttttatggtgttttctgtgttttgttctccctgaccactttggttgatgtattttttccatgcgtctc

SEQ ID NO: 64181 - DNA, 201 bp, Homo sapiens
tttgcattaagtaatcctacagcacaggcagagtgcacggctgaagaagcatatacacttacagagggcaggtgtttgtttgccagtggcagtccatttgrgccagtgaaacttacagatgggcgagtctttacaccaggtcaaggaaacaatgtttatatttttccaggccctgacaagccaattgacagatgaagagct

SEQ ID NO: 64182 - DNA, 155 bp, Homo sapiens; identical to SEQ ID NO: 64171

SEQ ID NO: 64183 - DNA, 147 bp, Homo sapiens; identical to SEQ ID NO: 64172

SEQ ID NO: 64184 - DNA, 201 bp, Homo sapiens; identical to SEQ ID NO: 64176

SEQ ID NO: 64185 - DNA, 145 bp, Homo sapiens; identical to SEQ ID NO: 64169

SEQ ID NO: 64186 - DNA, 201 bp, Homo sapiens; identical to SEQ ID NO: 64178

SEQ ID NO: 64187 - DNA, 201 bp, Homo sapiens; identical to SEQ ID NO: 64179

SEQ ID NO: 64188 - DNA, 201 bp, Homo sapiens; identical to SEQ ID NO: 64180

SEQ ID NO: 64189 - DNA, 201 bp, Homo sapiens
acctcaatgagaccttctctgagctgcggctggacagcgtggtccagtggatggagcatttcgagacatggccctcccacctccccattgtggctcacgcrgagcagcaaaccgtggctgctgtcctcatggtggctcagctcactcagcgctcagtgcacatatgtcacgtggcacggaaggaggagatcctgctaatta

SEQ ID NO: 64190 - DNA, 201 bp, Homo sapiens
gaagcacggacgcacagtacattccctggcctgcctgctcacccagtatcgtgtcagcctgcgctacgtggcacctcccagcctgcgcatgccacccactstgcgggccttcgtggcctcccgcggcaccaagcaggaggaattcgagagcattgaggaggcgctgcctgacactgatgtgctctacatgactcgaatcca

SEQ ID NO: 64191 - DNA, 201 bp, Homo sapiens
aagtgagcacacggaccagcagctcctttgcagcagccatggcccggctgggaggtgctgtgctcagcttctcggaagccacatcgtccgtccagaagggygaatccctggctgactccgtgcagaccatgagctgctatgccgacgtcgtcgtgctccggcacccccagcctggagcagtggagctggccgccaagcact

SEQ ID NO: 64192 - DNA, 201 bp, Homo sapiens
tggcagccatcgccatctctgagcatgtggagaatgcaggtgtgcattcaggtgatgcgacgctggtgacccccccacaagatatcactgccaaaaccctrgagcggatcaaagccattgtgcatgctgtgggccaggagctacaggtcacaggacccttcaatctgcagctcattgccaaggatgaccagctgaaagtta

SEQ ID NO: 64193 - DNA, 201 bp, Homo sapiens
gatgtggaagccctgtgggagaacatggctgtcatcgactgctttgcctcagaccatgctccccataccttggaggagaagtgtgggtccaggcccccacmtgggttcccagggttagagaccatgctgccactactcctgacggctgtaagcgagggccggctcagcctggacgacctgctgcagcgattgcaccacaat

SEQ ID NO: 64194 - DNA, 201 bp, Homo sapiens
tgctgccactactcctgacggctgtaagcgagggccggctcagcctggacgacctgctgcagcgattgcaccacaatcctcggcgcatctttcacctgccyccgcaggaggacacctatgtggaggtggatctggagcatgagtggacaattcccagccacatgcccttctccaaggcccactggacaccttttgaagggc

SEQ ID NO: 64195 - DNA, 201 bp, Homo sapiens
agtgcccaccacagcggagcatcctggagcagctagctgagaaaaactttgagctggtgattaacctgtcaatgcgtggagctgggggccggcgtctctcytcctttgtcaccaagggctaccgcacccgacgcttggccgctgacttctccgtgcccctaatcatcgatatcaagtgcaccaaactctttgtggaggccc

SEQ ID NO: 64196 - DNA, 201 bp, Homo sapiens
acgggtcggtcctgcggggccagccctttggggccgccgtgtcgactgccggggaagtggtgtttcaaaccggcatggtcggctaccccgaggccctcacygatccctcctacaaggcacagatcttagtgctcacctatcctctgatcggcaactatggcatccccccagatgaaatggatgagttcggtctctgcaagt

SEQ ID NO: 64197 - DNA, 201 bp, Homo sapiens
gaattgttggggagtgcaatgtgcagtatgccttgaaccctgagtctgagcagtattacatcattgaagtgaatgccaggctctctcgcagctctgccctrgccagtaaggccacaggttatccactggcttatgtggcagccaagctagcattgggcatccctttgcctgagctcaggaactctgtgacagggggtacag

SEQ ID NO: 64198 - DNA, 201 bp, Homo sapiens
ctggacttccaccaccacgaaaggttctgatcctgggctcagggggcctctccattggccaagctggagaatttgactactcgggctctcaggcaattaargccctgaaggaggaaaacatccagacgttgctgatcaaccccaatattgccacagtgcagacctcccaggggctggccgacaaggtctattttcttccca

SEQ ID NO: 64199 - DNA, 201 bp, Homo sapiens
gtgtcaacgagataagcgtggaagtggactcggatccccgcgcagcctacttccgccaggctgagaacggcatgtacatccgcatggctctgttagccacygtgctgggccgtttctagggcctggcttcctcagcctcttctctttaggcccagctgctgggcaaggaattccagtgcctcctacgggggcagcacactt

SEQ ID NO: 64200 - DNA, 201 bp, Homo sapiens
cctcgtctgaaaatgcaggaaccttgggcaccgtggccgggtctgcagccgggctgaagctttacctcaatgagaccttctctgagctgcggctggacagygtggtccagtggatggagcatttcgagacatggccctcccacctccccattgtggctcacgcagagcagcaaaccgtggctgctgtcctcatggtggctc

SEQ ID NO: 64201 - DNA, 201 bp, Homo sapiens
caatgcgtggagctgggggccggcgtctctcttcctttgtcaccaagggctaccgcacccgacgcttggccgctgacttctccgtgcccctaatcatcgayatcaagtgcaccaaactctttgtggaggccctaggccagatcgggccagcccctcctttgaaggtgcatgttgactgtatgacctcccaaaagcttgtgc

SEQ ID NO: 64202 - DNA, 201 bp, Homo sapiens
ctaccccgaggccctcactgatccctcctacaaggcacagatcttagtgctcacctatcctctgatcggcaactatggcatccccccagatgaaatggatragttcggtctctgcaagtggtttgaatcctcgggcatccacgtagcagcactggtagtgggagagtgctgtcctactcccagccactggagtgccacccg

SEQ ID NO: 64203 - DNA, 201 bp, Homo sapiens
atatcgatgggcaggttctggtacccccgggctatggacaggatgtacggaagtggccacagggggctgttcctcagctcccaccctcagcccctgccacyagtgagatgaccacgacacctgaaagaccccgccgtggcatcccagggcttcctgatggccgcttccatctgccgccccgaatccatcgagcctccgacc

SEQ ID NO: 64204 - DNA, 201 bp, Homo sapiens
ctcggatccttgctttggactgtggcctcaagtataatcagatccgatgcctctgccagcgtggggctgaggtcactgtggtaccctgggaccatgcactrgacagccaagagtatgagggtctcttcttaagtaatgggcctggtgaccctgcctcctatcccagtgtcgtatccacactgagccgtgttttatctgagc

SEQ ID NO: 64205 - DNA, 201 bp, Homo sapiens; identical to SEQ ID NO: 64189

SEQ ID NO: 64206 - DNA, 201 bp, Homo sapiens; identical to SEQ ID NO: 64190

SEQ ID NO: 64207 - DNA, 201 bp, Homo sapiens; identical to SEQ ID NO: 64191

SEQ ID NO: 64208 - DNA, 201 bp, Homo sapiens; identical to SEQ ID NO: 64192

SEQ ID NO: 64209 - DNA, 201 bp, Homo sapiens; identical to SEQ ID NO: 64193

SEQ ID NO: 64210 - DNA, 201 bp, Homo sapiens; identical to SEQ ID NO: 64194

SEQ ID NO: 64211 - DNA, 201 bp, Homo sapiens; identical to SEQ ID NO: 64195

SEQ ID NO: 64212 - DNA, 201 bp, Homo sapiens; identical to SEQ ID NO: 64196

SEQ ID NO: 64213 - DNA, 201 bp, Homo sapiens; identical to SEQ ID NO: 64197

SEQ ID NO: 64214 - DNA, 201 bp, Homo sapiens; identical to SEQ ID NO: 64198

SEQ ID NO: 64215 - DNA, 201 bp, Homo sapiens; identical to SEQ ID NO: 64199

SEQ ID NO: 64216 - DNA, 201 bp, Homo sapiens; identical to SEQ ID NO: 64200

SEQ ID NO: 64217 - DNA, 201 bp, Homo sapiens; identical to SEQ ID NO: 64201

SEQ ID NO: 64218 - DNA, 201 bp, Homo sapiens; identical to SEQ ID NO: 64202

SEQ ID NO: 64219 - DNA, 201 bp, Homo sapiens; identical to SEQ ID NO: 64203

SEQ ID NO: 64220 - DNA, 201 bp, Homo sapiens; identical to SEQ ID NO: 64204

SEQ ID NO: 64221 - DNA, 201 bp, Homo sapiens; identical to SEQ ID NO: 64189

SEQ ID NO: 64222 - DNA, 201 bp, Homo sapiens; identical to SEQ ID NO: 64190

SEQ ID NO: 64223 - DNA, 201 bp, Homo sapiens; identical to SEQ ID NO: 64191

SEQ ID NO: 64224 - DNA, 201 bp, Homo sapiens; identical to SEQ ID NO: 64192

SEQ ID NO: 64225 - DNA, 201 bp, Homo sapiens; identical to SEQ ID NO: 64193

SEQ ID NO: 64226 - DNA, 201 bp, Homo sapiens; identical to SEQ ID NO: 64194

SEQ ID NO: 64227 - DNA, 201 bp, Homo sapiens; identical to SEQ ID NO: 64195

SEQ ID NO: 64228 - DNA, 201 bp, Homo sapiens; identical to SEQ ID NO: 64196

SEQ ID NO: 64229 - DNA, 201 bp, Homo sapiens; identical to SEQ ID NO: 64197

SEQ ID NO: 64230 - DNA, 201 bp, Homo sapiens; identical to SEQ ID NO: 64198

SEQ ID NO: 64231 - DNA, 201 bp, Homo sapiens; identical to SEQ ID NO: 64199

SEQ ID NO: 64232 - DNA, 201 bp, Homo sapiens; identical to SEQ ID NO: 64200

SEQ ID NO: 64233 - DNA, 201 bp, Homo sapiens; identical to SEQ ID NO: 64201

SEQ ID NO: 64234 - DNA, 201 bp, Homo sapiens; identical to SEQ ID NO: 64202

SEQ ID NO: 64235 - DNA, 201 bp, Homo sapiens; identical to SEQ ID NO: 64203

SEQ ID NO: 64236 - DNA, 201 bp, Homo sapiens; identical to SEQ ID NO: 64204

SEQ ID NO: 64237 - DNA, 201 bp, Homo sapiens
ttatcaaagaatacattttaacccaaaagtataccatgctcattgtatctttgatcgttcttcaagtatttctcaatcttttaatctatcaggaacattamtatcaagagcagattgttgtaacataatactcaggatacatgaaatgtatgtgagagataaatagataatagaaagtttattgttataaaaatgacctac

SEQ ID NO: 64238 - DNA, 201 bp, Homo sapiens
atgtgagagataaatagataatagaaagtttattgttataaaaatgacctacaacttatataaaaaaattctgaaaatgttgactttttttggactgaagrctgcaaaataaatggcttctcaaagtaaattcctatttacttaaattgccttcttgattgttacacctggaaaaatatattcatctactttttcctttta

SEQ ID NO: 64239 - DNA, 201 bp, Homo sapiens
gtcacagaatttctgcaggcgccattgaagagtcaatcctttcccatggtaccgtggcagactgtgctgttgttggcaaggaagatcccttaaaaggtcaygtccccttagcactctgtgtattgagaaaagatataaatgcaacagaggagcaagttttggaagaaattgtgaaacacgttagacagaacattggccctg

SEQ ID NO: 64240 - DNA, 201 bp, Homo sapiens
aacgatgtgatgtagagaccctggaatggtccaaaaatgtcttcagagtacctgtcttagaccattggtggcaaactgagactggatctccaattactgcrtcatgtgttggattaggcaattctaaaacacctccaccagggcaagcaggaaaaagcgtcccaggatacaatgttatgattttggatgacaacatgcaaa

SEQ ID NO: 64241 - DNA, 201 bp, Homo sapiens
ataccatggatgctggttacatggatgaagaaggctatttgtatgttatgtctcgagtggatgatgtaataaatgttgcaggtcacagaatttctgcaggygccattgaagagtcaatcctttcccatggtaccgtggcagactgtgctgttgttggcaaggaagatcccttaaaaggtcatgtccccttagcactctgtg

SEQ ID NO: 64242 - DNA, 201 bp, Homo sapiens
ctgtggctgcttttcgaaatgcagtgtttgtcaaacagctacccaaaaccagatctggcaagatcccccgatcagctttatctgccattgtcaatggcaarccatacaagataacttctacaattgaagaccccagcatttttggccacgtagaagaaatgctgaagcaagcataatgagtttgtcttattcctattttga

SEQ ID NO: 64243 - DNA, 201 bp, Homo sapiens
ggtttttatgtgaaatctctaattttaaaataataactcattaaaaatattgtaatgtccaaaagtatctttccatttaacttctaaaaatctcttaaatkttttttttaaataattgtaaagtgagtttttgttaagcttataggaatgggccagttaactaaggtagacagatgtaggaaattaaatatttgatttact

SEQ ID NO: 64244 - DNA, 201 bp, Homo sapiens
tgctatcatctatgacagtcctgttacaaacactaaagcaacctttacctataaagaagttctggagcaggtctccaagctggctggtgtcttggtcaagyatggcatcaagaaaggtgacactgtggttatctacatgcctatgatcccacaggcgatgtataccatgttggcatgtgcaaggataggtgccatccacag

SEQ ID NO: 64245 - DNA, 201 bp, Homo sapiens
acgtaccacttgtagaagaagcgctaaaaataggacaacacaaaccagacaaaattctcatttataatcgtccaaatatggaggcggttcctttggctccsggtcgtgaccttgattgggatgaagagatggcaaaagcccagtcacatgactgtgttcctgttctttcagaacacccactgtatattctttacacatctg

SEQ ID NO: 64246 - DNA, 201 bp, Homo sapiens
gttcctcttcctcctcttcctctcgggcctggtcaccctgtgcttcggggccctcttcctgctgccccactcctctcgcctcaagcgcctcttcctggccscccggacccagcagcctggtctggaagtggtggctgaaatcgccggccatgccccggcccgcgagcaggagccgcctcccaacccggcccccgccgcgcc

SEQ ID NO: 64247 - DNA, 201 bp, Homo sapiens; identical to SEQ ID NO: 64246

SEQ ID NO: 64248 - DNA, 164 bp, Homo sapiens
atttcttggctggatttgaagcttaaactcctgtggattcacatcaaataccagttcagttttgtcattgttctagtaaattagttccatttgtaaaaggkttactctcatactccttatgtacagaaatcacatgaaaaataaaggttccataatgcatagtt

SEQ ID NO: 64249 - DNA, 106 bp, Homo sapiens
gttttgtcattgttctagtaaattagttccatttgtaaaagggttactctcatactccttatgtacagaaatcacatgaaaaataaaggttccataatgcrtagtt

SEQ ID NO: 64250 - DNA, 201 bp, Homo sapiens
aacaggctgttgcttaccgtcagatgtctctgttgctccgccgaccccctggtcgtgaggcctatcctggtgatgtgttctacctacactcccggttgctrgagagagcagccaaaatgaacgatgcttttggtggtggctccttgactgctttgccagtcatagaaacacaggctggtgatgtgtctgcttacattccaa

SEQ ID NO: 64251 - DNA, 161 bp, Homo sapiens
tgtgtgtgtgtgtgtgtgtgtgtgtgtgtgtgtgtgtgtgtgagtccggaggctgcggctkcagaagtaccgcctgcggagtaactgcaaagatgctgtccgtgcgcgttgctgcggccgtggtccgcgcccttcctcggcgggccggactggtctccaga

SEQ ID NO: 64252 - DNA, 164 bp, Homo sapiens; identical to SEQ ID NO: 64248

SEQ ID NO: 64253 - DNA, 106 bp, Homo sapiens; identical to SEQ ID NO: 64249

SEQ ID NO: 64254 - DNA, 161 bp, Homo sapiens; identical to SEQ ID NO: 64251

SEQ ID NO: 64255 - DNA, 164 bp, Homo sapiens; identical to SEQ ID NO: 64248

SEQ ID NO: 64256 - DNA, 106 bp, Homo sapiens; identical to SEQ ID NO: 64249

SEQ ID NO: 64257 - DNA, 201 bp, Homo sapiens; identical to SEQ ID NO: 64250

SEQ ID NO: 64258 - DNA, 136 bp, Homo sapiens
gccattttgtcccagtcagtccggaggctgcggctkcagaagtaccgcctgcggagtaactgcaaagatgctgtccgtgcgcgttgctgcggccgtggtccgcgcccttcctcggcgggccggactggtctccaga

SEQ ID NO: 64259 - DNA, 201 bp, Homo sapiens
aggccccggtccaaaaccacagcggggaagacaggggacaccaaatcgctcaataaggagcatcctaatcaggaggtagttgataacactcgcctggaaartgccaacttcggcctacatatatcaagaatccgtaaagacagtggagaggaaaatgcccacccacgaagaggccaaatcattgacttccaagggctgctc

SEQ ID NO: 64260 - DNA, 201 bp, Homo sapiens
gcatgaacagtgagatgcgagaattggcagccgtggtgagccggtatccacagctatttacaggaattctttctccctggaaaggactactgctgtacggycctccaggtacaggaaagactttactggccaaagctgtggccactgaatgtaaaacaaccttctttaacatttctgcatccaccattgtcagcaaatgga

SEQ ID NO: 64261 - DNA, 201 bp, Homo sapiens
caccaaagccaatgggaagggccgggagcgcgcggcgcgggagatttaaaggctgctggagtgaggggtcgcccgtgcaccctgtcccagccgtcctgtcytggctgctcgctctgcttcgctgcgccgccactatgctctccctccgtgtcccgctcgcgcccatcacggacccgcagcagctgcagctctcgccgctga

SEQ ID NO: 64262 - DNA, 201 bp, Homo sapiens
atttgactttatggagaatatttcactggaaggaaagactaacttctttgagaagagagtaggcgagtatcagaggatgggagtgatgtcaagtccaacakagaattcttttaccttggatgctgacttctaaatgaactgaagatgtgcccttacttggctgattttttttttccatctcataagaaaaatcagctgaag

SEQ ID NO: 64263 - DNA, 201 bp, Homo sapiens
cgcgcggcgcgggagatttaaaggctgctggagtgaggggtcgcccgtgcaccctgtcccagccgtcctgtcctggctgctcgctctgcttcgctgcgcckccactatgctctccctccgtgtcccgctcgcgcccatcacggacccgcagcagctgcagctctcgccgctgaaggggctcagcttggtcgacaaggagaa

SEQ ID NO: 64264 - DNA, 201 bp, Homo sapiens
cccgccgctttgtcatcttccccatcgagtaccatgatatctggcagatgtataagaaggcagaggcttccttttggaccgccgaggaggtggacctctcsaaggacattcagcactgggaatccctgaaacccgaggagagatattttatatcccatgttctggctttctttgcagcaagcgatggcatagtaaatgaaa

SEQ ID NO: 64265 - DNA, 201 bp, Homo sapiens
tggcacagccaatgggaagggccggggcaccaaagccaatgggaagggccgggagcgcgcggcgcgggagatttaaaggctgctggagtgaggggtcgccsgtgcaccctgtcccagccgtcctgtcctggctgctcgctctgcttcgctgcgccgccactatgctctccctccgtgtcccgctcgcgcccatcacggacc

SEQ ID NO: 64266 - DNA, 201 bp, Homo sapiens
gaggcatggcacagccaatgggaagggccggggcaccaaagccaatgggaagggccgggagcgcgcggcgcgggagatttaaaggctgctggagtgagggrtcgcccgtgcaccctgtcccagccgtcctgtcctggctgctcgctctgcttcgctgcgccgccactatgctctccctccgtgtcccgctcgcgcccatca

SEQ ID NO: 64267 - DNA, 201 bp, Homo sapiens
gaagaaagctgagacattgcatgaaagatgatgagagataaatgttgatcttttggccccatttgttaattgtattcagtatttgaacgtcgtcctgtttrttgttagttttcttcatcatttattgtatagacaatttttaaatctctgtaatatgatacattttcctatcttttaagttattgttacctaaagttaatc

SEQ ID NO: 64268 - DNA, 201 bp, Homo sapiens
gctgcgccgccactatgctctccctccgtgtcccgctcgcgcccatcacggacccgcagcagctgcagctctcgccgctgaaggggctcagcttggtcgayaaggagaacacgccgccggccctgagcgggacccgcgtcctggccagcaagaccgcgaggaggatcttccaggagcccacggagccgaaaactaaagcag

SEQ ID NO: 64269 - DNA, 201 bp, Homo sapiens; identical to SEQ ID NO: 64261

SEQ ID NO: 64270 - DNA, 201 bp, Homo sapiens; identical to SEQ ID NO: 64262

SEQ ID NO: 64271 - DNA, 201 bp, Homo sapiens; identical to SEQ ID NO: 64264

SEQ ID NO: 64272 - DNA, 201 bp, Homo sapiens; identical to SEQ ID NO: 64265

SEQ ID NO: 64273 - DNA, 201 bp, Homo sapiens; identical to SEQ ID NO: 64266

SEQ ID NO: 64274 - DNA, 201 bp, Homo sapiens; identical to SEQ ID NO: 64263

SEQ ID NO: 64275 - DNA, 201 bp, Homo sapiens; identical to SEQ ID NO: 64268

SEQ ID NO: 64276 - DNA, 201 bp, Homo sapiens
acgagaaggagaagacgtttacaaaggacagcgacaaagacttgaaagccaccattagccatgtctcacccgatagcctttacctgttccgagtccaggcygtgtgtcggaacgacatgcgcagcgactttagccagacgatgctgtttcaagctaataccactcgaatattccaagggaccagaatagtgaaaacaggag

SEQ ID NO: 64277 - DNA, 201 bp, Homo sapiens
aaggagaagagtggggtgacccacgctgccgaggagcggaatcagacggagcccagccccacaccctcgtctcctaacaggactgccgagggagggcatcrgactatacctgggcatgagcaggatcacactgccgtccccacagaccagacgggcggaaggagggatgccggcccaggcctggaccccgacatggtcacc

SEQ ID NO: 64278 - DNA, 201 bp, Homo sapiens
ccagccccacaccctcgtctcctaacaggactgccgagggagggcatcagactatacctgggcatgagcaggatcacactgccgtccccacagaccagacsggcggaaggagggatgccggcccaggcctggaccccgacatggtcacctccacccaagtgccccccaccgccacagaggagcagtatgcagggagtgatc

SEQ ID NO: 64279 - DNA, 201 bp, Homo sapiens
ctggggagagaggagagaaggggagcagaaaatgttttcagactgctcatttctatgtggaagacagcagttcacctcgagtggtccctaatgaaagtatycctattattcctattccggatgacatggaagccattcctgtcaaacagtttgtcaaacacatcggtgagctctattctaataaccagcatgggttctctg

SEQ ID NO: 64280 - DNA, 201 bp, Homo sapiens
gactgccgagggagggcatcagactatacctgggcatgagcaggatcacactgccgtccccacagaccagacgggcggaaggagggatgccggcccaggcytggaccccgacatggtcacctccacccaagtgccccccaccgccacagaggagcagtatgcagggagtgatcccaagaggcccgaaatgccatctaaaaa

SEQ ID NO: 64281 - DNA, 201 bp, Homo sapiens
gtactgggcctactctggtgcctatggtcctgagcactgggtcacgtctagtgtcagctgtgggggccgtcaccagtctcctattgacattttagaccagyatgcgcgtgttggggaagaataccaggaactgcaactcgatggcttcgacaatgagtcttctaacaaaacctggatgaaaaacacagggaaaacagtcgc

SEQ ID NO: 64282 - DNA, 201 bp, Homo sapiens
tgtgcttccccgcgttgacagaaggctacgttggggccctgcacgagaatagacacggcagcgcagtgcagatccgcaggcgcaaggcttcaggcgacccrtactgggcctactctggtgcctatggtcctgagcactgggtcacgtctagtgtcagctgtgggggccgtcaccagtctcctattgacattttagaccagt

SEQ ID NO: 64283 - DNA, 201 bp, Homo sapiens
tgaactacatgatctcctacagctggaccaagaatgaggacgagaaggagaagacgtttacaaaggacagcgacaaagacttgaaagccaccattagccaygtctcacccgatagcctttacctgttccgagtccaggccgtgtgtcggaacgacatgcgcagcgactttagccagacgatgctgtttcaagctaatacca

SEQ ID NO: 64284 - DNA, 201 bp, Homo sapiens
ggccgcctcagccagcaagcaggcggctaggccagtcctagccaccacagaggccttggcttctccagggcccgatggtgattcgtcaccaaccaaggacrgcgagggcaccgaggaaggagagaaggatgagaaaagcgagagtgaggatggggagcgggagcacgaggaggatggagagaaggactccgaaaagaagga

SEQ ID NO: 64285 - DNA, 201 bp, Homo sapiens
agcacaaaaacagatacatcaacattttagcatatgatcacagtagggtgaagttaagacctttaccaggaaaagactctaagcacagcgactacattaaygcaaactatgttgatggttacaacaaagcaaaagcctacattgccacccaaggacctttgaagtctacatttgaagatttctggaggatgatttgggaac

SEQ ID NO: 64286 - DNA, 201 bp, Homo sapiens
agtccaagggctttcccagacgtttccgtgaagtgccttcttctggggagagaggagagaaggggagcagaaaatgttttcagactgctcatttctatgtsgaagacagcagttcacctcgagtggtccctaatgaaagtattcctattattcctattccggatgacatggaagccattcctgtcaaacagtttgtcaaac

SEQ ID NO: 64287 - DNA, 201 bp, Homo sapiens
tgtggtatcagccttgaccttcgtgtgcctcatccttctcattgctgtgctcgtttactggagagggtgtaacaaaataaagtccaagggctttcccagaygtttccgtgaagtgccttcttctggggagagaggagagaaggggagcagaaaatgttttcagactgctcatttctatgtggaagacagcagttcacctcg

SEQ ID NO: 64288 - DNA, 201 bp, Homo sapiens
ttaaaaaggcagctgtccgccctccccctttcccctcgccagggcgaggggcccctcaagtccgggatccgcgagctgcgcggaggatctcgccaaacccragcaccgtgcggcgtcttttaagagctcgaacaacgggaatccagcaaaaaacaagccggccccagaaggcagcctccctcctctctccgcgcacgggct

SEQ ID NO: 64289 - DNA, 201 bp, Homo sapiens
atgtgcgttttcggacatgcggaggttactggaaccgtgttggtggattttgttcctgaaaatcaccagttccgtgctccattatgtcgtgtgcttcccckcgttgacagaaggctacgttggggccctgcacgagaatagacacggcagcgcagtgcagatccgcaggcgcaaggcttcaggcgacccgtactgggccta

SEQ ID NO: 64290 - DNA, 201 bp, Homo sapiens
ctacatagttactgttttctttccttctttgccaaatgttttataataaatctcttaattacatacatttttctacttaagattaaattggaaatactgtmttagcaaaagtcttgggactatctaaactcccacacatagataaatctgatttggagagagaaatttaaaatatttaattaaaggtgatacccacatttt

SEQ ID NO: 64291 - DNA, 201 bp, Homo sapiens
caacatgctggagtacaagtcttggctgaagaacttggccaaggaacaactgagtcgcgagaacatacaatcaagtttgctggaaacattgtatcgaaacygatccaacctagagaccatttttaggatcatagacagtgatcattcagggttcatctcactggacgagttcaggcagacctggaagctgttcagctctca

SEQ ID NO: 64292 - DNA, 201 bp, Homo sapiens
cggttccctggacgggcgggagctctcccggcaggtgcggagctccgtggaactggagctagagcggtgccggcagcaagcaggcctcctggtgaccggaragaaagaggagccctcccgctcagcctcagaagcagactctgaagccggagagctgcggaagcccactcaggaggagtggaggcaggttgtagatatcct

SEQ ID NO: 64293 - DNA, 201 bp, Homo sapiens
gcttggctcctacaaggcccagaaaaccagcaggtcctccagcatcccctgcagcggttccctggacgggcgggagctctcccggcaggtgcggagctccstggaactggagctagagcggtgccggcagcaagcaggcctcctggtgaccggagagaaagaggagccctcccgctcagcctcagaagcagactctgaagc

SEQ ID NO: 64294 - DNA, 201 bp, Homo sapiens
aacaacagctccatgctcgctacgtcttgaaccttttgtatgaaaccaagaaacatctggtacagctgccaaacatcaaccgggtctcaacctgttacagygaggagatcacagtgtgtggagacttacatggccaattggatgacttaatctttatattttataagaatggcctcccatcgccagaacggtcatatgtgt

SEQ ID NO: 64295 - DNA, 201 bp, Homo sapiens
gacccacacactcaccatgaggcaaaggattagcagagtggaggagtcggctctgagagctctgagggagaagctgtttgctcattcttcagatcttctcwgtgaatttaagaagcatgatgcagataaagtcggtttaatcaccttgagtgactgggcagcagcggtggagtctgtgttgcacctaggactgccatggcg

SEQ ID NO: 64296 - DNA, 201 bp, Homo sapiens
gacccgcatattcactgaggacagattcgcccaggactccgagatgaagaaatgcagtgactatgaatccatagaggtacccgacagttacacggggccahgcctctccttcccactcctgcctgaccatgcaactgccctggtagaagcattcagactgaaacaacagctccatgctcgctacgtcttgaaccttttgta

SEQ ID NO: 64297 - DNA, 201 bp, Homo sapiens
ggggcctatgtcaaactggggccagccctgaccccacatatcgtgcagtatcaagctaacaaggtgacccacacactcaccatgaggcaaaggattagcaragtggaggagtcggctctgagagctctgagggagaagctgtttgctcattcttcagatcttctcagtgaatttaagaagcatgatgcagataaagtcggt

SEQ ID NO: 64298 - DNA, 201 bp, Homo sapiens
acaacagctccatgctcgctacgtcttgaaccttttgtatgaaaccaagaaacatctggtacagctgccaaacatcaaccgggtctcaacctgttacagcraggagatcacagtgtgtggagacttacatggccaattggatgacttaatctttatattttataagaatggcctcccatcgccagaacggtcatatgtgtt

SEQ ID NO: 64299 - DNA, 201 bp, Homo sapiens
accgcaaggtattaacaatcttttctgcctccaactactatgaagttggcagcaacagaggggcctatgtcaaactggggccagccctgaccccacatatygtgcagtatcaagctaacaaggtgacccacacactcaccatgaggcaaaggattagcagagtggaggagtcggctctgagagctctgagggagaagctgt

SEQ ID NO: 64300 - DNA, 201 bp, Homo sapiens
accgggtctcaacctgttacagcgaggagatcacagtgtgtggagacttacatggccaattggatgacttaatctttatattttataagaatggcctcccrtcgccagaacggtcatatgtgttcaacggtgactttgtggatcgaggcaaggattcagtagagatcctgatgattctttttgccttcatgctggtttacc

SEQ ID NO: 64301 - DNA, 201 bp, Homo sapiens
gtcaagctccatgacttcttcagctatctcatggatcacttcatccccagcagccacaacgacagggacttcctgacccgcatattcactgaggacagatkcgcccaggactccgagatgaagaaatgcagtgactatgaatccatagaggtacccgacagttacacggggccacgcctctccttcccactcctgcctgac

SEQ ID NO: 64302 - DNA, 201 bp, Homo sapiens
cctcagcctcccaaagtgctgggattacaggcatgagccaccgcacccagcctattttatactttttatttattgtctttaacaatgtctattggtaaagsaaagttatttttaaaaattgtattgtaattccatgacccaagcatatggattttcttcattatttactttttcttacttgttactgtagtgtttatataa

SEQ ID NO: 64303 - DNA, 201 bp, Homo sapiens
ctcgtgtcctttcagcctatgtcagccgcctgcccgcggcctttgcgccgctgccccgggtccggatgctggccgtggcccggcctctcagcaccgctctstgctccgcggggacccagacgaggctcgggactttgcagccggccttagtgctcgcgcagctttcagtaaattctcattttatgaaagacctgggcttag

SEQ ID NO: 64304 - DNA, 105 bp, Homo sapiens
gcggsgcagtgcatcctgggttggcgtagccatggcgtctcgtgtcctttcagcctatgtcagccgcctgcccgcggcctttgcgccgctgccccgggtccggat

SEQ ID NO: 64305 - DNA, 201 bp, Homo sapiens
ctcgtgtcctttcagcctatgtcagccgcctgcccgcggcctttgcgccgctgccccgggtccggatgctggccgtggcccggcctctcagcaccgctctstgctccgcggggacccagacgaggctcgggactttgcagccggccttagtgctcgcgcaggttcctggtagagttacacagttgtgccgccagtatagcg

SEQ ID NO: 64306 - DNA, 105 bp, Homo sapiens; identical to SEQ ID NO: 64304

SEQ ID NO: 64307 - DNA, 201 bp, Homo sapiens
acatgagccaggagcaggtggcccagaagctggccaaggaccccaagcctgcgatccgcttccgcctggagcaggtggtgccagccttccaggacctggtstatggctggaataggcatgaagtggccagcgtggagggagacccagtcatcatgaagagcgacggcttccccacataccacctggcctgcgtggtggacg

SEQ ID NO: 64308 - DNA, 201 bp, Homo sapiens
atgacttataagtcatcatctctgctggtttctgaaatgagatatgcttcttggggtcttcagtgaagaggaatagcaagtgaaaggaggatggtggcagrgtacatgaacccctaccaggcttctaggcttcccctgcatggcagccagcctctaagttggcccccaaccatccctgccttcttctattcacacccttgt

SEQ ID NO: 64309 - DNA, 201 bp, Homo sapiens
tgctcctctaccaggccctgggctggcagccaccccacttcgcccacctgcccctgctcctcaacagggatggcagcaagctctccaagaggcaaggggaygttttcctggagcactttgctgctgatggcttcctgcccgattccttgttggacatcatcaccaactgtggctcaggttttgcagagaaccaaatgggca

SEQ ID NO: 64310 - DNA, 201 bp, Homo sapiens
cctgtggactcgccctgcagtaggtcgagcacagctggacgccatctcggagaaggtggatgtgattgccaagcgtgtgctggggcttctagaaagatctrgtatgagcttaactcaggatatgctgaatggagaactgaagaagctatcagaaggtctggaaggcaccaagtacagtaatgtgatgaaactccttcggat

SEQ ID NO: 64311 - DNA, 201 bp, Homo sapiens
gcactgccttgtacaactacatctttgctaagaagtaccaggggagcttcatcctgaggctagaggacacagatcagactcgcgttgtgcctggggcagcrgagaatattgaggacatgctggagtgggcaggcatcccgcctgatgagagcccccgccggggcggtcctgctgggccctaccagcaatctcagcggttgg

SEQ ID NO: 64312 - DNA, 201 bp, Homo sapiens
agcagcaaggacctcctgtagctgagatgatgttggccttgggaccaaaggaagtacgggaacggatccagaaggtggtttccagctagggagaggatgtktcgggcagtggagatcgccctaagaacctgtgagcttagaaacagctttcagagaccagaaggaggcctggggcccgtcgggaagtttgctgaaggaact

SEQ ID NO: 64313 - DNA, 201 bp, Homo sapiens
ttcaattccagccaagcattcacatgaccgcaatcctagctgatctcgcttgtgacctctatgggagaccctaagccagaaccactcagagaagctgctcyggaacgtcagacacacatgaactgtgagatagtaaacgtttattgtttaaagctacttggtttggggataatttgcgtttcagcagtagacaatatattt

SEQ ID NO: 64314 - DNA, 201 bp, Homo sapiens
ctattcacacccttgtgtggttccttcccacattgaataggcctgacttgtgtaaccactacactattgaagaaatgagagtttgacttctgagggtaagycataaaatacatcgtggcttctgtcttgttttctttgatcgcttactttgggggaagccagcttccaggtcatgaaaatactcaagcagccttatggagt

SEQ ID NO: 64315 - DNA, 201 bp, Homo sapiens
attctgaggttccaggggtttctcaacgtaagaatttagggggacagaattcagcccgtagcagctgggcagcaggactcatgggtcccagttctcaggcyccaaggactcagagcagcaaaggatacgtgacacaagcagggctgaactggacaccagactttctttggggttgtaaaaggagaagtgtgactccactgc

SEQ ID NO: 64316 - DNA, 201 bp, Homo sapiens
gttcacagaaaagttaacatcccggaacagtgcagaaggcttgggtttcagtttgctagggcccccataacaaaatgccacagaaccaggtggtttaaacaacagagatttattttctcacatttggaggctagaagttcaagatcaaggtgtcagcaggcctggtttttcctagaggcctcttttgttggcttgcagaca

SEQ ID NO: 64317 - DNA, 201 bp, Homo sapiens
tctgtcttgttttctttgatcgcttactttgggggaagccagcttccaggtcatgaaaatactcaagcagccttatggagtgctccacatgacaagggatsgaggcctcccaccaatagccatgggagtgtgcaatcttgaaagctggtccttcaattccagccaagcattcacatgaccgcaatcctagctgatctcgct

SEQ ID NO: 64318 - DNA, 201 bp, Homo sapiens
ttcacagaaaagttaacatcccggaacagtgcagaaggcttgggtttcagtttgctagggcccccataacaaaatgccacagaaccaggtggtttaaacaacagagatttattttctcacatttggaggctagaagttcaagatcaaggtgtcagcaggcctggtttttcctagaggcctcttttgttggcttgcagacag

SEQ ID NO: 64319 - DNA, 201 bp, Homo sapiens
tcacagaaaagttaacatcccggaacagtgcagaaggcttgggtttcagtttgctagggcccccataacaaaatgccacagaaccaggtggtttaaacaacagagatttattttctcacatttggaggctagaagttcaagatcaaggtgtcagcaggcctggtttttcctagaggcctcttttgttggcttgcagacagc

SEQ ID NO: 64320 - DNA, 201 bp, Homo sapiens
cacagaaaagttaacatcccggaacagtgcagaaggcttgggtttcagtttgctagggcccccataacaaaatgccacagaaccaggtggtttaaacaacagagatttattttctcacatttggaggctagaagttcaagatcaaggtgtcagcaggcctggtttttcctagaggcctcttttgttggcttgcagacagct

SEQ ID NO: 64321 - DNA, 201 bp, Homo sapiens
acagaaaagttaacatcccggaacagtgcagaaggcttgggtttcagtttgctagggcccccataacaaaatgccacagaaccaggtggtttaaacaacagagatttattttctcacatttggaggctagaagttcaagatcaaggtgtcagcaggcctggtttttcctagaggcctcttttgttggcttgcagacagctg

SEQ ID NO: 64322 - DNA, 201 bp, Homo sapiens; identical to SEQ ID NO: 64307

SEQ ID NO: 64323 - DNA, 201 bp, Homo sapiens; identical to SEQ ID NO: 64308

SEQ ID NO: 64324 - DNA, 201 bp, Homo sapiens; identical to SEQ ID NO: 64309

SEQ ID NO: 64325 - DNA, 201 bp, Homo sapiens; identical to SEQ ID NO: 64310

SEQ ID NO: 64326 - DNA, 201 bp, Homo sapiens; identical to SEQ ID NO: 64311

SEQ ID NO: 64327 - DNA, 201 bp, Homo sapiens; identical to SEQ ID NO: 64312

SEQ ID NO: 64328 - DNA, 201 bp, Homo sapiens; identical to SEQ ID NO: 64313

SEQ ID NO: 64329 - DNA, 201 bp, Homo sapiens; identical to SEQ ID NO: 64314

SEQ ID NO: 64330 - DNA, 201 bp, Homo sapiens; identical to SEQ ID NO: 64315

SEQ ID NO: 64331 - DNA, 201 bp, Homo sapiens; identical to SEQ ID NO: 64316

SEQ ID NO: 64332 - DNA, 201 bp, Homo sapiens; identical to SEQ ID NO: 64317

SEQ ID NO: 64333 - DNA, 201 bp, Homo sapiens; identical to SEQ ID NO: 64318

SEQ ID NO: 64334 - DNA, 201 bp, Homo sapiens; identical to SEQ ID NO: 64319

SEQ ID NO: 64335 - DNA, 201 bp, Homo sapiens; identical to SEQ ID NO: 64320

SEQ ID NO: 64336 - DNA, 201 bp, Homo sapiens; identical to SEQ ID NO: 64321

SEQ ID NO: 64337 - DNA, 201 bp, Homo sapiens; identical to SEQ ID NO: 64308

SEQ ID NO: 64338 - DNA, 201 bp, Homo sapiens; identical to SEQ ID NO: 64309

SEQ ID NO: 64339 - DNA, 164 bp, Homo sapiens
attatatgcaatggaggaaaagttgttctcaaggaaaactagggagctttctccagaagatgatgtaatggcagaaacaacaggtggttgaccacagaagsggacaataataatacttgtaatttattgtgcgcttatatgagcctcaccctctcccaggtgtc

SEQ ID NO: 64340 - DNA, 201 bp, Homo sapiens; identical to SEQ ID NO: 64313

SEQ ID NO: 64341 - DNA, 201 bp, Homo sapiens; identical to SEQ ID NO: 64314

SEQ ID NO: 64342 - DNA, 201 bp, Homo sapiens; identical to SEQ ID NO: 64307

SEQ ID NO: 64343 - DNA, 201 bp, Homo sapiens
tggactcgccctgcagtaggtcgagcacagctggacgccatctcggagaaggtggatgtgattgccaagcgtgtgctggggtgagcttctagaaagatctrgtatgagcttaactcaggatatgctgaatggagaactgaagaagctatcagaaggtctggaaggcaccaagtacagtaatgtgatgaaactccttcggat

SEQ ID NO: 64344 - DNA, 201 bp, Homo sapiens; identical to SEQ ID NO: 64311

SEQ ID NO: 64345 - DNA, 201 bp, Homo sapiens; identical to SEQ ID NO: 64312

SEQ ID NO: 64346 - DNA, 201 bp, Homo sapiens; identical to SEQ ID NO: 64315

SEQ ID NO: 64347 - DNA, 201 bp, Homo sapiens; identical to SEQ ID NO: 64317

SEQ ID NO: 64348 - DNA, 201 bp, Homo sapiens; identical to SEQ ID NO: 64316

SEQ ID NO: 64349 - DNA, 201 bp, Homo sapiens; identical to SEQ ID NO: 64318

SEQ ID NO: 64350 - DNA, 201 bp, Homo sapiens; identical to SEQ ID NO: 64319

SEQ ID NO: 64351 - DNA, 201 bp, Homo sapiens; identical to SEQ ID NO: 64320

SEQ ID NO: 64352 - DNA, 201 bp, Homo sapiens; identical to SEQ ID NO: 64321

SEQ ID NO: 64353 - DNA, 201 bp, Homo sapiens
gagtcctgtggcgcgggaaggtgctgcaacctccgaaaggggacgtggcggccgagtgtgtgcgaaacctaaacgaacgcatccggcgggacgtcagggtytacatcagcctcctgcccctgggcgatggactcaccttggccttcaagatctagggctggcccctagtgagtgggctcgagggagggttgcctgggaacc

SEQ ID NO: 64354 - DNA, 201 bp, Homo sapiens
accctggagcagccgcagggggattctatgatgacctgcgagcaggcccagctcttggccaacctggcgcggctcatccaggccaagaaggcgctggaccygggcaccttcacgggctactccgccctggccctggccctggcgctgcccgcggacgggcgcgtggtgacctgcgaggtggacgcgcagcccccggagctg

SEQ ID NO: 64355 - DNA, 201 bp, Homo sapiens; identical to SEQ ID NO: 64353

SEQ ID NO: 64356 - DNA, 201 bp, Homo sapiens; identical to SEQ ID NO: 64354

SEQ ID NO: 64357 - DNA, 201 bp, Homo sapiens
tactgtattttataaaatacgaactattgttatgctttatggagagtatattttcatatgaaactgataaatatatatgtggaatattctttttaaaaacrattttataaacaaatcaaggagcactagagctttagtgtctacatgagtatcttgtgaagtgtcataacaggcataacatatttttatgttaattaaaga

SEQ ID NO: 64358 - DNA, 201 bp, Homo sapiens
gctgtatacctgcacaagtggtggctgccattgatgtcaacactgtcgctaatgaagtatacaagtataattttcctcacacacagttacttgccaagacrattgaaggcattacactcgaagagtttgacagattatcttttgatatgattttaatgagccctccctgccagccattcacaagagacctcttgatacaaa

SEQ ID NO: 64359 - DNA, 201 bp, Homo sapiens
aaattcaacatagaattaccctatgattcagcgattccacctctggctatagatccaaaagaattgaaagcagggacttgaacagatatttgtacaccagygtttataacaccattatttacagtagccaaaaggtagaagcagcccaagtgtcatcccattcacccatgaatggatgcaggaattgtgttccgtgcatgc

SEQ ID NO: 64360 - DNA, 149 bp, Homo sapiens
tataggtcttaaagaagtctaggagatttctagagaagggaaagaacamaagcagagaagtgaactgaagggcatgtttggggaacaccaagtagtttcatttacagcagagttcaagaagagaaaaaagttaaggaagaaaaaccctt

SEQ ID NO: 64361 - DNA, 201 bp, Homo sapiens
ctgaaacgccgcggaaccagaggctgagggagcggcgcgatggagggaggaggagcgacggaccggcaggcctagctccggggctgcggcggctgaggcgsggggatggagcccctgcgggtgctggagctatacagcggcgtgggcggcatgcaccacgcgctgagagaaagctgtatacctgcacaagtggtggctgcc

SEQ ID NO: 64362 - DNA, 171 bp, Homo sapiens
tataggtcttaaagaagtctaggagatttctagagaagggaaagaacacaagcagagaagtgaactgaagrgcatgtttggggaacaccaagtagtttcatttacagcagagttcaagaagagaaaaaagttaaggaagaaaaacccttgccaatccccaggccgcgaggc

SEQ ID NO: 64363 - DNA, 201 bp, Homo sapiens
ctccaacctctcttggcattccaaattcaaggctacgatattttcttattgcaaagcttcagtcagagccattaccctttcaagcccctggtcaggtactkatggagttccccaaaattgaatctgtacatccacaaaaatatgcaatggatgtagaaaataaaattcaagaaaagaacgttgaaccaaatattagctttg

SEQ ID NO: 64364 - DNA, 201 bp, Homo sapiens
tgcacaagtggtggctgccattgatgtcaacactgtcgctaatgaagtatacaagtataattttcctcacacacagttacttgccaagacgattgaaggcrttacactcgaagagtttgacagattatcttttgatatgattttaatgagccctccctgccagccattcacaagagacctcttgatacaaacaatagaaaa

SEQ ID NO: 64365 - DNA, 201 bp, Homo sapiens
gagaagtgaactgaagggcatgtttggggaacaccaagtagtttcatttacagcagagttcaagaagagaaaaaagttaaggaagaaaaacccttgccaayccccaggccgcgaggccctctgaagccctgagcctggagcggtaggagacgggggaactgaaacgccgcggaaccagaggctgagggagcggcgcgatgg

SEQ ID NO: 64366 - DNA, 201 bp, Homo sapiens
atctccaacctctcttggcattccaaattcaaggctacgatattttcttattgcaaagcttcagtcagagccattaccctttcaagcccctggtcaggtaytgatggagttccccaaaattgaatctgtacatccacaaaaatatgcaatggatgtagaaaataaaattcaagaaaagaacgttgaaccaaatattagctt

SEQ ID NO: 64367 - DNA, 201 bp, Homo sapiens
ctgtcgctaatgaagtatacaagtataattttcctcacacacagttacttgccaagacgattgaaggcattacactcgaagagtttgacagattatctttygatatgattttaatgagccctccctgccagccattcacaagagacctcttgatacaaacaatagaaaattgtggctttcagtaccaagagtttctattat

SEQ ID NO: 64368 - DNA, 201 bp, Homo sapiens; identical to SEQ ID NO: 64357

SEQ ID NO: 64369 - DNA, 201 bp, Homo sapiens
gctgtatacctgcacaagtggtggctgccattgatgtcaacactgtcgctaatgaagtatacaagtataattttcctcacacacagttacttgccaagacrattgaaggcattacactcgaagagtttgacagattatcttttgatatgattttaatgagccctccctgccagccattcacaagattacaaaaattaccaa

SEQ ID NO: 64370 - DNA, 201 bp, Homo sapiens; identical to SEQ ID NO: 64359

SEQ ID NO: 64371 - DNA, 149 bp, Homo sapiens; identical to SEQ ID NO: 64360

SEQ ID NO: 64372 - DNA, 201 bp, Homo sapiens; identical to SEQ ID NO: 64361

SEQ ID NO: 64373 - DNA, 171 bp, Homo sapiens; identical to SEQ ID NO: 64362

SEQ ID NO: 64374 - DNA, 201 bp, Homo sapiens; identical to SEQ ID NO: 64363

SEQ ID NO: 64375 - DNA, 201 bp, Homo sapiens
tgcacaagtggtggctgccattgatgtcaacactgtcgctaatgaagtatacaagtataattttcctcacacacagttacttgccaagacgattgaaggcrttacactcgaagagtttgacagattatcttttgatatgattttaatgagccctccctgccagccattcacaagattacaaaaattaccaaagtatattct

SEQ ID NO: 64376 - DNA, 201 bp, Homo sapiens; identical to SEQ ID NO: 64365

SEQ ID NO: 64377 - DNA, 201 bp, Homo sapiens; identical to SEQ ID NO: 64366

SEQ ID NO: 64378 - DNA, 201 bp, Homo sapiens
ctgtcgctaatgaagtatacaagtataattttcctcacacacagttacttgccaagacgattgaaggcattacactcgaagagtttgacagattatctttygatatgattttaatgagccctccctgccagccattcacaagattacaaaaattaccaaagtatattcttttggaaaatgttaaaggttttgaagtatctt

SEQ ID NO: 64379 - DNA, 201 bp, Homo sapiens; identical to SEQ ID NO: 64357

SEQ ID NO: 64380 - DNA, 201 bp, Homo sapiens
gctgtatacctgcacaagtggtggctgccattgatgtcaacactgtcgctaatgaagtatacaagtataattttcctcacacacagttacttgccaagacrattgaaggcattacactcgaagagtttgacagattatcttttgatatgattttaatgagccctccctgccagccattcacaaggattggccggcagggtg

SEQ ID NO: 64381 - DNA, 201 bp, Homo sapiens; identical to SEQ ID NO: 64359

SEQ ID NO: 64382 - DNA, 201 bp, Homo sapiens
attatcttttgatatgattttaatgagccctccctgccagccattcacaaggattggccggcagggtgatatgactgattcaaggacgaatagcttcttayatattctagatattctcccaagattacaaaaattaccaaagtatattcttttggaaaatgttaaaggttttgaagtatcttctacaagagacctcttgat

SEQ ID NO: 64383 - DNA, 149 bp, Homo sapiens; identical to SEQ ID NO: 64360

SEQ ID NO: 64384 - DNA, 201 bp, Homo sapiens; identical to SEQ ID NO: 64361

SEQ ID NO: 64385 - DNA, 171 bp, Homo sapiens; identical to SEQ ID NO: 64362

SEQ ID NO: 64386 - DNA, 201 bp, Homo sapiens; identical to SEQ ID NO: 64363

SEQ ID NO: 64387 - DNA, 201 bp, Homo sapiens
tgcacaagtggtggctgccattgatgtcaacactgtcgctaatgaagtatacaagtataattttcctcacacacagttacttgccaagacgattgaaggcrttacactcgaagagtttgacagattatcttttgatatgattttaatgagccctccctgccagccattcacaaggattggccggcagggtgatatgactga

SEQ ID NO: 64388 - DNA, 201 bp, Homo sapiens; identical to SEQ ID NO: 64365

SEQ ID NO: 64389 - DNA, 201 bp, Homo sapiens; identical to SEQ ID NO: 64366

SEQ ID NO: 64390 - DNA, 201 bp, Homo sapiens
ctgtcgctaatgaagtatacaagtataattttcctcacacacagttacttgccaagacgattgaaggcattacactcgaagagtttgacagattatctttygatatgattttaatgagccctccctgccagccattcacaaggattggccggcagggtgatatgactgattcaaggacgaatagcttcttacatattctag

SEQ ID NO: 64391 - DNA, 201 bp, Homo sapiens; identical to SEQ ID NO: 64361

SEQ ID NO: 64392 - DNA, 201 bp, Homo sapiens; identical to SEQ ID NO: 64363

SEQ ID NO: 64393 - DNA, 201 bp, Homo sapiens; identical to SEQ ID NO: 64357

SEQ ID NO: 64394 - DNA, 201 bp, Homo sapiens; identical to SEQ ID NO: 64387

SEQ ID NO: 64395 - DNA, 112 bp, Homo sapiens
acccttgccaayccccaggccgcgaggccctctgaagccctgagcctggagcggtaggagacgggggaactgaaacgccgcggaaccagaggctgagggagcggcgcgatgg

SEQ ID NO: 64396 - DNA, 201 bp, Homo sapiens; identical to SEQ ID NO: 64366

SEQ ID NO: 64397 - DNA, 201 bp, Homo sapiens; identical to SEQ ID NO: 64380

SEQ ID NO: 64398 - DNA, 201 bp, Homo sapiens; identical to SEQ ID NO: 64359

SEQ ID NO: 64399 - DNA, 201 bp, Homo sapiens; identical to SEQ ID NO: 64390

SEQ ID NO: 64400 - DNA, 201 bp, Homo sapiens; identical to SEQ ID NO: 64382

SEQ ID NO: 64401 - DNA, 201 bp, Homo sapiens
tttctctcttttctggtgatagtctttaaaaatagagattgacagtgtatcataggattaccctctaagtgtgaaaatgtgtaattatgtacggtatttaraaaaagcccttatgtgtccattttgtcaactgaatacatttagattcactgggaaagtcagagaaatttattctttagtatcaaatcaaaccgaggcttt

SEQ ID NO: 64402 - DNA, 201 bp, Homo sapiens
aactaacaggttttaaaaacattttatttacacaaaatatcagggctggataccttttaaagaggaggctcaagtatcgggctgtcatttccaatagatctgaccttttcttcagatacataagcattattttctctgtttaggtccaaggaaaaacaaaaggtaaaggaaataaagggaatatacataaggcaaacattt

SEQ ID NO: 64403 - DNA, 201 bp, Homo sapiens
ggacatttgcattttttttttttatttatttaaaggaattagtttgttctcctggctcattcctctttgttactttctgttccaatacacagaaagcttgrtcatctttgatcagcagaaatatcttttatttagcaaagctcaacttcccaagagttatgcatggtgtgcctatctgaaggtggtgttagctctgttgaa

SEQ ID NO: 64404 - DNA, 201 bp, Homo sapiens
cctttcattgcctctgaaaactctttgacgagtagatttcaaaaacagagattttaaaaatttgcttgctttactggtgaaggacatttgcattttttttwtttatttatttaaaggaattagtttgttctcctggctcattcctctttgttactttctgttccaatacacagaaagcttgatcatctttgatcagcagaa

SEQ ID NO: 64405 - DNA, 201 bp, Homo sapiens
cattatatcttaccaattaattaaattgtggcctttgttattataaatgtaatgattcattaaactatattatgtaatatattttgacttttatgattgartttttataattcagtagtgttatgtgttcttatacaaactttgcaaaacagcaaaatgtatggcaaaaatagataccggaaagccaaagatatcaaaatc

SEQ ID NO: 64406 - DNA, 201 bp, Homo sapiens
ctgcatacgtcaccaaggggacactaggtgaggccttcaaatgattactacaagtctgtggcctgaggttattttaaaattaacaatttcgcatatagccwatatgacaacagagtgtttatattttatacaaatatctgctaaacatgcacacatatactcacacacacatatatatattagatgaaatgttttatttat

SEQ ID NO: 64407 - DNA, 201 bp, Homo sapiens
gcctatatgacaacagagtgtttatattttatacaaatatctgctaaacatgcacacatatactcacacacacatatatatattagatgaaatgttttatwtatgtataaaacatatacatataaaacatttatatatatggctttattccacagggcacagtggctgtatagcctcaaaattttaatataaaaaagtgta

SEQ ID NO: 64408 - DNA, 201 bp, Homo sapiens
gaggttattttaaaattaacaatttcgcatatagcctatatgacaacagagtgtttatattttatacaaatatctgctaaacatgcacacatatactcacrcacacatatatatattagatgaaatgttttatttatgtataaaacatatacatataaaacatttatatatatggctttattccacagggcacagtggctg

SEQ ID NO: 64409 - DNA, 167 bp, Homo sapiens
atggtgctgctgctggtgatcctcatcccggtgctggtgagctcggccggcacgtcggcgcactackagatgctgggcacctgccgcatggtctgcgacccctacgggggcaccaaggcgcccagcaccgctgccacgcccgaccgcggcctcatgcagtccctgcc

SEQ ID NO: 64410 - DNA, 201 bp, Homo sapiens
aattaacctttcaaaatatttttatcattgtgaattggtaattgtattacagtcagtatcctttggggaaaaaagtctcaaaatttaacttcccttgttgmagaagctattttacagtgccatattattcattaagcattaattaaagaacagcaggataattagtaggatcatcaatattacaagaaacattagatcgct

SEQ ID NO: 64411 - DNA, 201 bp, Homo sapiens
tatcaaattagatggcgggaaagcccatggaggaaacaacaacaaatacagcacgttttctggatttattatttatgctgactgataatgcagaaactaarcttattattctgagtttgaacactggattcgtatggctaacgtcagtgaatcaaggatcccaggggatgccaatggcagggcacctcagttgtgtatatg

SEQ ID NO: 64412 - DNA, 201 bp, Homo sapiens
aaagcctcggtttgatttgatactaaagaataaatttctctgactttcccagtgaatctaaatgtattcagttgacaaaatggacacataagggctttttytaaataccgtacataattacacattttcacacttagagggtaatcctatgatacactgtcaatctctatttttaaagactatcaccagaaaagagagaaa

SEQ ID NO: 64413 - DNA, 201 bp, Homo sapiens
tccgaatattgcaagaagcaggcgcagacatctccaaaacagtcatgtcacacctggataggactattcttgataagaaagagctcttggagtttgctcarcttggctgctacttggaatatgatctctttggtactgaactacttcattaccaactcggcccagatattgacatgcctgatgataacaaaagaattagaa

SEQ ID NO: 64414 - DNA, 201 bp, Homo sapiens
aaatgtttgccttatgtatattccctttatttcctttaccttttgtttttccttggacctaaacagagaaaataatgcttatgtatctgaagaaaaggtcagatctattggaaatgacagcccgatacttgagcctcctctttaaaaggtatccagccctgatattttgtgtaaataaaatgtttttaaaacctgttagtt

SEQ ID NO: 64415 - DNA, 201 bp, Homo sapiens
ttcaacagagctaacaccaccttcagataggcacaccatgcataactcttgggaagttgagctttgctaaataaaagatatttctgctgatcaaagatgaycaagctttctgtgtattggaacagaaagtaacaaagaggaatgagccaggagaacaaactaattcctttaaataaataaaaaaaaaaaatgcaaatgtcc

SEQ ID NO: 64416 - DNA, 201 bp, Homo sapiens
ttctgctgatcaaagatgatcaagctttctgtgtattggaacagaaagtaacaaagaggaatgagccaggagaacaaactaattcctttaaataaataaawaaaaaaaatgcaaatgtccttcaccagtaaagcaagcaaatttttaaaatctctgtttttgaaatctactcgtcaaagagttttcagaggcaatgaaagg

SEQ ID NO: 64417 - DNA, 201 bp, Homo sapiens
ggatggttgcttatgaattcacaccttgagtataaaacttgcagagaacattcagcgatttccagtccactgtgagatattaatcagttacctaggactartgacagatcatttccttctgatgagaactaggagggtttgccttctctgagaccagctattacaactgtgcctctagggagttactcagcctaattgagc

SEQ ID NO: 64418 - DNA, 201 bp, Homo sapiens
gattttgatatctttggctttccggtatctatttttgccatacattttgctgttttgcaaagtttgtataagaacacataacactactgaattataaaaaytcaatcataaaagtcaaaatatattacataatatagtttaatgaatcattacatttataataacaaaggccacaatttaattaattggtaagatataatg

SEQ ID NO: 64419 - DNA, 201 bp, Homo sapiens
ataaataaaacatttcatctaatatatatatgtgtgtgtgagtatatgtgtgcatgtttagcagatatttgtataaaatataaacactctgttgtcatatwggctatatgcgaaattgttaattttaaaataacctcaggccacagacttgtagtaatcatttgaaggcctcacctagtgtccccttggtgacgtatgcag

SEQ ID NO: 64420 - DNA, 201 bp, Homo sapiens
tacacttttttatattaaaattttgaggctatacagccactgtgccctgtggaataaagccatatatataaatgttttatatgtatatgttttatacatawataaaacatttcatctaatatatatatgtgtgtgtgagtatatgtgtgcatgtttagcagatatttgtataaaatataaacactctgttgtcatataggc

SEQ ID NO: 64421 - DNA, 201 bp, Homo sapiens
cttgcagagaacattcagcgatttccagtccactgtgagatattaatcagttacctaggactaatgacagatcatttccttctgatgagaactaggagggkttgccttctctgagaccagctattacaactgtgcctctagggagttactcagcctaattgagccctattattttaacttaacaaaataaatacagaagta

SEQ ID NO: 64422 - DNA, 201 bp, Homo sapiens
cagccactgtgccctgtggaataaagccatatatataaatgttttatatgtatatgttttatacataaataaaacatttcatctaatatatatatgtgtgygtgagtatatgtgtgcatgtttagcagatatttgtataaaatataaacactctgttgtcatataggctatatgcgaaattgttaattttaaaataacctc

SEQ ID NO: 64423 - DNA, 201 bp, Homo sapiens
gcctattcccataaagaaaaccttcaattaaatcaggagacagaagccataaaggaagaactgttgtattttaaagctaatggtggaggggctttggtggraaacacaaccactgggattagccgagacacacagacgttgaagaggcttgcagaagagactggcgtccatatcatatctggagccgggttttatgtggat

SEQ ID NO: 64424 - DNA, 201 bp, Homo sapiens
tgacccatgaacacctggccatgacctttgactgctgttactgtccacctcccccgtgccaggaagctatttccaaagaacctatcgtgatgaaaaatttrtattggattcagaaaaacgcctattcccataaagaaaaccttcaattaaatcaggagacagaagccataaaggaagaactgttgtattttaaagctaatg

SEQ ID NO: 64425 - DNA, 201 bp, Homo sapiens
gcttgcagaagagactggcgtccatatcatatctggagccgggttttatgtggatgcaactcactcctcagagaccagggccatgtcagtggagcagcttrccgatgtccttatgaatgaaattctccatggagctgatggaaccagtatcaagtgtggcattattggagaaattggttgctcctggcctttgactgagag

SEQ ID NO: 64426 - DNA, 201 bp, Homo sapiens
cagctcatgcccaggctcagcttggttgtcctgttattatccatcctggacggagctccagggcaccatttcagattatccgaatattgcaagaagcaggygcagacatctccaaaacagtcatgtcacacctggataggactattcttgataagaaagagctcttggagtttgctcaacttggctgctacttggaatatg

SEQ ID NO: 64427 - DNA, 186 bp, Homo sapiens
gtttcagttacctgtagtcaaccacagtctgaaaatattaaggtattttaagacagaaagagagagaggagagaaaccgcattcayaaaaaagaaatcctctttttagaacatctcttggtggtaccatcagaaatgtcttccttaagtggaaaagtccaaaccgttttgggccttgtagagccaa

SEQ ID NO: 64428 - DNA, 201 bp, Homo sapiens
atgttgttcctaaaatgttgctgagaggcataactgagaatgtgcttgataagattctaatagagaaccctaagcaatggctaactttcaaataggatggktgcttatgaattcacaccttgagtataaaacttgcagagaacattcagcgatttccagtccactgtgagatattaatcagttacctaggactaatgacag

SEQ ID NO: 64429 - DNA, 201 bp, Homo sapiens
caaataggatggttgcttatgaattcacaccttgagtataaaacttgcagagaacattcagcgatttccagtccactgtgagatattaatcagttacctakgactaatgacagatcatttccttctgatgagaactaggagggtttgccttctctgagaccagctattacaactgtgcctctagggagttactcagcctaa

SEQ ID NO: 64430 - DNA, 201 bp, Homo sapiens
agcgatctaatgtttcttgtaatattgatgatcctactaattatcctgctgttctttaattaatgcttaatgaataatatggcactgtaaaatagcttctkcaacaagggaagttaaattttgagacttttttccccaaaggatactgactgtaatacaattaccaattcacaatgataaaaatattttgaaaggttaatt

SEQ ID NO: 64431 - DNA, 201 bp, Homo sapiens; identical to SEQ ID NO: 64424

SEQ ID NO: 64432 - DNA, 201 bp, Homo sapiens; identical to SEQ ID NO: 64425

SEQ ID NO: 64433 - DNA, 201 bp, Homo sapiens; identical to SEQ ID NO: 64426

SEQ ID NO: 64434 - DNA, 201 bp, Homo sapiens; identical to SEQ ID NO: 64413

SEQ ID NO: 64435 - DNA, 201 bp, Homo sapiens; identical to SEQ ID NO: 64414

SEQ ID NO: 64436 - DNA, 201 bp, Homo sapiens; identical to SEQ ID NO: 64415

SEQ ID NO: 64437 - DNA, 201 bp, Homo sapiens; identical to SEQ ID NO: 64416

SEQ ID NO: 64438 - DNA, 201 bp, Homo sapiens; identical to SEQ ID NO: 64428

SEQ ID NO: 64439 - DNA, 201 bp, Homo sapiens; identical to SEQ ID NO: 64429

SEQ ID NO: 64440 - DNA, 146 bp, Homo sapiens
tgggagggcacaggggagactaaaaaggccagggaagttggcctgscggaagttcccagggagaaggcagcgcgttgtacccgagattcagggtctggctctgcttcccaggctagagtgcatttggcgcgatcacagctcactgc

SEQ ID NO: 64441 - DNA, 201 bp, Homo sapiens; identical to SEQ ID NO: 64418

SEQ ID NO: 64442 - DNA, 201 bp, Homo sapiens; identical to SEQ ID NO: 64417

SEQ ID NO: 64443 - DNA, 201 bp, Homo sapiens; identical to SEQ ID NO: 64421

SEQ ID NO: 64444 - DNA, 201 bp, Homo sapiens; identical to SEQ ID NO: 64423

SEQ ID NO: 64445 - DNA, 201 bp, Homo sapiens; identical to SEQ ID NO: 64430

SEQ ID NO: 64446 - DNA, 201 bp, Homo sapiens; identical to SEQ ID NO: 64424

SEQ ID NO: 64447 - DNA, 201 bp, Homo sapiens; identical to SEQ ID NO: 64425

SEQ ID NO: 64448 - DNA, 201 bp, Homo sapiens; identical to SEQ ID NO: 64426

SEQ ID NO: 64449 - DNA, 201 bp, Homo sapiens; identical to SEQ ID NO: 64413

SEQ ID NO: 64450 - DNA, 201 bp, Homo sapiens; identical to SEQ ID NO: 64414

SEQ ID NO: 64451 - DNA, 201 bp, Homo sapiens; identical to SEQ ID NO: 64415

SEQ ID NO: 64452 - DNA, 201 bp, Homo sapiens; identical to SEQ ID NO: 64416

SEQ ID NO: 64453 - DNA, 186 bp, Homo sapiens; identical to SEQ ID NO: 64427

SEQ ID NO: 64454 - DNA, 201 bp, Homo sapiens; identical to SEQ ID NO: 64428

SEQ ID NO: 64455 - DNA, 201 bp, Homo sapiens; identical to SEQ ID NO: 64429

SEQ ID NO: 64456 - DNA, 201 bp, Homo sapiens; identical to SEQ ID NO: 64418

SEQ ID NO: 64457 - DNA, 201 bp, Homo sapiens; identical to SEQ ID NO: 64417

SEQ ID NO: 64458 - DNA, 201 bp, Homo sapiens; identical to SEQ ID NO: 64421

SEQ ID NO: 64459 - DNA, 201 bp, Homo sapiens; identical to SEQ ID NO: 64423

SEQ ID NO: 64460 - DNA, 201 bp, Homo sapiens; identical to SEQ ID NO: 64430

SEQ ID NO: 64461 - DNA, 201 bp, Homo sapiens
aggtgtacgggcaggaccgacgcttctggagaaaatacctgcacctgagcttccatgccctggtgggcctggccacggaagagctcctgcaggtggcccgytgactgcactgcattgggggatgtcgggtagagctggggttgtcagaggctagggcagtgactgaggacctgggcaaaacctgccacagggtgtgggaac

SEQ ID NO: 64462 - DNA, 201 bp, Homo sapiens
cggcggccgaagaggcgccagagccccgctgctgggggccccatctgaatcgggctgcgaccaagagtccacagcctacgccagggcggagccgccagggytcggtgccggactacgggcagcggctcaaggccaatctgaaaggcaccctgcaggccggaccagccctgggccgcagaccgtggcctctaggaagagcct

SEQ ID NO: 64463 - DNA, 201 bp, Homo sapiens
gctgcagtgggaccacgagcccaggacaggtgtgcggcgtgggacaggggtgcttgtggagttcagtgagctggccttccaccttcgcagcccgggggacytgaccgctgaggagaaggaccagatatgtgacttcctctatggccgtgtgcaggcccgggagcgccaggccctggcccgtctgcgcagaaccttccaggc

SEQ ID NO: 64464 - DNA, 201 bp, Homo sapiens
gctccgcagctccgagtcgctccccgcggcggccgaagaggcgccagagccccgctgctgggggccccatctgaatcgggctgcgaccaagagtccacagyctacgccagggcggagccgccagggctcggtgccggactacgggcagcggctcaaggccaatctgaaaggcaccctgcaggccggaccagccctgggccg

SEQ ID NO: 64465 - DNA, 201 bp, Homo sapiens
cctgcacgcagcctgggtcccagggtctggaggtcgtgcccccaaaaccacagccgaggcctaccacgcgggcatgtgcagccgggaacggcggcgggtayagcgagccttcatgcagggccagttgcgggtggtggtggccacggtggcctttgggatggggctggaccggccagatgtgcgggctgtgctgcatctggg

SEQ ID NO: 64466 - DNA, 201 bp, Homo sapiens
accaggaagcaacgggaatctgtcctgcagaagattcgggcagcccaggtacacgtgctgatgctgacacctgaggcactggtgggggcgggaggcctccytccagccgcacagctgcctccagttgcttttgcctgcattgatgaggcccactgcctctcccagtggtcccacaacttccggccctgctacctgcgcgtc

SEQ ID NO: 64467 - DNA, 201 bp, Homo sapiens
cagcagctgcctgaggacccagggcaaggcagcagctccgtggagtttgacatggtcaagctggtggactccatgggctgggagctggcctctgtgcggcrggctctctgccagctgcagtgggaccacgagcccaggacaggtgtgcggcgtgggacaggggtgcttgtggagttcagtgagctggccttccaccttcgc

SEQ ID NO: 64468 - DNA, 201 bp, Homo sapiens
tgcaggcgtgggagcgcgcgttccgacggcagcgcgggcggcgaccgagccaggacgacgtggaggcggcgccggaggagacccgcgcgctctaccgggartaccgcactctgaagcgtaccacgggccaggccggcggcgggctccgcagctccgagtcgctccccgcggcggccgaagaggcgccagagccccgctgct

SEQ ID NO: 64469 - DNA, 201 bp, Homo sapiens
gtcatgcggatcctgtctggcatctccacgctgctggtgctgcctacaggtgccggcaagtccctgtgctaccagctcccagcgctgctctacagccggcrcagcccctgcctcacgttggtcgtctctcccctgctgtcactcatggatgaccaggtgtctggcctgccaccgtgtctcaaggcggcctgcatacactcg

SEQ ID NO: 64470 - DNA, 201 bp, Homo sapiens
gagccactggttccttcaccacaacctgtacctgaggtgcccagcctggaccccaccgtgctgccactctactccctggggccctcagggcagttggcagrgacgccggctgaggtgttccaggccctggagcagctggggcaccaagcctttcgccctgggcaggagcgtgcagtcatgcggatcctgtctggcatctcc

SEQ ID NO: 64471 - DNA, 201 bp, Homo sapiens
gctcagaggaatcacaacttctgatccctggtgagtcggctgtccttggtcctggtgctggctcccagggcccagaggcttcagccttccaagaagtcagyatccgtgtggggagcccccagcccagcagcagtggaggcgagaagcggagatggaacgaggacccctgggagagccccgcacaggtccagcaggagagca

SEQ ID NO: 64472 - DNA, 201 bp, Homo sapiens
cccagggcccagaggcttcagccttccaagaagtcagcatccgtgtggggagcccccagcccagcagcagtggaggcgagaagcggagatggaacgaggasccctgggagagccccgcacaggtccagcaggagagcagccaagctggacccccatcggagggggctggggctgtagcagttgaggaagaccctccagggg

SEQ ID NO: 64473 - DNA, 201 bp, Homo sapiens
ggagaaactgcggctgctgctggagaagctgagcaggttccatgccaagttcaccctcgagtactcctgagcaccccagctggggccaggctgggtcgccmtggactgtgtgctcaggagccctgggaggctctggagcccactgtacttgctcttgatgcctggcggggtggggtggggggggtgctgggcccctgcctc

SEQ ID NO: 64474 - DNA, 201 bp, Homo sapiens
cattcccacttctggtcctgccacctcctgagctgccttcccgcctggtctgggtagagtcatggcctcgagcacaggtgaccggagccaggcggtgaggmatggactgagggcgaaggtgctgacgctggacggcatgaacccgcgtgtgcggagagtggagtacgcagtgcgtggccccatagtgcagcgagccttgga

SEQ ID NO: 64475 - DNA, 201 bp, Homo sapiens
gggggctcgcgggccatggccaggccctcctcgcccgatgggccaccccctcctccgcacctgacctggccgtgcgcaggtgcgggttccgcggcggctakgtggaggtggtgaacatggacgctgcagtgcagcagcagatgctgaagctgatgagtgtgcggctgtgcccgccggtgccaggacaggccctgctggacc

SEQ ID NO: 64476 - DNA, 201 bp, Homo sapiens; identical to SEQ ID NO: 64473

SEQ ID NO: 64477 - DNA, 201 bp, Homo sapiens; identical to SEQ ID NO: 64474

SEQ ID NO: 64478 - DNA, 201 bp, Homo sapiens
tcatggagatggggccgccctacgccgggcagcaggagcttgcctccttccactccacctccaagggctacatgggcgagtgcgggttccgcggcggctakgtggaggtggtgaacatggacgctgcagtgcagcagcagatgctgaagctgatgagtgtgcggctgtgcccgccggtgccaggacaggccctgctggacc

SEQ ID NO: 64479 - DNA, 201 bp, Homo sapiens; identical to SEQ ID NO: 64473

SEQ ID NO: 64480 - DNA, 201 bp, Homo sapiens
gaggggcaggcctgcgcacggggaggctgttgtggcagcggaacagagacgtgcacgagtcatggcctcgagcacaggtgaccggagccaggcggtgaggmatggactgagggcgaaggtgctgacgctggacggcatgaacccgcgtgtgcggagagtggagtacgcagtgcgtggccccatagtgcagcgagccttgga

SEQ ID NO: 64481 - DNA, 201 bp, Homo sapiens; identical to SEQ ID NO: 64478

SEQ ID NO: 64482 - DNA, 201 bp, Homo sapiens
atgggctcctgtgcctctccctatcagttggccagtggagctcgagaacaaactgttgctgccagataaagcagcaaagcctgctccactgcccagcgcargcccccttcccttcctccaccaggctgagtggagaaccctaaagctacgggacaggctcccgttccccgtgcctacacagggtgctggctctggcagaaa

SEQ ID NO: 64483 - DNA, 201 bp, Homo sapiens
gccccgcatcacctgtccgagtgcgaacaccttgggaagggggttcctggtggtcctgtgacaaccagagacccccagggccaaggaggccactgcagccyggcccttctgtgccctgggcccctcctcattgcagcaccacccaccgcaccaccctgggacagaggaaacacatggaggccatagcatagagcctgtctg

SEQ ID NO: 64484 - DNA, 201 bp, Homo sapiens
gtcctcatgtacgtccacgactactacgtgctcaactatgaggccccagcggcagaggcctgagctgcacctgagggcctggcttctcactgccacctcamacccgctgccagagcccacctctcctcctaggcctcgagtgctggggatgggcctggctgcacagcatcctcctctggtcccagggaggcctctctgccc

SEQ ID NO: 64485 - DNA, 201 bp, Homo sapiens
cacccaccgcaccaccctgggacagaggaaacacatggaggccatagcatagagcctgtctgtttatagatctctgcctgtcttgtccgtccatccactgkgtgtatatatctgtgtatctctgtggagcggggaacgggacagttgtgtaaaaatccaaaatacaattctgactatgaacaacctgcagggtcagtccag

SEQ ID NO: 64486 - DNA, 201 bp, Homo sapiens
gcctgaatgccgtggctgagctcatgcagtttggagaccgggagttctaccgggactggtggaactccgagtctgtcacctacttctggcagaactggaasatccctgtgcacaagtggtgcatcagacacttctacaagcccatgcttcgacggggcagcagcaagtggatggccaggacaggggtgttcctggcctcgg

SEQ ID NO: 64487 - DNA, 201 bp, Homo sapiens
tgatggctcagatcccactggcctggttcgtgggccgctttttccagggcaactatggcaacgcagctgtgtggctgtcgctcatcatcggacagccaatwgccgtcctcatgtacgtccacgactactacgtgctcaactatgaggccccagcggcagaggcctgagctgcacctgagggcctggcttctcactgccacc

SEQ ID NO: 64488 - DNA, 201 bp, Homo sapiens
caggtggtttctctgttcctgaaggatccctatagctggcccgccccatgcctggttattgcggccaatgtctttgctgtggctgcattccaggttgagargcgcctggcggtgggtgccctgacggagcaggcgggactgctgctgcacgtggccaacctggccaccattctgtgtttcccagcggctgtggtcttactg

SEQ ID NO: 64489 - DNA, 201 bp, Homo sapiens; identical to SEQ ID NO: 64482

SEQ ID NO: 64490 - DNA, 201 bp, Homo sapiens
ccctcaataaagaactgcaagcacatgctggtcctggggagtcgggcaggcacggagctagctgcaagcatccgtcttcccccaggaggccactgcagccyggcccttctgtgccctgggcccctcctcattgcagcaccacccaccgcaccaccctgggacagaggaaacacatggaggccatagcatagagcctgtctg

SEQ ID NO: 64491 - DNA, 201 bp, Homo sapiens; identical to SEQ ID NO: 64484

SEQ ID NO: 64492 - DNA, 201 bp, Homo sapiens; identical to SEQ ID NO: 64485

SEQ ID NO: 64493 - DNA, 201 bp, Homo sapiens
gcctgaatgccgtggctgagctcatgcagtttggagaccgggagttctaccgggactggtggaactccgagtctgtcacctacttctggcagaactggaasatccctgtgcacaagtggtgcatcaggtaggtggggtgtgtgtgtgtgtgatgtggaacatggctgtgaacctgaaccgctttccatgccccctcctctg

SEQ ID NO: 64494 - DNA, 201 bp, Homo sapiens; identical to SEQ ID NO: 64487

SEQ ID NO: 64495 - DNA, 201 bp, Homo sapiens; identical to SEQ ID NO: 64488

SEQ ID NO: 64496 - DNA, 201 bp, Homo sapiens; identical to SEQ ID NO: 64482

SEQ ID NO: 64497 - DNA, 201 bp, Homo sapiens; identical to SEQ ID NO: 64490

SEQ ID NO: 64498 - DNA, 201 bp, Homo sapiens; identical to SEQ ID NO: 64484

SEQ ID NO: 64499 - DNA, 201 bp, Homo sapiens; identical to SEQ ID NO: 64485

SEQ ID NO: 64500 - DNA, 201 bp, Homo sapiens; identical to SEQ ID NO: 64486

SEQ ID NO: 64501 - DNA, 201 bp, Homo sapiens; identical to SEQ ID NO: 64487

SEQ ID NO: 64502 - DNA, 201 bp, Homo sapiens; identical to SEQ ID NO: 64488

SEQ ID NO: 64503 - DNA, 201 bp, Homo sapiens; identical to SEQ ID NO: 64482

SEQ ID NO: 64504 - DNA, 201 bp, Homo sapiens; identical to SEQ ID NO: 64490

SEQ ID NO: 64505 - DNA, 201 bp, Homo sapiens; identical to SEQ ID NO: 64484

SEQ ID NO: 64506 - DNA, 201 bp, Homo sapiens; identical to SEQ ID NO: 64485

SEQ ID NO: 64507 - DNA, 201 bp, Homo sapiens; identical to SEQ ID NO: 64487

SEQ ID NO: 64508 - DNA, 201 bp, Homo sapiens; identical to SEQ ID NO: 64488

SEQ ID NO: 64509 - DNA, 201 bp, Homo sapiens
tttctgccagagccagcaccctgtgtaggcacggggaacgggagcctgtcccgtagctttagggttctccactcagcctggtggaggaagggaagggggcytgcgctgggcagtggagcaggctttgctgctttatctggcagcaacagtttgttctcgagctccactggccaactgatagggagaggcacaggagcccat

SEQ ID NO: 64510 - DNA, 201 bp, Homo sapiens
cagacaggctctatgctatggcctccatgtgtttcctctgtcccagggtggtgcggtgggtggtgctgcaatgaggaggggcccagggcacagaagggccrggctgcagtggcctcctgggggaagacggatgcttgcagctagctccgtgcctgcccgactccccaggaccagcatgtgcttgcagttctttattgaggg

SEQ ID NO: 64511 - DNA, 201 bp, Homo sapiens
ctggactgaccctgcaggttgttcatagtcagaattgtattttggatttttacacaactgtcccgttccccgctccacagagatacacagatatatacacmcagtggatggacggacaagacaggcagagatctataaacagacaggctctatgctatggcctccatgtgtttcctctgtcccagggtggtgcggtgggtg

SEQ ID NO: 64512 - DNA, 201 bp, Homo sapiens
tggcgtcactatgatgttgctaagaagttaaaggaattaaaaaaggaggaactctttactatgaagttaatagaacctaagaaggcatttgaaatagagcygaggtcaaaggctggaaagtcatcaggagaaaaaattggttgtggaagggcaacacttcgcctgagatcaaaaggtcctgccaccgtggaagaaatgcct

SEQ ID NO: 64513 - DNA, 201 bp, Homo sapiens
gaaaggaggaagggagaattgagaaaatatattagtctattattttagagttctaatacactctaaattatagagaaaattgagagtaaatgactgtcttwtcactcttatttgacatttcgtaggtgtaagagaaatggaaatgaatggtttcaacaaagatcatttaatacagcagagcatggcatgaccaagcatctt

SEQ ID NO: 64514 - DNA, 201 bp, Homo sapiens
tatcagaaatagatttccttccagtggaaagaaaggaggaagggagaattgagaaaatatattagtctattattttagagttctaatacactctaaattawagagaaaattgagagtaaatgactgtcttatcactcttatttgacatttcgtaggtgtaagagaaatggaaatgaatggtttcaacaaagatcatttaat

SEQ ID NO: 64515 - DNA, 201 bp, Homo sapiens
cagatgaatttgctgtggcacttgacgaaactcttggagactttgcgttcccagacgaatttgtctttgatgtttggggagtcattggtgatgccaaacgragaggattatgatgtgtacactccatctctgaagaaacaacccatcgttcttttttttctcttttttaaaaagtcctataagatctgtttttggacacct

SEQ ID NO: 64516 - DNA, 201 bp, Homo sapiens
taccgtgtgtaccaaatagatggaaactactccgggagctctcacgtggtcctggaccatgagacctacatcctgaatctgacccaggcaaacataccggsagccataccgcactggcagcttctctacagggctcgagaaacctatgggctgcccaacacactgcctaccgcctggcacaacctggtatatcgcatgcgg

SEQ ID NO: 64517 - DNA, 201 bp, Homo sapiens
cactgtctgaagagctggagctggaattattaccgaattgtagccaggtatgagaacaccctggctgctcagttctttggccacactcatgtggatgaatytgaggtcttctatgatgaagagactctgagccggccgctggctgtagccttcctggcacccagtgcaactacctacatcggccttaatcctggttaccgt

SEQ ID NO: 64518 - DNA, 201 bp, Homo sapiens
cactgcctaccgcctggcacaacctggtatatcgcatgcggggcgacatgcaacttttccagaccttctggtttctctaccataagggccacccaccctcrgagccctgtggcacgccctgccgtctggctactctttgtgcccagctctctgcccgtgctgacagccctgctctgtgccgccacctgatgccagatggga

SEQ ID NO: 64519 - DNA, 201 bp, Homo sapiens
gcaccagactcgtcaggaccaactgcgggccctgaccaccgtcacagcacttgtgaggaagttcctggggccagtgccagtgtaccctgctgtgggtaacyatgaaagcacacctgtcaatagcttccctccccccttcattgagggcaaccactcctcccgctggctctatgaagcgatggccaaggcttgggagccctg

SEQ ID NO: 64520 - DNA, 201 bp, Homo sapiens
tggcacaacctggtatatcgcatgcggggcgacatgcaacttttccagaccttctggtttctctaccataagggccacccaccctcggagccctgtggcaygccctgccgtctggctactctttgtgcccagctctctgcccgtgctgacagccctgctctgtgccgccacctgatgccagatgggagcctcccagaggcc

SEQ ID NO: 64521 - DNA, 201 bp, Homo sapiens
gagccctggctgcctgccgaagccctgcgcaccctcagaattggggggttctatgctctttccccataccccggtctccgcctcatctctctcaatatgartttttgttcccgtgagaacttctggctcttgatcaactccacggatcccgcaggacagctccagtggctggtgggggagcttcaggctgctgaggatcga

SEQ ID NO: 64522 - DNA, 201 bp, Homo sapiens
cctgcgcaccctcagaattggggggttctatgctctttccccataccccggtctccgcctcatctctctcaatatgaatttttgttcccgtgagaacttckggctcttgatcaactccacggatcccgcaggacagctccagtggctggtgggggagcttcaggctgctgaggatcgaggagacaaagtgcatataattgg

SEQ ID NO: 64523 - DNA, 201 bp, Homo sapiens
atttgaggtcttctatgatgaagagactctgagccggccgctggctgtagccttcctggcacccagtgcaactacctacatcggccttaatcctggttacygtgtgtaccaaatagatggaaactactccgggagctctcacgtggtcctggaccatgagacctacatcctgaatctgacccaggcaaacataccgggagc

SEQ ID NO: 64524 - DNA, 201 bp, Homo sapiens
accctggagagcctgttgagtgggctgggcccagccggcccttttgatatggtgtactggacaggagacatccccgcacatgatgtctggcaccagactcrtcaggaccaactgcgggccctgaccaccgtcacagcacttgtgaggaagttcctggggccagtgccagtgtaccctgctgtgggtaaccatgaaagcaca

SEQ ID NO: 64525 - DNA, 201 bp, Homo sapiens
tggcacccagtgcaactacctacatcggccttaatcctggttaccgtgtgtaccaaatagatggaaactactccgggagctctcacgtggtcctggaccakgagacctacatcctgaatctgacccaggcaaacataccgggagccataccgcactggcagcttctctacagggctcgagaaacctatgggctgcccaaca

SEQ ID NO: 64526 - DNA, 201 bp, Homo sapiens
cgtcaggaccaactgcgggccctgaccaccgtcacagcacttgtgaggaagttcctggggccagtgccagtgtaccctgctgtgggtaaccatgaaagcayacctgtcaatagcttccctccccccttcattgagggcaaccactcctcccgctggctctatgaagcgatggccaaggcttgggagccctggctgcctgcc

SEQ ID NO: 64527 - DNA, 201 bp, Homo sapiens
gcacccagtgcaactacctacatcggccttaatcctggttaccgtgtgtaccaaatagatggaaactactccgggagctctcacgtggtcctggaccatgwgacctacatcctgaatctgacccaggcaaacataccgggagccataccgcactggcagcttctctacagggctcgagaaacctatgggctgcccaacaca

SEQ ID NO: 64528 - DNA, 201 bp, Homo sapiens
acctacatcctgaatctgacccaggcaaacataccgggagccataccgcactggcagcttctctacagggctcgagaaacctatgggctgcccaacacacygcctaccgcctggcacaacctggtatatcgcatgcggggcgacatgcaacttttccagaccttctggtttctctaccataagggccacccaccctcggag

SEQ ID NO: 64529 - DNA, 201 bp, Homo sapiens
atgggctgcccaacacactgcctaccgcctggcacaacctggtatatcgcatgcggggcgacatgcaacttttccagaccttctggtttctctaccataasggccacccaccctcggagccctgtggcacgccctgccgtctggctactctttgtgcccagctctctgcccgtgctgacagccctgctctgtgccgccacc

SEQ ID NO: 64530 - DNA, 201 bp, Homo sapiens
ttccagaccttctggtttctctaccataagggccacccaccctcggagccctgtggcacgccctgccgtctggctactctttgtgcccagctctctgcccvtgctgacagccctgctctgtgccgccacctgatgccagatgggagcctcccagaggcccagagcctgtggccaaggccactgttttgctagggccccagg

SEQ ID NO: 64531 - DNA, 201 bp, Homo sapiens
gggggagcttcaggctgctgaggatcgaggagacaaagtgcatataattggccacattcccccagggcactgtctgaagagctggagctggaattattacygaattgtagccaggtatgagaacaccctggctgctcagttctttggccacactcatgtggatgaatttgaggtcttctatgatgaagagactctgagccg

SEQ ID NO: 64532 - DNA, 201 bp, Homo sapiens
gctgaggatcgaggagacaaagtgcatataattggccacattcccccagggcactgtctgaagagctggagctggaattattaccgaattgtagccaggtrtgagaacaccctggctgctcagttctttggccacactcatgtggatgaatttgaggtcttctatgatgaagagactctgagccggccgctggctgtagcc

SEQ ID NO: 64533 - DNA, 201 bp, Homo sapiens
tttgaggtcttctatgatgaagagactctgagccggccgctggctgtagccttcctggcacccagtgcaactacctacatcggccttaatcctggttaccktgtgtaccaaatagatggaaactactccgggagctctcacgtggtcctggaccatgagacctacatcctgaatctgacccaggcaaacataccgggagcc

SEQ ID NO: 64534 - DNA, 201 bp, Homo sapiens
ccttttgatatggtgtactggacaggagacatccccgcacatgatgtctggcaccagactcgtcaggaccaactgcgggccctgaccaccgtcacagcacytgtgaggaagttcctggggccagtgccagtgtaccctgctgtgggtaaccatgaaagcacacctgtcaatagcttccctccccccttcattgagggcaac

SEQ ID NO: 64535 - DNA, 201 bp, Homo sapiens
gggagccctggctgcctgccgaagccctgcgcaccctcagaattggggggttctatgctctttccccataccccggtctccgcctcatctctctcaatatraatttttgttcccgtgagaacttctggctcttgatcaactccacggatcccgcaggacagctccagtggctggtgggggagcttcaggctgctgaggatc

SEQ ID NO: 64536 - DNA, 201 bp, Homo sapiens
actgacctgcactgggatcatgactacctggagggcacggaccctgactgtgcagacccactgtgctgccgccggggttctggcctgccgcccgcatcccrgccaggtgccggatactggggcgaatacagcaagtgtgacctgcccctgaggaccctggagagcctgttgagtgggctgggcccagccggcccttttgat

SEQ ID NO: 64537 - DNA, 201 bp, Homo sapiens
gacgggacagacgaaccagccccgtgtaggaagcgcgacaatgccccgctacggagcgtcactccgccagagctgccccaggtccggccgggagcagggayaagacgggaccgccggagcccccggactcctttggatgggcctggtgctggcgctggcgctggcgctggcgctggcgctggctctgtctgactctcgggt

SEQ ID NO: 64538 - DNA, 201 bp, Homo sapiens
aagaaggaacccaatgtggctcgcgtgggctccgtggccatcaagctgtgcaatctgctgaagatagcaccacctgccgtgtgccaatccattgtccaccyctttgaggatgacatggtggaggtgtggagacgctcagtgctgagcccatctgaggcctgtggcctgctcctgggctccacctgtgggcactgggacatt

SEQ ID NO: 64539 - DNA, 201 bp, Homo sapiens
gaagatagcaccacctgccgtgtgccaatccattgtccacctctttgaggatgacatggtggaggtgtggagacgctcagtgctgagcccatctgaggccygtggcctgctcctgggctccacctgtgggcactgggacattttctcatcttggaacatctctttgcctactgtgccgaagccgccccccaaaccccctag

SEQ ID NO: 64540 - DNA, 201 bp, Homo sapiens
gcttctctacagggctcgagaaacctatgggctgcccaacacactgcctaccgcctggcacaacctggtatatcgcatgcggggcgacatgcaacttttcyagaccttctggtttctctaccataagggccacccaccctcggagccctgtggcacgccctgccgtctggctactctttgtgcccagctctctgcccgtgc

SEQ ID NO: 64541 - DNA, 201 bp, Homo sapiens
acatggtggaggtgtggagacgctcagtgctgagcccatctgaggcctgtggcctgctcctgggctccacctgtgggcactgggacattttctcatcttgraacatctctttgcctactgtgccgaagccgccccccaaaccccctagccccccagccccaggtgcccctgtcagccgcatcctcttcctcactgacctgc

SEQ ID NO: 64542 - DNA, 201 bp, Homo sapiens
cctgatgccagatgggagcctcccagaggcccagagcctgtggccaaggccactgttttgctagggccccagggcccacatttgggaaagttcttgatgtwggaaagggtgaaaaagcccaaatgctgctgtggttcaaccaggcaagatcatccggtgaaagaaccagtccctgggccccaaggatgccggggaaacagg

SEQ ID NO: 64543 - DNA, 201 bp, Homo sapiens
cagatgggagcctcccagaggcccagagcctgtggccaaggccactgttttgctagggccccagggcccacatttgggaaagttcttgatgtaggaaaggrtgaaaaagcccaaatgctgctgtggttcaaccaggcaagatcatccggtgaaagaaccagtccctgggccccaaggatgccggggaaacaggaccttctc

SEQ ID NO: 64544 - DNA, 201 bp, Homo sapiens
gagccggccgctggctgtagccttcctggcacccagtgcaactacctacatcggccttaatcctggttaccgtgtgtaccaaatagatggaaactactccrggagctctcacgtggtcctggaccatgagacctacatcctgaatctgacccaggcaaacataccgggagccataccgcactggcagcttctctacagggc

SEQ ID NO: 64545 - DNA, 201 bp, Homo sapiens
ctgtggccaaggccactgttttgctagggccccagggcccacatttgggaaagttcttgatgtaggaaagggtgaaaaagcccaaatgctgctgtggttcmaccaggcaagatcatccggtgaaagaaccagtccctgggccccaaggatgccggggaaacaggaccttctcctttcctggagctggtttagctggatatg

SEQ ID NO: 64546 - DNA, 201 bp, Homo sapiens
aatagatggaaactactccgggagctctcacgtggtcctggaccatgagacctacatcctgaatctgacccaggcaaacataccgggagccataccgcacyggcagcttctctacagggctcgagaaacctatgggctgcccaacacactgcctaccgcctggcacaacctggtatatcgcatgcggggcgacatgcaact

SEQ ID NO: 64547 - DNA, 201 bp, Homo sapiens
actgtgctgccgccggggttctggcctgccgcccgcatcccggccaggtgccggatactggggcgaatacagcaagtgtgacctgcccctgaggaccctgkagagcctgttgagtgggctgggcccagccggcccttttgatatggtgtactggacaggagacatccccgcacatgatgtctggcaccagactcgtcagga

SEQ ID NO: 64548 - DNA, 201 bp, Homo sapiens
ctactccgggagctctcacgtggtcctggaccatgagacctacatcctgaatctgacccaggcaaacataccgggagccataccgcactggcagcttctcyacagggctcgagaaacctatgggctgcccaacacactgcctaccgcctggcacaacctggtatatcgcatgcggggcgacatgcaacttttccagacctt

SEQ ID NO: 64549 - DNA, 201 bp, Homo sapiens
tgggctgcccaacacactgcctaccgcctggcacaacctggtatatcgcatgcggggcgacatgcaacttttccagaccttctggtttctctaccataagrgccacccaccctcggagccctgtggcacgccctgccgtctggctactctttgtgcccagctctctgcccgtgctgacagccctgctctgtgccgccacct

SEQ ID NO: 64550 - DNA, 201 bp, Homo sapiens
ctccacctgtgggcactgggacattttctcatcttggaacatctctttgcctactgtgccgaagccgccccccaaaccccctagccccccagccccaggtscccctgtcagccgcatcctcttcctcactgacctgcactgggatcatgactacctggagggcacggaccctgactgtgcagacccactgtgctgccgccg

SEQ ID NO: 64551 - DNA, 201 bp, Homo sapiens
gcactgggacattttctcatcttggaacatctctttgcctactgtgccgaagccgccccccaaaccccctagccccccagccccaggtgcccctgtcagcygcatcctcttcctcactgacctgcactgggatcatgactacctggagggcacggaccctgactgtgcagacccactgtgctgccgccggggttctggcct

SEQ ID NO: 64552 - DNA, 201 bp, Homo sapiens
cccagccccaggtgcccctgtcagccgcatcctcttcctcactgacctgcactgggatcatgactacctggagggcacggaccctgactgtgcagacccamtgtgctgccgccggggttctggcctgccgcccgcatcccggccaggtgccggatactggggcgaatacagcaagtgtgacctgcccctgaggaccctgga

SEQ ID NO: 64553 - DNA, 201 bp, Homo sapiens
gctacggagcgtcactccgccagagctgccccaggtccggccgggagcagggacaagacgggaccgccggagcccccggactcctttggatgggcctggtyctggcgctggcgctggcgctggcgctggcgctggctctgtctgactctcgggttctctgggctccggcagaggctcaccctctttctccccaaggccatc

SEQ ID NO: 64554 - DNA, 201 bp, Homo sapiens
aggtgcccctgtcagccgcatcctcttcctcactgacctgcactgggatcatgactacctggagggcacggaccctgactgtgcagacccactgtgctgcygccggggttctggcctgccgcccgcatcccggccaggtgccggatactggggcgaatacagcaagtgtgacctgcccctgaggaccctggagagcctgtt

SEQ ID NO: 64555 - DNA, 201 bp, Homo sapiens
agccgcatcctcttcctcactgacctgcactgggatcatgactacctggagggcacggaccctgactgtgcagacccactgtgctgccgccggggttctgrcctgccgcccgcatcccggccaggtgccggatactggggcgaatacagcaagtgtgacctgcccctgaggaccctggagagcctgttgagtgggctgggc

SEQ ID NO: 64556 - DNA, 201 bp, Homo sapiens
tgactacctggagggcacggaccctgactgtgcagacccactgtgctgccgccggggttctggcctgccgcccgcatcccggccaggtgccggatactggrgcgaatacagcaagtgtgacctgcccctgaggaccctggagagcctgttgagtgggctgggcccagccggcccttttgatatggtgtactggacaggaga

SEQ ID NO: 64557 - DNA, 201 bp, Homo sapiens
agggcacggaccctgactgtgcagacccactgtgctgccgccggggttctggcctgccgcccgcatcccggccaggtgccggatactggggcgaatacagmaagtgtgacctgcccctgaggaccctggagagcctgttgagtgggctgggcccagccggcccttttgatatggtgtactggacaggagacatccccgcac

SEQ ID NO: 64558 - DNA, 201 bp, Homo sapiens
tcaggaccaactgcgggccctgaccaccgtcacagcacttgtgaggaagttcctggggccagtgccagtgtaccctgctgtgggtaaccatgaaagcacasctgtcaatagcttccctccccccttcattgagggcaaccactcctcccgctggctctatgaagcgatggccaaggcttgggagccctggctgcctgccga

SEQ ID NO: 64559 - DNA, 201 bp, Homo sapiens
gagcctgttgagtgggctgggcccagccggcccttttgatatggtgtactggacaggagacatccccgcacatgatgtctggcaccagactcgtcaggacmaactgcgggccctgaccaccgtcacagcacttgtgaggaagttcctggggccagtgccagtgtaccctgctgtgggtaaccatgaaagcacacctgtcaa

SEQ ID NO: 64560 - DNA, 201 bp, Homo sapiens
accaccgtcacagcacttgtgaggaagttcctggggccagtgccagtgtaccctgctgtgggtaaccatgaaagcacacctgtcaatagcttccctccccscttcattgagggcaaccactcctcccgctggctctatgaagcgatggccaaggcttgggagccctggctgcctgccgaagccctgcgcaccctcagaatt

SEQ ID NO: 64561 - DNA, 201 bp, Homo sapiens
gggccagtgccagtgtaccctgctgtgggtaaccatgaaagcacacctgtcaatagcttccctccccccttcattgagggcaaccactcctcccgctggcyctatgaagcgatggccaaggcttgggagccctggctgcctgccgaagccctgcgcaccctcagaattggggggttctatgctctttccccataccccggt

SEQ ID NO: 64562 - DNA, 201 bp, Homo sapiens
cgctacggagcgtcactccgccagagctgccccaggtccggccgggagcagggacaagacgggaccgccggagcccccggactcctttggatgggcctggygctggcgctggcgctggcgctggcgctggcgctggctctgtctgactctcgggttctctgggctccggcagaggctcaccctctttctccccaaggccat

SEQ ID NO: 64563 - DNA, 201 bp, Homo sapiens
gtcaatagcttccctccccccttcattgagggcaaccactcctcccgctggctctatgaagcgatggccaaggcttgggagccctggctgcctgccgaagmcctgcgcaccctcagaattggggggttctatgctctttccccataccccggtctccgcctcatctctctcaatatgaatttttgttcccgtgagaacttc

SEQ ID NO: 64564 - DNA, 201 bp, Homo sapiens
gaagccctgcgcaccctcagaattggggggttctatgctctttccccataccccggtctccgcctcatctctctcaatatgaatttttgttcccgtgagamcttctggctcttgatcaactccacggatcccgcaggacagctccagtggctggtgggggagcttcaggctgctgaggatcgaggagacaaagtgcatata

SEQ ID NO: 64565 - DNA, 201 bp, Homo sapiens
aagttcttgatgtaggaaagggtgaaaaagcccaaatgctgctgtggttcaaccaggcaagatcatccggtgaaagaaccagtccctgggccccaaggatrccggggaaacaggaccttctcctttcctggagctggtttagctggatatgggagggggtttggctgcctgtgcccaggagctagactgccttgaggctgc

SEQ ID NO: 64566 - DNA, 201 bp, Homo sapiens
tttgcggccggccgcggagcagtcagccgactacagagaagggtaatcgggtgtccccggcgccgcccggggccctgagggctggctagggtccaggccgsgggggacgggacagacgaaccagccccgtgtaggaagcgcgacaatgccccgctacggagcgtcactccgccagagctgccccaggtccggccgggagca

SEQ ID NO: 64567 - DNA, 201 bp, Homo sapiens
gaagcgatggccaaggcttgggagccctggctgcctgccgaagccctgcgcaccctcagaattggggggttctatgctctttccccataccccggtctccdcctcatctctctcaatatgaatttttgttcccgtgagaacttctggctcttgatcaactccacggatcccgcaggacagctccagtggctggtgggggag

SEQ ID NO: 64568 - DNA, 201 bp, Homo sapiens
ttgagtgggctgggcccagccggcccttttgatatggtgtactggacaggagacatccccgcacatgatgtctggcaccagactcgtcaggaccaactgcrggccctgaccaccgtcacagcacttgtgaggaagttcctggggccagtgccagtgtaccctgctgtgggtaaccatgaaagcacacctgtcaatagcttc

SEQ ID NO: 64569 - DNA, 201 bp, Homo sapiens
ggccaaggcttgggagccctggctgcctgccgaagccctgcgcaccctcagaattggggggttctatgctctttccccataccccggtctccgcctcatcyctctcaatatgaatttttgttcccgtgagaacttctggctcttgatcaactccacggatcccgcaggacagctccagtggctggtgggggagcttcaggc

SEQ ID NO: 64570 - DNA, 201 bp, Homo sapiens
ctcaatatgaatttttgttcccgtgagaacttctggctcttgatcaactccacggatcccgcaggacagctccagtggctggtgggggagcttcaggctgytgaggatcgaggagacaaagtgcatataattggccacattcccccagggcactgtctgaagagctggagctggaattattaccgaattgtagccaggtat

SEQ ID NO: 64571 - DNA, 201 bp, Homo sapiens
tgagaacttctggctcttgatcaactccacggatcccgcaggacagctccagtggctggtgggggagcttcaggctgctgaggatcgaggagacaaagtgyatataattggccacattcccccagggcactgtctgaagagctggagctggaattattaccgaattgtagccaggtatgagaacaccctggctgctcagtt

SEQ ID NO: 64572 - DNA, 201 bp, Homo sapiens
aaagtgcatataattggccacattcccccagggcactgtctgaagagctggagctggaattattaccgaattgtagccaggtatgagaacaccctggctgytcagttctttggccacactcatgtggatgaatttgaggtcttctatgatgaagagactctgagccggccgctggctgtagccttcctggcacccagtgca

SEQ ID NO: 64573 - DNA, 201 bp, Homo sapiens
cccagccggcccttttgatatggtgtactggacaggagacatccccgcacatgatgtctggcaccagactcgtcaggaccaactgcgggccctgaccaccrtcacagcacttgtgaggaagttcctggggccagtgccagtgtaccctgctgtgggtaaccatgaaagcacacctgtcaatagcttccctccccccttcat

SEQ ID NO: 64574 - DNA, 201 bp, Homo sapiens
ccgaattgtagccaggtatgagaacaccctggctgctcagttctttggccacactcatgtggatgaatttgaggtcttctatgatgaagagactctgagcyggccgctggctgtagccttcctggcacccagtgcaactacctacatcggccttaatcctggttaccgtgtgtaccaaatagatggaaactactccgggag

SEQ ID NO: 64575 - DNA, 201 bp, Homo sapiens
attgtagccaggtatgagaacaccctggctgctcagttctttggccacactcatgtggatgaatttgaggtcttctatgatgaagagactctgagccggcygctggctgtagccttcctggcacccagtgcaactacctacatcggccttaatcctggttaccgtgtgtaccaaatagatggaaactactccgggagctct

SEQ ID NO: 64576 - DNA, 201 bp, Homo sapiens
agaacaccctggctgctcagttctttggccacactcatgtggatgaatttgaggtcttctatgatgaagagactctgagccggccgctggctgtagccttmctggcacccagtgcaactacctacatcggccttaatcctggttaccgtgtgtaccaaatagatggaaactactccgggagctctcacgtggtcctggacc

SEQ ID NO: 64577 - DNA, 201 bp, Homo sapiens
cgcccgcatcccggccaggtgccggatactggggcgaatacagcaagtgtgacctgcccctgaggaccctggagagcctgttgagtgggctgggcccagcyggcccttttgatatggtgtactggacaggagacatccccgcacatgatgtctggcaccagactcgtcaggaccaactgcgggccctgaccaccgtcacag

SEQ ID NO: 64578 - DNA, 201 bp, Homo sapiens
ctttggccacactcatgtggatgaatttgaggtcttctatgatgaagagactctgagccggccgctggctgtagccttcctggcacccagtgcaactaccwacatcggccttaatcctggttaccgtgtgtaccaaatagatggaaactactccgggagctctcacgtggtcctggaccatgagacctacatcctgaatct

SEQ ID NO: 64579 - DNA, 201 bp, Homo sapiens
ggatgaatttgaggtcttctatgatgaagagactctgagccggccgctggctgtagccttcctggcacccagtgcaactacctacatcggccttaatcctrgttaccgtgtgtaccaaatagatggaaactactccgggagctctcacgtggtcctggaccatgagacctacatcctgaatctgacccaggcaaacatacc

SEQ ID NO: 64580 - DNA, 201 bp, Homo sapiens
gcctcatctctctcaatatgaatttttgttcccgtgagaacttctggctcttgatcaactccacggatcccgcaggacagctccagtggctggtgggggarcttcaggctgctgaggatcgaggagacaaagtgcatataattggccacattcccccagggcactgtctgaagagctggagctggaattattaccgaattg

SEQ ID NO: 64581 - DNA, 201 bp, Homo sapiens
ctgggatcatgactacctggagggcacggaccctgactgtgcagacccactgtgctgccgccggggttctggcctgccgcccgcatcccggccaggtgccrgatactggggcgaatacagcaagtgtgacctgcccctgaggaccctggagagcctgttgagtgggctgggcccagccggcccttttgatatggtgtactg

SEQ ID NO: 64582 - DNA, 201 bp, Homo sapiens
cgccggggttctggcctgccgcccgcatcccggccaggtgccggatactggggcgaatacagcaagtgtgacctgcccctgaggaccctggagagcctgtwgagtgggctgggcccagccggcccttttgatatggtgtactggacaggagacatccccgcacatgatgtctggcaccagactcgtcaggaccaactgcgg

SEQ ID NO: 64583 - DNA, 201 bp, Homo sapiens
tcctcactgacctgcactgggatcatgactacctggagggcacggaccctgactgtgcagacccactgtgctgccgccggggttctggcctgccgcccgcrtcccggccaggtgccggatactggggcgaatacagcaagtgtgacctgcccctgaggaccctggagagcctgttgagtgggctgggcccagccggccctt

SEQ ID NO: 64584 - DNA, 201 bp, Homo sapiens
ggagggcacggaccctgactgtgcagacccactgtgctgccgccggggttctggcctgccgcccgcatcccggccaggtgccggatactggggcgaatacmgcaagtgtgacctgcccctgaggaccctggagagcctgttgagtgggctgggcccagccggcccttttgatatggtgtactggacaggagacatccccgc

SEQ ID NO: 64585 - DNA, 201 bp, Homo sapiens; identical to SEQ ID NO: 64516

SEQ ID NO: 64586 - DNA, 201 bp, Homo sapiens; identical to SEQ ID NO: 64517

SEQ ID NO: 64587 - DNA, 201 bp, Homo sapiens; identical to SEQ ID NO: 64518

SEQ ID NO: 64588 - DNA, 201 bp, Homo sapiens; identical to SEQ ID NO: 64519

SEQ ID NO: 64589 - DNA, 201 bp, Homo sapiens; identical to SEQ ID NO: 64520

SEQ ID NO: 64590 - DNA, 201 bp, Homo sapiens; identical to SEQ ID NO: 64523

SEQ ID NO: 64591 - DNA, 201 bp, Homo sapiens; identical to SEQ ID NO: 64524

SEQ ID NO: 64592 - DNA, 201 bp, Homo sapiens; identical to SEQ ID NO: 64525

SEQ ID NO: 64593 - DNA, 201 bp, Homo sapiens; identical to SEQ ID NO: 64526

SEQ ID NO: 64594 - DNA, 201 bp, Homo sapiens; identical to SEQ ID NO: 64527

SEQ ID NO: 64595 - DNA, 201 bp, Homo sapiens; identical to SEQ ID NO: 64528

SEQ ID NO: 64596 - DNA, 201 bp, Homo sapiens; identical to SEQ ID NO: 64529

SEQ ID NO: 64597 - DNA, 201 bp, Homo sapiens; identical to SEQ ID NO: 64565

SEQ ID NO: 64598 - DNA, 201 bp, Homo sapiens; identical to SEQ ID NO: 64530

SEQ ID NO: 64599 - DNA, 201 bp, Homo sapiens
cttatcgtccgtggaaacccaggaagggaaaagaaaggtgcatataattggccacattcccccagggcactgtctgaagagctggagctggaattattacygaattgtagccaggtatgagaacaccctggctgctcagttctttggccacactcatgtggatgaatttgaggtcttctatgatgaagagactctgagccg

SEQ ID NO: 64600 - DNA, 201 bp, Homo sapiens
acccaggaagggaaaagaaaggtgcatataattggccacattcccccagggcactgtctgaagagctggagctggaattattaccgaattgtagccaggtrtgagaacaccctggctgctcagttctttggccacactcatgtggatgaatttgaggtcttctatgatgaagagactctgagccggccgctggctgtagcc

SEQ ID NO: 64601 - DNA, 201 bp, Homo sapiens; identical to SEQ ID NO: 64533

SEQ ID NO: 64602 - DNA, 201 bp, Homo sapiens; identical to SEQ ID NO: 64534

SEQ ID NO: 64603 - DNA, 201 bp, Homo sapiens; identical to SEQ ID NO: 64566

SEQ ID NO: 64604 - DNA, 201 bp, Homo sapiens; identical to SEQ ID NO: 64536

SEQ ID NO: 64605 - DNA, 201 bp, Homo sapiens; identical to SEQ ID NO: 64568

SEQ ID NO: 64606 - DNA, 201 bp, Homo sapiens; identical to SEQ ID NO: 64537

SEQ ID NO: 64607 - DNA, 201 bp, Homo sapiens; identical to SEQ ID NO: 64538

SEQ ID NO: 64608 - DNA, 201 bp, Homo sapiens
agcgatggccaaggcttgggagccctggctgcctgccgaagccctgcgcaccctcaggtacttatcgtccgtggaaacccaggaagggaaaagaaaggtgyatataattggccacattcccccagggcactgtctgaagagctggagctggaattattaccgaattgtagccaggtatgagaacaccctggctgctcagtt

SEQ ID NO: 64609 - DNA, 201 bp, Homo sapiens; identical to SEQ ID NO: 64539

SEQ ID NO: 64610 - DNA, 201 bp, Homo sapiens
aaggtgcatataattggccacattcccccagggcactgtctgaagagctggagctggaattattaccgaattgtagccaggtatgagaacaccctggctgytcagttctttggccacactcatgtggatgaatttgaggtcttctatgatgaagagactctgagccggccgctggctgtagccttcctggcacccagtgca

SEQ ID NO: 64611 - DNA, 201 bp, Homo sapiens; identical to SEQ ID NO: 64540

SEQ ID NO: 64612 - DNA, 201 bp, Homo sapiens; identical to SEQ ID NO: 64573

SEQ ID NO: 64613 - DNA, 201 bp, Homo sapiens; identical to SEQ ID NO: 64574

SEQ ID NO: 64614 - DNA, 201 bp, Homo sapiens; identical to SEQ ID NO: 64541

SEQ ID NO: 64615 - DNA, 201 bp, Homo sapiens; identical to SEQ ID NO: 64575

SEQ ID NO: 64616 - DNA, 201 bp, Homo sapiens; identical to SEQ ID NO: 64576

SEQ ID NO: 64617 - DNA, 201 bp, Homo sapiens; identical to SEQ ID NO: 64577

SEQ ID NO: 64618 - DNA, 201 bp, Homo sapiens; identical to SEQ ID NO: 64578

SEQ ID NO: 64619 - DNA, 201 bp, Homo sapiens; identical to SEQ ID NO: 64579

SEQ ID NO: 64620 - DNA, 201 bp, Homo sapiens; identical to SEQ ID NO: 64542

SEQ ID NO: 64621 - DNA, 201 bp, Homo sapiens; identical to SEQ ID NO: 64544

SEQ ID NO: 64622 - DNA, 201 bp, Homo sapiens; identical to SEQ ID NO: 64543

SEQ ID NO: 64623 - DNA, 201 bp, Homo sapiens; identical to SEQ ID NO: 64545

SEQ ID NO: 64624 - DNA, 201 bp, Homo sapiens; identical to SEQ ID NO: 64581

SEQ ID NO: 64625 - DNA, 201 bp, Homo sapiens; identical to SEQ ID NO: 64582

SEQ ID NO: 64626 - DNA, 201 bp, Homo sapiens; identical to SEQ ID NO: 64546

SEQ ID NO: 64627 - DNA, 201 bp, Homo sapiens; identical to SEQ ID NO: 64583

SEQ ID NO: 64628 - DNA, 201 bp, Homo sapiens; identical to SEQ ID NO: 64547

SEQ ID NO: 64629 - DNA, 201 bp, Homo sapiens; identical to SEQ ID NO: 64548

SEQ ID NO: 64630 - DNA, 201 bp, Homo sapiens; identical to SEQ ID NO: 64584

SEQ ID NO: 64631 - DNA, 201 bp, Homo sapiens; identical to SEQ ID NO: 64549

SEQ ID NO: 64632 - DNA, 201 bp, Homo sapiens; identical to SEQ ID NO: 64550

SEQ ID NO: 64633 - DNA, 201 bp, Homo sapiens; identical to SEQ ID NO: 64551

SEQ ID NO: 64634 - DNA, 201 bp, Homo sapiens; identical to SEQ ID NO: 64552

SEQ ID NO: 64635 - DNA, 201 bp, Homo sapiens; identical to SEQ ID NO: 64553

SEQ ID NO: 64636 - DNA, 201 bp, Homo sapiens; identical to SEQ ID NO: 64554

SEQ ID NO: 64637 - DNA, 201 bp, Homo sapiens; identical to SEQ ID NO: 64555

SEQ ID NO: 64638 - DNA, 201 bp, Homo sapiens; identical to SEQ ID NO: 64556

SEQ ID NO: 64639 - DNA, 201 bp, Homo sapiens; identical to SEQ ID NO: 64557

SEQ ID NO: 64640 - DNA, 201 bp, Homo sapiens; identical to SEQ ID NO: 64558

SEQ ID NO: 64641 - DNA, 201 bp, Homo sapiens; identical to SEQ ID NO: 64559

SEQ ID NO: 64642 - DNA, 201 bp, Homo sapiens
accaccgtcacagcacttgtgaggaagttcctggggccagtgccagtgtaccctgctgtgggtaaccatgaaagcacacctgtcaatagcttccctccccscttcattgagggcaaccactcctcccgctggctctatgaagcgatggccaaggcttgggagccctggctgcctgccgaagccctgcgcaccctcaggtac

SEQ ID NO: 64643 - DNA, 201 bp, Homo sapiens
gtcaatagcttccctccccccttcattgagggcaaccactcctcccgctggctctatgaagcgatggccaaggcttgggagccctggctgcctgccgaagmcctgcgcaccctcaggtacttatcgtccgtggaaacccaggaagggaaaagaaaggtgcatataattggccacattcccccagggcactgtctgaagagc

SEQ ID NO: 64644 - DNA, 201 bp, Homo sapiens; identical to SEQ ID NO: 64562

SEQ ID NO: 64645 - DNA, 201 bp, Homo sapiens
gggccagtgccagtgtaccctgctgtgggtaaccatgaaagcacacctgtcaatagcttccctccccccttcattgagggcaaccactcctcccgctggcyctatgaagcgatggccaaggcttgggagccctggctgcctgccgaagccctgcgcaccctcaggtacttatcgtccgtggaaacccaggaagggaaaaga

SEQ ID NO: 64646 - DNA, 201 bp, Homo sapiens; identical to SEQ ID NO: 64516

SEQ ID NO: 64647 - DNA, 201 bp, Homo sapiens; identical to SEQ ID NO: 64517

SEQ ID NO: 64648 - DNA, 201 bp, Homo sapiens; identical to SEQ ID NO: 64518

SEQ ID NO: 64649 - DNA, 201 bp, Homo sapiens; identical to SEQ ID NO: 64519

SEQ ID NO: 64650 - DNA, 201 bp, Homo sapiens; identical to SEQ ID NO: 64520

SEQ ID NO: 64651 - DNA, 201 bp, Homo sapiens
acttatcgtccgtggaaacccaggaagggaaaagaaagaattggggggttctatgctctttccccataccccggtctccgcctcatctctctcaatatgartttttgttcccgtgagaacttctggctcttgatcaactccacggatcccgcaggacagctccagtggctggtgggggagcttcaggctgctgaggatcga

SEQ ID NO: 64652 - DNA, 201 bp, Homo sapiens
gaagggaaaagaaagaattggggggttctatgctctttccccataccccggtctccgcctcatctctctcaatatgaatttttgttcccgtgagaacttckggctcttgatcaactccacggatcccgcaggacagctccagtggctggtgggggagcttcaggctgctgaggatcgaggagacaaagtgcatataattgg

SEQ ID NO: 64653 - DNA, 201 bp, Homo sapiens; identical to SEQ ID NO: 64524

SEQ ID NO: 64654 - DNA, 201 bp, Homo sapiens; identical to SEQ ID NO: 64523

SEQ ID NO: 64655 - DNA, 201 bp, Homo sapiens; identical to SEQ ID NO: 64525

SEQ ID NO: 64656 - DNA, 201 bp, Homo sapiens; identical to SEQ ID NO: 64526

SEQ ID NO: 64657 - DNA, 201 bp, Homo sapiens; identical to SEQ ID NO: 64527

SEQ ID NO: 64658 - DNA, 201 bp, Homo sapiens; identical to SEQ ID NO: 64528

SEQ ID NO: 64659 - DNA, 201 bp, Homo sapiens; identical to SEQ ID NO: 64529

SEQ ID NO: 64660 - DNA, 201 bp, Homo sapiens; identical to SEQ ID NO: 64530

SEQ ID NO: 64661 - DNA, 201 bp, Homo sapiens; identical to SEQ ID NO: 64531

SEQ ID NO: 64662 - DNA, 201 bp, Homo sapiens; identical to SEQ ID NO: 64532

SEQ ID NO: 64663 - DNA, 201 bp, Homo sapiens; identical to SEQ ID NO: 64533

SEQ ID NO: 64664 - DNA, 201 bp, Homo sapiens; identical to SEQ ID NO: 64534

SEQ ID NO: 64665 - DNA, 201 bp, Homo sapiens
gtacttatcgtccgtggaaacccaggaagggaaaagaaagaattggggggttctatgctctttccccataccccggtctccgcctcatctctctcaatatraatttttgttcccgtgagaacttctggctcttgatcaactccacggatcccgcaggacagctccagtggctggtgggggagcttcaggctgctgaggatc

SEQ ID NO: 64666 - DNA, 201 bp, Homo sapiens; identical to SEQ ID NO: 64536

SEQ ID NO: 64667 - DNA, 144 bp, Homo sapiens
ctgaagatagcaccacctgccgtgtgccaatccattgtccaccyctttgaggatgacatggtggaggtgtggagacgctcagtgctgagcccatctgaggcctgtggcctgctcctgggctccacctgtgggcactgggacatt

SEQ ID NO: 64668 - DNA, 201 bp, Homo sapiens; identical to SEQ ID NO: 64540

SEQ ID NO: 64669 - DNA, 201 bp, Homo sapiens; identical to SEQ ID NO: 64539

SEQ ID NO: 64670 - DNA, 201 bp, Homo sapiens; identical to SEQ ID NO: 64541

SEQ ID NO: 64671 - DNA, 201 bp, Homo sapiens; identical to SEQ ID NO: 64542

SEQ ID NO: 64672 - DNA, 201 bp, Homo sapiens; identical to SEQ ID NO: 64543

SEQ ID NO: 64673 - DNA, 201 bp, Homo sapiens; identical to SEQ ID NO: 64544

SEQ ID NO: 64674 - DNA, 201 bp, Homo sapiens; identical to SEQ ID NO: 64545

SEQ ID NO: 64675 - DNA, 201 bp, Homo sapiens; identical to SEQ ID NO: 64546

SEQ ID NO: 64676 - DNA, 201 bp, Homo sapiens; identical to SEQ ID NO: 64547

SEQ ID NO: 64677 - DNA, 201 bp, Homo sapiens; identical to SEQ ID NO: 64548

SEQ ID NO: 64678 - DNA, 201 bp, Homo sapiens; identical to SEQ ID NO: 64549

SEQ ID NO: 64679 - DNA, 201 bp, Homo sapiens; identical to SEQ ID NO: 64550

SEQ ID NO: 64680 - DNA, 201 bp, Homo sapiens; identical to SEQ ID NO: 64551

SEQ ID NO: 64681 - DNA, 201 bp, Homo sapiens; identical to SEQ ID NO: 64552

SEQ ID NO: 64682 - DNA, 201 bp, Homo sapiens; identical to SEQ ID NO: 64554

SEQ ID NO: 64683 - DNA, 201 bp, Homo sapiens; identical to SEQ ID NO: 64555

SEQ ID NO: 64684 - DNA, 201 bp, Homo sapiens; identical to SEQ ID NO: 64556

SEQ ID NO: 64685 - DNA, 201 bp, Homo sapiens; identical to SEQ ID NO: 64557

SEQ ID NO: 64686 - DNA, 201 bp, Homo sapiens; identical to SEQ ID NO: 64558

SEQ ID NO: 64687 - DNA, 201 bp, Homo sapiens; identical to SEQ ID NO: 64559

SEQ ID NO: 64688 - DNA, 201 bp, Homo sapiens; identical to SEQ ID NO: 64642

SEQ ID NO: 64689 - DNA, 201 bp, Homo sapiens; identical to SEQ ID NO: 64645

SEQ ID NO: 64690 - DNA, 201 bp, Homo sapiens
gtcaatagcttccctccccccttcattgagggcaaccactcctcccgctggctctatgaagcgatggccaaggcttgggagccctggctgcctgccgaagmcctgcgcaccctcaggtacttatcgtccgtggaaacccaggaagggaaaagaaagaattggggggttctatgctctttccccataccccggtctccgcct

SEQ ID NO: 64691 - DNA, 201 bp, Homo sapiens
cccaggaagggaaaagaaagaattggggggttctatgctctttccccataccccggtctccgcctcatctctctcaatatgaatttttgttcccgtgagamcttctggctcttgatcaactccacggatcccgcaggacagctccagtggctggtgggggagcttcaggctgctgaggatcgaggagacaaagtgcatata

SEQ ID NO: 64692 - DNA, 201 bp, Homo sapiens; identical to SEQ ID NO: 64565

SEQ ID NO: 64693 - DNA, 201 bp, Homo sapiens
aagccctgcgcaccctcaggtacttatcgtccgtggaaacccaggaagggaaaagaaagaattggggggttctatgctctttccccataccccggtctccdcctcatctctctcaatatgaatttttgttcccgtgagaacttctggctcttgatcaactccacggatcccgcaggacagctccagtggctggtgggggag

SEQ ID NO: 64694 - DNA, 201 bp, Homo sapiens
cgcaccctcaggtacttatcgtccgtggaaacccaggaagggaaaagaaagaattggggggttctatgctctttccccataccccggtctccgcctcatcyctctcaatatgaatttttgttcccgtgagaacttctggctcttgatcaactccacggatcccgcaggacagctccagtggctggtgggggagcttcaggc

SEQ ID NO: 64695 - DNA, 201 bp, Homo sapiens; identical to SEQ ID NO: 64568

SEQ ID NO: 64696 - DNA, 201 bp, Homo sapiens; identical to SEQ ID NO: 64570

SEQ ID NO: 64697 - DNA, 201 bp, Homo sapiens; identical to SEQ ID NO: 64571

SEQ ID NO: 64698 - DNA, 201 bp, Homo sapiens; identical to SEQ ID NO: 64572

SEQ ID NO: 64699 - DNA, 201 bp, Homo sapiens; identical to SEQ ID NO: 64574

SEQ ID NO: 64700 - DNA, 201 bp, Homo sapiens; identical to SEQ ID NO: 64573

SEQ ID NO: 64701 - DNA, 201 bp, Homo sapiens; identical to SEQ ID NO: 64575

SEQ ID NO: 64702 - DNA, 201 bp, Homo sapiens; identical to SEQ ID NO: 64576

SEQ ID NO: 64703 - DNA, 201 bp, Homo sapiens; identical to SEQ ID NO: 64578

SEQ ID NO: 64704 - DNA, 201 bp, Homo sapiens; identical to SEQ ID NO: 64577

SEQ ID NO: 64705 - DNA, 201 bp, Homo sapiens; identical to SEQ ID NO: 64579

SEQ ID NO: 64706 - DNA, 201 bp, Homo sapiens; identical to SEQ ID NO: 64580

SEQ ID NO: 64707 - DNA, 201 bp, Homo sapiens; identical to SEQ ID NO: 64581

SEQ ID NO: 64708 - DNA, 201 bp, Homo sapiens; identical to SEQ ID NO: 64582

SEQ ID NO: 64709 - DNA, 201 bp, Homo sapiens; identical to SEQ ID NO: 64583

SEQ ID NO: 64710 - DNA, 201 bp, Homo sapiens; identical to SEQ ID NO: 64584

SEQ ID NO: 64711 - DNA, 201 bp, Homo sapiens
tcagcatcgcccattctctcctatacaaaaaagtgaatgaggctcagtatcgcagccacctggccaatgagatgatgatgtaccacatgaaggtctccgaygatgagtataccaaacttctccatgatgggatccagcctgtggctgccattgactccaattttgcaagtttcacctatacccctcgttccctgcccgagg

SEQ ID NO: 64712 - DNA, 201 bp, Homo sapiens
gcacaaacaactctttccaggtggcctcgaaatctgtgctggctgcgctctacagctctgagggctccgtcatggagaggcaccactttgctcaggccatygccatcctcaacacccacggctgcaacatctttgatcatttctcccggaaggactatcagcgcatgctggatctgatgcgggacatcatcttggccacag

SEQ ID NO: 64713 - DNA, 201 bp, Homo sapiens
gagacctggagaaggccatgggcaacaggccgatggagatgatggaccgggagaaggcctatatccctgagctgcaaatcagcttcatggagcacattgcratgcccatctacaagctgttgcaggacctgttccccaaagcggcagagctgtacgagcgcgtggcctccaaccgtgagcactggaccaaggtgtcccaca

SEQ ID NO: 64714 - DNA, 201 bp, Homo sapiens
gtgcaggtcctgcagcagcgcgggcccagggaggctccccgagccgtccagaaccccccggaggggacggcggaagaccagaagggcggggcggcgtacaycgaccgcgaccgcaagatcctccaactgtgcggggaactctacgacctggatgcctcttccctgcagctcaaagtgctccaatacctgcagcaggagacc

SEQ ID NO: 64715 - DNA, 201 bp, Homo sapiens
ctctcttcaaggccatatccacctgtgccctggggcttgggagaccccatagggccgggactcttgggtcagcccggccactggcttctctctttttctcygtttcattctgtgtgcgttgtggggtgggggagggggtccacctgccttacctttctgagttgcctttagagagatgcgtttttctaggactctgtgcaa

SEQ ID NO: 64716 - DNA, 201 bp, Homo sapiens
ctgtgtgaccctggacaagtactaccttcctgggcctcagctttctcgtctgtataatggaagcaagacttccaacctcacggagactttgtaatttgttytctgagagcacaggggtgaccaatgagcagtgggccctactctgcacctctgaccacaccttggcaagtctttcccaagccattctttgtctgagcagct

SEQ ID NO: 64717 - DNA, 201 bp, Homo sapiens
cgctgggcgagtctcttcccctgtctgggccaaacagggagcgggtaagacaatccatgctctaagatccattttagatcaatgtctaaaatagctctatsgctctgcggagtcccagcagaggctatggaatgtttctgcaaccctaaggcacagagagcccaaccctgagtgtctcagaggccccctgagtgttcccct

SEQ ID NO: 64718 - DNA, 201 bp, Homo sapiens
aggcctatatccctgagctgcaaatcagcttcatggagcacattgcaatgcccatctacaagctgttgcaggacctgttccccaaagcggcagagctgtaygagcgcgtggcctccaaccgtgagcactggaccaaggtgtcccacaagttcaccatccgcggcctcccaagtaacaactcgctggacttcctggatgagg

SEQ ID NO: 64719 - DNA, 201 bp, Homo sapiens
ttctgccccaccagatctttgctcctttccctttgaggactcccaccctttggggtctccaggatcctcatggaaggggaaggtgagacatctgagtgagsagagtgtggcatcttggaaacagtccttagttctgtgggaggactagaaacagccgcggggcgaaggccccctgaggaccactactatactgatggtggg

SEQ ID NO: 64720 - DNA, 201 bp, Homo sapiens
aggtgcctgatctggatggcactagggcccccatcaatggctgctgcagccttgatgctgagtgatcccctccagggacacttccctgcccaggccacctyccacagccctccactggtctggccagatgcactgggaacagagccacgggtcctgggtcctagaccaggacttcctgtgtgaccctggacaagtactacc

SEQ ID NO: 64721 - DNA, 201 bp, Homo sapiens
cagagtggtctagggactcaccctgggtcacacagagggttgaaacagagctcagaaagggaactggggcccctgactccccctttctgactgctctgctkacctgggggctggagctggacgaggcccctgcttcctctcttggggtcaatggtaagggagcccatctgccccagctgggcccccatcactcctctcccc

SEQ ID NO: 64722 - DNA, 201 bp, Homo sapiens
cctgcttcctctcttggggtcaatggtaagggagcccatctgccccagctgggcccccatcactcctctccccccagaggcaccactttgctcaggccatygccatcctcaacacccacggctgcaacatctttgatcatttctcccggaaggtgatggggttgggggtggggtggggattgagggggagctgggagctgg

SEQ ID NO: 64723 - DNA, 201 bp, Homo sapiens; identical to SEQ ID NO: 64715

SEQ ID NO: 64724 - DNA, 201 bp, Homo sapiens; identical to SEQ ID NO: 64713

SEQ ID NO: 64725 - DNA, 201 bp, Homo sapiens; identical to SEQ ID NO: 64716

SEQ ID NO: 64726 - DNA, 201 bp, Homo sapiens; identical to SEQ ID NO: 64717

SEQ ID NO: 64727 - DNA, 201 bp, Homo sapiens; identical to SEQ ID NO: 64718

SEQ ID NO: 64728 - DNA, 201 bp, Homo sapiens; identical to SEQ ID NO: 64719

SEQ ID NO: 64729 - DNA, 201 bp, Homo sapiens; identical to SEQ ID NO: 64720

SEQ ID NO: 64730 - DNA, 201 bp, Homo sapiens; identical to SEQ ID NO: 64711

SEQ ID NO: 64731 - DNA, 201 bp, Homo sapiens; identical to SEQ ID NO: 64712

SEQ ID NO: 64732 - DNA, 201 bp, Homo sapiens; identical to SEQ ID NO: 64713

SEQ ID NO: 64733 - DNA, 201 bp, Homo sapiens; identical to SEQ ID NO: 64714

SEQ ID NO: 64734 - DNA, 201 bp, Homo sapiens; identical to SEQ ID NO: 64715

SEQ ID NO: 64735 - DNA, 201 bp, Homo sapiens; identical to SEQ ID NO: 64716

SEQ ID NO: 64736 - DNA, 201 bp, Homo sapiens; identical to SEQ ID NO: 64717

SEQ ID NO: 64737 - DNA, 201 bp, Homo sapiens; identical to SEQ ID NO: 64718

SEQ ID NO: 64738 - DNA, 201 bp, Homo sapiens; identical to SEQ ID NO: 64719

SEQ ID NO: 64739 - DNA, 201 bp, Homo sapiens; identical to SEQ ID NO: 64720

SEQ ID NO: 64740 - DNA, 201 bp, Homo sapiens
gtctctgaaagagtacatccttgtggaggaagccaagctttccaagattaagagctgggccaacaaaatggaagccttgactagcaagtcagctgctgatkctgagggctacctggctcaccctgtgaatgcctacaaactggtgaagcggctaaacacagactggcctgcgctggaggaccttgtcctgcaggactcagc

SEQ ID NO: 64741 - DNA, 201 bp, Homo sapiens
tttttaagactggaagcttttaccaggttcatcatttcctatgcatcaccttcatgcaggcagagtctggataatgaatgctttagcagcaaaaaagcatcttgggtcttggatttcagacctggtttcaacacttgtgttccctctaagtgtcagtgtccttttctggaaagtagggtaaatagtttctctttgtctccc

SEQ ID NO: 64742 - DNA, 201 bp, Homo sapiens
caaaaaataaaatgtccctaccagaagccttaaagagccttacttggagtatttttaagactggaagcttttaccaggttcatcatttcctatgcatcacmttcatgcaggcagagtctggataatgaatgctttagcagcaaaaaagcatcttgggtcttggatttcagacctggtttcaacacttgtgttccctctaag

SEQ ID NO: 64743 - DNA, 201 bp, Homo sapiens
tgtccttccccttcctggtccttcagcccatgtcaacgtgacagacacctttgtatgttcctttgtatgttcctatcaggctgatttttggagaaatgaawgtttgtctggagcagagggagaccatactagggcgactcctgtgtgactgaagtcccagcccttccattcagcctgtgccatccctggccccaaggctag

SEQ ID NO: 64744 - DNA, 166 bp, Homo sapiens
tcattcctttgcttgtctttatagttttaccatctatgattagatccctaaataagtagttattctgttttccctgattttgaacttttactaatagaatragagtaaatatttttgggtatgtggcttcttttgttcaacattgttttaagattcatccgtgttg

SEQ ID NO: 64745 - DNA, 201 bp, Homo sapiens
tggctcaccctgtgaatgcctacaaactggtgaagcggctaaacacagactggcctgcgctggaggaccttgtcctgcaggactcagctgcaggttttatygccaacctctctgtgcagcggcagttcttccccactgatgaggacgagataggagctgccaaagccctgatgagacttcaggacacatacaggctggacc

SEQ ID NO: 64746 - DNA, 201 bp, Homo sapiens
catttcctatgcatcaccttcatgcaggcagagtctggataatgaatgctttagcagcaaaaaagcatcttgggtcttggatttcagacctggtttcaacmcttgtgttccctctaagtgtcagtgtccttttctggaaagtagggtaaatagtttctctttgtctcccagagaacatagcacatgtgttcatgattgtaa

SEQ ID NO: 64747 - DNA, 201 bp, Homo sapiens; identical to SEQ ID NO: 64740

SEQ ID NO: 64748 - DNA, 201 bp, Homo sapiens; identical to SEQ ID NO: 64741

SEQ ID NO: 64749 - DNA, 201 bp, Homo sapiens; identical to SEQ ID NO: 64742

SEQ ID NO: 64750 - DNA, 201 bp, Homo sapiens; identical to SEQ ID NO: 64743

SEQ ID NO: 64751 - DNA, 166 bp, Homo sapiens; identical to SEQ ID NO: 64744

SEQ ID NO: 64752 - DNA, 201 bp, Homo sapiens; identical to SEQ ID NO: 64745

SEQ ID NO: 64753 - DNA, 201 bp, Homo sapiens; identical to SEQ ID NO: 64746

SEQ ID NO: 64754 - DNA, 201 bp, Homo sapiens; identical to SEQ ID NO: 64740

SEQ ID NO: 64755 - DNA, 201 bp, Homo sapiens; identical to SEQ ID NO: 64741

SEQ ID NO: 64756 - DNA, 201 bp, Homo sapiens; identical to SEQ ID NO: 64742

SEQ ID NO: 64757 - DNA, 201 bp, Homo sapiens; identical to SEQ ID NO: 64743

SEQ ID NO: 64758 - DNA, 166 bp, Homo sapiens; identical to SEQ ID NO: 64744

SEQ ID NO: 64759 - DNA, 201 bp, Homo sapiens; identical to SEQ ID NO: 64745

SEQ ID NO: 64760 - DNA, 201 bp, Homo sapiens; identical to SEQ ID NO: 64746

SEQ ID NO: 64761 - DNA, 201 bp, Homo sapiens
gtcaagacctatgtgggtggacgcattagtcttccttttcctctggttccacagctgggccaacaaaatggaagccttgactagcaagtcagctgctgatkctgagggctacctggctcaccctgtgaatgcctacaaactggtgaagcggctaaacacagactggcctgcgctggaggaccttgtcctgcaggactcagc

SEQ ID NO: 64762 - DNA, 201 bp, Homo sapiens; identical to SEQ ID NO: 64741

SEQ ID NO: 64763 - DNA, 201 bp, Homo sapiens; identical to SEQ ID NO: 64742

SEQ ID NO: 64764 - DNA, 201 bp, Homo sapiens
agagggtgatgtggggctggcctggttacttcatgccagtgcttgagaggagctaagtacatgggctaaggagtcactgtttattttctatttaagacctwttcccttacattgggggtcccagctgttatctagattaaggggctagaagtatctgtggggagttactgtattcatttttcattgcctcttgatgaaaag

SEQ ID NO: 64765 - DNA, 201 bp, Homo sapiens; identical to SEQ ID NO: 64743

SEQ ID NO: 64766 - DNA, 166 bp, Homo sapiens; identical to SEQ ID NO: 64744

SEQ ID NO: 64767 - DNA, 201 bp, Homo sapiens
tgagaggagctaagtacatgggctaaggagtcactgtttattttctatttaagaccttttcccttacattgggggtcccagctgttatctagattaagggrctagaagtatctgtggggagttactgtattcatttttcattgcctcttgatgaaaagggccccagaacctggcaccagggaattctcactaggaaaattg

SEQ ID NO: 64768 - DNA, 201 bp, Homo sapiens; identical to SEQ ID NO: 64745

SEQ ID NO: 64769 - DNA, 201 bp, Homo sapiens
cctaagtccccaaccatccttagttggccttccttcccttctgcccctcaaggaacaaggaagccatccagggtgcctataagaggaaacctttgagaggktgatgtggggctggcctggttacttcatgccagtgcttgagaggagctaagtacatgggctaaggagtcactgtttattttctatttaagaccttttccc

SEQ ID NO: 64770 - DNA, 201 bp, Homo sapiens; identical to SEQ ID NO: 64746

SEQ ID NO: 64771 - DNA, 201 bp, Homo sapiens; identical to SEQ ID NO: 64740

SEQ ID NO: 64772 - DNA, 201 bp, Homo sapiens; identical to SEQ ID NO: 64741

SEQ ID NO: 64773 - DNA, 201 bp, Homo sapiens; identical to SEQ ID NO: 64742

SEQ ID NO: 64774 - DNA, 201 bp, Homo sapiens; identical to SEQ ID NO: 64743

SEQ ID NO: 64775 - DNA, 166 bp, Homo sapiens; identical to SEQ ID NO: 64744

SEQ ID NO: 64776 - DNA, 201 bp, Homo sapiens; identical to SEQ ID NO: 64745

SEQ ID NO: 64777 - DNA, 201 bp, Homo sapiens; identical to SEQ ID NO: 64746

SEQ ID NO: 64778 - DNA, 201 bp, Homo sapiens; identical to SEQ ID NO: 64740

SEQ ID NO: 64779 - DNA, 201 bp, Homo sapiens; identical to SEQ ID NO: 64741

SEQ ID NO: 64780 - DNA, 201 bp, Homo sapiens; identical to SEQ ID NO: 64742

SEQ ID NO: 64781 - DNA, 201 bp, Homo sapiens; identical to SEQ ID NO: 64743

SEQ ID NO: 64782 - DNA, 166 bp, Homo sapiens; identical to SEQ ID NO: 64744

SEQ ID NO: 64783 - DNA, 201 bp, Homo sapiens; identical to SEQ ID NO: 64745

SEQ ID NO: 64784 - DNA, 201 bp, Homo sapiens; identical to SEQ ID NO: 64746

SEQ ID NO: 64785 - DNA, 201 bp, Homo sapiens
cagtttactcccagttcattactcagctaacagacgaaaaccagtcatgttgccccgtttgtcagagagtttttcagacagaggctgagttacaagaagtyatcagtgatttgcagtctaaactgcgacttgctccagataaactcaagtcaacagaatcagagctaaaaaaaaaggaaaagcggcgtgatgaaatgctgg

SEQ ID NO: 64786 - DNA, 201 bp, Homo sapiens
agatttaaatgccatagaaatgtaggtcctcagaaagtgtataataagaaacttatttctcatatcaacttagtcaataagaaaatatattctttcaaagkaacattgtgtctaggattttggatgttgagaggttctaaaatcatgaaacttgtttcactgaaaattggacagattgcctgtttctgatttgctgctctt

SEQ ID NO: 64787 - DNA, 201 bp, Homo sapiens
tggttgagataataaaaagtcgctcacagcagcgtaacttccagcttctggtaatcactcatgatgaagattttgtggagcttttaggacgttctgaataygtggagaaattctacaggattaaaaagaacatcgatcagtgctcagagattgtgaaatgcagtgttagctccctgggattcaatgttcattaaaaatatc

SEQ ID NO: 64788 - DNA, 201 bp, Homo sapiens
tacaagataaccttactttaagaaaaagaaatgaggaactaaaagaagttgaagaagaaagaaaacaacatttgaaggaaatgggtcaaatgcaggttttrcaaatgaaaagtgaacatcagaagttggaagagaacatagacaatataaaaagaaatcataatttggcattagggcgacagaaaggttatgaagaagaaa

SEQ ID NO: 64789 - DNA, 201 bp, Homo sapiens
tagacaggcttaaagaggaaattgaaaaatcatcaaaacagcgagccatgctggctggagccacagcagtttactcccagttcattactcagctaacagaygaaaaccagtcatgttgccccgtttgtcagagagtttttcagacagaggctgagttacaagaagtcatcagtgatttgcagtctaaactgcgacttgctc

SEQ ID NO: 64790 - DNA, 201 bp, Homo sapiens
gcagtttactcccagttcattactcagctaacagacgaaaaccagtcatgttgccccgtttgtcagagagtttttcagacagaggctgagttacaagaagycatcagtgatttgcagtctaaactgcgacttgctccagataaactcaagtcaacagaatcagagctaaaaaaaaaggaaaagcggcgtgatgaaatgctg

SEQ ID NO: 64791 - DNA, 201 bp, Homo sapiens
tcctgtggcctcgctccccgcccggatcctcctgaccctgagattcgcgggtctcacgtcccgtgcacgccttgcttcggcctcagttaagcctttgtggrctccaggtccctggtgagattagaaacgtttgcaaacatgtcccggatcgaaaagatgagcattctgggcgtgcggagttttggaatagaggacaaagat

SEQ ID NO: 64792 - DNA, 201 bp, Homo sapiens
taaatcaaaagaaattaatcagaccagggacagacttgccaaattgaacaaggaactagcttcatctgagcagaataaaaatcatataaataatgaactaraaagaaaggaagagcagttgtccagttacgaagacaagctgtttgatgtttgtggtagccaggattttgaaagtgatttagacaggcttaaagaggaaat

SEQ ID NO: 64793 - DNA, 201 bp, Homo sapiens
gagacaagatattgatacacagaagatacaagaaaggtggctacaagataaccttactttaagaaaaagaaatgaggaactaaaagaagttgaagaagaargaaaacaacatttgaaggaaatgggtcaaatgcaggttttgcaaatgaaaagtgaacatcagaagttggaagagaacatagacaatataaaaagaaatca

SEQ ID NO: 64794 - DNA, 201 bp, Homo sapiens; identical to SEQ ID NO: 64785

SEQ ID NO: 64795 - DNA, 201 bp, Homo sapiens; identical to SEQ ID NO: 64786

SEQ ID NO: 64796 - DNA, 201 bp, Homo sapiens; identical to SEQ ID NO: 64787

SEQ ID NO: 64797 - DNA, 201 bp, Homo sapiens; identical to SEQ ID NO: 64788

SEQ ID NO: 64798 - DNA, 201 bp, Homo sapiens; identical to SEQ ID NO: 64789

SEQ ID NO: 64799 - DNA, 201 bp, Homo sapiens; identical to SEQ ID NO: 64790

SEQ ID NO: 64800 - DNA, 201 bp, Homo sapiens; identical to SEQ ID NO: 64791

SEQ ID NO: 64801 - DNA, 201 bp, Homo sapiens; identical to SEQ ID NO: 64792

SEQ ID NO: 64802 - DNA, 201 bp, Homo sapiens; identical to SEQ ID NO: 64793

SEQ ID NO: 64803 - DNA, 201 bp, Homo sapiens; identical to SEQ ID NO: 64785

SEQ ID NO: 64804 - DNA, 201 bp, Homo sapiens; identical to SEQ ID NO: 64786

SEQ ID NO: 64805 - DNA, 201 bp, Homo sapiens; identical to SEQ ID NO: 64787

SEQ ID NO: 64806 - DNA, 201 bp, Homo sapiens; identical to SEQ ID NO: 64788

SEQ ID NO: 64807 - DNA, 201 bp, Homo sapiens; identical to SEQ ID NO: 64789

SEQ ID NO: 64808 - DNA, 201 bp, Homo sapiens; identical to SEQ ID NO: 64790

SEQ ID NO: 64809 - DNA, 201 bp, Homo sapiens; identical to SEQ ID NO: 64791

SEQ ID NO: 64810 - DNA, 201 bp, Homo sapiens; identical to SEQ ID NO: 64792

SEQ ID NO: 64811 - DNA, 201 bp, Homo sapiens; identical to SEQ ID NO: 64793

SEQ ID NO: 64812 - DNA, 201 bp, Homo sapiens
agctattgcttttgagatcattcagaaatacgagcctatcgaagaagttaggaaagcacaccaaatgtcattagaaggttttacaagatacatggattcaygtgaatgtctactgtttaaaaatgaatgtagaaaagtttatcaagatatgactcatccattaaatgattattttatttcatcttcacataacacatattt

SEQ ID NO: 64813 - DNA, 161 bp, Homo sapiens
atgcatgaacaaaggttatcgtcgtattcctctgttttccagaatgggtgagagccttgagcctgcttcactgtttgtttatgtttggtacgtcagataayagctaatgataaatgacatatcattagctatgcatcgcaataaaacagccaaaatgaatg

SEQ ID NO: 64814 - DNA, 201 bp, Homo sapiens
agtaaatcatactttaacccaagtaacataaaagagggtatgccaattacacttacaataaggctcatcagtggtatccagttgcctcttactcattcatyatctaacaaaggtgattcattagtaattatagaagtttttggtgttccaaatgatcaaatgaagcagcagactcgtgtaattaaaaaaaatgcttttagt

SEQ ID NO: 64815 - DNA, 201 bp, Homo sapiens; identical to SEQ ID NO: 64812

SEQ ID NO: 64816 - DNA, 161 bp, Homo sapiens; identical to SEQ ID NO: 64813

SEQ ID NO: 64817 - DNA, 201 bp, Homo sapiens; identical to SEQ ID NO: 64814

SEQ ID NO: 64818 - DNA, 201 bp, Homo sapiens; identical to SEQ ID NO: 64812

SEQ ID NO: 64819 - DNA, 159 bp, Homo sapiens
atcatctaacaaaggttatcgtcgtattcctctgttttccagaatgggtgagagccttgagcctgcttcactgtttgtttatgtttggtacgtcagataayagctaatgataaatgacatatcattagctatgcatcgcaataaaacagccaaaatgaa

SEQ ID NO: 64820 - DNA, 201 bp, Homo sapiens
agtaaatcatactttaacccaagtaacataaaagagggtatgccaattacacttacaataaggctcatcagtggtatccagttgcctcttactcattcatyatctaacaaaggttatcgtcgtattcctctgttttccagaatgggtgagagccttgagcctgcttcactgtttgtttatgtttggtacgtcagataacag

SEQ ID NO: 64821 - DNA, 201 bp, Homo sapiens
attccgggagctggtggagccaaggaaacaggatgctgatagtttccagcgggccctgatggtgggttggtgtgtggaactgctgcaagctttcttcctcrtggtagatgacatcacggattcatccctcacccactggggacagatctgctggtatcagaagctgggcgtgggtttggatgctgtcaatgatgctatgct

SEQ ID NO: 64822 - DNA, 201 bp, Homo sapiens
cctctttggggactccactgtgactgacaaagttggcactgccatctaggacaacaaatgcagctggctggtggttcagtgtctgcaatgggccactccaraacagtaccagatcctgaaggagaattaggggcagaaggaggccaagaaggtggtccaggagaaggcactatatgaggagctagatctgctggccgtgtt

SEQ ID NO: 64823 - DNA, 201 bp, Homo sapiens
tacctgaacctgattgagctcttcctgcagagttcctatcagactgagattgggcagaccctggaccccatcacagcacccccagggcaatgtggatcttsgcagattcaaggaaaagaattacaaattgtcaagtacaagacagttttctactctttctaccttcctatagctgcagccatgcatatggcaggcattgat

SEQ ID NO: 64824 - DNA, 201 bp, Homo sapiens
gattgagctcttcctgcagagttcctatcagactgagattgggcagaccctggaccccatcacagcacccccagggcaatgtggatcttggcagattcaasgaaaagaattacaaattgtcaagtacaagacagttttctactctttctaccttcctatagctgcagccatgcatatggcaggcattgatggtgagaaggc

SEQ ID NO: 64825 - DNA, 201 bp, Homo sapiens
aaaagaattacaaattgtcaagtacaagacagttttctactctttctaccttcctatagctgcagccatgcatatggcaggcattgatggtgagaaggcayacaccaatgccaagaagatcctgctggagatgggagagttctttaagattcaggatgatcactttgacctctttggggactccactgtgactgacaaagt

SEQ ID NO: 64826 - DNA, 201 bp, Homo sapiens
ggtgtgtggaactgctgcaagctttcttcctcgtggtagatgacatcacggattcatccctcacccactggggacagatctgctggtatcagaagctgggygtgggtttggatgctgtcaatgatgctatgcttctggaagcatgtatctactgcctgctgaagctctgttgttgggagcagccctattacctgaacctga

SEQ ID NO: 64827 - DNA, 201 bp, Homo sapiens
tgccccccagccctccttatcaaaggacaccattttggcaagctctatcaccaaggagccaaacatcctacaagacacagtgaccatactaattatacccyctgcaaagcccagcttgaaaccttcacttaggaacgtaatcgtgtcccctatcctacttccccttcctaattccacagctgctcaataaagtacaagagc

SEQ ID NO: 64828 - DNA, 109 bp, Homo sapiens
tgccgcgtsggggagtggagtgggacaggtatataaaggaagtacagggcctggggaagaggccctgtctaggtagctggcaccaggagccgtgggcaagggaagaggc

SEQ ID NO: 64829 - DNA, 201 bp, Homo sapiens
caacacccagagtcgccggactttcatcaagtcagtaccgccatttctgcgcacccatggctttgatgggctggaccttgcctggctctaccctggacggrgagacaaacagcattttaccaccctaatcaaggaaatgaaggccgaatttataaaggaagcccagccagggaaaaagcagctcctgctcagcgcagcact

SEQ ID NO: 64830 - DNA, 201 bp, Homo sapiens
aagctggtgatgggcatccccaccttcgggaggagcttcactctggcttcttctgagactggtgttggagccccaatctcaggaccgggaattccaggccsgttcaccaaggaggcagggacccttgcctactatgagatctgtgacttcctccgcggagccacagtccatagaatcctcggccagcaggtcccctatgcc

SEQ ID NO: 64831 - DNA, 201 bp, Homo sapiens
aggaaagcgtcaaaagcaaggtgcagtacctgaaggacaggcagctggcgggcgccatggtatgggccctggacctggatgacttccagggctccttctgyggccaggatctgcgcttccctctcaccaatgccatcaaggatgcactcgctgcaacgtagccctctgttctgcacacagcacgggggccaaggatgcccc

SEQ ID NO: 64832 - DNA, 201 bp, Homo sapiens
ccccaagcctggcaagggaatttcttcaactccctgccccccagccctccttatcaaaggacaccattttggcaagctctatcaccaaggagccaaacatsctacaagacacagtgaccatactaattataccccctgcaaagcccagcttgaaaccttcacttaggaacgtaatcgtgtcccctatcctacttccccttc

SEQ ID NO: 64833 - DNA, 201 bp, Homo sapiens
tcttgtctgtcggaggatggaactttgggtctcaaagattttccaagatagcctccaacacccagagtcgccggactttcatcaagtcagtaccgccattyctgcgcacccatggctttgatgggctggaccttgcctggctctaccctggacggagagacaaacagcattttaccaccctaatcaaggaaatgaaggccg

SEQ ID NO: 64834 - DNA, 168 bp, Homo sapiens
tggcaagctctatcaccaaggagccaaacatcctacaagacacagtgaccatactaattataccccctgcaaagcccagcttgaaaccttcacttaggaaygtaatcgtgtcccctatcctacttccccttcctaattccacagctgctcaataaagtacaagagctt

SEQ ID NO: 64835 - DNA, 201 bp, Homo sapiens
tcagtctccctcccttggggcctatgcagaggtccacaacacacagatttgagctcagccctggtgggcagagagatccccaagcctggcaagggaatttyttcaactccctgccccccagccctccttatcaaaggacaccattttggcaagctctatcaccaaggagccaaacatcctacaagacacagtgaccatact

SEQ ID NO: 64836 - DNA, 201 bp, Homo sapiens
ggcctatgcagaggtccacaacacacagatttgagctcagccctggtgggcagagagatccccaagcctggcaagggaatttcttcaactccctgcccccyagccctccttatcaaaggacaccattttggcaagctctatcaccaaggagccaaacatcctacaagacacagtgaccatactaattataccccctgcaaa

SEQ ID NO: 64837 - DNA, 201 bp, Homo sapiens; identical to SEQ ID NO: 64827

SEQ ID NO: 64838 - DNA, 109 bp, Homo sapiens; identical to SEQ ID NO: 64828

SEQ ID NO: 64839 - DNA, 107 bp, Homo sapiens
atctttgagcgcccactagacccactggactcacctcccccatctcttctgggttccttcctctgagccttgggacccctgagcttgcagagatgaggccrccatgt

SEQ ID NO: 64840 - DNA, 201 bp, Homo sapiens; identical to SEQ ID NO: 64829

SEQ ID NO: 64841 - DNA, 201 bp, Homo sapiens; identical to SEQ ID NO: 64830

SEQ ID NO: 64842 - DNA, 201 bp, Homo sapiens; identical to SEQ ID NO: 64831

SEQ ID NO: 64843 - DNA, 201 bp, Homo sapiens; identical to SEQ ID NO: 64832

SEQ ID NO: 64844 - DNA, 201 bp, Homo sapiens; identical to SEQ ID NO: 64833

SEQ ID NO: 64845 - DNA, 201 bp, Homo sapiens
ccctcccttggggcctatgcagaggtccacaacacacagatttgagctcagccctggtgggcagagaggtagggatggggctgtggggatagtgaggcatygcaatgtaagactcgggattagtacacacttgttgattaatggaaatgtttacagatccccaagcctggcaagggaatttcttcaactccctgcccccca

SEQ ID NO: 64846 - DNA, 201 bp, Homo sapiens
tggcaagctctatcaccaaggagccaaacatcctacaagacacagtgaccatactaattataccccctgcaaagcccagcttgaaaccttcacttaggaaygtaatcgtgtcccctatcctacttccccttcctaattccacagctgctcaataaagtacaagagcttaacagtgtgttggcgctttgctttggtctatct

SEQ ID NO: 64847 - DNA, 201 bp, Homo sapiens
tgaaaccttcacttaggaacgtaatcgtgtcccctatcctacttccccttcctaattccacagctgctcaataaagtacaagagcttaacagtgtgttggygctttgctttggtctatctttgagcgcccactagacccactggactcacctcccccatctcttctgggttccttcctctgagccttgggacccctgagct

SEQ ID NO: 64848 - DNA, 201 bp, Homo sapiens
tgtggggatagtgaggcatcgcaatgtaagactcgggattagtacacacttgttgattaatggaaatgtttacagatccccaagcctggcaagggaatttyttcaactccctgccccccagccctccttatcaaaggacaccattttggcaagctctatcaccaaggagccaaacatcctacaagacacagtgaccatact

SEQ ID NO: 64849 - DNA, 201 bp, Homo sapiens
tcgcaatgtaagactcgggattagtacacacttgttgattaatggaaatgtttacagatccccaagcctggcaagggaatttcttcaactccctgcccccyagccctccttatcaaaggacaccattttggcaagctctatcaccaaggagccaaacatcctacaagacacagtgaccatactaattataccccctgcaaa

SEQ ID NO: 64850 - DNA, 111 bp, Homo sapiens
atggcttccaycgctttggcaaaacctcagatgtgtggtcttctggccaaatgtctgcaatttcatattgttggagcctttattgtatccctgggggttgcagctgtctgt

SEQ ID NO: 64851 - DNA, 201 bp, Homo sapiens
gttaaaaagattgcaatgcgagaaatcaagttactaaagcaacttaggcatgaaaacttggtgaatctcttggaagtgtgtaagaaaaaaaaacgatggtmcctagtctttgaatttgttgaccacacaattcttgatgacttggagctctttccaaatggactagactaccaagtagttcaaaagtatttgtttcagatt

SEQ ID NO: 64852 - DNA, 201 bp, Homo sapiens
cgcttggttggcgcgggcgcctggctgccttcctcgtggtggggccttcggagcaatcgtcctggttctggcgatggttgagacgcctcgattgcggcgtrtaacgaacaccttccaccatgaccacctcagcaagttcccacttaaataaaggcatcaagcaggtgtacatgtccctgcctcagggtgagaaagtccagg

SEQ ID NO: 64853 - DNA, 201 bp, Homo sapiens
ctaaaggaaaaaaccatccaggtcacggggcaccaaatttgagacaaatagtcggattagaaataaagcatctcattttgagtagagagcaagggaagtgrttcttagatggtgatctgggattaggccctcaagacccttttgggtttctgccctgcccaccctctggagaaggtgggcactggattagttaacagacaa

SEQ ID NO: 64854 - DNA, 201 bp, Homo sapiens
ggttcttagatggtgatctgggattaggccctcaagacccttttgggtttctgccctgcccaccctctggagaaggtgggcactggattagttaacagacracacgttactagcagtcacttgatctccgtggctttggtttaaaagacacacttgtccacataggtttagagataagagttggctggtcaacttgagcat

SEQ ID NO: 64855 - DNA, 118 bp, Homo sapiens
acagggctggagtcaaaacacttgtaattttgtatcttgatgtctttgttaagactgctgaagaattattttttttcttttataataaggaataaaccccmcctttattccttcattt

SEQ ID NO: 64856 - DNA, 201 bp, Homo sapiens
tcttagatggtgatctgggattaggccctcaagacccttttgggtttctgccctgcccaccctctggagaaggtgggcactggattagttaacagacaacrcgttactagcagtcacttgatctccgtggctttggtttaaaagacacacttgtccacataggtttagagataagagttggctggtcaacttgagcatgtt

SEQ ID NO: 64857 - DNA, 201 bp, Homo sapiens
ggggaggagggtggggagacataaccactgcttccatttaatggggtgcacctgtccaataggcgtagctatccggacagagcacgtttgcagaagggggwctcttcttccaggtagctgaaaggggaagacctgacgtactctggttaggttaggacttgccctcgtggtggaaacttttcttaaaaagttataaccaac

SEQ ID NO: 64858 - DNA, 201 bp, Homo sapiens
ccattcctgggaactggaatggtgcaggctgccataccaacttcagcaccaaggccatgcgggaggagaatggtctgaagtacatcgaggaggccattgaraaactaagcaagcggcaccagtaccacatccgtgcctatgatcccaagggaggcctggacaatgcccgacgtctaactggattccatgaaacctccaaca

SEQ ID NO: 64859 - DNA, 201 bp, Homo sapiens
ggatcgatggtactggagaaggactgcgctgcaagacccggaccctggacagtgagcccaagtgtgtggaagagttgcctgagtggaatttcgatggctcyagtactttacagtctgagggttccaacagtgacatgtatctcgtgcctgctgccatgtttcgggaccccttccgtaaggaccctaacaagctggtgttat

SEQ ID NO: 64860 - DNA, 201 bp, Homo sapiens; identical to SEQ ID NO: 64852

SEQ ID NO: 64861 - DNA, 201 bp, Homo sapiens; identical to SEQ ID NO: 64853

SEQ ID NO: 64862 - DNA, 201 bp, Homo sapiens
gtatcttgatgtctttgttaagactgctgaagaattattttttttcttttataataaggaataaaccccacctttattccttcatttcatctaccattttytggttcttgtgttggctgtggcaggccagctgtggttttcttttgccatgacaacttctaattgccatgtacagtatgttcaaagtcaaataactcctca

SEQ ID NO: 64863 - DNA, 201 bp, Homo sapiens; identical to SEQ ID NO: 64854

SEQ ID NO: 64864 - DNA, 201 bp, Homo sapiens
acagggctggagtcaaaacacttgtaattttgtatcttgatgtctttgttaagactgctgaagaattattttttttcttttataataaggaataaaccccmcctttattccttcatttcatctaccattttctggttcttgtgttggctgtggcaggccagctgtggttttcttttgccatgacaacttctaattgccatg

SEQ ID NO: 64865 - DNA, 201 bp, Homo sapiens; identical to SEQ ID NO: 64856

SEQ ID NO: 64866 - DNA, 201 bp, Homo sapiens; identical to SEQ ID NO: 64857

SEQ ID NO: 64867 - DNA, 201 bp, Homo sapiens; identical to SEQ ID NO: 64858

SEQ ID NO: 64868 - DNA, 201 bp, Homo sapiens; identical to SEQ ID NO: 64859

SEQ ID NO: 64869 - DNA, 201 bp, Homo sapiens
gaataaaccccacctttattccttcatttcatctaccattttctggttcttgtgttggctgtggcaggccagctgtggttttcttttgccatgacaacttytaattgccatgtacagtatgttcaaagtcaaataactcctcattgtaaacaaactgtgtaactgcccaaagcagcacttataaatcagcctaacataaga

SEQ ID NO: 64870 - DNA, 201 bp, Homo sapiens
tttttcttttataataaggaataaaccccacctttattccttcatttcatctaccattttctggttcttgtgttggctgtggcaggccagctgtggttttyttttgccatgacaacttctaattgccatgtacagtatgttcaaagtcaaataactcctcattgtaaacaaactgtgtaactgcccaaagcagcacttata

SEQ ID NO: 64871 - DNA, 201 bp, Homo sapiens; identical to SEQ ID NO: 64853

SEQ ID NO: 64872 - DNA, 165 bp, Homo sapiens
ggccctgcagagtcgagagtgggagaagagcggagcgtgtgagcagtactgcggcctcctctcckctcctaacctcgctctcgcggcctacctttacccgcccgcctgctcggcgaccagaacaccttccaccatgaccacctcagcaagttcccacttaaataa

SEQ ID NO: 64873 - DNA, 201 bp, Homo sapiens; identical to SEQ ID NO: 64862

SEQ ID NO: 64874 - DNA, 201 bp, Homo sapiens; identical to SEQ ID NO: 64854

SEQ ID NO: 64875 - DNA, 201 bp, Homo sapiens; identical to SEQ ID NO: 64864

SEQ ID NO: 64876 - DNA, 201 bp, Homo sapiens; identical to SEQ ID NO: 64856

SEQ ID NO: 64877 - DNA, 201 bp, Homo sapiens; identical to SEQ ID NO: 64857

SEQ ID NO: 64878 - DNA, 201 bp, Homo sapiens; identical to SEQ ID NO: 64858

SEQ ID NO: 64879 - DNA, 201 bp, Homo sapiens; identical to SEQ ID NO: 64859

SEQ ID NO: 64880 - DNA, 201 bp, Homo sapiens; identical to SEQ ID NO: 64869

SEQ ID NO: 64881 - DNA, 201 bp, Homo sapiens; identical to SEQ ID NO: 64870

SEQ ID NO: 64882 - DNA, 191 bp, Homo sapiens
ggccctgcagagtcgagagtgggagaagagcggagcgtgtgagcagtactgcggcctcctctcctctcctaacctcgctctcgcggcctasctttacccgcccgcctgctcggcgaccagaacaccttccaccatgaccacctcagcaagttcccacttaaataaaggcatcaagcaggtgtacatgtccc

SEQ ID NO: 64883 - DNA, 104 bp, Homo sapiens
ggcyctgcagagtcgagagtgggagaagagcggagcgtgtgagcagtactgcggcctcctctcctctcctaacctcgctctcgcggcctacctttacccgcccg

SEQ ID NO: 64884 - DNA, 201 bp, Homo sapiens; identical to SEQ ID NO: 64852

SEQ ID NO: 64885 - DNA, 201 bp, Homo sapiens; identical to SEQ ID NO: 64857

SEQ ID NO: 64886 - DNA, 201 bp, Homo sapiens; identical to SEQ ID NO: 64853

SEQ ID NO: 64887 - DNA, 201 bp, Homo sapiens; identical to SEQ ID NO: 64858

SEQ ID NO: 64888 - DNA, 201 bp, Homo sapiens; identical to SEQ ID NO: 64859

SEQ ID NO: 64889 - DNA, 201 bp, Homo sapiens
ggttcttagatggtgatctgggattaggccctcaagacccttttgggtttctgccctgcccaccctctggagaaggtgggcactggattagttaacagacracacgttactagcagtcacttgatctccgtggctttggtttgagcatgttactgacagagggggtattggggttattttctggtaggaatagcatgtcac

SEQ ID NO: 64890 - DNA, 201 bp, Homo sapiens
tcttagatggtgatctgggattaggccctcaagacccttttgggtttctgccctgcccaccctctggagaaggtgggcactggattagttaacagacaacrcgttactagcagtcacttgatctccgtggctttggtttgagcatgttactgacagagggggtattggggttattttctggtaggaatagcatgtcactaa

SEQ ID NO: 64891 - DNA, 201 bp, Homo sapiens; identical to SEQ ID NO: 64853

SEQ ID NO: 64892 - DNA, 153 bp, Homo sapiens
tcgagagtgggagaagagcggagcgtgtgagcagtactgcggcctcctctcckctcctaacctcgctctcgcgaacaccttccaccatgaccacctcagcaagttcccacttaaataaaggcatcaagcaggtgtacatgtccctgcctcagg

SEQ ID NO: 64893 - DNA, 201 bp, Homo sapiens; identical to SEQ ID NO: 64862

SEQ ID NO: 64894 - DNA, 201 bp, Homo sapiens; identical to SEQ ID NO: 64854

SEQ ID NO: 64895 - DNA, 201 bp, Homo sapiens; identical to SEQ ID NO: 64864

SEQ ID NO: 64896 - DNA, 201 bp, Homo sapiens; identical to SEQ ID NO: 64856

SEQ ID NO: 64897 - DNA, 201 bp, Homo sapiens; identical to SEQ ID NO: 64857

SEQ ID NO: 64898 - DNA, 201 bp, Homo sapiens; identical to SEQ ID NO: 64858

SEQ ID NO: 64899 - DNA, 201 bp, Homo sapiens; identical to SEQ ID NO: 64859

SEQ ID NO: 64900 - DNA, 201 bp, Homo sapiens; identical to SEQ ID NO: 64869

SEQ ID NO: 64901 - DNA, 201 bp, Homo sapiens; identical to SEQ ID NO: 64870

SEQ ID NO: 64902 - DNA, 201 bp, Homo sapiens
aagagcctggatttcctttctttcactgatttaaaggatggaaacttggaagctggtagctagtgcctctctatcaaatcagggtttgcaccttgagacayaatctaccttaaatagtgcatttttttctcagggaattttagatgaacttgaataaactctcctagcaaatgaaatctcacaataagcattgaggtacct

SEQ ID NO: 64903 - DNA, 201 bp, Homo sapiens
agggctgaaattcagtgatacagatctcttagacttcgggcaatgtgttgatcagaatcgccagcaacagtttgctttcctttttggggtggatgagcaaytgttgagtgctctggtgatgggagcaactggagcagtgggcagtacctataactacctgggaaaaaagacaaaccagatgttggaggcttttgaacaaaa

SEQ ID NO: 64904 - DNA, 201 bp, Homo sapiens
taggagcactgagcttgaaggagtcacaggaactggcccaacatgcagcagaaataggagctgatggcatcgctgtcattgcaccgttcttcctcaagccrtggaccaaagatatcctgattaatttcctaaaggaagtggctgctgccgcccctgccctgccattttattactatcacattcctgccttgacaggggtaa

SEQ ID NO: 64905 - DNA, 201 bp, Homo sapiens
aggaactggcccaacatgcagcagaaataggagctgatggcatcgctgtcattgcaccgttcttcctcaagccatggaccaaagatatcctgattaatttyctaaaggaagtggctgctgccgcccctgccctgccattttattactatcacattcctgccttgacaggggtaaagattcgtgctgaggagttgttggatg

SEQ ID NO: 64906 - DNA, 201 bp, Homo sapiens; identical to SEQ ID NO: 64902

SEQ ID NO: 64907 - DNA, 201 bp, Homo sapiens; identical to SEQ ID NO: 64903

SEQ ID NO: 64908 - DNA, 201 bp, Homo sapiens; identical to SEQ ID NO: 64904

SEQ ID NO: 64909 - DNA, 201 bp, Homo sapiens; identical to SEQ ID NO: 64905

SEQ ID NO: 64910 - DNA, 201 bp, Homo sapiens; identical to SEQ ID NO: 64902

SEQ ID NO: 64911 - DNA, 201 bp, Homo sapiens; identical to SEQ ID NO: 64904

SEQ ID NO: 64912 - DNA, 201 bp, Homo sapiens; identical to SEQ ID NO: 64905

SEQ ID NO: 64913 - DNA, 191 bp, Homo sapiens
atggctatttctgtggctgcttctaaagccaaacaagccccattgacacacccatacaagccagaatttccagaagtgactctcatacccrgttacgcattcttcacagtgaatggaacagactcttgtccacctgtggacagaccttttactggaacacaatggagtctgcagggctggtgcagcggcgt

SEQ ID NO: 64914 - DNA, 199 bp, Homo sapiens
atggctatttctgtggctgcttctaaagccaaacaagccccattgacacacccatacaagccagaatttccagaagtgactctcatacccggttacgcrttcttcacagtgaatggaacagactcttgtccacctgtggacagaccttttactggaacacaatggagtctgcagggctggtgcagcggcgtcaacccga

SEQ ID NO: 64915 - DNA, 201 bp, Homo sapiens; identical to SEQ ID NO: 64902

SEQ ID NO: 64916 - DNA, 201 bp, Homo sapiens; identical to SEQ ID NO: 64903

SEQ ID NO: 64917 - DNA, 201 bp, Homo sapiens; identical to SEQ ID NO: 64904

SEQ ID NO: 64918 - DNA, 201 bp, Homo sapiens; identical to SEQ ID NO: 64905

SEQ ID NO: 64919 - DNA, 201 bp, Homo sapiens
gaggaggtggcggctattaaaacttggttatgtcagttcctgtgtgtagacagtaaggaaaaaaaggcatgctatgtgttacgtgttttttccagtatgtwtatttgccaccaaaaagtaaatgcattttcacccattctgtggttcattgtagtttaaggaaaccaagcatatagatgcattagtgattttgtttatatt

SEQ ID NO: 64920 - DNA, 201 bp, Homo sapiens
atagatgcattagtgattttgtttatattatgtaaaatataacgatctcttaaaaataccacagtttgtattttttctttaaggagtaaagatttgccttwaaataacttggtattttcctggctttcgtttaatacaatagaaaataaagtattacaccgaatacttgccgtgtagtttgtttgttgacctcgtatgtta

SEQ ID NO: 64921 - DNA, 201 bp, Homo sapiens
cagtattccaagcctgggatgatgctagaatgggtggagaagaagcagagatacgtttttgtgagcacaaaagacttaatatggctacactaagaatgacytgggaagccaaagttcagctcaaagagattttgattaattctgggtttccagaagattgtttgttgacacaagtgtttactaacactggaccagataata

SEQ ID NO: 64922 - DNA, 201 bp, Homo sapiens
accacagtttgtattttttctttaaggagtaaagatttgcctttaaataacttggtattttcctggctttcgtttaatacaatagaaaataaagtattacmccgaatacttgccgtgtagtttgtttgttgacctcgtatgttagaaaattttacaatgccagctacatctgttgattttaaatgtcagagaagttgtacc

SEQ ID NO: 64923 - DNA, 201 bp, Homo sapiens
gtgtgtagacagtaaggaaaaaaaggcatgctatgtgttacgtgttttttccagtatgtttatttgccaccaaaaagtaaatgcattttcacccattctgkggttcattgtagtttaaggaaaccaagcatatagatgcattagtgattttgtttatattatgtaaaatataacgatctcttaaaaataccacagtttgta

SEQ ID NO: 64924 - DNA, 201 bp, Homo sapiens
tactttggacagggaagaggaggtggcggctattaaaacttggttatgtcagttcctgtgtgtagacagtaaggaaaaaaaggcatgctatgtgttacgtrttttttccagtatgtttatttgccaccaaaaagtaaatgcattttcacccattctgtggttcattgtagtttaaggaaaccaagcatatagatgcattag

SEQ ID NO: 64925 - DNA, 201 bp, Homo sapiens
tccagtatgtttatttgccaccaaaaagtaaatgcattttcacccattctgtggttcattgtagtttaaggaaaccaagcatatagatgcattagtgattktgtttatattatgtaaaatataacgatctcttaaaaataccacagtttgtattttttctttaaggagtaaagatttgcctttaaataacttggtattttc

SEQ ID NO: 64926 - DNA, 201 bp, Homo sapiens
gtatgtttatttgccaccaaaaagtaaatgcattttcacccattctgtggttcattgtagtttaaggaaaccaagcatatagatgcattagtgattttgtwtatattatgtaaaatataacgatctcttaaaaataccacagtttgtattttttctttaaggagtaaagatttgcctttaaataacttggtattttcctgg

SEQ ID NO: 64927 - DNA, 156 bp, Homo sapiens
cgtgggagatgctatctgtaccattgctgctgctacctgctttccagagcctttcrtcaatgaaggaaagcggctgggctatatccatcgaaattttgctggaaacagattttctgatcacgtagcccttttatcagtattccaagcctgggatga

SEQ ID NO: 64928 - DNA, 201 bp, Homo sapiens
attgtagtttaaggaaaccaagcatatagatgcattagtgattttgtttatattatgtaaaatataacgatctcttaaaaataccacagtttgtatttttyctttaaggagtaaagatttgcctttaaataacttggtattttcctggctttcgtttaatacaatagaaaataaagtattacaccgaatacttgccgtgta

SEQ ID NO: 64929 - DNA, 172 bp, Homo sapiens
cgtgggagatgctatctgtaccattgctgctgctacctgctttccagagcctttcatcaatgaaggaaagcrgctgggctatatccatcgaaattttgctggaaacagattttctgatcacgtagcccttttatcagtattccaagcctgggatgatgctagaatgggtgga

SEQ ID NO: 64930 - DNA, 201 bp, Homo sapiens
tagtttaaggaaaccaagcatatagatgcattagtgattttgtttatattatgtaaaatataacgatctcttaaaaataccacagtttgtattttttcttwaaggagtaaagatttgcctttaaataacttggtattttcctggctttcgtttaatacaatagaaaataaagtattacaccgaatacttgccgtgtagttt

SEQ ID NO: 64931 - DNA, 173 bp, Homo sapiens
cgtgggagatgctatctgtaccattgctgctgctacctgctttccagagcctttcatcaatgaaggaaagcgrctgggctatatccatcgaaattttgctggaaacagattttctgatcacgtagcccttttatcagtattccaagcctgggatgatgctagaatgggtggag

SEQ ID NO: 64932 - DNA, 201 bp, Homo sapiens; identical to SEQ ID NO: 64919

SEQ ID NO: 64933 - DNA, 201 bp, Homo sapiens; identical to SEQ ID NO: 64920

SEQ ID NO: 64934 - DNA, 201 bp, Homo sapiens
gcatgttttgtgaatatttcttcaattgccccatcattgaagtttatgggaggacttacccagttcaagaatattttctggaagactgcattcagatgacycactttgttcctccaccaaaagacaaaaagaagaaggataaggatgatgatggtggtgaggatgatgatgcaaattgcaacttgatctgtggtgatgaat

SEQ ID NO: 64935 - DNA, 201 bp, Homo sapiens
aattgaacgaaaaggaaactccttttgaactcatcgaggctctacttaagtacattgaaacccttaatgttcctggagctgtgttggtttttttgcctggytggaatctgatttatactatgcagaagcatttggaaatgaatccacattttggaagccatcggtatcagattctacccctgcattctcagattcctcgag

SEQ ID NO: 64936 - DNA, 201 bp, Homo sapiens; identical to SEQ ID NO: 64921

SEQ ID NO: 64937 - DNA, 201 bp, Homo sapiens
ttcctcgagaggaacagcgcaaagtgtttgatccagtaccagttggagtaaccaaggttattttgtccacaaatattgctgaaacaagcattaccataaaygatgttgtttatgtcattgactcctgcaagcagaaagtgaaactcttcactgctcacaacaatatgaccaactatgctaccgtatgggcatcaaaaacaa

SEQ ID NO: 64938 - DNA, 201 bp, Homo sapiens; identical to SEQ ID NO: 64922

SEQ ID NO: 64939 - DNA, 201 bp, Homo sapiens
tgctgaaacaagcattaccataaacgatgttgtttatgtcattgactcctgcaagcagaaagtgaaactcttcactgctcacaacaatatgaccaactatkctaccgtatgggcatcaaaaacaaaccttgagcaacggaaagggcgagctggccgagtacggcctggattctgctttcacctgtgcagccgagctcgttt

SEQ ID NO: 64940 - DNA, 201 bp, Homo sapiens; identical to SEQ ID NO: 64923

SEQ ID NO: 64941 - DNA, 201 bp, Homo sapiens; identical to SEQ ID NO: 64924

SEQ ID NO: 64942 - DNA, 201 bp, Homo sapiens; identical to SEQ ID NO: 64925

SEQ ID NO: 64943 - DNA, 201 bp, Homo sapiens; identical to SEQ ID NO: 64926

SEQ ID NO: 64944 - DNA, 201 bp, Homo sapiens
tgagcctcgttttggcaaaatgatgataatggggtgtattttctacgtgggagatgctatctgtaccattgctgctgctacctgctttccagagcctttcrtcaatgaaggaaagcggctgggctatatccatcgaaattttgctggaaacagattttctgatcacgtagcccttttatcagtattccaagcctgggatga

SEQ ID NO: 64945 - DNA, 201 bp, Homo sapiens
gaagaacaagaagtgcaagcgactctagaatcagaagaagtggatttaaatgctgggcttcatggaaactggaccttggaaaatgctaaagctcgtctaawccaatattttcagaaagaaaagatccaaggagaatataagtacacccaagtgggtcctgatcacaacaggagctttattgcagaaatgaccatttatatc

SEQ ID NO: 64946 - DNA, 201 bp, Homo sapiens; identical to SEQ ID NO: 64928

SEQ ID NO: 64947 - DNA, 201 bp, Homo sapiens
aaaatgatgataatggggtgtattttctacgtgggagatgctatctgtaccattgctgctgctacctgctttccagagcctttcatcaatgaaggaaagcrgctgggctatatccatcgaaattttgctggaaacagattttctgatcacgtagcccttttatcagtattccaagcctgggatgatgctagaatgggtgga

SEQ ID NO: 64948 - DNA, 201 bp, Homo sapiens
gcccagaagaatcagtgcggtttctgtggcagagcgagttgcatttgaaagaggagaagagcctggaaaaagctgtggctacagcgttcgatttgagtctrtacttcctcgtcctcatgccagtataatgttttgtactgtaggtgtgctcctgagaaaattagaagcaggcattcgaggaatcagtcatgtaattgtaga

SEQ ID NO: 64949 - DNA, 201 bp, Homo sapiens
atcagtgcggtttctgtggcagagcgagttgcatttgaaagaggagaagagcctggaaaaagctgtggctacagcgttcgatttgagtctatacttcctcktcctcatgccagtataatgttttgtactgtaggtgtgctcctgagaaaattagaagcaggcattcgaggaatcagtcatgtaattgtagatgaaatacat

SEQ ID NO: 64950 - DNA, 201 bp, Homo sapiens
aaatgatgataatggggtgtattttctacgtgggagatgctatctgtaccattgctgctgctacctgctttccagagcctttcatcaatgaaggaaagcgrctgggctatatccatcgaaattttgctggaaacagattttctgatcacgtagcccttttatcagtattccaagcctgggatgatgctagaatgggtggag

SEQ ID NO: 64951 - DNA, 201 bp, Homo sapiens; identical to SEQ ID NO: 64930

SEQ ID NO: 64952 - DNA, 201 bp, Homo sapiens; identical to SEQ ID NO: 64919

SEQ ID NO: 64953 - DNA, 201 bp, Homo sapiens; identical to SEQ ID NO: 64920

SEQ ID NO: 64954 - DNA, 201 bp, Homo sapiens; identical to SEQ ID NO: 64934

SEQ ID NO: 64955 - DNA, 201 bp, Homo sapiens
caaagtaaacctctctcaagatttagagcatcagctgcaaaacatcattcaagagctaaatcttgagattttgcccccggtaagcataaagctgtttagtkcacatttacatccttctgtgccagttgcactcaacattggcaaattggctcagttcgaaccatctcagcgacaaaaccaagtgggtgtggttccttggtc

SEQ ID NO: 64956 - DNA, 201 bp, Homo sapiens; identical to SEQ ID NO: 64935

SEQ ID NO: 64957 - DNA, 201 bp, Homo sapiens; identical to SEQ ID NO: 64921

SEQ ID NO: 64958 - DNA, 201 bp, Homo sapiens; identical to SEQ ID NO: 64937

SEQ ID NO: 64959 - DNA, 201 bp, Homo sapiens; identical to SEQ ID NO: 64922

SEQ ID NO: 64960 - DNA, 201 bp, Homo sapiens; identical to SEQ ID NO: 64939

SEQ ID NO: 64961 - DNA, 201 bp, Homo sapiens; identical to SEQ ID NO: 64923

SEQ ID NO: 64962 - DNA, 201 bp, Homo sapiens; identical to SEQ ID NO: 64924

SEQ ID NO: 64963 - DNA, 201 bp, Homo sapiens; identical to SEQ ID NO: 64925

SEQ ID NO: 64964 - DNA, 201 bp, Homo sapiens; identical to SEQ ID NO: 64926

SEQ ID NO: 64965 - DNA, 201 bp, Homo sapiens; identical to SEQ ID NO: 64944

SEQ ID NO: 64966 - DNA, 201 bp, Homo sapiens; identical to SEQ ID NO: 64945

SEQ ID NO: 64967 - DNA, 201 bp, Homo sapiens; identical to SEQ ID NO: 64928

SEQ ID NO: 64968 - DNA, 201 bp, Homo sapiens; identical to SEQ ID NO: 64947

SEQ ID NO: 64969 - DNA, 201 bp, Homo sapiens; identical to SEQ ID NO: 64948

SEQ ID NO: 64970 - DNA, 201 bp, Homo sapiens; identical to SEQ ID NO: 64949

SEQ ID NO: 64971 - DNA, 201 bp, Homo sapiens; identical to SEQ ID NO: 64950

SEQ ID NO: 64972 - DNA, 201 bp, Homo sapiens; identical to SEQ ID NO: 64930

SEQ ID NO: 64973 - DNA, 201 bp, Homo sapiens
taaccaggctgatgtctccagctagaaagttgatgtacttcttggttaacttttggaaaaccaacgatctgcccttcaaaacttattcctggagcacttcrtatgtttacaagaatggtacagaaactgaggactgtttctggtaccttaatgctctggaggctagcgtttcctatttctcccacgaactcggctttaagg

SEQ ID NO: 64974 - DNA, 201 bp, Homo sapiens
tgtgtggtggtccagagttcctctacaagctgaagggtgaccgagcagtggctgaagacattgtcattattctagtggatcttttcaatgaccagtacttkgaggacaatgtcacagcccctgactatatgaaaaatgtccttgttctgacgctgtctcctgggaattcccttctaaatagctctttctccaggaatctat

SEQ ID NO: 64975 - DNA, 201 bp, Homo sapiens
accggaatgagaagattttcagagtggaaaattccaatggaatgaaacccttccgcccagatttattcttggaaacagcagaggaaaaagagctagaagtrtacctacttgtaaaaaactgttgggaggaagatccagaaaagagaccagatttcaaaaaaattgagactacacttgccaagatatttggactttttcatg

SEQ ID NO: 64976 - DNA, 201 bp, Homo sapiens
acaccaagaaatacaaggttcttttgacctatgatacccacgtaaataagacctatcctgtggatatgagccccacattcacttggaagaactctaaactkcctaatgatattacaggccggggccctcagatcctgatgattgcagtcttcaccctcactggagctgtggtgctgctcctgctcgtcgctctcctgatgc

SEQ ID NO: 64977 - DNA, 201 bp, Homo sapiens
caaaaaaggacctgtggacagctccagagcacctccgccaagccaacatctctcagaaaggagatgtgtacagctatgggatcatcgcacaggagatcatyctgcggaaagaaaccttctacactttgagctgtcgggaccggaatgagaagattttcagagtggaaaattccaatggaatgaaacccttccgcccagatt

SEQ ID NO: 64978 - DNA, 201 bp, Homo sapiens
tggtaccttaatgctctggaggctagcgtttcctatttctcccacgaactcggctttaaggtggtgttaagacaagataaggagtttcaggatatcttaakggaccacaacaggaaaagcaatgtgattattatgtgtggtggtccagagttcctctacaagctgaagggtgaccgagcagtggctgaagacattgtcatt

SEQ ID NO: 64979 - DNA, 201 bp, Homo sapiens
ttcctcctgaaaatatctttcctctggagaccaatgagaccaatcatgttagcctcaagatcgatgatgacaaaagacgagatacaatccagagactacgrcagtgcaaatacgacaaaaagcgagtgattctcaaagatctcaagcacaatgatggtaatttcactgaaaaacagaagatagaattgaacaagttgcttc

SEQ ID NO: 64980 - DNA, 201 bp, Homo sapiens
ccatgatcttcggggtgatagaatactgtgagagaggatccctccgggaagttttaaatgacacaatttcctaccctgatggcacattcatggattgggartttaagatctctgtcttgtatgacattgctaagggaatgtcatatctgcactccagtaagacagaagtccatggtcgtctgaaatctaccaactgcgtag

SEQ ID NO: 64981 - DNA, 201 bp, Homo sapiens
ttcaggatatcttaatggaccacaacaggaaaagcaatgtgattattatgtgtggtggtccagagttcctctacaagctgaagggtgaccgagcagtggckgaagacattgtcattattctagtggatcttttcaatgaccagtacttggaggacaatgtcacagcccctgactatatgaaaaatgtccttgttctgacgc

SEQ ID NO: 64982 - DNA, 201 bp, Homo sapiens
gcctccacatggtgacagagtacaaccctgtgactgtgattgggttattcaacagcgtaattcagattcatctcctcctgataatgaacaaggcctccccwgagtatgaagagaacatgcacagataccagaaggcagccaagctcttccaggggaagattctctttattctggtggacagtggtatgaaagaaaatggga

SEQ ID NO: 64983 - DNA, 201 bp, Homo sapiens
atcataattatctttctattcttagcgctaggatcaatgcctggcatagcatatttacattttttatttaaataaactgacctgactttcttctggttggwtatgttctgagtccctattactaaccttggtcttttatctcagaagttgaaggctcccctggagccagctgcaaagttcccaaagccctaacaaccccac

SEQ ID NO: 64984 - DNA, 201 bp, Homo sapiens
ttacccagaactctgctccggcatcctccgcaggaagaacactttcattgaaccctagcattgtccctaatacccttaatatgtattgtcatagcaccctrtgaatttttctatatcactttccatcttatatttaaataatctttttacttgcccatctctcccactgataatctaagctggcagaggctggatcagatc

SEQ ID NO: 64985 - DNA, 201 bp, Homo sapiens
cctaatacccttaatatgtattgtcatagcaccctatgaatttttctatatcactttccatcttatatttaaataatctttttacttgcccatctctcccmctgataatctaagctggcagaggctggatcagatcataattatctttctattcttagcgctaggatcaatgcctggcatagcatatttacattttttatt

SEQ ID NO: 64986 - DNA, 201 bp, Homo sapiens
agctgccccgtccaggttcatgttcctcttatttctcctcacgtgtgagctggctgcagaagttgctgcagaagttgagaaatcctcagatggtcctggtrctgcccaggaacccacgtggctcacagatgtcccagctgccatggaattcattgctgccactgaggtggctgtcataggcttcttccaggatttagaaat

SEQ ID NO: 64987 - DNA, 201 bp, Homo sapiens
atcttatatttaaataatctttttacttgcccatctctcccactgataatctaagctggcagaggctggatcagatcataattatctttctattcttagcrctaggatcaatgcctggcatagcatatttacattttttatttaaataaactgacctgactttcttctggttggatatgttctgagtccctattactaacc

SEQ ID NO: 64988 - DNA, 201 bp, Homo sapiens
gatcagcactgattctgaggttctgacacactacaacatcactgggaacaccatctgcctctttcgcctggtagacaatgaacaactgaatttagaggacraagacattgaaagcattgatgccaccaaattgagccgtttcattgagatcaacagcctccacatggtgacagagtacaaccctgtgactgtgattgggtt

SEQ ID NO: 64989 - DNA, 201 bp, Homo sapiens
ataattatctttctattcttagcgctaggatcaatgcctggcatagcatatttacattttttatttaaataaactgacctgactttcttctggttggatawgttctgagtccctattactaaccttggtcttttatctcagaagttgaaggctcccctggagccagctgcaaagttcccaaagccctaacaaccccacagc

SEQ ID NO: 64990 - DNA, 201 bp, Homo sapiens
gctggctgcagaagttgctgcagaagttgagaaatcctcagatggtcctggtgctgcccaggaacccacgtggctcacagatgtcccagctgccatggaaytcattgctgccactgaggtggctgtcataggcttcttccaggatttagaaataccagcagtgcccatactccatagcatggtgcaaaaattcccaggcgt

SEQ ID NO: 64991 - DNA, 142 bp, Homo sapiens
tgggattacaggtatgagccaccacgcccggcctgtgctttrgttctttacatgaaactccctttctaccttgtgttgcctggcaaaatcttacttacccagaactctgctccggcatcctccgcaggaagaacactttcat

SEQ ID NO: 64992 - DNA, 201 bp, Homo sapiens
aactcaaatctcagagacactaaacaacaggatcactaggcctgccaaccacacacacacgcacgtgcacacacgcacgcacgcgtgcacacacacacgcrcacacacacacacacacagagcttcatttcctgtcttaaaatctcgttttctcttcttccttcttttaaatttcatatcctcactccctatccaatttcc

SEQ ID NO: 64993 - DNA, 201 bp, Homo sapiens
caactcaaatctcagagacactaaacaacaggatcactaggcctgccaaccacacacacacgcacgtgcacacacgcacgcacgcgtgcacacacacacgsacacacacacacacacacagagcttcatttcctgtcttaaaatctcgttttctcttcttccttcttttaaatttcatatcctcactccctatccaatttc

SEQ ID NO: 64994 - DNA, 201 bp, Homo sapiens
ggattacaggtatgagccaccacgcccggcctgtgctttggttctttacatgaaactccctttctaccttgtgttgcctggcaaaatcttacttacccagractctgctccggcatcctccgcaggaagaacactttcattgaaccctagcattgtccctaatacccttaatatgtattgtcatagcaccctatgaatttt

SEQ ID NO: 64995 - DNA, 201 bp, Homo sapiens
gctttagacctgactatgctggatttgagattccaaacttatttgtggtgggatatgccttagattacaatgaatacttcagagatctgaatcacatatgygtcatcaatgagcacggtaaagaaaaatatcgagtctaaagacatgaattctcaccactaaagtcccagatagcatcatatttacgcctgtacttgggaa

SEQ ID NO: 64996 - DNA, 201 bp, Homo sapiens
gaggttgaattttttaaaaaatatctttaaaagactgatcacaaaatccaaggtgctacaggaaacaagcacactcaagaaagtttttttctgaataacakttttttccaatttctccgttttataagacatttcctaatttatggggattttaattgaaaataaacttgagtcccaatagagctgtttttttctcacttc

SEQ ID NO: 64997 - DNA, 201 bp, Homo sapiens
atgagcacggtaaagaaaaatatcgagtctaaagacatgaattctcaccactaaagtcccagatagcatcatatttacgcctgtacttgggaagccagctrtcaagtttgtccccccaggcatcttcactcagcaggatataaaagaaaaaaatgttcaaatgagagagctttcttttctgaggttaatataaagagtatc

SEQ ID NO: 64998 - DNA, 201 bp, Homo sapiens
gccctggtttctaagctgtatccttttattcatgtgggacatgagcaaatggcagaattaggggcgagtgctttcaatgctcgaaactaagcaagtataawtttttcctcttatttgcatgaaaggacaagacactgttatgccctgtcctaaatgtgaagacagaggttgaattttttaaaaaatatctttaaaagactg

SEQ ID NO: 64999 - DNA, 201 bp, Homo sapiens; identical to SEQ ID NO: 64995

SEQ ID NO: 65000 - DNA, 201 bp, Homo sapiens; identical to SEQ ID NO: 64996

SEQ ID NO: 65001 - DNA, 201 bp, Homo sapiens; identical to SEQ ID NO: 64997

SEQ ID NO: 65002 - DNA, 201 bp, Homo sapiens; identical to SEQ ID NO: 64998

SEQ ID NO: 65003 - DNA, 201 bp, Homo sapiens
cacacgctctggagaggttaccatatccattgagttgaagaagtctggtttcatgttgtctctacaaatgcttgagttgattacaagacttcaccagtatrtattctcacatattcttcggcttgaaaaacctgcactagaatttaaacctacagacgctgattcagcatactgtgttctacctcttaatgttgttaatga

SEQ ID NO: 65004 - DNA, 201 bp, Homo sapiens
aaacaagatccagagctggcttatatcagtagcaatttcataactggacatggcattgggaagaatcagcctcgcaacaaacagatggaagcagaattcasaaaacaggaagaggtacttaggaaatttcgagcacatgagaccaacctgcttattgcaacaagtattgtagaagagggtgttgatataccaaaatgcaac

SEQ ID NO: 65005 - DNA, 201 bp, Homo sapiens
tctggaatccatcagaagaaaactgtggtgttgacacgggaaagcagtccatttcttacgacttgcacactgagcagtgtattgctgacaaaagcatagcrgactgtgtggaagccctgctgggctgctatttaaccagctgtggggagagggctgctcagcttttcctctgttcactggggctgaaggtgctcccggtaa

SEQ ID NO: 65006 - DNA, 201 bp, Homo sapiens
gttagaaggccatggagcttaaacctccagcagtccctaggatgatgtagattcttctccatctctccgtgtgtgcagtagtgccagtcctgcagtagttrataagctgaatagaaagataaggttttcgagaggagaagtgcgccaatgttgtcttttctttccacgttatactgtgtaaggtgatgttcccggtcgctg

SEQ ID NO: 65007 - DNA, 201 bp, Homo sapiens
cagtatatattctcacatattcttcggcttgaaaaacctgcactagaatttaaacctacagacgctgattcagcatactgtgttctacctcttaatgttgrtaatgactccagcactttggatattgactttaaattcatggaagatattgagaagtctgaagctcgcataggcattcccagtacaaagtatacaaaagaa

SEQ ID NO: 65008 - DNA, 201 bp, Homo sapiens
tcccaatagctgaaaccgctttttaaaattcaaaacaagaaacaaaacaaaaaaaattaaggggaaaattatttaaatcggaaaggaagacttaaagttgwtagtgagtggaatgaattgaaggcagaatttaaagtttggttgataacaggatagataacagaataaaacatttaacatatgtataaaattttggaacta

SEQ ID NO: 65009 - DNA, 201 bp, Homo sapiens
ggagcttaaacctccagcagtccctaggatgatgtagattcttctccatctctccgtgtgtgcagtagtgccagtcctgcagtagttgataagctgaataraaagataaggttttcgagaggagaagtgcgccaatgttgtcttttctttccacgttatactgtgtaaggtgatgttcccggtcgctgttgcacctgatag

SEQ ID NO: 65010 - DNA, 201 bp, Homo sapiens
ttgacctaaccaatctcaaccagccactgctggatgtggaccacacatcttcaagacttaatcttttgacacctcgacatttgaatcagaaggggaaagcrcttcctttaagcagtgctgagaagaggaaagccaaatgggaaagtctgcagaataaacagatactggttccagaactctgtgctatacatccaattccag

SEQ ID NO: 65011 - DNA, 201 bp, Homo sapiens
tcttctttcctcacttctgctttgtttaaatcacaagagtgctttaatgatgacatttagcaagtgctcaaaataattgacaggttttgttttttttttttgagtttatgtcagctttgcttagtgttagaaggccatggagcttaaacctccagcagtccctaggatgatgtagattcttctccatctctccgtgtgtgc

SEQ ID NO: 65012 - DNA, 201 bp, Homo sapiens
tgcagttcagacaagagcaacacagagatctcaaacattaaaacgtaagctgtgctagaacaaaaatgcaatgaaagaaacactggatgaatgaaaagccmtgctttgcaacccctcagcatggcaggcctgcagctcatgacccctgcttcctcaccaatgggtcctttctttggactgccatggcaacaagaagcaatt

SEQ ID NO: 65013 - DNA, 201 bp, Homo sapiens
aaacttttgcagaatattataaaacaaagtacaaccttgacctaaccaatctcaaccagccactgctggatgtggaccacacatcttcaagacttaatctkttgacacctcgacatttgaatcagaaggggaaagcgcttcctttaagcagtgctgagaagaggaaagccaaatgggaaagtctgcagaataaacagatac

SEQ ID NO: 65014 - DNA, 201 bp, Homo sapiens
gattaccaagtgatccgtttactcatctagctcctaaatgcagaacccgagagttgcctgatggtacattttattcaactctttatctgccaattaactcwcctcttcgagcctccattgttggtccaccaatgagctgtgtacgattggctgaaagagttgtagctctcatttgctgtgagaaactgcacaaaattggcg

SEQ ID NO: 65015 - DNA, 201 bp, Homo sapiens
gaaagaaacactggatgaatgaaaagccctgctttgcaacccctcagcatggcaggcctgcagctcatgacccctgcttcctcaccaatgggtcctttctktggactgccatggcaacaagaagcaattcatgataacatttatacgccaagaaaatatcaggttgaactgcttgaagcagctctggatcataataccatc

SEQ ID NO: 65016 - DNA, 201 bp, Homo sapiens; identical to SEQ ID NO: 65003

SEQ ID NO: 65017 - DNA, 201 bp, Homo sapiens; identical to SEQ ID NO: 65004

SEQ ID NO: 65018 - DNA, 201 bp, Homo sapiens; identical to SEQ ID NO: 65005

SEQ ID NO: 65019 - DNA, 201 bp, Homo sapiens; identical to SEQ ID NO: 65006

SEQ ID NO: 65020 - DNA, 201 bp, Homo sapiens; identical to SEQ ID NO: 65007

SEQ ID NO: 65021 - DNA, 201 bp, Homo sapiens; identical to SEQ ID NO: 65008

SEQ ID NO: 65022 - DNA, 201 bp, Homo sapiens; identical to SEQ ID NO: 65009

SEQ ID NO: 65023 - DNA, 201 bp, Homo sapiens; identical to SEQ ID NO: 65010

SEQ ID NO: 65024 - DNA, 201 bp, Homo sapiens; identical to SEQ ID NO: 65011

SEQ ID NO: 65025 - DNA, 201 bp, Homo sapiens; identical to SEQ ID NO: 65012

SEQ ID NO: 65026 - DNA, 201 bp, Homo sapiens; identical to SEQ ID NO: 65013

SEQ ID NO: 65027 - DNA, 201 bp, Homo sapiens; identical to SEQ ID NO: 65014

SEQ ID NO: 65028 - DNA, 201 bp, Homo sapiens; identical to SEQ ID NO: 65015

SEQ ID NO: 65029 - DNA, 201 bp, Homo sapiens; identical to SEQ ID NO: 65003

SEQ ID NO: 65030 - DNA, 201 bp, Homo sapiens; identical to SEQ ID NO: 65004

SEQ ID NO: 65031 - DNA, 201 bp, Homo sapiens; identical to SEQ ID NO: 65005

SEQ ID NO: 65032 - DNA, 201 bp, Homo sapiens; identical to SEQ ID NO: 65006

SEQ ID NO: 65033 - DNA, 201 bp, Homo sapiens; identical to SEQ ID NO: 65007

SEQ ID NO: 65034 - DNA, 201 bp, Homo sapiens; identical to SEQ ID NO: 65008

SEQ ID NO: 65035 - DNA, 201 bp, Homo sapiens; identical to SEQ ID NO: 65009

SEQ ID NO: 65036 - DNA, 201 bp, Homo sapiens; identical to SEQ ID NO: 65010

SEQ ID NO: 65037 - DNA, 201 bp, Homo sapiens; identical to SEQ ID NO: 65011

SEQ ID NO: 65038 - DNA, 201 bp, Homo sapiens; identical to SEQ ID NO: 65012

SEQ ID NO: 65039 - DNA, 201 bp, Homo sapiens; identical to SEQ ID NO: 65013

SEQ ID NO: 65040 - DNA, 201 bp, Homo sapiens; identical to SEQ ID NO: 65014

SEQ ID NO: 65041 - DNA, 201 bp, Homo sapiens; identical to SEQ ID NO: 65015

SEQ ID NO: 65042 - DNA, 201 bp, Homo sapiens
ccactggtctctttgacacaaaaactcatgctcttagtggcaagcacagtgttctcaagattgggggaagccagggagggacagtgggttgtctgctactrgtgggtcaaaattacatatttagtcatgaatggttcagcttttaccatttaaataacaaataaatgttctttctccataggcattaaagactattccaac

SEQ ID NO: 65043 - DNA, 134 bp, Homo sapiens
gagaagtgactgacggcctgcaccaacttagacrgtcacagtcatgaaaagtgcacaggtgggattgcccgagttggccatgaattaccgtgatggatccatttggaaatgaagttggttgtgacatttcttca

SEQ ID NO: 65044 - DNA, 201 bp, Homo sapiens
ttgaagcttgactggtagatggagaattttggccttatgtatcttatgtgacttgcattacccagtccagtcctctgccattaatctaaggtccgcaatgyatcaggtattttactgagaatcttgcttacctaattctcacaaaaaaaaaaaaaccttgggagatgagggtggaaacaggatgagaggtcaggtgacttg

SEQ ID NO: 65045 - DNA, 201 bp, Homo sapiens
tttactgagaatcttgcttacctaattctcacaaaaaaaaaaaaaccttgggagatgagggtggaaacaggatgagaggtcaggtgacttgtctgagggcygacggtttgtaattggaagagtcagggcctaaccactggtctctttgacacaaaaactcatgctcttagtggcaagcacagtgttctcaagattggggga

SEQ ID NO: 65046 - DNA, 201 bp, Homo sapiens
gtacctcaatggcgagtttgtagggggctgtgacattcttctgcagatgcaccagaatggggacttggtggaagaactgaaaaagctggggatccactccrcccttttagatgaaaagaaagaccaagactccaagtgagggcggccaagtcctcgctgagcagagagggagccgttcatgtcagagactcactgccagaa

SEQ ID NO: 65047 - DNA, 201 bp, Homo sapiens
ttggaatcattattcatgacccctctgcaaatgtgtcagtctccaaagagagtatctccccccaaattttgtgtagcttcttttgttatggaaaatggtgracaaaaaaagaaactgtgataactggggcgttgttttttaaaataaactccagcacagggatgctgtgcatgcctgagttgattccgaagtgcatatgtc

SEQ ID NO: 65048 - DNA, 201 bp, Homo sapiens
tctgctactagtgggtcaaaattacatatttagtcatgaatggttcagcttttaccatttaaataacaaataaatgttctttctccataggcattaaagaytattccaactggcccaccatcccgcaagtgtacctcaatggcgagtttgtagggggctgtgacattcttctgcagatgcaccagaatggggacttggtgg

SEQ ID NO: 65049 - DNA, 201 bp, Homo sapiens
gagggagccgttcatgtcagagactcactgccagaaaagccttacccattttggttttcactattgagaccgcaactgcttgcactgatcattttggttcrtgagcagttggtgattttagttggtctggtgttcgggctaagaatattttattgtggacttaattacaaccactgcactgtaatgattcaatgctgtatt

SEQ ID NO: 65050 - DNA, 201 bp, Homo sapiens
aagaactgaaaaagctggggatccactccgcccttttagatgaaaagaaagaccaagactccaagtgagggcggccaagtcctcgctgagcagagagggarccgttcatgtcagagactcactgccagaaaagccttacccattttggttttcactattgagaccgcaactgcttgcactgatcattttggttcgtgagca

SEQ ID NO: 65051 - DNA, 201 bp, Homo sapiens
gcttgcactgatcattttggttcgtgagcagttggtgattttagttggtctggtgttcgggctaagaatattttattgtggacttaattacaaccactgcmctgtaatgattcaatgctgtattatgatattgctgtaaacaaaattcattcttatattgtcacttattctttgcctgattcagaagttaaataggagctt

SEQ ID NO: 65052 - DNA, 201 bp, Homo sapiens
aaattttgtgtagcttcttttgttatggaaaatggtggacaaaaaaagaaactgtgataactggggcgttgttttttaaaataaactccagcacagggatrctgtgcatgcctgagttgattccgaagtgcatatgtctgtaaggatttggagtgcctgcagtgttttatgtgtgggaagtaagggtgagtctcatattct

SEQ ID NO: 65053 - DNA, 201 bp, Homo sapiens; identical to SEQ ID NO: 65046

SEQ ID NO: 65054 - DNA, 201 bp, Homo sapiens
tcagcaacgccgtggtgcagatcctgcggctgcacggcgtccgcgattacgcggcctacaacgtgctggacgacccggagctccgacaaggcattaaagaytattccaactggcccaccatcccgcaagtgtacctcaatggcgagtttgtagggggctgtgacattcttctgcagatgcaccagaatggggacttggtgg

SEQ ID NO: 65055 - DNA, 201 bp, Homo sapiens; identical to SEQ ID NO: 65049

SEQ ID NO: 65056 - DNA, 201 bp, Homo sapiens; identical to SEQ ID NO: 65047

SEQ ID NO: 65057 - DNA, 201 bp, Homo sapiens; identical to SEQ ID NO: 65051

SEQ ID NO: 65058 - DNA, 201 bp, Homo sapiens; identical to SEQ ID NO: 65052

SEQ ID NO: 65059 - DNA, 201 bp, Homo sapiens; identical to SEQ ID NO: 65050

SEQ ID NO: 65060 - DNA, 113 bp, Homo sapiens
tgtttggggtgccctcacccttcctcaaggcgtggccagaggcgtcagaaactccctcagtgcccctttgcgagtacttctcaagggaatggtccctgccygaggcctggggg

SEQ ID NO: 65061 - DNA, 201 bp, Homo sapiens
tctaatgactacaaaatgcgttagcacacgtgggaagctgcagagagcaacgagaaaaggaactctcacctcgatctgccgtgccgtcccaaagaataccstttgcaggactacacacttgaaaaccagagttttcaactctgccttgaagattggtgaactccccagggctcccgtgggctctgccactggacagaaggc

SEQ ID NO: 65062 - DNA, 201 bp, Homo sapiens
ctgcgggtgtctaggacagattgcttccactagaacctggagacatagcatctttgatagcataagccagattatctgtgtgtgcggtggtgtgcgtgtgmgtgcatgtgtgaatgtgagcagcatagttgatatttacccacaaacacctgtatatgcgtgcatatacaaccaagtgggtagacctaggtgttctctcag

SEQ ID NO: 65063 - DNA, 201 bp, Homo sapiens
ccaagtgccacaagaaaatggggttttccacagcccctgatgctccctacacccactggaagcagaccgtcttctacttggaagattacctcactgtccgraggggggaggaaatctacgggaccatatccatgaagccaaatgccaaaaatgtgcgagacctcgatttcacagtagacttggattttaagggacagctgt

SEQ ID NO: 65064 - DNA, 201 bp, Homo sapiens
agttgatatttacccacaaacacctgtatatgcgtgcatatacaaccaagtgggtagacctaggtgttctctcagaggggtgtgtgtgtgtgtgcgtgcgygtgtgcctagaatatatattactctcagaggagattctgttgcttttgaataggaatttgttttgtgattagttcgccccttccccaccccttaccagat

SEQ ID NO: 65065 - DNA, 201 bp, Homo sapiens
ggttacaacacacgagctacaaactacaatgctggagacagaagcactgattatgggatatttcagatcaatagccgctactggtgtaatgatggcaaaamcccaggagcagttaatgcctgtcatttatcctgcagtgctttgctgcaagataacatcgctgatgctgtagcttgtgcaaagagggttgtccgtgatcca

SEQ ID NO: 65066 - DNA, 201 bp, Homo sapiens
atgggagagtggttacaacacacgagctacaaactacaatgctggagacagaagcactgattatgggatatttcagatcaatagccgctactggtgtaatsatggcaaaaccccaggagcagttaatgcctgtcatttatcctgcagtgctttgctgcaagataacatcgctgatgctgtagcttgtgcaaagagggttgt

SEQ ID NO: 65067 - DNA, 201 bp, Homo sapiens
aagtaaaaaatataagaaaaggttatcttaaatagatcttaggcaaaataccagctgatgaaggcatctgatgccttcatctgttcagtcatctccaaaamcagtaaaaataaccactttttgttgggcaatatgaaatttttaaaggagtagaataccaaatgatagaaacagactgcctgaatgtgtttctttctaaat

SEQ ID NO: 65068 - DNA, 201 bp, Homo sapiens
atcagcctagcaaactggatgtgtttggccaaatgggagagtggttacaacacacgagctacaaactacaatgctggagacagaagcactgattatgggayatttcagatcaatagccgctactggtgtaatgatggcaaaaccccaggagcagttaatgcctgtcatttatcctgcagtgctttgctgcaagataacatc

SEQ ID NO: 65069 - DNA, 201 bp, Homo sapiens
tttggccaaatgggagagtggttacaacacacgagctacaaactacaatgctggagacagaagcactgattatgggatatttcagatcaatagccgctacyggtgtaatgatggcaaaaccccaggagcagttaatgcctgtcatttatcctgcagtgctttgctgcaagataacatcgctgatgctgtagcttgtgcaaa

SEQ ID NO: 65070 - DNA, 201 bp, Homo sapiens
aataatatttttacagaagcaggagcaaaatatggcctttcttctaagagatataatgttcactaatgtggttattttatattaagcctacaacatttttyagtttgcaaatagaactaatactggtgaaaatttacctaaaaccttggttatcaaatacatctccagtacattccgttctttttttttagacagtctcgc

SEQ ID NO: 65071 - DNA, 201 bp, Homo sapiens
gagacagggtttcaccgtgttgttcttatcaaagaaataacccagacttaatcttgaatgatacgattatgcccaatattaagtaaaaaatataagaaaakgttatcttaaatagatcttaggcaaaataccagctgatgaaggcatctgatgccttcatctgttcagtcatctccaaaaacagtaaaaataaccactttt

SEQ ID NO: 65072 - DNA, 201 bp, Homo sapiens
aaaaggttatcttaaatagatcttaggcaaaataccagctgatgaaggcatctgatgccttcatctgttcagtcatctccaaaaacagtaaaaataaccaytttttgttgggcaatatgaaatttttaaaggagtagaataccaaatgatagaaacagactgcctgaatgtgtttctttctaaattgctgttccttaattt

SEQ ID NO: 65073 - DNA, 201 bp, Homo sapiens
ccattatttccccttcaaacaaataatatttttacagaagcaggagcaaaatatggcctttcttctaagagatataatgttcactaatgtggttattttayattaagcctacaacatttttcagtttgcaaatagaactaatactggtgaaaatttacctaaaaccttggttatcaaatacatctccagtacattccgttc

SEQ ID NO: 65074 - DNA, 132 bp, Homo sapiens
ggtcagcctagcactctgacctagcagtcaayatgaaggctctcattgttctggggcttgtcctcctttctgttacggtccagggcaaggtctttgaaaggtgtgagttggccagaactctgaaaagattgg

SEQ ID NO: 65075 - DNA, 201 bp, Homo sapiens; identical to SEQ ID NO: 65065

SEQ ID NO: 65076 - DNA, 201 bp, Homo sapiens; identical to SEQ ID NO: 65066

SEQ ID NO: 65077 - DNA, 201 bp, Homo sapiens; identical to SEQ ID NO: 65067

SEQ ID NO: 65078 - DNA, 201 bp, Homo sapiens; identical to SEQ ID NO: 65068

SEQ ID NO: 65079 - DNA, 201 bp, Homo sapiens; identical to SEQ ID NO: 65069

SEQ ID NO: 65080 - DNA, 201 bp, Homo sapiens
aataatatttttacagaagcaggagcaaaatatggcctttcttctaagagatataatgttcactaatgtggttattttatattaagcctacaacatttttyagtttgcaaatagaactaatactggtgaaaatttacctaaaaccttggttatcaaatacatctccagtacattccgttcttttttttgagacagtctcgc

SEQ ID NO: 65081 - DNA, 201 bp, Homo sapiens
cactgcgcccggccacattcagttcttatcaaagaaataacccagacttaatcttgaatgatacgattatgcccaatattaagtaaaaaatataagaaaakgttatcttaaatagatcttaggcaaaataccagctgatgaaggcatctgatgccttcatctgttcagtcatctccaaaaacagtaaaaataaccactttt

SEQ ID NO: 65082 - DNA, 201 bp, Homo sapiens; identical to SEQ ID NO: 65072

SEQ ID NO: 65083 - DNA, 201 bp, Homo sapiens; identical to SEQ ID NO: 65073

SEQ ID NO: 65084 - DNA, 132 bp, Homo sapiens; identical to SEQ ID NO: 65074

SEQ ID NO: 65085 - DNA, 201 bp, Homo sapiens; identical to SEQ ID NO: 65065

SEQ ID NO: 65086 - DNA, 201 bp, Homo sapiens; identical to SEQ ID NO: 65066

SEQ ID NO: 65087 - DNA, 201 bp, Homo sapiens
aagtaaaaaatataagaaaaggttatcttaaatagatcttaggcaaaataccagctgatgaaggcatctgatgccttcatctgttcagtcatctccaaaamcagtaaaaataaccactttttgttgggcaatatgaaatttttaaaggagtagaataccaaatgatagaaacagactgcctgaattgagaattttgatttt

SEQ ID NO: 65088 - DNA, 201 bp, Homo sapiens
acagtaaaaataaccactttttgttgggcaatatgaaatttttaaaggagtagaataccaaatgatagaaacagactgcctgaattgagaattttgatttyttaaagtgtgtttctttctaaattgctgttccttaatttgattaatttaattcatgtattatgattaaatctgaggcagatgagcttacaagtattgaaa

SEQ ID NO: 65089 - DNA, 201 bp, Homo sapiens; identical to SEQ ID NO: 65068

SEQ ID NO: 65090 - DNA, 201 bp, Homo sapiens; identical to SEQ ID NO: 65069

SEQ ID NO: 65091 - DNA, 201 bp, Homo sapiens
aataatatttttacagaagcaggagcaaaatatggcctttcttctaagagatataatgttcactaatgtggttattttatattaagcctacaacatttttyagtttgcaaatagaactaatactggtgaaaatttacctaaaaccttggttatcaaatacatctccagtacattccgttcttttttttttttttttttttt

SEQ ID NO: 65092 - DNA, 201 bp, Homo sapiens; identical to SEQ ID NO: 65081

SEQ ID NO: 65093 - DNA, 201 bp, Homo sapiens
aaaaggttatcttaaatagatcttaggcaaaataccagctgatgaaggcatctgatgccttcatctgttcagtcatctccaaaaacagtaaaaataaccaytttttgttgggcaatatgaaatttttaaaggagtagaataccaaatgatagaaacagactgcctgaattgagaattttgattttttaaagtgtgtttctt

SEQ ID NO: 65094 - DNA, 201 bp, Homo sapiens; identical to SEQ ID NO: 65073

SEQ ID NO: 65095 - DNA, 132 bp, Homo sapiens; identical to SEQ ID NO: 65074

SEQ ID NO: 65096 - DNA, 201 bp, Homo sapiens
  misc_feature (1)...(201): n = A,T,C or G
agtttcaacatgacagctaaaacctttttcatcattcacggatggacgatgagcggtatctttgaaaactggctgcacaaactcgtgtcagccctgcacanaagagagaaagacgccaatgtagttgtggttgactggctccccctggcccaccagctttacacggatgcggtcaataataccagggtggtgggacacagc

SEQ ID NO: 65097 - DNA, 201 bp, Homo sapiens
gctacacagactgaggtcaaaccatctgtgaggtttaacctccgcacctccaaggacccagagcatgaaggatgctacctctccgtcggccacagccagcycttagaagactgcagtttcaacatgacagctaaaacctttttcatcattcacggatggacgatgagcggtatctttgaaaactggctgcacaaactcgtg

SEQ ID NO: 65098 - DNA, 201 bp, Homo sapiens
acaatcacagaggtggtaaaatgtgagcatgagcgagccgtccacctctttgttgactctctggtgaatcaggacaagccgagttttgccttccagtgcastgactccaatcgcttcaaaaaggggatctgtctgagctgccgcaagaaccgttgtaatagcattggctacaatgccaagaaaatgaggaacaagaggaac

SEQ ID NO: 65099 - DNA, 201 bp, Homo sapiens
ttgggagggggtgtggcggggcaggatgagcaactccgttcctctgctctgtttctggagcctctgctattgctttgctgcggggagccccgtaccttttrgtccagagggacggctggaagataagctccacaaacccaaagctacacagactgaggtcaaaccatctgtgaggtttaacctccgcacctccaaggaccc

SEQ ID NO: 65100 - DNA, 201 bp, Homo sapiens; identical to SEQ ID NO: 65097

SEQ ID NO: 65101 - DNA, 201 bp, Homo sapiens; identical to SEQ ID NO: 65098

SEQ ID NO: 65102 - DNA, 201 bp, Homo sapiens
gtgtgtaagcagctgggtgcctggggcctctcgtgcacactggattggtttctcagttgctgggcgagcctgtactctgcctgacgaggaacgctggctcygaagaggccctgtgtagaaggctgtcagctgctcagcctgctttgagcctcagtgagaagtccttccgacaggagctgactcatgtcaggatggcaggcc

SEQ ID NO: 65103 - DNA, 201 bp, Homo sapiens
ctatagctcttgctgcctctcttgaatagctctaactccaaacctctgtccacacctccagagcaccaagtccagatttgtgtgtaagcagctgggtgccyggggcctctcgtgcacactggattggtttctcagttgctgggcgagcctgtactctgcctgacgaggaacgctggctccgaagaggccctgtgtagaagg

SEQ ID NO: 65104 - DNA, 201 bp, Homo sapiens
ccttatccacatagcctgagggtaattttatacgatattttaaatagttgtgtacatgaagcatggtttgtggtaacttatgtgaggggttttcccatttkttgtcttgttggtgctcaaaaagttttggattttggagcatttcggattttggatttttggattagggttgctcaacccatattattggctgtacatcct

SEQ ID NO: 65105 - DNA, 201 bp, Homo sapiens
tgtcagctgctcagcctgctttgagcctcagtgagaagtccttccgacaggagctgactcatgtcaggatggcaggcctggtatcttgctcgggccctggytgttggggttctcatgggttgcactgaccatactgcttacgtcttagccattccgtcctgctccccagctcactctctgaagcacacatcattggctttc

SEQ ID NO: 65106 - DNA, 201 bp, Homo sapiens
gctgtcagctgctcagcctgctttgagcctcagtgagaagtccttccgacaggagctgactcatgtcaggatggcaggcctggtatcttgctcgggccctrgctgttggggttctcatgggttgcactgaccatactgcttacgtcttagccattccgtcctgctccccagctcactctctgaagcacacatcattggctt

SEQ ID NO: 65107 - DNA, 201 bp, Homo sapiens
tatgcattgcctaattagagtagggggagaagggcaactattattatccctattttacaaaactgaggcttagtgaggttcagccacatgcctagacttayatactagttagtggtgcagccagggagaggactcagatttcctggaggcaaagtctatctctgaaactccatgaagacttttgcagccagttcccaccaa

SEQ ID NO: 65108 - DNA, 201 bp, Homo sapiens
gtatcattcatgctggggccagaatgatggccggttgccagatataactgctttggagcaaatctcttctgtttagagagatagaagttatgacatatgtratacacatctgtgtacacagaaaccggcacctgccagacagagctggttctaagatttaatacagtgctttttttcctctttgaaatattttactttaat

SEQ ID NO: 65109 - DNA, 201 bp, Homo sapiens
ttttgcagccagttcccaccaatatgccccagacgtgagacaaacaaggacttttttttttatatagagccatccataaaatcctaagcccttttattaaygtataaccaggagaacatctgtgccaacggttggactttttatggctgagattcgggaggaagtgtgacaccaagcaggagaggaagaatgattttcttt

SEQ ID NO: 65110 - DNA, 201 bp, Homo sapiens
gtttagagagatagaagttatgacatatgtaatacacatctgtgtacacagaaaccggcacctgccagacagagctggttctaagatttaatacagtgctwtttttcctctttgaaatattttactttaataccagtgccttttcttgttgaacttcttggaaaagccaccaattctagatcttgatttgaattaatacac

SEQ ID NO: 65111 - DNA, 201 bp, Homo sapiens; identical to SEQ ID NO: 65096
  misc_feature (1)...(201): n = A,T,C or G

SEQ ID NO: 65112 - DNA, 201 bp, Homo sapiens
aaacttctgtttcttgggagggggtgtggcggggcaggatgagcaactccgttcctctgctctgtttctggagcctctgctattgctttgctgcggggagycccgtaccttttggtccagagggacggctggaagataagctccacaaacccaaagctacacagactgaggtcaaaccatctgtgaggtttaacctccgca

SEQ ID NO: 65113 - DNA, 201 bp, Homo sapiens
tcttaccggccgggattgctggaaacaccaagaggtggtttttgttttttaaaacttctgtttcttgggagggggtgtggcggggcaggatgagcaactcmgttcctctgctctgtttctggagcctctgctattgctttgctgcggggagccccgtaccttttggtccagagggacggctggaagataagctccacaaac

SEQ ID NO: 65114 - DNA, 201 bp, Homo sapiens
gcctccagtcccccagcccctggccgagagaagggtcttaccggccgggattgctggaaacaccaagaggtggtttttgttttttaaaacttctgtttctkgggagggggtgtggcggggcaggatgagcaactccgttcctctgctctgtttctggagcctctgctattgctttgctgcggggagccccgtaccttttgg

SEQ ID NO: 65115 - DNA, 201 bp, Homo sapiens; identical to SEQ ID NO: 65099

SEQ ID NO: 65116 - DNA, 201 bp, Homo sapiens; identical to SEQ ID NO: 65112

SEQ ID NO: 65117 - DNA, 201 bp, Homo sapiens; identical to SEQ ID NO: 65096
  misc_feature (1)...(201): n = A,T,C or G

SEQ ID NO: 65118 - DNA, 201 bp, Homo sapiens; identical to SEQ ID NO: 65097

SEQ ID NO: 65119 - DNA, 201 bp, Homo sapiens; identical to SEQ ID NO: 65113

SEQ ID NO: 65120 - DNA, 201 bp, Homo sapiens; identical to SEQ ID NO: 65098

SEQ ID NO: 65121 - DNA, 201 bp, Homo sapiens; identical to SEQ ID NO: 65114

SEQ ID NO: 65122 - DNA, 201 bp, Homo sapiens
aaaaacgaaaccagtcccactgtggagcttccctgagggtgcccgggcaagtcttgccagcaaggcagcaagacttcctgctatccaacccttttattaaygtataaccaggagaacatctgtgccaacggttggactttttatggctgagattcgggaggaagtgtgacaccaagcaggagaggaagaatgattttcttt

SEQ ID NO: 65123 - DNA, 201 bp, Homo sapiens
caggagttcttttcagaactccgggaatgtgctaaagccaaaggcttcttcatagatacacggtccaataaaacactggctgattctctggataatgcgarcgacccccacgatcccattgtgaacaggctactgcgctccatggccacgcaggccatgtcgaatgctctgtacttctccaccggatcctgtgcggaggag

SEQ ID NO: 65124 - DNA, 201 bp, Homo sapiens
atgtttcaaacaattatggaatatgagaggctcttacttcactaagagctgtcatatgtgaatgttttacagtcttttcaaacttaacatttaatgtgtgtcactcagtgctctagtcgatcaggactgggtagctatttcgcatatatgtaaaatgttctcagccgggcacggtggctcacgcctgtaaccccagcactt

SEQ ID NO: 65125 - DNA, 201 bp, Homo sapiens
tgtttcaaacaattatggaatatgagaggctcttacttcactaagagctgtcatatgtgaatgttttacagtcttttcaaacttaacatttaatgtgtgtcactcagtgctctagtcgatcaggactgggtagctatttcgcatatatgtaaaatgttctcagccgggcacggtggctcacgcctgtaaccccagcacttt

SEQ ID NO: 65126 - DNA, 201 bp, Homo sapiens
gtttcaaacaattatggaatatgagaggctcttacttcactaagagctgtcatatgtgaatgttttacagtcttttcaaacttaacatttaatgtgtgtcactcagtgctctagtcgatcaggactgggtagctatttcgcatatatgtaaaatgttctcagccgggcacggtggctcacgcctgtaaccccagcactttg

SEQ ID NO: 65127 - DNA, 201 bp, Homo sapiens
gccaaaggcttcttcatagatacacggtccaataaaacactggctgattctctggataatgcgaacgacccccacgatcccattgtgaacaggctactgcrctccatggccacgcaggccatgtcgaatgctctgtacttctccaccggatcctgtgcggaggaggagttccatcattacggtcttgcattagataaatat

SEQ ID NO: 65128 - DNA, 201 bp, Homo sapiens
tgaagcaggagaattgcctgaacccaggaagaggaggttgcagtgagccgagatcgcaccactgcattccagcctgggcaacagagcgagactccatctcaaaaaaaaaaaaaaaaaaaaaaaaagttctctcattcattaaagttgcattaaataaagtataattaggtcactatggaaacagagttttcagtaatgagt

SEQ ID NO: 65129 - DNA, 201 bp, Homo sapiens
ttcccaaaattcgaattagcactcagcaagcagaaaccctccaggacttcagggtggtcgtgcgcatcgattcctgggagtcaacatctgtgtatccaaayggacattttgtgcgtgttttaggaagaatcggagatctggaaggggaaattgcaaccatcctggtggaaaacagtatttcagttattcctttctcagaag

SEQ ID NO: 65130 - DNA, 201 bp, Homo sapiens
agaagctcagatgtgtgagatgccagtaaacacaccagaaagtccctggaaggtgagtcctgaagaggaacaaaaacgtaaagacttgaggaaaagccatstcgtattcagcattgaccccaaaggttgtgaagatgtggatgacacactctcagtcagaaccttaaataatggcaacctggaacttggggtccacatcgc

SEQ ID NO: 65131 - DNA, 201 bp, Homo sapiens
tgtggatgacacactctcagtcagaaccttaaataatggcaacctggaacttggggtccacatcgcagatgtaacacactttgtggcaccaaattcttacrttgatattgaagctagaacaagggccaccacttattatctagcagatcgtcgctatgacatgctgccttccgtcctcagtgcagatttgtgttcccttct

SEQ ID NO: 65132 - DNA, 201 bp, Homo sapiens
tttcaaacaattatggaatatgagaggctcttacttcactaagagctgtcatatgtgaatgttttacagtcttttcaaacttaacatttaatgtgtgtcactcagtgctctagtcgatcaggactgggtagctatttcgcatatatgtaaaatgttctcagccgggcacggtggctcacgcctgtaaccccagcactttgg

SEQ ID NO: 65133 - DNA, 201 bp, Homo sapiens
attattcgatcagcatacaaactgttctatgaagcagcccaagaactactggatggaaacttaagcgttgttgatgatattccagaattcaaagacttggrtgagaagagcagacaagccaagctggaggagttggtgtgggcaattggaaagctgaccgacatagctcgccatgtcagagctaaacgagacggatgtggt

SEQ ID NO: 65134 - DNA, 201 bp, Homo sapiens
gctactgcgctccatggccacgcaggccatgtcgaatgctctgtacttctccaccggatcctgtgcggaggaggagttccatcattacggtcttgcattasataaatatacccactttacttctccaataagaagatattcagatattgtagtacaccgcttgttaatggcagccatttcaaaagataagaaaatggaaat

SEQ ID NO: 65135 - DNA, 201 bp, Homo sapiens
gccattctgatacaatcagacttgaaataattagtaacaaaccatacaagataccaaatacagaacttattcatcagagttcccccttgctgaagagtgarttagtgaaagaagtaactaaatctgtggaagaagctcagcttgcccaagaagtcaaagtaaacatcattcaggaggaatatcaagaatatcgccaaacaa

SEQ ID NO: 65136 - DNA, 201 bp, Homo sapiens; identical to SEQ ID NO: 65123

SEQ ID NO: 65137 - DNA, 201 bp, Homo sapiens; identical to SEQ ID NO: 65124

SEQ ID NO: 65138 - DNA, 201 bp, Homo sapiens; identical to SEQ ID NO: 65125

SEQ ID NO: 65139 - DNA, 201 bp, Homo sapiens; identical to SEQ ID NO: 65126

SEQ ID NO: 65140 - DNA, 201 bp, Homo sapiens; identical to SEQ ID NO: 65127

SEQ ID NO: 65141 - DNA, 201 bp, Homo sapiens; identical to SEQ ID NO: 65128

SEQ ID NO: 65142 - DNA, 201 bp, Homo sapiens; identical to SEQ ID NO: 65129

SEQ ID NO: 65143 - DNA, 201 bp, Homo sapiens; identical to SEQ ID NO: 65130

SEQ ID NO: 65144 - DNA, 201 bp, Homo sapiens; identical to SEQ ID NO: 65131

SEQ ID NO: 65145 - DNA, 201 bp, Homo sapiens; identical to SEQ ID NO: 65132

SEQ ID NO: 65146 - DNA, 201 bp, Homo sapiens; identical to SEQ ID NO: 65133

SEQ ID NO: 65147 - DNA, 201 bp, Homo sapiens; identical to SEQ ID NO: 65134

SEQ ID NO: 65148 - DNA, 201 bp, Homo sapiens; identical to SEQ ID NO: 65135

SEQ ID NO: 65149 - DNA, 201 bp, Homo sapiens; identical to SEQ ID NO: 65123

SEQ ID NO: 65150 - DNA, 201 bp, Homo sapiens; identical to SEQ ID NO: 65124

SEQ ID NO: 65151 - DNA, 201 bp, Homo sapiens; identical to SEQ ID NO: 65125

SEQ ID NO: 65152 - DNA, 201 bp, Homo sapiens; identical to SEQ ID NO: 65126

SEQ ID NO: 65153 - DNA, 201 bp, Homo sapiens; identical to SEQ ID NO: 65127

SEQ ID NO: 65154 - DNA, 201 bp, Homo sapiens; identical to SEQ ID NO: 65128

SEQ ID NO: 65155 - DNA, 201 bp, Homo sapiens; identical to SEQ ID NO: 65129

SEQ ID NO: 65156 - DNA, 201 bp, Homo sapiens; identical to SEQ ID NO: 65130

SEQ ID NO: 65157 - DNA, 201 bp, Homo sapiens; identical to SEQ ID NO: 65131

SEQ ID NO: 65158 - DNA, 201 bp, Homo sapiens; identical to SEQ ID NO: 65132

SEQ ID NO: 65159 - DNA, 201 bp, Homo sapiens; identical to SEQ ID NO: 65133

SEQ ID NO: 65160 - DNA, 201 bp, Homo sapiens; identical to SEQ ID NO: 65134

SEQ ID NO: 65161 - DNA, 201 bp, Homo sapiens; identical to SEQ ID NO: 65135

SEQ ID NO: 65162 - DNA, 201 bp, Homo sapiens
acatgatgaacgtcacactgctcgggtgccacccgctcaccaccctgaccttccacgtggtcaacatctggctttccgtggaggaccactccggctacaayttcccttggtccactcacagactggtgcccttcgggtggtacgggggtgtggtgcaccacgacctgcatcactctcactttaactgcaacttcgctccgt

SEQ ID NO: 65163 - DNA, 201 bp, Homo sapiens
tcgacatggagttcttcgtgtggcacctgctgcaccacaaggtgccctggctgtaccgcaccttccacaaggtgcaccaccagaactcgtcctcgttcgcrctggcaacgcagtatatgagcgtctgggaactgttttctttgggcttcttcgacatgatgaacgtcacactgctcgggtgccacccgctcaccaccctga

SEQ ID NO: 65164 - DNA, 183 bp, Homo sapiens
cagcctcagctgccttgcacagcctcgcaatgagctgccacaactgctccgacccccaggtcctttgcagctccgggcagctsttcctgcagcccctctgggaccacctgaggagctgggaggccctcctacagtcgcccttcttcccggtcatcttctccatcaccacatacgtgggctttt

SEQ ID NO: 65165 - DNA, 201 bp, Homo sapiens
gttttgacgtgtggatgggcaacagcagaggaaatacctggtctcggaaacataagacactctcagtttctcaggatgaattctgggctttcagttatgawgagatggcaaaatatgacctaccagcttccattaacttcattctgaataaaactggccaagaacaagtgtattatgtgggtcattctcaaggcaccacta

SEQ ID NO: 65166 - DNA, 201 bp, Homo sapiens
tatcctcccacatacaatgtgaaggacatgcttgtgccgactgcagtctggagcgggggtcacgactggcttgcagatgtctacgacgtcaatatcttacygactcagatcaccaacttggtgttccatgagagcattccggaatgggagcatcttgacttcatttggggcctggatgccccttggaggctttataataaa

SEQ ID NO: 65167 - DNA, 201 bp, Homo sapiens
aaaacatgttacactggagccaggctgttaaattccaaaagtttcaagcctttgactggggaagcagtgccaagaattattttcattacaaccagagttawcctcccacatacaatgtgaaggacatgcttgtgccgactgcagtctggagcgggggtcacgactggcttgcagatgtctacgacgtcaatatcttactga

SEQ ID NO: 65168 - DNA, 201 bp, Homo sapiens
caagtgtattatgtgggtcattctcaaggcaccactataggttttatagcattttcacagatccctgagctggctaaaaggattaaaatgttttttgcccygggtcctgtggcttccgtcgccttctgtactagccctatggccaaattaggacgattaccagatcatctcattaaggacttatttggagacaaagaattt

SEQ ID NO: 65169 - DNA, 201 bp, Homo sapiens
agcatgcaattcacttcaccagcagtcactaagaatgaaaatgcggttcttggggttggtggtctgtttggttctctggaccctgcattctgaggggtctrgagggaaactgacagctgtggatcctgaaacaaacatgaatgtgagtgaaattatctcttactggggattccctagtgaggaatacctagttgagacaga

SEQ ID NO: 65170 - DNA, 130 bp, Homo sapiens
attgtcagctcctgattctgcagaaaacaygaaactgagctgtacaaagatgctgatgaggggctgcagcatgcaattcacttcaccagcagtcactaagaatgaaaatgcggttcttggggttggtggt

SEQ ID NO: 65171 - DNA, 201 bp, Homo sapiens
ttcctgcaacatggcttgctggcagattctagtaactgggtcacaaaccttgccaacagcagcctgggcttcattcttgctgatgctggttttgacgtgtrgatgggcaacagcagaggaaatacctggtctcggaaacataagacactctcagtttctcaggatgaattctgggctttcagttatgatgagatggcaaaa

SEQ ID NO: 65172 - DNA, 201 bp, Homo sapiens
tgactggggaagcagtgccaagaattattttcattacaaccagagttatcctcccacatacaatgtgaaggacatgcttgtgccgactgcagtctggagcrggggtcacgactggcttgcagatgtctacgacgtcaatatcttactgactcagatcaccaacttggtgttccatgagagcattccggaatgggagcatct

SEQ ID NO: 65173 - DNA, 201 bp, Homo sapiens
tattatgtgggtcattctcaaggcaccactataggttttatagcattttcacagatccctgagctggctaaaaggattaaaatgttttttgccctgggtcytgtggcttccgtcgccttctgtactagccctatggccaaattaggacgattaccagatcatctcattaaggacttatttggagacaaagaatttcttccc

SEQ ID NO: 65174 - DNA, 201 bp, Homo sapiens
gtgccttaaccgaattcctcatgggaggaagaaccattctgacaaaggtcccaaaccagttgtcttcctgcaacatggcttgctggcagattctagtaacwgggtcacaaaccttgccaacagcagcctgggcttcattcttgctgatgctggttttgacgtgtggatgggcaacagcagaggaaatacctggtctcggaa

SEQ ID NO: 65175 - DNA, 201 bp, Homo sapiens
gtcacaaaccttgccaacagcagcctgggcttcattcttgctgatgctggttttgacgtgtggatgggcaacagcagaggaaatacctggtctcggaaacvtaagacactctcagtttctcaggatgaattctgggctttcagttatgatgagatggcaaaatatgacctaccagcttccattaacttcattctgaataaa

SEQ ID NO: 65176 - DNA, 201 bp, Homo sapiens
aagatgctgatgaggggctgcagcatgcaattcacttcaccagcagtcactaagaatgaaaatgcggttcttggggttggtggtctgtttggttctctggmccctgcattctgaggggtctggagggaaactgacagctgtggatcctgaaacaaacatgaatgtgagtgaaattatctcttactggggattccctagtga

SEQ ID NO: 65177 - DNA, 201 bp, Homo sapiens
tctgtttggttctctggaccctgcattctgaggggtctggagggaaactgacagctgtggatcctgaaacaaacatgaatgtgagtgaaattatctcttastggggattccctagtgaggaatacctagttgagacagaagatggatatattctgtgccttaaccgaattcctcatgggaggaagaaccattctgacaaag

SEQ ID NO: 65178 - DNA, 201 bp, Homo sapiens; identical to SEQ ID NO: 65165

SEQ ID NO: 65179 - DNA, 201 bp, Homo sapiens; identical to SEQ ID NO: 65166

SEQ ID NO: 65180 - DNA, 201 bp, Homo sapiens; identical to SEQ ID NO: 65167

SEQ ID NO: 65181 - DNA, 201 bp, Homo sapiens; identical to SEQ ID NO: 65168

SEQ ID NO: 65182 - DNA, 201 bp, Homo sapiens
ggcaggacagctccagactgttttattatacagaatgaaaatgcggttcttggggttggtggtctgtttggttctctggaccctgcattctgaggggtctrgagggaaactgacagctgtggatcctgaaacaaacatgaatgtgagtgaaattatctcttactggggattccctagtgaggaatacctagttgagacaga

SEQ ID NO: 65183 - DNA, 201 bp, Homo sapiens
atatgcatccttatttttaatacacctgcttcacgtccctatgttgggaagtccatatttgtctgcttttcttgcagcatcatttccttacaatactgtcyggtggacaaaatgacaattgatatgtttttctgatataattactttagctgcactaacagtacaatgcttgttaatggttaatataggcagggcgaatac

SEQ ID NO: 65184 - DNA, 201 bp, Homo sapiens
attttttctgagattaatgtactcttggagcccgctactgtcgttattgatcacatctgtgtgaagccaaagccccgtggttgcccatgagaagtgtcctwgttcattttcacccaaatgaagtgtgaacgtgatgttttcggatgcaaactcagctcagggattcattttgtgtcttagttttatatgcatccttatttt

SEQ ID NO: 65185 - DNA, 201 bp, Homo sapiens; identical to SEQ ID NO: 65171

SEQ ID NO: 65186 - DNA, 201 bp, Homo sapiens; identical to SEQ ID NO: 65172

SEQ ID NO: 65187 - DNA, 201 bp, Homo sapiens; identical to SEQ ID NO: 65173

SEQ ID NO: 65188 - DNA, 201 bp, Homo sapiens; identical to SEQ ID NO: 65174

SEQ ID NO: 65189 - DNA, 201 bp, Homo sapiens; identical to SEQ ID NO: 65175

SEQ ID NO: 65190 - DNA, 201 bp, Homo sapiens
tgcgactcgagacagcggcccggcaggacagctccagactgttttattatacagaatgaaaatgcggttcttggggttggtggtctgtttggttctctggmccctgcattctgaggggtctggagggaaactgacagctgtggatcctgaaacaaacatgaatgtgagtgaaattatctcttactggggattccctagtga

SEQ ID NO: 65191 - DNA, 201 bp, Homo sapiens; identical to SEQ ID NO: 65177

SEQ ID NO: 65192 - DNA, 201 bp, Homo sapiens; identical to SEQ ID NO: 65166

SEQ ID NO: 65193 - DNA, 201 bp, Homo sapiens; identical to SEQ ID NO: 65168

SEQ ID NO: 65194 - DNA, 201 bp, Homo sapiens
ctgtggacctgccagcctgcgaggcggaggacgggctccatctcttagaaacgcctacggcgcatgctctatggggtcaactggggggctggcaagcggcmgcgctggtctggggcggagtctccgaggcacttcccggtggctggctgctctgattggctgaacaaatagtccgagggtggtgggcatccgccctcccga

SEQ ID NO: 65195 - DNA, 201 bp, Homo sapiens
actcgagacagcggcccggcaggacagctccagaatgaaaatgcggttcttggggttggtggtctgtttggttctctggaccctgcattctgaggggtctrgagggaaactgacagctgtggatcctgaaacaaacatgaatgtgagtgaaattatctcttactggggattccctagtgaggaatacctagttgagacaga

SEQ ID NO: 65196 - DNA, 201 bp, Homo sapiens; identical to SEQ ID NO: 65183

SEQ ID NO: 65197 - DNA, 201 bp, Homo sapiens; identical to SEQ ID NO: 65173

SEQ ID NO: 65198 - DNA, 201 bp, Homo sapiens; identical to SEQ ID NO: 65175

SEQ ID NO: 65199 - DNA, 201 bp, Homo sapiens
cccctgagagctggcactgcgactcgagacagcggcccggcaggacagctccagaatgaaaatgcggttcttggggttggtggtctgtttggttctctggmccctgcattctgaggggtctggagggaaactgacagctgtggatcctgaaacaaacatgaatgtgagtgaaattatctcttactggggattccctagtga

SEQ ID NO: 65200 - DNA, 201 bp, Homo sapiens; identical to SEQ ID NO: 65177

SEQ ID NO: 65201 - DNA, 201 bp, Homo sapiens; identical to SEQ ID NO: 65165

SEQ ID NO: 65202 - DNA, 201 bp, Homo sapiens; identical to SEQ ID NO: 65167

SEQ ID NO: 65203 - DNA, 201 bp, Homo sapiens
ccagcctgcgaggcggaggacgggctccatctcttagaaacgcctacggcgcatgctctatggggtcaactggggggctggcaagcggcagcgctggtctrgggcggagtctccgaggcacttcccggtggctggctgctctgattggctgaacaaatagtccgagggtggtgggcatccgccctcccgacaaggcagacc

SEQ ID NO: 65204 - DNA, 201 bp, Homo sapiens; identical to SEQ ID NO: 65171

SEQ ID NO: 65205 - DNA, 201 bp, Homo sapiens; identical to SEQ ID NO: 65184

SEQ ID NO: 65206 - DNA, 201 bp, Homo sapiens; identical to SEQ ID NO: 65172

SEQ ID NO: 65207 - DNA, 201 bp, Homo sapiens; identical to SEQ ID NO: 65174

SEQ ID NO: 65208 - DNA, 201 bp, Homo sapiens
actacaaatctggcatgttttactgtgaacacttttgttatttgttttgtacccttttttgtcttgtttttctgttttagttgtcttctgaaaaaagagtygttccctctgtttctgtcctcagatgatgtccctccccctacctgtaacctttctttgacataattgttcatatcaatgaaggtgctgaccagctcaata

SEQ ID NO: 65209 - DNA, 201 bp, Homo sapiens
ttcagggcctgctttatgtcgactctgttggcttcaacggcaagccagaatgttactattttgaaaatcccacaaatcctgaattgtgtcaaaaaaagccrtactgccttgataacccataccctatgttgctggttaacatgggctcaggtgtcagcattctagccgtgtactccaaggacaactataaaagagttacag

SEQ ID NO: 65210 - DNA, 201 bp, Homo sapiens
tgatgagtaaagaaaagcgagattccatcagcaaggaagacctcgcccgggccacattggtcaccatcaccaacaacattggctccattgctcggatgtgygcgttgaatgagaacatagacagagttgtgtttgttggaaattttctcagaatcaatatggtctccatgaagctgctggcatatgccatggatttttggt

SEQ ID NO: 65211 - DNA, 201 bp, Homo sapiens
atttttggtccaaaggacaactgaaagctctgtttttggaacatgagggttattttggagccgttggggcactgttggaactgttcaaaatgactgatgayaagtagagacgagcagtggaggaaacagcctcccaaaaggacagagaactaaaaaattgctgctggagaaggtgaaagtcgctttgggacggaagccaag

SEQ ID NO: 65212 - DNA, 201 bp, Homo sapiens; identical to SEQ ID NO: 65208

SEQ ID NO: 65213 - DNA, 201 bp, Homo sapiens; identical to SEQ ID NO: 65209

SEQ ID NO: 65214 - DNA, 201 bp, Homo sapiens; identical to SEQ ID NO: 65210

SEQ ID NO: 65215 - DNA, 201 bp, Homo sapiens; identical to SEQ ID NO: 65211

SEQ ID NO: 65216 - DNA, 201 bp, Homo sapiens; identical to SEQ ID NO: 65208

SEQ ID NO: 65217 - DNA, 201 bp, Homo sapiens
gcttccatccgccgccagtccagccgccgcacgtctgcagccggggtccagtgggcggcagcgacgcggcgccccagcgcctcccgctcctgccggagctscagccgcagccactgctccctcagcatgactccccggccaagaaatgccggctgcggaggaggatggactcggggagaaagaacaggccgccattcccat

SEQ ID NO: 65218 - DNA, 201 bp, Homo sapiens; identical to SEQ ID NO: 65209

SEQ ID NO: 65219 - DNA, 201 bp, Homo sapiens; identical to SEQ ID NO: 65210

SEQ ID NO: 65220 - DNA, 201 bp, Homo sapiens; identical to SEQ ID NO: 65211

SEQ ID NO: 65221 - DNA, 201 bp, Homo sapiens
ggctggagttccggctggtgcccgggcagcgcttcgggctgcaggagcaggccacactcaagccactggaccccgtgctgtgcaccctgcggccccgcggytggcagcccgcacccccaccacccccctgctgagggggcctccaggcaggacgagactcctcgggcaagggccgtgcccgcccacctctgctgcccacgg

SEQ ID NO: 65222 - DNA, 201 bp, Homo sapiens
tccttgccaccccccgccggcaggggcccctcctctgtgctccctcggtcacctgtgctacctctaacaccacactgaccacactgtatcgtgagtgtccrttgacgtgaccaattgccctgccaggctgtcagcgcctcaagggtagggtctgcgtgtgatttgtctctgagccccctgtgcccacccagggcccggcac

SEQ ID NO: 65223 - DNA, 181 bp, Homo sapiens
tgctacctctaacaccacactgaccacactgtatcgtgagtgtccgttgacgtgaccaattgccctgccaggctgtcagcgcctcaagggtagggtctgcrtgtgatttgtctctgagccccctgtgcccacccagggcccggcacagagtcgatgctcaataaatgtgtgttgactgcat

SEQ ID NO: 65224 - DNA, 201 bp, Homo sapiens
aatccttcaaactctttacttctgtatttggagtggggctgaagacttctgagaagtggttcaggatgggtttcagaactctgagtaaagtaaggtcggamaaaagcctgaaatttacacgaatgcagaaagcaggatttctgtattatgaagaccttgtcagctgtgtgaccagggcagaagcagaggccgtcagtgtgc

SEQ ID NO: 65225 - DNA, 201 bp, Homo sapiens
tgagtaaagtaaggtcggacaaaagcctgaaatttacacgaatgcagaaagcaggatttctgtattatgaagaccttgtcagctgtgtgaccagggcagamgcagaggccgtcagtgtgctggttaaagaggctgtctgggcatttcttccggatgctttcgtcaccatgacaggagggttccggaggggtaagaagatgg

SEQ ID NO: 65226 - DNA, 148 bp, Homo sapiens
atattcctcaaagcagaaagtgaagaagaaatttttgcgcatctgggattggattatattgaaccgtgggaaagaaatgcctaggaaagtgttgtcaacawttttttcctattcttttcaagttaaataaattatgcttcatattagt

SEQ ID NO: 65227 - DNA, 201 bp, Homo sapiens
cgcaggaaagggttcagggttgaaaatgagctcagtgattctgtcacccacatcgtagcagagaacaactcgggttcggatgttctggagtggcttcaagyacagaaagtacaagtcagctcacaaccagagctcctcgatgtctcctggctgatcgaatgcataggagcagggaaaccggtggaaatgacaggaaaacac

SEQ ID NO: 65228 - DNA, 201 bp, Homo sapiens
agaagaaaatgggaaccacccgcagagcgttcctcatggagctggcccgcaggaaagggttcagggttgaaaatgagctcagtgattctgtcacccacatygtagcagagaacaactcgggttcggatgttctggagtggcttcaagcacagaaagtacaagtcagctcacaaccagagctcctcgatgtctcctggctga

SEQ ID NO: 65229 - DNA, 201 bp, Homo sapiens
caactcgggttcggatgttctggagtggcttcaagcacagaaagtacaagtcagctcacaaccagagctcctcgatgtctcctggctgatcgaatgcatargagcagggaaaccggtggaaatgacaggaaaacaccagcttgttgtgagaagagactattcagatagcaccaacccaggccccccgaagactccaccaat

SEQ ID NO: 65230 - DNA, 201 bp, Homo sapiens
cagatagcaccaacccaggccccccgaagactccaccaattgctgtacaaaagatctcccagtatgcgtgtcagagaagaaccactttaaacaactgtaaycagatattcacggatgcctttgatatactggctgaaaactgtgagtttagagaaaatgaagactcctgtgtgacatttatgagagcagcttctgtattga

SEQ ID NO: 65231 - DNA, 201 bp, Homo sapiens
tcaatccttcaaactctttacttctgtatttggagtggggctgaagacttctgagaagtggttcaggatgggtttcagaactctgagtaaagtaaggtcgsacaaaagcctgaaatttacacgaatgcagaaagcaggatttctgtattatgaagaccttgtcagctgtgtgaccagggcagaagcagaggccgtcagtgt

SEQ ID NO: 65232 - DNA, 201 bp, Homo sapiens
tatcctgggtaggcagaaaccatagatcttttgtgtttacagctatggaaaccaactgtaccataaagatagttcactgagttttaaagccaagccacatsttatttttccaaggtttaatttagtgagagggcagcattagtgtggagtggcatgcttttgccctatcgtggaatttacacatcagaatgtgcaggatcc

SEQ ID NO: 65233 - DNA, 201 bp, Homo sapiens
gcactctggcagaaactggccaaggacattcaggcaagttgcaagtaatgaaattctcagggacccatgctttcatcctggatataagaaggtagtgaacrtaagtgacctttacaagaccccctgcaccaagagatttgagatgactcttccattccagcagtttgaaatccagggtattggaaactatcaacaatgcca

SEQ ID NO: 65234 - DNA, 201 bp, Homo sapiens
attacagctcattacagcctcaatctcccaggctcaagtgatcttcccacctcagcctcctgagtagctgggactgcaggtacaaaattcagtaggacacsactttctgagtcatatgctggatttgaggagatactgaagccacaagactgaaataacttttaaactgtgggtgatttggctaaaagctactctcatcta

SEQ ID NO: 65235 - DNA, 201 bp, Homo sapiens
aaaacgttaagtatgggattgtgctggatgcgggttcttctcacacaagtttatacatctataagtggccagcagaaaaggagaatgacacaggcgtggtscatcaagtagaagaatgcagggttaaaggtcctggaatctcaaaatttgttcagaaagtaaatgaaataggcatttacctgactgattgcatggaaagag

SEQ ID NO: 65236 - DNA, 155 bp, Homo sapiens
tctacacacatagcttcttgtgctatgggaaggatcaggcactctggcagaaactggccaaggacattcaggcaagtataactcaatccagacctgccccyttcacatctgcacctccagcccccacatcctgttgttttctgtttcaaattcag

SEQ ID NO: 65237 - DNA, 201 bp, Homo sapiens; identical to SEQ ID NO: 65234

SEQ ID NO: 65238 - DNA, 201 bp, Homo sapiens; identical to SEQ ID NO: 65235

SEQ ID NO: 65239 - DNA, 201 bp, Homo sapiens; identical to SEQ ID NO: 65232

SEQ ID NO: 65240 - DNA, 201 bp, Homo sapiens; identical to SEQ ID NO: 65235

SEQ ID NO: 65241 - DNA, 201 bp, Homo sapiens
tcaggcactctggcagaaactggccaaggacattcaggttgcaagtaatgaaattctcagggacccatgctttcatcctggatataagaaggtagtgaacrtaagtgacctttacaagaccccctgcaccaagagatttgagatgactcttccattccagcagtttgaaatccagggtattggaaactatcaacaatgcca

SEQ ID NO: 65242 - DNA, 201 bp, Homo sapiens; identical to SEQ ID NO: 65232

SEQ ID NO: 65243 - DNA, 201 bp, Homo sapiens; identical to SEQ ID NO: 65241

SEQ ID NO: 65244 - DNA, 201 bp, Homo sapiens; identical to SEQ ID NO: 65234

SEQ ID NO: 65245 - DNA, 201 bp, Homo sapiens; identical to SEQ ID NO: 65235

SEQ ID NO: 65246 - DNA, 201 bp, Homo sapiens; identical to SEQ ID NO: 65232

SEQ ID NO: 65247 - DNA, 201 bp, Homo sapiens; identical to SEQ ID NO: 65235

SEQ ID NO: 65248 - DNA, 201 bp, Homo sapiens; identical to SEQ ID NO: 65241

SEQ ID NO: 65249 - DNA, 201 bp, Homo sapiens
ccggctaatttagcccctcccacgagcccaagggtctgttatatctctgtttccttgaggacctctctcacggagacggaccacagcaagcagaggctggrggggggaaagacgaggaaagaggaggaaaacaaaagctgctacttatggaagatacaaaggagtctaacgtgaagacattttgctccaagaatatcctag

SEQ ID NO: 65250 - DNA, 201 bp, Homo sapiens
ctgggaccagccgggcctgaggttgaactggggtgaaccgatgcactggcacctagacatgtacaacaggaaccgtgtggatacatcccccacacctgttycttggcatgtcatgtgtatgcagctcttcggtttcctggctttcatgatattcatgtgctgggtgggggacgtgtaccctgtctaccagcctgtgggacc

SEQ ID NO: 65251 - DNA, 117 bp, Homo sapiens
tctgaggaggcttcgtgggcttttgggtcctctaactaggactccctcattcctagaaatttaaccttaatgaaatccctaataaaactcagtgctgtgtwatttgtgcctcatttc

SEQ ID NO: 65252 - DNA, 128 bp, Homo sapiens
ctctatccaacccttggcttcccaactscgtatttaaaccccgcccctgttgaacccttcggcttttcttcactcccggcttcctccgtcacgtttggcccggctcagccgccgtgacaggcctttgc

SEQ ID NO: 65253 - DNA, 201 bp, Homo sapiens; identical to SEQ ID NO: 65250

SEQ ID NO: 65254 - DNA, 117 bp, Homo sapiens; identical to SEQ ID NO: 65251

SEQ ID NO: 65255 - DNA, 201 bp, Homo sapiens
agctgaagtactacaactccgacgtgcaccgcgccgcctttgtgctgcccgagtttgcccgcaagagcgccctcctgactggcctcatgtccctccaggcmctgaatgatgtgagctgagcccaggcgccaccactgatgccacccaggacctcggaccttggagcctgcggggtgcctcggcccctccagccccgggccg

SEQ ID NO: 65256 - DNA, 201 bp, Homo sapiens
ctccgtggagtccgtggtccagtgtgagatcgacgaggatgtcatccaagtctccaagaagttcctgccaggcatggccattggctactctagctcgaagstgaccctacatgtgggtgacggttttgagttcatgaaacagaatcaggatgccttcgacgtgatcatcactgactcctcagaccccatgggccccgccga

SEQ ID NO: 65257 - DNA, 201 bp, Homo sapiens
agccgctgacacagcagcaggtggcgcagatgcagctgaagtactacaactccgacgtgcaccgcgccgcctttgtgctgcccgagtttgcccgcaaggcmctgaatgatgtgagctgagcccaggcgccaccactgatgccacccaggacctcggaccttggagcctgcggggtgcctcggcccctccagccccgggccg

SEQ ID NO: 65258 - DNA, 201 bp, Homo sapiens; identical to SEQ ID NO: 65256

SEQ ID NO: 65259 - DNA, 201 bp, Homo sapiens
tggtgggttgtgccgtggctgtcctggctgtgcacggggccggtaatttggtcaacacttactatgacttttccaagggcattgaccacaaaaagagtgaygacaggacacttgtggaccgaatcttggagccgcaggatgtcgtccggttcggagtcttcctctacacgttgggctgcgtctgtgccgcttgcctctact

SEQ ID NO: 65260 - DNA, 201 bp, Homo sapiens
tgttgtttttctgttttttgttttttccattttatggggaatttaaaaaccattcttgtatcagaaggtgaattaggcgcatggtctttgttttattaatwatttccactagagggtgttctcaggtcactttgcagtgaagtggacttagttcctccttgttctgtacaaaatgtctccagactttgtaaaggagctgcc

SEQ ID NO: 65261 - DNA, 201 bp, Homo sapiens
cccggaccttgccgccacaccagccctgtcctggggcggaaccgaaggaaggtcgggccctgctgccccgccccgtccttcctccttcccgggcggtcackgtgcgtggctcacttttagagtttacttcaaccacgtggagcttccatggcggcctctcaggtcctgggggagaagattaacatcctgtcgggagagact

SEQ ID NO: 65262 - DNA, 201 bp, Homo sapiens
caggagccctgaaacggtagaggcactgccatccttgtgggatactcaaagcccacagggcttttccctccctattgcatcttctgatgctccccacaccyaccctccacctctccacctctgtggtgttcccatttgtgtgtttcccatctgtggagccagactgagcaatagcttagcagcgagtcagggacagctgcc

SEQ ID NO: 65263 - DNA, 201 bp, Homo sapiens
attaaagtcagagtctctgaggaaggaatgtgatttggcagtcagggtactaagcatgggtgggaactcctgccttataaaaattgtttttgtgttcttaragataatatgttgtttttctgttttttgttttttccattttatggggaatttaaaaaccattcttgtatcagaaggtgaattaggcgcatggtctttgtt

SEQ ID NO: 65264 - DNA, 201 bp, Homo sapiens
tttctgaggcttttgtactttagtaaatgcttccactaaactgaaaccatggtgagaaagtttgactttgttaaatattttgaaatgtaaatgaaaagaastactgtatattaaaagttggtttgaaccaactttctagctgctgttgaagaatatattgtcagaaacacaaggcttgatttggttcccaggacagtgaaa

SEQ ID NO: 65265 - DNA, 201 bp, Homo sapiens
gtcatgccagcggggccaacatcaccaacgccaccactgccgccaccacggccgccactgccaccaccactgccagcaccgagggcagcaacagtgagagygaggccgagagcaccgagaacagccccaccccatcgccgctgcagaagaaggtcactgaggatctgtccaaaaccctcctgatgtacacggtgcctgccg

SEQ ID NO: 65266 - DNA, 201 bp, Homo sapiens
tgtttgatgcccctgaagctccactgccatctcgaaaggcagcgctagagactgtggaccgcctgacggagtccctggatttcactgactatgcctcccgsatcattcaccctattgttcgaacactggaccagagcccagaactgcgctccacagccatggacacgctgtcttcacttgtttttcagctggggaagaagt

SEQ ID NO: 65267 - DNA, 201 bp, Homo sapiens
ctgagtttaaggtctatttgcctcgcgtgctggacatcatccgagcggccctgcccccaaaggacttcgcccataagaggcagaaggcaatgcaggtggaygccacagtcttcacttgcatcagcatgctggctcgagcaatggggccaggcatccagcaggatatcaaggagctgctggagcccatgctggcagtgggac

SEQ ID NO: 65268 - DNA, 101 bp, Homo sapiens
sctcccggcttagaggacagcggggaaggcgggcggtggggcagggggcctgaagcggcggtaccggtgctggcggcggcagctgaggccttggccgaagc

SEQ ID NO: 65269 - DNA, 144 bp, Homo sapiens
gctcccggcttagaggacagcggggaaggcgggcggtggggcasggggcctgaagcggcggtaccggtgctggcggcggcagctgaggccttggccgaagccgcgcgaacctcagggcaagatgcttggaaccggacctgccgc

SEQ ID NO: 65270 - DNA, 201 bp, Homo sapiens
ggatggctccggactatgaccacttgactctgatgcagaaggtggaggtgtttgagcatgccgtcaataatacagctggggacgacctggccaagctgctrtggctgaaaagccccagctccgaggtgtggtttgaccgaagaaccaattatacccgttctttagcggtcatgtcaatggttgggtatattttaggcctgg

SEQ ID NO: 65271 - DNA, 201 bp, Homo sapiens
tttgactttgttaaatattttgaaatgtaaatgaaaagaactactgtatattaaaagttggtttgaaccaactttctagctgctgttgaagaatatattgwcagaaacacaaggcttgatttggttcccaggacagtgaaacatagtaataccacgtaaatcaagccattcattttggggaacagaagatccataacttta

SEQ ID NO: 65272 - DNA, 201 bp, Homo sapiens
atcatcacaccatggttgtccaggccatcaccttcatcttcaagtccctgggactcaaatgtgtgcagttcctgccccaggtcatgcccacgttccttaaygtcattcgagtctgtgatggggccatccgggaatttttgttccagcagctgggaatgttggtgtcctttgtgaagagccacatcagaccttatatggatg

SEQ ID NO: 65273 - DNA, 201 bp, Homo sapiens
cattttatagagctgtgctggcactgcatcaggacctcttctccttggcacaacagtgcattgacaaggccagggacctgctggatgctgaattaactgcratggcaggagagagttacagtcgggcatatggggccatggtttcttgccacatgctgtccgagctggaggaggttatccagtacaaacttgtccccgagc

SEQ ID NO: 65274 - DNA, 201 bp, Homo sapiens
tccctttatcgaccaactcgggcctcattggctgggttccccactgtgacacactgcacgccctcatccgggactacagggagaagaagaagatccttctyaacatcgagcatcgcatcatgttgcggatggctccggactatgaccacttgactctgatgcagaaggtggaggtgtttgagcatgccgtcaataatacag

SEQ ID NO: 65275 - DNA, 201 bp, Homo sapiens
caaaatactctgtttagagcaagggctcagaaaacagaaatactgtcatggaggtgctgaacacagggaaggtctggtacatattggaaattatgagcagracaaatactcaactaaatgcacaaagtataaagtgtagccatgtctagacaccatgttgtatcagaataatttttgtgccaataaatgacatcagaattt

SEQ ID NO: 65276 - DNA, 201 bp, Homo sapiens
tgggcagcaacggacatgagtttgttttccttctaaaaggccatgaagatctgcgccaggatgagcgtgtgatgcagctcttcggcctggttaacaccctyctggccaatgacccaacatctcttcggaaaaacctcagcatccagagatacgctgtcatccctttatcgaccaactcgggcctcattggctgggttcccc

SEQ ID NO: 65277 - DNA, 201 bp, Homo sapiens
tgttttcagtggtcaaaatactctgtttagagcaagggctcagaaaacagaaatactgtcatggaggtgctgaacacagggaaggtctggtacatattggraattatgagcagaacaaatactcaactaaatgcacaaagtataaagtgtagccatgtctagacaccatgttgtatcagaataatttttgtgccaataaat

SEQ ID NO: 65278 - DNA, 201 bp, Homo sapiens; identical to SEQ ID NO: 65264

SEQ ID NO: 65279 - DNA, 201 bp, Homo sapiens; identical to SEQ ID NO: 65265

SEQ ID NO: 65280 - DNA, 201 bp, Homo sapiens; identical to SEQ ID NO: 65266

SEQ ID NO: 65281 - DNA, 201 bp, Homo sapiens; identical to SEQ ID NO: 65267

SEQ ID NO: 65282 - DNA, 101 bp, Homo sapiens; identical to SEQ ID NO: 65268

SEQ ID NO: 65283 - DNA, 144 bp, Homo sapiens; identical to SEQ ID NO: 65269

SEQ ID NO: 65284 - DNA, 201 bp, Homo sapiens
acggtgcctgccgtccagggcttcttccgttccatctccttgtcacgaggcaacaacctccaggatacactcagagttctcaccttatggtttgattatggtcactggccagatgtcaatgaggccttagtggagggggtgaaagccatccagattgatacctggctacaggttatacctcagctcattgcaagaattgat

SEQ ID NO: 65285 - DNA, 201 bp, Homo sapiens; identical to SEQ ID NO: 65270

SEQ ID NO: 65286 - DNA, 201 bp, Homo sapiens; identical to SEQ ID NO: 65272

SEQ ID NO: 65287 - DNA, 201 bp, Homo sapiens; identical to SEQ ID NO: 65271

SEQ ID NO: 65288 - DNA, 201 bp, Homo sapiens; identical to SEQ ID NO: 65273

SEQ ID NO: 65289 - DNA, 201 bp, Homo sapiens; identical to SEQ ID NO: 65274

SEQ ID NO: 65290 - DNA, 201 bp, Homo sapiens; identical to SEQ ID NO: 65276

SEQ ID NO: 65291 - DNA, 201 bp, Homo sapiens; identical to SEQ ID NO: 65275

SEQ ID NO: 65292 - DNA, 201 bp, Homo sapiens; identical to SEQ ID NO: 65277

SEQ ID NO: 65293 - DNA, 201 bp, Homo sapiens; identical to SEQ ID NO: 65264

SEQ ID NO: 65294 - DNA, 201 bp, Homo sapiens; identical to SEQ ID NO: 65265

SEQ ID NO: 65295 - DNA, 201 bp, Homo sapiens; identical to SEQ ID NO: 65266

SEQ ID NO: 65296 - DNA, 201 bp, Homo sapiens; identical to SEQ ID NO: 65267

SEQ ID NO: 65297 - DNA, 101 bp, Homo sapiens; identical to SEQ ID NO: 65268

SEQ ID NO: 65298 - DNA, 144 bp, Homo sapiens; identical to SEQ ID NO: 65269

SEQ ID NO: 65299 - DNA, 201 bp, Homo sapiens; identical to SEQ ID NO: 65270

SEQ ID NO: 65300 - DNA, 201 bp, Homo sapiens; identical to SEQ ID NO: 65271

SEQ ID NO: 65301 - DNA, 201 bp, Homo sapiens; identical to SEQ ID NO: 65272

SEQ ID NO: 65302 - DNA, 201 bp, Homo sapiens; identical to SEQ ID NO: 65273

SEQ ID NO: 65303 - DNA, 201 bp, Homo sapiens; identical to SEQ ID NO: 65274

SEQ ID NO: 65304 - DNA, 201 bp, Homo sapiens; identical to SEQ ID NO: 65275

SEQ ID NO: 65305 - DNA, 201 bp, Homo sapiens; identical to SEQ ID NO: 65276

SEQ ID NO: 65306 - DNA, 201 bp, Homo sapiens; identical to SEQ ID NO: 65277

SEQ ID NO: 65307 - DNA, 201 bp, Homo sapiens; identical to SEQ ID NO: 65264

SEQ ID NO: 65308 - DNA, 201 bp, Homo sapiens; identical to SEQ ID NO: 65265

SEQ ID NO: 65309 - DNA, 201 bp, Homo sapiens; identical to SEQ ID NO: 65266

SEQ ID NO: 65310 - DNA, 201 bp, Homo sapiens; identical to SEQ ID NO: 65267

SEQ ID NO: 65311 - DNA, 201 bp, Homo sapiens; identical to SEQ ID NO: 65270

SEQ ID NO: 65312 - DNA, 201 bp, Homo sapiens; identical to SEQ ID NO: 65271

SEQ ID NO: 65313 - DNA, 201 bp, Homo sapiens; identical to SEQ ID NO: 65272

SEQ ID NO: 65314 - DNA, 201 bp, Homo sapiens; identical to SEQ ID NO: 65273

SEQ ID NO: 65315 - DNA, 201 bp, Homo sapiens; identical to SEQ ID NO: 65274

SEQ ID NO: 65316 - DNA, 201 bp, Homo sapiens; identical to SEQ ID NO: 65275

SEQ ID NO: 65317 - DNA, 201 bp, Homo sapiens; identical to SEQ ID NO: 65276

SEQ ID NO: 65318 - DNA, 201 bp, Homo sapiens; identical to SEQ ID NO: 65277

SEQ ID NO: 65319 - DNA, 139 bp, Homo sapiens
aatttatgttagactttttctttaatgatttcttcatatgtagttgttgtatagctgagcataggaaattaaaaagcctctttaaagatctgtactgtctygaggttgatatttaaaggataaaagcaacactattttc

SEQ ID NO: 65320 - DNA, 104 bp, Homo sapiens
gggkgggggttgcctggcggcgcagcagcgcgggaggcggcgaagggcgcaggagcatcgctcggaggggacaaggggacgccacgggccacatgtttaggagg

SEQ ID NO: 65321 - DNA, 201 bp, Homo sapiens
tagatcgtgacttcacccccagccacttcccctagaaagaaatccttggaaaagttgcatttgaaaaaatccttgcgctgacctttggggccgacggggcmgaagaagcgtgcgtgcgtttgcaagtaagagaaccaaaggtgtgtgtgcatggggggctggcggtgggggaccctccgctgccacttcgcctagctttgt

SEQ ID NO: 65322 - DNA, 201 bp, Homo sapiens
aattttttattttggaaaaataattatttattgtccaagtattaccataaaaatactttaaaaaaagattatgctgctgacaaatttatgttagactttttctttaatgatttcttcatatgtagttgttgtatagctgagcataggaaattaaaaagcctctttaaagatctgtactgtctcgaggttgatatttaaagg

SEQ ID NO: 65323 - DNA, 201 bp, Homo sapiens
atgccaagcgcctgtccacaggactttttctggtgagcgcagctctgggtctctgtgaagaggtggccatctatggcttctggcccttctctgtgaatatkcatgagcagcccatcagccaccactactatgacaacgtcttacccttttctggcttccatgccatgcccgaggaatttctccaactctggtatcttcata

SEQ ID NO: 65324 - DNA, 201 bp, Homo sapiens
tgttggggtaaaagtgttgctgattgtcaacacaaactggcttaataatattaataagaacctgtcttattaagactggctttagaaccgtaggttttttwaaaaaattattatttatttttgccctctttggggaagtgggtgggtagatttaaaaaatcccttcctgagtaataaagatacaaaatgttactgctgata

SEQ ID NO: 65325 - DNA, 104 bp, Homo sapiens; identical to SEQ ID NO: 65320

SEQ ID NO: 65326 - DNA, 201 bp, Homo sapiens
ctctggtatcttcataaaatcggtgcactgagaatgcagctggacccatgtgaagatacctcactccagcccacttcctaggaacaatggaagaagaaagkactgaaccagggtatttttgttaggttttctatgtgactccaagagggaatggtcaagttgtttcatgagtttgcatgggcccttggaaaaacaggaaag

SEQ ID NO: 65327 - DNA, 201 bp, Homo sapiens
actctggtatcttcataaaatcggtgcactgagaatgcagctggacccatgtgaagatacctcactccagcccacttcctaggaacaatggaagaagaaavgactgaaccagggtatttttgttaggttttctatgtgactccaagagggaatggtcaagttgtttcatgagtttgcatgggcccttggaaaaacaggaaa

SEQ ID NO: 65328 - DNA, 201 bp, Homo sapiens
gatccaaaagtcagttagtgacagctaatcccagcataattcggcaaaggtttcagaaccttctgtggtccagaaagacatttgtggacaacatgaaaatytataaccacagttacatctacatgcctgccttttctatgaagacaggaacagagccatctttgagggtttattatacactgtcagatgttggtgccaatc

SEQ ID NO: 65329 - DNA, 201 bp, Homo sapiens; identical to SEQ ID NO: 65321

SEQ ID NO: 65330 - DNA, 201 bp, Homo sapiens
gcacggcgtggaggaggaaccagaccgcggccagagcgttcaggaaacaaatggaagactgctgcgaccctgcccatctctttgctatgactaaaatgaaytcccctatggggaagagcatgtggtatgacggggagtttttatactcattcaccattgacaattcaacttactctctcttcccacaggcaaccccattcc

SEQ ID NO: 65331 - DNA, 201 bp, Homo sapiens
ctgagccttccatgtatcctcaatgcccggggattaaccagcgttatcaaccagaagctaaaggatgatgaggttgctcagctcaagaaaagtgcagataycctgtgggacatccagaaggacctaaaagacctgtgactagtgagctctaggctgtagaaatttaaaaactacaatgtgattaactcgagcctttagttt

SEQ ID NO: 65332 - DNA, 201 bp, Homo sapiens
agacctgtgactagtgagctctaggctgtagaaatttaaaaactacaatgtgattaactcgagcctttagttttcatccatgtacatggatcacagtttgytttgatcttcttcaatatgtgaatttgggctcacagaatcaaagcctatgcttggtttaatgcttgcaatctgagctcttgaacaaataaaattaactat

SEQ ID NO: 65333 - DNA, 201 bp, Homo sapiens
attgaatccatgttgaaaaatctatccaggattcatcccgtgtcaacaatggtaaaggggatgtatggcattgagaatgaagtcttcctgagccttccatrtatcctcaatgcccggggattaaccagcgttatcaaccagaagctaaaggatgatgaggttgctcagctcaagaaaagtgcagataccctgtgggacatc

SEQ ID NO: 65334 - DNA, 201 bp, Homo sapiens
ttttggaagataagcttaaaggagaaatgatggatctgcagcatgggagcttatttcttcagacacctaaaattgtggcagataaagattattctgtgacygccaattctaagattgtagtggtaactgcaggagtccgtcagcaagaaggggagagtcggctcaatctggtgcagagaaatgttaatgtcttcaaattca

SEQ ID NO: 65335 - DNA, 201 bp, Homo sapiens
ttccaacccagtggacattcttacgtatgttacctggaaactaagtggattacccaaacaccgcgtgattggaagtggatgtaatctggattctgctagakttcgctaccttatggctgaaaaacttggcattcatcccagcagctgccatggatggattttgggggaacatggcgactcaagtgtggctgtgtggagtgg

SEQ ID NO: 65336 - DNA, 201 bp, Homo sapiens
aacccagtggacattcttacgtatgttacctggaaactaagtggattacccaaacaccgcgtgattggaagtggatgtaatctggattctgctagatttcvctaccttatggctgaaaaacttggcattcatcccagcagctgccatggatggattttgggggaacatggcgactcaagtgtggctgtgtggagtggtgtg

SEQ ID NO: 65337 - DNA, 201 bp, Homo sapiens
ccttccatgtatcctcaatgcccggggattaaccagcgttatcaaccagaagctaaaggatgatgaggttgctcagctcaagaaaagtgcagataccctgygggacatccagaaggacctaaaagacctgtgactagtgagctctaggctgtagaaatttaaaaactacaatgtgattaactcgagcctttagttttcatc

SEQ ID NO: 65338 - DNA, 201 bp, Homo sapiens
tcagacacctaaaattgtggcagataaagattattctgtgaccgccaattctaagattgtagtggtaactgcaggagtccgtcagcaagaaggggagagtyggctcaatctggtgcagagaaatgttaatgtcttcaaattcattattcctcagatcgtcaagtacagtcctgattgcatcataattgtggtttccaaccc

SEQ ID NO: 65339 - DNA, 201 bp, Homo sapiens
ggacattcttacgtatgttacctggaaactaagtggattacccaaacaccgcgtgattggaagtggatgtaatctggattctgctagatttcgctaccttwtggctgaaaaacttggcattcatcccagcagctgccatggatggattttgggggaacatggcgactcaagtgtggctgtgtggagtggtgtgaatgtggc

SEQ ID NO: 65340 - DNA, 201 bp, Homo sapiens
aaccagaagctaaaggatgatgaggttgctcagctcaagaaaagtgcagataccctgtgggacatccagaaggacctaaaagacctgtgactagtgagctytaggctgtagaaatttaaaaactacaatgtgattaactcgagcctttagttttcatccatgtacatggatcacagtttgctttgatcttcttcaatatgt

SEQ ID NO: 65341 - DNA, 201 bp, Homo sapiens
cggaggagacgcacgcagctgactttgtcttctccgcacgactgttacagaggtctccagagccttctctctcctgtgcaaaatggcaactcttaaggaaraactcattgcaccagttgcggaagaagaggcaacagttccaaacaataagatcactgtagtgggtgttggacaagttggtatggcgtgtgctatcagcat

SEQ ID NO: 65342 - DNA, 201 bp, Homo sapiens
gaaatgttaatgtcttcaaattcattattcctcagatcgtcaagtacagtcctgattgcatcataattgtggtttccaacccagtggacattcttacgtakgttacctggaaactaagtggattacccaaacaccgcgtgattggaagtggatgtaatctggattctgctagatttcgctaccttatggctgaaaaacttg

SEQ ID NO: 65343 - DNA, 201 bp, Homo sapiens
ctgagccttccatgtatcctcaatgcccggggattaaccagcgttatcaaccagaagctaaaggatgatgaggttgctcagctcaagaaaagtgcagataycctgtgggacatccagaaggacctaaaagacctgtgactagtgattttcatccatgtacatggatcacagtttgctttgatcttcttcaatatgtgaatt

SEQ ID NO: 65344 - DNA, 201 bp, Homo sapiens
gctcagctcaagaaaagtgcagataccctgtgggacatccagaaggacctaaaagacctgtgactagtgattttcatccatgtacatggatcacagtttgytttgatcttcttcaatatgtgaatttgggctcacagaatcaaagcctatgcttggtttaatgcttgcaatctgagctcttgaacaaataaaattaactat

SEQ ID NO: 65345 - DNA, 201 bp, Homo sapiens; identical to SEQ ID NO: 65333

SEQ ID NO: 65346 - DNA, 201 bp, Homo sapiens; identical to SEQ ID NO: 65334

SEQ ID NO: 65347 - DNA, 201 bp, Homo sapiens; identical to SEQ ID NO: 65335

SEQ ID NO: 65348 - DNA, 201 bp, Homo sapiens; identical to SEQ ID NO: 65336

SEQ ID NO: 65349 - DNA, 201 bp, Homo sapiens
ccttccatgtatcctcaatgcccggggattaaccagcgttatcaaccagaagctaaaggatgatgaggttgctcagctcaagaaaagtgcagataccctgygggacatccagaaggacctaaaagacctgtgactagtgattttcatccatgtacatggatcacagtttgctttgatcttcttcaatatgtgaatttgggc

SEQ ID NO: 65350 - DNA, 201 bp, Homo sapiens; identical to SEQ ID NO: 65338

SEQ ID NO: 65351 - DNA, 201 bp, Homo sapiens; identical to SEQ ID NO: 65339

SEQ ID NO: 65352 - DNA, 201 bp, Homo sapiens; identical to SEQ ID NO: 65341

SEQ ID NO: 65353 - DNA, 201 bp, Homo sapiens; identical to SEQ ID NO: 65342

SEQ ID NO: 65354 - DNA, 135 bp, Homo sapiens
aagttcactttgtattgtaccctgtaaaactgtgtgtttgtgtgctttcaaagatgttgggattttatttatctggggacagtgtgtatggtaagacatgmccttctattaataaaactacatttctcaaacttg

SEQ ID NO: 65355 - DNA, 201 bp, Homo sapiens
tcttcagccagtttgcttttatttttgattaagtaaattccatgttgtaatgttacagagagtgtgatttggtttgtgatatatatatattgtgctctacytttctctttacgcaagataattatttagagactgattacagtctttctcagatttttagtaaatgcaagtaagaacatcatcaaagttcactttgtattg

SEQ ID NO: 65356 - DNA, 201 bp, Homo sapiens
gtgtggatatagatgtggatattgattggcctattgcagagcaaagagtattaagatatggctattttggcaaagagaagcttaaggaaataaaacttttkgtttgcaatattgatggatgtctcaccaatggccacatttatgtatcaggagaccaaaaagaaataatatcttatgatgtaaaagatgctattgggataa

SEQ ID NO: 65357 - DNA, 201 bp, Homo sapiens
aagactgggatggagaattatatgaaaatggctcattttattttgctaaaagacatttgatagagatgggttacttgcagggtggaaaaatggcatactaygaaatgcgagctgaacatagtgtggatatagatgtggatattgattggcctattgcagagcaaagagtattaagatatggctattttggcaaagagaagc

SEQ ID NO: 65358 - DNA, 201 bp, Homo sapiens
gaaaaggttaataattcatgccaaaaatagaaattagcgtaatattgagaaaaaaatgatacagccttcttcagccagtttgcttttatttttgattaagkaaattccatgttgtaatgttacagagagtgtgatttggtttgtgatatatatatattgtgctctacttttctctttacgcaagataattatttagagact

SEQ ID NO: 65359 - DNA, 108 bp, Homo sapiens
aagttcactttgtattgtaccctgtaaaactgtgtgtttgtgtgctttcaaagatgttgggattttatttatctggggacagtgtgtatggtaagacatgmccttcta

SEQ ID NO: 65360 - DNA, 201 bp, Homo sapiens
ctactaatggaaaaggttaataattcatgccaaaaatagaaattagctaatgttacagagagtgtgatttggtttgtgatatatatatattgtgctctacytttctctttacgcaagataattatttagagactgattacagtctttctcagatttttagtaaatgcaagtaagaacatcatcaaagttcactttgtattg

SEQ ID NO: 65361 - DNA, 201 bp, Homo sapiens; identical to SEQ ID NO: 65356

SEQ ID NO: 65362 - DNA, 201 bp, Homo sapiens; identical to SEQ ID NO: 65357

SEQ ID NO: 65363 - DNA, 201 bp, Homo sapiens
aagcggggccgtgcgtcgccggggcttcgccttcgctcgcgtgacctccgccgtcctccccaaccctcgtcctctggccgcgcctgcggccgcacgcccarcgcccctcgcctaacctcgcgcccgggccgcgcctcctcctcctcctgctccccgccgcttccgtttctcgagggaaaggctgctgcctcctgctctgtc

SEQ ID NO: 65364 - DNA, 201 bp, Homo sapiens
agcagccgtggccaagctgaccccagagcccttcccttcctggccctccctctgaatcatcgcgctccacttgtgacgtcgcggacgcccggctcgggcargcgtggggggcccgcgcgtcccgggagccccgaggcggcagcgcgcgtttccacgccgcggtcccgcgggaaagccgggggcggcggcctggctgaggcc

SEQ ID NO: 65365 - DNA, 201 bp, Homo sapiens
caggggttcccctgatgggagtcatcaatcaaccttttgtgtcacgagatccaaacaccctcaggtggaaaggacagtgctattggggcctttcttacatrgggaccaacatgcattcactacagctcaccatctctagaagaaacggcagtgaaacacacactggaaacaccggctctgaggcagcattctcccccagtt

SEQ ID NO: 65366 - DNA, 201 bp, Homo sapiens
agtttccaggcttggaaaaaaatatttttggagaagaatccaatgagtttactaatgactggggggaaaagattaccttgaggttgtgttcaacagaggargaaacagcagagcttcttagcaaagtcctcaatggtaacaaggtggcatctgaagcattagccagggttgttcatcaggatgttgcctttactgacccaa

SEQ ID NO: 65367 - DNA, 201 bp, Homo sapiens
caagtttccaggcttggaaaaaaatatttttggagaagaatccaatgagtttactaatgactggggggaaaagattaccttgaggttgtgttcaacagagraggaaacagcagagcttcttagcaaagtcctcaatggtaacaaggtggcatctgaagcattagccagggttgttcatcaggatgttgcctttactgaccc

SEQ ID NO: 65368 - DNA, 201 bp, Homo sapiens
tgagtttactaatgactggggggaaaagattaccttgaggttgtgttcaacagaggaggaaacagcagagcttcttagcaaagtcctcaatggtaacaagrtggcatctgaagcattagccagggttgttcatcaggatgttgcctttactgacccaactctggattccacagagatcaatgttccacaggacattttggg

SEQ ID NO: 65369 - DNA, 201 bp, Homo sapiens
ggttcccctgatgggagtcatcaatcaaccttttgtgtcacgagatccaaacaccctcaggtggaaaggacagtgctattggggcctttcttacatggggrccaacatgcattcactacagctcaccatctctagaagaaacggcagtgaaacacacactggaaacaccggctctgaggcagcattctcccccagtttttc

SEQ ID NO: 65370 - DNA, 113 bp, Homo sapiens
ttaatttcaataaatgacattcatgcagcaattatattggtgtatgaaattcttacagtgaatattgtgctgttagtgctgcttgaaacatttcaataaartattgaccagga

SEQ ID NO: 65371 - DNA, 201 bp, Homo sapiens
aaatgtcagatatcctccgggagctgctctgtgtctctgagaaggctgctaacattgcccgggcgtgcagacagcaggaagccctcttccagctgctgatygaagaaaagaaagagggagaaaagaacaagaagtttgcagttgacttcaagacgctggctgatgtactggtacaggaagttataaaacagaatatggaga

SEQ ID NO: 65372 - DNA, 201 bp, Homo sapiens
tgccatactgcgggccatgggtgggggaatagtagacttgaaagaatgcttagaaagaaatccagaaacagggcttgatttgccacagttggtgtaccacrtggaaaatgagggtgctgctggggtggatcggtgggccaacaagggaggactcattgcatacagatccaggaagcggctggagacattcctgagcctcct

SEQ ID NO: 65373 - DNA, 201 bp, Homo sapiens
tggttataagagcctatgtgttgtccaaggcctcgttgacatttacatcttttcagaagataccacattcaaatgggactcttgtgctgctcatgccatamtgcgggccatgggtgggggaatagtagacttgaaagaatgcttagaaagaaatccagaaacagggcttgatttgccacagttggtgtaccacgtggaaaa

SEQ ID NO: 65374 - DNA, 201 bp, Homo sapiens
agtttactaatgactggggggaaaagattaccttgaggttgtgttcaacagaggaggaaacagcagagcttcttagcaaagtcctcaatggtaacaaggtrgcatctgaagcattagccagggttgttcatcaggatgttgcctttactgacccaactctggattccacagagatcaatgttccacaggacattttgggaa

SEQ ID NO: 65375 - DNA, 201 bp, Homo sapiens
ttgcccgggcgtgcagacagcaggaagccctcttccagctgctgatcgaagaaaagaaagagggagaaaagaacaagaagtttgcagttgacttcaagackctggctgatgtactggtacaggaagttataaaacagaatatggagaacaagtttccaggcttggaaaaaaatatttttggagaagaatccaatgagttta

SEQ ID NO: 65376 - DNA, 201 bp, Homo sapiens
gcgcctcctcctcctcctgctccccgccgcttccgtttctcgagggaaaggctgctgcctcctgctctgtcctcatccccggcttagctgacggcccagasggtgggtgccaattccaccagcagctgcaactgaaaagcaaggttcagaaatgtcagatatcctccgggagctgctctgtgtctctgagaaggctgctaa

SEQ ID NO: 65377 - DNA, 118 bp, Homo sapiens
taatgttaatttcaataaatgacattcatgcagcaattatattggtgtatgaaattcttacagtgaatattgtgctgttagtgctgcttgaaacatttcartaaaatattgaccagga

SEQ ID NO: 65378 - DNA, 201 bp, Homo sapiens
ggaaacagcagccgtggccaagctgaccccagagcccttcccttcctggccctccctctgaatcatcgcgctccacttgtgacgtcgcggacgcccggctygggcaggcgtggggggcccgcgcgtcccgggagccccgaggcggcagcgcgcgtttccacgccgcggtcccgcgggaaagccgggggcggcggcctggct

SEQ ID NO: 65379 - DNA, 201 bp, Homo sapiens
ttataagagcctatgtgttgtccaaggcctcgttgacatttacatcttttcagaagataccacattcaaatgggactcttgtgctgctcatgccatactgmgggccatgggtgggggaatagtagacttgaaagaatgcttagaaagaaatccagaaacagggcttgatttgccacagttggtgtaccacgtggaaaatga

SEQ ID NO: 65380 - DNA, 201 bp, Homo sapiens
gcgtgacctccgccgtcctccccaaccctcgtcctctggccgcgcctgcggccgcacgcccagcgcccctcgcctaacctcgcgcccgggccgcgcctcckcctcctcctgctccccgccgcttccgtttctcgagggaaaggctgctgcctcctgctctgtcctcatccccggcttagctgacggcccagagggtgggtg

SEQ ID NO: 65381 - DNA, 180 bp, Homo sapiens
cgtttctcgagggaaaggctgctgcctcctgctctgtcctcatccccggcttagggtgaaagaaagcactacttcaataytgctgctaagcatatgatcattctaagctgacggcccagagggtgggtgccaattccaccagcagctgcaactgaaaagcaaggttcagaaatgtcagat

SEQ ID NO: 65382 - DNA, 201 bp, Homo sapiens; identical to SEQ ID NO: 65366

SEQ ID NO: 65383 - DNA, 201 bp, Homo sapiens; identical to SEQ ID NO: 65369

SEQ ID NO: 65384 - DNA, 113 bp, Homo sapiens; identical to SEQ ID NO: 65370

SEQ ID NO: 65385 - DNA, 201 bp, Homo sapiens; identical to SEQ ID NO: 65371

SEQ ID NO: 65386 - DNA, 201 bp, Homo sapiens; identical to SEQ ID NO: 65372

SEQ ID NO: 65387 - DNA, 201 bp, Homo sapiens; identical to SEQ ID NO: 65379

SEQ ID NO: 65388 - DNA, 201 bp, Homo sapiens; identical to SEQ ID NO: 65365

SEQ ID NO: 65389 - DNA, 201 bp, Homo sapiens; identical to SEQ ID NO: 65367

SEQ ID NO: 65390 - DNA, 201 bp, Homo sapiens; identical to SEQ ID NO: 65368

SEQ ID NO: 65391 - DNA, 194 bp, Homo sapiens
cgtttctcgagggaaaggctgctgcctcctgctctgtcctcatccccggcttagggtgaaagaaagcactacttcaatattgctgctaagcatrtgatcattctaagctgacggcccagagggtgggtgccaattccaccagcagctgcaactgaaaagcaaggttcagaaatgtcagatatcctccgggagct

SEQ ID NO: 65392 - DNA, 201 bp, Homo sapiens; identical to SEQ ID NO: 65373

SEQ ID NO: 65393 - DNA, 118 bp, Homo sapiens; identical to SEQ ID NO: 65377

SEQ ID NO: 65394 - DNA, 201 bp, Homo sapiens; identical to SEQ ID NO: 65374

SEQ ID NO: 65395 - DNA, 201 bp, Homo sapiens; identical to SEQ ID NO: 65375

SEQ ID NO: 65396 - DNA, 201 bp, Homo sapiens
gctgcctcctgctctgtcctcatccccggcttagggtgaaagaaagcactacttcaatattgctgctaagcatatgatcattctaagctgacggcccagasggtgggtgccaattccaccagcagctgcaactgaaaagcaaggttcagaaatgtcagatatcctccgggagctgctctgtgtctctgagaaggctgctaa

SEQ ID NO: 65397 - DNA, 192 bp, Homo sapiens
cgtttctcgagggaaaggctgctgcctcctgctctgtcctcatccccggcttagggtgaaagaaagcactacttcaatattgctgctaagcmtatgatcattctaagctgacggcccagagggtgggtgccaattccaccagcagctgcaactgaaaagcaaggttcagaaatgtcagatatcctccgggag

SEQ ID NO: 65398 - DNA, 201 bp, Homo sapiens
gtttaatgcattcaaaaggactaataccatactgcaccatttgagaatgtccaagcacacagatgcagcagaagaggtgctattggaaaaaaaaggttgcrcgggagtcataacactaaacagaccaaagttcctcaatgcactgactcttaatatgattcggcagatttatccacagctaaagaagtgggaacaagatcc

SEQ ID NO: 65399 - DNA, 201 bp, Homo sapiens
atggtaaagcctacaaagcctaattatttactgtctggtttttgtcagaaaaaagtttgtcaatccttgttttagaagatggaaaaatgtgaagatctttrgagattctcttgagtggtatatctaattgaaatgggatcttcgtttggcttgtatgttgatgaaatcaacttaggtatacaatataaaaaataaagaccc

SEQ ID NO: 65400 - DNA, 201 bp, Homo sapiens
ttgctacacactttgtagattctgaaaagttggccatgttagaggaagatttgttagccttgaaatctccttcaaaagaaaatattgcatctgtcttagamaattaccatacagagtctaagattgatcgagacaagtcttttatacttgaggaacacatggacaaaataaacagttgtttttcagccaatactgtggaag

SEQ ID NO: 65401 - DNA, 174 bp, Homo sapiens
ggccaagggcgccgcgggactcacgagctcccctccgcgctggctgcagcggcgatgccgggcatgcctggccrggcccggccgggggcggcctcgctgccggggcagggacctcgcaggccggcgcgcagaggcgaggaaccctcccggcgccatcgactcacctacccgcgg

SEQ ID NO: 65402 - DNA, 201 bp, Homo sapiens
aagatggttcatcttttgccctagagcaattgaaggtaattaataaaatgtctccaacatctctaaagatcacactaaggcaactcatggaggggtcttcraagaccttgcaagaagtactaactatggagtatcggctaagtcaagcttgtatgagaggtcatgactttcatgaaggcgttagagctgttttaattgata

SEQ ID NO: 65403 - DNA, 201 bp, Homo sapiens
aactcatggaggggtcttcaaagaccttgcaagaagtactaactatggagtatcggctaagtcaagcttgtatgagaggtcatgactttcatgaaggcgtwagagctgttttaattgataaagaccagagtccaaaatggaaaccagctgatctaaaagaagttactgaggaagatttgaataatcactttaagtctttgg

SEQ ID NO: 65404 - DNA, 201 bp, Homo sapiens
gtgggccaaatccagcctgctgcctgtttttatataccctgtaagctaagaatggtttccgcatttttaaatggttgggaaaagaaatcaaagactaatawttcatgacgtgaaaattatcagaattcacaaataaagctttattggaactagctatactcatctgtttatatattatctgtggctgctttgaaatgagta

SEQ ID NO: 65405 - DNA, 201 bp, Homo sapiens
gggcccggccgggggcggcctcgctgccggggcagggacctcgcaggccggcgcgcagaggcgaggaaccctcccggcgccatcgactcacctacccgcgragaggcgacggcgcgcgccgctcaccagcccgggccccagatccaaggaggaggggcagcggcgcggggaccctgtggtttaatgcattcaaaaggacta

SEQ ID NO: 65406 - DNA, 201 bp, Homo sapiens
aacactaaacagaccaaagttcctcaatgcactgactcttaatatgattcggcagatttatccacagctaaagaagtgggaacaagatcctgaaactttcstgatcattataaagggagcaggaggaaaggctttctgtgccgggggtgatatcagagtgatctcggaagctgaaaaggcaaaacagaagatagctccagt

SEQ ID NO: 65407 - DNA, 201 bp, Homo sapiens
tgtcagaaaaaagtttgtcaatccttgttttagaagatggaaaaatgtgaagatctttggagattctcttgagtggtatatctaattgaaatgggatcttygtttggcttgtatgttgatgaaatcaacttaggtatacaatataaaaaataaagaccctgaaaattgttttggatactgtgttaatgcctcatagaattt

SEQ ID NO: 65408 - DNA, 158 bp, Homo sapiens
atctgtgcccggcggcgcaggacggcggtgggcggggctcacgcgaggcgctggaacrgtccgggagattctcgctctgctgctttagcttcggagtgtttggcgatggggcagcgcgagatgtggaggctcatgtcgaggtttaatgcattcaaaag

SEQ ID NO: 65409 - DNA, 201 bp, Homo sapiens
gcccggcggcgcaggacggcggtgggcggggctcacgcgaggcgctggaacggtccgggagattctcgctctgctgctttagcttcggagtgtttggcgayggggcagcgcgagatgtggaggctcatgtcgaggtttaatgcattcaaaaggactaataccatactgcaccatttgagaatgtccaagcacacagatgca

SEQ ID NO: 65410 - DNA, 201 bp, Homo sapiens; identical to SEQ ID NO: 65398

SEQ ID NO: 65411 - DNA, 133 bp, Homo sapiens
atctgtgcccggcggcgcaggacggcggtgggyggggctcacgcgaggcgctggaacggtccgggagattctcgctctgctgctttagcttcggagtgtttggcgatggggcagcgcgagatgtggaggctca

SEQ ID NO: 65412 - DNA, 201 bp, Homo sapiens; identical to SEQ ID NO: 65400

SEQ ID NO: 65413 - DNA, 201 bp, Homo sapiens; identical to SEQ ID NO: 65402

SEQ ID NO: 65414 - DNA, 201 bp, Homo sapiens; identical to SEQ ID NO: 65403

SEQ ID NO: 65415 - DNA, 178 bp, Homo sapiens
ggcctgaaaccagcccaactcagtggtcataatcttctgggcctaccgaagagcaaaagcctacttctagttcttccagttgccagttcaagggctttatytgtcacttcctttgggaacaggtagagtgctttgatttagaatgatggcaataaatgagaaaccaatttgaaattgg

SEQ ID NO: 65416 - DNA, 201 bp, Homo sapiens; identical to SEQ ID NO: 65406

SEQ ID NO: 65417 - DNA, 158 bp, Homo sapiens; identical to SEQ ID NO: 65408

SEQ ID NO: 65418 - DNA, 201 bp, Homo sapiens; identical to SEQ ID NO: 65409

SEQ ID NO: 65419 - DNA, 201 bp, Homo sapiens; identical to SEQ ID NO: 65398

SEQ ID NO: 65420 - DNA, 133 bp, Homo sapiens; identical to SEQ ID NO: 65411

SEQ ID NO: 65421 - DNA, 201 bp, Homo sapiens; identical to SEQ ID NO: 65399

SEQ ID NO: 65422 - DNA, 201 bp, Homo sapiens; identical to SEQ ID NO: 65400

SEQ ID NO: 65423 - DNA, 201 bp, Homo sapiens; identical to SEQ ID NO: 65402

SEQ ID NO: 65424 - DNA, 201 bp, Homo sapiens; identical to SEQ ID NO: 65403

SEQ ID NO: 65425 - DNA, 201 bp, Homo sapiens; identical to SEQ ID NO: 65404

SEQ ID NO: 65426 - DNA, 201 bp, Homo sapiens; identical to SEQ ID NO: 65406

SEQ ID NO: 65427 - DNA, 201 bp, Homo sapiens; identical to SEQ ID NO: 65407

SEQ ID NO: 65428 - DNA, 158 bp, Homo sapiens; identical to SEQ ID NO: 65408

SEQ ID NO: 65429 - DNA, 201 bp, Homo sapiens; identical to SEQ ID NO: 65409

SEQ ID NO: 65430 - DNA, 201 bp, Homo sapiens; identical to SEQ ID NO: 65398

SEQ ID NO: 65431 - DNA, 133 bp, Homo sapiens; identical to SEQ ID NO: 65411

SEQ ID NO: 65432 - DNA, 201 bp, Homo sapiens; identical to SEQ ID NO: 65399

SEQ ID NO: 65433 - DNA, 201 bp, Homo sapiens; identical to SEQ ID NO: 65400

SEQ ID NO: 65434 - DNA, 201 bp, Homo sapiens
atactgtggaagaaattattgaaaacttacagcaagatggttcatcttttgccctagagcaattgaagatcacactaaggcaactcatggaggggtcttcraagaccttgcaagaagtactaactatggagtatcggctaagtcaagcttgtatgttttaattgataaagaccagagtccaaaatggaaaccagctgatct

SEQ ID NO: 65435 - DNA, 201 bp, Homo sapiens; identical to SEQ ID NO: 65404

SEQ ID NO: 65436 - DNA, 201 bp, Homo sapiens; identical to SEQ ID NO: 65406

SEQ ID NO: 65437 - DNA, 201 bp, Homo sapiens; identical to SEQ ID NO: 65407

SEQ ID NO: 65438 - DNA, 201 bp, Homo sapiens; identical to SEQ ID NO: 65399

SEQ ID NO: 65439 - DNA, 201 bp, Homo sapiens; identical to SEQ ID NO: 65400

SEQ ID NO: 65440 - DNA, 174 bp, Homo sapiens; identical to SEQ ID NO: 65401

SEQ ID NO: 65441 - DNA, 201 bp, Homo sapiens; identical to SEQ ID NO: 65402

SEQ ID NO: 65442 - DNA, 201 bp, Homo sapiens; identical to SEQ ID NO: 65403

SEQ ID NO: 65443 - DNA, 201 bp, Homo sapiens; identical to SEQ ID NO: 65404

SEQ ID NO: 65444 - DNA, 201 bp, Homo sapiens; identical to SEQ ID NO: 65405

SEQ ID NO: 65445 - DNA, 201 bp, Homo sapiens
aaggactaataccatactgcaccatttgagaatgtccaagcacacagatgcagcagaagaggtgctattggagaagtgggaacaagatcctgaaactttcstgatcattataaagggagcaggaggaaaggctttctgtgccgggggtgatatcagagtgatctcggaagctgaaaaggcaaaacagaagatagctccagt

SEQ ID NO: 65446 - DNA, 201 bp, Homo sapiens; identical to SEQ ID NO: 65407

SEQ ID NO: 65447 - DNA, 201 bp, Homo sapiens
ctcttcagttggcacccaaacatctggattggcaaatcagtggcaagaagttccagcatctggacttttcagaattgatcttaagtctactgtcatttccrgatgcattattttacaactgtatccttggaaatatatttctagggagaatattattgaagaaaatgttaatagcctgagtcaaatttcagcagacttacc

SEQ ID NO: 65448 - DNA, 201 bp, Homo sapiens
agcagacttaccagcatttgtatcagtggtagcaaatgaagccaaactgtatcttgaaaaacctgttgttcctttaaatatgatgttgccacaagctgcaytggagactcattgcagtaatatttccaatgtgccacctacaagagagatacttcaagtctttcttactgatgtacacatgaaggaagtaattcagcagtt

SEQ ID NO: 65449 - DNA, 201 bp, Homo sapiens
caacctgatttcacataacaatgtgtggcatttgttgttctgtaaacttttctgctgagcatttcagtcaagatttaaaagaggacttactatataatctwaaacagcggggacccaatagtagtaaacaattgttaaagtctgatgttaactaccagtgtttattttctgctcacgtcctacacttgaggggtgttttga

SEQ ID NO: 65450 - DNA, 151 bp, Homo sapiens
ggtgagcgcggctggaagcgcgcatgcgctgtggctaatgccgtaggctcyttcagggctgagccatcccgcgtgtcttgcgctcggtggaaatgcccagccgagggacgcgaccagaggacagctctgtgctgatccccaccgacaattc

SEQ ID NO: 65451 - DNA, 170 bp, Homo sapiens
ggtgagcgcggctggaagcgcgcatgcgctgtggctaatgccgtaggctccttcagggctgagccatccygcgtgtcttgcgctcggtggaaatgcccagccgagggacgcgaccagaggacagctctgtgctgatccccaccgacaattcgaccccacacaaggaggat

SEQ ID NO: 65452 - DNA, 201 bp, Homo sapiens
ggaagggcgggactaaaggaactacaagctgttagcccttcccgaatttggaattttgttgaaattaatgtttctatggaagaactgcagaaattaagaaraactcgaatatgtcacttaattcggccattggatacagttttggatgatagcattggctgtgcagtctggtttgcttctagaggaattggttggttagtg

SEQ ID NO: 65453 - DNA, 201 bp, Homo sapiens
acagagcttctaaaaccatggaatttccttagtgatagggaatatcttttgttgttcataataagccccttttgatcacacctgagtttatgctaatgcgktgacttagggtgaggtctctaaatagcctttaacacctgcagcttgggaggccaaggcagagggatctcttgagtccaggagtttgagaacagcctgggc

SEQ ID NO: 65454 - DNA, 201 bp, Homo sapiens
aaaaaattaatgaaaaggcatctgataaatgtggacggctccaaatcatgtccttagaaaatctttctattgaaaaggagactaaattgtaatgtgattcmcaatgtaacaatataaaaataagtttttatataattatataaaagtaagatactctgctgctttactattgtataatatagtagttttaaagttcatttg

SEQ ID NO: 65455 - DNA, 201 bp, Homo sapiens
gagactaaattgtaatgtgattcacaatgtaacaatataaaaataagtttttatataattatataaaagtaagatactctgctgctttactattgtataayatagtagttttaaagttcatttggttgaattttcattttttcctgtcacagagcttctaaaaccatggaatttccttagtgatagggaatatcttttgtt

SEQ ID NO: 65456 - DNA, 201 bp, Homo sapiens
agagtttctgcctctcttcagttggcacccaaacatctggattggcaaatcagtggcaagaagttccagcatctggacttttcagaattgatcttaagtcyactgtcatttccagatgcattattttacaactgtatccttggaaatatatttctagggagaatattattgaagaaaatgttaatagcctgagtcaaattt

SEQ ID NO: 65457 - DNA, 201 bp, Homo sapiens
ctgttttctgggggcattgattccatggttattgcaacccttgctgaccgtcatattcctttagatgaaccaattgatcttcttaatgtagctttcatagstgaagaaaagaccatgccaactacctttaacagagaagggaataaacagaaaaataaatgtgaaataccttcagaagaattctctaaagatgttgctgct

SEQ ID NO: 65458 - DNA, 201 bp, Homo sapiens
gtcagtgtaccagatcgaatcacaggaagggcgggactaaaggaactacaagctgttagcccttcccgaatttggaattttgttgaaattaatgtttctayggaagaactgcagaaattaagaagaactcgaatatgtcacttaattcggccattggatacagttttggatgatagcattggctgtgcagtctggtttgct

SEQ ID NO: 65459 - DNA, 201 bp, Homo sapiens; identical to SEQ ID NO: 65447

SEQ ID NO: 65460 - DNA, 201 bp, Homo sapiens; identical to SEQ ID NO: 65448

SEQ ID NO: 65461 - DNA, 201 bp, Homo sapiens; identical to SEQ ID NO: 65449

SEQ ID NO: 65462 - DNA, 160 bp, Homo sapiens
aaaagaaagggtgagcgcggctggaagcgcgcatgcgctgtggctaatgccgtaggctcyttcagggctgagccatcccgcgtgtcttgcgctcggtggaaatgcccagccgagggacgcgaccagaggacagctctgtgctgatccccaccgacaattc

SEQ ID NO: 65463 - DNA, 179 bp, Homo sapiens
aaaagaaagggtgagcgcggctggaagcgcgcatgcgctgtggctaatgccgtaggctccttcagggctgagccatccygcgtgtcttgcgctcggtggaaatgcccagccgagggacgcgaccagaggacagctctgtgctgatccccaccgacaattcgaccccacacaaggaggat

SEQ ID NO: 65464 - DNA, 201 bp, Homo sapiens; identical to SEQ ID NO: 65452

SEQ ID NO: 65465 - DNA, 201 bp, Homo sapiens; identical to SEQ ID NO: 65453

SEQ ID NO: 65466 - DNA, 201 bp, Homo sapiens; identical to SEQ ID NO: 65454

SEQ ID NO: 65467 - DNA, 201 bp, Homo sapiens; identical to SEQ ID NO: 65455

SEQ ID NO: 65468 - DNA, 201 bp, Homo sapiens; identical to SEQ ID NO: 65456

SEQ ID NO: 65469 - DNA, 201 bp, Homo sapiens; identical to SEQ ID NO: 65457

SEQ ID NO: 65470 - DNA, 201 bp, Homo sapiens; identical to SEQ ID NO: 65458

SEQ ID NO: 65471 - DNA, 201 bp, Homo sapiens; identical to SEQ ID NO: 65447

SEQ ID NO: 65472 - DNA, 201 bp, Homo sapiens; identical to SEQ ID NO: 65448

SEQ ID NO: 65473 - DNA, 201 bp, Homo sapiens; identical to SEQ ID NO: 65449

SEQ ID NO: 65474 - DNA, 160 bp, Homo sapiens; identical to SEQ ID NO: 65462

SEQ ID NO: 65475 - DNA, 179 bp, Homo sapiens; identical to SEQ ID NO: 65463

SEQ ID NO: 65476 - DNA, 201 bp, Homo sapiens; identical to SEQ ID NO: 65452

SEQ ID NO: 65477 - DNA, 201 bp, Homo sapiens; identical to SEQ ID NO: 65453

SEQ ID NO: 65478 - DNA, 201 bp, Homo sapiens; identical to SEQ ID NO: 65454

SEQ ID NO: 65479 - DNA, 201 bp, Homo sapiens; identical to SEQ ID NO: 65455

SEQ ID NO: 65480 - DNA, 201 bp, Homo sapiens; identical to SEQ ID NO: 65456

SEQ ID NO: 65481 - DNA, 201 bp, Homo sapiens; identical to SEQ ID NO: 65457

SEQ ID NO: 65482 - DNA, 201 bp, Homo sapiens; identical to SEQ ID NO: 65458

SEQ ID NO: 65483 - DNA, 201 bp, Homo sapiens
ctacaccctggcgttggctttcaaagaacagatttgcctccaggtcccagtgaatgaaaacgacatgaaggtagatgaagtcctttacgaagactcgtcarcagcttaaatctggattactacagccaaataatcagtgttttatatgagagtaaagcaaagtatgtgtatttttcccttgtcaaaaattagttgaaattg

SEQ ID NO: 65484 - DNA, 201 bp, Homo sapiens
ggtctaacacgggacttttagtttgcgaagggcctagatagggagagaggtaacatgaatctggacagggagggagatactatagaaaggagaacactgcmtactttgcaagccagtgacctgccttttgaggggacattggacgggggccgggggcgggggttgggtttgagctacagtcatgaacttttggcgtctact

SEQ ID NO: 65485 - DNA, 201 bp, Homo sapiens
acttcctggataagagtgcagaggagatgccctacctgaaatgccctcttcacaccgtcctgaaactgacgcctgtcgcttatggctgccgtgtggaatcyatctacctgaacgtggagtccgtctgcacacaccgggagaggtcagaggatgcaaagaagggacctaacccgctcatgagacgcaatagtgtcaccccgc

SEQ ID NO: 65486 - DNA, 201 bp, Homo sapiens
ttgacatggaaggcctgttgctttgctcttgagaatagtttctcgtgtccccctcgcaggcctcattctttgaacatcaactctgaagtttgatacagatrggggcttgatagctgtggtcccctctcccctctgactacctaaaatcaatacctaaatacagaagccttggtctaacacgggacttttagtttgcgaagg

SEQ ID NO: 65487 - DNA, 201 bp, Homo sapiens
accccgacaaatgcgacagggacttgtcgctgatcaaggtgattgacgtgggccggaggttcctggtgaaccgggtgcaggaccacatccagagccgcatygtgtactacctgatgaacatccacgtgcagccgcgtaccatctacctgtgccggcacggcgagaacgagcacaacctccagggccgcatcgggggcgact

SEQ ID NO: 65488 - DNA, 201 bp, Homo sapiens
tgtcaccccgctagccagccccgaacccaccaaaaagcctcgcatcaacagctttgaggagcatgtggcctccacctcggccgccctgcccagctgcctgmccccggaggtgcccacgcagctgcctggacaaaacatgaaaggctcccggagcagcgctgactcctccaggaaacactgaggcagacgtgtcggttccat

SEQ ID NO: 65489 - DNA, 201 bp, Homo sapiens
aggacaagtactattaccgctaccccaccggggagtcctaccaggacctggtccagcgcttggagccagtgatcatggagctggagcggcaggagaatgtrctggtcatctgccaccaggccgtcctgcgctgcctgcttgcctacttcctggataagagtgcagaggagatgccctacctgaaatgccctcttcacaccg

SEQ ID NO: 65490 - DNA, 201 bp, Homo sapiens
gtccggaacttagcccaaagcacgtttcccctggcagcgcaggaaacgcccggccgcgcgccggcgcacgcccccctctcctcctttgttccgggggtcgscggccgctctcctgccagcgtcgggatctcggccccgggaggcgggccgtcgggcgcagccgcgaagatgccgttggaactgacgcagagccgagtgcag

SEQ ID NO: 65491 - DNA, 201 bp, Homo sapiens
ttgtatttttcgatttgacatggaaggcctgttgctttgctcttgagaatagtttctcgtgtccccctcgcaggcctcattctttgaacatcaactctgawgtttgatacagataggggcttgatagctgtggtcccctctcccctctgactacctaaaatcaatacctaaatacagaagccttggtctaacacgggactt

SEQ ID NO: 65492 - DNA, 201 bp, Homo sapiens
tccggaacttagcccaaagcacgtttcccctggcagcgcaggaaacgcccggccgcgcgccggcgcacgcccccctctcctcctttgttccgggggtcggyggccgctctcctgccagcgtcgggatctcggccccgggaggcgggccgtcgggcgcagccgcgaagatgccgttggaactgacgcagagccgagtgcaga

SEQ ID NO: 65493 - DNA, 201 bp, Homo sapiens
gcttaacttggttgtatttttcgatttgacatggaaggcctgttgctttgctcttgagaatagtttctcgtgtccccctcgcaggcctcattctttgaacmtcaactctgaagtttgatacagataggggcttgatagctgtggtcccctctcccctctgactacctaaaatcaatacctaaatacagaagccttggtcta

SEQ ID NO: 65494 - DNA, 201 bp, Homo sapiens
gccgtggggcccccacctccactctctgggtttcctaggaatgtccagcctcggagaccttcacaaagccttgggagggtgatgagtgctggtcctgacargaggccgctggggacactgtgctgttttgtttcgtttctgtgatctcccggcacgtttggagctgggaagaccacactggtggcagaatcctaaaattaa

SEQ ID NO: 65495 - DNA, 201 bp, Homo sapiens
cacgggtgcatgattgtgcttaacttggttgtatttttcgatttgacatggaaggcctgttgctttgctcttgagaatagtttctcgtgtccccctcgcasgcctcattctttgaacatcaactctgaagtttgatacagataggggcttgatagctgtggtcccctctcccctctgactacctaaaatcaatacctaaat

SEQ ID NO: 65496 - DNA, 201 bp, Homo sapiens
gagccgcatcgtgtactacctgatgaacatccacgtgcagccgcgtaccatctacctgtgccggcacggcgagaacgagcacaacctccagggccgcatcrggggcgactcaggcctgtccagccggggcaagaagtttgccagtgctctgagcaagttcgtggaggagcagaacctgaaggacctgcgcgtgtggaccag

SEQ ID NO: 65497 - DNA, 125 bp, Homo sapiens
agccaagccggagaggaggcgagcrgcagggcctggtggcgagagcgcggctgtcactgcgcccgagcatcccagagctttccgagcggacgagccggccgtgccgggcatccccagcctcgcta

SEQ ID NO: 65498 - DNA, 201 bp, Homo sapiens
cgaaagaagggggacaaattgcggttttcgatgccaccaatactactagagagaggagacacatgatccttcattttgccaaagaaaatgactttaaggcrtttttcatcgagtcggtgtgcgacgaccctacagttgtggcctccaatatcatggaagttaaaatctccagcccggattacaaagactgcaactcggcag

SEQ ID NO: 65499 - DNA, 201 bp, Homo sapiens
gtgcacgggtgcatgattgtgcttaacttggttgtatttttcgatttgacatggaaggcctgttgctttgctcttgagaatagtttctcgtgtccccctcrcaggcctcattctttgaacatcaactctgaagtttgatacagataggggcttgatagctgtggtcccctctcccctctgactacctaaaatcaataccta

SEQ ID NO: 65500 - DNA, 201 bp, Homo sapiens
cgctaccctcgcagcacacgtcgagccccgcacaggcgagggtccggaacttagcccaaagcacgtttcccctggcagcgcaggaaacgcccggccgcgcsccggcgcacgcccccctctcctcctttgttccgggggtcggcggccgctctcctgccagcgtcgggatctcggccccgggaggcgggccgtcgggcgcag

SEQ ID NO: 65501 - DNA, 201 bp, Homo sapiens
cctccagggccgcatcgggggcgactcaggcctgtccagccggggcaagaagtttgccagtgctctgagcaagttcgtggaggagcagaacctgaaggacytgcgcgtgtggaccagccagctgaagagcaccatccagacggccgaggcgctgcggctgccctacgagcagtggaaggcgctcaatgagatcgacgcggg

SEQ ID NO: 65502 - DNA, 201 bp, Homo sapiens
ccatctacctgaacgtggagtccgtctgcacacaccgggagaggtcagaggatgcaaagaagggacctaacccgctcatgagacgcaatagtgtcaccccrctagccagccccgaacccaccaaaaagcctcgcatcaacagctttgaggagcatgtggcctccacctcggccgccctgcccagctgcctgcccccggagg

SEQ ID NO: 65503 - DNA, 201 bp, Homo sapiens
tggcctccacctcggccgccctgcccagctgcctgcccccggaggtgcccacgcagctgcctggacaaaacatgaaaggctcccggagcagcgctgactcytccaggaaacactgaggcagacgtgtcggttccattccatttccatttctgcagcttagcttgtgtcctgccctccgcccgaggcaaaacgtatcctgag

SEQ ID NO: 65504 - DNA, 201 bp, Homo sapiens
tcagaatatgtgggtagggggtggacgtgcacgggtgcatgattgtgcttaacttggttgtatttttcgatttgacatggaaggcctgttgctttgctctwgagaatagtttctcgtgtccccctcgcaggcctcattctttgaacatcaactctgaagtttgatacagataggggcttgatagctgtggtcccctctccc

SEQ ID NO: 65505 - DNA, 201 bp, Homo sapiens
gccgaagagaaccatgcttggcaccgtctgtgtcccctcggccgctggacaccagaaagccacgtgggtccctggcgccctgcctttagccgtggggcccycacctccactctctgggtttcctaggaatgtccagcctcggagaccttcacaaagccttgggagggtgatgagtgctggtcctgacaagaggccgctggg

SEQ ID NO: 65506 - DNA, 201 bp, Homo sapiens
ctgctggagaggatgtctctgtccgcattcccgtgcagctccaggctcgcgcagttttctctctctccctggatgttgagtctcatcagaatatgtgggtrgggggtggacgtgcacgggtgcatgattgtgcttaacttggttgtatttttcgatttgacatggaaggcctgttgctttgctcttgagaatagtttctcg

SEQ ID NO: 65507 - DNA, 201 bp, Homo sapiens
tggacaccagaaagccacgtgggtccctggcgccctgcctttagccgtggggcccccacctccactctctgggtttcctaggaatgtccagcctcggagaycttcacaaagccttgggagggtgatgagtgctggtcctgacaagaggccgctggggacactgtgctgttttgtttcgtttctgtgatctcccggcacgtt

SEQ ID NO: 65508 - DNA, 201 bp, Homo sapiens
tcctggttggaattgagtaggaactgaggctgtgcttcaggtatggtacaatcaagtgggggattttcatgctgaaccattcaagccctccccgcccgttscacccactttggctggcgtctgctggagaggatgtctctgtccgcattcccgtgcagctccaggctcgcgcagttttctctctctccctggatgttgagt

SEQ ID NO: 65509 - DNA, 201 bp, Homo sapiens
taacttggttgtatttttcgatttgacatggaaggcctgttgctttgctcttgagaatagtttctcgtgtccccctcgcaggcctcattctttgaacatcractctgaagtttgatacagataggggcttgatagctgtggtcccctctcccctctgactacctaaaatcaatacctaaatacagaagccttggtctaaca

SEQ ID NO: 65510 - DNA, 201 bp, Homo sapiens
ccctccccgcccgttgcacccactttggctggcgtctgctggagaggatgtctctgtccgcattcccgtgcagctccaggctcgcgcagttttctctctcyccctggatgttgagtctcatcagaatatgtgggtagggggtggacgtgcacgggtgcatgattgtgcttaacttggttgtatttttcgatttgacatgga

SEQ ID NO: 65511 - DNA, 201 bp, Homo sapiens
tactatagaaaggagaacactgcctactttgcaagccagtgacctgccttttgaggggacattggacgggggccgggggcgggggttgggtttgagctacmgtcatgaacttttggcgtctactgattcctccaactctccaccccacaaaataacggggaccaatatttttaactttgcctatttgtttttgggtgagtt

SEQ ID NO: 65512 - DNA, 201 bp, Homo sapiens
acagggagggagatactatagaaaggagaacactgcctactttgcaagccagtgacctgccttttgaggggacattggacgggggccgggggcgggggttsggtttgagctacagtcatgaacttttggcgtctactgattcctccaactctccaccccacaaaataacggggaccaatatttttaactttgcctatttgt

SEQ ID NO: 65513 - DNA, 201 bp, Homo sapiens
ggctcccggagcagcgctgactcctccaggaaacactgaggcagacgtgtcggttccattccatttccatttctgcagcttagcttgtgtcctgccctccrcccgaggcaaaacgtatcctgaggacttcttccggagagggtggggtggagcagcgggggagccttggccgaagagaaccatgcttggcaccgtctgtgt

SEQ ID NO: 65514 - DNA, 201 bp, Homo sapiens
accatgcttggcaccgtctgtgtcccctcggccgctggacaccagaaagccacgtgggtccctggcgccctgcctttagccgtggggcccccacctccacyctctgggtttcctaggaatgtccagcctcggagaccttcacaaagccttgggagggtgatgagtgctggtcctgacaagaggccgctggggacactgtgc

SEQ ID NO: 65515 - DNA, 201 bp, Homo sapiens
aggtcctgggtgagggtgggagatttagacacctgaaactgggcgtggagagaagagccgttgctgtttgttttttgggaagagcttttaaagaatgcatrtttttttcctggttggaattgagtaggaactgaggctgtgcttcaggtatggtacaatcaagtgggggattttcatgctgaaccattcaagccctccccg

SEQ ID NO: 65516 - DNA, 201 bp, Homo sapiens
tttggtgcatcttgacctgggaagacgcctcatgggaacgaacttggacaggtgttgggttgaggcctcttctgcaggaatggcccaagcaaggcctcacwcgcagccacttcttcaagagctgcctgcacactgtcttggagcatctgccttgtgcctggcactctgccggtgccttgggaaggtcggaagagtggactt

SEQ ID NO: 65517 - DNA, 201 bp, Homo sapiens
acaaaagtgttcaacgtcggggagtatcgccgggaggctgtgaagcagtacagctcctacaacttcttccgccccgacaatgaggaagccatgaaagtccrgaagcaatgtgccttagctgccttgagagatgtcaaaagctacctggcgaaagaagggggacaaattgcggttttcgatgccaccaatactactagagag

SEQ ID NO: 65518 - DNA, 201 bp, Homo sapiens; identical to SEQ ID NO: 65484

SEQ ID NO: 65519 - DNA, 201 bp, Homo sapiens; identical to SEQ ID NO: 65485

SEQ ID NO: 65520 - DNA, 201 bp, Homo sapiens; identical to SEQ ID NO: 65486

SEQ ID NO: 65521 - DNA, 201 bp, Homo sapiens; identical to SEQ ID NO: 65487

SEQ ID NO: 65522 - DNA, 201 bp, Homo sapiens; identical to SEQ ID NO: 65488

SEQ ID NO: 65523 - DNA, 201 bp, Homo sapiens; identical to SEQ ID NO: 65489

SEQ ID NO: 65524 - DNA, 201 bp, Homo sapiens; identical to SEQ ID NO: 65490

SEQ ID NO: 65525 - DNA, 201 bp, Homo sapiens; identical to SEQ ID NO: 65491

SEQ ID NO: 65526 - DNA, 201 bp, Homo sapiens; identical to SEQ ID NO: 65492

SEQ ID NO: 65527 - DNA, 201 bp, Homo sapiens; identical to SEQ ID NO: 65493

SEQ ID NO: 65528 - DNA, 201 bp, Homo sapiens; identical to SEQ ID NO: 65494

SEQ ID NO: 65529 - DNA, 201 bp, Homo sapiens; identical to SEQ ID NO: 65495

SEQ ID NO: 65530 - DNA, 201 bp, Homo sapiens; identical to SEQ ID NO: 65496

SEQ ID NO: 65531 - DNA, 125 bp, Homo sapiens; identical to SEQ ID NO: 65497

SEQ ID NO: 65532 - DNA, 201 bp, Homo sapiens; identical to SEQ ID NO: 65498

SEQ ID NO: 65533 - DNA, 201 bp, Homo sapiens; identical to SEQ ID NO: 65499

SEQ ID NO: 65534 - DNA, 201 bp, Homo sapiens; identical to SEQ ID NO: 65500

SEQ ID NO: 65535 - DNA, 201 bp, Homo sapiens; identical to SEQ ID NO: 65501

SEQ ID NO: 65536 - DNA, 201 bp, Homo sapiens; identical to SEQ ID NO: 65502

SEQ ID NO: 65537 - DNA, 201 bp, Homo sapiens; identical to SEQ ID NO: 65503

SEQ ID NO: 65538 - DNA, 201 bp, Homo sapiens; identical to SEQ ID NO: 65504

SEQ ID NO: 65539 - DNA, 201 bp, Homo sapiens; identical to SEQ ID NO: 65505

SEQ ID NO: 65540 - DNA, 201 bp, Homo sapiens; identical to SEQ ID NO: 65506

SEQ ID NO: 65541 - DNA, 201 bp, Homo sapiens; identical to SEQ ID NO: 65507

SEQ ID NO: 65542 - DNA, 201 bp, Homo sapiens; identical to SEQ ID NO: 65508

SEQ ID NO: 65543 - DNA, 201 bp, Homo sapiens; identical to SEQ ID NO: 65509

SEQ ID NO: 65544 - DNA, 201 bp, Homo sapiens; identical to SEQ ID NO: 65510

SEQ ID NO: 65545 - DNA, 201 bp, Homo sapiens; identical to SEQ ID NO: 65511

SEQ ID NO: 65546 - DNA, 201 bp, Homo sapiens
gaaacactttcctggagctgctggcttttgcacttttttgatggcagaagtgtgacctgagagtcccaccttctcttcaggaacgtagatgttggggtgtsttgccctggggggcttggaacctctgaaggtggggagcggaacacctggcatccttccccagcacttgcattaccgtccctgctcttcccaggtggggac

SEQ ID NO: 65547 - DNA, 201 bp, Homo sapiens
cctggctctcctgcaggtccacacaccttccaggcctgtggcctgcctccaaagatgtgcaagggcaggctggctgcacggggagagggaagtattttgcygaaatatgagaactggggcctcctgctcccagggagctccagggcccctctctcctcccacctggacttggggggaactgagaaacactttcctggagct

SEQ ID NO: 65548 - DNA, 201 bp, Homo sapiens; identical to SEQ ID NO: 65512

SEQ ID NO: 65549 - DNA, 201 bp, Homo sapiens; identical to SEQ ID NO: 65513

SEQ ID NO: 65550 - DNA, 201 bp, Homo sapiens; identical to SEQ ID NO: 65514

SEQ ID NO: 65551 - DNA, 201 bp, Homo sapiens; identical to SEQ ID NO: 65515

SEQ ID NO: 65552 - DNA, 201 bp, Homo sapiens; identical to SEQ ID NO: 65517

SEQ ID NO: 65553 - DNA, 201 bp, Homo sapiens
tctgaaggtggggagcggaacacctggcatccttccccagcacttgcattaccgtccctgctcttcccaggtggggacagtggcccaagcaaggcctcacwcgcagccacttcttcaagagctgcctgcacactgtcttggagcatctgccttgtgcctggcactctgccggtgccttgggaaggtcggaagagtggactt

SEQ ID NO: 65554 - DNA, 201 bp, Homo sapiens
ttcaggaacgtagatgttggggtgtcttgccctggggggcttggaacctctgaaggtggggagcggaacacctggcatccttccccagcacttgcattacsgtccctgctcttcccaggtggggacagtggcccaagcaaggcctcactcgcagccacttcttcaagagctgcctgcacactgtcttggagcatctgcctt

SEQ ID NO: 65555 - DNA, 201 bp, Homo sapiens; identical to SEQ ID NO: 65487

SEQ ID NO: 65556 - DNA, 196 bp, Homo sapiens
tgtcaccccgctagccagccccgaacccaccaaaaagcctcgcatcaacagctttgaggagcatgtggcctccacctcggccgccctgcccagctgcctgmccccggaggtgcccacgcagctgcctggacaacctttgctagggcaagcctgtctacgaactgtctgtcacattttctcaaagttttctccttac

SEQ ID NO: 65557 - DNA, 201 bp, Homo sapiens; identical to SEQ ID NO: 65489

SEQ ID NO: 65558 - DNA, 201 bp, Homo sapiens; identical to SEQ ID NO: 65498

SEQ ID NO: 65559 - DNA, 201 bp, Homo sapiens; identical to SEQ ID NO: 65501

SEQ ID NO: 65560 - DNA, 201 bp, Homo sapiens; identical to SEQ ID NO: 65496

SEQ ID NO: 65561 - DNA, 201 bp, Homo sapiens; identical to SEQ ID NO: 65502

SEQ ID NO: 65562 - DNA, 201 bp, Homo sapiens; identical to SEQ ID NO: 65485

SEQ ID NO: 65563 - DNA, 201 bp, Homo sapiens; identical to SEQ ID NO: 65517

SEQ ID NO: 65564 - DNA, 201 bp, Homo sapiens
cgaaagaagggggacaaattgcggttttcgatgccaccaatactactagagagaggagacacatgatccttcattttgccaaagaaaatgactttaaggcrtttttcatcgagtcggtgtgcgacgaccctacagttgtggcctccaatatcatggtaagacagccgggagccccgtgcttctgcggcagcgtagaccaca

SEQ ID NO: 65565 - DNA, 124 bp, Homo sapiens
ggcctccaatatcatggtaagacagccgggagccccgtgcttctgcggcagcgtagaccacaagggcatttgcagtctgaggaagtgggggaccgggtccrgctcggaagcgcagctgagccct

SEQ ID NO: 65566 - DNA, 201 bp, Homo sapiens; identical to SEQ ID NO: 65517

SEQ ID NO: 65567 - DNA, 201 bp, Homo sapiens; identical to SEQ ID NO: 65487

SEQ ID NO: 65568 - DNA, 187 bp, Homo sapiens
tgtcaccccgctagccagccccgaacccaccaaaaagcctcgcatcaacagctttgaggagcatgtggcctccacctcggccgccctgcccagctgcctgmccccggaggtgcccacgcagctgcctggacaacctttgctagggcaagcctgtctaaactggaaaggtgtgatgaggaatgcagcc

SEQ ID NO: 65569 - DNA, 201 bp, Homo sapiens; identical to SEQ ID NO: 65489

SEQ ID NO: 65570 - DNA, 201 bp, Homo sapiens; identical to SEQ ID NO: 65498

SEQ ID NO: 65571 - DNA, 201 bp, Homo sapiens; identical to SEQ ID NO: 65501

SEQ ID NO: 65572 - DNA, 201 bp, Homo sapiens; identical to SEQ ID NO: 65496

SEQ ID NO: 65573 - DNA, 201 bp, Homo sapiens; identical to SEQ ID NO: 65502

SEQ ID NO: 65574 - DNA, 201 bp, Homo sapiens; identical to SEQ ID NO: 65485

SEQ ID NO: 65575 - DNA, 201 bp, Homo sapiens; identical to SEQ ID NO: 65517

SEQ ID NO: 65576 - DNA, 201 bp, Homo sapiens
cggcacctgttgtcttctgcgggtgacgcacactttaaatggaagagaggttgtggctataacttgtggctgggaataataaagatggcaccgccaaggarcctcaccttgcgtgagtgagtactcagttgggcgctgcagggtctggagtctgtgtgagacgtgtgtgattgtgatgggtgcgaatcagcgtatagcact

SEQ ID NO: 65577 - DNA, 201 bp, Homo sapiens
aagccctgaacacgggcaagctgcagcagcagcctggctgcactgctgaggagaccctggaggcactgatcctgaaggagctgtctgtgatccgtgaccaygctggcagtgcctgcctccgggagctggacaagagcaacagccccctcaccatggctctgtgcggctccaaaggttccttcattaacatatcacagatga

SEQ ID NO: 65578 - DNA, 201 bp, Homo sapiens
aaaaaaattagtttttataaaaaattatagtttgaccttttgatttccctgcatctacaaggtagacctattaacttctcttggggtatcagtgatgtggraaaaaaatgccatttttcttaatgtttaacccccctttatctttgaattgagctagagcctggtttaggacaaaggattaagtttgttaatgaacactaa

SEQ ID NO: 65579 - DNA, 201 bp, Homo sapiens
tcactctcaaggacactttctttgatcgagccaaggcttgccaaatcattgcttcaatactggttggcaaggatgagaaaattaaagttcgcctcccaccrcctacaatcctaaagcctgtcaccctgtggacgggaaagcagatcttcagtgtcatcctcaggcctagcgatgacaatccagtgagggccaacctgcgaa

SEQ ID NO: 65580 - DNA, 201 bp, Homo sapiens
gccacatcatgctgtcccaagaggagaagaagcagtttctggactatctaaagaggcccggcctgacctaccttcagaagcgaggactgaaaaagaaaatytctgacaagtgccggaagaaaaacatctgccatcactgtggcgcttttaatggtaccgtaaagaagtgtggactgctgaaaataattcatgagaaataca

SEQ ID NO: 65581 - DNA, 201 bp, Homo sapiens
gctcacaccagtgaccctgactgtgccacgctgctcgggagagctgagggttttattgtttgcttgcttgaaacctaatctatagacggccccacagctcstgcacacactgcttccctggacttaaagcccagccaggtgtcatggtccatcccagctcactgcatacatccatcggctccccatggtgtcttcacacct

SEQ ID NO: 65582 - DNA, 201 bp, Homo sapiens
tcaccttgcgtgagtgagtactcagttgggcgctgcagggtctggagtctgtgtgagacgtgtgtgattgtgatgggtgcgaatcagcgtatagcacttgrgaacaaggcagaccttggagcagaatggttatgtgaaggatcacatcacccatgggtagggggggaagtcatacgtcctggaggtgctggtcctcctcct

SEQ ID NO: 65583 - DNA, 201 bp, Homo sapiens
cccacctatgccagcaatcagagaagccctcttggcatccccaggagcagcttctcctctgatagggtgcagctcacaccagtgaccctgactgtgccacrctgctcgggagagctgagggttttattgtttgcttgcttgaaacctaatctatagacggccccacagctcgtgcacacactgcttccctggacttaaagc

SEQ ID NO: 65584 - DNA, 201 bp, Homo sapiens
gcctatctcctcactctcaaggacactttctttgatcgagccaaggcttgccaaatcattgcttcaatactggttggcaaggatgagaaaattaaagttckcctcccaccgcctacaatcctaaagcctgtcaccctgtggacgggaaagcagatcttcagtgtcatcctcaggcctagcgatgacaatccagtgagggcc

SEQ ID NO: 65585 - DNA, 201 bp, Homo sapiens
tgtcacggctcgccaggctggctcctgtctacctgtctaaccgtggtttctcaattgggatcggtgatgtcacacctggccaaggactgctgaaggccaastatgagttgctgaatgccggctacaagaaatgtgatgagtacatcgaagccctgaacacgggcaagctgcagcagcagcctggctgcactgctgaggaga

SEQ ID NO: 65586 - DNA, 201 bp, Homo sapiens
gtgcctgcctccgggagctggacaagagcaacagccccctcaccatggctctgtgcggctccaaaggttccttcattaacatatcacagatgattgcctgygtgggacagcaggccatcagtggctctcgagtgccagacggctttgaaaacaggtccttgcctcattttgaaaaacactcaaagctcccagctgccaaag

SEQ ID NO: 65587 - DNA, 201 bp, Homo sapiens
catgcctgggaagtaagctgtaggcctgatccgagccaggaccactgggatccgtgcaaaggccaggggagggtagaattgaatcataggagtgaactccrgcacctgttgtcttctgcgggtgacgcacactttaaatggaagagaggttgtggctataacttgtggctgggaataataaagatggcaccgccaaggagc

SEQ ID NO: 65588 - DNA, 201 bp, Homo sapiens
atgagtgtgtctgtacaccctataatgctgactttgatggtgatgaaatgaaccttcatcttcctcaaacagaagaagctaaagcagaggcccttgttctkatggggactaaagcaaatcttgtaaccccgaggaatggggaaccgctgattgctgctattcaggattttctaacaggtgcctatctcctcactctcaagg

SEQ ID NO: 65589 - DNA, 201 bp, Homo sapiens
gtaggcctgatccgagccaggaccactgggatccgtgcaaaggccaggggagggtagaattgaatcataggagtgaactccggcacctgttgtcttctgcrggtgacgcacactttaaatggaagagaggttgtggctataacttgtggctgggaataataaagatggcaccgccaaggagcctcaccttgcgtgagtgag

SEQ ID NO: 65590 - DNA, 109 bp, Homo sapiens
ggtatgaaygtgatttctgatgaaactggattggaataattttcatgatctttgtatatttatatatatatatttttaaattttgcatttgacttaaagtgccatgaga

SEQ ID NO: 65591 - DNA, 201 bp, Homo sapiens
ctctttgtaaggatttgatgctcttctcatcttccaagaagtataccaagagcaaatttaactctatagttacctgttcttcaaagaaaaaagaaacttaraaggtagtgtttctgaggtcataactgtgaggggttgtatacaaagaatgagtcactttttaagccatttggaaaattagatctgtttctaattagatga

SEQ ID NO: 65592 - DNA, 201 bp, Homo sapiens
tatacaaagaatgagtcactttttaagccatttggaaaattagatctgtttctaattagatgacattttctccattctctgatttcctgaagattgccaagcatttgcttgataatctaccaggactgataattttgcagaatatgaggcaaatatatgaaattcagttgtgtatctatatcctagcaacaaacacttgaa

SEQ ID NO: 65593 - DNA, 201 bp, Homo sapiens
attcctaaatactttgaaaatacaaaatattcctgaatagttgtgccttacattggttttatttgaagttagagtggatccctgtttatcataattacttrtaattaggcagatgcttatcactctattataactcaaattgggaagaaaagaatgaaaaagaaaacaatggctgggtactggctcatacctgtaatttta

SEQ ID NO: 65594 - DNA, 201 bp, Homo sapiens
cattgggaatattcatccattctgcagatggaggacatcgtgcaggccatgtcctcattgctcccattctacatttagctgagaaacagaggttcctcttygtaaggatttgatgctcttctcatcttccaagaagtataccaagagcaaatttaactctatagttacctgttcttcaaagaaaaaagaaacttagaaggt

SEQ ID NO: 65595 - DNA, 201 bp, Homo sapiens
cctaagaatgtttccaaaagtcgcatcgctaatgatatttgccaagttgagtgtacacaaagtttctcatatcctgttcaagttaatcaacatcaagcacrtggggatgctttagggtgagtctatagtacaaaatgcataaaccatgtccccaggaaatttgaaaggaagcaggtgctgaatggaatttttttccttttc

SEQ ID NO: 65596 - DNA, 201 bp, Homo sapiens
cttctatataatttctccaggtgttacaaaggtagattatggagatatatcgtcaagagttggtctaagacacaaactacaatgcaaacctttttcctggkacctagagaatatatatcctgattctcaaattccacgtcactatttctcattgggagagatacgaaatgtggaaacgaatcagtgtctagataacatggc

SEQ ID NO: 65597 - DNA, 201 bp, Homo sapiens
gtcttatttcttactgtatgaaagcttaacagcaatgtgatttaaggttttgttttaaatgggagatgtaagtgatttaattcatgggtacttttagaacmtgatagataatcccattgcctttatttttctaattaaagaattcctaaatactttgaaaatacaaaatattcctgaatagttgtgccttacattggtttt

SEQ ID NO: 65598 - DNA, 201 bp, Homo sapiens
tttcttgtgcctaagaatgtttccaaaagtcgcatcgctaatgatatttgccaagttgagtgtacacaaagtttctcatatcctgttcaagttaatcaacrtcaagcacatggggatgctttagggtgagtctatagtacaaaatgcataaaccatgtccccaggaaatttgaaaggaagcaggtgctgaatggaattttt

SEQ ID NO: 65599 - DNA, 201 bp, Homo sapiens
tgcccagcattagagactgcaatggaagtcggtcccagcagtggcttcttcgaaacgtcaccctgccagaaatattctgagaccaaatttacaaaaaaacraaaaaaataaggattgactgggctacctcagcatacatttctgccacattcttaagtagcaaaaaaggaaaagtgctttcctcctctgcaggatgtaagg

SEQ ID NO: 65600 - DNA, 199 bp, Homo sapiens
gcccgcgctgcggcccgcgggaccgcgccgcgaccgcccgggccggcccggaggagcgcctgccgccgccgccgccgccgcgcgcctagcggtatgaaygtgatttctgatgaaactggattggaataattttcatgatctttgtatatttatatatatatatttttaaattttgcatttgacttaaagtgccatgaga

SEQ ID NO: 65601 - DNA, 201 bp, Homo sapiens; identical to SEQ ID NO: 65596

SEQ ID NO: 65602 - DNA, 201 bp, Homo sapiens; identical to SEQ ID NO: 65599

SEQ ID NO: 65603 - DNA, 199 bp, Homo sapiens; identical to SEQ ID NO: 65600

SEQ ID NO: 65604 - DNA, 201 bp, Homo sapiens; identical to SEQ ID NO: 65591

SEQ ID NO: 65605 - DNA, 201 bp, Homo sapiens; identical to SEQ ID NO: 65592

SEQ ID NO: 65606 - DNA, 201 bp, Homo sapiens; identical to SEQ ID NO: 65593

SEQ ID NO: 65607 - DNA, 201 bp, Homo sapiens; identical to SEQ ID NO: 65594

SEQ ID NO: 65608 - DNA, 201 bp, Homo sapiens; identical to SEQ ID NO: 65595

SEQ ID NO: 65609 - DNA, 201 bp, Homo sapiens; identical to SEQ ID NO: 65596

SEQ ID NO: 65610 - DNA, 201 bp, Homo sapiens; identical to SEQ ID NO: 65597

SEQ ID NO: 65611 - DNA, 201 bp, Homo sapiens; identical to SEQ ID NO: 65598

SEQ ID NO: 65612 - DNA, 201 bp, Homo sapiens; identical to SEQ ID NO: 65599

SEQ ID NO: 65613 - DNA, 199 bp, Homo sapiens; identical to SEQ ID NO: 65600

SEQ ID NO: 65614 - DNA, 201 bp, Homo sapiens; identical to SEQ ID NO: 65591

SEQ ID NO: 65615 - DNA, 201 bp, Homo sapiens; identical to SEQ ID NO: 65592

SEQ ID NO: 65616 - DNA, 201 bp, Homo sapiens; identical to SEQ ID NO: 65593

SEQ ID NO: 65617 - DNA, 201 bp, Homo sapiens; identical to SEQ ID NO: 65594

SEQ ID NO: 65618 - DNA, 201 bp, Homo sapiens; identical to SEQ ID NO: 65595

SEQ ID NO: 65619 - DNA, 201 bp, Homo sapiens; identical to SEQ ID NO: 65596

SEQ ID NO: 65620 - DNA, 201 bp, Homo sapiens; identical to SEQ ID NO: 65597

SEQ ID NO: 65621 - DNA, 201 bp, Homo sapiens; identical to SEQ ID NO: 65598

SEQ ID NO: 65622 - DNA, 201 bp, Homo sapiens; identical to SEQ ID NO: 65599

SEQ ID NO: 65623 - DNA, 201 bp, Homo sapiens
aagccctggtgcagacactgcagggacccttccacacggcaggattattgaacatggggaaggaagaggcctcacttgaggaagtgttagtctatctcaaycaaatctactgtgggcagatttctattgaaacctcccaacttcagagccaggatgagaaagactggtttgccaagcggtttgaggaactgcaaaaggaga

SEQ ID NO: 65624 - DNA, 201 bp, Homo sapiens
ggcatgcaatggtggtttgccaggagacggatgacacctacatccccctgaaccatatggacccaaatcagaaggggtttctagaggtcagcaacagcccmctgtcagaagaggccgtcctgggattcgaatatgggatgagcattgagagcccaaagttactgcccctgtgggaggcacagtttggcgatttcttcaatg

SEQ ID NO: 65625 - DNA, 201 bp, Homo sapiens
cggatgacacctacatccccctgaaccatatggacccaaatcagaaggggtttctagaggtcagcaacagccccctgtcagaagaggccgtcctgggattygaatatgggatgagcattgagagcccaaagttactgcccctgtgggaggcacagtttggcgatttcttcaatggtgcccagatcatctttgacacattca

SEQ ID NO: 65626 - DNA, 201 bp, Homo sapiens
tgcccaatccctcgcacctggaggccgtcaaccccgtggccgtgggcaaaactcgcggcaggcagcagtctcgccaagacggcgattactctccagacaaytcagcccagccgggggacagggtcatttgcttacaggtccatggtgatgcttctttctgtggtcaagggattgttcctgaaacattcacgctgtccaatc

SEQ ID NO: 65627 - DNA, 201 bp, Homo sapiens
aagcccgagagccgcgagccccagggcgccctggagcgccccccagttgatcatggccttgccaggttggtgacagtatattgtgagcatggtcataaagstgccaaaatcaaccccctcttcaccggacaagccctgctggagaatgtgcctgaaatccaagccctggtgcagacactgcagggacccttccacacggca

SEQ ID NO: 65628 - DNA, 201 bp, Homo sapiens
tgagctggatgagccattctacaccaaccccatcatgtacaaaatcatcagagctcgaaagagcattccagacacatatgcagagcacctcattgctggcrgactcatgacgcaggaggaggtgtctgaaataaaatcctcctactatgccaagttgaatgatcacttaaataacatggcccactacaggccccctgccct

SEQ ID NO: 65629 - DNA, 201 bp, Homo sapiens
caactcagcccagccgggggacagggtcatttgcttacaggtccatggtgatgcttctttctgtggtcaagggattgttcctgaaacattcacgctgtccratctcccacatttcagaattggtgggagtgtgcatttgattgttaataaccagctgggttacaccactccagctgaaagaggaaggtcttctttatactg

SEQ ID NO: 65630 - DNA, 201 bp, Homo sapiens
tcatctttgacacattcatctctggaggagaggccaagtggctcctacaaagcggcattgtcatcctccttccacatggctacgatggggctgggccagamcactcatcctgtcgaatagagcgtttcctgcagatgtgtgacagtgcggaagagggggtggacggagacactgtgaacatgtttgtggttcacccaacaa

SEQ ID NO: 65631 - DNA, 201 bp, Homo sapiens
cggaagctcttgccttgggttctttacttgctcaaggttttaatgttcgtctaagtggccaagatgttggtcgtggaactttcagtcagaggcatgcaatsgtggtttgccaggagacggatgacacctacatccccctgaaccatatggacccaaatcagaaggggtttctagaggtcagcaacagccccctgtcagaag

SEQ ID NO: 65632 - DNA, 201 bp, Homo sapiens
agttgaatgatcacttaaataacatggcccactacaggccccctgccctgaacctgcaggcccactggcagggcctggctcagccagaagcgcaaatcacyacctggagtacaggtgtgcccctcgacctcctgcggtttgttggcatgaagtctgtagaggtgccaagagagctgcagatgcacagtcacctgctgaaga

SEQ ID NO: 65633 - DNA, 201 bp, Homo sapiens
tcgggctcccgccttagcatgctggccgggacatctggtgaacatggcctctgctactgcggcagcagcacgacggggcctcggccgggctctccctctcytctggcgtggctaccagaccgagcggggcgtttacggctaccggccgaggaagcccgagagccgcgagccccagggcgccctggagcgccccccagttga

SEQ ID NO: 65634 - DNA, 201 bp, Homo sapiens
agagctgatgttccgtaaaatgcgaggcttaagtgaatttccagagaatttctcagccactggagacgtcctgtctcacctgacctcctctgtggacctgkactttggggcgcaccatcccctccatgtgacaatgttgcccaatccctcgcacctggaggccgtcaaccccgtggccgtgggcaaaactcgcggcaggca

SEQ ID NO: 65635 - DNA, 201 bp, Homo sapiens
tgtgggaggcacagtttggcgatttcttcaatggtgcccagatcatctttgacacattcatctctggaggagaggccaagtggctcctacaaagcggcatygtcatcctccttccacatggctacgatggggctgggccagaccactcatcctgtcgaatagagcgtttcctgcagatgtgtgacagtgcggaagaggggg

SEQ ID NO: 65636 - DNA, 201 bp, Homo sapiens
agctgccaaaatcaaccccctcttcaccggacaagccctgctggagaatgtgcctgaaatccaagccctggtgcagacactgcagggacccttccacacgkcaggattattgaacatggggaaggaagaggcctcacttgaggaagtgttagtctatctcaatcaaatctactgtgggcagatttctattgaaacctccca

SEQ ID NO: 65637 - DNA, 201 bp, Homo sapiens
aagcttgtgggctgtgccatcatccatgtcaatggagacagcccagaggaagtggtccgtgccacacgactggcttttgaataccaacgccagttccgcarggatgtgattattgatctgttgtgctacaggcagtggggccacaatgagctggatgagccattctacaccaaccccatcatgtacaaaatcatcagagct

SEQ ID NO: 65638 - DNA, 201 bp, Homo sapiens
tgtctggttcctcagccaaagatgtagctaaacagctgaaagaacagcagatggtaatgaggggccaccgagatacctctatggttcatgagcttaatagygctagagcgtaggaatagaccctggcgtccactgtgagatgttcttcagctaccagagctgtggaaagcaaagaaaacaacttagatcatgccgttaagg

SEQ ID NO: 65639 - DNA, 201 bp, Homo sapiens
tcaatggagcccagaaactgtttggtatgatcattaccattgggcaagccattgtgtatgtcatgacggggatgtatggggaccctgcagaaatgggtgcyggaatctgtctcctgatcatcattcagttgtttgttgctggtttgattgtgctgctgttagatgagctgctacagaagggttacggcttggggtctggga

SEQ ID NO: 65640 - DNA, 201 bp, Homo sapiens
ggagtggaagctctctaagggatacgaaatctgattttatccaaagaaatcacagcagcctttgaaagacacattcagattttcaaacaaacaacagacawttcaaaaccaggcgctctgcttattcactgaaaccgtaagctgctgaaactcagggaaaagcttaagaaactggtcttaaagcttcaggccaaacaatgc

SEQ ID NO: 65641 - DNA, 201 bp, Homo sapiens
ccgagtcgggcctgtgactccgagctgcgctgcctcgtattgattgtcatgcctttctccaaatacgcaccagataaactattgtatctattcagtatgaytgttctaactctggctttgagctgtcgaggtggcttctaccttaggtctagtttttggaaaggtgaagcaggagtggaagctctctaagggatacgaaat

SEQ ID NO: 65642 - DNA, 200 bp, Homo sapiens
agggcggagtctgcgcggggttgggcggagcctgcgcggggccggtaggatcgcgtcgggagccggtaccgaggcccgagccgcgggagtcgagcgaagrcagcgccgaggccgcggtttccccctgggcctccccagcagcagccatgggcatcaaatttttagaagttatcaaaccattctgtgcagttctaccagaa

SEQ ID NO: 65643 - DNA, 201 bp, Homo sapiens
acatccccatcatcctccagtcggccctggtgtccaacctgtatgttatttcccagatgctgtctgttcgatttagtggcaactttttagtaaatttactrggacagtgggccgatgtcagtgggggaggacccgcacgttcttacccagttggaggcctttgttactatctttctcctcctgagtccatgggcgccatct

SEQ ID NO: 65644 - DNA, 201 bp, Homo sapiens; identical to SEQ ID NO: 65638

SEQ ID NO: 65645 - DNA, 201 bp, Homo sapiens; identical to SEQ ID NO: 65639

SEQ ID NO: 65646 - DNA, 201 bp, Homo sapiens; identical to SEQ ID NO: 65640

SEQ ID NO: 65647 - DNA, 201 bp, Homo sapiens; identical to SEQ ID NO: 65641

SEQ ID NO: 65648 - DNA, 200 bp, Homo sapiens; identical to SEQ ID NO: 65642

SEQ ID NO: 65649 - DNA, 201 bp, Homo sapiens; identical to SEQ ID NO: 65643

SEQ ID NO: 65650 - DNA, 201 bp, Homo sapiens
ccactcctggggtgaacgtcgggctcttctgttctacccctggggttgccttggcaagagcagtgcctagaaaggtggccttggagatgctctttactggygagcccatttctgcccaggaggccctgctccacgggctgcttagcaaggtggtgccagaggcggagctgcaggaggagaccatgcggatcgctaggaaga

SEQ ID NO: 65651 - DNA, 201 bp, Homo sapiens
ccatttctgcccaggaggccctgctccacgggctgcttagcaaggtggtgccagaggcggagctgcaggaggagaccatgcggatcgctaggaagatcgcrtcgctgagccgtccggtggtgtccctgggcaaagccaccttctacaagcagctgccccaggacctggggacggcttactacctcacctcccaggccatgg

SEQ ID NO: 65652 - DNA, 201 bp, Homo sapiens
gtggacaacctggccctgcgggacgggcaggagggcatcacggccttcctccagaagagaaaacctgtctggtcacacgagccagtgtgagtggaggcagwggagtgaggcccacgggcagcgcccaggagcccaccttcccctctggcccagccaccactgcctctcagcttcaacaggtgacaggctgctttcgtgact

SEQ ID NO: 65653 - DNA, 201 bp, Homo sapiens
atgacttaaaggagctgacagaggagcaaggccgtgattaccatgccgaagtatttcagacctgttccaaggtcatgatgcacatccggaaccaccccgtycccgtcattgccatggtcaatggcctggccacggctgccggctgtcaactggttgccagctgcgacattgccgtggcgagcgacaagtcctcttttgcca

SEQ ID NO: 65654 - DNA, 201 bp, Homo sapiens
tttctgcccaggaggccctgctccacgggctgcttagcaaggtggtgccagaggcggagctgcaggaggagaccatgcggatcgctaggaagatcgcatcrctgagccgtccggtggtgtccctgggcaaagccaccttctacaagcagctgccccaggacctggggacggcttactacctcacctcccaggccatggtgg

SEQ ID NO: 65655 - DNA, 201 bp, Homo sapiens
ccgtgattaccatgccgaagtatttcagacctgttccaaggtcatgatgcacatccggaaccaccccgtccccgtcattgccatggtcaatggcctggccrcggctgccggctgtcaactggttgccagctgcgacattgccgtggcgagcgacaagtcctcttttgccactcctggggtgaacgtcgggctcttctgttc

SEQ ID NO: 65656 - DNA, 201 bp, Homo sapiens
aagtatttcagacctgttccaaggtcatgatgcacatccggaaccaccccgtccccgtcattgccatggtcaatggcctggccacggctgccggctgtcarctggttgccagctgcgacattgccgtggcgagcgacaagtcctcttttgccactcctggggtgaacgtcgggctcttctgttctacccctggggttgcct

SEQ ID NO: 65657 - DNA, 201 bp, Homo sapiens
ttccaaggtcatgatgcacatccggaaccaccccgtccccgtcattgccatggtcaatggcctggccacggctgccggctgtcaactggttgccagctgcracattgccgtggcgagcgacaagtcctcttttgccactcctggggtgaacgtcgggctcttctgttctacccctggggttgccttggcaagagcagtgcc

SEQ ID NO: 65658 - DNA, 201 bp, Homo sapiens
ccctgggcaaagccaccttctacaagcagctgccccaggacctggggacggcttactacctcacctcccaggccatggtggacaacctggccctgcgggaygggcaggagggcatcacggccttcctccagaagagaaaacctgtctggtcacacgagccagtgtgagtggaggcagaggagtgaggcccacgggcagcgc

SEQ ID NO: 65659 - DNA, 201 bp, Homo sapiens
ggccggggcggggcggcgggagtcggagccgcggcccaccagcgcgcggcagctggacggcataaggaacatcgtcttgagcaatcccaagaagaggaacrcgttgtcacttgcaatgctgaaatctctccaaagtgacattcttcatgacgctgacagcaacgatctgaaagtcattatcatctcggctgaggggcctgt

SEQ ID NO: 65660 - DNA, 201 bp, Homo sapiens
ttctgcagccgggacccggccggggcggggcggcgggagtcggagccgcggcccaccagcgcgcggcagctggacggcataaggaacatcgtcttgagcartcccaagaagaggaacacgttgtcacttgcaatgctgaaatctctccaaagtgacattcttcatgacgctgacagcaacgatctgaaagtcattatcatc

SEQ ID NO: 65661 - DNA, 201 bp, Homo sapiens
cggagccgcggcccaccagcgcgcggcagctggacggcataaggaacatcgtcttgagcaatcccaagaagaggaacacgttgtcacttgcaatgctgaartctctccaaagtgacattcttcatgacgctgacagcaacgatctgaaagtcattatcatctcggctgaggggcctgtgttttcttctgggcatgacttaa

SEQ ID NO: 65662 - DNA, 201 bp, Homo sapiens
tctttactggtgagcccatttctgcccaggaggccctgctccacgggctgcttagcaaggtggtgccagaggcggagctgcaggaggagaccatgcggatygctaggaagatcgcatcgctgagccgtccggtggtgtccctgggcaaagccaccttctacaagcagctgccccaggacctggggacggcttactacctca

SEQ ID NO: 65663 - DNA, 201 bp, Homo sapiens; identical to SEQ ID NO: 65650

SEQ ID NO: 65664 - DNA, 201 bp, Homo sapiens; identical to SEQ ID NO: 65651

SEQ ID NO: 65665 - DNA, 201 bp, Homo sapiens; identical to SEQ ID NO: 65652

SEQ ID NO: 65666 - DNA, 201 bp, Homo sapiens; identical to SEQ ID NO: 65653

SEQ ID NO: 65667 - DNA, 201 bp, Homo sapiens; identical to SEQ ID NO: 65654

SEQ ID NO: 65668 - DNA, 201 bp, Homo sapiens; identical to SEQ ID NO: 65655

SEQ ID NO: 65669 - DNA, 201 bp, Homo sapiens; identical to SEQ ID NO: 65656

SEQ ID NO: 65670 - DNA, 201 bp, Homo sapiens; identical to SEQ ID NO: 65657

SEQ ID NO: 65671 - DNA, 201 bp, Homo sapiens; identical to SEQ ID NO: 65658

SEQ ID NO: 65672 - DNA, 201 bp, Homo sapiens
ccgtttacgcccctggggagggaactccccgtgtcccggacccgggcctggcagcgagacgcgcaggaacatcgtcttgagcaatcccaagaagaggaacrcgttgtcacttgcaatgctgaaatctctccaaagtgacattcttcatgacgctgacagcaacgatctgaaagtcattatcatctcggctgaggggcctgt

SEQ ID NO: 65673 - DNA, 201 bp, Homo sapiens
cccggggaaccggagccccgtttacgcccctggggagggaactccccgtgtcccggacccgggcctggcagcgagacgcgcaggaacatcgtcttgagcartcccaagaagaggaacacgttgtcacttgcaatgctgaaatctctccaaagtgacattcttcatgacgctgacagcaacgatctgaaagtcattatcatc

SEQ ID NO: 65674 - DNA, 201 bp, Homo sapiens
actccccgtgtcccggacccgggcctggcagcgagacgcgcaggaacatcgtcttgagcaatcccaagaagaggaacacgttgtcacttgcaatgctgaartctctccaaagtgacattcttcatgacgctgacagcaacgatctgaaagtcattatcatctcggctgaggggcctgtgttttcttctgggcatgacttaa

SEQ ID NO: 65675 - DNA, 201 bp, Homo sapiens; identical to SEQ ID NO: 65662

SEQ ID NO: 65676 - DNA, 201 bp, Homo sapiens
ggcagttgggaaaatgcaaagcacccaaaccactaacacatccaacagcaccaacaaatctcagcatggatcagcaaggctctttcgttcttccagcaaakgcttccaaggtacaactcaaacaagccatggttccttgatgacaaacaaacaacatcaaggcaaatccaataatcagtattaccatggcaaaaagaggaa

SEQ ID NO: 65677 - DNA, 201 bp, Homo sapiens
ttttctatagtgctgtcgtcttgggcaatgggcaattacatgactttgtgtttgcttcctttgcagtcttttttttttccccccatttcttcctaataggaaaaaaaaaaaaaaaaaaggtcacccatgtctggtctcattcctgttgcagtgaaacttcgagttccacagactttgcatgctggcttctctaaccctgtg

SEQ ID NO: 65678 - DNA, 201 bp, Homo sapiens; identical to SEQ ID NO: 65676

SEQ ID NO: 65679 - DNA, 201 bp, Homo sapiens; identical to SEQ ID NO: 65677

SEQ ID NO: 65680 - DNA, 201 bp, Homo sapiens; identical to SEQ ID NO: 65676

SEQ ID NO: 65681 - DNA, 201 bp, Homo sapiens; identical to SEQ ID NO: 65677

SEQ ID NO: 65682 - DNA, 201 bp, Homo sapiens; identical to SEQ ID NO: 65676

SEQ ID NO: 65683 - DNA, 201 bp, Homo sapiens; identical to SEQ ID NO: 65677

SEQ ID NO: 65684 - DNA, 201 bp, Homo sapiens
gctttgccaccaagttctcgaggtgctgcccagctcgggggacgctctgcactatctctgagagggtggagacacagcccctgctgaggctgaccctggcygtcctgaccatcggcagcctgctcactgtggccatcatcaacctgcccctgatgcctttccaagttccagagctgcctgttggcaatgagacaggcctac

SEQ ID NO: 65685 - DNA, 201 bp, Homo sapiens
atccgcacctacctggtcatcgacccccggagccagcagccacccccgcccagccaacacctccccaggcccaagggggacgcggccctgaagatgcgggygtcagtgcgcatgacccggtacctcgagtcctggggggcggcacggccctttgcacatctcaaccaccgtgagagcgtgagcagtggtgagacccacgtc

SEQ ID NO: 65686 - DNA, 201 bp, Homo sapiens
tggccagccgaatggaaagcactggagaacttgggaaaatccaggttaccgaggagacctgcaccatcctccagggcctcgggtactcttgtgaatgccgyggcctgatcaacgtcaaaggcaaaggcgagctgaggacttactttgtctgtacggacactgccaagtttcaggggctggggctgaactgagggctcctgc

SEQ ID NO: 65687 - DNA, 201 bp, Homo sapiens
agatccgccggaagctgcgcatcgagaagcgccagcaggagaacctgctgctgtcagtgcttccggcccacatctccatgggcatgaagctggccatcatygaacggctcaaggagcatggtgaccgtcgctgcatgcctgacaacaacttccacagcctctacgtcaagaggcaccagaatgtcagcatcctctatgcgg

SEQ ID NO: 65688 - DNA, 201 bp, Homo sapiens
tccacaagcaccaaatgcaggatgcgtcccgggacctcttcacctacactgtgaagtgcatccagatccgccggaagctgcgcatcgagaagcgccagcargagaacctgctgctgtcagtgcttccggcccacatctccatgggcatgaagctggccatcatcgaacggctcaaggagcatggtgaccgtcgctgcatgc

SEQ ID NO: 65689 - DNA, 201 bp, Homo sapiens
ttccccagcgccaccgccggaccccagacagaagcatgtcccccaaggggcggtcggaggatgactcgtacgatgacgagatgctgtcagccattgagggrctcagctccacgaggccctgctgctccaagtccgatgacttctacacctttgggtccatcttcctggagaagggctttgagcgcgagtaccgcctggcac

SEQ ID NO: 65690 - DNA, 201 bp, Homo sapiens
gggagtttaacaaataactgactaccactcactcatgcatttttatttccaattaaagcaaagcactgtgctgtgctcagataataatagtttgtaagtaraagtttttagttttcagtgttcaggttatagaatataactgaccataaaaattacctgcaggtattttctttttatgaacttgtttttaaattaccaagt

SEQ ID NO: 65691 - DNA, 201 bp, Homo sapiens
cctacctcaaggagatgaacatccgcacctacctggtcatcgacccccggagccagcagccacccccgcccagccaacacctccccaggcccaagggggaygcggccctgaagatgcgggcgtcagtgcgcatgacccggtacctcgagtcctggggggcggcacggccctttgcacatctcaaccaccgtgagagcgtga

SEQ ID NO: 65692 - DNA, 201 bp, Homo sapiens
tttgaatgaggcagcttgtgaggcaagcattctggagagaggtgctttgaaagtaaggtgcggcctttcacctcttccttgattactcacacatctttgcrttctcccctgccgtccttcaactgtatcttacttttcttaccagaaaggaatggagtctgtttagagacaacttggacaacctgtgagtgcatctcttct

SEQ ID NO: 65693 - DNA, 201 bp, Homo sapiens
aaccactgacatgtaaggaggactactgtctagcatcagcttatggggtcagctggctgtggggatagagtcctgaggaatgtggtcacagcaagaaggcrgggagcagcagagccttgcctttgaatgaggcagcttgtgaggcaagcattctggagagaggtgctttgaaagtaaggtgcggcctttcacctcttcctt

SEQ ID NO: 65694 - DNA, 201 bp, Homo sapiens
ctacatagcagggattcttagctaggtgtccccatgaaccccgtaaagttctacacaaagtcttgcatacaggagcctttacaagatgattatacagggtkgcagattgggtgactgaccagacttgttggggtcctgggatgagttgccccgggctgcaaattaagagtacagctaagtgcgggggtggcggtggaggga

SEQ ID NO: 65695 - DNA, 156 bp, Homo sapiens
agctgaggaactgcgtgtggagtcagcccagtctggatgcacaggaggatgctggyggcacagtgagtgaggcctggtgccagagctgtgcggaccccttgttggccatggagcagcaggcccagaggccctctccccagccctgcttgcctgcct

SEQ ID NO: 65696 - DNA, 201 bp, Homo sapiens; identical to SEQ ID NO: 65684

SEQ ID NO: 65697 - DNA, 201 bp, Homo sapiens; identical to SEQ ID NO: 65686

SEQ ID NO: 65698 - DNA, 124 bp, Homo sapiens
agctgaggaactgcgtgtggagtyagcccagtctggatgcacaggaggatgctggcggcacagtgagtgaggcctggtgccagagctgtgcggaccccttgttggccatggagcagcaggccca

SEQ ID NO: 65699 - DNA, 201 bp, Homo sapiens; identical to SEQ ID NO: 65687

SEQ ID NO: 65700 - DNA, 201 bp, Homo sapiens; identical to SEQ ID NO: 65688

SEQ ID NO: 65701 - DNA, 201 bp, Homo sapiens
acacgcgtgccaagggtggaggatgccagccaaggggcgctacttcctcaacgagggcgaggagggccctgaccaagatgcgctctacgagaagtaccagytcaccagccagcatgggccgctgctgctcacgctcctgctggtggccgccactgcctgcgtggccctcatcatcattgccttcagccagggggacccctc

SEQ ID NO: 65702 - DNA, 201 bp, Homo sapiens; identical to SEQ ID NO: 65690

SEQ ID NO: 65703 - DNA, 201 bp, Homo sapiens; identical to SEQ ID NO: 65692

SEQ ID NO: 65704 - DNA, 201 bp, Homo sapiens; identical to SEQ ID NO: 65693

SEQ ID NO: 65705 - DNA, 201 bp, Homo sapiens; identical to SEQ ID NO: 65694

SEQ ID NO: 65706 - DNA, 201 bp, Homo sapiens
ccctgcagaccctggccggctgctggggccggggaggagagccagagctgaggaactgcgtgtggagtcagcccagtctggatgcacaggaggatgctggyggcacagtgagtgaggcctggtgccagagctgtgcggaccccttgttggccatggagcagcaggcccagaggccctctccccagccctgcttgcctgcct

SEQ ID NO: 65707 - DNA, 201 bp, Homo sapiens; identical to SEQ ID NO: 65684

SEQ ID NO: 65708 - DNA, 201 bp, Homo sapiens; identical to SEQ ID NO: 65685

SEQ ID NO: 65709 - DNA, 201 bp, Homo sapiens; identical to SEQ ID NO: 65686

SEQ ID NO: 65710 - DNA, 201 bp, Homo sapiens
ctgaggaagggcaggcgggggccgggccacctccctgcagaccctggccggctgctggggccggggaggagagccagagctgaggaactgcgtgtggagtyagcccagtctggatgcacaggaggatgctggcggcacagtgagtgaggcctggtgccagagctgtgcggaccccttgttggccatggagcagcaggccca

SEQ ID NO: 65711 - DNA, 201 bp, Homo sapiens; identical to SEQ ID NO: 65687

SEQ ID NO: 65712 - DNA, 201 bp, Homo sapiens; identical to SEQ ID NO: 65688

SEQ ID NO: 65713 - DNA, 201 bp, Homo sapiens; identical to SEQ ID NO: 65701

SEQ ID NO: 65714 - DNA, 201 bp, Homo sapiens; identical to SEQ ID NO: 65689

SEQ ID NO: 65715 - DNA, 201 bp, Homo sapiens; identical to SEQ ID NO: 65690

SEQ ID NO: 65716 - DNA, 201 bp, Homo sapiens; identical to SEQ ID NO: 65692

SEQ ID NO: 65717 - DNA, 201 bp, Homo sapiens; identical to SEQ ID NO: 65691

SEQ ID NO: 65718 - DNA, 201 bp, Homo sapiens; identical to SEQ ID NO: 65693

SEQ ID NO: 65719 - DNA, 201 bp, Homo sapiens; identical to SEQ ID NO: 65694

SEQ ID NO: 65720 - DNA, 201 bp, Homo sapiens
ccaagcggcgcgtgttcatcatcgagaccatgggcggctactgtggctacctggccaacatgggggggctcgcggccggagctgatgccgcatacattttygaagagcccttcgacatcagggatctgcagtccaacgtggagcacctgacggagaaaatgaagaccaccatccagagaggccttgtgctcagaaatgaga

SEQ ID NO: 65721 - DNA, 201 bp, Homo sapiens
agctatgacgtgtcggactcaggccagctggaacatgtgcagccctggagtgtctgacccagtcccgcctgcatgtgcctgcagccaccgtggactgtctstttttgtaacacttaagttattttatcagcactttatgcacgtattattgacattaatacctaatcggcgagtgcccatctgccccaccagccccagtgc

SEQ ID NO: 65722 - DNA, 201 bp, Homo sapiens
tgtctgacccagtcccgcctgcatgtgcctgcagccaccgtggactgtctgtttttgtaacacttaagttattttatcagcactttatgcacgtattattracattaatacctaatcggcgagtgcccatctgccccaccagccccagtgcgtgctgtctgtggagtgtgtctcatgctttcagatgtgcatatgagcaga

SEQ ID NO: 65723 - DNA, 109 bp, Homo sapiens
agtgcccatctgccccaccagccccagtgcgtgctgtctgtggagtgtgtctcatgctttcagatgtgcatatgagcagaattaattaaacatttgcctayaactccaa

SEQ ID NO: 65724 - DNA, 201 bp, Homo sapiens
catttgatagaaactttggaaccaaaatctctgccagagctatggagtggatcactgcaaaactcaaggaggcccggggcagaggaaaaaaatttaccacygatgattccatttgtgtgctgggaataagcaaaagaaacgttatttttcaacctgtggcagagctgaagaagcaaacggattttgagcacaggattccca

SEQ ID NO: 65725 - DNA, 201 bp, Homo sapiens
cacccgcggctgggatgaacgcggccgtacgctcagctgtgcgcgtgggcattgccgacggccacaggatgctcgccatctatgatggctttgacggcttygccaagggccagatcaaagaaatcggctggacagatgtcgggggctggaccggccaaggaggctccattcttgggacaaaacgcgttctcccggggaagt

SEQ ID NO: 65726 - DNA, 187 bp, Homo sapiens
  misc_feature (1)...(187): n = A,T,C or G
actgtctgtttttgtaacacttaagttattttatcagcactttatgcacgtattattgacattaatacctaatcggcgagtgcccatctgccccaccagcnccagtgcgtgctgtctgtggagtgtgtctcatgctttcagatgtgcatatgagcagaattaattaaacatttgcctacaactccaa

SEQ ID NO: 65727 - DNA, 201 bp, Homo sapiens
aaactcaaggaggcccggggcagaggaaaaaaatttaccaccgatgattccatttgtgtgctgggaataagcaaaagaaacgttatttttcaacctgtggyagagctgaagaagcaaacggattttgagcacaggattcccaaagaacagtggtggctcaagctacggcccctcatgaaaatcctggccaagtacaaggcc

SEQ ID NO: 65728 - DNA, 201 bp, Homo sapiens
gcagaggaaaaaaatttaccaccgatgattccatttgtgtgctgggaataagcaaaagaaacgttatttttcaacctgtggcagagctgaagaagcaaackgattttgagcacaggattcccaaagaacagtggtggctcaagctacggcccctcatgaaaatcctggccaagtacaaggccagctatgacgtgtcggact

SEQ ID NO: 65729 - DNA, 201 bp, Homo sapiens
agaccaccatccagagaggccttgtgctcagaaatgagagctgcagtgaaaactacaccaccgacttcatttaccagctgtattcagaagagggcaaaggygtgtttgactgcaggaagaacgtgctgggtcacatgcagcagggtggggcaccctctccatttgatagaaactttggaaccaaaatctctgccagagcta

SEQ ID NO: 65730 - DNA, 201 bp, Homo sapiens
cggcattcgacaggatcttggccagccgcatgggagtggaggcagtcatcgccttgctagaggccaccccggacaccccagcttgcgtcgtgtcactgaaygggaaccacgccgtgcgcctgccgctgatggagtgcgtgcagatgactcaggatgtgcagaaggcgatggacgagaggagatttcaagatgcagttcgac

SEQ ID NO: 65731 - DNA, 121 bp, Homo sapiens
acctaatcggcgagtgcccatctgccccaccagccccagtgcgtgctgtctgtggagtgtgtctcatgctttcagatgtgcatatgagcagaattaattaaacatttgcctacaactccaa

SEQ ID NO: 65732 - DNA, 180 bp, Homo sapiens
gtttttgtaacacttaagttattttatcagcactttatgcacgtattattgacattaatacctaatcggcgagtgcccatctgccccaccagccccagtgygtgctgtctgtggagtgtgtctcatgctttcagatgtgcatatgagcagaattaattaaacatttgcctacaactccaa

SEQ ID NO: 65733 - DNA, 122 bp, Homo sapiens
tacctaatcggcgagtgcccatctgccccaccagccccagtgcgtgctgtctgtggagtgtgtctcatgctttcagatgtgcatatgagcagaattaattaaacatttgcctacaactccaa

SEQ ID NO: 65734 - DNA, 124 bp, Homo sapiens
aatacctaatcggcgagtgcccatctgccccaccagccccagtgcgtgctgtctgtggagtgtgtctcatgctttcagatgtgcatatgagcagaattaattaaacatttgcctacaactccaa

SEQ ID NO: 65735 - DNA, 201 bp, Homo sapiens
agaagcaaacggattttgagcacaggattcccaaagaacagtggtggctcaagctacggcccctcatgaaaatcctggccaagtacaaggccagctatgaygtgtcggactcaggccagctggaacatgtgcagccctggagtgtctgacccagtcccgcctgcatgtgcctgcagccaccgtggactgtctgtttttgta

SEQ ID NO: 65736 - DNA, 201 bp, Homo sapiens
caagtacaaggccagctatgacgtgtcggactcaggccagctggaacatgtgcagccctggagtgtctgacccagtcccgcctgcatgtgcctgcagccaycgtggactgtctgtttttgtaacacttaagttattttatcagcactttatgcacgtattattgacattaatacctaatcggcgagtgcccatctgcccca

SEQ ID NO: 65737 - DNA, 201 bp, Homo sapiens
gcgaccgcatcaagcagtccgccagcggaaccaagcggcgcgtgttcatcatcgagaccatgggcggctactgtggctacctggccaacatgggggggctygcggccggagctgatgccgcatacattttcgaagagcccttcgacatcagggatctgcagtccaacgtggagcacctgacggagaaaatgaagaccacca

SEQ ID NO: 65738 - DNA, 201 bp, Homo sapiens
accgcatcaagcagtccgccagcggaaccaagcggcgcgtgttcatcatcgagaccatgggcggctactgtggctacctggccaacatgggggggctcgcrgccggagctgatgccgcatacattttcgaagagcccttcgacatcagggatctgcagtccaacgtggagcacctgacggagaaaatgaagaccaccatcc

SEQ ID NO: 65739 - DNA, 201 bp, Homo sapiens
atgtgcagaaggcgatggacgagaggagatttcaagatgcagttcgactccgagggaggagctttgcgggcaacctgaacacctacaagcgacttgccatyaagctgccggatgatcagatcccaaagaccaattgcaacgtagctgtcatcaacgtgggggcacccgcggctgggatgaacgcggccgtacgctcagctg

SEQ ID NO: 65740 - DNA, 201 bp, Homo sapiens
gcatcctgcaagtgggcgggacgatcattggcagtgcgcggtgccaggccttccgcacgcgggaaggccgcctgaaggctgcttgcaacctgctgcagcgmggcatcaccaacctgtgtgtgatcggcggggacgggagcctcaccggggccaacctcttccggaaggagtggagtgggctgctggaggagctggccagga

SEQ ID NO: 65741 - DNA, 201 bp, Homo sapiens
accgtgcccggaaaaaaaggctgaatattattattgtggctgaaggagcaattgatacccaaaataaacccatcacctctgagaaaatcaaagagcttgtygtcacgcagctgggctatgacacacgtgtgaccatcctcgggcacgtgcagagaggagggaccccttcggcattcgacaggatcttggccagccgcatgg

SEQ ID NO: 65742 - DNA, 201 bp, Homo sapiens
ataaacccatcacctctgagaaaatcaaagagcttgtcgtcacgcagctgggctatgacacacgtgtgaccatcctcgggcacgtgcagagaggagggacyccttcggcattcgacaggatcttggccagccgcatgggagtggaggcagtcatcgccttgctagaggccaccccggacaccccagcttgcgtcgtgtcac

SEQ ID NO: 65743 - DNA, 123 bp, Homo sapiens
atacctaatcggcgagtgcccatctgccccaccagccccagtgcgtgctgtctgtggagtgtgtctcatgctttcagatgtgcatatgagcagaattaattaaacatttgcctacaactccaa

SEQ ID NO: 65744 - DNA, 201 bp, Homo sapiens
gcatcaagcagtccgccagcggaaccaagcggcgcgtgttcatcatcgagaccatgggcggctactgtggctacctggccaacatgggggggctcgcggcyggagctgatgccgcatacattttcgaagagcccttcgacatcagggatctgcagtccaacgtggagcacctgacggagaaaatgaagaccaccatccaga

SEQ ID NO: 65745 - DNA, 201 bp, Homo sapiens
agctgtcagccgcccgggagaagcacgaggagttctgtgtccccatggtcatggttcccgctactgtgtccaacaatgtgccgggttccgatttcagcatyggggcagacaccgccctgaacactatcaccgacacctgcgaccgcatcaagcagtccgccagcggaaccaagcggcgcgtgttcatcatcgagaccatgg

SEQ ID NO: 65746 - DNA, 201 bp, Homo sapiens
cctctgagaaaatcaaagagcttgtcgtcacgcagctgggctatgacacacgtgtgaccatcctcgggcacgtgcagagaggagggaccccttcggcattygacaggatcttggccagccgcatgggagtggaggcagtcatcgccttgctagaggccaccccggacaccccagcttgcgtcgtgtcactgaacgggaacc

SEQ ID NO: 65747 - DNA, 201 bp, Homo sapiens
ccgctactgtgtccaacaatgtgccgggttccgatttcagcatcggggcagacaccgccctgaacactatcaccgacacctgcgaccgcatcaagcagtcygccagcggaaccaagcggcgcgtgttcatcatcgagaccatgggcggctactgtggctacctggccaacatgggggggctcgcggccggagctgatgccg

SEQ ID NO: 65748 - DNA, 201 bp, Homo sapiens
acaagcgacttgccatcaagctgccggatgatcagatcccaaagaccaattgcaacgtagctgtcatcaacgtgggggcacccgcggctgggatgaacgcrgccgtacgctcagctgtgcgcgtgggcattgccgacggccacaggatgctcgccatctatgatggctttgacggcttcgccaagggccagatcaaagaaa

SEQ ID NO: 65749 - DNA, 201 bp, Homo sapiens
cagctatgacgtgtcggactcaggccagctggaacatgtgcagccctggagtgtctgacccagtcccgcctgcatgtgcctgcagccaccgtggactgtcwgtttttgtaacacttaagttattttatcagcactttatgcacgtattattgacattaatacctaatcggcgagtgcccatctgccccaccagccccagtg

SEQ ID NO: 65750 - DNA, 201 bp, Homo sapiens
cactgaacgggaaccacgccgtgcgcctgccgctgatggagtgcgtgcagatgactcaggatgtgcagaaggcgatggacgagaggagatttcaagatgcrgttcgactccgagggaggagctttgcgggcaacctgaacacctacaagcgacttgccatcaagctgccggatgatcagatcccaaagaccaattgcaacg

SEQ ID NO: 65751 - DNA, 201 bp, Homo sapiens
gcctgcatgtgcctgcagccaccgtggactgtctgtttttgtaacacttaagttattttatcagcactttatgcacgtattattgacattaatacctaatyggcgagtgcccatctgccccaccagccccagtgcgtgctgtctgtggagtgtgtctcatgctttcagatgtgcatatgagcagaattaattaaacatttg

SEQ ID NO: 65752 - DNA, 201 bp, Homo sapiens
tcattggcagtgcgcggtgccaggccttccgcacgcgggaaggccgcctgaaggctgcttgcaacctgctgcagcgcggcatcaccaacctgtgtgtgatyggcggggacgggagcctcaccggggccaacctcttccggaaggagtggagtgggctgctggaggagctggccaggaacggccagatcgataaggaggccg

SEQ ID NO: 65753 - DNA, 190 bp, Homo sapiens
tggactgtctgtttttgtaacacttaagttattttatcagcactttatgcacgtattattgacattaatacctaatcggcgagtgcccatctgccccaccwgccccagtgcgtgctgtctgtggagtgtgtctcatgctttcagatgtgcatatgagcagaattaattaaacatttgcctacaactccaa

SEQ ID NO: 65754 - DNA, 201 bp, Homo sapiens
gcagtgcgcggtgccaggccttccgcacgcgggaaggccgcctgaaggctgcttgcaacctgctgcagcgcggcatcaccaacctgtgtgtgatcggcggrgacgggagcctcaccggggccaacctcttccggaaggagtggagtgggctgctggaggagctggccaggaacggccagatcgataaggaggccgtgcaga

SEQ ID NO: 65755 - DNA, 201 bp, Homo sapiens
cccgggagaagcacgaggagttctgtgtccccatggtcatggttcccgctactgtgtccaacaatgtgccgggttccgatttcagcatcggggcagacacygccctgaacactatcaccgacacctgcgaccgcatcaagcagtccgccagcggaaccaagcggcgcgtgttcatcatcgagaccatgggcggctactgtg

SEQ ID NO: 65756 - DNA, 201 bp, Homo sapiens
agtacaaggccagctatgacgtgtcggactcaggccagctggaacatgtgcagccctggagtgtctgacccagtcccgcctgcatgtgcctgcagccaccrtggactgtctgtttttgtaacacttaagttattttatcagcactttatgcacgtattattgacattaatacctaatcggcgagtgcccatctgccccacc

SEQ ID NO: 65757 - DNA, 201 bp, Homo sapiens; identical to SEQ ID NO: 65720

SEQ ID NO: 65758 - DNA, 201 bp, Homo sapiens; identical to SEQ ID NO: 65721

SEQ ID NO: 65759 - DNA, 201 bp, Homo sapiens; identical to SEQ ID NO: 65722

SEQ ID NO: 65760 - DNA, 109 bp, Homo sapiens; identical to SEQ ID NO: 65723

SEQ ID NO: 65761 - DNA, 201 bp, Homo sapiens; identical to SEQ ID NO: 65724

SEQ ID NO: 65762 - DNA, 201 bp, Homo sapiens; identical to SEQ ID NO: 65725

SEQ ID NO: 65763 - DNA, 187 bp, Homo sapiens; identical to SEQ ID NO: 65726
  misc_feature (1)...(187): n = A,T,C or G

SEQ ID NO: 65764 - DNA, 201 bp, Homo sapiens; identical to SEQ ID NO: 65727

SEQ ID NO: 65765 - DNA, 201 bp, Homo sapiens; identical to SEQ ID NO: 65728

SEQ ID NO: 65766 - DNA, 201 bp, Homo sapiens; identical to SEQ ID NO: 65729

SEQ ID NO: 65767 - DNA, 201 bp, Homo sapiens
cacgtgtgaccatcctcgggcacgtgcagagaggagggaccccttcggcattcgacaggatcttggccccggacaccccagcttgcgtcgtgtcactgaaygggaaccacgccgtgcgcctgccgctgatggagtgcgtgcagatgactcaggatgtgcagaaggcgatggacgagaggagatttcaagatgcagttcgac

SEQ ID NO: 65768 - DNA, 121 bp, Homo sapiens; identical to SEQ ID NO: 65731

SEQ ID NO: 65769 - DNA, 180 bp, Homo sapiens; identical to SEQ ID NO: 65732

SEQ ID NO: 65770 - DNA, 122 bp, Homo sapiens; identical to SEQ ID NO: 65733

SEQ ID NO: 65771 - DNA, 124 bp, Homo sapiens; identical to SEQ ID NO: 65734

SEQ ID NO: 65772 - DNA, 201 bp, Homo sapiens; identical to SEQ ID NO: 65735

SEQ ID NO: 65773 - DNA, 201 bp, Homo sapiens; identical to SEQ ID NO: 65736

SEQ ID NO: 65774 - DNA, 201 bp, Homo sapiens; identical to SEQ ID NO: 65737

SEQ ID NO: 65775 - DNA, 201 bp, Homo sapiens; identical to SEQ ID NO: 65738

SEQ ID NO: 65776 - DNA, 201 bp, Homo sapiens; identical to SEQ ID NO: 65739

SEQ ID NO: 65777 - DNA, 201 bp, Homo sapiens; identical to SEQ ID NO: 65740

SEQ ID NO: 65778 - DNA, 201 bp, Homo sapiens
accgtgcccggaaaaaaaggctgaatattattattgtggctgaaggagcaattgatacccaaaataaacccatcacctctgagaaaatcaaagagcttgtygtcacgcagctgggctatgacacacgtgtgaccatcctcgggcacgtgcagagaggagggaccccttcggcattcgacaggatcttggccccggacaccc

SEQ ID NO: 65779 - DNA, 201 bp, Homo sapiens
ataaacccatcacctctgagaaaatcaaagagcttgtcgtcacgcagctgggctatgacacacgtgtgaccatcctcgggcacgtgcagagaggagggacyccttcggcattcgacaggatcttggccccggacaccccagcttgcgtcgtgtcactgaacgggaaccacgccgtgcgcctgccgctgatggagtgcgtgc

SEQ ID NO: 65780 - DNA, 123 bp, Homo sapiens; identical to SEQ ID NO: 65743

SEQ ID NO: 65781 - DNA, 201 bp, Homo sapiens; identical to SEQ ID NO: 65744

SEQ ID NO: 65782 - DNA, 201 bp, Homo sapiens; identical to SEQ ID NO: 65745

SEQ ID NO: 65783 - DNA, 201 bp, Homo sapiens
cctctgagaaaatcaaagagcttgtcgtcacgcagctgggctatgacacacgtgtgaccatcctcgggcacgtgcagagaggagggaccccttcggcattygacaggatcttggccccggacaccccagcttgcgtcgtgtcactgaacgggaaccacgccgtgcgcctgccgctgatggagtgcgtgcagatgactcagg

SEQ ID NO: 65784 - DNA, 201 bp, Homo sapiens; identical to SEQ ID NO: 65747

SEQ ID NO: 65785 - DNA, 201 bp, Homo sapiens; identical to SEQ ID NO: 65748

SEQ ID NO: 65786 - DNA, 201 bp, Homo sapiens; identical to SEQ ID NO: 65749

SEQ ID NO: 65787 - DNA, 201 bp, Homo sapiens; identical to SEQ ID NO: 65750

SEQ ID NO: 65788 - DNA, 201 bp, Homo sapiens; identical to SEQ ID NO: 65751

SEQ ID NO: 65789 - DNA, 201 bp, Homo sapiens; identical to SEQ ID NO: 65752

SEQ ID NO: 65790 - DNA, 190 bp, Homo sapiens; identical to SEQ ID NO: 65753

SEQ ID NO: 65791 - DNA, 201 bp, Homo sapiens; identical to SEQ ID NO: 65754

SEQ ID NO: 65792 - DNA, 201 bp, Homo sapiens; identical to SEQ ID NO: 65755

SEQ ID NO: 65793 - DNA, 201 bp, Homo sapiens; identical to SEQ ID NO: 65756

SEQ ID NO: 65794 - DNA, 201 bp, Homo sapiens; identical to SEQ ID NO: 65720

SEQ ID NO: 65795 - DNA, 201 bp, Homo sapiens; identical to SEQ ID NO: 65721

SEQ ID NO: 65796 - DNA, 201 bp, Homo sapiens; identical to SEQ ID NO: 65722

SEQ ID NO: 65797 - DNA, 109 bp, Homo sapiens; identical to SEQ ID NO: 65723

SEQ ID NO: 65798 - DNA, 201 bp, Homo sapiens; identical to SEQ ID NO: 65724

SEQ ID NO: 65799 - DNA, 201 bp, Homo sapiens; identical to SEQ ID NO: 65725

SEQ ID NO: 65800 - DNA, 187 bp, Homo sapiens; identical to SEQ ID NO: 65726
  misc_feature (1)...(187): n = A,T,C or G

SEQ ID NO: 65801 - DNA, 201 bp, Homo sapiens; identical to SEQ ID NO: 65727

SEQ ID NO: 65802 - DNA, 201 bp, Homo sapiens; identical to SEQ ID NO: 65728

SEQ ID NO: 65803 - DNA, 201 bp, Homo sapiens; identical to SEQ ID NO: 65729

SEQ ID NO: 65804 - DNA, 201 bp, Homo sapiens; identical to SEQ ID NO: 65730

SEQ ID NO: 65805 - DNA, 121 bp, Homo sapiens; identical to SEQ ID NO: 65731

SEQ ID NO: 65806 - DNA, 180 bp, Homo sapiens; identical to SEQ ID NO: 65732

SEQ ID NO: 65807 - DNA, 122 bp, Homo sapiens; identical to SEQ ID NO: 65733

SEQ ID NO: 65808 - DNA, 124 bp, Homo sapiens; identical to SEQ ID NO: 65734

SEQ ID NO: 65809 - DNA, 201 bp, Homo sapiens; identical to SEQ ID NO: 65735

SEQ ID NO: 65810 - DNA, 201 bp, Homo sapiens; identical to SEQ ID NO: 65736

SEQ ID NO: 65811 - DNA, 201 bp, Homo sapiens; identical to SEQ ID NO: 65737

SEQ ID NO: 65812 - DNA, 201 bp, Homo sapiens; identical to SEQ ID NO: 65738

SEQ ID NO: 65813 - DNA, 201 bp, Homo sapiens; identical to SEQ ID NO: 65739

SEQ ID NO: 65814 - DNA, 201 bp, Homo sapiens
acttcatctacgagggcgggacgatcattggcagtgcgcggtgccaggccttccgcacgcgggaaggccgcctgaaggctgcttgcaacctgctgcagcgmggcatcaccaacctgtgtgtgatcggcggggacgggagcctcaccggggccaacctcttccggaaggagtggagtgggctgctggaggagctggccagga

SEQ ID NO: 65815 - DNA, 201 bp, Homo sapiens; identical to SEQ ID NO: 65741

SEQ ID NO: 65816 - DNA, 201 bp, Homo sapiens; identical to SEQ ID NO: 65742

SEQ ID NO: 65817 - DNA, 123 bp, Homo sapiens; identical to SEQ ID NO: 65743

SEQ ID NO: 65818 - DNA, 201 bp, Homo sapiens; identical to SEQ ID NO: 65744

SEQ ID NO: 65819 - DNA, 201 bp, Homo sapiens; identical to SEQ ID NO: 65745

SEQ ID NO: 65820 - DNA, 201 bp, Homo sapiens; identical to SEQ ID NO: 65746

SEQ ID NO: 65821 - DNA, 201 bp, Homo sapiens; identical to SEQ ID NO: 65747

SEQ ID NO: 65822 - DNA, 201 bp, Homo sapiens; identical to SEQ ID NO: 65748

SEQ ID NO: 65823 - DNA, 201 bp, Homo sapiens; identical to SEQ ID NO: 65749

SEQ ID NO: 65824 - DNA, 201 bp, Homo sapiens; identical to SEQ ID NO: 65750

SEQ ID NO: 65825 - DNA, 201 bp, Homo sapiens; identical to SEQ ID NO: 65751

SEQ ID NO: 65826 - DNA, 201 bp, Homo sapiens; identical to SEQ ID NO: 65752

SEQ ID NO: 65827 - DNA, 190 bp, Homo sapiens; identical to SEQ ID NO: 65753

SEQ ID NO: 65828 - DNA, 201 bp, Homo sapiens; identical to SEQ ID NO: 65754

SEQ ID NO: 65829 - DNA, 201 bp, Homo sapiens; identical to SEQ ID NO: 65755

SEQ ID NO: 65830 - DNA, 201 bp, Homo sapiens; identical to SEQ ID NO: 65756

SEQ ID NO: 65831 - DNA, 201 bp, Homo sapiens; identical to SEQ ID NO: 65720

SEQ ID NO: 65832 - DNA, 201 bp, Homo sapiens; identical to SEQ ID NO: 65721

SEQ ID NO: 65833 - DNA, 201 bp, Homo sapiens; identical to SEQ ID NO: 65722

SEQ ID NO: 65834 - DNA, 109 bp, Homo sapiens; identical to SEQ ID NO: 65723

SEQ ID NO: 65835 - DNA, 201 bp, Homo sapiens; identical to SEQ ID NO: 65724

SEQ ID NO: 65836 - DNA, 201 bp, Homo sapiens; identical to SEQ ID NO: 65725

SEQ ID NO: 65837 - DNA, 187 bp, Homo sapiens; identical to SEQ ID NO: 65726
  misc_feature (1)...(187): n = A,T,C or G

SEQ ID NO: 65838 - DNA, 201 bp, Homo sapiens; identical to SEQ ID NO: 65727

SEQ ID NO: 65839 - DNA, 201 bp, Homo sapiens; identical to SEQ ID NO: 65728

SEQ ID NO: 65840 - DNA, 201 bp, Homo sapiens; identical to SEQ ID NO: 65729

SEQ ID NO: 65841 - DNA, 201 bp, Homo sapiens; identical to SEQ ID NO: 65730

SEQ ID NO: 65842 - DNA, 121 bp, Homo sapiens; identical to SEQ ID NO: 65731

SEQ ID NO: 65843 - DNA, 180 bp, Homo sapiens; identical to SEQ ID NO: 65732

SEQ ID NO: 65844 - DNA, 122 bp, Homo sapiens; identical to SEQ ID NO: 65733

SEQ ID NO: 65845 - DNA, 124 bp, Homo sapiens; identical to SEQ ID NO: 65734

SEQ ID NO: 65846 - DNA, 201 bp, Homo sapiens; identical to SEQ ID NO: 65735

SEQ ID NO: 65847 - DNA, 201 bp, Homo sapiens; identical to SEQ ID NO: 65736

SEQ ID NO: 65848 - DNA, 201 bp, Homo sapiens; identical to SEQ ID NO: 65737

SEQ ID NO: 65849 - DNA, 201 bp, Homo sapiens; identical to SEQ ID NO: 65738

SEQ ID NO: 65850 - DNA, 201 bp, Homo sapiens; identical to SEQ ID NO: 65739

SEQ ID NO: 65851 - DNA, 201 bp, Homo sapiens; identical to SEQ ID NO: 65740

SEQ ID NO: 65852 - DNA, 201 bp, Homo sapiens; identical to SEQ ID NO: 65741

SEQ ID NO: 65853 - DNA, 201 bp, Homo sapiens; identical to SEQ ID NO: 65742

SEQ ID NO: 65854 - DNA, 123 bp, Homo sapiens; identical to SEQ ID NO: 65743

SEQ ID NO: 65855 - DNA, 201 bp, Homo sapiens; identical to SEQ ID NO: 65744

SEQ ID NO: 65856 - DNA, 201 bp, Homo sapiens; identical to SEQ ID NO: 65745

SEQ ID NO: 65857 - DNA, 201 bp, Homo sapiens; identical to SEQ ID NO: 65746

SEQ ID NO: 65858 - DNA, 201 bp, Homo sapiens; identical to SEQ ID NO: 65747

SEQ ID NO: 65859 - DNA, 201 bp, Homo sapiens; identical to SEQ ID NO: 65748

SEQ ID NO: 65860 - DNA, 201 bp, Homo sapiens; identical to SEQ ID NO: 65749

SEQ ID NO: 65861 - DNA, 201 bp, Homo sapiens; identical to SEQ ID NO: 65750

SEQ ID NO: 65862 - DNA, 201 bp, Homo sapiens; identical to SEQ ID NO: 65751

SEQ ID NO: 65863 - DNA, 201 bp, Homo sapiens; identical to SEQ ID NO: 65752

SEQ ID NO: 65864 - DNA, 190 bp, Homo sapiens; identical to SEQ ID NO: 65753

SEQ ID NO: 65865 - DNA, 201 bp, Homo sapiens; identical to SEQ ID NO: 65754

SEQ ID NO: 65866 - DNA, 201 bp, Homo sapiens; identical to SEQ ID NO: 65755

SEQ ID NO: 65867 - DNA, 201 bp, Homo sapiens; identical to SEQ ID NO: 65756

SEQ ID NO: 65868 - DNA, 201 bp, Homo sapiens
atgcacatcacagacatgaaattgcctcacctgcctggcttagaagaccttggtattcaggcaacaccactggaactcaaggccattgaggtgctgcggcktcatcgcacttaccgctggctgtctgctgaaattgaggatgtgaagccggccaagaccgtcaacatttagtgcctcctgagcagctcttggttttggcgt

SEQ ID NO: 65869 - DNA, 201 bp, Homo sapiens
tttttgttaaacatatttaataatgatatatatactatttattctctgaaatgccagagagtttgaattttcctatgacaaaccacttctagcatacgttytagaagacaaggaccctttttaatgtcaaagtattgtaaagaccccaagtgatatgtgattgttttttaatttccattaaatgagagagcatacagtatc

SEQ ID NO: 65870 - DNA, 201 bp, Homo sapiens
catgaaattgcctcacctgcctggcttagaagaccttggtattcaggcaacaccactggaactcaaggccattgaggtgctgcggcgtcatcgcacttacygctggctgtctgctgaaattgaggatgtgaagccggccaagaccgtcaacatttagtgcctcctgagcagctcttggttttggcgtcttttgggtcggcc

SEQ ID NO: 65871 - DNA, 201 bp, Homo sapiens
acttgagcatgatttttgttaaacatatttaataatgatatatatactatttattctctgaaatgccagagagtttgaattttcctatgacaaaccacttytagcatacgttctagaagacaaggaccctttttaatgtcaaagtattgtaaagaccccaagtgatatgtgattgttttttaatttccattaaatgagaga

SEQ ID NO: 65872 - DNA, 201 bp, Homo sapiens
ctggctgtctgctgaaattgaggatgtgaagccggccaagaccgtcaacatttagtgcctcctgagcagctcttggttttggcgtcttttgggtcggcccrtgtggtttgagcacccagccaggcggtctctttagaggatcctgtacacagttccactattaaaacatttcaggttgaattctgcagtattttcttcctt

SEQ ID NO: 65873 - DNA, 201 bp, Homo sapiens
atcacagacatgaaattgcctcacctgcctggcttagaagaccttggtattcaggcaacaccactggaactcaaggccattgaggtgctgcggcgtcatcrcacttaccgctggctgtctgctgaaattgaggatgtgaagccggccaagaccgtcaacatttagtgcctcctgagcagctcttggttttggcgtcttttg

SEQ ID NO: 65874 - DNA, 201 bp, Homo sapiens
agaccgtcaacatttagtgcctcctgagcagctcttggttttggcgtcttttgggtcggcccatgtggtttgagcacccagccaggcggtctctttagagratcctgtacacagttccactattaaaacatttcaggttgaattctgcagtattttcttccttgatttacaaaatgagaaatgtagtcacttagaacttga

SEQ ID NO: 65875 - DNA, 201 bp, Homo sapiens
attgaggtgctgcggcgtcatcgcacttaccgctggctgtctgctgaaattgaggatgtgaagccggccaagaccgtcaacatttagtgcctcctgagcarctcttggttttggcgtcttttgggtcggcccatgtggtttgagcacccagccaggcggtctctttagaggatcctgtacacagttccactattaaaacat

SEQ ID NO: 65876 - DNA, 201 bp, Homo sapiens
taccgctggctgtctgctgaaattgaggatgtgaagccggccaagaccgtcaacatttagtgcctcctgagcagctcttggttttggcgtcttttgggtcrgcccatgtggtttgagcacccagccaggcggtctctttagaggatcctgtacacagttccactattaaaacatttcaggttgaattctgcagtattttct

SEQ ID NO: 65877 - DNA, 201 bp, Homo sapiens
tccacagtcttcttggatctgagctatctgaggccagcccgatgcccttagtaccacatctggattatttcagacacataggtggagatagattctcttcmcatgcaaaggagatgcttcagcttctatgccagcagtgccagcacttaggaattaggaccttctaatgaagttcttaaaattgcagccaagacccagatg

SEQ ID NO: 65878 - DNA, 201 bp, Homo sapiens
cttggtattcaggcaacaccactggaactcaaggccattgaggtgctgcggcgtcatcgcacttaccgctggctgtctgctgaaattgaggatgtgaagcyggccaagaccgtcaacatttagtgcctcctgagcagctcttggttttggcgtcttttgggtcggcccatgtggtttgagcacccagccaggcggtctctt

SEQ ID NO: 65879 - DNA, 201 bp, Homo sapiens
agttccactattaaaacatttcaggttgaattctgcagtattttcttccttgatttacaaaatgagaaatgtagtcacttagaacttgagcatgatttttkttaaacatatttaataatgatatatatactatttattctctgaaatgccagagagtttgaattttcctatgacaaaccacttctagcatacgttctagaa

SEQ ID NO: 65880 - DNA, 201 bp, Homo sapiens
aaggccattgaggtgctgcggcgtcatcgcacttaccgctggctgtctgctgaaattgaggatgtgaagccggccaagaccgtcaacatttagtgcctccygagcagctcttggttttggcgtcttttgggtcggcccatgtggtttgagcacccagccaggcggtctctttagaggatcctgtacacagttccactatta

SEQ ID NO: 65881 - DNA, 201 bp, Homo sapiens
tgtgaagccggccaagaccgtcaacatttagtgcctcctgagcagctcttggttttggcgtcttttgggtcggcccatgtggtttgagcacccagccaggyggtctctttagaggatcctgtacacagttccactattaaaacatttcaggttgaattctgcagtattttcttccttgatttacaaaatgagaaatgtagt

SEQ ID NO: 65882 - DNA, 201 bp, Homo sapiens
gcgtcatcgcacttaccgctggctgtctgctgaaattgaggatgtgaagccggccaagaccgtcaacatttagtgcctcctgagcagctcttggttttggygtcttttgggtcggcccatgtggtttgagcacccagccaggcggtctctttagaggatcctgtacacagttccactattaaaacatttcaggttgaattc

SEQ ID NO: 65883 - DNA, 201 bp, Homo sapiens
cctcatgggaaaggtggacgttcctcagtcagtgggattgtggccactgtgtttggagcaacaggattcctggggcgatatgttgtcaaccaccttggacrcatggggtcacaggtaatcataccctatcggtgtgataaatatgacatcatgcaccttcgtcccatgggtgacctgggccagcttctgtttctggaatgg

SEQ ID NO: 65884 - DNA, 201 bp, Homo sapiens
ctcctgagcagctcttggttttggcgtcttttgggtcggcccatgtggtttgagcacccagccaggcggtctctttagaggatcctgtacacagttccacyattaaaacatttcaggttgaattctgcagtattttcttccttgatttacaaaatgagaaatgtagtcacttagaacttgagcatgatttttgttaaacat

SEQ ID NO: 65885 - DNA, 201 bp, Homo sapiens
catctggattatttcagacacataggtggagatagattctcttcccatgcaaaggagatgcttcagcttctatgccagcagtgccagcacttaggaattakgaccttctaatgaagttcttaaaattgcagccaagacccagatgaacaattggtttagtgttggcaaatcccaccagtacagtgtgatttaaaactccca

SEQ ID NO: 65886 - DNA, 122 bp, Homo sapiens
agccaacataccaccatcctaggtgacccagggttggtcattgtgtttcactggacttcagcctcctgatctatatttgggacagggatgtcagtaaaaaygctgtttgatgagggaatgcc

SEQ ID NO: 65887 - DNA, 201 bp, Homo sapiens
aaatcctttgctttcgttggtcccagtcggtacctccttttccacctggtgaagtacatctttgctgtggctcacagattgttcctcccattccccttgcygctttttgcctatcgatgggtagcaagagtctttgaaataagcccatttgagccctggataacaagggataaagtggagcggatgcacatcacagacatg

SEQ ID NO: 65888 - DNA, 201 bp, Homo sapiens; identical to SEQ ID NO: 65868

SEQ ID NO: 65889 - DNA, 201 bp, Homo sapiens; identical to SEQ ID NO: 65869

SEQ ID NO: 65890 - DNA, 201 bp, Homo sapiens; identical to SEQ ID NO: 65870

SEQ ID NO: 65891 - DNA, 201 bp, Homo sapiens; identical to SEQ ID NO: 65871

SEQ ID NO: 65892 - DNA, 201 bp, Homo sapiens; identical to SEQ ID NO: 65872

SEQ ID NO: 65893 - DNA, 201 bp, Homo sapiens; identical to SEQ ID NO: 65873

SEQ ID NO: 65894 - DNA, 201 bp, Homo sapiens; identical to SEQ ID NO: 65874

SEQ ID NO: 65895 - DNA, 201 bp, Homo sapiens; identical to SEQ ID NO: 65875

SEQ ID NO: 65896 - DNA, 201 bp, Homo sapiens; identical to SEQ ID NO: 65876

SEQ ID NO: 65897 - DNA, 201 bp, Homo sapiens; identical to SEQ ID NO: 65877

SEQ ID NO: 65898 - DNA, 201 bp, Homo sapiens; identical to SEQ ID NO: 65878

SEQ ID NO: 65899 - DNA, 201 bp, Homo sapiens; identical to SEQ ID NO: 65879

SEQ ID NO: 65900 - DNA, 201 bp, Homo sapiens; identical to SEQ ID NO: 65880

SEQ ID NO: 65901 - DNA, 201 bp, Homo sapiens; identical to SEQ ID NO: 65881

SEQ ID NO: 65902 - DNA, 201 bp, Homo sapiens; identical to SEQ ID NO: 65882

SEQ ID NO: 65903 - DNA, 201 bp, Homo sapiens; identical to SEQ ID NO: 65883

SEQ ID NO: 65904 - DNA, 201 bp, Homo sapiens; identical to SEQ ID NO: 65884

SEQ ID NO: 65905 - DNA, 134 bp, Homo sapiens
cgtgggggattgtgggaaaagatggcggctgccscacaatcccgggttgtccgggtcctgtcaatgtcacgttctgccattactgcaatagccacatctgtgtgtcacggcccaccctgtcgccagcttcatca

SEQ ID NO: 65906 - DNA, 201 bp, Homo sapiens; identical to SEQ ID NO: 65885

SEQ ID NO: 65907 - DNA, 122 bp, Homo sapiens; identical to SEQ ID NO: 65886

SEQ ID NO: 65908 - DNA, 201 bp, Homo sapiens; identical to SEQ ID NO: 65887

SEQ ID NO: 65909 - DNA, 201 bp, Homo sapiens
gaagcgcaatgctctgcgagtggccgaaatctggatggatgagcacaaacacatggtctacttggcctggaacatacctctccagaactctggaatagatwttggagacgtttcttccagaatggcactccgggaaaaactgaaatgtaaaacttttgactggtacctgaaaaatgtttatccactcttgaagccactcca

SEQ ID NO: 65910 - DNA, 201 bp, Homo sapiens
gaaaaatgtttatccactcttgaagccactccacaccatcgtgggctatggaagaatgaaaaacctattggatgaaaatgtctgcttggatcagggaccckttccaggcaacacccccatcatgtattactgccatgaattcagctcacagaatgtctactatcacctaactggggagctctatgtgggacaactgattgc

SEQ ID NO: 65911 - DNA, 201 bp, Homo sapiens
ggcccaggacctcttccggaagtttggttacaacgcgtacctcagcaaccagctgcctctcaatcgcaccatccccgacacgcgagactacagatgtcttyggaagacatatccttcccaactcccatccctcagtgtcattctcatattcgtgaatgaagctctgtccattatacaacgggccatcaccagtatcatcaa

SEQ ID NO: 65912 - DNA, 201 bp, Homo sapiens
taaaggcaatggaaaccaaggtgaatgagacaaagaagcacaaaacccaaatgaaactcttcccacactcacagcttttcaggcaatggggcgaggatctktctgaggcccagcagaaggcggcccaggacctcttccggaagtttggttacaacgcgtacctcagcaaccagctgcctctcaatcgcaccatccccgaca

SEQ ID NO: 65913 - DNA, 201 bp, Homo sapiens
ttttgggtagccacgtgcttgtgctccagacctgtagcacgcaagtgtgggaaatccagcacactgtcagagactggggtcagaccaacagccagtgatcytcagatggcgctggatctgggtcatcaattcttgcaagtggaatggcttctactcctaacactcccagcttctttctcaatgagaaagaaagcatgtgta

SEQ ID NO: 65914 - DNA, 201 bp, Homo sapiens
catcaccagtatcatcaaccggacgccctctcgattgttgaaggaaatcatcttggtggatgatttcagctcaaatggagaactaaaggtacacttggatragaagattaagctttacaaccagaagtatccaggactactgaaaataatacggcatcctgaaaggaaaggtcttgctcaagcccgcaacactggctggga

SEQ ID NO: 65915 - DNA, 201 bp, Homo sapiens
agcttttcaggcaatggggcgaggatctttctgaggcccagcagaaggcggcccaggacctcttccggaagtttggttacaacgcgtacctcagcaaccarctgcctctcaatcgcaccatccccgacacgcgagactacagatgtcttcggaagacatatccttcccaactcccatccctcagtgtcattctcatattcg

SEQ ID NO: 65916 - DNA, 201 bp, Homo sapiens
  misc_feature (1)...(201): n = A,T,C or G
tgctgtcaatctccttctggtattttctagcaaggggactttacaaaacctgtttacgggtggtctccacagggagcttcctttacatctgaataaacgcnacggggcagtgataaagagactctcccacttggaggtggaattgcaggatctgaaagaaagtatgaaattagctctgaggcaacaagaaaatgtgaacag

SEQ ID NO: 65917 - DNA, 122 bp, Homo sapiens
atggcgctggatctgggtcatcaattcttgcaagtggaatggcttctactcctaacactcccagcttctttctcaatgagaaagaaagcatgtgtatgtcygtttatggcgacttcaggtgg

SEQ ID NO: 65918 - DNA, 201 bp, Homo sapiens
gagaagattaagctttacaaccagaagtatccaggactactgaaaataatacggcatcctgaaaggaaaggtcttgctcaagcccgcaacactggctgggragctgccacagcagacgtggtcgccatcttggatgctcacattgaagtcaatgttgggtgggcagagccaatcttggctcggattcaggaggaccgcact

SEQ ID NO: 65919 - DNA, 201 bp, Homo sapiens
tagctctgaggcaacaagaaaatgtgaacagcacactgaagagggcgaaagatgaagtacgccctcttctaaaggcaatggaaaccaaggtgaatgagacraagaagcacaaaacccaaatgaaactcttcccacactcacagcttttcaggcaatggggcgaggatctttctgaggcccagcagaaggcggcccaggacc

SEQ ID NO: 65920 - DNA, 201 bp, Homo sapiens
gctcacattgaagtcaatgttgggtgggcagagccaatcttggctcggattcaggaggaccgcactgtgattgtgtctcctgtgtttgacaacattcgttytgacaccttcaaactggataagtatgaactggcagttgatgggtttaactgggaactctggtgccgctacgatgcactgccacaagcctggattgatctg

SEQ ID NO: 65921 - DNA, 201 bp, Homo sapiens
aactcttcccacactcacagcttttcaggcaatggggcgaggatctttctgaggcccagcagaaggcggcccaggacctcttccggaagtttggttacaaygcgtacctcagcaaccagctgcctctcaatcgcaccatccccgacacgcgagactacagatgtcttcggaagacatatccttcccaactcccatccctca

SEQ ID NO: 65922 - DNA, 201 bp, Homo sapiens
tgaaaaatgtttatccactcttgaagccactccacaccatcgtgggctatggaagaatgaaaaacctattggatgaaaatgtctgcttggatcagggaccytttccaggcaacacccccatcatgtattactgccatgaattcagctcacagaatgtctactatcacctaactggggagctctatgtgggacaactgattg

SEQ ID NO: 65923 - DNA, 201 bp, Homo sapiens
ttgttgaaggaaatcatcttggtggatgatttcagctcaaatggagaactaaaggtacacttggatgagaagattaagctttacaaccagaagtatccagractactgaaaataatacggcatcctgaaaggaaaggtcttgctcaagcccgcaacactggctgggaagctgccacagcagacgtggtcgccatcttggat

SEQ ID NO: 65924 - DNA, 201 bp, Homo sapiens
gccacgtgcttgtgctccagacctgtagcacgcaagtgtgggaaatccagcacactgtcagagactggggtcagaccaacagccagtgatcttcagatggygctggatctgggtcatcaattcttgcaagtggaatggcttctactcctaacactcccagcttctttctcaatgagaaagaaagcatgtgtatgtctgttt

SEQ ID NO: 65925 - DNA, 201 bp, Homo sapiens
tagactgcatatatattgggattttaaaccgggaggagctgtcataaacagagataccaagcggtgtctggagatgaagaaggatcttttgggtagccacrtgcttgtgctccagacctgtagcacgcaagtgtgggaaatccagcacactgtcagagactggggtcagaccaacagccagtgatcttcagatggcgctgg

SEQ ID NO: 65926 - DNA, 201 bp, Homo sapiens
acccacggcgtgaaggggcagaaattcggaacaagactgtggtcaacctgttatttgctgcctatagtggcgatgtctcagctcttcgaaggtttgccttrtcagccatggatatggaacagaaagactatgactcgcgcacagctctgcatgttgctgcagctgaaggacacatcgaagttgttaaattcctgatcgagg

SEQ ID NO: 65927 - DNA, 201 bp, Homo sapiens
tcatttggtgacttaggctagtgctttctatgggagtcaaaataccccattccctcagcagacagagtacagagaagggcctcagaggacacctgcagtasagctatccagagagactgggcttcaaggtacagcctaatggcttgccccactcaaaaccatcccagctcttcacccaggtctcctcttcctctccctgaa

SEQ ID NO: 65928 - DNA, 201 bp, Homo sapiens
tgggtttcagcaatgccacattccagtcagagaaggaaacaggggatcggaattatgccatcggctattatctcaaggaaaagaagtgctttcctaagggrgtggacatgatggctgcccttgatctctacttccagctgtgttctgtggaggtcacttgtgaatcaggcagtgtcatggcagccaccctcgccaacggtg

SEQ ID NO: 65929 - DNA, 201 bp, Homo sapiens
gccaaggacaggtggggcaacattcccctggatgatgctgtgcagttcaaccatctggaggtggtcaaactgcttcaagattaccaggactcctacacacyctctgaaactcaggctgaggcagcagctgaggccctgtccaaagagaacttagaaagcatggtatgagcacaggtcatggacagcccctgctcaagaaaa

SEQ ID NO: 65930 - DNA, 201 bp, Homo sapiens
ccctgagccgggctggcagtcactgcgggcgaggaggctggggtcacccgagccggagccccctccttggcgggggcgtccggcaccacctcagtgaggcygcggcgcagggcagagagacgccacacagccaccagccgcagcaccaggatcatgattcatcagaaagtggcatgctgtcccgcctgggtgatttgctct

SEQ ID NO: 65931 - DNA, 201 bp, Homo sapiens
gctagtgctttctatgggagtcaaaataccccattccctcagcagacagagtacagagaagggcctcagaggacacctgcagtacagctatccagagagamtgggcttcaaggtacagcctaatggcttgccccactcaaaaccatcccagctcttcacccaggtctcctcttcctctccctgaagaaaccatcatgagag

SEQ ID NO: 65932 - DNA, 201 bp, Homo sapiens; identical to SEQ ID NO: 65926

SEQ ID NO: 65933 - DNA, 201 bp, Homo sapiens; identical to SEQ ID NO: 65927

SEQ ID NO: 65934 - DNA, 201 bp, Homo sapiens; identical to SEQ ID NO: 65928

SEQ ID NO: 65935 - DNA, 201 bp, Homo sapiens; identical to SEQ ID NO: 65929

SEQ ID NO: 65936 - DNA, 201 bp, Homo sapiens; identical to SEQ ID NO: 65930

SEQ ID NO: 65937 - DNA, 201 bp, Homo sapiens; identical to SEQ ID NO: 65931

SEQ ID NO: 65938 - DNA, 201 bp, Homo sapiens
cactggcaacggcgggattacaaaggcttctctccatctgtggactgggagactgtagattttgactctgctccatccattcaggaacttcctgtccagtmcgccatcacagagccccgggatggagagactgtagaatcaggggaggtgaccatcaagggctatgcatggagtggtggtggcagggctgtgatccgggtg

SEQ ID NO: 65939 - DNA, 201 bp, Homo sapiens
ccagccctgaaggtcaacagccagcggccctttaatgcagagcctccccctgagctgctgacagaaaactacatcacacccaaccctatcttcttcacccrgaaccatctgcctgtacctaacctggatccagacacctatcgcttacacgtagtaggagcacctgggggtcagtcactgtctctttccctggatgacttg

SEQ ID NO: 65940 - DNA, 201 bp, Homo sapiens
tcaccttctctggtgataactccagcacccagggatggagagtcatggggaccctattaggtctcggtgcagtgttggcctatcaggaccatcggtgtagkgctgctcaggagtcaacacacatatacactaaggaggaagtgagttcccacaccagccctgagactgggatctgggtgactctgggctctgaggtctttg

SEQ ID NO: 65941 - DNA, 201 bp, Homo sapiens
agaccctactgggactgcctatggagcatccatccctctggctcgggccatggaccctgaagctgaggtcctgctggcatatgagatgaatgggcagcctytgccacgtgaccacggcttccctgtgcgtgtggtggttcctggagtggtgggtgcccgccatgtcaaatggctgggcagagtgagtgtgcagccagagga

SEQ ID NO: 65942 - DNA, 201 bp, Homo sapiens
gacactggacccgcaaaaggctgtccctcccaaacctgggattctgggctcactgagttcacctgcgagtcagccctacctgcactgctctggtctagtayaaacaggctgctggcattgagggacggagtctccaactcctggcctctagcagtcctcctgtgtaggtctcccaaagtgctagtgtgtccggaattggtg

SEQ ID NO: 65943 - DNA, 201 bp, Homo sapiens
ttccctgtgcgtgtggtggttcctggagtggtgggtgcccgccatgtcaaatggctgggcagagtgagtgtgcagccagaggaaagttacagccactggcracggcgggattacaaaggcttctctccatctgtggactgggagactgtagattttgactctgctccatccattcaggaacttcctgtccagtccgccatc

SEQ ID NO: 65944 - DNA, 201 bp, Homo sapiens
ttacaaaggcttctctccatctgtggactgggagactgtagattttgactctgctccatccattcaggaacttcctgtccagtccgccatcacagagcccygggatggagagactgtagaatcaggggaggtgaccatcaagggctatgcatggagtggtggtggcagggctgtgatccgggtggatgtgtctctggatgg

SEQ ID NO: 65945 - DNA, 201 bp, Homo sapiens
tggtggttcctggagtggtgggtgcccgccatgtcaaatggctgggcagagtgagtgtgcagccagaggaaagttacagccactggcaacggcgggattasaaaggcttctctccatctgtggactgggagactgtagattttgactctgctccatccattcaggaacttcctgtccagtccgccatcacagagccccggg

SEQ ID NO: 65946 - DNA, 201 bp, Homo sapiens
actggcaacggcgggattacaaaggcttctctccatctgtggactgggagactgtagattttgactctgctccatccattcaggaacttcctgtccagtcbgccatcacagagccccgggatggagagactgtagaatcaggggaggtgaccatcaagggctatgcatggagtggtggtggcagggctgtgatccgggtgg

SEQ ID NO: 65947 - DNA, 201 bp, Homo sapiens
gtgccagctggacaaaaggaactgaacattgtttgtaaggctgtggatgatggttacaatgtgcagccagacaccgtggccccaatctggaacctgcgagrtgttctcagcaatgcctggcatcgtgtccatgtctatgtctccccatgagcatggaaaggagccacctccacccctttccccacccattagcctcactgc

SEQ ID NO: 65948 - DNA, 201 bp, Homo sapiens
cctggatccagacacctatcgcttacacgtagtaggagcacctgggggtcagtcactgtctctttccctggatgacttgcacaactttcccaggtacgagmtcacagtcactctgcagtgtgccggcaaccgacgctctgagatgactcaggtcaaagaagtaaaaggtctggagtggagaacaggagccatcagcactgc

SEQ ID NO: 65949 - DNA, 201 bp, Homo sapiens
gccagaggaaagttacagccactggcaacggcgggattacaaaggcttctctccatctgtggactgggagactgtagattttgactctgctccatccattyaggaacttcctgtccagtccgccatcacagagccccgggatggagagactgtagaatcaggggaggtgaccatcaagggctatgcatggagtggtggtgg

SEQ ID NO: 65950 - DNA, 201 bp, Homo sapiens
gtaggagcacctgggggtcagtcactgtctctttccctggatgacttgcacaactttcccaggtacgagatcacagtcactctgcagtgtgccggcaaccracgctctgagatgactcaggtcaaagaagtaaaaggtctggagtggagaacaggagccatcagcactgcacgctgggctggggcacggctctgtgatgtg

SEQ ID NO: 65951 - DNA, 201 bp, Homo sapiens
ttacacgtagtaggagcacctgggggtcagtcactgtctctttccctggatgacttgcacaactttcccaggtacgagatcacagtcactctgcagtgtgmcggcaaccgacgctctgagatgactcaggtcaaagaagtaaaaggtctggagtggagaacaggagccatcagcactgcacgctgggctggggcacggctc

SEQ ID NO: 65952 - DNA, 201 bp, Homo sapiens
tgctccatccattcaggaacttcctgtccagtccgccatcacagagccccgggatggagagactgtagaatcaggggaggtgaccatcaagggctatgcayggagtggtggtggcagggctgtgatccgggtggatgtgtctctggatgggggcctaacctggcaggtggctaagctggatggagaggaacagcgccccag

SEQ ID NO: 65953 - DNA, 201 bp, Homo sapiens
tgcctatggagcatccatccctctggctcgggccatggaccctgaagctgaggtcctgctggcatatgagatgaatgggcagcctctgccacgtgaccacrgcttccctgtgcgtgtggtggttcctggagtggtgggtgcccgccatgtcaaatggctgggcagagtgagtgtgcagccagaggaaagttacagccactg

SEQ ID NO: 65954 - DNA, 201 bp, Homo sapiens
tccatccctctggctcgggccatggaccctgaagctgaggtcctgctggcatatgagatgaatgggcagcctctgccacgtgaccacggcttccctgtgcrtgtggtggttcctggagtggtgggtgcccgccatgtcaaatggctgggcagagtgagtgtgcagccagaggaaagttacagccactggcaacggcgggat

SEQ ID NO: 65955 - DNA, 201 bp, Homo sapiens
tgaagctgaggtcctgctggcatatgagatgaatgggcagcctctgccacgtgaccacggcttccctgtgcgtgtggtggttcctggagtggtgggtgccygccatgtcaaatggctgggcagagtgagtgtgcagccagaggaaagttacagccactggcaacggcgggattacaaaggcttctctccatctgtggactg

SEQ ID NO: 65956 - DNA, 201 bp, Homo sapiens
gtcctgctggcatatgagatgaatgggcagcctctgccacgtgaccacggcttccctgtgcgtgtggtggttcctggagtggtgggtgcccgccatgtcaratggctgggcagagtgagtgtgcagccagaggaaagttacagccactggcaacggcgggattacaaaggcttctctccatctgtggactgggagactgta

SEQ ID NO: 65957 - DNA, 201 bp, Homo sapiens; identical to SEQ ID NO: 65938

SEQ ID NO: 65958 - DNA, 201 bp, Homo sapiens; identical to SEQ ID NO: 65939

SEQ ID NO: 65959 - DNA, 201 bp, Homo sapiens; identical to SEQ ID NO: 65940

SEQ ID NO: 65960 - DNA, 201 bp, Homo sapiens; identical to SEQ ID NO: 65941

SEQ ID NO: 65961 - DNA, 201 bp, Homo sapiens; identical to SEQ ID NO: 65943

SEQ ID NO: 65962 - DNA, 201 bp, Homo sapiens; identical to SEQ ID NO: 65944

SEQ ID NO: 65963 - DNA, 201 bp, Homo sapiens; identical to SEQ ID NO: 65945

SEQ ID NO: 65964 - DNA, 201 bp, Homo sapiens; identical to SEQ ID NO: 65946

SEQ ID NO: 65965 - DNA, 201 bp, Homo sapiens; identical to SEQ ID NO: 65947

SEQ ID NO: 65966 - DNA, 201 bp, Homo sapiens; identical to SEQ ID NO: 65948

SEQ ID NO: 65967 - DNA, 201 bp, Homo sapiens; identical to SEQ ID NO: 65949

SEQ ID NO: 65968 - DNA, 201 bp, Homo sapiens; identical to SEQ ID NO: 65950

SEQ ID NO: 65969 - DNA, 201 bp, Homo sapiens; identical to SEQ ID NO: 65951

SEQ ID NO: 65970 - DNA, 201 bp, Homo sapiens; identical to SEQ ID NO: 65952

SEQ ID NO: 65971 - DNA, 201 bp, Homo sapiens; identical to SEQ ID NO: 65953

SEQ ID NO: 65972 - DNA, 201 bp, Homo sapiens; identical to SEQ ID NO: 65954

SEQ ID NO: 65973 - DNA, 201 bp, Homo sapiens; identical to SEQ ID NO: 65955

SEQ ID NO: 65974 - DNA, 201 bp, Homo sapiens; identical to SEQ ID NO: 65956

SEQ ID NO: 65975 - DNA, 201 bp, Homo sapiens
ctactgggggtcgtagaacatatccccagtggataagggggtactactgtacttgttggctcttcatgttagctctgctaggcagatgtcatttcagagawgaggaagcaagttcagaacggcttggaatcttgctcaggaaatcgggctggttaatgaataacaagagatccagtttcacaaacccaaggcattttgccc

SEQ ID NO: 65976 - DNA, 201 bp, Homo sapiens; identical to SEQ ID NO: 65938

SEQ ID NO: 65977 - DNA, 201 bp, Homo sapiens; identical to SEQ ID NO: 65939

SEQ ID NO: 65978 - DNA, 201 bp, Homo sapiens; identical to SEQ ID NO: 65940

SEQ ID NO: 65979 - DNA, 201 bp, Homo sapiens; identical to SEQ ID NO: 65941

SEQ ID NO: 65980 - DNA, 201 bp, Homo sapiens; identical to SEQ ID NO: 65943

SEQ ID NO: 65981 - DNA, 201 bp, Homo sapiens; identical to SEQ ID NO: 65944

SEQ ID NO: 65982 - DNA, 201 bp, Homo sapiens
agtcagtctgacccacagttgtcctctgctgacttcagaaataataatctggccagtagacatttggtttcggtcctttaggcccttcgccccaggcatcrttctctatggtggacaaagttcagaatggaagatgggagaaaggtgattctgattctagaagcacccatccctcctaccccattccccacccgcattacc

SEQ ID NO: 65983 - DNA, 201 bp, Homo sapiens; identical to SEQ ID NO: 65945

SEQ ID NO: 65984 - DNA, 201 bp, Homo sapiens; identical to SEQ ID NO: 65949

SEQ ID NO: 65985 - DNA, 201 bp, Homo sapiens; identical to SEQ ID NO: 65948

SEQ ID NO: 65986 - DNA, 201 bp, Homo sapiens; identical to SEQ ID NO: 65947

SEQ ID NO: 65987 - DNA, 201 bp, Homo sapiens; identical to SEQ ID NO: 65946

SEQ ID NO: 65988 - DNA, 201 bp, Homo sapiens; identical to SEQ ID NO: 65950

SEQ ID NO: 65989 - DNA, 201 bp, Homo sapiens; identical to SEQ ID NO: 65951

SEQ ID NO: 65990 - DNA, 201 bp, Homo sapiens; identical to SEQ ID NO: 65952

SEQ ID NO: 65991 - DNA, 201 bp, Homo sapiens; identical to SEQ ID NO: 65953

SEQ ID NO: 65992 - DNA, 201 bp, Homo sapiens; identical to SEQ ID NO: 65954

SEQ ID NO: 65993 - DNA, 201 bp, Homo sapiens; identical to SEQ ID NO: 65955

SEQ ID NO: 65994 - DNA, 201 bp, Homo sapiens; identical to SEQ ID NO: 65956

SEQ ID NO: 65995 - DNA, 201 bp, Homo sapiens
aacagtaatatagggtttggtgcaatctgtggtttcaaacatctactgggggtcgtagaacatatccccagtggataagggggtactactgtacttgttgrctcttcatgttagctctgctaggcagatgtcatttcagagatgaggaagcaagttcagaacggcttggaatcttgctcaggaaatcgggctggttaatga

SEQ ID NO: 65996 - DNA, 201 bp, Homo sapiens; identical to SEQ ID NO: 65938

SEQ ID NO: 65997 - DNA, 201 bp, Homo sapiens; identical to SEQ ID NO: 65939

SEQ ID NO: 65998 - DNA, 201 bp, Homo sapiens; identical to SEQ ID NO: 65940

SEQ ID NO: 65999 - DNA, 201 bp, Homo sapiens; identical to SEQ ID NO: 65941

SEQ ID NO: 66000 - DNA, 201 bp, Homo sapiens
gacactggacccgcaaaaggctgtccctcccaaacctgggattctgggctcactgagttcacctgcgagtcagccctacctgcactgctctggtctagtayaaacaggctgctggcattgaggtctgctacaatgctgctgctgcacagagctgtggtcctcaggctccaacaggcctgcagactcaagtcaatcccctca

SEQ ID NO: 66001 - DNA, 201 bp, Homo sapiens; identical to SEQ ID NO: 65943

SEQ ID NO: 66002 - DNA, 201 bp, Homo sapiens; identical to SEQ ID NO: 65944

SEQ ID NO: 66003 - DNA, 201 bp, Homo sapiens; identical to SEQ ID NO: 65945

SEQ ID NO: 66004 - DNA, 201 bp, Homo sapiens; identical to SEQ ID NO: 65946

SEQ ID NO: 66005 - DNA, 201 bp, Homo sapiens; identical to SEQ ID NO: 65947

SEQ ID NO: 66006 - DNA, 201 bp, Homo sapiens; identical to SEQ ID NO: 65948

SEQ ID NO: 66007 - DNA, 201 bp, Homo sapiens; identical to SEQ ID NO: 65949

SEQ ID NO: 66008 - DNA, 201 bp, Homo sapiens; identical to SEQ ID NO: 65950

SEQ ID NO: 66009 - DNA, 201 bp, Homo sapiens; identical to SEQ ID NO: 65951

SEQ ID NO: 66010 - DNA, 201 bp, Homo sapiens; identical to SEQ ID NO: 65952

SEQ ID NO: 66011 - DNA, 201 bp, Homo sapiens; identical to SEQ ID NO: 65953

SEQ ID NO: 66012 - DNA, 201 bp, Homo sapiens; identical to SEQ ID NO: 65954

SEQ ID NO: 66013 - DNA, 201 bp, Homo sapiens; identical to SEQ ID NO: 65955

SEQ ID NO: 66014 - DNA, 201 bp, Homo sapiens; identical to SEQ ID NO: 65956

SEQ ID NO: 66015 - DNA, 201 bp, Homo sapiens
gccttcagtctccacccggactacgccatgttggggtttgtgggtcgggtggccgctgctccggcctccggggccttgcggagactcaccccttcagcgtygctgcccccagctcagctcttactgcgggccgctccgacggcggtccatcctgtcagggactatgcggcgcaaacatctccttcgccaaaagcaggcgcc

SEQ ID NO: 66016 - DNA, 201 bp, Homo sapiens
ggaagctggtacccctgaaggagaccatcaaaggattccagcagattttggcaggtgaatatgaccatctcccagaacaggccttctatatggtgggaccyattgaagaagctgtggcaaaagctgataagctggctgaagagcattcatcgtgaggggtctttgtcctctgtactgtctctctccttgcccctaacccaa

SEQ ID NO: 66017 - DNA, 148 bp, Homo sapiens
gtctttgtcctctgtactgtctctctccttgcccctaacccaaaaagcttcatttttctgtgtaggctgcacaagagccttgattgaagatatattctttytgaacagtatttaaggtttccaataaaatgtacacccctcagaattt

SEQ ID NO: 66018 - DNA, 201 bp, Homo sapiens
acatctttcgcttcacccaggctggttcagaggtgtctgcattattgggccgaatcccttctgctgtgggctatcagcctaccctggccactgacatgggyactatgcaggaaagaattaccactaccaagaagggatctatcacctctgtacaggctatctatgtgcctgctgatgacttgactgaccctgcccctgcta

SEQ ID NO: 66019 - DNA, 189 bp, Homo sapiens
caaaagctgataagctggctgaagagcattcatcgtgaggggtctttgtcctctgtactgtctctctccttgcccctaacccaaaaagcttcatttttctrtgtaggctgcacaagagccttgattgaagatatattctttctgaacagtatttaaggtttccaataaaatgtacacccctcagaattt

SEQ ID NO: 66020 - DNA, 191 bp, Homo sapiens
ggcaaaagctgataagctggctgaagagcattcatcgtgaggggtctttgtcctctgtactgtctctctccttgcccctaacccaaaaagcttcatttttytgtgtaggctgcacaagagccttgattgaagatatattctttctgaacagtatttaaggtttccaataaaatgtacacccctcagaattt

SEQ ID NO: 66021 - DNA, 152 bp, Homo sapiens
acaccccaaaacacatacattgaaagtgcctcatctgaataaaatgacttgtgtttcccctttgggatctgctaagtaagtggtacacttccttcttttawaccttcactccttaaatgacgtagattctcccaagaagcaacagaaaaacc

SEQ ID NO: 66022 - DNA, 201 bp, Homo sapiens
ctctgcggattgaccctgttcctaacacccacccacttctcgtctttgtcaatcctaagagtggcgggaagcaggggcaaagggtgctctggaagttccartatatattaaaccctcgacaggtgttcaacctcctaaaggatggtcctgagatagggctccgattattcaaggatgttcctgatagccggattttggtgt

SEQ ID NO: 66023 - DNA, 201 bp, Homo sapiens
atgatggcagtggctctgtctctcaagctgagtgggtccgggctggggccaccaccgtgccactgctagtgctgctgggtctggagatgactctgaaggaygacggacagcacatgtggaggcccaagaggttccccagaccagtctactgcaatctgtgcgagtcaagcattggtcttggcaaacagggactgagctgta

SEQ ID NO: 66024 - DNA, 201 bp, Homo sapiens
acacctaagcctggcactgtttcaatcctttgagactggtcactgcttaaatgagacaaatgtgacaaaaggtatggtcaagcagatgtggtgtgtctcartgatgtttcctgctacttttcccttctggagggtggtcggccagaagacaagttagaattcaccttcaagctgtacgacacggacagaaatgggatcctg

SEQ ID NO: 66025 - DNA, 201 bp, Homo sapiens
tcatcaccgaccctgatatcctgaaaacctgtgtaccagacctaagtgacaagagactggaagtggttgggctggagggtgcaattgagatgggccaaatytataccaagctcaagaatgctggacgtcggctggccaagtgctctgagatcaccttccacaccacaaaaacccttcccatgcaaattgacggagaaccct

SEQ ID NO: 66026 - DNA, 154 bp, Homo sapiens
acacaccccaaaacacatacattgaaagtgcctcatctgaataaaatgacttgtgtttcccctttgggatctgctaagtaagtggtacacttccttctttyataccttcactccttaaatgacgtagattctcccaagaagcaacagaaaaacc

SEQ ID NO: 66027 - DNA, 201 bp, Homo sapiens
agaccattgacaaagctaacttgccagttttgcctcctgttgctgtgttgcccctgggtactggaaatgatctggctcgatgcctaagatggggaggaggktatgaaggacagaatctggcaaagatcctcaaggatttagagatgagtaaagtggtacatatggatcgatggtctgtggaggtgatacctcaacaaactg

SEQ ID NO: 66028 - DNA, 201 bp, Homo sapiens
taaatttgagcacctctgaggctctgcggattgaccctgttcctaacacccacccacttctcgtctttgtcaatcctaagagtggcgggaagcaggggcaragggtgctctggaagttccagtatatattaaaccctcgacaggtgttcaacctcctaaaggatggtcctgagatagggctccgattattcaaggatgttc

SEQ ID NO: 66029 - DNA, 136 bp, Homo sapiens
ctccatctctctcccttgctgtaccaccttcaccascatccatgcgaccccaagagccttaatgactctagaagagactccaggcaggggaagctgaaaggacctttcactccctacttttggccagggccttctg

SEQ ID NO: 66030 - DNA, 152 bp, Homo sapiens; identical to SEQ ID NO: 66021

SEQ ID NO: 66031 - DNA, 201 bp, Homo sapiens; identical to SEQ ID NO: 66022

SEQ ID NO: 66032 - DNA, 201 bp, Homo sapiens; identical to SEQ ID NO: 66023

SEQ ID NO: 66033 - DNA, 201 bp, Homo sapiens
gataatgttcccagacacctaagcctggcactgtttcaatcctttgagactggtcactgcttaaatgagacaaatgtgacaaaagatgtggtgtgtctcartgatgtttcctgctacttttcccttctggagggtggtcggccagaagacaagttagaattcaccttcaagctgtacgacacggacagaaatgggatcctg

SEQ ID NO: 66034 - DNA, 201 bp, Homo sapiens; identical to SEQ ID NO: 66025

SEQ ID NO: 66035 - DNA, 154 bp, Homo sapiens; identical to SEQ ID NO: 66026

SEQ ID NO: 66036 - DNA, 201 bp, Homo sapiens; identical to SEQ ID NO: 66028

SEQ ID NO: 66037 - DNA, 201 bp, Homo sapiens; identical to SEQ ID NO: 66027

SEQ ID NO: 66038 - DNA, 152 bp, Homo sapiens; identical to SEQ ID NO: 66021

SEQ ID NO: 66039 - DNA, 201 bp, Homo sapiens; identical to SEQ ID NO: 66022

SEQ ID NO: 66040 - DNA, 201 bp, Homo sapiens; identical to SEQ ID NO: 66023

SEQ ID NO: 66041 - DNA, 201 bp, Homo sapiens; identical to SEQ ID NO: 66033

SEQ ID NO: 66042 - DNA, 201 bp, Homo sapiens; identical to SEQ ID NO: 66025

SEQ ID NO: 66043 - DNA, 154 bp, Homo sapiens; identical to SEQ ID NO: 66026

SEQ ID NO: 66044 - DNA, 201 bp, Homo sapiens; identical to SEQ ID NO: 66028

SEQ ID NO: 66045 - DNA, 201 bp, Homo sapiens; identical to SEQ ID NO: 66027

SEQ ID NO: 66046 - DNA, 152 bp, Homo sapiens; identical to SEQ ID NO: 66021

SEQ ID NO: 66047 - DNA, 201 bp, Homo sapiens; identical to SEQ ID NO: 66022

SEQ ID NO: 66048 - DNA, 201 bp, Homo sapiens; identical to SEQ ID NO: 66023

SEQ ID NO: 66049 - DNA, 201 bp, Homo sapiens; identical to SEQ ID NO: 66033

SEQ ID NO: 66050 - DNA, 201 bp, Homo sapiens; identical to SEQ ID NO: 66025

SEQ ID NO: 66051 - DNA, 154 bp, Homo sapiens; identical to SEQ ID NO: 66026

SEQ ID NO: 66052 - DNA, 201 bp, Homo sapiens; identical to SEQ ID NO: 66028

SEQ ID NO: 66053 - DNA, 201 bp, Homo sapiens; identical to SEQ ID NO: 66027

SEQ ID NO: 66054 - DNA, 152 bp, Homo sapiens; identical to SEQ ID NO: 66021

SEQ ID NO: 66055 - DNA, 201 bp, Homo sapiens; identical to SEQ ID NO: 66022

SEQ ID NO: 66056 - DNA, 201 bp, Homo sapiens; identical to SEQ ID NO: 66023

SEQ ID NO: 66057 - DNA, 201 bp, Homo sapiens; identical to SEQ ID NO: 66033

SEQ ID NO: 66058 - DNA, 201 bp, Homo sapiens; identical to SEQ ID NO: 66025

SEQ ID NO: 66059 - DNA, 154 bp, Homo sapiens; identical to SEQ ID NO: 66026

SEQ ID NO: 66060 - DNA, 201 bp, Homo sapiens; identical to SEQ ID NO: 66027

SEQ ID NO: 66061 - DNA, 201 bp, Homo sapiens; identical to SEQ ID NO: 66028

SEQ ID NO: 66062 - DNA, 136 bp, Homo sapiens; identical to SEQ ID NO: 66029

SEQ ID NO: 66063 - DNA, 201 bp, Homo sapiens
ggatatccagtgccttatcccatgtgccattgaccaggatccttactttagaatgacaagggacgtcgcccccaggatcggctatcctaaaccagccctgytgcactccaccttcttcccagccctgcagggcgcccagaccaaaatgagtgccagcgaccccaactcctccatcttcctcaccgacacggccaagcagat

SEQ ID NO: 66064 - DNA, 201 bp, Homo sapiens
acaaggggagctcgtaaggtccctcaaagcgggaaatgcgtcaaaggatgaaattgattctgcagtaaagatgttggtgtcattaaaaatgagctacaaakctgccgcgggggaggattacaaggctgactgtcctccagggaacccagcacctaccagtaatcatggcccagatgccacagaagctgaagaggattttgt

SEQ ID NO: 66065 - DNA, 201 bp, Homo sapiens
ggagctcgtaaggtccctcaaagcgggaaatgcgtcaaaggatgaaattgattctgcagtaaagatgttggtgtcattaaaaatgagctacaaagctgcckcgggggaggattacaaggctgactgtcctccagggaacccagcacctaccagtaatcatggcccagatgccacagaagctgaagaggattttgtggaccc

SEQ ID NO: 66066 - DNA, 201 bp, Homo sapiens
tttctggagggagagacaccatcgaggagcacaggcagtttgggggcaactgtgatgtggacgtgtctttcatgtacctgaccttcttcctcgaggacgaygacaagctcgagcagatcaggaaggattacaccagcggagccatgctcaccggtgagctcaagaaggcactcatagaggttctgcagcccttgatcgcag

SEQ ID NO: 66067 - DNA, 201 bp, Homo sapiens
gagctcgtaaggtccctcaaagcgggaaatgcgtcaaaggatgaaattgattctgcagtaaagatgttggtgtcattaaaaatgagctacaaagctgccgygggggaggattacaaggctgactgtcctccagggaacccagcacctaccagtaatcatggcccagatgccacagaagctgaagaggattttgtggaccca

SEQ ID NO: 66068 - DNA, 201 bp, Homo sapiens
cagcacctaccagtaatcatggcccagatgccacagaagctgaagaggattttgtggacccatggacagtacagacaagcagtgcaaaaggcatagactaygataagctcattgttcggtttggaagtagtaaaattgacaaagagctaataaaccgaatagagagagccaccggccaaagaccacaccacttcctgcgca

SEQ ID NO: 66069 - DNA, 201 bp, Homo sapiens
ttccgagacaggacggatatccagtgccttatcccatgtgccattgaccaggatccttactttagaatgacaagggacgtcgcccccaggatcggctatcytaaaccagccctgctgcactccaccttcttcccagccctgcagggcgcccagaccaaaatgagtgccagcgaccccaactcctccatcttcctcaccgac

SEQ ID NO: 66070 - DNA, 201 bp, Homo sapiens
tccatcttcctcaccgacacggccaagcagatcaaaaccaaggtcaataagcatgcgttttctggagggagagacaccatcgaggagcacaggcagtttgkgggcaactgtgatgtggacgtgtctttcatgtacctgaccttcttcctcgaggacgacgacaagctcgagcagatcaggaaggattacaccagcggagcc

SEQ ID NO: 66071 - DNA, 107 bp, Homo sapiens
acagccsgttgctgagccgggagcgctgactggcccggctgggcagggtgaatctacttctcttaacaaagtctcaatgtcctatttgcaatttatgtggtaaacac

SEQ ID NO: 66072 - DNA, 201 bp, Homo sapiens
aataatcccagcccagtcaaagcaccgccacctgtaggcttctgtctcatggtaattactgggcctggcctctgtaagcctgtgtatgttatcaatactgkttcttcctgtgagttccattatttctatctcttatgggcaaagcattgtgggtaattggtgctggctaacattgccaccctgttcttgtccatggaggac

SEQ ID NO: 66073 - DNA, 201 bp, Homo sapiens
gaagctgtccttcgactttcagtagcactcgttttacatatgcttataaaagaagtgatgtatcagtaatgtatcaataatcccagcccagtcaaagcacsgccacctgtaggcttctgtctcatggtaattactgggcctggcctctgtaagcctgtgtatgttatcaatactgtttcttcctgtgagttccattatttc

SEQ ID NO: 66074 - DNA, 201 bp, Homo sapiens; identical to SEQ ID NO: 66063

SEQ ID NO: 66075 - DNA, 201 bp, Homo sapiens; identical to SEQ ID NO: 66064

SEQ ID NO: 66076 - DNA, 201 bp, Homo sapiens; identical to SEQ ID NO: 66065

SEQ ID NO: 66077 - DNA, 201 bp, Homo sapiens; identical to SEQ ID NO: 66067

SEQ ID NO: 66078 - DNA, 201 bp, Homo sapiens; identical to SEQ ID NO: 66066

SEQ ID NO: 66079 - DNA, 194 bp, Homo sapiens
ggagaaagtcgaggcagcagccctcgaggccctcacagatgtctaggcaggcctcatttcatcacgcagcatgtgcaggcctggaagagcaaagccaaatytcagggaagtccttggttgatgtatctgggtctcctctggagcactctgccctcctgtcacccagtagagtaaataaacttccttggctcctg

SEQ ID NO: 66080 - DNA, 201 bp, Homo sapiens; identical to SEQ ID NO: 66068

SEQ ID NO: 66081 - DNA, 201 bp, Homo sapiens
tggaagtcagcacagagcagtgccctggctgtgtccctggacgggtggacttagctagggagaaagtcgaggcagcagccctcgaggccctcacagatgtytaggcaggcctcatttcatcacgcagcatgtgcaggcctggaagagcaaagccaaatctcagggaagtccttggttgatgtatctgggtctcctctggag

SEQ ID NO: 66082 - DNA, 157 bp, Homo sapiens
gatgtctaggcaggcctcatttcatcacgcagcatgtgcaggcctggaagagcaaagccaaatctcagggaagtccttggttgatgtatctgggtctcctytggagcactctgccctcctgtcacccagtagagtaaataaacttccttggctcctg

SEQ ID NO: 66083 - DNA, 201 bp, Homo sapiens; identical to SEQ ID NO: 66069

SEQ ID NO: 66084 - DNA, 168 bp, Homo sapiens
aggccctcacagatgtctaggcaggcctcatttcatcacgcagcatgtgcaggcctggaagagcaaagccaaatctcagggaagtccttggttgatgtatytgggtctcctctggagcactctgccctcctgtcacccagtagagtaaataaacttccttggctcctg

SEQ ID NO: 66085 - DNA, 201 bp, Homo sapiens; identical to SEQ ID NO: 66070

SEQ ID NO: 66086 - DNA, 121 bp, Homo sapiens
cggacgcccaggagacagccsgttgctgagccgggagcgctgactggcccggctgggcaggggcactctcagcagctcaactgcccagcgtgaccagtggccacctctgcagtgtcttcca

SEQ ID NO: 66087 - DNA, 201 bp, Homo sapiens
aaaaagaaattgataagtaaaagcttcgttatacatttgactaagaaatcacccagctttaaagctgcttttaacaatgaagattgaacagagttcagcarttttgattaaattaagacttgggggtgaaactttccagtttactgaactccagaccatgcatgtagtccactccagaaatcatgctcgcttcccttggca

SEQ ID NO: 66088 - DNA, 188 bp, Homo sapiens
agtcgaggcagcagccctcgaggccctcacagatgtctaggcaggcctcatttcatcacgcagcatgtgcaggcctggaagagcaaagccaaatctcaggsaagtccttggttgatgtatctgggtctcctctggagcactctgccctcctgtcacccagtagagtaaataaacttccttggctcctg

SEQ ID NO: 66089 - DNA, 201 bp, Homo sapiens
aataatcccagcccagtcaaagcaccgccacctgtaggcttctgtctcatggtaattactgggcctggcctctgtaagcctgtgtatgttatcaatactgkttcttcctgtgagttccattatttctatctcttatgggcaaagcattgtgggtaattggtgctggctaacattgcatggtcggatagagaagtccagctg

SEQ ID NO: 66090 - DNA, 201 bp, Homo sapiens; identical to SEQ ID NO: 66073

SEQ ID NO: 66091 - DNA, 201 bp, Homo sapiens; identical to SEQ ID NO: 66063

SEQ ID NO: 66092 - DNA, 201 bp, Homo sapiens; identical to SEQ ID NO: 66064

SEQ ID NO: 66093 - DNA, 201 bp, Homo sapiens; identical to SEQ ID NO: 66065

SEQ ID NO: 66094 - DNA, 201 bp, Homo sapiens; identical to SEQ ID NO: 66067

SEQ ID NO: 66095 - DNA, 201 bp, Homo sapiens; identical to SEQ ID NO: 66066

SEQ ID NO: 66096 - DNA, 194 bp, Homo sapiens; identical to SEQ ID NO: 66079

SEQ ID NO: 66097 - DNA, 201 bp, Homo sapiens; identical to SEQ ID NO: 66068

SEQ ID NO: 66098 - DNA, 201 bp, Homo sapiens; identical to SEQ ID NO: 66081

SEQ ID NO: 66099 - DNA, 157 bp, Homo sapiens; identical to SEQ ID NO: 66082

SEQ ID NO: 66100 - DNA, 201 bp, Homo sapiens; identical to SEQ ID NO: 66069

SEQ ID NO: 66101 - DNA, 168 bp, Homo sapiens; identical to SEQ ID NO: 66084

SEQ ID NO: 66102 - DNA, 201 bp, Homo sapiens; identical to SEQ ID NO: 66070

SEQ ID NO: 66103 - DNA, 128 bp, Homo sapiens
gtttccacggacgcccaggagacagccsgttgctgagccgggagcgctgactggcccggctgggcaggctgaaagaaagaggggaagagtattaaagaccatttctggctgggcagggcactctcagc

SEQ ID NO: 66104 - DNA, 201 bp, Homo sapiens; identical to SEQ ID NO: 66087

SEQ ID NO: 66105 - DNA, 188 bp, Homo sapiens; identical to SEQ ID NO: 66088

SEQ ID NO: 66106 - DNA, 201 bp, Homo sapiens; identical to SEQ ID NO: 66089

SEQ ID NO: 66107 - DNA, 201 bp, Homo sapiens; identical to SEQ ID NO: 66073

SEQ ID NO: 66108 - DNA, 201 bp, Homo sapiens; identical to SEQ ID NO: 66063

SEQ ID NO: 66109 - DNA, 153 bp, Homo sapiens
tgcaatgaccagctaatggctcgattctcaagagggtttcattggtctcaacmtggccccccaggcaacccacccctgattggacagtctcatcaagaaggttggtcaagagctcaagtgtttctgagaatctgggtgatttataagaaaccc

SEQ ID NO: 66110 - DNA, 201 bp, Homo sapiens; identical to SEQ ID NO: 66064

SEQ ID NO: 66111 - DNA, 201 bp, Homo sapiens; identical to SEQ ID NO: 66065

SEQ ID NO: 66112 - DNA, 201 bp, Homo sapiens; identical to SEQ ID NO: 66067

SEQ ID NO: 66113 - DNA, 201 bp, Homo sapiens; identical to SEQ ID NO: 66066

SEQ ID NO: 66114 - DNA, 194 bp, Homo sapiens; identical to SEQ ID NO: 66079

SEQ ID NO: 66115 - DNA, 201 bp, Homo sapiens; identical to SEQ ID NO: 66068

SEQ ID NO: 66116 - DNA, 201 bp, Homo sapiens; identical to SEQ ID NO: 66081

SEQ ID NO: 66117 - DNA, 157 bp, Homo sapiens; identical to SEQ ID NO: 66082

SEQ ID NO: 66118 - DNA, 201 bp, Homo sapiens; identical to SEQ ID NO: 66069

SEQ ID NO: 66119 - DNA, 168 bp, Homo sapiens; identical to SEQ ID NO: 66084

SEQ ID NO: 66120 - DNA, 201 bp, Homo sapiens; identical to SEQ ID NO: 66070

SEQ ID NO: 66121 - DNA, 201 bp, Homo sapiens; identical to SEQ ID NO: 66087

SEQ ID NO: 66122 - DNA, 188 bp, Homo sapiens; identical to SEQ ID NO: 66088

SEQ ID NO: 66123 - DNA, 201 bp, Homo sapiens; identical to SEQ ID NO: 66089

SEQ ID NO: 66124 - DNA, 201 bp, Homo sapiens; identical to SEQ ID NO: 66073

SEQ ID NO: 66125 - DNA, 201 bp, Homo sapiens; identical to SEQ ID NO: 66063

SEQ ID NO: 66126 - DNA, 201 bp, Homo sapiens
attaaagaccatttctggctgggcagggcactctcagcagctcaactgcccagcgtgaccagtggccacctctgcagtgtcttccacaacctggagtgtastatttgttaaacaggtgaatctacttctcttaacaaagtctcaatgtcctatttgcaatttatgtggtaaacactgaagacaatggtccttaaccttttg

SEQ ID NO: 66127 - DNA, 151 bp, Homo sapiens
caatgaccagctaatggctcgattctcaagagggtttcattggtctcaacmtggccccccaggcaacccacccctgattggacagtctcatcaagaaggttggtcaagagctcaagtgtttctgagaatctgggtgatttataagaaaccc

SEQ ID NO: 66128 - DNA, 201 bp, Homo sapiens; identical to SEQ ID NO: 66064

SEQ ID NO: 66129 - DNA, 201 bp, Homo sapiens; identical to SEQ ID NO: 66065

SEQ ID NO: 66130 - DNA, 201 bp, Homo sapiens; identical to SEQ ID NO: 66067

SEQ ID NO: 66131 - DNA, 201 bp, Homo sapiens; identical to SEQ ID NO: 66066

SEQ ID NO: 66132 - DNA, 194 bp, Homo sapiens; identical to SEQ ID NO: 66079

SEQ ID NO: 66133 - DNA, 201 bp, Homo sapiens; identical to SEQ ID NO: 66068

SEQ ID NO: 66134 - DNA, 201 bp, Homo sapiens; identical to SEQ ID NO: 66081

SEQ ID NO: 66135 - DNA, 157 bp, Homo sapiens; identical to SEQ ID NO: 66082

SEQ ID NO: 66136 - DNA, 201 bp, Homo sapiens; identical to SEQ ID NO: 66069

SEQ ID NO: 66137 - DNA, 168 bp, Homo sapiens; identical to SEQ ID NO: 66084

SEQ ID NO: 66138 - DNA, 201 bp, Homo sapiens; identical to SEQ ID NO: 66070

SEQ ID NO: 66139 - DNA, 201 bp, Homo sapiens; identical to SEQ ID NO: 66087

SEQ ID NO: 66140 - DNA, 188 bp, Homo sapiens; identical to SEQ ID NO: 66088

SEQ ID NO: 66141 - DNA, 201 bp, Homo sapiens; identical to SEQ ID NO: 66089

SEQ ID NO: 66142 - DNA, 201 bp, Homo sapiens; identical to SEQ ID NO: 66073

SEQ ID NO: 66143 - DNA, 201 bp, Homo sapiens; identical to SEQ ID NO: 66064

SEQ ID NO: 66144 - DNA, 201 bp, Homo sapiens; identical to SEQ ID NO: 66065

SEQ ID NO: 66145 - DNA, 194 bp, Homo sapiens; identical to SEQ ID NO: 66079

SEQ ID NO: 66146 - DNA, 201 bp, Homo sapiens; identical to SEQ ID NO: 66081

SEQ ID NO: 66147 - DNA, 201 bp, Homo sapiens; identical to SEQ ID NO: 66069

SEQ ID NO: 66148 - DNA, 157 bp, Homo sapiens; identical to SEQ ID NO: 66082

SEQ ID NO: 66149 - DNA, 168 bp, Homo sapiens; identical to SEQ ID NO: 66084

SEQ ID NO: 66150 - DNA, 201 bp, Homo sapiens; identical to SEQ ID NO: 66070

SEQ ID NO: 66151 - DNA, 188 bp, Homo sapiens; identical to SEQ ID NO: 66088

SEQ ID NO: 66152 - DNA, 201 bp, Homo sapiens; identical to SEQ ID NO: 66089

SEQ ID NO: 66153 - DNA, 201 bp, Homo sapiens; identical to SEQ ID NO: 66073

SEQ ID NO: 66154 - DNA, 201 bp, Homo sapiens; identical to SEQ ID NO: 66063

SEQ ID NO: 66155 - DNA, 201 bp, Homo sapiens; identical to SEQ ID NO: 66067

SEQ ID NO: 66156 - DNA, 201 bp, Homo sapiens; identical to SEQ ID NO: 66066

SEQ ID NO: 66157 - DNA, 201 bp, Homo sapiens; identical to SEQ ID NO: 66068

SEQ ID NO: 66158 - DNA, 201 bp, Homo sapiens; identical to SEQ ID NO: 66087

SEQ ID NO: 66159 - DNA, 201 bp, Homo sapiens
ttaagtgtgcaaacaagttagagctggcagctgaatgatagacaaatagtgcaaatttgccagcttggagatagaaaggaattcaacaatatatcaaataytttccttcccacctttttccttttttttttttttttctgatttgattctggttacagtgccataaaccttgttacatatgtatatcagaatgtaagaaaa

SEQ ID NO: 66160 - DNA, 185 bp, Homo sapiens
attatataaatgaaactggtttaggatgtgtctttttttcccctctcttttaccttaactcaggttcaagcctttcttaagctctggtaacttgcatatayaacaaagttgaaataaaacagatttttatatagggaaagagagatgaggaagggaacatatccagttttctcactgtgaaacag

SEQ ID NO: 66161 - DNA, 201 bp, Homo sapiens
atactttccttcccacctttttccttttttttttttttttctgatttgattctggttacagtgccataaaccttgttacatatgtatatcagaatgtaagaaaaaaaaatttatttaaaaatatttttcgcaaaaaaaaaaaaatcttggtgtgtttctgttgattgtgtaaaaatttattttcattatataaatgaaact

SEQ ID NO: 66162 - DNA, 201 bp, Homo sapiens
gtagggaaggcaaggactctttcaagaggatcttttccaaagaaattatagtttatgatgagaataccaatgagccaagccgagtgatgccctcccagccmcttcacatagtcctcgagtccctgaagagagaaggcaaagaacctctggtgttgaaaggtggacttagtagttttaagcagaaccatgaaaacctctgtg

SEQ ID NO: 66163 - DNA, 201 bp, Homo sapiens
tttttttttctgatttgattctggttacagtgccataaaccttgttacatatgtatatcagaatgtaagaaaaaaaaatttatttaaaaatatttttcgcaaaaaaaaaaaaatcttggtgtgtttctgttgattgtgtaaaaatttattttcattatataaatgaaactggtttaggatgtgtctttttttcccctctct

SEQ ID NO: 66164 - DNA, 201 bp, Homo sapiens
agatcactgtcctagacttgatttcctgtagggaaggcaaggactctttcaagaggatcttttccaaagaaattatagtttatgatgagaataccaatgarccaagccgagtgatgccctcccagccacttcacatagtcctcgagtccctgaagagagaaggcaaagaacctctggtgttgaaaggtggacttagtagtt

SEQ ID NO: 66165 - DNA, 201 bp, Homo sapiens
atatgccctcatccagcggctctgcccgctcgctgaattgtggatgcagcagtgccagctgctgcactgtggcaacctacgacaaggacaatcaggcccaracccaagccattgccgctggcaccaccaccactgccatcggaacctctaccacctgccctgctaaccagatggtcaacaataatgagaatacaggctctc

SEQ ID NO: 66166 - DNA, 201 bp, Homo sapiens; identical to SEQ ID NO: 66159

SEQ ID NO: 66167 - DNA, 185 bp, Homo sapiens; identical to SEQ ID NO: 66160

SEQ ID NO: 66168 - DNA, 201 bp, Homo sapiens; identical to SEQ ID NO: 66161

SEQ ID NO: 66169 - DNA, 201 bp, Homo sapiens; identical to SEQ ID NO: 66163

SEQ ID NO: 66170 - DNA, 201 bp, Homo sapiens
aggaagaggaggctgaaagggatcggttaaatatcaagtcaccattttcactgagccacgttcctcatgggaagaaaaagctgcatggtgaatataagaaytgaattctacatgtgctgcatgaagagctaatttaaaaaagcaaagtaagactaattatttaaaataaaaatgccacaaatttcattttctccttctaag

SEQ ID NO: 66171 - DNA, 201 bp, Homo sapiens
agcaccattagacggattggacttttcaacaaccgcacagatagagtcaaggtgattttgcacccagagtttctatcctccaccagtcccttactacccakggactatgaagagtttgttagaggttgtcatcttggagtatttccatcatactatgaaccctggggttatactccagctgaatgcactgtgatgggtatc

SEQ ID NO: 66172 - DNA, 201 bp, Homo sapiens
attatttaaaataaaaatgccacaaatttcattttctccttctaagtattacaatggagtttattctctgcctaaaaagtggaagaaattgagtgaatgayaattttgtaatttaggataagatccaagttattttccccaactcttgtttcccccataaagttaggcatgaggaggagcactcattaaaggcagaagacg

SEQ ID NO: 66173 - DNA, 201 bp, Homo sapiens
gcagtgatgtggaagatgaagtggaggatgagagatacgatgaggaagaggaggctgaaagggatcggttaaatatcaagtcaccattttcactgagccaygttcctcatgggaagaaaaagctgcatggtgaatataagaactgaattctacatgtgctgcatgaagagctaatttaaaaaagcaaagtaagactaatta

SEQ ID NO: 66174 - DNA, 201 bp, Homo sapiens
aggctgaaagggatcggttaaatatcaagtcaccattttcactgagccacgttcctcatgggaagaaaaagctgcatggtgaatataagaactgaattctwcatgtgctgcatgaagagctaatttaaaaaagcaaagtaagactaattatttaaaataaaaatgccacaaatttcattttctccttctaagtattacaat

SEQ ID NO: 66175 - DNA, 201 bp, Homo sapiens
gggttatactccagctgaatgcactgtgatgggtatccccagtgtgaccacgaatctctccgggtttggctgtttcatgcaggagcacgtggctgatcctrctgcttacggtatttacatcgttgacaggcggttccgttctccagatgattcttgcaatcagctgactaagtttctctatggattttgcaaacagtcacg

SEQ ID NO: 66176 - DNA, 201 bp, Homo sapiens
gacaagcagtgcgaaaacagctgtgggatgttgcacattctgtgaaggaaaagtttggaaaaaaactctatgatgcattattaagaggagaaattcctgasctgaacgatattttagatcgagatgatctaacaattatgaaaagagccatcttttcaactcagcgacagtcattgcccccagtgaccacgcacaacatga

SEQ ID NO: 66177 - DNA, 201 bp, Homo sapiens
taacttttgtgcctgtaagttctcttctcctgggattacaactaattgaaacaggaattcaaaggagtctcggaggactgtaagaagaatgcttcgaggcygatccctctctgtaacatccctgggtgggcttccccagtgggaagtcgaagaacttcctgtggaggagttactgctctttgaagttgcttgggaagtgac

SEQ ID NO: 66178 - DNA, 201 bp, Homo sapiens
tctctgtgcagcaaatattgatttctacaaccatcttgataagtttaacattgacaaagaggctggggaaaggcagatttaccaccggtactgcatggagygagcttccgttcattgcgctcacgtgttcaccacggtttctgaaataacagcaatagaagctgaacatatgctgaagagaaagcctgatgtagttactcc

SEQ ID NO: 66179 - DNA, 201 bp, Homo sapiens
caaagtaagactaattatttaaaataaaaatgccacaaatttcattttctccttctaagtattacaatggagtttattctctgcctaaaaagtggaagaahttgagtgaatgacaattttgtaatttaggataagatccaagttattttccccaactcttgtttcccccataaagttaggcatgaggaggagcactcatta

SEQ ID NO: 66180 - DNA, 201 bp, Homo sapiens
ccatcctcagcaccattagacggattggacttttcaacaaccgcacagatagagtcaaggtgattttgcacccagagtttctatcctccaccagtcccttrctacccatggactatgaagagtttgttagaggttgtcatcttggagtatttccatcatactatgaaccctggggttatactccagctgaatgcactgtga

SEQ ID NO: 66181 - DNA, 201 bp, Homo sapiens
tgcctggttcttaaaagaggtgacagatcatgcagatggtaaatatgtcgttgcccaattccatgaatggcaggctggaattggactgatcctttctcgarccaggaaacttcctattgccacaatatttacaacccacgctacactacttgggaggtatctctgtgcagcaaatattgatttctacaaccatcttgataa

SEQ ID NO: 66182 - DNA, 201 bp, Homo sapiens
agagaactattttctgataggtccatattttgagcataatatgaagactcaggtggaacagtgtgaacctgtaaatgatgctgtcagaagagcagtggacrcaatgaataagcatggctgccaggtgcattttggaagatggctgatagaaggaagtccttatgtggtactttttgacataggctattcagcttggaatct

SEQ ID NO: 66183 - DNA, 201 bp, Homo sapiens
caatgatatgctgatatttggatctttaactgcctggttcttaaaagaggtgacagatcatgcagatggtaaatatgtcgttgcccaattccatgaatggyaggctggaattggactgatcctttctcgagccaggaaacttcctattgccacaatatttacaacccacgctacactacttgggaggtatctctgtgcagc

SEQ ID NO: 66184 - DNA, 201 bp, Homo sapiens
agattttgttcgaggtcatttctatggtcatctcgactttgatcttgaaaagactttgttccttttcattgctgggaggtatgagttttcaaacaaaggasctgacatcttcctagaatccttatccaggctaaatttcctgctgaggatgcataaaagtgacatcacagtggtggtgtttttcattatgcctgccaagac

SEQ ID NO: 66185 - DNA, 201 bp, Homo sapiens
tgggaggtatgagttttcaaacaaaggagctgacatcttcctagaatccttatccaggctaaatttcctgctgaggatgcataaaagtgacatcacagtgrtggtgtttttcattatgcctgccaagacaaataatttcaacgtggaaaccctgaaaggacaagcagtgcgaaaacagctgtgggatgttgcacattctgt

SEQ ID NO: 66186 - DNA, 201 bp, Homo sapiens
atggtgaatataagaactgaattctacatgtgctgcatgaagagctaatttaaaaaagcaaagtaagactaattatttaaaataaaaatgccacaaatttmattttctccttctaagtattacaatggagtttattctctgcctaaaaagtggaagaaattgagtgaatgacaattttgtaatttaggataagatccaagt

SEQ ID NO: 66187 - DNA, 201 bp, Homo sapiens; identical to SEQ ID NO: 66170

SEQ ID NO: 66188 - DNA, 201 bp, Homo sapiens; identical to SEQ ID NO: 66171

SEQ ID NO: 66189 - DNA, 201 bp, Homo sapiens; identical to SEQ ID NO: 66173

SEQ ID NO: 66190 - DNA, 201 bp, Homo sapiens; identical to SEQ ID NO: 66174

SEQ ID NO: 66191 - DNA, 201 bp, Homo sapiens; identical to SEQ ID NO: 66175

SEQ ID NO: 66192 - DNA, 201 bp, Homo sapiens; identical to SEQ ID NO: 66176

SEQ ID NO: 66193 - DNA, 201 bp, Homo sapiens; identical to SEQ ID NO: 66177

SEQ ID NO: 66194 - DNA, 201 bp, Homo sapiens; identical to SEQ ID NO: 66178

SEQ ID NO: 66195 - DNA, 201 bp, Homo sapiens; identical to SEQ ID NO: 66180

SEQ ID NO: 66196 - DNA, 201 bp, Homo sapiens; identical to SEQ ID NO: 66181

SEQ ID NO: 66197 - DNA, 201 bp, Homo sapiens; identical to SEQ ID NO: 66182

SEQ ID NO: 66198 - DNA, 201 bp, Homo sapiens; identical to SEQ ID NO: 66183

SEQ ID NO: 66199 - DNA, 201 bp, Homo sapiens; identical to SEQ ID NO: 66184

SEQ ID NO: 66200 - DNA, 201 bp, Homo sapiens; identical to SEQ ID NO: 66185

SEQ ID NO: 66201 - DNA, 201 bp, Homo sapiens
atggtgaatataagaactgaattctacatgtgctgcatgaagagctaatttaaaaaagcaaagtaagactaattatttaaaataaaaatgccacaaatttmattttctccttctaagtattacaatggagtttattctctgcctaaaaattattttccccaactcttgtttcccccataaagttaggcatgaggaggagca

SEQ ID NO: 66202 - DNA, 201 bp, Homo sapiens
catggctgaggtgaatgcatccccacttaagcactttgtcactgccaagaagaagatcaatggcatttttgagcagctgggggcctacatccaggagagcrccaccttccttgaagacacgtacaggaatgcagaactggaccccgttaccacagaagaacaggttctggacgtcaaaggttacctatccaaagtgagagg

SEQ ID NO: 66203 - DNA, 201 bp, Homo sapiens
gatctgttttggaagatggcatggtctaggtggttgaaggatgtagtagaaggatggatggtggaaggtggggacgttggtggctggctgaggtgcatggsccccacacaggacagctggagaatgggccgtccacttggcctcgttctgcgaggggctcatgggtctgagagcccccacccactaggcttgattgcatcc

SEQ ID NO: 66204 - DNA, 201 bp, Homo sapiens
ggataccactgagggagagaccctttctgaaagaagtatggccaaaagcactttaatgctgctgacattgttgtttttatgttcatttgctggagcgcaaracgtgctgacacagtgagttttctctgatgtatttaaggtgatgtatttgcttgagttactcctgtatcattgctcataatattggaaactaaaataaaa

SEQ ID NO: 66205 - DNA, 201 bp, Homo sapiens
gtatttaaagccctcagtctgtcctgttgtgtggggcgaagtgatggactctgccaggtggacatgctgtgggtggataccactgagggagagaccctttytgaaagaagtatggccaaaagcactttaatgctgctgacattgttgtttttatgttcatttgctggagcgcaagacgtgctgacacagtgagttttctct

SEQ ID NO: 66206 - DNA, 201 bp, Homo sapiens
gacggaaaagcacttcttccacaaggtgcggcggcagcacatggagcgttgtaccagcttcctggtggatgagctgggcgtggtggatcgatcccaggccrgggaccgcatcttctttgtgtctgctaaggaggtgctcaacgccaggattcagaaagcccagggcatgcctgaaggagggggcgctctcgcagaaggctt

SEQ ID NO: 66207 - DNA, 201 bp, Homo sapiens
agacggaaaagcacttcttccacaaggtgcggcggcagcacatggagcgttgtaccagcttcctggtggatgagctgggcgtggtggatcgatcccaggcyggggaccgcatcttctttgtgtctgctaaggaggtgctcaacgccaggattcagaaagcccagggcatgcctgaaggagggggcgctctcgcagaaggct

SEQ ID NO: 66208 - DNA, 201 bp, Homo sapiens
gctcaacatgttcacacaccagtacctgcagcccagcagatagtgggcacctgaggcggagtctgcgtggagaggggcggtgctgccagccctaagtgccrtgtgggctcccccaggggcacgtgtggctcctgccccctggccactgccaagagaatgaagcacccagtctcgtaccattttgagccctccagcactact

SEQ ID NO: 66209 - DNA, 201 bp, Homo sapiens
acatggctgaggtgaatgcatccccacttaagcactttgtcactgccaagaagaagatcaatggcatttttgagcagctgggggcctacatccaggagagygccaccttccttgaagacacgtacaggaatgcagaactggaccccgttaccacagaagaacaggttctggacgtcaaaggttacctatccaaagtgagag

SEQ ID NO: 66210 - DNA, 201 bp, Homo sapiens
cctgttcacatacctgcttgtatttaaagccctcagtctgtcctgttgtgtggggcgaagtgatggactctgccaggtggacatgctgtgggtggataccmctgagggagagaccctttctgaaagaagtatggccaaaagcactttaatgctgctgacattgttgtttttatgttcatttgctggagcgcaagacgtgct

SEQ ID NO: 66211 - DNA, 181 bp, Homo sapiens
gtgagtgtgatggccgccgcgaggccgggaaggtgaaggactggtggagtcaacacagtcaatcaatagccaacctcaacytgagacaggacagaagagaactcagaatctttttgtcttttggacttcagccatgtccatgatgcctaccctgtgaagatctctcaccatccaaaaaacg

SEQ ID NO: 66212 - DNA, 201 bp, Homo sapiens
tggcatggtctaggtggttgaaggatgtagtagaaggatggatggtggaaggtggggacgttggtggctggctgaggtgcatgggccccacacaggacagytggagaatgggccgtccacttggcctcgttctgcgaggggctcatgggtctgagagcccccacccactaggcttgattgcatccaaaacccagtgtccat

SEQ ID NO: 66213 - DNA, 201 bp, Homo sapiens
gctggtgaataggttcctgggccccaagaacagccgtcgggccttgatgggctacaatgaccaggcaagcaaagttcctcacctcaagggcattgtggggsgtccagcgtcccatccctctgacgccagccaaccccagcatgcccccactgccacagggctcgctcacccaggaggagttcatggtttccatggttaccg

SEQ ID NO: 66214 - DNA, 201 bp, Homo sapiens
caactccctgcagaccatgcagcaggacatgatagatggcttgaaacccctccttcctgtgtctgtgcggagtcagatagacatgctggtcccacgccagygcttctccctcaactatgacctaaactgtgacaagctgtgtgctgacttccaggaagacattgagttccatttctctctcggatggaccatgctggtgaa

SEQ ID NO: 66215 - DNA, 201 bp, Homo sapiens
acctctcccaaaaagcagcccacaaggcaggggcccagcagcccagccatcactcatctttgaggaaatgagttggtagcctctgtgcactgtttggtggycacatcacaggtgatgtcctgttcacatacctgcttgtatttaaagccctcagtctgtcctgttgtgtggggcgaagtgatggactctgccaggtggaca

SEQ ID NO: 66216 - DNA, 201 bp, Homo sapiens
tgcagaccatgcagcaggacatgatagatggcttgaaacccctccttcctgtgtctgtgcggagtcagatagacatgctggtcccacgccagtgcttctcyctcaactatgacctaaactgtgacaagctgtgtgctgacttccaggaagacattgagttccatttctctctcggatggaccatgctggtgaataggttcc

SEQ ID NO: 66217 - DNA, 189 bp, Homo sapiens
tttctgaaagaagtatggccaaaagcactttaatgctgctgacattgttgtttttatgttcatttgctggagcgcaagacgtgctgacacagtgagttttytctgatgtatttaaggtgatgtatttgcttgagttactcctgtatcattgctcataatattggaaactaaaataaaacctagttggaa

SEQ ID NO: 66218 - DNA, 201 bp, Homo sapiens; identical to SEQ ID NO: 66203

SEQ ID NO: 66219 - DNA, 201 bp, Homo sapiens
cggaggagtggcgcgctgagacgccgctcgaagcgccgagtcgcggggcagcagaggcgtaaggagtaggcggggcgagccggctgggctcagggtccacyagctcacccgggtcgaggggcaatctgaggcgactggtgacgcgcttatccacttccctcctcccgcctccccctggggtggcgctcgctggtgacgtag

SEQ ID NO: 66220 - DNA, 201 bp, Homo sapiens; identical to SEQ ID NO: 66208

SEQ ID NO: 66221 - DNA, 201 bp, Homo sapiens; identical to SEQ ID NO: 66209

SEQ ID NO: 66222 - DNA, 201 bp, Homo sapiens
agtcgcggggcagcagaggcgtaaggagtaggcggggcgagccggctgggctcagggtccaccagctcacccgggtcgaggggcaatctgaggcgactggwgacgcgcttatccacttccctcctcccgcctccccctggggtggcgctcgctggtgacgtagtgagtgtgatggccgccgcgaggccgggaaggtgaagt

SEQ ID NO: 66223 - DNA, 201 bp, Homo sapiens
cgagccggctgggctcagggtccaccagctcacccgggtcgaggggcaatctgaggcgactggtgacgcgcttatccacttccctcctcccgcctcccccyggggtggcgctcgctggtgacgtagtgagtgtgatggccgccgcgaggccgggaaggtgaagtcaggactggtggagtcaacacagtcaatcaatagcca

SEQ ID NO: 66224 - DNA, 201 bp, Homo sapiens
aaaaaattctttagcgtaaacatgaattttttttcaatgtagcccctggggaatgaatgaaattttgagcttcttcaatacgtaaaattaaatttataccmctgagggagagaccctttctgaaagaagtatggccaaaagcactttaatgctgctgacattgttgtttttatgttcatttgctggagcgcaagacgtgct

SEQ ID NO: 66225 - DNA, 201 bp, Homo sapiens
gctcgctggtgacgtagtgagtgtgatggccgccgcgaggccgggaaggtgaagtcaggactggtggagtcaacacagtcaatcaatagccaacctcaacytgagacaggacagaagagaactcagaatctttttgtcttttggacttcagccatgtccatgatgcctaccctgtgaagatctctcaccatccaaaaaacg

SEQ ID NO: 66226 - DNA, 201 bp, Homo sapiens; identical to SEQ ID NO: 66214

SEQ ID NO: 66227 - DNA, 201 bp, Homo sapiens
tggcatggtctaggtggttgaaggatgtagtagaaggatggatggtggaaggtggggacgttggtggctggctgaggtgcatgggccccacacaggacagytggagaatgggccgtccacttggcctcgttctgcgaggggctcatgggtctgagagcccccacccactaggcttgattgcatccctgttgtgccctttaa

SEQ ID NO: 66228 - DNA, 145 bp, Homo sapiens
acgcgccggcggaggagtggcgcgcggaggagtggcgcgctgagrcgccgctcgaagcgccgagtcgcggggcagcagaggcgtaaggagtaggcggggcgagccggctgggctcagggtccaccagctcacccgggtcgagggg

SEQ ID NO: 66229 - DNA, 201 bp, Homo sapiens; identical to SEQ ID NO: 66216

SEQ ID NO: 66230 - DNA, 201 bp, Homo sapiens; identical to SEQ ID NO: 66215

SEQ ID NO: 66231 - DNA, 193 bp, Homo sapiens
tttctgaaagaagtatggccaaaagcactttaatgctgctgacattgttgtttttatgttcatttgctggagcgcaagacgtgctgacacagtgagttttytctgatgtatttaaggtgatgtatttgcttgagttactcctgtatcattgctcataatattggaaactaaaataaaacctagttggaaatcc

SEQ ID NO: 66232 - DNA, 201 bp, Homo sapiens
ctgcttgtatttaaagccctcagtctgtcctgttgtgtggggcgaagtgatggactctgccaggtggacatgctgtgggtggatgttcccggcgtgtgccrggcctgaatggacaggggccacttcacagcatgtcagggaaaatcactgtcacacaattccaatggattttgtgctctttttgaaaaaaaaaaattcttt

SEQ ID NO: 66233 - DNA, 201 bp, Homo sapiens
ttataccactgagggagagaccctttctgaaagaagtatggccaaaagcactttaatgctgctgacattgttgtttttatgttcatttgctggagcgcaaracgtgctgacacagtgagttttctctgatgtatttaaggtgatgtatttgcttgagttactcctgtatcattgctcataatattggaaactaaaataaaa

SEQ ID NO: 66234 - DNA, 201 bp, Homo sapiens
agttttgtctggatgctgatgtgtttgtgctggtggccaactcagagtccaccctgatgcagacggaaaagcacttcttccacaaggtgagtgagcgtctytcccggccaaacatcttcatcctgaacaaccgctgggatgcatctgcctcagagcccgagtacatggaggaggtgcggcggcagcacatggagcgttgta

SEQ ID NO: 66235 - DNA, 201 bp, Homo sapiens; identical to SEQ ID NO: 66202

SEQ ID NO: 66236 - DNA, 201 bp, Homo sapiens
acatgaattttttttcaatgtagcccctggggaatgaatgaaattttgagcttcttcaatacgtaaaattaaatttataccactgagggagagaccctttytgaaagaagtatggccaaaagcactttaatgctgctgacattgttgtttttatgttcatttgctggagcgcaagacgtgctgacacagtgagttttctct

SEQ ID NO: 66237 - DNA, 201 bp, Homo sapiens
ctcagagcccgagtacatggaggaggtgcggcggcagcacatggagcgttgtaccagcttcctggtggatgagctgggcgtggtggatcgatcccaggccrgggaccgcatcttctttgtgtctgctaaggaggtgctcaacgccaggattcagaaagcccagggcatgcctgaaggagggggcgctctcgcagaaggctt

SEQ ID NO: 66238 - DNA, 201 bp, Homo sapiens
cctcagagcccgagtacatggaggaggtgcggcggcagcacatggagcgttgtaccagcttcctggtggatgagctgggcgtggtggatcgatcccaggcyggggaccgcatcttctttgtgtctgctaaggaggtgctcaacgccaggattcagaaagcccagggcatgcctgaaggagggggcgctctcgcagaaggct

SEQ ID NO: 66239 - DNA, 201 bp, Homo sapiens
cgcccatgacggagaagctctaccccggctactacaccagggcccagtttgacctggcctttgtcgtccgctacaagcctgatgagcagccctcactgatkccacaccatgatgcctccaccttcaccatcaacatcgccctgaaccgagtcggggtggattacgagggcgggggctgtcggttcctgcgctacaactgtt

SEQ ID NO: 66240 - DNA, 201 bp, Homo sapiens
gtttgacctggcctttgtcgtccgctacaagcctgatgagcagccctcactgatgccacaccatgatgcctccaccttcaccatcaacatcgccctgaacygagtcggggtggattacgagggcgggggctgtcggttcctgcgctacaactgttccatccgagccccaaggaagggctggaccctcatgcaccctggacg

SEQ ID NO: 66241 - DNA, 201 bp, Homo sapiens
ctacaagcctgatgagcagccctcactgatgccacaccatgatgcctccaccttcaccatcaacatcgccctgaaccgagtcggggtggattacgagggcrggggctgtcggttcctgcgctacaactgttccatccgagccccaaggaagggctggaccctcatgcaccctggacgactcacgcattaccatgaggggct

SEQ ID NO: 66242 - DNA, 201 bp, Homo sapiens
aggtggcctgtgatgagctggtggaggagatggagcactttggccagtggtctctgggcaacaacaaggacaaccgcatccagggtggctacgagaacgtkccgactattgacatccacatgaaccagatcggctttgagcgggagtggcacaaattcctgctggagtacattgcgcccatgacggagaagctctaccccg

SEQ ID NO: 66243 - DNA, 201 bp, Homo sapiens
ggccgaagcgaagggcgacgccaagccggaggacaaccttttagtcctcacggtggccactaaggagaccgagggattccgtcgcttcaagcgctcagctyagttcttcaactacaagatccaggcgcttggcctaggggaggactggaatgtggagaaggggacgtcggcaggtggagggcagaaggtccggctgctgaa

SEQ ID NO: 66244 - DNA, 201 bp, Homo sapiens
acaaccttttagtcctcacggtggccactaaggagaccgagggattccgtcgcttcaagcgctcagctcagttcttcaactacaagatccaggcgcttggyctaggggaggactggaatgtggagaaggggacgtcggcaggtggagggcagaaggtccggctgctgaagaaagctctggagaagcacgcagacaaggagg

SEQ ID NO: 66245 - DNA, 201 bp, Homo sapiens
gaagcacgcagacaaggaggatctggtcattctcttcgcagacagctatgacgtgctgtttgcatcggggccccgggagctcctgaagaagttccggcagkccaggagccaggtggtcttctctgctgaggagctcatctacccagaccgcaggctggagaccaagtatccggtggtgtccgatggcaagaggttcctggg

SEQ ID NO: 66246 - DNA, 201 bp, Homo sapiens
ggtctctgggcaacaacaaggacaaccgcatccagggtggctacgagaacgtgccgactattgacatccacatgaaccagatcggctttgagcgggagtgscacaaattcctgctggagtacattgcgcccatgacggagaagctctaccccggctactacaccagggcccagtttgacctggcctttgtcgtccgctaca

SEQ ID NO: 66247 - DNA, 201 bp, Homo sapiens
gcccacggtcctggtcggcgtgttcatcgaacagcccacgccgtttgtgtccctgttcttccagcggctcctgcggctccactacccccagaaacacatgygacttttcatccacaaccacgagcagcaccacaaggctcaggtggaagagttcctggcacagcatggcagcgagtaccagtctgtgaagctggtgggccc

SEQ ID NO: 66248 - DNA, 201 bp, Homo sapiens
catgagagcaaaccgtagtcccctggagacagcgactccagagaacctcttgggagacagaagaggcatctgtgcacagctcgatcttctacttgcctgtkgggaggggagtgacaggtccacacaccacactgggtcaccctgtcctggatgcctctgaagagagggacagaccgtcagaaactggagagtttctattaa

SEQ ID NO: 66249 - DNA, 201 bp, Homo sapiens
catcgaacagcccacgccgtttgtgtccctgttcttccagcggctcctgcggctccactacccccagaaacacatgcgacttttcatccacaaccacgagyagcaccacaaggctcaggtggaagagttcctggcacagcatggcagcgagtaccagtctgtgaagctggtgggccctgaggtgcggatggcgaatgcaga

SEQ ID NO: 66250 - DNA, 201 bp, Homo sapiens
ggccccgggagctcctgaagaagttccggcaggccaggagccaggtggtcttctctgctgaggagctcatctacccagaccgcaggctggagaccaagtawccggtggtgtccgatggcaagaggttcctgggctctggaggcttcatcggttatgcccccaacctcagcaaactggtggccgagtgggagggccaggaca

SEQ ID NO: 66251 - DNA, 201 bp, Homo sapiens
cttcaactacaagatccaggcgcttggcctaggggaggactggaatgtggagaaggggacgtcggcaggtggagggcagaaggtccggctgctgaagaaarctctggagaagcacgcagacaaggaggatctggtcattctcttcgcagacagctatgacgtgctgtttgcatcggggccccgggagctcctgaagaagtt

SEQ ID NO: 66252 - DNA, 201 bp, Homo sapiens
atggcaagaggttcctgggctctggaggcttcatcggttatgcccccaacctcagcaaactggtggccgagtgggagggccaggacagcgacagcgatcarctgttttacaccaagatcttcttggacccggagaagagggagcagatcaatatcaccctggaccaccgctgccgtatcttccagaacctggatggagcct

SEQ ID NO: 66253 - DNA, 201 bp, Homo sapiens
accgcaccacccacctgcacaacgacctctgggaggtgttcagcaaccccgaggactggaaggagaagtacatccaccagaactacaccaaagccctggcmgggaagctggtggagacgccctgcccggatgtctattggttccccatcttcacggaggtggcctgtgatgagctggtggaggagatggagcactttggcc

SEQ ID NO: 66254 - DNA, 162 bp, Homo sapiens
acagaagaggcatctgtgcacagctcgatcttctacttgcctgtggggaggggagtgacaggtccacacaccacactgggtcaccctgtcctggatgcctmtgaagagagggacagaccgtcagaaactggagagtttctattaaaggtcatttaaaccact

SEQ ID NO: 66255 - DNA, 201 bp, Homo sapiens
gcctccatggctggtcatgagagcaaaccgtagtcccctggagacagcgactccagagaacctcttgggagacagaagaggcatctgtgcacagctcgatyttctacttgcctgtggggaggggagtgacaggtccacacaccacactgggtcaccctgtcctggatgcctctgaagagagggacagaccgtcagaaactg

SEQ ID NO: 66256 - DNA, 201 bp, Homo sapiens
accccgacatggccttctgtgccaacatccggcagcaggatgtgttcatgttcctgaccaaccggcacacccttggccatctgctctccctagacagctascgcaccacccacctgcacaacgacctctgggaggtgttcagcaaccccgaggactggaaggagaagtacatccaccagaactacaccaaagccctggcag

SEQ ID NO: 66257 - DNA, 201 bp, Homo sapiens
ggtaaagacacctggatcagactccaagggctgccctgagtctgggacttctgcctccatggctggtcatgagagcaaaccgtagtcccctggagacagcsactccagagaacctcttgggagacagaagaggcatctgtgcacagctcgatcttctacttgcctgtggggaggggagtgacaggtccacacaccacactg

SEQ ID NO: 66258 - DNA, 201 bp, Homo sapiens
ggggctgtcggttcctgcgctacaactgttccatccgagccccaaggaagggctggaccctcatgcaccctggacgactcacgcattaccatgaggggctscccaccaccaggggcacccgctacatcgcagtctccttcgtcgatccctaattggccaggcctgaccctcttggacctttcttctttgccgacaaccact

SEQ ID NO: 66259 - DNA, 201 bp, Homo sapiens
acgagggcgggggctgtcggttcctgcgctacaactgttccatccgagccccaaggaagggctggaccctcatgcaccctggacgactcacgcattaccaygaggggctccccaccaccaggggcacccgctacatcgcagtctccttcgtcgatccctaattggccaggcctgaccctcttggacctttcttctttgccg

SEQ ID NO: 66260 - DNA, 201 bp, Homo sapiens
ttttcatccacaaccacgagcagcaccacaaggctcaggtggaagagttcctggcacagcatggcagcgagtaccagtctgtgaagctggtgggccctgargtgcggatggcgaatgcagatgccaggaacatgggcgcagacctgtgccggcaggaccgcagctgcacctactacttcagcgtggatgctgacgtggccc

SEQ ID NO: 66261 - DNA, 201 bp, Homo sapiens
tgtggagaaggggacgtcggcaggtggagggcagaaggtccggctgctgaagaaagctctggagaagcacgcagacaaggaggatctggtcattctcttcrcagacagctatgacgtgctgtttgcatcggggccccgggagctcctgaagaagttccggcaggccaggagccaggtggtcttctctgctgaggagctcat

SEQ ID NO: 66262 - DNA, 201 bp, Homo sapiens
atgtggagaaggggacgtcggcaggtggagggcagaaggtccggctgctgaagaaagctctggagaagcacgcagacaaggaggatctggtcattctcttygcagacagctatgacgtgctgtttgcatcggggccccgggagctcctgaagaagttccggcaggccaggagccaggtggtcttctctgctgaggagctca

SEQ ID NO: 66263 - DNA, 201 bp, Homo sapiens
tacatcgcagtctccttcgtcgatccctaattggccaggcctgaccctcttggacctttcttctttgccgacaaccactgcccagcagcctctgggacctsggggtcccagggaacccagtccagcctcctggctgttgacttcccattgctcttggagccaccaatcaaagagattcaaagagattcctgcaggccagag

SEQ ID NO: 66264 - DNA, 201 bp, Homo sapiens; identical to SEQ ID NO: 66239

SEQ ID NO: 66265 - DNA, 201 bp, Homo sapiens; identical to SEQ ID NO: 66240

SEQ ID NO: 66266 - DNA, 201 bp, Homo sapiens; identical to SEQ ID NO: 66241

SEQ ID NO: 66267 - DNA, 201 bp, Homo sapiens; identical to SEQ ID NO: 66242

SEQ ID NO: 66268 - DNA, 201 bp, Homo sapiens; identical to SEQ ID NO: 66243

SEQ ID NO: 66269 - DNA, 201 bp, Homo sapiens; identical to SEQ ID NO: 66244

SEQ ID NO: 66270 - DNA, 201 bp, Homo sapiens; identical to SEQ ID NO: 66245

SEQ ID NO: 66271 - DNA, 201 bp, Homo sapiens; identical to SEQ ID NO: 66246

SEQ ID NO: 66272 - DNA, 201 bp, Homo sapiens; identical to SEQ ID NO: 66247

SEQ ID NO: 66273 - DNA, 201 bp, Homo sapiens; identical to SEQ ID NO: 66248

SEQ ID NO: 66274 - DNA, 201 bp, Homo sapiens; identical to SEQ ID NO: 66249

SEQ ID NO: 66275 - DNA, 201 bp, Homo sapiens; identical to SEQ ID NO: 66250

SEQ ID NO: 66276 - DNA, 201 bp, Homo sapiens; identical to SEQ ID NO: 66251

SEQ ID NO: 66277 - DNA, 201 bp, Homo sapiens; identical to SEQ ID NO: 66252

SEQ ID NO: 66278 - DNA, 201 bp, Homo sapiens; identical to SEQ ID NO: 66253

SEQ ID NO: 66279 - DNA, 170 bp, Homo sapiens
acagaagaggcatctgtgcacagctcgatcttctacttgcctgtggggaggggagtgacaggtccacacaccacactgggtcaccctgtcctggatgcctmtgaagagagggacagaccgtcagaaactggagagtttctattaaaggtcatttaaaccactgaagggaa

SEQ ID NO: 66280 - DNA, 201 bp, Homo sapiens; identical to SEQ ID NO: 66255

SEQ ID NO: 66281 - DNA, 201 bp, Homo sapiens; identical to SEQ ID NO: 66256

SEQ ID NO: 66282 - DNA, 201 bp, Homo sapiens; identical to SEQ ID NO: 66257

SEQ ID NO: 66283 - DNA, 201 bp, Homo sapiens; identical to SEQ ID NO: 66258

SEQ ID NO: 66284 - DNA, 201 bp, Homo sapiens; identical to SEQ ID NO: 66259

SEQ ID NO: 66285 - DNA, 201 bp, Homo sapiens; identical to SEQ ID NO: 66260

SEQ ID NO: 66286 - DNA, 201 bp, Homo sapiens; identical to SEQ ID NO: 66261

SEQ ID NO: 66287 - DNA, 201 bp, Homo sapiens; identical to SEQ ID NO: 66262

SEQ ID NO: 66288 - DNA, 201 bp, Homo sapiens; identical to SEQ ID NO: 66263

SEQ ID NO: 66289 - DNA, 201 bp, Homo sapiens
ccactcaggtgtcttgatgtgtcgggggtgtggctgcctgccccctgatgctccctgccccaccctgtgcagtaggaacccagccatggtgaacgaagccwgaggaaacagcagcctcaacccctgcttggagggcagtgccagcagtggcagtgagagctccaaagatagttcgagatgttccaccccgggcctggaccc

SEQ ID NO: 66290 - DNA, 201 bp, Homo sapiens
accatcctgcacatgacctgctgccgtcagcgcctggaggagatcacgggccatctgcacaaagctaagcagctgggcctgaagaacatcatggcgctgcrgggagacccaataggtgaccagtgggaagaggaggagggaggcttcaactacgcagtggacctggtgaagcacatccgaagtgagtttggtgactacttt

SEQ ID NO: 66291 - DNA, 201 bp, Homo sapiens
gccagcagtggcagtgagagctccaaagatagttcgagatgttccaccccgggcctggaccccgagcggcatgagagactccgggagaagatgaggcggcrattggaatctggtgacaagtggttctccctggaattcttccctcctcgaactgctgagggagctgtcaatctcatctcaaggtttgaccggatggcagca

SEQ ID NO: 66292 - DNA, 201 bp, Homo sapiens
actactacctcttctacctgaagagcaagtcccccaaggaggagctgctgaagatgtggggggaggagctgaccagtgaagaaagtgtctttgaagtcttygttctttacctctcgggagaaccaaaccggaatggtcacaaagtgacttgcctgccctggaacgatgagcccctggcggctgagaccagcctgctgaagg

SEQ ID NO: 66293 - DNA, 201 bp, Homo sapiens
gcctttggggagctgaaggactactacctcttctacctgaagagcaagtcccccaaggaggagctgctgaagatgtggggggaggagctgaccagtgaagmaagtgtctttgaagtctttgttctttacctctcgggagaaccaaaccggaatggtcacaaagtgacttgcctgccctggaacgatgagcccctggcggct

SEQ ID NO: 66294 - DNA, 201 bp, Homo sapiens
gcaattcctcttcccctgcctttggggagctgaaggactactacctcttctacctgaagagcaagtcccccaaggaggagctgctgaagatgtggggggakgagctgaccagtgaagaaagtgtctttgaagtctttgttctttacctctcgggagaaccaaaccggaatggtcacaaagtgacttgcctgccctggaacg

SEQ ID NO: 66295 - DNA, 201 bp, Homo sapiens
gatggcagcaggtggccccctctacatagacgtgacctggcacccagcaggtgaccctggctcagacaaggagacctcctccatgatgatcgccagcaccrccgtgaactactgtggcctggagaccatcctgcacatgacctgctgccgtcagcgcctggaggagatcacgggccatctgcacaaagctaagcagctggg

SEQ ID NO: 66296 - DNA, 201 bp, Homo sapiens
ccgcgagatggctaccacagaggtgctgaagcgcctggggatgtggactgaggaccccaggcgtcccctaccctgggctctcagcgcccaccccaagcgcygagaggaagatgtacgtcccatcttctgggcctccagaccaaagagttacatctaccgtacccaggagtgggacgagttccctaacggccgctggggcaa

SEQ ID NO: 66297 - DNA, 201 bp, Homo sapiens
tgaactgcagccgaatgctgtcacttggggcatcttccctgggcgagagatcatccagcccaccgtagtggatcccgtcagcttcatgttctggaaggacraggcctttgccctgtggattgagcggtggggaaagctgtatgaggaggagtccccgtcccgcaccatcatccagtacatccacgacaactacttcctggt

SEQ ID NO: 66298 - DNA, 201 bp, Homo sapiens
ggcctgatgctgccccgttccctgtcagaggctaagatgagatttgccactgggatttcttcgctgctctagctggcaggacacatcccggcctcttcttccacccattcccccatgtggctgaagacattccaacaatggggtgggcccataatagttagccctcagtcagttcccggagcacagccctgggagggggct

SEQ ID NO: 66299 - DNA, 201 bp, Homo sapiens
aggcctgatgctgccccgttccctgtcagaggctaagatgagatttgccactgggatttcttcgctgctctagctggcaggacacatcccggcctcttcttccacccattcccccatgtggctgaagacattccaacaatggggtgggcccataatagttagccctcagtcagttcccggagcacagccctgggagggggc

SEQ ID NO: 66300 - DNA, 201 bp, Homo sapiens
gaggcctgatgctgccccgttccctgtcagaggctaagatgagatttgccactgggatttcttcgctgctctagctggcaggacacatcccggcctcttcttccacccattcccccatgtggctgaagacattccaacaatggggtgggcccataatagttagccctcagtcagttcccggagcacagccctgggaggggg

SEQ ID NO: 66301 - DNA, 201 bp, Homo sapiens
gaggaaacagcagcctcaacccctgcttggagggcagtgccagcagtggcagtgagagctccaaagatagttcgagatgttccaccccgggcctggacccygagcggcatgagagactccgggagaagatgaggcggcgattggaatctggtgacaagtggttctccctggaattcttccctcctcgaactgctgagggag

SEQ ID NO: 66302 - DNA, 201 bp, Homo sapiens
tgtgtggcaggttaccccaaaggccaccccgaagcagggagctttgaggctgacctgaagcacttgaaggagaaggtgtctgcgggagccgatttcatcaycacgcagcttttctttgaggctgacacattcttccgctttgtgaaggcatgcaccgacatgggcatcacttgccccatcgtccccgggatctttcccatc

SEQ ID NO: 66303 - DNA, 201 bp, Homo sapiens
caccccaagcgccgagaggaagatgtacgtcccatcttctgggcctccagaccaaagagttacatctaccgtacccaggagtgggacgagttccctaacgrccgctggggcaattcctcttcccctgcctttggggagctgaaggactactacctcttctacctgaagagcaagtcccccaaggaggagctgctgaagatg

SEQ ID NO: 66304 - DNA, 201 bp, Homo sapiens
acttctacaccctcaaccgcgagatggctaccacagaggtgctgaagcgcctggggatgtggactgaggaccccaggcgtcccctaccctgggctctcagygcccaccccaagcgccgagaggaagatgtacgtcccatcttctgggcctccagaccaaagagttacatctaccgtacccaggagtgggacgagttcccta

SEQ ID NO: 66305 - DNA, 201 bp, Homo sapiens
gtggcaggttaccccaaaggccaccccgaagcagggagctttgaggctgacctgaagcacttgaaggagaaggtgtctgcgggagccgatttcatcatcaygcagcttttctttgaggctgacacattcttccgctttgtgaaggcatgcaccgacatgggcatcacttgccccatcgtccccgggatctttcccatccag

SEQ ID NO: 66306 - DNA, 201 bp, Homo sapiens
aagcagggagctttgaggctgacctgaagcacttgaaggagaaggtgtctgcgggagccgatttcatcatcacgcagcttttctttgaggctgacacattyttccgctttgtgaaggcatgcaccgacatgggcatcacttgccccatcgtccccgggatctttcccatccagggctaccactcccttcggcagcttgtga

SEQ ID NO: 66307 - DNA, 201 bp, Homo sapiens
tactttgacatctgtgtggcaggttaccccaaaggccaccccgaagcagggagctttgaggctgacctgaagcacttgaaggagaaggtgtctgcgggagycgatttcatcatcacgcagcttttctttgaggctgacacattcttccgctttgtgaaggcatgcaccgacatgggcatcacttgccccatcgtccccggg

SEQ ID NO: 66308 - DNA, 201 bp, Homo sapiens
tggggcatcttccctgggcgagagatcatccagcccaccgtagtggatcccgtcagcttcatgttctggaaggacgaggcctttgccctgtggattgagcrgtggggaaagctgtatgaggaggagtccccgtcccgcaccatcatccagtacatccacgacaactacttcctggtcaacctggtggacaatgacttccca

SEQ ID NO: 66309 - DNA, 201 bp, Homo sapiens
gagctccgggttaattaccaccttgtcaatgtgaagggtgaaaacatcaccaatgcccctgaactgcagccgaatgctgtcacttggggcatcttccctgrgcgagagatcatccagcccaccgtagtggatcccgtcagcttcatgttctggaaggacgaggcctttgccctgtggattgagcggtggggaaagctgtat

SEQ ID NO: 66310 - DNA, 201 bp, Homo sapiens
gctccgggttaattaccaccttgtcaatgtgaagggtgaaaacatcaccaatgcccctgaactgcagccgaatgctgtcacttggggcatcttccctgggygagagatcatccagcccaccgtagtggatcccgtcagcttcatgttctggaaggacgaggcctttgccctgtggattgagcggtggggaaagctgtatga

SEQ ID NO: 66311 - DNA, 201 bp, Homo sapiens
gatgctgccatccgcaactatggcatcgagctggccgtgagcctgtgccaggagcttctggccagtggcttggtgccaggcctccacttctacaccctcarccgcgagatggctaccacagaggtgctgaagcgcctggggatgtggactgaggaccccaggcgtcccctaccctgggctctcagcgcccaccccaagcgc

SEQ ID NO: 66312 - DNA, 201 bp, Homo sapiens
tgcccctgaactgcagccgaatgctgtcacttggggcatcttccctgggcgagagatcatccagcccaccgtagtggatcccgtcagcttcatgttctggwaggacgaggcctttgccctgtggattgagcggtggggaaagctgtatgaggaggagtccccgtcccgcaccatcatccagtacatccacgacaactactt

SEQ ID NO: 66313 - DNA, 187 bp, Homo sapiens
aaggctagttcctttcaattccatttaaaaaacaaaaaccagcaggtgtggtggctcatggcgtaatgggcctgcccaatgctttgggaggccaaggcagrtagatcgcttgagcccaggagtttgagacaagccctggcaacatagtgagatcccatttctacaaaaaaaaaaaaaaaattagccg

SEQ ID NO: 66314 - DNA, 201 bp, Homo sapiens
aggaccccaggcgtcccctaccctgggctctcagcgcccaccccaagcgccgagaggaagatgtacgtcccatcttctgggcctccagaccaaagagttasatctaccgtacccaggagtgggacgagttccctaacggccgctggggcaattcctcttcccctgcctttggggagctgaaggactactacctcttctacc

SEQ ID NO: 66315 - DNA, 201 bp, Homo sapiens
agtgccagcagtggcagtgagagctccaaagatagttcgagatgttccaccccgggcctggaccccgagcggcatgagagactccgggagaagatgaggcsgcgattggaatctggtgacaagtggttctccctggaattcttccctcctcgaactgctgagggagctgtcaatctcatctcaaggtttgaccggatggca

SEQ ID NO: 66316 - DNA, 201 bp, Homo sapiens
aacgatgctgccatccgcaactatggcatcgagctggccgtgagcctgtgccaggagcttctggccagtggcttggtgccaggcctccacttctacacccycaaccgcgagatggctaccacagaggtgctgaagcgcctggggatgtggactgaggaccccaggcgtcccctaccctgggctctcagcgcccaccccaag

SEQ ID NO: 66317 - DNA, 112 bp, Homo sapiens
ccaatgctttgggaggccaaggcaggtagatcgcttgagcccaggagtttgagacaagccctggcaacatagtgagatcccatttctacaaaaaaaaaaaaaaaattagccg

SEQ ID NO: 66318 - DNA, 201 bp, Homo sapiens
ccctggcggctgagaccagcctgctgaaggaggagctgctgcgggtgaaccgccagggcatcctcaccatcaactcacagcccaacatcaacgggaagccrtcctccgaccccatcgtgggctggggccccagcgggggctatgtcttccagaaggcctacttagagtttttcacttcccgcgagacagcggaagcacttc

SEQ ID NO: 66319 - DNA, 201 bp, Homo sapiens
aacctggtggacaatgacttcccactggacaactgcctctggcaggtggtggaagacacattggagcttctcaacaggcccacccagaatgcgagagaaayggaggctccatgaccctgcgtcctgacgccctgcgttggagccactcctgtcccgccttcctcctccacagtgctgcttctcttgggaactccactctcc

SEQ ID NO: 66320 - DNA, 201 bp, Homo sapiens
tgctgccatccgcaactatggcatcgagctggccgtgagcctgtgccaggagcttctggccagtggcttggtgccaggcctccacttctacaccctcaacygcgagatggctaccacagaggtgctgaagcgcctggggatgtggactgaggaccccaggcgtcccctaccctgggctctcagcgcccaccccaagcgccg

SEQ ID NO: 66321 - DNA, 113 bp, Homo sapiens
cccaatgctttgggaggccaaggcaggtagatcgcttgagcccaggagtttgagacaagccctggcaacatagtgagatcccatttctacaaaaaaaaaaaaaaaattagccg

SEQ ID NO: 66322 - DNA, 201 bp, Homo sapiens
caaccgcgagatggctaccacagaggtgctgaagcgcctggggatgtggactgaggaccccaggcgtcccctaccctgggctctcagcgcccaccccaagygccgagaggaagatgtacgtcccatcttctgggcctccagaccaaagagttacatctaccgtacccaggagtgggacgagttccctaacggccgctgggg

SEQ ID NO: 66323 - DNA, 201 bp, Homo sapiens
ggtggcacctcctgagaaggcgaggagagtggttgttgccaactaagccctcgaaccaaggcagcctccagagccagcctgggactcccagtgaacttacmcttggagcccgtgcagtacaggcaaaacacgcaagggcatcaggcactggtggcatcgtagaagagatgtggcaaagtgctgtacccttccacctcctag

SEQ ID NO: 66324 - DNA, 179 bp, Homo sapiens
gccacagtggtgcggccggcggccgagcgttctgagtcacccgggactggagggccttcttcctgtgtggaaatacagygcctccggcttgaacctgccactcaggtgtcttgatgtgtcgggggtgtggctgcctgccccctgatgctccctgccccaccctgtgcagtaggaaccca

SEQ ID NO: 66325 - DNA, 201 bp, Homo sapiens
agacctcctccatgatgatcgccagcaccgccgtgaactactgtggcctggagaccatcctgcacatgacctgctgccgtcagcgcctggaggagatcacrggccatctgcacaaagctaagcagctgggcctgaagaacatcatggcgctgcggggagacccaataggtgaccagtgggaagaggaggagggaggcttca

SEQ ID NO: 66326 - DNA, 201 bp, Homo sapiens
ggatggcagcaggtggccccctctacatagacgtgacctggcacccagcaggtgaccctggctcagacaaggagacctcctccatgatgatcgccagcacmgccgtgaactactgtggcctggagaccatcctgcacatgacctgctgccgtcagcgcctggaggagatcacgggccatctgcacaaagctaagcagctgg

SEQ ID NO: 66327 - DNA, 201 bp, Homo sapiens
ccgggcctggaccccgagcggcatgagagactccgggagaagatgaggcggcgattggaatctggtgacaagtggttctccctggaattcttccctcctcraactgctgagggagctgtcaatctcatctcaaggtttgaccggatggcagcaggtggccccctctacatagacgtgacctggcacccagcaggtgaccct

SEQ ID NO: 66328 - DNA, 201 bp, Homo sapiens
cctgaagaacatcatggcgctgcggggagacccaataggtgaccagtgggaagaggaggagggaggcttcaactacgcagtggacctggtgaagcacatcygaagtgagtttggtgactactttgacatctgtgtggcaggttaccccaaaggccaccccgaagcagggagctttgaggctgacctgaagcacttgaagga

SEQ ID NO: 66329 - DNA, 201 bp, Homo sapiens
ctactgcccctcgctaggaatatgggcctcgcaggtcggcagcgtgaggtcctctgtgccaccttccatcagtaggaacccagccatggtgaacgaagccwgaggaaacagcagcctcaacccctgcttggagggcagtgccagcagtggcagtgagagctccaaagatagttcgagatgttccaccccgggcctggaccc

SEQ ID NO: 66330 - DNA, 201 bp, Homo sapiens; identical to SEQ ID NO: 66290

SEQ ID NO: 66331 - DNA, 201 bp, Homo sapiens; identical to SEQ ID NO: 66291

SEQ ID NO: 66332 - DNA, 201 bp, Homo sapiens; identical to SEQ ID NO: 66292

SEQ ID NO: 66333 - DNA, 201 bp, Homo sapiens; identical to SEQ ID NO: 66293

SEQ ID NO: 66334 - DNA, 201 bp, Homo sapiens; identical to SEQ ID NO: 66294

SEQ ID NO: 66335 - DNA, 201 bp, Homo sapiens; identical to SEQ ID NO: 66295

SEQ ID NO: 66336 - DNA, 201 bp, Homo sapiens; identical to SEQ ID NO: 66297

SEQ ID NO: 66337 - DNA, 201 bp, Homo sapiens; identical to SEQ ID NO: 66296

SEQ ID NO: 66338 - DNA, 201 bp, Homo sapiens; identical to SEQ ID NO: 66301

SEQ ID NO: 66339 - DNA, 201 bp, Homo sapiens; identical to SEQ ID NO: 66302

SEQ ID NO: 66340 - DNA, 201 bp, Homo sapiens; identical to SEQ ID NO: 66304

SEQ ID NO: 66341 - DNA, 201 bp, Homo sapiens; identical to SEQ ID NO: 66303

SEQ ID NO: 66342 - DNA, 201 bp, Homo sapiens; identical to SEQ ID NO: 66305

SEQ ID NO: 66343 - DNA, 201 bp, Homo sapiens; identical to SEQ ID NO: 66306

SEQ ID NO: 66344 - DNA, 201 bp, Homo sapiens; identical to SEQ ID NO: 66307

SEQ ID NO: 66345 - DNA, 201 bp, Homo sapiens; identical to SEQ ID NO: 66308

SEQ ID NO: 66346 - DNA, 201 bp, Homo sapiens; identical to SEQ ID NO: 66309

SEQ ID NO: 66347 - DNA, 201 bp, Homo sapiens; identical to SEQ ID NO: 66310

SEQ ID NO: 66348 - DNA, 201 bp, Homo sapiens; identical to SEQ ID NO: 66311

SEQ ID NO: 66349 - DNA, 201 bp, Homo sapiens; identical to SEQ ID NO: 66312

SEQ ID NO: 66350 - DNA, 201 bp, Homo sapiens; identical to SEQ ID NO: 66314

SEQ ID NO: 66351 - DNA, 201 bp, Homo sapiens; identical to SEQ ID NO: 66315

SEQ ID NO: 66352 - DNA, 201 bp, Homo sapiens; identical to SEQ ID NO: 66316

SEQ ID NO: 66353 - DNA, 201 bp, Homo sapiens; identical to SEQ ID NO: 66319

SEQ ID NO: 66354 - DNA, 201 bp, Homo sapiens; identical to SEQ ID NO: 66318

SEQ ID NO: 66355 - DNA, 201 bp, Homo sapiens; identical to SEQ ID NO: 66320

SEQ ID NO: 66356 - DNA, 201 bp, Homo sapiens; identical to SEQ ID NO: 66323

SEQ ID NO: 66357 - DNA, 201 bp, Homo sapiens; identical to SEQ ID NO: 66322

SEQ ID NO: 66358 - DNA, 201 bp, Homo sapiens; identical to SEQ ID NO: 66325

SEQ ID NO: 66359 - DNA, 201 bp, Homo sapiens; identical to SEQ ID NO: 66326

SEQ ID NO: 66360 - DNA, 201 bp, Homo sapiens; identical to SEQ ID NO: 66327

SEQ ID NO: 66361 - DNA, 201 bp, Homo sapiens; identical to SEQ ID NO: 66328

SEQ ID NO: 66362 - DNA, 201 bp, Homo sapiens; identical to SEQ ID NO: 66289

SEQ ID NO: 66363 - DNA, 201 bp, Homo sapiens; identical to SEQ ID NO: 66290

SEQ ID NO: 66364 - DNA, 201 bp, Homo sapiens; identical to SEQ ID NO: 66291

SEQ ID NO: 66365 - DNA, 201 bp, Homo sapiens; identical to SEQ ID NO: 66292

SEQ ID NO: 66366 - DNA, 201 bp, Homo sapiens; identical to SEQ ID NO: 66293

SEQ ID NO: 66367 - DNA, 201 bp, Homo sapiens; identical to SEQ ID NO: 66294

SEQ ID NO: 66368 - DNA, 201 bp, Homo sapiens; identical to SEQ ID NO: 66295

SEQ ID NO: 66369 - DNA, 201 bp, Homo sapiens; identical to SEQ ID NO: 66297

SEQ ID NO: 66370 - DNA, 201 bp, Homo sapiens; identical to SEQ ID NO: 66296

SEQ ID NO: 66371 - DNA, 201 bp, Homo sapiens; identical to SEQ ID NO: 66301

SEQ ID NO: 66372 - DNA, 201 bp, Homo sapiens; identical to SEQ ID NO: 66302

SEQ ID NO: 66373 - DNA, 201 bp, Homo sapiens; identical to SEQ ID NO: 66304

SEQ ID NO: 66374 - DNA, 201 bp, Homo sapiens; identical to SEQ ID NO: 66303

SEQ ID NO: 66375 - DNA, 201 bp, Homo sapiens; identical to SEQ ID NO: 66305

SEQ ID NO: 66376 - DNA, 201 bp, Homo sapiens; identical to SEQ ID NO: 66306

SEQ ID NO: 66377 - DNA, 201 bp, Homo sapiens; identical to SEQ ID NO: 66307

SEQ ID NO: 66378 - DNA, 201 bp, Homo sapiens; identical to SEQ ID NO: 66308

SEQ ID NO: 66379 - DNA, 201 bp, Homo sapiens; identical to SEQ ID NO: 66309

SEQ ID NO: 66380 - DNA, 201 bp, Homo sapiens; identical to SEQ ID NO: 66310

SEQ ID NO: 66381 - DNA, 201 bp, Homo sapiens; identical to SEQ ID NO: 66311

SEQ ID NO: 66382 - DNA, 201 bp, Homo sapiens; identical to SEQ ID NO: 66312

SEQ ID NO: 66383 - DNA, 201 bp, Homo sapiens; identical to SEQ ID NO: 66314

SEQ ID NO: 66384 - DNA, 201 bp, Homo sapiens; identical to SEQ ID NO: 66315

SEQ ID NO: 66385 - DNA, 201 bp, Homo sapiens; identical to SEQ ID NO: 66316

SEQ ID NO: 66386 - DNA, 201 bp, Homo sapiens; identical to SEQ ID NO: 66319

SEQ ID NO: 66387 - DNA, 201 bp, Homo sapiens; identical to SEQ ID NO: 66318

SEQ ID NO: 66388 - DNA, 201 bp, Homo sapiens; identical to SEQ ID NO: 66320

SEQ ID NO: 66389 - DNA, 201 bp, Homo sapiens; identical to SEQ ID NO: 66323

SEQ ID NO: 66390 - DNA, 201 bp, Homo sapiens; identical to SEQ ID NO: 66322

SEQ ID NO: 66391 - DNA, 179 bp, Homo sapiens; identical to SEQ ID NO: 66324

SEQ ID NO: 66392 - DNA, 201 bp, Homo sapiens; identical to SEQ ID NO: 66325

SEQ ID NO: 66393 - DNA, 201 bp, Homo sapiens; identical to SEQ ID NO: 66326

SEQ ID NO: 66394 - DNA, 201 bp, Homo sapiens; identical to SEQ ID NO: 66327

SEQ ID NO: 66395 - DNA, 201 bp, Homo sapiens; identical to SEQ ID NO: 66328

SEQ ID NO: 66396 - DNA, 201 bp, Homo sapiens; identical to SEQ ID NO: 66329

SEQ ID NO: 66397 - DNA, 201 bp, Homo sapiens; identical to SEQ ID NO: 66290

SEQ ID NO: 66398 - DNA, 201 bp, Homo sapiens; identical to SEQ ID NO: 66291

SEQ ID NO: 66399 - DNA, 201 bp, Homo sapiens; identical to SEQ ID NO: 66292

SEQ ID NO: 66400 - DNA, 201 bp, Homo sapiens; identical to SEQ ID NO: 66293

SEQ ID NO: 66401 - DNA, 201 bp, Homo sapiens; identical to SEQ ID NO: 66294

SEQ ID NO: 66402 - DNA, 201 bp, Homo sapiens; identical to SEQ ID NO: 66295

SEQ ID NO: 66403 - DNA, 201 bp, Homo sapiens; identical to SEQ ID NO: 66296

SEQ ID NO: 66404 - DNA, 201 bp, Homo sapiens; identical to SEQ ID NO: 66297

SEQ ID NO: 66405 - DNA, 201 bp, Homo sapiens; identical to SEQ ID NO: 66298

SEQ ID NO: 66406 - DNA, 201 bp, Homo sapiens; identical to SEQ ID NO: 66299

SEQ ID NO: 66407 - DNA, 201 bp, Homo sapiens; identical to SEQ ID NO: 66300

SEQ ID NO: 66408 - DNA, 201 bp, Homo sapiens; identical to SEQ ID NO: 66301

SEQ ID NO: 66409 - DNA, 201 bp, Homo sapiens; identical to SEQ ID NO: 66302

SEQ ID NO: 66410 - DNA, 201 bp, Homo sapiens; identical to SEQ ID NO: 66303

SEQ ID NO: 66411 - DNA, 201 bp, Homo sapiens; identical to SEQ ID NO: 66304

SEQ ID NO: 66412 - DNA, 201 bp, Homo sapiens; identical to SEQ ID NO: 66305

SEQ ID NO: 66413 - DNA, 201 bp, Homo sapiens; identical to SEQ ID NO: 66306

SEQ ID NO: 66414 - DNA, 201 bp, Homo sapiens; identical to SEQ ID NO: 66307

SEQ ID NO: 66415 - DNA, 201 bp, Homo sapiens; identical to SEQ ID NO: 66308

SEQ ID NO: 66416 - DNA, 201 bp, Homo sapiens; identical to SEQ ID NO: 66309

SEQ ID NO: 66417 - DNA, 201 bp, Homo sapiens; identical to SEQ ID NO: 66310

SEQ ID NO: 66418 - DNA, 201 bp, Homo sapiens; identical to SEQ ID NO: 66311

SEQ ID NO: 66419 - DNA, 201 bp, Homo sapiens; identical to SEQ ID NO: 66312

SEQ ID NO: 66420 - DNA, 187 bp, Homo sapiens; identical to SEQ ID NO: 66313

SEQ ID NO: 66421 - DNA, 201 bp, Homo sapiens; identical to SEQ ID NO: 66314

SEQ ID NO: 66422 - DNA, 201 bp, Homo sapiens; identical to SEQ ID NO: 66315

SEQ ID NO: 66423 - DNA, 201 bp, Homo sapiens; identical to SEQ ID NO: 66316

SEQ ID NO: 66424 - DNA, 112 bp, Homo sapiens; identical to SEQ ID NO: 66317

SEQ ID NO: 66425 - DNA, 201 bp, Homo sapiens; identical to SEQ ID NO: 66318

SEQ ID NO: 66426 - DNA, 201 bp, Homo sapiens; identical to SEQ ID NO: 66319

SEQ ID NO: 66427 - DNA, 201 bp, Homo sapiens; identical to SEQ ID NO: 66320

SEQ ID NO: 66428 - DNA, 113 bp, Homo sapiens; identical to SEQ ID NO: 66321

SEQ ID NO: 66429 - DNA, 201 bp, Homo sapiens; identical to SEQ ID NO: 66322

SEQ ID NO: 66430 - DNA, 201 bp, Homo sapiens; identical to SEQ ID NO: 66323

SEQ ID NO: 66431 - DNA, 201 bp, Homo sapiens; identical to SEQ ID NO: 66325

SEQ ID NO: 66432 - DNA, 201 bp, Homo sapiens; identical to SEQ ID NO: 66326

SEQ ID NO: 66433 - DNA, 201 bp, Homo sapiens; identical to SEQ ID NO: 66327

SEQ ID NO: 66434 - DNA, 201 bp, Homo sapiens; identical to SEQ ID NO: 66328

SEQ ID NO: 66435 - DNA, 126 bp, Homo sapiens
gaacccagccatggtgaacgaagccwgaggaaacagcagcctcaacccctgcttggagggcagtgccagcagtggcagtgagagctccaaagatagttcgagatgttccaccccgggcctggaccc

SEQ ID NO: 66436 - DNA, 201 bp, Homo sapiens; identical to SEQ ID NO: 66290

SEQ ID NO: 66437 - DNA, 201 bp, Homo sapiens; identical to SEQ ID NO: 66291

SEQ ID NO: 66438 - DNA, 201 bp, Homo sapiens; identical to SEQ ID NO: 66292

SEQ ID NO: 66439 - DNA, 201 bp, Homo sapiens; identical to SEQ ID NO: 66293

SEQ ID NO: 66440 - DNA, 201 bp, Homo sapiens; identical to SEQ ID NO: 66294

SEQ ID NO: 66441 - DNA, 201 bp, Homo sapiens; identical to SEQ ID NO: 66295

SEQ ID NO: 66442 - DNA, 201 bp, Homo sapiens; identical to SEQ ID NO: 66297

SEQ ID NO: 66443 - DNA, 201 bp, Homo sapiens; identical to SEQ ID NO: 66296

SEQ ID NO: 66444 - DNA, 201 bp, Homo sapiens; identical to SEQ ID NO: 66301

SEQ ID NO: 66445 - DNA, 201 bp, Homo sapiens; identical to SEQ ID NO: 66302

SEQ ID NO: 66446 - DNA, 201 bp, Homo sapiens; identical to SEQ ID NO: 66304

SEQ ID NO: 66447 - DNA, 201 bp, Homo sapiens; identical to SEQ ID NO: 66303

SEQ ID NO: 66448 - DNA, 201 bp, Homo sapiens; identical to SEQ ID NO: 66305

SEQ ID NO: 66449 - DNA, 201 bp, Homo sapiens; identical to SEQ ID NO: 66306

SEQ ID NO: 66450 - DNA, 201 bp, Homo sapiens; identical to SEQ ID NO: 66307

SEQ ID NO: 66451 - DNA, 201 bp, Homo sapiens; identical to SEQ ID NO: 66308

SEQ ID NO: 66452 - DNA, 201 bp, Homo sapiens; identical to SEQ ID NO: 66309

SEQ ID NO: 66453 - DNA, 201 bp, Homo sapiens; identical to SEQ ID NO: 66310

SEQ ID NO: 66454 - DNA, 201 bp, Homo sapiens; identical to SEQ ID NO: 66311

SEQ ID NO: 66455 - DNA, 201 bp, Homo sapiens; identical to SEQ ID NO: 66312

SEQ ID NO: 66456 - DNA, 201 bp, Homo sapiens; identical to SEQ ID NO: 66314

SEQ ID NO: 66457 - DNA, 201 bp, Homo sapiens; identical to SEQ ID NO: 66315

SEQ ID NO: 66458 - DNA, 201 bp, Homo sapiens; identical to SEQ ID NO: 66316

SEQ ID NO: 66459 - DNA, 201 bp, Homo sapiens; identical to SEQ ID NO: 66319

SEQ ID NO: 66460 - DNA, 201 bp, Homo sapiens; identical to SEQ ID NO: 66318

SEQ ID NO: 66461 - DNA, 201 bp, Homo sapiens; identical to SEQ ID NO: 66320

SEQ ID NO: 66462 - DNA, 201 bp, Homo sapiens; identical to SEQ ID NO: 66323

SEQ ID NO: 66463 - DNA, 201 bp, Homo sapiens; identical to SEQ ID NO: 66322

SEQ ID NO: 66464 - DNA, 201 bp, Homo sapiens; identical to SEQ ID NO: 66325

SEQ ID NO: 66465 - DNA, 201 bp, Homo sapiens; identical to SEQ ID NO: 66326

SEQ ID NO: 66466 - DNA, 201 bp, Homo sapiens; identical to SEQ ID NO: 66327

SEQ ID NO: 66467 - DNA, 201 bp, Homo sapiens; identical to SEQ ID NO: 66328

SEQ ID NO: 66468 - DNA, 201 bp, Homo sapiens
tgcgttccccgcccctgcagcggccacagtggtgcggccggcggccgagcgttctgagtcacccgggactggagggaacccagccatggtgaacgaagccwgaggaaacagcagcctcaacccctgcttggagggcagtgccagcagtggcagtgagagctccaaagatagttcgagatgttccaccccgggcctggaccc

SEQ ID NO: 66469 - DNA, 201 bp, Homo sapiens; identical to SEQ ID NO: 66290

SEQ ID NO: 66470 - DNA, 201 bp, Homo sapiens; identical to SEQ ID NO: 66291

SEQ ID NO: 66471 - DNA, 201 bp, Homo sapiens; identical to SEQ ID NO: 66292

SEQ ID NO: 66472 - DNA, 201 bp, Homo sapiens; identical to SEQ ID NO: 66293

SEQ ID NO: 66473 - DNA, 201 bp, Homo sapiens; identical to SEQ ID NO: 66294

SEQ ID NO: 66474 - DNA, 201 bp, Homo sapiens; identical to SEQ ID NO: 66295

SEQ ID NO: 66475 - DNA, 201 bp, Homo sapiens; identical to SEQ ID NO: 66297

SEQ ID NO: 66476 - DNA, 201 bp, Homo sapiens; identical to SEQ ID NO: 66296

SEQ ID NO: 66477 - DNA, 201 bp, Homo sapiens; identical to SEQ ID NO: 66301

SEQ ID NO: 66478 - DNA, 201 bp, Homo sapiens; identical to SEQ ID NO: 66302

SEQ ID NO: 66479 - DNA, 201 bp, Homo sapiens; identical to SEQ ID NO: 66304

SEQ ID NO: 66480 - DNA, 201 bp, Homo sapiens; identical to SEQ ID NO: 66303

SEQ ID NO: 66481 - DNA, 201 bp, Homo sapiens; identical to SEQ ID NO: 66305

SEQ ID NO: 66482 - DNA, 201 bp, Homo sapiens; identical to SEQ ID NO: 66306

SEQ ID NO: 66483 - DNA, 201 bp, Homo sapiens; identical to SEQ ID NO: 66307

SEQ ID NO: 66484 - DNA, 201 bp, Homo sapiens; identical to SEQ ID NO: 66308

SEQ ID NO: 66485 - DNA, 201 bp, Homo sapiens; identical to SEQ ID NO: 66309

SEQ ID NO: 66486 - DNA, 201 bp, Homo sapiens; identical to SEQ ID NO: 66310

SEQ ID NO: 66487 - DNA, 201 bp, Homo sapiens; identical to SEQ ID NO: 66311

SEQ ID NO: 66488 - DNA, 201 bp, Homo sapiens; identical to SEQ ID NO: 66312

SEQ ID NO: 66489 - DNA, 201 bp, Homo sapiens; identical to SEQ ID NO: 66314

SEQ ID NO: 66490 - DNA, 201 bp, Homo sapiens; identical to SEQ ID NO: 66315

SEQ ID NO: 66491 - DNA, 201 bp, Homo sapiens; identical to SEQ ID NO: 66316

SEQ ID NO: 66492 - DNA, 201 bp, Homo sapiens; identical to SEQ ID NO: 66319

SEQ ID NO: 66493 - DNA, 201 bp, Homo sapiens; identical to SEQ ID NO: 66318

SEQ ID NO: 66494 - DNA, 201 bp, Homo sapiens; identical to SEQ ID NO: 66320

SEQ ID NO: 66495 - DNA, 201 bp, Homo sapiens; identical to SEQ ID NO: 66323

SEQ ID NO: 66496 - DNA, 201 bp, Homo sapiens; identical to SEQ ID NO: 66322

SEQ ID NO: 66497 - DNA, 201 bp, Homo sapiens; identical to SEQ ID NO: 66325

SEQ ID NO: 66498 - DNA, 201 bp, Homo sapiens; identical to SEQ ID NO: 66326

SEQ ID NO: 66499 - DNA, 201 bp, Homo sapiens; identical to SEQ ID NO: 66327

SEQ ID NO: 66500 - DNA, 201 bp, Homo sapiens; identical to SEQ ID NO: 66328

SEQ ID NO: 66501 - DNA, 201 bp, Homo sapiens
gggccagctcatcagagattcctggcaggctcctcaccacacttcagtcggcccagggacaaaaattcctccattttgcaaagtcggattcttttcttgaygacatctttgcagcctggatggctcaacggctgaagacacacttgttaacagaaacctggcagcgaaaaagacaagagcttccttcaaactgctcccttc

SEQ ID NO: 66502 - DNA, 201 bp, Homo sapiens
tcccagccacctttcaccaggagctcattcacatgccccagctgtgcaccagggccagctcatcagagattcctggcaggctcctcaccacacttcagtckgcccagggacaaaaattcctccattttgcaaagtcggattcttttcttgacgacatctttgcagcctggatggctcaacggctgaagacacacttgttaa

SEQ ID NO: 66503 - DNA, 201 bp, Homo sapiens
gacaagagcttccttcaaactgctcccttccttaccatgtctacaatataaaagcaattaaattatcacgacactcttatttcagttcttatcaagatcaygccaagtggtgtatttcccaaaagggcaccaaaaatcgctggacatgtattggagacctaaatcggagtccacaccaagccttcagaagtggaggattca

SEQ ID NO: 66504 - DNA, 201 bp, Homo sapiens
ttccttggcctctttggggtgctgggggcagcaacaatttcatgcagaaatgaagaagggaaagctgtggactggtttactttttataagttacctaaaaracaaaacaaggaaagtggagagactgggttagagtacctgtacctagactctacaactagaagctggaggaagagtgagcaactaatgaatgacaccaag

SEQ ID NO: 66505 - DNA, 201 bp, Homo sapiens; identical to SEQ ID NO: 66501

SEQ ID NO: 66506 - DNA, 201 bp, Homo sapiens; identical to SEQ ID NO: 66502

SEQ ID NO: 66507 - DNA, 142 bp, Homo sapiens
atggggaaagtgtcctgctgtggcatgaaataaatgaaacasaaaatgatggcaagactgctaagaacatcctttgctttgctcttccttggcctctttggggtgctgggggcagcaacaatttcatgcagaaatgaagaag

SEQ ID NO: 66508 - DNA, 201 bp, Homo sapiens; identical to SEQ ID NO: 66503

SEQ ID NO: 66509 - DNA, 201 bp, Homo sapiens
tccctgcccctccaggtgtccagggtaaagtgtaactcagactgacctgtggggcacagggggcaccagctggccttgccctctctggtctgggctgtctrccttcctcactgtatctttgcccagacccacctgggccagtaggcccctgtccccagccacacaccttagatgctggcatgccttactccaggtgcctgt

SEQ ID NO: 66510 - DNA, 201 bp, Homo sapiens
gaaagaacttccacttcgtgcaccgctcggccgacgtggagagcgtggtgagcgggaccctccgctcagccttcgagtacggtggccagaagtgttccgcstgctcgcgtctctacgtgccgcactcgctgtggccgcagatcaaagggcggctgctggaggagcacagtcggatcaaagtgggcgaccctgcagaggatt

SEQ ID NO: 66511 - DNA, 201 bp, Homo sapiens
actttgtggagccctgcatcgtggagagcaaggaccctcaggagcccatcatgaaggaggagatcttcgggcctgtactgtctgtgtacgtctacccggaygacaagtacaaggagacgctgcagctggttgacagcaccaccagctatggcctcacgggggcagtgttctcccaggataaggacgtcgtgcaggaggcca

SEQ ID NO: 66512 - DNA, 201 bp, Homo sapiens
tggagagcgtggtgagcgggaccctccgctcagccttcgagtacggtggccagaagtgttccgcctgctcgcgtctctacgtgccgcactcgctgtggccrcagatcaaagggcggctgctggaggagcacagtcggatcaaagtgggcgaccctgcagaggattttgggaccttcttctctgcagtgattgatgccaagt

SEQ ID NO: 66513 - DNA, 201 bp, Homo sapiens
caaggaccctcaggagcccatcatgaaggaggagatcttcgggcctgtactgtctgtgtacgtctacccggatgacaagtacaaggagacgctgcagctgrttgacagcaccaccagctatggcctcacgggggcagtgttctcccaggataaggacgtcgtgcaggaggccacaaaggtgctgaggaatgctgccggcaa

SEQ ID NO: 66514 - DNA, 201 bp, Homo sapiens
tcgccgcaggtcatcaaggagacacataagcccctgggggactggagctacgcgtacatgcagtgagcccctctcgggctccaccgtccagctgtctgtcygtccaggtggccgacctcactgcacagaccccactccagcccctccaccccttcttcatgcacagctgcctttctataatccgggcttgactcccttctt

SEQ ID NO: 66515 - DNA, 201 bp, Homo sapiens
catgactttcaaggatggttcttaggggactgtgaaagtgttgggtcttcctccaggatgcctgcatgggaccccacccggagctggtgtggccattcccsaagtgctggtgccagctgggctgggtgtgggttctgtgtccttccaggatatgtgtcatttcccatgaggggccggggcaggtggctgggtgggggcaca

SEQ ID NO: 66516 - DNA, 201 bp, Homo sapiens
aacttccacttcgtgcaccgctcggccgacgtggagagcgtggtgagcgggaccctccgctcagccttcgagtacggtggccagaagtgttccgcctgctygcgtctctacgtgccgcactcgctgtggccgcagatcaaagggcggctgctggaggagcacagtcggatcaaagtgggcgaccctgcagaggattttggg

SEQ ID NO: 66517 - DNA, 201 bp, Homo sapiens
tcggcggcaacctggcgggggcaccggccctgatgggcaacgtggtcctatggaagcccagtgacactgccatgctggccagctatgctgtctaccgcatycttcgggaggctggcctgccccccaacatcatccagtttgtgccagctgatgggcccctatttggggacactgtcaccagctcagagcacctctgtggca

SEQ ID NO: 66518 - DNA, 201 bp, Homo sapiens
ccagctgtctgtccgtccaggtggccgacctcactgcacagaccccactccagcccctccaccccttcttcatgcacagctgcctttctataatccgggcytgactcccttcttaccactgtattctggcctctcccatgcctcaggctctggtttgagatcgtgctggggaggaacatggccactaccccttatcccatc

SEQ ID NO: 66519 - DNA, 201 bp, Homo sapiens
tctcccaggataaggacgtcgtgcaggaggccacaaaggtgctgaggaatgctgccggcaacttctacatcaacgacaagtccactggctcgatagtgggycagcagccctttgggggggcccgagcctctggaaccaatgacaagccagggggcccacactacatcctgcgctggacgtcgccgcaggtcatcaaggaga

SEQ ID NO: 66520 - DNA, 201 bp, Homo sapiens
tccaggatgcctgcatgggaccccacccggagctggtgtggccattccccaagtgctggtgccagctgggctgggtgtgggttctgtgtccttccaggatmtgtgtcatttcccatgaggggccggggcaggtggctgggtgggggcacaggctggagtattcttagttctactggttctacactgtgaggtggcaatggg

SEQ ID NO: 66521 - DNA, 201 bp, Homo sapiens
tggttcttaggggactgtgaaagtgttgggtcttcctccaggatgcctgcatgggaccccacccggagctggtgtggccattccccaagtgctggtgccasctgggctgggtgtgggttctgtgtccttccaggatatgtgtcatttcccatgaggggccggggcaggtggctgggtgggggcacaggctggagtattctt

SEQ ID NO: 66522 - DNA, 201 bp, Homo sapiens
ccgtccagctgtctgtccgtccaggtggccgacctcactgcacagaccccactccagcccctccaccccttcttcatgcacagctgcctttctataatccrggcttgactcccttcttaccactgtattctggcctctcccatgcctcaggctctggtttgagatcgtgctggggaggaacatggccactaccccttatcc

SEQ ID NO: 66523 - DNA, 201 bp, Homo sapiens
ggaggccattctgggccccttggcaaacctcaccactcacagaggctcctggccttgatccctgcccctccaggtgtccagggtaaagtgtaactcagacygacctgtggggcacagggggcaccagctggccttgccctctctggtctgggctgtctaccttcctcactgtatctttgcccagacccacctgggccagta

SEQ ID NO: 66524 - DNA, 201 bp, Homo sapiens
ggaggccacctgccaaggcgtgggatgggatggtcctgccggtttaggccgtgattctggaaaaccttggatgggccttcgtcctatgtcagccttccctytgatcctcaggccctacctgtagagacctccactcctagagccagtctcagggtctgggatttccctgcaggagctcagccaccactgtgccatggtgac

SEQ ID NO: 66525 - DNA, 201 bp, Homo sapiens
atgactttcaaggatggttcttaggggactgtgaaagtgttgggtcttcctccaggatgcctgcatgggaccccacccggagctggtgtggccattccccragtgctggtgccagctgggctgggtgtgggttctgtgtccttccaggatatgtgtcatttcccatgaggggccggggcaggtggctgggtgggggcacag

SEQ ID NO: 66526 - DNA, 201 bp, Homo sapiens
aggcctgtgtgattcccggtctgcaccacatggcggggttggggggccgctggaggccacctgccaaggcgtgggatgggatggtcctgccggtttaggcygtgattctggaaaaccttggatgggccttcgtcctatgtcagccttccctttgatcctcaggccctacctgtagagacctccactcctagagccagtctc

SEQ ID NO: 66527 - DNA, 184 bp, Homo sapiens
cagctgggctgggtgtgggttctgtgtccttccaggatatgtgtcatttcccatgaggggccggggcaggtggctgggtgggggcacaggctggagtattyttagttctactggttctacactgtgaggtggcaatgggatttgctcagatgccacccaataaaatgcctgttacttaatcaca

SEQ ID NO: 66528 - DNA, 201 bp, Homo sapiens
ttgggaccttcttctctgcagtgattgatgccaagtcctttgcccgtatcaagaagtggctggagcacgcacgctcctcacccagcctcaccatcctggcygggggcaagtgtgatgactccgtgggctactttgtggagccctgcatcgtggagagcaaggaccctcaggagcccatcatgaaggaggagatcttcgggc

SEQ ID NO: 66529 - DNA, 201 bp, Homo sapiens
tgggcgaccctgcagaggattttgggaccttcttctctgcagtgattgatgccaagtcctttgcccgtatcaagaagtggctggagcacgcacgctcctcrcccagcctcaccatcctggccgggggcaagtgtgatgactccgtgggctactttgtggagccctgcatcgtggagagcaaggaccctcaggagcccatca

SEQ ID NO: 66530 - DNA, 201 bp, Homo sapiens
tgaccacgattcctcccacagatgcctcctgcttggattctgagtggtcagagatctgtaaagcatgactttcaaggatggttcttaggggactgtgaaartgttgggtcttcctccaggatgcctgcatgggaccccacccggagctggtgtggccattccccaagtgctggtgccagctgggctgggtgtgggttctgt

SEQ ID NO: 66531 - DNA, 201 bp, Homo sapiens
ttccctgcaggagctcagccaccactgtgccatggtgacacaggccaaggcagacattggccctcccttctcccagcccccagaggcctggccttgggttygtcagcatgggccgaggacgttgcctgtagaatcctcctctgcctgggagtggctctgtgtggaccagtccctcactggcccattctttttttgacgcag

SEQ ID NO: 66532 - DNA, 201 bp, Homo sapiens
ggatcaaagtgggcgaccctgcagaggattttgggaccttcttctctgcagtgattgatgccaagtcctttgcccgtatcaagaagtggctggagcacgcrcgctcctcacccagcctcaccatcctggccgggggcaagtgtgatgactccgtgggctactttgtggagccctgcatcgtggagagcaaggaccctcagg

SEQ ID NO: 66533 - DNA, 201 bp, Homo sapiens
ggtgagcgggaccctccgctcagccttcgagtacggtggccagaagtgttccgcctgctcgcgtctctacgtgccgcactcgctgtggccgcagatcaaarggcggctgctggaggagcacagtcggatcaaagtgggcgaccctgcagaggattttgggaccttcttctctgcagtgattgatgccaagtcctttgcccg

SEQ ID NO: 66534 - DNA, 201 bp, Homo sapiens
ggatttccctgcaggagctcagccaccactgtgccatggtgacacaggccaaggcagacattggccctcccttctcccagcccccagaggcctggccttgrgttcgtcagcatgggccgaggacgttgcctgtagaatcctcctctgcctgggagtggctctgtgtggaccagtccctcactggcccattctttttttgac

SEQ ID NO: 66535 - DNA, 201 bp, Homo sapiens; identical to SEQ ID NO: 66509

SEQ ID NO: 66536 - DNA, 201 bp, Homo sapiens; identical to SEQ ID NO: 66510

SEQ ID NO: 66537 - DNA, 201 bp, Homo sapiens; identical to SEQ ID NO: 66511

SEQ ID NO: 66538 - DNA, 201 bp, Homo sapiens; identical to SEQ ID NO: 66512

SEQ ID NO: 66539 - DNA, 201 bp, Homo sapiens; identical to SEQ ID NO: 66513

SEQ ID NO: 66540 - DNA, 201 bp, Homo sapiens; identical to SEQ ID NO: 66514

SEQ ID NO: 66541 - DNA, 201 bp, Homo sapiens
catgactttcaaggatggttcttaggggactgtgaaagtgttgggtcttcctccaggatgcctgcatgggaccccacccggagctggtgtggccattcccsaagtgccactggcccatggatgggggtgggtgctggtgccagctgggctgggtgtgggttctgtgtccttccaggatatgtgtcatttcccatgaggggc

SEQ ID NO: 66542 - DNA, 201 bp, Homo sapiens; identical to SEQ ID NO: 66516

SEQ ID NO: 66543 - DNA, 201 bp, Homo sapiens; identical to SEQ ID NO: 66517

SEQ ID NO: 66544 - DNA, 201 bp, Homo sapiens; identical to SEQ ID NO: 66518

SEQ ID NO: 66545 - DNA, 201 bp, Homo sapiens; identical to SEQ ID NO: 66519

SEQ ID NO: 66546 - DNA, 201 bp, Homo sapiens
cggagctggtgtggccattccccaagtgccactggcccatggatgggggtgggtgctggtgccagctgggctgggtgtgggttctgtgtccttccaggatmtgtgtcatttcccatgaggggccggggcaggtggctgggtgggggcacaggctggagtattcttagttctactggttctacactgtgaggtggcaatggg

SEQ ID NO: 66547 - DNA, 201 bp, Homo sapiens
gggtcttcctccaggatgcctgcatgggaccccacccggagctggtgtggccattccccaagtgccactggcccatggatgggggtgggtgctggtgccasctgggctgggtgtgggttctgtgtccttccaggatatgtgtcatttcccatgaggggccggggcaggtggctgggtgggggcacaggctggagtattctt

SEQ ID NO: 66548 - DNA, 201 bp, Homo sapiens; identical to SEQ ID NO: 66522

SEQ ID NO: 66549 - DNA, 201 bp, Homo sapiens; identical to SEQ ID NO: 66523

SEQ ID NO: 66550 - DNA, 201 bp, Homo sapiens; identical to SEQ ID NO: 66524

SEQ ID NO: 66551 - DNA, 201 bp, Homo sapiens
atgactttcaaggatggttcttaggggactgtgaaagtgttgggtcttcctccaggatgcctgcatgggaccccacccggagctggtgtggccattccccragtgccactggcccatggatgggggtgggtgctggtgccagctgggctgggtgtgggttctgtgtccttccaggatatgtgtcatttcccatgaggggcc

SEQ ID NO: 66552 - DNA, 201 bp, Homo sapiens; identical to SEQ ID NO: 66526

SEQ ID NO: 66553 - DNA, 179 bp, Homo sapiens
cagctgggctgggtgtgggttctgtgtccttccaggatatgtgtcatttcccatgaggggccggggcaggtggctgggtgggggcacaggctggagtattyttagttctactggttctacactgtgaggtggcaatgggatttgctcagatgccacccaataaaatgcctgttacttaa

SEQ ID NO: 66554 - DNA, 201 bp, Homo sapiens; identical to SEQ ID NO: 66528

SEQ ID NO: 66555 - DNA, 201 bp, Homo sapiens; identical to SEQ ID NO: 66529

SEQ ID NO: 66556 - DNA, 201 bp, Homo sapiens
tgaccacgattcctcccacagatgcctcctgcttggattctgagtggtcagagatctgtaaagcatgactttcaaggatggttcttaggggactgtgaaartgttgggtcttcctccaggatgcctgcatgggaccccacccggagctggtgtggccattccccaagtgccactggcccatggatgggggtgggtgctggt

SEQ ID NO: 66557 - DNA, 201 bp, Homo sapiens; identical to SEQ ID NO: 66531

SEQ ID NO: 66558 - DNA, 201 bp, Homo sapiens; identical to SEQ ID NO: 66532

SEQ ID NO: 66559 - DNA, 201 bp, Homo sapiens; identical to SEQ ID NO: 66533

SEQ ID NO: 66560 - DNA, 201 bp, Homo sapiens; identical to SEQ ID NO: 66534

SEQ ID NO: 66561 - DNA, 201 bp, Homo sapiens; identical to SEQ ID NO: 66510

SEQ ID NO: 66562 - DNA, 201 bp, Homo sapiens; identical to SEQ ID NO: 66511

SEQ ID NO: 66563 - DNA, 201 bp, Homo sapiens; identical to SEQ ID NO: 66512

SEQ ID NO: 66564 - DNA, 201 bp, Homo sapiens; identical to SEQ ID NO: 66513

SEQ ID NO: 66565 - DNA, 201 bp, Homo sapiens
tcgccgcaggtcatcaaggagacacataagcccctgggggactggagctacgcgtacatgcagtgagcccctctcgggctccaccgtccagctgtctgtcygtccagatgcctcctgcttggattctgagtggtcagagatctgtaaagcatgactttcaaggatggttcttaggggactgtgaaagtgttgggtcttcct

SEQ ID NO: 66566 - DNA, 201 bp, Homo sapiens; identical to SEQ ID NO: 66541

SEQ ID NO: 66567 - DNA, 201 bp, Homo sapiens; identical to SEQ ID NO: 66516

SEQ ID NO: 66568 - DNA, 201 bp, Homo sapiens; identical to SEQ ID NO: 66517

SEQ ID NO: 66569 - DNA, 201 bp, Homo sapiens; identical to SEQ ID NO: 66519

SEQ ID NO: 66570 - DNA, 201 bp, Homo sapiens; identical to SEQ ID NO: 66546

SEQ ID NO: 66571 - DNA, 201 bp, Homo sapiens; identical to SEQ ID NO: 66547

SEQ ID NO: 66572 - DNA, 201 bp, Homo sapiens; identical to SEQ ID NO: 66551

SEQ ID NO: 66573 - DNA, 201 bp, Homo sapiens; identical to SEQ ID NO: 66528

SEQ ID NO: 66574 - DNA, 177 bp, Homo sapiens
cagctgggctgggtgtgggttctgtgtccttccaggatatgtgtcatttcccatgaggggccggggcaggtggctgggtgggggcacaggctggagtattyttagttctactggttctacactgtgaggtggcaatgggatttgctcagatgccacccaataaaatgcctgttactt

SEQ ID NO: 66575 - DNA, 201 bp, Homo sapiens
tccagctgtctgtccgtccagatgcctcctgcttggattctgagtggtcagagatctgtaaagcatgactttcaaggatggttcttaggggactgtgaaartgttgggtcttcctccaggatgcctgcatgggaccccacccggagctggtgtggccattccccaagtgccactggcccatggatgggggtgggtgctggt

SEQ ID NO: 66576 - DNA, 201 bp, Homo sapiens; identical to SEQ ID NO: 66529

SEQ ID NO: 66577 - DNA, 201 bp, Homo sapiens; identical to SEQ ID NO: 66533

SEQ ID NO: 66578 - DNA, 201 bp, Homo sapiens; identical to SEQ ID NO: 66532

SEQ ID NO: 66579 - DNA, 201 bp, Homo sapiens
cgcatgcgcgctgaggcctgcctgaccgaccttcagcagggctgtggctaccatgttctctcgcgcgggtgtcgctgggctgtcggcctggaccttgcagscgcaatggattcaagttcgaaatatggcaactttgaaagatatcaccaggagactaaagtccatcaaaaacatccagaaaattaccaagtctatgaaaat

SEQ ID NO: 66580 - DNA, 193 bp, Homo sapiens
ttaatgaaaatcaagttccatcctcagacaagaggtaaagaaggaaaattcagccagttgattttgtttttagcttactgctgcctttgtccgaagaaacygttcctccattatttgaattactgaagacagcaagatatttgtaaattatcttaaaataaacaacttaaaataaaatcattgtttttcttat

SEQ ID NO: 66581 - DNA, 201 bp, Homo sapiens; identical to SEQ ID NO: 66579

SEQ ID NO: 66582 - DNA, 191 bp, Homo sapiens
agttgattgaaattatctctggtgctgcagctctgtaaagaaggaaaattcagccagttgattttgtttttagcttactgctgcctttgtccgaagaaacygttcctccattatttgaattactgaagacagcaagatatttgtaaattatcttaaaataaacaacttaaaataaaatcattgtttttctt

SEQ ID NO: 66583 - DNA, 201 bp, Homo sapiens
ggagcctgcctgcaggcctcccgaggagcccagacagctgcagccacagctccccgtatcaagaaatttgccatctatcgatgggacccagacaaggctgragacaaacctcatatgcagacttatgaagttgaccttaataaatgtggccccatggtattggatgctttaatcaagattaagaatgaagttgactctact

SEQ ID NO: 66584 - DNA, 114 bp, Homo sapiens
cacccgggaaacckgaagccgcctcccacttggttgctcgtacgcggctagtgggtcctcagtggatgtaggctgggcgccgcgatgttcgacgggacaccggcggagagcgac

SEQ ID NO: 66585 - DNA, 201 bp, Homo sapiens
ccgaggagcccagacagctgcagccacagctccccgtatcaagaaatttgccatctatcgatgggacccagacaaggctggagacaaacctcatatgcagrcttatgaagttgaccttaataaatgtggccccatggtattggatgctttaatcaagattaagaatgaagttgactctactttgaccttccgaagatcatg

SEQ ID NO: 66586 - DNA, 201 bp, Homo sapiens
atcgctggatgattgactccagagatgacttcacagaggagcgcctggccaagctgcaggacccattctctctataccgctgccacaccatcatgaactgmacaaggacctgtcctaagggtctgaatccagggaaagctattgcagagatcaagaaaatgatggcaacctataaggagaagaaagcttcagtttaactgt

SEQ ID NO: 66587 - DNA, 201 bp, Homo sapiens
tcttccacacatgtatgtgataaaggatcttgttcccgatttgagcaacttctatgcacagtacaaatccattgagccttatttgaagaagaaggatgaayctcaggaaggcaagcagcagtatctgcagtccatagaagagcgtgagaaactggacgggctctacgagtgcattctctgtgcctgctgtagcaccagctg

SEQ ID NO: 66588 - DNA, 201 bp, Homo sapiens
caggcctcccgaggagcccagacagctgcagccacagctccccgtatcaagaaatttgccatctatcgatgggacccagacaaggctggagacaaacctcrtatgcagacttatgaagttgaccttaataaatgtggccccatggtattggatgctttaatcaagattaagaatgaagttgactctactttgaccttccga

SEQ ID NO: 66589 - DNA, 201 bp, Homo sapiens
gttgccggccacaacccttggcggagcctgcctgcaggcctcccgaggagcccagacagctgcagccacagctccccgtatcaagaaatttgccatctatsgatgggacccagacaaggctggagacaaacctcatatgcagacttatgaagttgaccttaataaatgtggccccatggtattggatgctttaatcaagat

SEQ ID NO: 66590 - DNA, 201 bp, Homo sapiens
tcatatgcagacttatgaagttgaccttaataaatgtggccccatggtattggatgctttaatcaagattaagaatgaagttgactctactttgaccttcygaagatcatgcagagaaggcatctgtggctcttgtgcaatgaacatcaatggaggcaacactctagcttgcacccgaaggattgacaccaacctcaataa

SEQ ID NO: 66591 - DNA, 201 bp, Homo sapiens
tgtggccccatggtattggatgctttaatcaagattaagaatgaagttgactctactttgaccttccgaagatcatgcagagaaggcatctgtggctcttrtgcaatgaacatcaatggaggcaacactctagcttgcacccgaaggattgacaccaacctcaataaggtctcaaaaatctaccctcttccacacatgtat

SEQ ID NO: 66592 - DNA, 201 bp, Homo sapiens
tctcaggaaggcaagcagcagtatctgcagtccatagaagagcgtgagaaactggacgggctctacgagtgcattctctgtgcctgctgtagcaccagctrccccagctactggtggaacggagacaaatatctggggcctgcagttcttatgcaggcctatcgctggatgattgactccagagatgacttcacagaggag

SEQ ID NO: 66593 - DNA, 201 bp, Homo sapiens
aggctgggcgccgcgatgttcgacgggacaccggcggagagcgacctcggggttaaggggtggggctgacgtcaggagccaagatggcggcggtggtcgcmctctccttgaggcgccggttgccggccacaacccttggcggagcctgcctgcaggcctcccgaggagcccagacagctgcagccacagctccccgtatca

SEQ ID NO: 66594 - DNA, 201 bp, Homo sapiens
caggaaggcaagcagcagtatctgcagtccatagaagagcgtgagaaactggacgggctctacgagtgcattctctgtgcctgctgtagcaccagctgccscagctactggtggaacggagacaaatatctggggcctgcagttcttatgcaggcctatcgctggatgattgactccagagatgacttcacagaggagcgc

SEQ ID NO: 66595 - DNA, 201 bp, Homo sapiens
gctagtgggtcctcagtggatgtaggctgggcgccgcgatgttcgacgggacaccggcggagagcgacctcggggttaaggggtggggctgacgtcaggarccaagatggcggcggtggtcgcactctccttgaggcgccggttgccggccacaacccttggcggagcctgcctgcaggcctcccgaggagcccagacagc

SEQ ID NO: 66596 - DNA, 201 bp, Homo sapiens
tggcggagcctgcctgcctcccgaggagcccagacagctgcagccacagctccccgtatcaagaaatttgccatctatcgatgggacccagacaaggctgragacaaacctcatatgcagacttatgaagttgaccttaataaatgtggccccatggtattggatgctttaatcaagattaagaatgaagttgactctact

SEQ ID NO: 66597 - DNA, 201 bp, Homo sapiens; identical to SEQ ID NO: 66585

SEQ ID NO: 66598 - DNA, 201 bp, Homo sapiens; identical to SEQ ID NO: 66586

SEQ ID NO: 66599 - DNA, 201 bp, Homo sapiens; identical to SEQ ID NO: 66587

SEQ ID NO: 66600 - DNA, 201 bp, Homo sapiens
cctgcctcccgaggagcccagacagctgcagccacagctccccgtatcaagaaatttgccatctatcgatgggacccagacaaggctggagacaaacctcrtatgcagacttatgaagttgaccttaataaatgtggccccatggtattggatgctttaatcaagattaagaatgaagttgactctactttgaccttccga

SEQ ID NO: 66601 - DNA, 201 bp, Homo sapiens
gccggttgccggccacaacccttggcggagcctgcctgcctcccgaggagcccagacagctgcagccacagctccccgtatcaagaaatttgccatctatsgatgggacccagacaaggctggagacaaacctcatatgcagacttatgaagttgaccttaataaatgtggccccatggtattggatgctttaatcaagat

SEQ ID NO: 66602 - DNA, 201 bp, Homo sapiens; identical to SEQ ID NO: 66590

SEQ ID NO: 66603 - DNA, 201 bp, Homo sapiens; identical to SEQ ID NO: 66591

SEQ ID NO: 66604 - DNA, 123 bp, Homo sapiens
ccaagatggcggcggtggtcgcmctctccttgaggcgccggttgccggccacaacccttggcggagcctgcctgcctcccgaggagcccagacagctgcagccacagctccccgtatcaagaa

SEQ ID NO: 66605 - DNA, 201 bp, Homo sapiens; identical to SEQ ID NO: 66592

SEQ ID NO: 66606 - DNA, 201 bp, Homo sapiens; identical to SEQ ID NO: 66594

SEQ ID NO: 66607 - DNA, 201 bp, Homo sapiens
tgctggtgctggggaagcacctgggcatccccaagccctttgggcccatcatcaatggctgctgctgcctggaggagaaggtgcggtccctgctggagcckctgggcctccactgcaccttcattgatgacttcactccataccacatgctgcatggggaggtgcactgtggcaccaatgtgtgcagaaagcccttctctt

SEQ ID NO: 66608 - DNA, 201 bp, Homo sapiens
tgagctttgtccctgcccccgatgggaagggcttccggatgctcctggccagccctggggcctgcttcaagctcttccaggaaaagcagaagtgtggccaygggagggccctcctgttccagggggttgttgatgatgagcaggtcaagaccatctccatcaaccaggtgctctccaataaagacctcatcaactacaata

SEQ ID NO: 66609 - DNA, 201 bp, Homo sapiens
ctgcaccttcattgatgacttcactccataccacatgctgcatggggaggtgcactgtggcaccaatgtgtgcagaaagcccttctctttcaagtggtggmacatggtgccctgagacagctcccacccaccatcctgtccccctggggcgggcattggcccaggtggtggagacagagacaggcccctgaacgataagca

SEQ ID NO: 66610 - DNA, 201 bp, Homo sapiens
cgactggaaccgtgaggtgctgaagcgggagctgggcctggcagagtgtgacatcattgacatcccacagctcttcaagaccgagaggaaaaaagcaacgrccttcttccctgacttggtgaacatgctggtgctggggaagcacctgggcatccccaagccctttgggcccatcatcaatggctgctgctgcctggagga

SEQ ID NO: 66611 - DNA, 201 bp, Homo sapiens
ttcactgacactgtggtgttccgagtggcaccctggatcatgacgcccagcactctgccacccctagaggtgtatgtgtgccgtgtgaggaacaacacgtrttttgtggatgcggtggcagagctggccaggaaggccggctgcaagctgaccatctgcccacaggccgagaaccgcaacgaccgctggatccaggatgag

SEQ ID NO: 66612 - DNA, 201 bp, Homo sapiens
cctgacttggtgaacatgctggtgctggggaagcacctgggcatccccaagccctttgggcccatcatcaatggctgctgctgcctggaggagaaggtgcrgtccctgctggagccgctgggcctccactgcaccttcattgatgacttcactccataccacatgctgcatggggaggtgcactgtggcaccaatgtgtgc

SEQ ID NO: 66613 - DNA, 201 bp, Homo sapiens
aggtctgtgagtggcctggactcctttgggaacctggaggtcagccctccagtggtggccaatgggaaagagtaccccctggggaggatcctcattggggrcaacctgcctgggtcaagtggccgcagggtcacccaggtggtgcgggacttcctccatgcccagaaggtgcagccccccgtggagctctttgtggactgg

SEQ ID NO: 66614 - DNA, 201 bp, Homo sapiens
gtgtgtggctggcgtggagaccctcgtggacatttatgggtcagtgcctgagggcacagaaatgtttgaggtctatgggacgcctggcgtggacatctacrtctctcccaacatggagaggggccgggagcgtgcagacaccaggcggtggcgctttgacgcgactttggagatcatcgtggtcatgaactcccccagcaa

SEQ ID NO: 66615 - DNA, 155 bp, Homo sapiens
gcagtgttggggttggcggccacagctaagtccaacaccagcatgtcgctgcagmgaatcgtgcgtgtgtccctggagcatcccaccagcgcggtgtgtgtggctggcgtggagaccctcgtggacatttatgggtcagtgcctgagggcacaga

SEQ ID NO: 66616 - DNA, 201 bp, Homo sapiens
tgtcctccatacctccagctatgatgccaaacgggcacaggtcttccacatctgcggtcctgaggatgtgtgtgaggcctataggcatgtgctgggccaarataaggtgtcctatgaggtaccccgcttgcatggggatgaggagcgcttcttcgtggaaggcctgtccttccctgatgccggcttcacaggactcatctc

SEQ ID NO: 66617 - DNA, 110 bp, Homo sapiens
gcagtgttgrggttggcggccacagctaagtccaacaccagcatgtcgctgcagagaatcgtgcgtgtgtccctggagcatcccaccagcgcggtgtgtgtggctggcgt

SEQ ID NO: 66618 - DNA, 201 bp, Homo sapiens
gcccacaggccgagaaccgcaacgaccgctggatccaggatgagatggagctgggctacgttcaggcgccgcacaagaccctcccggtggtctttgactcyccaaggaatggggaactgcaggatttcccttacaaaagaatcctgggtccagattttggttacgtgactcgggaaccacgcgacaggtctgtgagtggcc

SEQ ID NO: 66619 - DNA, 201 bp, Homo sapiens
tcccggtggtctttgactccccaaggaatggggaactgcaggatttcccttacaaaagaatcctgggtccagattttggttacgtgactcgggaaccacgygacaggtctgtgagtggcctggactcctttgggaacctggaggtcagccctccagtggtggccaatgggaaagagtaccccctggggaggatcctcattg

SEQ ID NO: 66620 - DNA, 201 bp, Homo sapiens
acatggttgactatggtgatccaccttgtgatggttaatattaggtgtctggagaaggttgcttcattggccctgggacttctctctgcaggaggagagamcgctgcctctcctctggattggtctcaggctctctgttggcctttggtcagcgtttccacatcctgctctgctgcaggagagggggctaaggggctggat

SEQ ID NO: 66621 - DNA, 201 bp, Homo sapiens
gcagtgggtctgggggcccagtgggtatggcggcatcttgctggtgaactgtgaccgtgatgatccgagctgtgatgtccaggacaattgtgaccagcacrtgcactgcctgcaagacctggaagacatgtctgtcatggtcctgcggacgcagggccctgcagccctctttgatgaccacaaacttgtcctccatacctc

SEQ ID NO: 66622 - DNA, 201 bp, Homo sapiens
gttggcctttggtcagcgtttccacatcctgctctgctgcaggagagggggctaaggggctggatccaccaaggcagctcacagcgggaaaactctgggamtgaaccactgaattcaggggatgggggtgggggggcggttctcgaggtgtgtgccagctacacgtgtgttctgtatgggtccagctgcgtttccatcact

SEQ ID NO: 66623 - DNA, 201 bp, Homo sapiens
tgtgccgtgtgaggaacaacacgtgttttgtggatgcggtggcagagctggccaggaaggccggctgcaagctgaccatctgcccacaggccgagaaccgyaacgaccgctggatccaggatgagatggagctgggctacgttcaggcgccgcacaagaccctcccggtggtctttgactccccaaggaatggggaactgc

SEQ ID NO: 66624 - DNA, 201 bp, Homo sapiens
gggcaccttgactcagcttgacatctgcagctctgcccctgaggactgcacgtccttcagcatcaacgcctccccaggggtggtcgtggatattgcccacrgccctccagccaagaagaaatccacaggttcctccacatggcccctggaccctggggtagaggtgaccctgacgatgaaagtggccagtggtagcacagg

SEQ ID NO: 66625 - DNA, 114 bp, Homo sapiens
acagccagagggaygagctagcccgacgatggcccaggggacattgatccgtgtgaccccagagcagcccacccatgccgtgtgtgtgctgggcaccttgactcagcttgacat

SEQ ID NO: 66626 - DNA, 201 bp, Homo sapiens
ggtggaaagcacaacatggacttctacgtggaggccctcgctttcccggacaccgacttcccggggctcattaccctcaccatctccctgctggacacgtycaacctggagctccccgaggctgtggtgttccaagacagcgtggtcttccgcgtggcgccctggatcatgacccccaacacccagcccccgcaggaggtg

SEQ ID NO: 66627 - DNA, 201 bp, Homo sapiens
gtcgtggatattgcccacggccctccagccaagaagaaatccacaggttcctccacatggcccctggaccctggggtagaggtgaccctgacgatgaaagyggccagtggtagcacaggcgaccagaaggttcagatttcatactacggacccaagactccaccagtcaaagctctactctacctcaccggggtggaaatc

SEQ ID NO: 66628 - DNA, 201 bp, Homo sapiens
agagctgtgaaagatcagaggacctggacctggggcccttgtggacagggtgccatcctgctggtgaactgtgacagagacaatctcgaatcttctgccayggactgcgaggatgatgaagtgcttgacagcgaagacctgcaggacatgtcgctgatgaccctgagcacgaagacccccaaggacttcttcacaaaccat

SEQ ID NO: 66629 - DNA, 201 bp, Homo sapiens
ccaggggtggtcgtggatattgcccacggccctccagccaagaagaaatccacaggttcctccacatggcccctggaccctggggtagaggtgaccctgaygatgaaagtggccagtggtagcacaggcgaccagaaggttcagatttcatactacggacccaagactccaccagtcaaagctctactctacctcaccggg

SEQ ID NO: 66630 - DNA, 201 bp, Homo sapiens
atgaaatggagatcggctacatccaagccccacacaaaacgctgcccgtggtcttcgactctccaaggaacagaggcctgaaggagtttcccatcaaacgmgtgatggtacctgcatggggtggggagggggcacagctgccgaaaccctcttgtcttgagactccctccttttagcctgccttccccgcccgcgcctgta

SEQ ID NO: 66631 - DNA, 201 bp, Homo sapiens
tggacaaagtgagggtgtttcaggccacacggggcaaactgtcctccaagtgcagcgtagtcttgggtcccaagtggccctctcactacctgatggtcccyggtggaaagcacaacatggacttctacgtggaggccctcgctttcccggacaccgacttcccggggctcattaccctcaccatctccctgctggacacgt

SEQ ID NO: 66632 - DNA, 201 bp, Homo sapiens
cgtagtcttgggtcccaagtggccctctcactacctgatggtccccggtggaaagcacaacatggacttctacgtggaggccctcgctttcccggacaccracttcccggggctcattaccctcaccatctccctgctggacacgtccaacctggagctccccgaggctgtggtgttccaagacagcgtggtcttccgcgt

SEQ ID NO: 66633 - DNA, 201 bp, Homo sapiens
cagcttgatctccaggtaaccctgccgaggaggtggctcaggcttggacctccctgtgctcttgaagaagctcttgctgcaaggcggaggtggggccgggrctggaatctttcccaatgcccagctggaggctctgtcttatgggtggtgtttggtcttcaggggctccatctgggatatgggggattttgggatcagtgg

SEQ ID NO: 66634 - DNA, 201 bp, Homo sapiens
cagtggtagcacaggcgaccagaaggttcagatttcatactacggacccaagactccaccagtcaaagctctactctacctcaccggggtggaaatctccytgtgcgcagacatcacccgcaccggcaaagtgaagccaaccagagctgtgaaagatcagaggacctggacctggggcccttgtggacagggtgccatcct

SEQ ID NO: 66635 - DNA, 201 bp, Homo sapiens
ttgggtcccaagtggccctctcactacctgatggtccccggtggaaagcacaacatggacttctacgtggaggccctcgctttcccggacaccgacttccyggggctcattaccctcaccatctccctgctggacacgtccaacctggagctccccgaggctgtggtgttccaagacagcgtggtcttccgcgtggcgccc

SEQ ID NO: 66636 - DNA, 201 bp, Homo sapiens
aaggaacagaggcctgaaggagtttcccatcaaacgcgtgatggtacctgcatggggtggggagggggcacagctgccgaaaccctcttgtcttgagactycctccttttagcctgccttccccgcccgcgcctgtagctgagtagcccagtgcaaggaggtggaattcctaccaaagtgggagcatgtaggtggggcttg

SEQ ID NO: 66637 - DNA, 201 bp, Homo sapiens
acgatgaaagtggccagtggtagcacaggcgaccagaaggttcagatttcatactacggacccaagactccaccagtcaaagctctactctacctcaccgsggtggaaatctccttgtgcgcagacatcacccgcaccggcaaagtgaagccaaccagagctgtgaaagatcagaggacctggacctggggcccttgtgga

SEQ ID NO: 66638 - DNA, 151 bp, Homo sapiens
acagccagagggacgagctagcccgacgatggcccaggggacattgatccrtgtgaccccagagcagcccacccatgccgtgtgtgtgctgggcaccttgactcagcttgacatctgcagctctgcccctgaggactgcacgtccttcagc

SEQ ID NO: 66639 - DNA, 201 bp, Homo sapiens
ttgtcacccgtgagctcagcttgatctccaggtaaccctgccgaggaggtggctcaggcttggacctccctgtgctcttgaagaagctcttgctgcaaggyggaggtggggccggggctggaatctttcccaatgcccagctggaggctctgtcttatgggtggtgtttggtcttcaggggctccatctgggatatggggg

SEQ ID NO: 66640 - DNA, 201 bp, Homo sapiens
aacctggagctccccgaggctgtggtgttccaagacagcgtggtcttccgcgtggcgccctggatcatgacccccaacacccagcccccgcaggaggtgtrcgcgtgcagtatttttgaaaatgaggacttcctgaagtcagtgactactctggccatgaaagccaagtgcaagctgaccatctgccctgaggaggagaac

SEQ ID NO: 66641 - DNA, 201 bp, Homo sapiens
ggacccaagactccaccagtcaaagctctactctacctcaccggggtggaaatctccttgtgcgcagacatcacccgcaccggcaaagtgaagccaaccasagctgtgaaagatcagaggacctggacctggggcccttgtggacagggtgccatcctgctggtgaactgtgacagagacaatctcgaatcttctgccatg

SEQ ID NO: 66642 - DNA, 201 bp, Homo sapiens
gcccctggaccctggggtagaggtgaccctgacgatgaaagtggccagtggtagcacaggcgaccagaaggttcagatttcatactacggacccaagactmcaccagtcaaagctctactctacctcaccggggtggaaatctccttgtgcgcagacatcacccgcaccggcaaagtgaagccaaccagagctgtgaaaga

SEQ ID NO: 66643 - DNA, 201 bp, Homo sapiens; identical to SEQ ID NO: 66624

SEQ ID NO: 66644 - DNA, 114 bp, Homo sapiens; identical to SEQ ID NO: 66625

SEQ ID NO: 66645 - DNA, 201 bp, Homo sapiens; identical to SEQ ID NO: 66626

SEQ ID NO: 66646 - DNA, 201 bp, Homo sapiens; identical to SEQ ID NO: 66627

SEQ ID NO: 66647 - DNA, 201 bp, Homo sapiens; identical to SEQ ID NO: 66628

SEQ ID NO: 66648 - DNA, 201 bp, Homo sapiens; identical to SEQ ID NO: 66629

SEQ ID NO: 66649 - DNA, 201 bp, Homo sapiens
atgaaatggagatcggctacatccaagccccacacaaaacgctgcccgtggtcttcgactctccaaggaacagaggcctgaaggagtttcccatcaaacgmgtgatgggtccagattttggctatgtaactcgagggccccaaacagggggtatcagtggactggactcctttgggaacctggaagtgagccccccagtca

SEQ ID NO: 66650 - DNA, 201 bp, Homo sapiens; identical to SEQ ID NO: 66631

SEQ ID NO: 66651 - DNA, 201 bp, Homo sapiens
cggaagcttttttccccaacatggtgaacatgctggtgctagggaagcacctgggcatccccaagcccttcgggcccgtcatcaacggccgctgctgcctrgaggagaaggtgtgttccctgctggagccactgggcctccagtgcaccttcatcaacgacttcttcacctaccacatcaggcatggggaggtgcactgcg

SEQ ID NO: 66652 - DNA, 201 bp, Homo sapiens; identical to SEQ ID NO: 66632

SEQ ID NO: 66653 - DNA, 201 bp, Homo sapiens; identical to SEQ ID NO: 66634

SEQ ID NO: 66654 - DNA, 201 bp, Homo sapiens; identical to SEQ ID NO: 66635

SEQ ID NO: 66655 - DNA, 201 bp, Homo sapiens; identical to SEQ ID NO: 66637

SEQ ID NO: 66656 - DNA, 201 bp, Homo sapiens
atgtaactcgagggccccaaacagggggtatcagtggactggactcctttgggaacctggaagtgagccccccagtcacagtcaggggcaaggaatacccrctgggcaggattctcttcggggacagctgttatcccagcaatgacagccggcagatgcaccaggccctgcaggacttcctcagtgcccagcaggtgcagg

SEQ ID NO: 66657 - DNA, 151 bp, Homo sapiens; identical to SEQ ID NO: 66638

SEQ ID NO: 66658 - DNA, 201 bp, Homo sapiens; identical to SEQ ID NO: 66640

SEQ ID NO: 66659 - DNA, 201 bp, Homo sapiens; identical to SEQ ID NO: 66641

SEQ ID NO: 66660 - DNA, 201 bp, Homo sapiens
tgagctttgtgccagcacccgacaggaagggcttccggctgctcctggccagccccaggtcctgctacaaactgttccaggagcagcagaatgagggccayggggaggccctgctgttcgaagggatcaagaaaaaaaaacagcagaaaataaagaacattctgtcaaacaagacattgagagaacataattcatttgtgg

SEQ ID NO: 66661 - DNA, 201 bp, Homo sapiens; identical to SEQ ID NO: 66642

SEQ ID NO: 66662 - DNA, 201 bp, Homo sapiens
catggggaggtgcactgcggcaccaacgtgcgcagaaagcccttctccttcaagtggtggaacatggtgccctgagcccatcttccctggcgtcctctccytcctggccagatgtcgctgggtcctctgcagtgtggcaagcaagagctcttgtgaatattgtggctccctgggggcggccagccctcccagcagtggctt

SEQ ID NO: 66663 - DNA, 201 bp, Homo sapiens
accaacgtgcgcagaaagcccttctccttcaagtggtggaacatggtgccctgagcccatcttccctggcgtcctctccctcctggccagatgtcgctggrtcctctgcagtgtggcaagcaagagctcttgtgaatattgtggctccctgggggcggccagccctcccagcagtggcttgctttcttctcctgtgatgtc

SEQ ID NO: 66664 - DNA, 201 bp, Homo sapiens
aggcagaagcctcagtggtctcacccttcacctcgagcatggccagtattgagtgcgtgcccatggtcatcagggaggggcgctgttcccttgacacttcrttcagcgtcttcaagtacatggctctgtacagcctgacccagttcatctccgtcctgatcctctacacgatcaacaccaacctgggtgacctgcagttcc

SEQ ID NO: 66665 - DNA, 201 bp, Homo sapiens
cactggaactccctgcctctgagccaccaactggacccctctccagcaacaccaccgccaccacctcccacatccctgaggttggcgactgtctacactcytcccccgagaccacccccaccctggggaagcgttgactactgtcccctaccttggaccatcccgcgtaggggtggcagcccccagctcccctcagtgctg

SEQ ID NO: 66666 - DNA, 201 bp, Homo sapiens
acctgggtgacctgcagttcctggccatcgacctggtcatcaccaccacagtggcagtgctcatgagccgcacggggccagcgctggtcctgggacgggtrcggccaccgggggcgctgctcagcgtgcccgtgctcagcagcctgctgctgcagatggtcctggtgaccggcgtgcagctagggggctacttcctgaccc

SEQ ID NO: 66667 - DNA, 201 bp, Homo sapiens
aaccccgagacagtgcccaccgacttcgcccagatgctgcagagctatacagctgctggctaccgtgtcgtggccctggccagcaagccactgcccactgygcccagcctggaggcagcccagcaactgacgagggacactgtggaaggagacctgagcctcctggggctgctggtcatgaggaacctactgaagccgcag

SEQ ID NO: 66668 - DNA, 201 bp, Homo sapiens
tggaacgagagctggccgagcagccctggccgccgctgcccgccggccccctgaggtagtgcaggcccacgggcaccccagacactggaactccctgcctytgagccaccaactggacccctctccagcaacaccaccgccaccacctcccacatccctgaggttggcgactgtctacactcctcccccgagaccaccccc

SEQ ID NO: 66669 - DNA, 201 bp, Homo sapiens
accagtgcctccccgcctgcctgcgccgcctccggcccaagcgggcctccaagaagcgcttcaagcagctggaacgagagctggccgagcagccctggccrccgctgcccgccggccccctgaggtagtgcaggcccacgggcaccccagacactggaactccctgcctctgagccaccaactggacccctctccagcaac

SEQ ID NO: 66670 - DNA, 201 bp, Homo sapiens
ctctgaacaggacagtggccgcaccagacaacctgcccaactacgagaacaccgtggtcttctctctgtccagcttccagtacctcatcctggctgcagcygtgtccaagggggcgcccttccgccggccgctctacaccaatgtgcccttcctggtggccctggcgctcctgagctccgtcctggtgggccttgtcctgg

SEQ ID NO: 66671 - DNA, 201 bp, Homo sapiens
gcgcacgccggggcccaggccgagggccgcagcgccggggccggcgatgagcgcgaggagccggcatgagcgcagacagcagccctctcgtgggcagcacrcccaccggttatgggaccctgacgatagggacatcaatagatcccctcagctcctcagtttcatccgtgaggctcagcggctactgtggcagtccatgga

SEQ ID NO: 66672 - DNA, 201 bp, Homo sapiens
ccatggacttgaagatggtggagtctactggctgggtcctggaggaagagccggctgcagactcagcatttgggacccaggtcttggcagtgatgagaccyccactttgggagccccagctgcaggcaatggaggagcccccggtgccagtcagcgtcctccaccgcttccccttctcttcggctctgcagcgcatgagtg

SEQ ID NO: 66673 - DNA, 201 bp, Homo sapiens
tcgtggccctggccagcaagccactgcccactgtgcccagcctggaggcagcccagcaactgacgagggacactgtggaaggagacctgagcctcctgggkctgctggtcatgaggaacctactgaagccgcagacaacgccagttatccaggctctgcgaaggacccgcatccgcgccgtcatggtgacaggggacaacc

SEQ ID NO: 66674 - DNA, 201 bp, Homo sapiens
tccagggcactgtctttgcccgcatggcccctgagcagaagacagagctggtgtgcgagctacagaagcttcagtactgcgtgggcatgtgcggagacggygccaatgactgtggggccctgaaggcggctgatgtcggcatctcgctgtcccaggcagaagcctcagtggtctcacccttcacctcgagcatggccagta

SEQ ID NO: 66675 - DNA, 201 bp, Homo sapiens
agctgcagctggtgtgtttcgacaagacgggcaccctcactgaggacggcttagacgtgatgggggtggtgcccctgaaggggcaggcattcctgcccctkgtcccagagcctcgccgcctgcctgtggggcccctgctccgagcactggccacctgccatgccctcagccggctccaggacacccccgtgggcgacccca

SEQ ID NO: 66676 - DNA, 201 bp, Homo sapiens; identical to SEQ ID NO: 66664

SEQ ID NO: 66677 - DNA, 201 bp, Homo sapiens; identical to SEQ ID NO: 66665

SEQ ID NO: 66678 - DNA, 201 bp, Homo sapiens; identical to SEQ ID NO: 66666

SEQ ID NO: 66679 - DNA, 201 bp, Homo sapiens; identical to SEQ ID NO: 66667

SEQ ID NO: 66680 - DNA, 201 bp, Homo sapiens; identical to SEQ ID NO: 66668

SEQ ID NO: 66681 - DNA, 201 bp, Homo sapiens; identical to SEQ ID NO: 66669

SEQ ID NO: 66682 - DNA, 201 bp, Homo sapiens; identical to SEQ ID NO: 66670

SEQ ID NO: 66683 - DNA, 201 bp, Homo sapiens; identical to SEQ ID NO: 66671

SEQ ID NO: 66684 - DNA, 201 bp, Homo sapiens; identical to SEQ ID NO: 66672

SEQ ID NO: 66685 - DNA, 201 bp, Homo sapiens; identical to SEQ ID NO: 66673

SEQ ID NO: 66686 - DNA, 201 bp, Homo sapiens; identical to SEQ ID NO: 66674

SEQ ID NO: 66687 - DNA, 201 bp, Homo sapiens; identical to SEQ ID NO: 66675

SEQ ID NO: 66688 - DNA, 201 bp, Homo sapiens; identical to SEQ ID NO: 66664

SEQ ID NO: 66689 - DNA, 196 bp, Homo sapiens
cactggaactccctgcctctgagccaccaactggacccctctccagcaacaccaccgccaccacctcccacatccctgaggttggcgactgtctacactcytcccccgagaccacccccaccctggggaagcgttgactactgtcccctaccttggaccatcccgcgtaggggtggcagcccccagctcccctcag

SEQ ID NO: 66690 - DNA, 201 bp, Homo sapiens; identical to SEQ ID NO: 66668

SEQ ID NO: 66691 - DNA, 201 bp, Homo sapiens; identical to SEQ ID NO: 66666

SEQ ID NO: 66692 - DNA, 201 bp, Homo sapiens; identical to SEQ ID NO: 66667

SEQ ID NO: 66693 - DNA, 201 bp, Homo sapiens
ctctgaacaggacagtggccgcaccagacaacctgcccaactacgagaacaccgtggtcttctctctgtccagcttccagtacctcatcctggctgcagcygtgtccaagggggcgcccttccgccggccgctctacaccaatgagcgtgctagaccagtgcctccccgcctgcctgcgccgcctccggcccaagcgggcc

SEQ ID NO: 66694 - DNA, 201 bp, Homo sapiens; identical to SEQ ID NO: 66671

SEQ ID NO: 66695 - DNA, 201 bp, Homo sapiens; identical to SEQ ID NO: 66669

SEQ ID NO: 66696 - DNA, 201 bp, Homo sapiens; identical to SEQ ID NO: 66672

SEQ ID NO: 66697 - DNA, 201 bp, Homo sapiens; identical to SEQ ID NO: 66673

SEQ ID NO: 66698 - DNA, 201 bp, Homo sapiens; identical to SEQ ID NO: 66674

SEQ ID NO: 66699 - DNA, 201 bp, Homo sapiens; identical to SEQ ID NO: 66675

SEQ ID NO: 66700 - DNA, 201 bp, Homo sapiens
tgatcgtgctggacaaggacctgggcatccccaagccattcgggccacaggttgaggaggaatgctgcctggagatgcacgtgcgtggcctcctggagccyctgggcctcgaatgcaccttcatcgacgacatttctgcctaccacaaatttctgggggaagtccactgtggcaccaacgtccgcaggaagcccttcacct

SEQ ID NO: 66701 - DNA, 201 bp, Homo sapiens
tccccaagccattcgggccacaggttgaggaggaatgctgcctggagatgcacgtgcgtggcctcctggagcccctgggcctcgaatgcaccttcatcgaygacatttctgcctaccacaaatttctgggggaagtccactgtggcaccaacgtccgcaggaagcccttcaccttcaagtggtggcacatggtgccctgac

SEQ ID NO: 66702 - DNA, 201 bp, Homo sapiens
caagtgcctatttgagggtgtctgtctggagacttagagtttgtcatgtgtgtgtgtgtgtttggttaatgtgggtttatgggttttctttcttttttttyttttttttttagtctacattagggggaagtgagcgcctcccatgtgcagacagtgtgtctttatagatttttctaaggctttccccaatgatgtcggtaa

SEQ ID NO: 66703 - DNA, 201 bp, Homo sapiens
gcccagattttggctacgtgacccgggagcccctctttgagtctgtcaccagccttgactcatttggaaacctggaggtcagtcccccagtgaccgtgaayggcaagacatacccgcttggccgcatcctcatcgggagcagctttcctctgtctggtggtcggaggatgaccaaggtggtgcgtgacttcctgaaggccc

SEQ ID NO: 66704 - DNA, 201 bp, Homo sapiens
gtgacatcctcaagaaggagctgggactgacagagcaggacatcattgacctgcccgctctgttcaagatggacgaggaccaccgtgccagagccttcttyccaaacatggtgaacatgatcgtgctggacaaggacctgggcatccccaagccattcgggccacaggttgaggaggaatgctgcctggagatgcacgtgc

SEQ ID NO: 66705 - DNA, 201 bp, Homo sapiens
ctggtccctactggcatggaacccatcactccccaacatgcaaagcccacatttaaaggccagcctctgccccttcagtgatgcgctctttagaaatgccwgtccactatattcagaaatccgcagggcacaaaacttccagcaagtcactgttgtggtgaaatgggcagtgggggtggggggtcttctttaaacaggccc

SEQ ID NO: 66706 - DNA, 201 bp, Homo sapiens
ggtccctactggcatggaacccatcactccccaacatgcaaagcccacatttaaaggccagcctctgccccttcagtgatgcgctctttagaaatgccagyccactatattcagaaatccgcagggcacaaaacttccagcaagtcactgttgtggtgaaatgggcagtgggggtggggggtcttctttaaacaggccccc

SEQ ID NO: 66707 - DNA, 201 bp, Homo sapiens
acaaagtgggcgtgttctacgtggagaacccgttcttcggccaacgctatatccacatcctgggccggcggaagctctaccatgtggtcaagtacacgggkggctccgcggagctgctgttcttcgtggaaggcctctgtttccccgacgagggcttctcaggcctggtctccatccatgtcagcctgctggagtacatgg

SEQ ID NO: 66708 - DNA, 201 bp, Homo sapiens
agggccagggggccatcctgctggtgaactgtgaccgagagacaccctggttgcccaaggaggactgccgtgatgagaaggtctacagcaaggaagatctyaaggacatgtcccagatgatcctgcggaccaaaggccccgaccgcctccccgccggatacgagatagttctgtacatttccatgtcagactcagacaaag

SEQ ID NO: 66709 - DNA, 201 bp, Homo sapiens
acaaatttctgggggaagtccactgtggcaccaacgtccgcaggaagcccttcaccttcaagtggtggcacatggtgccctgacctgccaggggccctggygtttgcctccttcgcttagttctccagaccctccctcacacgcccagagccttctgctgacatggactggacagccccgctgggagacctttgggacgtg

SEQ ID NO: 66710 - DNA, 201 bp, Homo sapiens
gaaatgggcagtgggggtggggggtcttctttaaacaggcccccttcccatctacctagccagtacccatccaatgagtccccagagcctccagaagctgytgtctcctctctggggacagcagctcctgcctttggaggccaaagccccagatctctccagccccagagctgaaaacaccaagtgcctatttgagggtgt

SEQ ID NO: 66711 - DNA, 201 bp, Homo sapiens
tcaaaggcttgggtgggatgagcagcaagcgaatcaccatcaacaagattctgtccaacgagagccttgtgcaggagaacctgtacttccagcgctgcctrgactggaaccgtgacatcctcaagaaggagctgggactgacagagcaggacatcattgacctgcccgctctgttcaagatggacgaggaccaccgtgcca

SEQ ID NO: 66712 - DNA, 201 bp, Homo sapiens
aggaagcccttcaccttcaagtggtggcacatggtgccctgacctgccaggggccctggcgtttgcctccttcgcttagttctccagaccctccctcacaygcccagagccttctgctgacatggactggacagccccgctgggagacctttgggacgtggggtggaatttggggtatctgtgccttgccctccctgagag

SEQ ID NO: 66713 - DNA, 201 bp, Homo sapiens
aggggcctcagtgtcctctgaagccatccccagtgagcctcgactctgtccctgctgaaaatagctgggccagtgtctctgtagccctgacataaggaacrgaacacaacaaaacacagcaaaccatgtgcccaaactgctccccaaagaattttgagtctctaatctgacactgaatgaggggagaagggaaggagattc

SEQ ID NO: 66714 - DNA, 201 bp, Homo sapiens
ttctctggccgctccctgaccttcctccttccactgccttgactttcttcctttttattcctggtgccatctgtccaggcagctagacaagaacttgttcrccagcagccagattcaggccttcccaggggcataataagtgaccagcccctcctctccggacatcagatccaacacataaggaccctggcctaccctcca

SEQ ID NO: 66715 - DNA, 201 bp, Homo sapiens
gctccctgaccttcctccttccactgccttgactttcttcctttttattcctggtgccatctgtccaggcagctagacaagaacttgttcgccagcagccrgattcaggccttcccaggggcataataagtgaccagcccctcctctccggacatcagatccaacacataaggaccctggcctaccctccagcccaacagc

SEQ ID NO: 66716 - DNA, 201 bp, Homo sapiens
ggatgctccttttgcctcatctgtctcagggatgcaggctcccccgcatgcatggggatttctccccagaccagcatacttgtgacctgagagttcaatgygtaaagatgcccctggtcagccatatccatcttctcttgcctggtccttgattctctggccgctccctgaccttcctccttccactgccttgactttctt

SEQ ID NO: 66717 - DNA, 201 bp, Homo sapiens
tatcccattgaaattcaccagtgcctttgccaaagaccctctcatttggacatacccagattcattccctggctccaactgaaaagactcagtttcaatckttaaaagttcctttagggccagaagaataaatgaattataatcccattttgaagaaccgatttataaccaatgaaaaggttataatgtaatttatattct

SEQ ID NO: 66718 - DNA, 201 bp, Homo sapiens
actcagacaaagtgggcgtgttctacgtggagaacccgttcttcggccaacgctatatccacatcctgggccggcggaagctctaccatgtggtcaagtayacgggtggctccgcggagctgctgttcttcgtggaaggcctctgtttccccgacgagggcttctcaggcctggtctccatccatgtcagcctgctggagt

SEQ ID NO: 66719 - DNA, 201 bp, Homo sapiens
tttgagggtgtctgtctggagacttagagtttgtcatgtgtgtgtgtgtgtttggttaatgtgggtttatgggttttctttctttttttttttttttttttagtctacattagggggaagtgagcgcctcccatgtgcagacagtgtgtctttatagatttttctaaggctttccccaatgatgtcggtaatttctgatgt

SEQ ID NO: 66720 - DNA, 201 bp, Homo sapiens
cgcttggccgcatcctcatcgggagcagctttcctctgtctggtggtcggaggatgaccaaggtggtgcgtgacttcctgaaggcccagcaggtgcaggcrcccgtggagctctactcagactggctgactgtgggccacgtggatgagttcatgtcctttgtccccatccccggcacaaagaaattcctgctactcatgg

SEQ ID NO: 66721 - DNA, 201 bp, Homo sapiens
cattgagatctccctggatgtggacgcagaccgggatggtgtggtggagaagaacaacccaaagaaggcatcctggacctggggccccgagggccaggggrccatcctgctggtgaactgtgaccgagagacaccctggttgcccaaggaggactgccgtgatgagaaggtctacagcaaggaagatctcaaggacatgtc

SEQ ID NO: 66722 - DNA, 130 bp, Homo sapiens
tggagaaggcgcacctgctgcaggtgctcscggccgccccggaccagcgagcgcgggcactgcggcggggaggatgctgcgcgagcggaccgtgcggctgcagtacgggagccgcgtggaggcggtgtac

SEQ ID NO: 66723 - DNA, 201 bp, Homo sapiens
ccaaagccccagatctctccagccccagagctgaaaacaccaagtgcctatttgagggtgtctgtctggagacttagagtttgtcatgtgtgtgtgtgtgtttggttaatgtgggtttatgggttttctttctttttttttttttttttttagtctacattagggggaagtgagcgcctcccatgtgcagacagtgtgtct

SEQ ID NO: 66724 - DNA, 201 bp, Homo sapiens
gccaaagccccagatctctccagccccagagctgaaaacaccaagtgcctatttgagggtgtctgtctggagacttagagtttgtcatgtgtgtgtgtgtgtttggttaatgtgggtttatgggttttctttctttttttttttttttttttagtctacattagggggaagtgagcgcctcccatgtgcagacagtgtgtc

SEQ ID NO: 66725 - DNA, 201 bp, Homo sapiens
tgagccaggcgagcaccgaggccagcagtgacaaggtcaccgtcaactactatgacgaggaagggagcattcccatcgaccaggcggggctcttcctcacrgccattgagatctccctggatgtggacgcagaccgggatggtgtggtggagaagaacaacccaaagaaggcatcctggacctggggccccgagggccagg

SEQ ID NO: 66726 - DNA, 201 bp, Homo sapiens; identical to SEQ ID NO: 66700

SEQ ID NO: 66727 - DNA, 201 bp, Homo sapiens; identical to SEQ ID NO: 66701

SEQ ID NO: 66728 - DNA, 184 bp, Homo sapiens
caagtgcctatttgagggtgtctgtctggagacttagagtttgtcatgtgtgtgtgtgtgtttggttaatgtgggtttatgggttttctttcttttttttyttttttttttaggctcttccccacccccactttctataaatgtaggcctagaatacgcttctctgttgcaaaactcagctaag

SEQ ID NO: 66729 - DNA, 201 bp, Homo sapiens; identical to SEQ ID NO: 66703

SEQ ID NO: 66730 - DNA, 201 bp, Homo sapiens; identical to SEQ ID NO: 66704

SEQ ID NO: 66731 - DNA, 201 bp, Homo sapiens; identical to SEQ ID NO: 66705

SEQ ID NO: 66732 - DNA, 201 bp, Homo sapiens; identical to SEQ ID NO: 66706

SEQ ID NO: 66733 - DNA, 201 bp, Homo sapiens; identical to SEQ ID NO: 66707

SEQ ID NO: 66734 - DNA, 201 bp, Homo sapiens; identical to SEQ ID NO: 66708

SEQ ID NO: 66735 - DNA, 201 bp, Homo sapiens; identical to SEQ ID NO: 66709

SEQ ID NO: 66736 - DNA, 201 bp, Homo sapiens; identical to SEQ ID NO: 66710

SEQ ID NO: 66737 - DNA, 201 bp, Homo sapiens; identical to SEQ ID NO: 66711

SEQ ID NO: 66738 - DNA, 201 bp, Homo sapiens; identical to SEQ ID NO: 66712

SEQ ID NO: 66739 - DNA, 201 bp, Homo sapiens; identical to SEQ ID NO: 66713

SEQ ID NO: 66740 - DNA, 201 bp, Homo sapiens; identical to SEQ ID NO: 66714

SEQ ID NO: 66741 - DNA, 201 bp, Homo sapiens; identical to SEQ ID NO: 66715

SEQ ID NO: 66742 - DNA, 201 bp, Homo sapiens; identical to SEQ ID NO: 66716

SEQ ID NO: 66743 - DNA, 201 bp, Homo sapiens; identical to SEQ ID NO: 66717

SEQ ID NO: 66744 - DNA, 201 bp, Homo sapiens; identical to SEQ ID NO: 66718

SEQ ID NO: 66745 - DNA, 174 bp, Homo sapiens
tttgagggtgtctgtctggagacttagagtttgtcatgtgtgtgtgtgtgtttggttaatgtgggtttatgggttttctttctttttttttttttttttttaggctcttccccacccccactttctataaatgtaggcctagaatacgcttctctgttgcaaaactcagctaag

SEQ ID NO: 66746 - DNA, 201 bp, Homo sapiens; identical to SEQ ID NO: 66720

SEQ ID NO: 66747 - DNA, 201 bp, Homo sapiens; identical to SEQ ID NO: 66721

SEQ ID NO: 66748 - DNA, 130 bp, Homo sapiens; identical to SEQ ID NO: 66722

SEQ ID NO: 66749 - DNA, 201 bp, Homo sapiens
ccaaagccccagatctctccagccccagagctgaaaacaccaagtgcctatttgagggtgtctgtctggagacttagagtttgtcatgtgtgtgtgtgtgtttggttaatgtgggtttatgggttttctttctttttttttttttttttttaggctcttccccacccccactttctataaatgtaggcctagaatacgctt

SEQ ID NO: 66750 - DNA, 201 bp, Homo sapiens
gccaaagccccagatctctccagccccagagctgaaaacaccaagtgcctatttgagggtgtctgtctggagacttagagtttgtcatgtgtgtgtgtgtgtttggttaatgtgggtttatgggttttctttctttttttttttttttttttaggctcttccccacccccactttctataaatgtaggcctagaatacgct

SEQ ID NO: 66751 - DNA, 201 bp, Homo sapiens; identical to SEQ ID NO: 66725

SEQ ID NO: 66752 - DNA, 201 bp, Homo sapiens
aagggttatcaacctcaatgcctttgactctatgctccccaaaatgatgacacagttcctagagcagggagaggccatcctctcagtggcaagaagagccytgggtgcccagttgccagtcctaccatggttggaagtgacctccctggctccagccacatggccagataaggtggtgtgtgtgggcatgaattatgtgga

SEQ ID NO: 66753 - DNA, 201 bp, Homo sapiens
gtaaagagaagacgacttcaaccagcttgcatgtttggtggactccttcttccggaaaagtcacctcatatgaggtgcaattatttgatgaaaataaccaraagatacagggggttcaaattcaagaaagtacttcatggaatgaatacacttttttcaatctcactgctggtagtaaatacaatattgccatcacagctg

SEQ ID NO: 66754 - DNA, 201 bp, Homo sapiens
aaggccgaacagtcccagcagctgtcaccgacctgaggatcacagagaactccaccaggcacctgtccttccgctggaccgcctcagagggggagctcagytggtacaacatctttttgtacaacccagatgggaatctccaggagagagctcaagttgacccactagtccagagcttctctttccagaacttgctacaag

SEQ ID NO: 66755 - DNA, 201 bp, Homo sapiens
tgagcgttgccaaggcaggacagtccccctggctgtcctccagcttcgtgtcaaacatgccaatgaaacctcactgagtatcatgtggcagacccctgtakcagaatgggagaaatacatcatttccctagctgacagagacctcttactgatccacaagtcactctccaaagatgccaaagaattcacttttactgacct

SEQ ID NO: 66756 - DNA, 201 bp, Homo sapiens
cccctcctccacccccacacattcgtgtgaatgaaaaggatgtgctaattagcaagtcttccatcaactttactgtcaactgcagctggttcagcgacacsaatggagctgtgaaatacttcacagtggtggtgagagaggctgatggcagtgatgagctgaagccagaacagcagcaccctctcccttcctacctggagt

SEQ ID NO: 66757 - DNA, 201 bp, Homo sapiens
cagagatggagagcctaggtggaaaatgcgatcccactcagcaaaaattctgtgatggaccactgaagccacacactgcctacagaatcagcattcgagcwtttacacagctctttgatgaggacctgaaggaattcacaaagccactctattcagacacatttttttctttacccatcactactgaatcagagcccttgt

SEQ ID NO: 66758 - DNA, 201 bp, Homo sapiens
aatgaagtcaaaatgtcaagtaatcacccaaagttgcatttaataacaaaaggcactacatactgtaccaagtttatcttcaatatttgtgccttacttahtttgactataacaaattccaatgagtcagaaagtatttccttcatcaaggtccagttccgacagcattcctgggaaaaatttgaaaggagtttgtacgga

SEQ ID NO: 66759 - DNA, 201 bp, Homo sapiens
gttcctagtgctgtcaaaaatattcacatttctcccaatggagcaacagatagcctgacggtgaactggactcctggtgggggagacgttgattcctacayggtgtcggcattcaggcacagtcaaaaggttgactctcagactattcccaagcacgtctttgagcacacgttccacagactggaggccggggagcagtac

SEQ ID NO: 66760 - DNA, 201 bp, Homo sapiens
ctgacaaagtccagggagtcagtgttagcaactcagccaggagtgactatttaagggtatcctgggtgcatgccactggagactttgatcactatgaagtyaccattaaaaacaaaaacaacttcattcaaactaaaagcattcccaagtcagaaaacgaatgtgtatttgttcagctagtccctggacggttgtacagtg

SEQ ID NO: 66761 - DNA, 201 bp, Homo sapiens
ccattaaaaacaaaaacaacttcattcaaactaaaagcattcccaagtcagaaaacgaatgtgtatttgttcagctagtccctggacggttgtacagtgtyactgttactacaaaaagtggacaatatgaagccaatgaacaagggaatgggagaacaattccagagcctgttaaggatctaacattgcgcaacaggagca

SEQ ID NO: 66762 - DNA, 201 bp, Homo sapiens
ggccagcggaccaggattccctctactatggggacctcatcctgcagatgctctcagagtccgtcctgcctgagtggaccatccgggagtttaagatatgyggtgaggaacagcttgatgcacacagactcatccgccactttcactatacggtgtggccagaccatggagtcccagaaaccacccagtctctgatccagt

SEQ ID NO: 66763 - DNA, 201 bp, Homo sapiens
gaaagctacggagtgaacaagaaaaccccttgtttccaatctatgaaaatgtgaatccagagtatcacagagatccagtctattcaaggcattgagaatgyacctgaagagctcctggataaaaattattcactgtgtgatttgtttttaaaaacttgcttcatgccctacagaggtgccagctatttctgttgatactat

SEQ ID NO: 66764 - DNA, 201 bp, Homo sapiens
ggagatgtttgcctttttcacactacaaatttttctgtaataaacttgggaattagaggtcaagtttgttgatggcatagcttcctttgcataaagagtayatttcttttcaaagtatatatttttgtaacctaccataaagtccgtaagtgaatacaacgaatgtaattgacataataattgaaaatcattgactatacc

SEQ ID NO: 66765 - DNA, 201 bp, Homo sapiens
gacaccctgggggccgcgttgtgccctacctttcggatagacaacaccacatacggatgtaaccttcaagatttacaagcaggaaccatctataacttcargattatttctctggatgaagagagaacagtggtcttgcaaacagatcctttacctcctgctaggtttggagtcagtaaagagaagacgacttcaaccagc

SEQ ID NO: 66766 - DNA, 201 bp, Homo sapiens
tcctagttcatggcggtgttgtggacaaacatgctacttcctatgcttttcacgggctgacccctggctacctctacaacctcactgttatgactgaggcygcagggctgcaaaactacaggtggaaactagtcaggacagcccccatggaagtctcaaatctgaaggtgacaaatgatggcagtttgacctctctaaaag

SEQ ID NO: 66767 - DNA, 201 bp, Homo sapiens
ctggcaccaaggatgacttctggaaaatggtgtgggaacaaaacgttcacaacatcgtcatggtgacccagtgtgttgagaagggccgagtaaagtgtgaycattactggccagcggaccaggattccctctactatggggacctcatcctgcagatgctctcagagtccgtcctgcctgagtggaccatccgggagttta

SEQ ID NO: 66768 - DNA, 201 bp, Homo sapiens
ttgctgacattgcaaacacatccttggccatcacgtggaaagggcccccagactggacagactacaacgactttgagctgcagtggttgcccagagatgcrcttactgtcttcaacccctacaacaacagaaaatcagaaggacgcattgtgtatggtcttcgtccagggagatcctatcaattcaacgtcaagactgtca

SEQ ID NO: 66769 - DNA, 201 bp, Homo sapiens
tctggtgaactgtctgctcagaagatggcagtgggcagaacatttccagacaaagttgcaaacctggaggcaaacaataatggcaggatgaggtctcttgyagtgagctggtcgccccctgctggagactgggagcagtatcggatcctactcttcaatgattctgtggtgctgctcaacatcactgtgggaaaggaagaa

SEQ ID NO: 66770 - DNA, 201 bp, Homo sapiens
cctttcggatagacaacaccacatacggatgtaaccttcaagatttacaagcaggaaccatctataacttcaggattatttctctggatgaagagagaacwgtggtcttgcaaacagatcctttacctcctgctaggtttggagtcagtaaagagaagacgacttcaaccagcttgcatgtttggtggactccttcttccg

SEQ ID NO: 66771 - DNA, 201 bp, Homo sapiens
actgagtatcatgtggcagacccctgtagcagaatgggagaaatacatcatttccctagctgacagagacctcttactgatccacaagtcactctccaaaratgccaaagaattcacttttactgacctggtgcctggacgaaaatacatggctacagtcaccagtattagtggagacttaaaaaattcctcttcagtaaa

SEQ ID NO: 66772 - DNA, 201 bp, Homo sapiens
tccccctggctgtcctccagcttcgtgtcaaacatgccaatgaaacctcactgagtatcatgtggcagacccctgtagcagaatgggagaaatacatcatktccctagctgacagagacctcttactgatccacaagtcactctccaaagatgccaaagaattcacttttactgacctggtgcctggacgaaaatacatgg

SEQ ID NO: 66773 - DNA, 201 bp, Homo sapiens
caaggagtaattgcagacaatgcatacagcagttattccttaatagtaagttggcaaaaagctgctggtgtggcagaaagatatgatatcctgcttctaaytgaaaatggaatccttctgcgcaacacatcagagccagccaccactaagcaacacaaatttgaagatctaacaccaggcaagaaatacaagatacagatc

SEQ ID NO: 66774 - DNA, 201 bp, Homo sapiens
caggattatttctctggatgaagagagaacagtggtcttgcaaacagatcctttacctcctgctaggtttggagtcagtaaagagaagacgacttcaaccrgcttgcatgtttggtggactccttcttccggaaaagtcacctcatatgaggtgcaattatttgatgaaaataaccaaaagatacagggggttcaaattca

SEQ ID NO: 66775 - DNA, 201 bp, Homo sapiens
acctggaggcaaacaataatggcaggatgaggtctcttgtagtgagctggtcgccccctgctggagactgggagcagtatcggatcctactcttcaatgaktctgtggtgctgctcaacatcactgtgggaaaggaagaaacacagtatgtcatggatgacacggggctcgtaccgggaagacagtatgaggtggaagtca

SEQ ID NO: 66776 - DNA, 201 bp, Homo sapiens
tttccctagctgacagagacctcttactgatccacaagtcactctccaaagatgccaaagaattcacttttactgacctggtgcctggacgaaaatacatrgctacagtcaccagtattagtggagacttaaaaaattcctcttcagtaaaaggaagaacagtgcctgcccaagtgactgacttgcatgtggccaaccaag

SEQ ID NO: 66777 - DNA, 201 bp, Homo sapiens; identical to SEQ ID NO: 66753

SEQ ID NO: 66778 - DNA, 201 bp, Homo sapiens; identical to SEQ ID NO: 66754

SEQ ID NO: 66779 - DNA, 201 bp, Homo sapiens; identical to SEQ ID NO: 66755

SEQ ID NO: 66780 - DNA, 201 bp, Homo sapiens; identical to SEQ ID NO: 66756

SEQ ID NO: 66781 - DNA, 201 bp, Homo sapiens; identical to SEQ ID NO: 66757

SEQ ID NO: 66782 - DNA, 201 bp, Homo sapiens; identical to SEQ ID NO: 66758

SEQ ID NO: 66783 - DNA, 201 bp, Homo sapiens; identical to SEQ ID NO: 66759

SEQ ID NO: 66784 - DNA, 201 bp, Homo sapiens; identical to SEQ ID NO: 66760

SEQ ID NO: 66785 - DNA, 201 bp, Homo sapiens; identical to SEQ ID NO: 66761

SEQ ID NO: 66786 - DNA, 201 bp, Homo sapiens; identical to SEQ ID NO: 66762

SEQ ID NO: 66787 - DNA, 201 bp, Homo sapiens; identical to SEQ ID NO: 66763

SEQ ID NO: 66788 - DNA, 201 bp, Homo sapiens; identical to SEQ ID NO: 66764

SEQ ID NO: 66789 - DNA, 201 bp, Homo sapiens; identical to SEQ ID NO: 66765

SEQ ID NO: 66790 - DNA, 201 bp, Homo sapiens; identical to SEQ ID NO: 66766

SEQ ID NO: 66791 - DNA, 201 bp, Homo sapiens; identical to SEQ ID NO: 66767

SEQ ID NO: 66792 - DNA, 201 bp, Homo sapiens; identical to SEQ ID NO: 66768

SEQ ID NO: 66793 - DNA, 201 bp, Homo sapiens; identical to SEQ ID NO: 66769

SEQ ID NO: 66794 - DNA, 201 bp, Homo sapiens; identical to SEQ ID NO: 66770

SEQ ID NO: 66795 - DNA, 201 bp, Homo sapiens; identical to SEQ ID NO: 66771

SEQ ID NO: 66796 - DNA, 201 bp, Homo sapiens; identical to SEQ ID NO: 66772

SEQ ID NO: 66797 - DNA, 201 bp, Homo sapiens; identical to SEQ ID NO: 66773

SEQ ID NO: 66798 - DNA, 201 bp, Homo sapiens; identical to SEQ ID NO: 66774

SEQ ID NO: 66799 - DNA, 201 bp, Homo sapiens; identical to SEQ ID NO: 66775

SEQ ID NO: 66800 - DNA, 201 bp, Homo sapiens; identical to SEQ ID NO: 66776

SEQ ID NO: 66801 - DNA, 164 bp, Homo sapiens
agcgattgcgagccagcgcgcgcgcttcggcgttcccggcggtctgcgaagtttccggagcccsggtcccgccgcgggttcgcgcttgtgctcgcgctcgttcctggagtcggcggccgctgcgcgcgctcgttgcccaacccggtccccgcccccagacacgc

SEQ ID NO: 66802 - DNA, 201 bp, Homo sapiens
gccttgtagcagtgagtgatgtgaataaacatgctgatagaattgctttttgggatgatgtctatggcttcaagatgtcctgcatgaagaaagcagttatyccagaagctgttgtggaagttttagatccgaagactcttatttcagaaccttgtggtattaagcatatagattgccatacgacgtctatctcagatttgg

SEQ ID NO: 66803 - DNA, 201 bp, Homo sapiens
tttagatccgaagactcttatttcagaaccttgtggtattaagcatatagattgccatacgacgtctatctcagatttggaattttcatcagattttaccstgaaaatcacaaggacatccatgtgcacggcaattgctggctactttgatatatattttgagaagaattgccacaacagggtcgtgttctctacgggccc

SEQ ID NO: 66804 - DNA, 150 bp, Homo sapiens
agcgattgcgagccagcgcgcgcgcttcggcgttcccggcggtctgcgamgtttccggagcccgggtcccgccgcgggttcgcgcttgtgctcgcgctcgttcctggagtcggcggccgctgcgcgcgctcgttgcccaacccggtcccc

SEQ ID NO: 66805 - DNA, 201 bp, Homo sapiens; identical to SEQ ID NO: 66802

SEQ ID NO: 66806 - DNA, 201 bp, Homo sapiens; identical to SEQ ID NO: 66803

SEQ ID NO: 66807 - DNA, 179 bp, Homo sapiens
cgcctcgaggccggaagcgattgcgagccagcgcgcgcgcttcggcgttcccggcggtctgcgaagtttccggagcccsggtcccgccgcgggttcgcgcttgtgctcgcgctcgttcctggagtcggcggccgctgcgcgcgctcgttgcccaacccggtccccgcccccagacacgc

SEQ ID NO: 66808 - DNA, 201 bp, Homo sapiens; identical to SEQ ID NO: 66802

SEQ ID NO: 66809 - DNA, 201 bp, Homo sapiens; identical to SEQ ID NO: 66803

SEQ ID NO: 66810 - DNA, 165 bp, Homo sapiens
cgcctcgaggccggaagcgattgcgagccagcgcgcgcgcttcggcgttcccggcggtctgcgamgtttccggagcccgggtcccgccgcgggttcgcgcttgtgctcgcgctcgttcctggagtcggcggccgctgcgcgcgctcgttgcccaacccggtcccc

SEQ ID NO: 66811 - DNA, 201 bp, Homo sapiens
tgcagagactgggggtgaacaccgccgtcttcgagaggcgccatgtgatcgggggtgcagctgtcactgaggagatcatcccagggtttaagttctcccgygcgtcctacctgctcagcctgctgaggccgcagatttacactgatctggagctgaagaaacatgggctgaggcttcatcttcgaaacccctactccttca

SEQ ID NO: 66812 - DNA, 201 bp, Homo sapiens
ccttcccacaggcctgtgattgagctctgcatcccttcctcgctggaccccaccctggctccccctggctgccatgtagtctccctcttcactcagtacaygccctatacgctggctggaggcaaggcctgggacgagcaggagagagacgcttatgcagacagagtgtttgattgcatcgaggtctatgcccctggcttc

SEQ ID NO: 66813 - DNA, 201 bp, Homo sapiens
accccagtggattgtcagttttgccattatcccctgcatcctggaggtgacaccgcctggttaataggcaacactcccgacggcccagcacagccccaggrcagcaggaggctggcctgtggccaagaatgcatggtggagggggcctggagggggactgcagctcctcctcttcctgcttcctccctgctccaccccgtg

SEQ ID NO: 66814 - DNA, 146 bp, Homo sapiens
gagaattacagacagcgaacttgcccctaagccctcgttgtgggtktgtgtttgagcatttaggagaggactccagtgctcctcagcgacagacacagctgcctctgcggtgtctgaaggccctggtcgtggtgacgctagatggc

SEQ ID NO: 66815 - DNA, 201 bp, Homo sapiens
agttggagcagagtctgacacgagcacttgccatcccaggcgtttcagttctgactgagaaggtagatgcacaggggaggagagggccctttcgagctccrctctgcctccaccactcattccctaaccccgcagcctcagcgccctcatctgtaaaatggggagttttgcctacagggttcagcacaatgccagcctgac

SEQ ID NO: 66816 - DNA, 201 bp, Homo sapiens
tctgactgagaaggtagatgcacaggggaggagagggccctttcgagctccactctgcctccaccactcattccctaaccccgcagcctcagcgccctcayctgtaaaatggggagttttgcctacagggttcagcacaatgccagcctgacataggaaccccagtggattgtcagttttgccattatcccctgcatcctg

SEQ ID NO: 66817 - DNA, 201 bp, Homo sapiens
ggagggggcctggagggggactgcagctcctcctcttcctgcttcctccctgctccaccccgtgcctagggcagcacaaaagccaatcgctagcaaactcsctgcctagcaaggcccagcctggggcagaaatggctgcaagtggccgaggtctctgcaaggctgtggccgcctctcccttcccggcgtggagacgagata

SEQ ID NO: 66818 - DNA, 201 bp, Homo sapiens
cagcatggagttggagcagagtctgacacgagcacttgccatcccaggcgtttcagttctgactgagaaggtagatgcacaggggaggagagggccctttygagctccactctgcctccaccactcattccctaaccccgcagcctcagcgccctcatctgtaaaatggggagttttgcctacagggttcagcacaatgcc

SEQ ID NO: 66819 - DNA, 201 bp, Homo sapiens
agcatggagttggagcagagtctgacacgagcacttgccatcccaggcgtttcagttctgactgagaaggtagatgcacaggggaggagagggccctttcragctccactctgcctccaccactcattccctaaccccgcagcctcagcgccctcatctgtaaaatggggagttttgcctacagggttcagcacaatgcca

SEQ ID NO: 66820 - DNA, 201 bp, Homo sapiens
gccatgtagtctccctcttcactcagtacatgccctatacgctggctggaggcaaggcctgggacgagcaggagagagacgcttatgcagacagagtgttygattgcatcgaggtctatgcccctggcttcaaggactctgtggttggcagagacatcctcacaccaccagatttggagagaatcttcgggcttcctggag

SEQ ID NO: 66821 - DNA, 201 bp, Homo sapiens
tggcagagacatcctcacaccaccagatttggagagaatcttcgggcttcctggagggaacatattccactgcgccatgtccctggaccagctctacttcrcccgccccgtgcccctgcattctggctaccgctgccctctccagggcctgtatctctgtggaagtggggctcatcctggaggaggtgtgatgggagctgc

SEQ ID NO: 66822 - DNA, 201 bp, Homo sapiens
cctagcaaggcccagcctggggcagaaatggctgcaagtggccgaggtctctgcaaggctgtggccgcctctcccttcccggcgtggagacgagataacayggaagccaggggaggtctgaagcctgagtatgatgcggtggtgataggagcaggacacaacggactggtggctgcagcgtacctgcagagactgggggtg

SEQ ID NO: 66823 - DNA, 141 bp, Homo sapiens
gagaattacagacagcgaacttgcccctaagccctcgttgwgggtttgtgtttgagcatttaggagaggactccagtgctcctcagcgacagacacagctgcctctgcggtgtctgaaggccctggtcgtggtgacgctag

SEQ ID NO: 66824 - DNA, 201 bp, Homo sapiens
acaatgccagcctgacataggaaccccagtggattgtcagttttgccattatcccctgcatcctggaggtgacaccgcctggttaataggcaacactcccracggcccagcacagccccagggcagcaggaggctggcctgtggccaagaatgcatggtggagggggcctggagggggactgcagctcctcctcttcctgc

SEQ ID NO: 66825 - DNA, 201 bp, Homo sapiens; identical to SEQ ID NO: 66811

SEQ ID NO: 66826 - DNA, 201 bp, Homo sapiens; identical to SEQ ID NO: 66812

SEQ ID NO: 66827 - DNA, 201 bp, Homo sapiens; identical to SEQ ID NO: 66813

SEQ ID NO: 66828 - DNA, 146 bp, Homo sapiens; identical to SEQ ID NO: 66814

SEQ ID NO: 66829 - DNA, 201 bp, Homo sapiens; identical to SEQ ID NO: 66815

SEQ ID NO: 66830 - DNA, 201 bp, Homo sapiens; identical to SEQ ID NO: 66816

SEQ ID NO: 66831 - DNA, 201 bp, Homo sapiens; identical to SEQ ID NO: 66817

SEQ ID NO: 66832 - DNA, 201 bp, Homo sapiens; identical to SEQ ID NO: 66818

SEQ ID NO: 66833 - DNA, 201 bp, Homo sapiens; identical to SEQ ID NO: 66819

SEQ ID NO: 66834 - DNA, 201 bp, Homo sapiens; identical to SEQ ID NO: 66820

SEQ ID NO: 66835 - DNA, 201 bp, Homo sapiens; identical to SEQ ID NO: 66821

SEQ ID NO: 66836 - DNA, 201 bp, Homo sapiens; identical to SEQ ID NO: 66822

SEQ ID NO: 66837 - DNA, 141 bp, Homo sapiens; identical to SEQ ID NO: 66823

SEQ ID NO: 66838 - DNA, 201 bp, Homo sapiens; identical to SEQ ID NO: 66824

SEQ ID NO: 66839 - DNA, 201 bp, Homo sapiens
cccatccacctgagtgaggtgcgctgcaggggatatgagcggaccctcagcgactgccctgccctggaagggtcccagaatggttgccaacatgagaatgmtgctgctgtcaggtgcaatgtccctaacatgggctttcagaatcaggtgcgcttggctggtgggcgtatccctgaggaggggctattggaggtgcaggtg

SEQ ID NO: 66840 - DNA, 201 bp, Homo sapiens
ccacacagatctacaatctgggccggactgactttcgtccaaagactggacgcgatagctgggtttggcaccagtgccacaggcattaccacagcattgargtcttcacccactacgacctcctcactctcaatggctccaaggtggctgaggggcacaaggccagcttctgtctggaggacacaaactgccccacaggac

SEQ ID NO: 66841 - DNA, 201 bp, Homo sapiens
tgatgaacgcccagctagtgcaggagacggcctacttggaggaccgcccgctcagccagctgtattgtgcccacgaggagaactgcctctccaagtctgcrgatcacatggactggccctacggataccgccgcctattgcgcttctccacacagatctacaatctgggccggactgactttcgtccaaagactggacgcg

SEQ ID NO: 66842 - DNA, 201 bp, Homo sapiens
gggccgcctggaggtgctgcaccagggccagtggggcaccgtgtgtgatgacaactttgctatccaggaggccacagtggcttgccgccagctgggcttcraagctgccttgacctgggcccacagtgccaagtacggccaaggggagggacccatctggctggacaatgtgcgctgtgtgggcacagagagctccttgga

SEQ ID NO: 66843 - DNA, 201 bp, Homo sapiens
gactgcagtcactcagaagacgtaggggtgatatgccacccccggcgccatcgtggctacctttctgaaactgtctccaatgcccttgggccccagggccrgcggctggaggaggtgcggctcaagcccatccttgccagtgccaagcagcatagcccagtgaccgagggagccgtggaggtgaagtatgagggccactgg

SEQ ID NO: 66844 - DNA, 201 bp, Homo sapiens
atacccagccaatgcagaactctccctggagcaggaacagcgtctcaggaacaacctcatctgaagctgtcactgcacactcctagctgctgccgatacascagatacctcagcttattggagccatgcccttcacagagtcccaactcagaggaaaagggccagtgccaaggggcaccaagaacctgctcaggaagcctt

SEQ ID NO: 66845 - DNA, 201 bp, Homo sapiens
aggtcacctgcctggggacagagccccacatggccaactgccaggtgcaggtggctccagcccggggcaagctgcggccagcctgcccaggtggcatgcaygctgtggtcagctgtgtggcagggcctcacttccgcccaccgaagacaaagccacaacgcaaagggtcctgggcagaggagccgagggtgcgcctgcgct

SEQ ID NO: 66846 - DNA, 201 bp, Homo sapiens
tggcaagatcaccaatccagatggtattgctccctcaggatggctctgggcctgcccctaagggcctgtggcctatggaatatgtcctccaggctttgctyagctgagctcctcttctgtaaggaaacccagtcatccctgaatcttgccacagagatccgggattcaggagctctcagtttcttagggatggactatggc

SEQ ID NO: 66847 - DNA, 201 bp, Homo sapiens; identical to SEQ ID NO: 66839

SEQ ID NO: 66848 - DNA, 201 bp, Homo sapiens; identical to SEQ ID NO: 66840

SEQ ID NO: 66849 - DNA, 201 bp, Homo sapiens; identical to SEQ ID NO: 66841

SEQ ID NO: 66850 - DNA, 201 bp, Homo sapiens; identical to SEQ ID NO: 66842

SEQ ID NO: 66851 - DNA, 201 bp, Homo sapiens; identical to SEQ ID NO: 66843

SEQ ID NO: 66852 - DNA, 201 bp, Homo sapiens; identical to SEQ ID NO: 66844

SEQ ID NO: 66853 - DNA, 201 bp, Homo sapiens; identical to SEQ ID NO: 66845

SEQ ID NO: 66854 - DNA, 201 bp, Homo sapiens; identical to SEQ ID NO: 66846

SEQ ID NO: 66855 - DNA, 201 bp, Homo sapiens
aaaatggcagagtagatggttttggcctgctgactttccctgatggttctcatggaatcccccgcaatgaaggtctctttgagaacaacaagctgctgcgrcgtgagaagtgttctgccattgttcagcgggcccagagcgcctccaagtcagccagaaatctcactgcctgacagcgcagtgggcaccagctgataagta

SEQ ID NO: 66856 - DNA, 201 bp, Homo sapiens
ccgcggcctcccgaagtgctgggattacagatgtgagccactgcgcctggccagtttcatccttttatcctgtaatctgtcaccatgaccctgacaaaagkttccttcacctactccagtggggaggaatatcgtggcgagtggaaggagggccgcaggcatggttttggtcaactgatgtttgcagatggtggcacctac

SEQ ID NO: 66857 - DNA, 178 bp, Homo sapiens
ctcccgttaccctggtacccaaatacgtcccccacctctagctccctagcctcacattgaatgtctcttcaacagcagattgtggtggaagttatagccgygtgcctctatttattctctgaattgtactgtagaaaaaggtgtttataaagaataaagaaatcaccagaactgccta

SEQ ID NO: 66858 - DNA, 201 bp, Homo sapiens
agtttaatggcgtcggagtcttcattcgatatgacaacatgacctttgagggggaatttaaaaatggcagagtagatggttttggcctgctgactttcccygatggttctcatggaatcccccgcaatgaaggtctctttgagaacaacaagctgctgcgacgtgagaagtgttctgccattgttcagcgggcccagagcg

SEQ ID NO: 66859 - DNA, 201 bp, Homo sapiens
gccatttcaactagacggcctctgggtaggccagatctggatcctctgtctttatctgcgttgcagaggtgggaccacccctctttcacatagtcagcccrggttcgcaaacactcggccccgcacaaagatggcgtggagccgggctgggccaatgcggagtggcgttgctcccggttgcctaggtaacagccaatgggc

SEQ ID NO: 66860 - DNA, 201 bp, Homo sapiens; identical to SEQ ID NO: 66855

SEQ ID NO: 66861 - DNA, 201 bp, Homo sapiens
ggcgctggaaccctgcgtccaggcgtgacggtcatcccgaaaggccggccccagtttcatccttttatcctgtaatctgtcaccatgaccctgacaaaagkttccttcacctactccagtggggaggaatatcgtggcgagtggaaggagggccgcaggcatggttttggtcaactgatgtttgcagatggtggcacctac

SEQ ID NO: 66862 - DNA, 178 bp, Homo sapiens; identical to SEQ ID NO: 66857

SEQ ID NO: 66863 - DNA, 201 bp, Homo sapiens
gttgctcccggttgcctaggtaacagccaatgggcagcgggaattgtacccagtgcggtcgcccaggatggcggcgtcaagtggggcaatcgctggtggargtggcggagagcaaggtggcagccgggagcccatcagaggaaaagtccgaggcgctggaaccctgcgtccaggcgtgacggtcatcccgaaaggccggcc

SEQ ID NO: 66864 - DNA, 201 bp, Homo sapiens
gccgggctgggccaatgcggagtggcgttgctcccggttgcctaggtaacagccaatgggcagcgggaattgtacccagtgcggtcgcccaggatggcggygtcaagtggggcaatcgctggtggaggtggcggagagcaaggtggcagccgggagcccatcagaggaaaagtccgaggcgctggaaccctgcgtccaggc

SEQ ID NO: 66865 - DNA, 201 bp, Homo sapiens; identical to SEQ ID NO: 66858

SEQ ID NO: 66866 - DNA, 201 bp, Homo sapiens
ctgggtaggccagatctggatcctctgtctttatctgcgttgcagaggtgggaccacccctctttcacatagtcagcccgggttcgcaaacactcggcccmgcacaaagatggcgtggagccgggctgggccaatgcggagtggcgttgctcccggttgcctaggtaacagccaatgggcagcgggaattgtacccagtgc

SEQ ID NO: 66867 - DNA, 201 bp, Homo sapiens
gcctcattgagccaaacgctgcggtgacccggcgctttgggatcccagggctgaagaaaatcatggactggtttggctactatggaggcccctgccgcgcmcccttgcaggagctgagccccgctgaggaggaggcactgcgcatggatttcaccagcaacggctggctctgagggcaggcagggtccatggctggcctga

SEQ ID NO: 66868 - DNA, 201 bp, Homo sapiens
ttctgatggccagctatgccttgggagctgtggggggcgtctgcgccctggccaatgtcctgggggctcaggtgtgccagctggagcgactgtgctgcacrgggcaatgggaagatgcccagaaactgcagcaccgcctcattgagccaaacgctgcggtgacccggcgctttgggatcccagggctgaagaaaatcatgg

SEQ ID NO: 66869 - DNA, 201 bp, Homo sapiens
ccaggattgggctgattgttcacaagaccaggaagcaggattttcaggtgttggctggatcggctggctttctgatggccagctatgccttgggagctgtkgggggcgtctgcgccctggccaatgtcctgggggctcaggtgtgccagctggagcgactgtgctgcacggggcaatgggaagatgcccagaaactgcagc

SEQ ID NO: 66870 - DNA, 201 bp, Homo sapiens
ctaaactgtgtctctggtctgaagactgggaaggagcaatttctcaatttatctttctactgtggatgctttcctacgccctgaggcacatgaagtcagamaggaagggcagaggggcaagtaggcacagtaagggaatttttttttctttttttttttttttgagacagagtttcactctgtcacccaggctggagtgca

SEQ ID NO: 66871 - DNA, 201 bp, Homo sapiens
gggaatttttttttctttttttttttttttgagacagagtttcactctgtcacccaggctggagtgcaatggcgcgatctttgctcactccaacctccgcytcagcctcccaagtagctgggattacaggcatgcgccaccacgcctggctaattttgtattttcagtagagatggggtttcaccatgttggccaggctgg

SEQ ID NO: 66872 - DNA, 201 bp, Homo sapiens
tgagggcaggcagggtccatggctggcctgagcccatctcagcctcctgccttgcacttgcagcctgaagcggagagcacagggggatgagggtggcaggyagcggggagccgatagaggctcctttgcctgctgtggtcctccaggcagcctttcacaggcacgcccatgcatatctcctattctaacggcccctgacct

SEQ ID NO: 66873 - DNA, 201 bp, Homo sapiens
ggaggaggcactgcgcatggatttcaccagcaacggctggctctgagggcaggcagggtccatggctggcctgagcccatctcagcctcctgccttgcacytgcagcctgaagcggagagcacagggggatgagggtggcaggcagcggggagccgatagaggctcctttgcctgctgtggtcctccaggcagcctttcac

SEQ ID NO: 66874 - DNA, 201 bp, Homo sapiens
cccaggctggagtgcaatggcatgatctcgcctcctgggttcaagcgattctcctgcctcagcctcccgagtagctgggattacaggcgcctgccaccacrcccagctaatttttgtatttttagcagagatggggtttcaccgtgttggccaggctggtcttgaactcctgacctcaggtgatccaactgcctcggcctc

SEQ ID NO: 66875 - DNA, 201 bp, Homo sapiens; identical to SEQ ID NO: 66867

SEQ ID NO: 66876 - DNA, 201 bp, Homo sapiens
aactgggcaccttccccttccgaggagctgtggggggcgtctgcgccctggccaatgtcctgggggctcaggtgtgccagctggagcgactgtgctgcacrgggcaatgggaagatgcccagaaactgcagcaccgcctcattgagccaaacgctgcggtgacccggcgctttgggatcccagggctgaagaaaatcatgg

SEQ ID NO: 66877 - DNA, 201 bp, Homo sapiens
cccctgtgaccacccccttcactgccactgcagaggtggactatgggaaactggaggagaatctgcacaaactgggcaccttccccttccgaggagctgtkgggggcgtctgcgccctggccaatgtcctgggggctcaggtgtgccagctggagcgactgtgctgcacggggcaatgggaagatgcccagaaactgcagc

SEQ ID NO: 66878 - DNA, 201 bp, Homo sapiens; identical to SEQ ID NO: 66870

SEQ ID NO: 66879 - DNA, 201 bp, Homo sapiens; identical to SEQ ID NO: 66872

SEQ ID NO: 66880 - DNA, 201 bp, Homo sapiens; identical to SEQ ID NO: 66873

SEQ ID NO: 66881 - DNA, 201 bp, Homo sapiens; identical to SEQ ID NO: 66867

SEQ ID NO: 66882 - DNA, 201 bp, Homo sapiens; identical to SEQ ID NO: 66876

SEQ ID NO: 66883 - DNA, 201 bp, Homo sapiens; identical to SEQ ID NO: 66877

SEQ ID NO: 66884 - DNA, 201 bp, Homo sapiens; identical to SEQ ID NO: 66870

SEQ ID NO: 66885 - DNA, 201 bp, Homo sapiens; identical to SEQ ID NO: 66871

SEQ ID NO: 66886 - DNA, 201 bp, Homo sapiens; identical to SEQ ID NO: 66872

SEQ ID NO: 66887 - DNA, 201 bp, Homo sapiens; identical to SEQ ID NO: 66873

SEQ ID NO: 66888 - DNA, 201 bp, Homo sapiens
gcatcagtggccgctggatttccagctggacagactcatttgaagacacgattagaagagatcagattggctgtggaagatggagctacagaaatcgacgyggtaattaacagaagcttggtgctgacaggccagtgggaagccctgtatgatgagattcgtcagtttcgcaaggcctgtggggaggctcatcttaaaact

SEQ ID NO: 66889 - DNA, 201 bp, Homo sapiens
agcgggcaggggcggggcgagcgctccagctggcgggaaggaggaagggccgggcgcggcgcagaggcgggcgcctaccagccggcagctccggagctgcycgcgccatgtccgcgcacaatcggggcaccgagctcgaccttagctggatctccaaaatacaagtgaatcacccggcagttctgaggcgtgcggaacaaa

SEQ ID NO: 66890 - DNA, 201 bp, Homo sapiens
catcttccaacattcaaaggctctgttataaagccaaatacccaatccgggaagatctcttaaaagctttaaatatgcatgataaaggcattactacagcygccgtttgtgtttatcccgcccgggtgtgtgatgctgtaaaagcactcaaggctgcaggctgtaatatccctgtggcatcagtggccgctggatttccag

SEQ ID NO: 66891 - DNA, 201 bp, Homo sapiens
agtactctgctctcggacattgagaggcagatttaccatcatgtgactggaagatatgcagcttatcatgatcttccaatgtcttaaatcagtcaccagtwccagaaaagttctttacgacaatgtttaaaaattatttttctacgtaattgctaaaattatttaattaaaaaattgggcagtaggtaactggcattcctc

SEQ ID NO: 66892 - DNA, 201 bp, Homo sapiens; identical to SEQ ID NO: 66888

SEQ ID NO: 66893 - DNA, 201 bp, Homo sapiens; identical to SEQ ID NO: 66889

SEQ ID NO: 66894 - DNA, 201 bp, Homo sapiens
atctccaaaatacaagtgaatcacccggcagttctgaggcgtgcggaacaaatccaggctcgcagaaccgtgaaaaaggagtggcaggcattactacagcygccgtttgtgtttatcccgcccgggtgtgtgatgctgtaaaagcactcaaggctgcaggctgtaatatccctgtggcatcagtggccgctggatttccag

SEQ ID NO: 66895 - DNA, 201 bp, Homo sapiens; identical to SEQ ID NO: 66891

SEQ ID NO: 66896 - DNA, 201 bp, Homo sapiens; identical to SEQ ID NO: 66888

SEQ ID NO: 66897 - DNA, 201 bp, Homo sapiens
agcgggcaggggcggggcgagcgctccagctggcgggaaggaggaagggccgggcgcggcgcagaggcgggcgcctaccagccggcagctccggagctgcycgcgccatgtccgcgcacaatcggggcaccgagctcgtttgtttcagagaagatgcaatttatcctgagggagaatggaaaagtccaaactttggtagat

SEQ ID NO: 66898 - DNA, 201 bp, Homo sapiens; identical to SEQ ID NO: 66890

SEQ ID NO: 66899 - DNA, 201 bp, Homo sapiens; identical to SEQ ID NO: 66891

SEQ ID NO: 66900 - DNA, 201 bp, Homo sapiens
gagcaaaggtcccatgatcattcactgcagtgctggcgtgggacggacaggaacattcattgccctggacaggctcttgcagcacattcgggatcatgagwttgttgacatcttagggctggtgtcagaaatgaggtcataccggatgtctatggtacagacagaggagcagtacatttttatccatcagtgtgtgcaact

SEQ ID NO: 66901 - DNA, 201 bp, Homo sapiens
ctagaatgcttcactggatggtggttgcagaaggaaaaaagaaaattaaaaagagtgtaacacgcaatgtcatgactgcaattctcagcttgcctccaggmgacatctataacctctcagtaactgcttgtactgaaagaggaagtaatacctccatgctccgccttgtcaagctagaaccagctccacccaaatcactct

SEQ ID NO: 66902 - DNA, 201 bp, Homo sapiens
atgttactgtccaagttctttctcaagaaaccacatctggttcagaagagtgtcaagttggactctttgaactctgttgctgtctgagcaatcgtggtgcstagactttgcattccttgttctgttgacctgcatacatgtgagagctatttctttaagaactatataggctgtgaaaacgcactttctttcccccaaaga

SEQ ID NO: 66903 - DNA, 201 bp, Homo sapiens
tcaagctagaaccagctccacccaaatcactcttcgcagtgaacaaaacccagacttcagtgactttgctgtgggtggaagagggagtagctgatttcttygaagttttctgtcaacaagttggctccagtcagaaaaccaaacttcaggaaccagttgctgtttcttcccatgtcgtgaccatctccagccttcttcctg

SEQ ID NO: 66904 - DNA, 201 bp, Homo sapiens
tatacctaaggaaaggccctttgattggaccaccttcagatcctgtgacatttgctattgttcccacaggaataaaggatttaatgctctatcctttgggycctacggccgtggttctgagctggaccagaccttatttaggcgtgttcagaaaatacgtggttgaaatgttttatttcaaccctgctacaatgacatcag

SEQ ID NO: 66905 - DNA, 201 bp, Homo sapiens
tgagattagtctccatgaatgaagaggaaggtgcagactacatcaatgccaactatattcctggatacaactcaccccaggagtatattgccacccagggrccactgcctgaaaccagaaatgacttctggaagatggtcctgcaacaaaagtctcagattattgtcatgctcactcagtgtaatgagaaaaggagggtga

SEQ ID NO: 66906 - DNA, 201 bp, Homo sapiens
aaccagttgctgtttcttcccatgtcgtgaccatctccagccttcttcctgccactgcctacaattgtagtgtcaccagctttagccatgacagccccagygtccctacgttcatagccgtctcaacaatggttacagagatgaatcccaatgtggtagtgatctccgtgctggccatccttagcacacttttaattggac

SEQ ID NO: 66907 - DNA, 201 bp, Homo sapiens; identical to SEQ ID NO: 66901

SEQ ID NO: 66908 - DNA, 201 bp, Homo sapiens; identical to SEQ ID NO: 66903

SEQ ID NO: 66909 - DNA, 201 bp, Homo sapiens; identical to SEQ ID NO: 66904

SEQ ID NO: 66910 - DNA, 201 bp, Homo sapiens; identical to SEQ ID NO: 66905

SEQ ID NO: 66911 - DNA, 201 bp, Homo sapiens; identical to SEQ ID NO: 66906

SEQ ID NO: 66912 - DNA, 201 bp, Homo sapiens; identical to SEQ ID NO: 66900

SEQ ID NO: 66913 - DNA, 201 bp, Homo sapiens
tctggcagccgcggtggtggcggcggcagagcctcgcccactccaatccccaccctctccatccttagtcattaaagaacagcagcgcctggcacgttctyggaggaccccgggcgcagaggaggaaagggagcaggcgcagggggactggaaaggcagcatgcgctcgccaggagcaacctcggcgcccagggtctgagg

SEQ ID NO: 66914 - DNA, 201 bp, Homo sapiens; identical to SEQ ID NO: 66904

SEQ ID NO: 66915 - DNA, 201 bp, Homo sapiens; identical to SEQ ID NO: 66902

SEQ ID NO: 66916 - DNA, 201 bp, Homo sapiens; identical to SEQ ID NO: 66901

SEQ ID NO: 66917 - DNA, 201 bp, Homo sapiens; identical to SEQ ID NO: 66903

SEQ ID NO: 66918 - DNA, 201 bp, Homo sapiens; identical to SEQ ID NO: 66905

SEQ ID NO: 66919 - DNA, 201 bp, Homo sapiens; identical to SEQ ID NO: 66906

SEQ ID NO: 66920 - DNA, 201 bp, Homo sapiens; identical to SEQ ID NO: 66913

SEQ ID NO: 66921 - DNA, 201 bp, Homo sapiens; identical to SEQ ID NO: 66901

SEQ ID NO: 66922 - DNA, 201 bp, Homo sapiens; identical to SEQ ID NO: 66903

SEQ ID NO: 66923 - DNA, 201 bp, Homo sapiens; identical to SEQ ID NO: 66904

SEQ ID NO: 66924 - DNA, 201 bp, Homo sapiens; identical to SEQ ID NO: 66905

SEQ ID NO: 66925 - DNA, 201 bp, Homo sapiens; identical to SEQ ID NO: 66906

SEQ ID NO: 66926 - DNA, 187 bp, Homo sapiens
gaacattcttttgcagtgctggcgtgggacggacaggaacattcattgccctggacaggctcttgcagcacattcgggatcatgagwttgttgacatcttagggctggtgtcagaaatgaggtcataccggatgtctatggtacagacagaggagcagtacatttttatccatcagtgtgtgcaact

SEQ ID NO: 66927 - DNA, 201 bp, Homo sapiens; identical to SEQ ID NO: 66902

SEQ ID NO: 66928 - DNA, 187 bp, Homo sapiens; identical to SEQ ID NO: 66926

SEQ ID NO: 66929 - DNA, 201 bp, Homo sapiens
tggattggacactcctaaaaccaaaaacaacagtgacaatagagtctcaggatagcagagtctgaaaataccttggtctcccccattatgtgagcccttayttgagagcttcatgaagacacttgtaacatattcaacgtcctgtactccagttttgactacgagatcagattttggaggtgtaagtaatcttggctgagg

SEQ ID NO: 66930 - DNA, 201 bp, Homo sapiens; identical to SEQ ID NO: 66902

SEQ ID NO: 66931 - DNA, 201 bp, Homo sapiens
gtgagcccttatttgagagcttcatgaagacacttgtaacatattcaacgtcctgtactccagttttgactacgagatcagattttggaggtgtaagtaawcttggctgaggtaacagtaatctgcccatttagttcagtaaacagactgtagagtgtctgactatactgggggaagaggagccaatgacagggtagggag

SEQ ID NO: 66932 - DNA, 201 bp, Homo sapiens
agaagcagcagttctgcatcagtgatgtcatatacgagaatgttagcaagtcctagttcagaatccggagcagtaagtggagaagagctctccacgagtgytcagtcttagaactattagagggggatgtgatggatgggacaaaagacagcagtagccatttgtattgactctgacttcacatgagtatttcttcccagc

SEQ ID NO: 66933 - DNA, 201 bp, Homo sapiens
aagtcctagttcagaatccggagcagtaagtggagaagagctctccacgagtgttcagtcttagaactattagagggggatgtgatggatgggacaaaagrcagcagtagccatttgtattgactctgacttcacatgagtatttcttcccagctcctggcctcacatgggtggtcacagggagaaacaagtactgtagca

SEQ ID NO: 66934 - DNA, 201 bp, Homo sapiens; identical to SEQ ID NO: 66900

SEQ ID NO: 66935 - DNA, 201 bp, Homo sapiens; identical to SEQ ID NO: 66932

SEQ ID NO: 66936 - DNA, 201 bp, Homo sapiens; identical to SEQ ID NO: 66929

SEQ ID NO: 66937 - DNA, 201 bp, Homo sapiens; identical to SEQ ID NO: 66931

SEQ ID NO: 66938 - DNA, 201 bp, Homo sapiens; identical to SEQ ID NO: 66902

SEQ ID NO: 66939 - DNA, 201 bp, Homo sapiens
tttgctcagaaccagctccacccaaatcactcttcgcagtgaacaaaacccagacttcagtgactttgctgtgggtggaagagggagtagctgatttcttygaagttttctgtcaacaagttggctccagtcagaaaaccaaacttcaggaaccagttgctgtttcttcccatgtcgtgaccatctccagccttcttcctg

SEQ ID NO: 66940 - DNA, 201 bp, Homo sapiens
acctacctatatttgaattgggggatgcttcacctgcttattagtgaaagaagaaagaatacacttagtaaattaaattttttttaaaactttgtctttgmtcagaaccagctccacccaaatcactcttcgcagtgaacaaaacccagacttcagtgactttgctgtgggtggaagagggagtagctgatttctttgaag

SEQ ID NO: 66941 - DNA, 201 bp, Homo sapiens; identical to SEQ ID NO: 66905

SEQ ID NO: 66942 - DNA, 201 bp, Homo sapiens; identical to SEQ ID NO: 66906

SEQ ID NO: 66943 - DNA, 201 bp, Homo sapiens; identical to SEQ ID NO: 66933

SEQ ID NO: 66944 - DNA, 201 bp, Homo sapiens; identical to SEQ ID NO: 66900

SEQ ID NO: 66945 - DNA, 201 bp, Homo sapiens; identical to SEQ ID NO: 66901

SEQ ID NO: 66946 - DNA, 201 bp, Homo sapiens; identical to SEQ ID NO: 66902

SEQ ID NO: 66947 - DNA, 201 bp, Homo sapiens; identical to SEQ ID NO: 66903

SEQ ID NO: 66948 - DNA, 201 bp, Homo sapiens; identical to SEQ ID NO: 66904

SEQ ID NO: 66949 - DNA, 201 bp, Homo sapiens; identical to SEQ ID NO: 66905

SEQ ID NO: 66950 - DNA, 201 bp, Homo sapiens; identical to SEQ ID NO: 66906

SEQ ID NO: 66951 - DNA, 201 bp, Homo sapiens; identical to SEQ ID NO: 66900

SEQ ID NO: 66952 - DNA, 201 bp, Homo sapiens; identical to SEQ ID NO: 66913

SEQ ID NO: 66953 - DNA, 201 bp, Homo sapiens; identical to SEQ ID NO: 66904

SEQ ID NO: 66954 - DNA, 201 bp, Homo sapiens; identical to SEQ ID NO: 66902

SEQ ID NO: 66955 - DNA, 201 bp, Homo sapiens; identical to SEQ ID NO: 66901

SEQ ID NO: 66956 - DNA, 201 bp, Homo sapiens; identical to SEQ ID NO: 66903

SEQ ID NO: 66957 - DNA, 201 bp, Homo sapiens; identical to SEQ ID NO: 66905

SEQ ID NO: 66958 - DNA, 201 bp, Homo sapiens; identical to SEQ ID NO: 66906

SEQ ID NO: 66959 - DNA, 201 bp, Homo sapiens
tagagctttgagtttttttgttggatatggagttactctttccatggcttacaggttgctgaaaagtaaattgtacctgtaaagaaaatcatacaactcarcatccagttggctttttaagaattctgtacttccaatttataatgaatactttcttagattttaggtaggaggggagcagaggaattatgaactggggta

SEQ ID NO: 66960 - DNA, 110 bp, Homo sapiens
aactggagargggcggtgcctgcgtccggcccgcgcggccacagtccctgcattgcgcgcgacccggcggcgggacaggcttgctgcttcctcctcctcggcctcaccat

SEQ ID NO: 66961 - DNA, 201 bp, Homo sapiens
tttccatggcttacaggttgctgaaaagtaaattgtacctgtaaagaaaatcatacaactcagcatccagttggctttttaagaattctgtacttccaatktataatgaatactttcttagattttaggtaggaggggagcagaggaattatgaactggggtaaacccattttgaatattagcattgccaatatcctgtat

SEQ ID NO: 66962 - DNA, 201 bp, Homo sapiens
tgaacggcagagccagaatggggctacaaatgaagtgaaaagtatgctttaccgtgtgcaacaattgtgaaagttaatacatacacatatggaacaattamctaaaaacttaagagcccacctgaatgaccttgaaaatattattccatttcttggaattggcctcctgtattccttgagtggtcccgacccctctacagc

SEQ ID NO: 66963 - DNA, 201 bp, Homo sapiens; identical to SEQ ID NO: 66959

SEQ ID NO: 66964 - DNA, 123 bp, Homo sapiens
atgttatgatttgtaacattcacacaacacctcacttttgaatctataaaagaattgcacgtatgagaaacctatatttcaatactgctgaaacagacatkaaataaagaatttaaagaatga

SEQ ID NO: 66965 - DNA, 201 bp, Homo sapiens; identical to SEQ ID NO: 66961

SEQ ID NO: 66966 - DNA, 201 bp, Homo sapiens; identical to SEQ ID NO: 66959

SEQ ID NO: 66967 - DNA, 123 bp, Homo sapiens; identical to SEQ ID NO: 66964

SEQ ID NO: 66968 - DNA, 110 bp, Homo sapiens; identical to SEQ ID NO: 66960

SEQ ID NO: 66969 - DNA, 201 bp, Homo sapiens; identical to SEQ ID NO: 66961

SEQ ID NO: 66970 - DNA, 201 bp, Homo sapiens; identical to SEQ ID NO: 66959

SEQ ID NO: 66971 - DNA, 123 bp, Homo sapiens; identical to SEQ ID NO: 66964

SEQ ID NO: 66972 - DNA, 201 bp, Homo sapiens; identical to SEQ ID NO: 66961

SEQ ID NO: 66973 - DNA, 110 bp, Homo sapiens; identical to SEQ ID NO: 66960

SEQ ID NO: 66974 - DNA, 201 bp, Homo sapiens; identical to SEQ ID NO: 66959

SEQ ID NO: 66975 - DNA, 123 bp, Homo sapiens; identical to SEQ ID NO: 66964

SEQ ID NO: 66976 - DNA, 201 bp, Homo sapiens; identical to SEQ ID NO: 66961

SEQ ID NO: 66977 - DNA, 201 bp, Homo sapiens
ttgaagaaaaaatttatcttttcaacatctaatgagttaatggattcaagcaaagattatccacggctgttaacaacacaaaaagacaatcggaaattagytattactgcgggaagtacccaataccatctatgaaactgtgtggacaaaaacactgacaaaaatctccacgaatctctaattttgaatacaaatttaaag

SEQ ID NO: 66978 - DNA, 201 bp, Homo sapiens
gtgttccactgtacccagtacatccggcatggctcagatcccctctacaccccagaaccagacacatgccatgaactcttgggacatgttccactacttgyggatcctaagtttgctcagttttcacaagaaataggtctggcgtctctgggagcatcagatgaagatgttcagaaactagccacgtgctatttcttcaca

SEQ ID NO: 66979 - DNA, 201 bp, Homo sapiens
cgtctctgggagcatcagatgaagatgttcagaaactagccacgtgctatttcttcacaatcgagtttggcctttgcaagcaagaagggcaactgcgggcwtatggagcaggactcctttcctccattggagaattaaagcacgccctttctgacaaggcatgtgtgaaagcctttgacccaaagacaacttgcttacagg

SEQ ID NO: 66980 - DNA, 101 bp, Homo sapiens
staaataaacctaactctggcaaaaatgacgacaaaggcaacaagggaagcagcaaacgtgaagctgctaccgaaagtggcaagacagcagttgttttctc

SEQ ID NO: 66981 - DNA, 201 bp, Homo sapiens
gagtgttccactgtacccagtacatccggcatggctcagatcccctctacaccccagaaccagacacatgccatgaactcttgggacatgttccactactwgcggatcctaagtttgctcagttttcacaagaaataggtctggcgtctctgggagcatcagatgaagatgttcagaaactagccacgtgctatttcttca

SEQ ID NO: 66982 - DNA, 201 bp, Homo sapiens
ctggatacctgagcccacgagactttctggcaggactggcctacagagtgttccactgtacccagtacatccggcatggctcagatcccctctacaccccrgaaccagacacatgccatgaactcttgggacatgttccactacttgcggatcctaagtttgctcagttttcacaagaaataggtctggcgtctctgggag

SEQ ID NO: 66983 - DNA, 201 bp, Homo sapiens
gaggaagccaggacacggaagtgagagacactaaagaaggtgtgggccagacaaggccttggagcccacacatgggatcaagtcctgcaagcagaggtggygatttgttaaagggccaaaagtatccaaggttagggttggagcaggggtgctgggacctggggcactgtgggactgggacacttttatgttaatgctctg

SEQ ID NO: 66984 - DNA, 201 bp, Homo sapiens
cccagtgggactgccccctgggcctgatcccgcaccctcaccgtcacttccagcacctcacacccatcaaggcagcctggcatcctcgctacaacctcatygttgtgggccgatacccagatcctaatttcaaaagttgtaccccttatgaattgaggacgatcgacgtgttcgatggaaactcagggaagatgatgtgtc

SEQ ID NO: 66985 - DNA, 201 bp, Homo sapiens
atgcacaaaaagaaagtgacgcatgtggccctgaacccatgctgtgattggttcctggccacagcctccgtagatcaaacagtgaaaatttgggacctgcrccaggttagagggaaagccagcttcctctactcgctgccgcacaggcatcctgtcaacgcagcttgtttcagtcccgatggagcccggctcctgaccacg

SEQ ID NO: 66986 - DNA, 201 bp, Homo sapiens
cagcttcctctactcgctgccgcacaggcatcctgtcaacgcagcttgtttcagtcccgatggagcccggctcctgaccacggaccagaagagcgagatcygagtttactctgcttcccagtgggactgccccctgggcctgatcccgcaccctcaccgtcacttccagcacctcacacccatcaaggcagcctggcatcc

SEQ ID NO: 66987 - DNA, 201 bp, Homo sapiens
cgcttgtagtcccatctacttaggaggctgaggtgggaggatcgcttgagcccaggaggtggaggctgcactgagctatgatcgccccactgccctccagrgtgggcgacagagccagaccctgttgctaaaaaaaaaaaaaaaatccataaagccggggaccatctttgctccagggaggtcagctgacccgggctggca

SEQ ID NO: 66988 - DNA, 201 bp, Homo sapiens
cctttttgcacactctggattcttaccggatattacaaaaggctgccccctttgacaggagggctacatccttggcgtggcacccaactcaccccagcacygtggctgtgggttccaaagggggagatatcatgctctggaattttggcatcaaggacaaacccaccttcatcaaagggattggagctggagggagcatca

SEQ ID NO: 66989 - DNA, 201 bp, Homo sapiens; identical to SEQ ID NO: 66983

SEQ ID NO: 66990 - DNA, 201 bp, Homo sapiens
tgggttccaaagggggagatatcatgctctggaattttggcatcaaggacaaacccaccttcatcaaaggggcagcctggcatcctcgctacaacctcatygttgtgggccgatacccagatcctaatttcaaaagttgtaccccttatgaattgaggacgatcgacgtgttcgatggaaactcagggaagatgatgtgtc

SEQ ID NO: 66991 - DNA, 201 bp, Homo sapiens; identical to SEQ ID NO: 66987

SEQ ID NO: 66992 - DNA, 201 bp, Homo sapiens
cctttttgcacactctggattcttaccggatattacaaaaggctgccccctttgacaggagggctacatccttggcgtggcacccaactcaccccagcacygtggctgtgggttccaaagggggagatatcatgctctggaattttggcatcaaggacaaacccaccttcatcaaaggggcagcctggcatcctcgctaca

SEQ ID NO: 66993 - DNA, 201 bp, Homo sapiens; identical to SEQ ID NO: 66983

SEQ ID NO: 66994 - DNA, 201 bp, Homo sapiens; identical to SEQ ID NO: 66987

SEQ ID NO: 66995 - DNA, 201 bp, Homo sapiens
cagcctccgtagatcaaacagtgaaaatttgggacctgcgccagcttgtttcagtcccgatggagcccggctcctgaccacggaccagaagagcgagatcygagtttactctgcttcccagtgggactgccccctgggcctgatcccgcaccctcaccgtcacttccagcacctcacacccatcaagcctggcatcctcgc

SEQ ID NO: 66996 - DNA, 201 bp, Homo sapiens
gcttcccagtgggactgccccctgggcctgatcccgcaccctcaccgtcacttccagcacctcacacccatcaagcctggcatcctcgctacaacctcatygttgtgggccgatacccagatcctaatttcaaaagttgtaccccttatgaattgaggacgatcgacgtgttcgatggaaactcagggaagatgatgtgtc

SEQ ID NO: 66997 - DNA, 201 bp, Homo sapiens; identical to SEQ ID NO: 66988

SEQ ID NO: 66998 - DNA, 201 bp, Homo sapiens
gggaagagttctgcattgtactttatccttgtgtgtttctttggctggggtctcaggaaccctgcacgactgtatttactttcacttcagacttactgttygtgggagtgttttggggaaggggccaaatcctcactcatttttttatttctggtgctcgttgagaccacacagacatggaaaggccgcaggaggtgatga

SEQ ID NO: 66999 - DNA, 201 bp, Homo sapiens
gccaaatcctcactcatttttttatttctggtgctcgttgagaccacacagacatggaaaggccgcaggaggtgatgagacagagattaaccgtgccgaakgaaacaaggcttcctttcggggaattcagcagaaaaacctttcgtgagattggagaggaaaatatgtctgttctgcttggcaggtcctagcagaagatgt

SEQ ID NO: 67000 - DNA, 201 bp, Homo sapiens
atgcacaaaaagaaagtgacgcatgtggccctgaacccatgctgtgattggttcctggccacagcctccgtagatcaaacagtgaaaatttgggacctgcrccagcttgtttcagtcccgatggagcccggctcctgaccacggaccagaagagcgagatccgagtttactctgcttcccagtgggactgccccctgggcc

SEQ ID NO: 67001 - DNA, 201 bp, Homo sapiens
tttttatttctggtgctcgttgagaccacacagacatggaaaggccgcaggaggtgatgagacagagattaaccgtgccgaatgaaacaaggcttcctttyggggaattcagcagaaaaacctttcgtgagattggagaggaaaatatgtctgttctgcttggcaggtcctagcagaagatgtgactcagactgcctctgg

SEQ ID NO: 67002 - DNA, 201 bp, Homo sapiens
agacctccgagattgtattacgccccaggaacaagaggagcaggagtcccctggagctggagcccgaggccaagaagctctgtgcgaagggctccggtackgcctgtgcctgctgcttgaatatttccgccttttagggtgctcgcgcaggaggctgcagcgggggatgggtgctccgaggctcccgaggcccgcgcaggt

SEQ ID NO: 67003 - DNA, 201 bp, Homo sapiens
gtgaagcgggtggtggcagagccggtggagttggcccaagagttccgcaaatttgacctgaacagcccctgggaggctttcccagtctatcgccaaccccmggagagtctcaagcttgaagccggagacaagaagcctgatgccaagtagctccagggaacgcatgtggatcctagacagcgccttatctatgattgagtg

SEQ ID NO: 67004 - DNA, 201 bp, Homo sapiens
tgaagcgggtggtggcagagccggtggagttggcccaagagttccgcaaatttgacctgaacagcccctgggaggctttcccagtctatcgccaacccccrgagagtctcaagcttgaagccggagacaagaagcctgatgccaagtagctccagggaacgcatgtggatcctagacagcgccttatctatgattgagtgt

SEQ ID NO: 67005 - DNA, 201 bp, Homo sapiens
tatgtggctgaaatcttgcccaagtatgtccaacaagttcaggtaatacttactaatgttatttgggtctgggtcaagaaagaaccatgttcgcagggcaygtgggagtgggcagacttgtttcaaagaaactacagattcctccatcccaagcttggacttttctctcagcattaaaccaggtgactccagctgaagtta

SEQ ID NO: 67006 - DNA, 201 bp, Homo sapiens
gtagctccggccccgccgttccgacccccgccgccgtcgccgccatgacggggctagcactgctctactccggggtcttcgtggccttctgggcctgcgcsctggccgtgggagtctgctacaccatttttgatttgggcttccgctttgatgtggcatggttcctgacggagacttcgcccttcatgtggtccaacctgg

SEQ ID NO: 67007 - DNA, 201 bp, Homo sapiens
tttcagaggcttggtgttcagggccctccctgcactcccctcttgctgcgtgttgatttggaggcactgcagtccaggccgagtcctcagtgcggggagcrggctgctgctgctgactctgtgcagctgcgcacctgtgtcccccacctccaccctcaacccatcttcctagtgtttgtgaaataaacttggtatttgtct

SEQ ID NO: 67008 - DNA, 201 bp, Homo sapiens
gccattggcctctttggggtcatcgtcgcaattcttcagacctccagagtgaagatgggtgactagatgatatgtgtgggtggggccgtgcctcacttttwtttattgctggttttcctgggacagctggagctgtgtcccttagcctttcagaggcttggtgttcagggccctccctgcactcccctcttgctgcgtgtt

SEQ ID NO: 67009 - DNA, 201 bp, Homo sapiens
gcagcgccattggcctctttggggtcatcgtcgcaattcttcagacctccagagtgaagatgggtgactagatgatatgtgtgggtggggccgtgcctcamttttatttattgctggttttcctgggacagctggagctgtgtcccttagcctttcagaggcttggtgttcagggccctccctgcactcccctcttgctgc

SEQ ID NO: 67010 - DNA, 201 bp, Homo sapiens
ggagatctttggcagcgccattggcctctttggggtcatcgtcgcaattcttcagacctccagagtgaagatgggtgactagatgatatgtgtgggtgggrccgtgcctcacttttatttattgctggttttcctgggacagctggagctgtgtcccttagcctttcagaggcttggtgttcagggccctccctgcactcc

SEQ ID NO: 67011 - DNA, 201 bp, Homo sapiens
gtagctccggccccgccgttccgacccccgccgccgtcgccgccatgacggggctagcactgctctactccggggtcttcgtggccttctgggcctgcgcsctggccgtgggttcctgacggagacttcgcccttcatgtggtccaacctgggcattggcctagctatctccctgtctgtggttggggcagcctggggcat

SEQ ID NO: 67012 - DNA, 201 bp, Homo sapiens; identical to SEQ ID NO: 67007

SEQ ID NO: 67013 - DNA, 201 bp, Homo sapiens; identical to SEQ ID NO: 67008

SEQ ID NO: 67014 - DNA, 201 bp, Homo sapiens; identical to SEQ ID NO: 67009

SEQ ID NO: 67015 - DNA, 201 bp, Homo sapiens; identical to SEQ ID NO: 67010

SEQ ID NO: 67016 - DNA, 201 bp, Homo sapiens
ctctagctccgggctccctgaggtccccagtgccctgcccggtcccacggctcccacgctgccaccctgtcctgactcgccacctggtcttgcgggtgcasagggagaacccaggcgtgctcatgggcggccgatacacaccgcccgactgcaccccagcccagacggtggcggtcatcatcccctttagacaccgggaac

SEQ ID NO: 67017 - DNA, 201 bp, Homo sapiens
gagcgcgtctgcaaggctgtgctccttctctgcctgctgcacttcctcgtggccgtcatcctctactttgacgtctacgcccagcacctggccttcttcakccgcttcagtgcccgaggccctgcccatgccctccacccagctgctagcagcagcagcagcagcagcaactgctcccggcccaacgccaccgcctctagc

SEQ ID NO: 67018 - DNA, 201 bp, Homo sapiens
cccatgccctccacccagctgctagcagcagcagcagcagcagcaactgctcccggcccaacgccaccgcctctagctccgggctccctgaggtccccagkgccctgcccggtcccacggctcccacgctgccaccctgtcctgactcgccacctggtcttgcgggtgcagagggagaacccaggcgtgctcatgggcggc

SEQ ID NO: 67019 - DNA, 201 bp, Homo sapiens
ggtcccacggctcccacgctgccaccctgtcctgactcgccacctggtcttgcgggtgcagagggagaacccaggcgtgctcatgggcggccgatacacaycgcccgactgcaccccagcccagacggtggcggtcatcatcccctttagacaccgggaacaccacctgcgctactggctccactatctacaccccatctt

SEQ ID NO: 67020 - DNA, 201 bp, Homo sapiens
gcattgggtcagtgcggtaccaggtcttggaggtgtctcggcaaccactcttcaccaatatcacagtggacattgggcggcctccgtcgtggccccctcgrggctgacactaatggacagaggctctcggtgccgaagattgcctgccagaggactgaccacagcctggctggcagctgctctgtggaggacctccaggac

SEQ ID NO: 67021 - DNA, 201 bp, Homo sapiens
ttcagccgcttcagtgcccgaggccctgcccatgccctccacccagctgctagcagcagcagcagcagcagcaactgctcccggcccaacgccaccgcctytagctccgggctccctgaggtccccagtgccctgcccggtcccacggctcccacgctgccaccctgtcctgactcgccacctggtcttgcgggtgcagag

SEQ ID NO: 67022 - DNA, 201 bp, Homo sapiens
ccgctaccgcatgatcaagcacgaccgcgacaagcataacgaacctaaccctcagaggtttaccaagattcaaaacacgaagctgaccatgaagcgggacsgcattgggtcagtgcggtaccaggtcttggaggtgtctcggcaaccactcttcaccaatatcacagtggacattgggcggcctccgtcgtggccccctcg

SEQ ID NO: 67023 - DNA, 201 bp, Homo sapiens
tttcccccccttgagtcccctagggcctggaagggtgggaggtatgtctagggggcagtgtctcttccagggggaattctcagctcttgggaacccccttrctcccaggggaggggaaacctttttcattcaacattgtagggggcaagctttggtgcgccccctgctgaggagcagccccaggaggggaccagaggggat

SEQ ID NO: 67024 - DNA, 201 bp, Homo sapiens
caccgcccgactgcaccccagcccagacggtggcggtcatcatcccctttagacaccgggaacaccacctgcgctactggctccactatctacaccccatyttgaggcggcagcggctgcgctacggcgtctatgtcatcaaccagcatggtgaggacaccttcaaccgggccaagctgcttaacgtgggcttcctagagg

SEQ ID NO: 67025 - DNA, 201 bp, Homo sapiens
ggaggggaccagaggggatgctgtgtcgctgcctgggatcttggggttggcctttgcatgggaggcaggtggggcttggatcagtaagtctggttcccgcytccctgtctgagagaggaggcaggagccccagggccggcttgtgtttgtacattgcacagaaacttgtgtgggtgctttagtaaaaaacgtgaatggagc

SEQ ID NO: 67026 - DNA, 201 bp, Homo sapiens
gcttccccaatgagtactggggctggggtggcgaggatgatgacatcttcaaccggatctccctgactgggatgaagatctcacgcccagacatccgaatyggccgctaccgcatgatcaagcacgaccgcgacaagcataacgaacctaaccctcagaggtttaccaagattcaaaacacgaagctgaccatgaagcggg

SEQ ID NO: 67027 - DNA, 201 bp, Homo sapiens; identical to SEQ ID NO: 67017

SEQ ID NO: 67028 - DNA, 201 bp, Homo sapiens
ccacggctcccacgctgccaccctgtcctgactcgccacctggtcttgtgggcagactgctgatcgagttcacctcacccatgcccctggagcgggtgcasagggagaacccaggcgtgctcatgggcggccgatacacaccgcccgactgcaccccagcccagacggtggcggtcatcatcccctttagacaccgggaac

SEQ ID NO: 67029 - DNA, 201 bp, Homo sapiens
cccatgccctccacccagctgctagcagcagcagcagcagcagcaactgctcccggcccaacgccaccgcctctagctccgggctccctgaggtccccagkgccctgcccggtcccacggctcccacgctgccaccctgtcctgactcgccacctggtcttgtgggcagactgctgatcgagttcacctcacccatgcccc

SEQ ID NO: 67030 - DNA, 201 bp, Homo sapiens
tggtcttgtgggcagactgctgatcgagttcacctcacccatgcccctggagcgggtgcagagggagaacccaggcgtgctcatgggcggccgatacacaycgcccgactgcaccccagcccagacggtggcggtcatcatcccctttagacaccgggaacaccacctgcgctactggctccactatctacaccccatctt

SEQ ID NO: 67031 - DNA, 201 bp, Homo sapiens; identical to SEQ ID NO: 67020

SEQ ID NO: 67032 - DNA, 201 bp, Homo sapiens
ttcagccgcttcagtgcccgaggccctgcccatgccctccacccagctgctagcagcagcagcagcagcagcaactgctcccggcccaacgccaccgcctytagctccgggctccctgaggtccccagtgccctgcccggtcccacggctcccacgctgccaccctgtcctgactcgccacctggtcttgtgggcagactg

SEQ ID NO: 67033 - DNA, 201 bp, Homo sapiens; identical to SEQ ID NO: 67022

SEQ ID NO: 67034 - DNA, 201 bp, Homo sapiens; identical to SEQ ID NO: 67023

SEQ ID NO: 67035 - DNA, 201 bp, Homo sapiens; identical to SEQ ID NO: 67024

SEQ ID NO: 67036 - DNA, 201 bp, Homo sapiens; identical to SEQ ID NO: 67025

SEQ ID NO: 67037 - DNA, 201 bp, Homo sapiens; identical to SEQ ID NO: 67026

SEQ ID NO: 67038 - DNA, 201 bp, Homo sapiens; identical to SEQ ID NO: 67017

SEQ ID NO: 67039 - DNA, 201 bp, Homo sapiens; identical to SEQ ID NO: 67028

SEQ ID NO: 67040 - DNA, 201 bp, Homo sapiens; identical to SEQ ID NO: 67029

SEQ ID NO: 67041 - DNA, 201 bp, Homo sapiens; identical to SEQ ID NO: 67030

SEQ ID NO: 67042 - DNA, 201 bp, Homo sapiens; identical to SEQ ID NO: 67020

SEQ ID NO: 67043 - DNA, 201 bp, Homo sapiens; identical to SEQ ID NO: 67032

SEQ ID NO: 67044 - DNA, 201 bp, Homo sapiens; identical to SEQ ID NO: 67022

SEQ ID NO: 67045 - DNA, 201 bp, Homo sapiens; identical to SEQ ID NO: 67024

SEQ ID NO: 67046 - DNA, 198 bp, Homo sapiens
agaggggaccagaggggatgctgtgtcgctgcctgggatcttggggttggcctttgcatgggaggcaggtggggcttggatcagtaagtctggttcccgcytccctgtctgagagaggaggcaggagccccagggccggcttgtgtttgtacattgcacagaaacttgtgtgggtgctttagtaaaaaacgtgaatgg

SEQ ID NO: 67047 - DNA, 201 bp, Homo sapiens; identical to SEQ ID NO: 67026

SEQ ID NO: 67048 - DNA, 201 bp, Homo sapiens; identical to SEQ ID NO: 67017

SEQ ID NO: 67049 - DNA, 201 bp, Homo sapiens; identical to SEQ ID NO: 67028

SEQ ID NO: 67050 - DNA, 201 bp, Homo sapiens; identical to SEQ ID NO: 67029

SEQ ID NO: 67051 - DNA, 201 bp, Homo sapiens; identical to SEQ ID NO: 67030

SEQ ID NO: 67052 - DNA, 201 bp, Homo sapiens; identical to SEQ ID NO: 67020

SEQ ID NO: 67053 - DNA, 201 bp, Homo sapiens; identical to SEQ ID NO: 67032

SEQ ID NO: 67054 - DNA, 201 bp, Homo sapiens; identical to SEQ ID NO: 67022

SEQ ID NO: 67055 - DNA, 201 bp, Homo sapiens; identical to SEQ ID NO: 67023

SEQ ID NO: 67056 - DNA, 201 bp, Homo sapiens; identical to SEQ ID NO: 67024

SEQ ID NO: 67057 - DNA, 201 bp, Homo sapiens; identical to SEQ ID NO: 67025

SEQ ID NO: 67058 - DNA, 201 bp, Homo sapiens; identical to SEQ ID NO: 67026

SEQ ID NO: 67059 - DNA, 201 bp, Homo sapiens; identical to SEQ ID NO: 67017

SEQ ID NO: 67060 - DNA, 201 bp, Homo sapiens; identical to SEQ ID NO: 67028

SEQ ID NO: 67061 - DNA, 201 bp, Homo sapiens; identical to SEQ ID NO: 67029

SEQ ID NO: 67062 - DNA, 201 bp, Homo sapiens; identical to SEQ ID NO: 67030

SEQ ID NO: 67063 - DNA, 201 bp, Homo sapiens; identical to SEQ ID NO: 67020

SEQ ID NO: 67064 - DNA, 201 bp, Homo sapiens; identical to SEQ ID NO: 67032

SEQ ID NO: 67065 - DNA, 201 bp, Homo sapiens; identical to SEQ ID NO: 67022

SEQ ID NO: 67066 - DNA, 201 bp, Homo sapiens; identical to SEQ ID NO: 67023

SEQ ID NO: 67067 - DNA, 201 bp, Homo sapiens; identical to SEQ ID NO: 67024

SEQ ID NO: 67068 - DNA, 201 bp, Homo sapiens; identical to SEQ ID NO: 67025

SEQ ID NO: 67069 - DNA, 201 bp, Homo sapiens; identical to SEQ ID NO: 67026

SEQ ID NO: 67070 - DNA, 201 bp, Homo sapiens; identical to SEQ ID NO: 67016

SEQ ID NO: 67071 - DNA, 201 bp, Homo sapiens; identical to SEQ ID NO: 67017

SEQ ID NO: 67072 - DNA, 201 bp, Homo sapiens; identical to SEQ ID NO: 67018

SEQ ID NO: 67073 - DNA, 201 bp, Homo sapiens; identical to SEQ ID NO: 67019

SEQ ID NO: 67074 - DNA, 201 bp, Homo sapiens; identical to SEQ ID NO: 67020

SEQ ID NO: 67075 - DNA, 201 bp, Homo sapiens; identical to SEQ ID NO: 67021

SEQ ID NO: 67076 - DNA, 201 bp, Homo sapiens; identical to SEQ ID NO: 67022

SEQ ID NO: 67077 - DNA, 201 bp, Homo sapiens; identical to SEQ ID NO: 67024

SEQ ID NO: 67078 - DNA, 198 bp, Homo sapiens; identical to SEQ ID NO: 67046

SEQ ID NO: 67079 - DNA, 201 bp, Homo sapiens; identical to SEQ ID NO: 67026

SEQ ID NO: 67080 - DNA, 201 bp, Homo sapiens
acgactatgacattgtggtgagactgaattcagcaccagtgaaaggctttgagaaggacgtgggcagcaaaacgacactgcgcatcacctaccccgagggygccatgcagcggcctgagcagtacgagcgcgattctctctttgtcctcgccggcttcaagtggcaggactttaagtggttgaaatacatcgtctacaagg

SEQ ID NO: 67081 - DNA, 201 bp, Homo sapiens
tccagctcatgacactgtttggcctttcttggggagaaggcggggtattcccactcaccagccctagctgtcccatggggaaaccctggagccatcccttyggagccaacaagaccgccccagggctatagcagaaagaactttaaagctcaggagggtgacgcccagctccgcctgctgggaagagctcccctccacagc

SEQ ID NO: 67082 - DNA, 201 bp, Homo sapiens
ggtgacgcccagctccgcctgctgggaagagctcccctccacagctgcagctgatccataggactaccgcaggcccggactcaccaacttgccacatgttytaggtttcagcaacaagactgccaggtggttgggttctgcctttagcctggaccaaagggaagtgaggcccaaggagcttacccaagctgtggcagccgt

SEQ ID NO: 67083 - DNA, 141 bp, Homo sapiens
tctaggtttcagcaacaagactgccaggtggttgggttctgcctttagcctggaccaaagggaagtgaggcccaaggagcttacccaagctgtggcagccrtcccaggccacccccatggaagcaataaagctcttccctg

SEQ ID NO: 67084 - DNA, 201 bp, Homo sapiens
gcgcccatgcagcccagcgcgttgtgggctcccgccggggtcccccgcggctgtcgccgccgcctacgccgctgcctccgccttcctgccccgcgtcgggycgggcgccacctcccccctgcctccctctccgctgtggtcatttaggaaatcgtaaatcatgtgaagatgggactcttggtatttgtgcgcaatctgctg

SEQ ID NO: 67085 - DNA, 201 bp, Homo sapiens
ccagagctgtgcctgctcagcacccagcatgcaggtggtgggacactgggcagcaaggctgctgccggaatcacttctccaatcagtgtttggtgtattaycattttgtgaatttgggtaggggggagggtagggataatttatttttaaataaggttggagatgtcaagttgggttcacttgccatgcaggaagaggccc

SEQ ID NO: 67086 - DNA, 201 bp, Homo sapiens
caaggccttggtggagcagccagagctgtgcctgctcagcacccagcatgcaggtggtgggacactgggcagcaaggctgctgccggaatcacttctccartcagtgtttggtgtattatcattttgtgaatttgggtaggggggagggtagggataatttatttttaaataaggttggagatgtcaagttgggttcactt

SEQ ID NO: 67087 - DNA, 201 bp, Homo sapiens
agaccgccccagggctatagcagaaagaactttaaagctcaggagggtgacgcccagctccgcctgctgggaagagctcccctccacagctgcagctgatscataggactaccgcaggcccggactcaccaacttgccacatgttctaggtttcagcaacaagactgccaggtggttgggttctgcctttagcctggacca

SEQ ID NO: 67088 - DNA, 201 bp, Homo sapiens
caggatctcaagccagccccctccagctcatgacactgtttggcctttcttggggagaaggcggggtattcccactcaccagccctagctgtcccatgggraaaccctggagccatcccttcggagccaacaagaccgccccagggctatagcagaaagaactttaaagctcaggagggtgacgcccagctccgcctgctg

SEQ ID NO: 67089 - DNA, 201 bp, Homo sapiens
ccctccacagctgcagctgatccataggactaccgcaggcccggactcaccaacttgccacatgttctaggtttcagcaacaagactgccaggtggttggsttctgcctttagcctggaccaaagggaagtgaggcccaaggagcttacccaagctgtggcagccgtcccaggccacccccatggaagcaataaagctctt

SEQ ID NO: 67090 - DNA, 201 bp, Homo sapiens; identical to SEQ ID NO: 67080

SEQ ID NO: 67091 - DNA, 201 bp, Homo sapiens; identical to SEQ ID NO: 67081

SEQ ID NO: 67092 - DNA, 201 bp, Homo sapiens; identical to SEQ ID NO: 67082

SEQ ID NO: 67093 - DNA, 141 bp, Homo sapiens; identical to SEQ ID NO: 67083

SEQ ID NO: 67094 - DNA, 201 bp, Homo sapiens; identical to SEQ ID NO: 67084

SEQ ID NO: 67095 - DNA, 201 bp, Homo sapiens
gctcctggctgtgcccagcaggcccagcatgcaggtggtgggacactgggcagcaaggctgctgccggaatcacttctccaatcagtgtttggtgtattaycattttgtgaatttgggtaggggggagggtagggataatttatttttaaataaggttggagatgtcaagttgggttcacttgccatgcaggaagaggccc

SEQ ID NO: 67096 - DNA, 201 bp, Homo sapiens
gatgccagagggccagcaggctcctggctgtgcccagcaggcccagcatgcaggtggtgggacactgggcagcaaggctgctgccggaatcacttctccartcagtgtttggtgtattatcattttgtgaatttgggtaggggggagggtagggataatttatttttaaataaggttggagatgtcaagttgggttcactt

SEQ ID NO: 67097 - DNA, 201 bp, Homo sapiens; identical to SEQ ID NO: 67087

SEQ ID NO: 67098 - DNA, 201 bp, Homo sapiens; identical to SEQ ID NO: 67088

SEQ ID NO: 67099 - DNA, 201 bp, Homo sapiens; identical to SEQ ID NO: 67089

SEQ ID NO: 67100 - DNA, 201 bp, Homo sapiens; identical to SEQ ID NO: 67080

SEQ ID NO: 67101 - DNA, 201 bp, Homo sapiens; identical to SEQ ID NO: 67081

SEQ ID NO: 67102 - DNA, 201 bp, Homo sapiens; identical to SEQ ID NO: 67082

SEQ ID NO: 67103 - DNA, 141 bp, Homo sapiens; identical to SEQ ID NO: 67083

SEQ ID NO: 67104 - DNA, 201 bp, Homo sapiens; identical to SEQ ID NO: 67084

SEQ ID NO: 67105 - DNA, 201 bp, Homo sapiens; identical to SEQ ID NO: 67095

SEQ ID NO: 67106 - DNA, 201 bp, Homo sapiens; identical to SEQ ID NO: 67096

SEQ ID NO: 67107 - DNA, 201 bp, Homo sapiens; identical to SEQ ID NO: 67087

SEQ ID NO: 67108 - DNA, 201 bp, Homo sapiens; identical to SEQ ID NO: 67088

SEQ ID NO: 67109 - DNA, 201 bp, Homo sapiens; identical to SEQ ID NO: 67089

SEQ ID NO: 67110 - DNA, 201 bp, Homo sapiens; identical to SEQ ID NO: 67080

SEQ ID NO: 67111 - DNA, 201 bp, Homo sapiens; identical to SEQ ID NO: 67081

SEQ ID NO: 67112 - DNA, 201 bp, Homo sapiens; identical to SEQ ID NO: 67082

SEQ ID NO: 67113 - DNA, 141 bp, Homo sapiens; identical to SEQ ID NO: 67083

SEQ ID NO: 67114 - DNA, 201 bp, Homo sapiens; identical to SEQ ID NO: 67095

SEQ ID NO: 67115 - DNA, 201 bp, Homo sapiens; identical to SEQ ID NO: 67096

SEQ ID NO: 67116 - DNA, 201 bp, Homo sapiens; identical to SEQ ID NO: 67087

SEQ ID NO: 67117 - DNA, 201 bp, Homo sapiens; identical to SEQ ID NO: 67088

SEQ ID NO: 67118 - DNA, 201 bp, Homo sapiens; identical to SEQ ID NO: 67089

SEQ ID NO: 67119 - DNA, 143 bp, Homo sapiens
atagcaatgccagtcaacagggcccacaaggatgctgacctgyggtcctcacatgacaagatgctggcgcagcccctcaaagacagcgatgttgaggtttacaacatcattaaggagagtaccggcagagggctggattggag

SEQ ID NO: 67120 - DNA, 201 bp, Homo sapiens
ttgctgtggccctgaagcaagctatgactctggaatttgaagtttatcagcaccatgtggtggccaactgcagagctctgtctgaggcactgacggagctsggctaccaaacagtcacaggttgttctgataaacatttgatcctcgtggatctccattcaatcaaaggcacagatggcagaagggctgagaaggtcctag

SEQ ID NO: 67121 - DNA, 201 bp, Homo sapiens
ctgcagatgagaatggggtgtatctcatggtggacatggcacatatcagcaggctggtggcagctggcgtggtgccctccccatttgaacactgccaccamcactcacaagaacctgagaggctgccaagtccgcacgatcttctacaggaaaggagggcaaagtatggatcccaagactggcaaagagattctgtacaac

SEQ ID NO: 67122 - DNA, 201 bp, Homo sapiens
ccacaaggatgctgacctgtggtcctcacatgacaagatgctggcgcagcccctcaaagacagcgatgttgaggtttacaacatcattaaggagagtaccrgcagagggctggattggagctgattacctcggagaatttcgccagctgggcagttttggaggccctaggctcttgcttaaataacaaatactctgagggg

SEQ ID NO: 67123 - DNA, 201 bp, Homo sapiens
cctgggactctgggaactcggagcctgtaacctactatggcatccagtaccgcgcagcgggcacggagggcccctttcaggaggtggatggtgtggccacyacccgctacagcattggcggcctcagccctttctcggaatatgccttccgcgtgctggcggtgaacagcatcgggcgagggccgcccagcgaggcagtgc

SEQ ID NO: 67124 - DNA, 201 bp, Homo sapiens
gcgtccccgggagtgactacatcaatgccaactacatcgatggctaccgcaagcagaatgcctacatcgccacgcagggccccctgcccgagaccatgggygatttctggagaatggtgtgggaacagcgcacggccactgtggtcatgatgacacggctggaggagaagtcccgggtaaaatgtgatcagtactggccag

SEQ ID NO: 67125 - DNA, 201 bp, Homo sapiens
agctgggccaagtgcctccaggggagagtgtgaccgccatggagctcgagttcaagttgctggccagctccaaggcccacacgtcccgcttcatcagcgcyaacctgccctgcaacaagttcaagaaccggctggtgaacatcatgccctacgaattgacccgtgtgtgtctgcagcccatccgtggtgtggagggctctg

SEQ ID NO: 67126 - DNA, 201 bp, Homo sapiens
agtttggacaggatgggcctatcacggtgcactgcagtgctggcgtgggccgcaccggggtgttcatcactctgagcatcgtcctggagcgcatgcgctaygagggcgtggtcgacatgtttcagaccgtgaagaccctgcgtacacagcgtcctgccatggtgcagacagaggaccagtatcagctgtgctaccgtgcgg

SEQ ID NO: 67127 - DNA, 201 bp, Homo sapiens
gtgactacatcaatgccaactacatcgatggctaccgcaagcagaatgcctacatcgccacgcagggccccctgcccgagaccatgggcgatttctggagratggtgtgggaacagcgcacggccactgtggtcatgatgacacggctggaggagaagtcccgggtaaaatgtgatcagtactggccagcccgtggcaccg

SEQ ID NO: 67128 - DNA, 201 bp, Homo sapiens
tgtcaggaggggtagcctccttcgtgtgccaagctacaggagaacccaagccgcgcatcacatggatgaagaaggggaagaaagtcagctcccagcgcttygaggtcattgagtttgatgatggggcagggtcagtgcttcggatccagccattgcgggtgcagcgagatgaagccatctatgagtgtacagctactaaca

SEQ ID NO: 67129 - DNA, 201 bp, Homo sapiens
aagccatcgagcaaggcggagaggagcagcggcggcggcggcggcaggcagaacgtctgaagccatatgtggctgctcaactggatgtgctcccggagacytttaccttgggggacaagaagaactaccggggcttctacaaccggcccctgtctccggacttgagctaccagtgctttgtgcttgcctccttgaaggaac

SEQ ID NO: 67130 - DNA, 201 bp, Homo sapiens
cccagaaggtgatgtgtgtgagcatgggctccaccacggtccgggtaagttgggtcccgccgcctgccgacagccgcaacggcgttatcacccagtactcygtggcctacgaggcggtggacggcgaggaccgcgggcggcatgtggtggatggcatcagccgtgagcactccagctgggacctggtgggcctggagaagt

SEQ ID NO: 67131 - DNA, 201 bp, Homo sapiens
gtggatggtgtggccaccacccgctacagcattggcggcctcagccctttctcggaatatgccttccgcgtgctggcggtgaacagcatcgggcgagggcygcccagcgaggcagtgcgggcacgcacgggagaacaggcgccctccagcccaccgcgccgcgtgcaggcacgcatgctgagcgccagcaccatgctggtg

SEQ ID NO: 67132 - DNA, 201 bp, Homo sapiens
ctcagccctttctcggaatatgccttccgcgtgctggcggtgaacagcatcgggcgagggccgcccagcgaggcagtgcgggcacgcacgggagaacaggygccctccagcccaccgcgccgcgtgcaggcacgcatgctgagcgccagcaccatgctggtgcagtgggagcctcccgaggagcccaacggcctggtgcgg

SEQ ID NO: 67133 - DNA, 201 bp, Homo sapiens
cctgtggccttattcaggtgaccctgttggacacagtggagctggccacatacactgtgcgcaccttcgcactccacaagagtggctccagtgagaagcgygagctgcgtcagtttcagttcatggcctggccagaccatggagttcctgagtacccaactcccatcctggccttcctacgacgggtcaaggcctgcaacc

SEQ ID NO: 67134 - DNA, 201 bp, Homo sapiens
cagaacgtctgaagccatatgtggctgctcaactggatgtgctcccggagacctttaccttgggggacaagaagaactaccggggcttctacaaccggccyctgtctccggacttgagctaccagtgctttgtgcttgcctccttgaaggaacccatggaccagaagcgctatgcctccagcccctactcggatgagatcg

SEQ ID NO: 67135 - DNA, 201 bp, Homo sapiens
ccgcgccgcgtgcaggcacgcatgctgagcgccagcaccatgctggtgcagtgggagcctcccgaggagcccaacggcctggtgcggggataccgcgtctrctatactccggactcccgccgccccccgaacgcctggcacaagcacaacaccgacgcggggctcctcacgaccgtgggcagcctgctgcctggcatcacc

SEQ ID NO: 67136 - DNA, 201 bp, Homo sapiens
tagaggacctgaagcctgacacactctaccgcttccagctggctgcacgctcggatatgggggtgggcgtcttcacccccaccattgaggcccgcacagcmcagtccaccccctccgcccctccccagaaggtgatgtgtgtgagcatgggctccaccacggtccgggtaagttgggtcccgccgcctgccgacagccgca

SEQ ID NO: 67137 - DNA, 201 bp, Homo sapiens
cgctgcctgcctctgcctacatagaggacggccgcttcgatctctccatgccccatgtgcaagacccctcgcttgtcaggtggttctacattgttgtggtrcccattgaccgtgtgggcgggagcatgctgacgccaaggtggagcacacccgaggaactggagctggacgagcttctagaagccatcgagcaaggcggag

SEQ ID NO: 67138 - DNA, 201 bp, Homo sapiens
gtcaggaggggtagcctccttcgtgtgccaagctacaggagaacccaagccgcgcatcacatggatgaagaaggggaagaaagtcagctcccagcgcttcraggtcattgagtttgatgatggggcagggtcagtgcttcggatccagccattgcgggtgcagcgagatgaagccatctatgagtgtacagctactaacag

SEQ ID NO: 67139 - DNA, 201 bp, Homo sapiens
ggagagcctggcaaggcattcctcatcaccatcgtgtttgcaaaggttaaaacaaaaacaaaaaaccacaaaaataaaaaacaaaaaaaacaaaaaacccragaaaaaaaaaaagagtcagcccttggcttctgcttcaaaccctcaagaggggaagcaactccgtgtgcctggggttcccgagggagctgctggctgacc

SEQ ID NO: 67140 - DNA, 201 bp, Homo sapiens
acaccgtggtgttccgagacatcaacagccaacaggagctgcagaacatcacgacagacacccgctttacccttactggcctcaagccagacaccacttaygacatcaaggtccgcgcatggaccagcaaaggctctggcccactcagccccagcatccagtcccggaccatgccggtggagcaagtgtttgccaagaact

SEQ ID NO: 67141 - DNA, 201 bp, Homo sapiens
tgctcgaagaggaacagctgccccctgggttcccttccatcgacatggggcctcagctgaaggtggtggagaaggcacgcacagccaccatgctatgtgcygcaggcggaaatccagaccctgagatttcttggttcaaggacttccttcctgtagaccctgccacgagcaacggccgcatcaagcagctgcgttcaggtg

SEQ ID NO: 67142 - DNA, 201 bp, Homo sapiens
gcgatggccctcccagccccaccatccaggtcaagacgcagcagggagtgcctgcccagcccgcggacttccaggccgaggtggagtcggacaccaggatycagctctcgtggctgctgccccctcaggagcggatcatcatgtatgaactggtgtactgggcggcagaggacgaagaccaacagcacaaggtgaccttcg

SEQ ID NO: 67143 - DNA, 201 bp, Homo sapiens
ccagctctcgtggctgctgccccctcaggagcggatcatcatgtatgaactggtgtactgggcggcagaggacgaagaccaacagcacaaggtgaccttcracccaacctcctcctacacactagaggacctgaagcctgacacactctaccgcttccagctggctgcacgctcggatatgggggtgggcgtcttcacccc

SEQ ID NO: 67144 - DNA, 197 bp, Homo sapiens
aaacctagctaggctaagtcaagatcaacattccagggttggtaatgttggatgatgaaacattcatttttaccttgtggatgctagtgctgtagagttcmctgttgtacacagtctgttttctatttgttaagaaaaactacagcatcattgcataattcttgatggtaataaatttgaataatcagatttcttac

SEQ ID NO: 67145 - DNA, 201 bp, Homo sapiens; identical to SEQ ID NO: 67123

SEQ ID NO: 67146 - DNA, 201 bp, Homo sapiens; identical to SEQ ID NO: 67124

SEQ ID NO: 67147 - DNA, 201 bp, Homo sapiens; identical to SEQ ID NO: 67125

SEQ ID NO: 67148 - DNA, 201 bp, Homo sapiens; identical to SEQ ID NO: 67126

SEQ ID NO: 67149 - DNA, 201 bp, Homo sapiens; identical to SEQ ID NO: 67127

SEQ ID NO: 67150 - DNA, 201 bp, Homo sapiens; identical to SEQ ID NO: 67128

SEQ ID NO: 67151 - DNA, 201 bp, Homo sapiens; identical to SEQ ID NO: 67129

SEQ ID NO: 67152 - DNA, 201 bp, Homo sapiens; identical to SEQ ID NO: 67130

SEQ ID NO: 67153 - DNA, 201 bp, Homo sapiens; identical to SEQ ID NO: 67131

SEQ ID NO: 67154 - DNA, 201 bp, Homo sapiens; identical to SEQ ID NO: 67132

SEQ ID NO: 67155 - DNA, 201 bp, Homo sapiens; identical to SEQ ID NO: 67133

SEQ ID NO: 67156 - DNA, 201 bp, Homo sapiens; identical to SEQ ID NO: 67134

SEQ ID NO: 67157 - DNA, 201 bp, Homo sapiens; identical to SEQ ID NO: 67135

SEQ ID NO: 67158 - DNA, 201 bp, Homo sapiens; identical to SEQ ID NO: 67136

SEQ ID NO: 67159 - DNA, 201 bp, Homo sapiens; identical to SEQ ID NO: 67137

SEQ ID NO: 67160 - DNA, 201 bp, Homo sapiens; identical to SEQ ID NO: 67138

SEQ ID NO: 67161 - DNA, 201 bp, Homo sapiens; identical to SEQ ID NO: 67139

SEQ ID NO: 67162 - DNA, 201 bp, Homo sapiens; identical to SEQ ID NO: 67140

SEQ ID NO: 67163 - DNA, 201 bp, Homo sapiens; identical to SEQ ID NO: 67141

SEQ ID NO: 67164 - DNA, 201 bp, Homo sapiens; identical to SEQ ID NO: 67142

SEQ ID NO: 67165 - DNA, 201 bp, Homo sapiens; identical to SEQ ID NO: 67143

SEQ ID NO: 67166 - DNA, 197 bp, Homo sapiens; identical to SEQ ID NO: 67144

SEQ ID NO: 67167 - DNA, 201 bp, Homo sapiens; identical to SEQ ID NO: 67123

SEQ ID NO: 67168 - DNA, 201 bp, Homo sapiens; identical to SEQ ID NO: 67124

SEQ ID NO: 67169 - DNA, 201 bp, Homo sapiens; identical to SEQ ID NO: 67125

SEQ ID NO: 67170 - DNA, 201 bp, Homo sapiens; identical to SEQ ID NO: 67126

SEQ ID NO: 67171 - DNA, 201 bp, Homo sapiens; identical to SEQ ID NO: 67127

SEQ ID NO: 67172 - DNA, 201 bp, Homo sapiens; identical to SEQ ID NO: 67128

SEQ ID NO: 67173 - DNA, 201 bp, Homo sapiens; identical to SEQ ID NO: 67129

SEQ ID NO: 67174 - DNA, 201 bp, Homo sapiens; identical to SEQ ID NO: 67130

SEQ ID NO: 67175 - DNA, 201 bp, Homo sapiens; identical to SEQ ID NO: 67131

SEQ ID NO: 67176 - DNA, 201 bp, Homo sapiens; identical to SEQ ID NO: 67132

SEQ ID NO: 67177 - DNA, 201 bp, Homo sapiens; identical to SEQ ID NO: 67133

SEQ ID NO: 67178 - DNA, 201 bp, Homo sapiens; identical to SEQ ID NO: 67134

SEQ ID NO: 67179 - DNA, 201 bp, Homo sapiens; identical to SEQ ID NO: 67135

SEQ ID NO: 67180 - DNA, 201 bp, Homo sapiens; identical to SEQ ID NO: 67136

SEQ ID NO: 67181 - DNA, 201 bp, Homo sapiens; identical to SEQ ID NO: 67137

SEQ ID NO: 67182 - DNA, 201 bp, Homo sapiens; identical to SEQ ID NO: 67138

SEQ ID NO: 67183 - DNA, 201 bp, Homo sapiens; identical to SEQ ID NO: 67139

SEQ ID NO: 67184 - DNA, 201 bp, Homo sapiens; identical to SEQ ID NO: 67140

SEQ ID NO: 67185 - DNA, 201 bp, Homo sapiens; identical to SEQ ID NO: 67141

SEQ ID NO: 67186 - DNA, 201 bp, Homo sapiens; identical to SEQ ID NO: 67142

SEQ ID NO: 67187 - DNA, 201 bp, Homo sapiens; identical to SEQ ID NO: 67143

SEQ ID NO: 67188 - DNA, 197 bp, Homo sapiens; identical to SEQ ID NO: 67144

SEQ ID NO: 67189 - DNA, 201 bp, Homo sapiens; identical to SEQ ID NO: 67123

SEQ ID NO: 67190 - DNA, 201 bp, Homo sapiens; identical to SEQ ID NO: 67124

SEQ ID NO: 67191 - DNA, 201 bp, Homo sapiens; identical to SEQ ID NO: 67125

SEQ ID NO: 67192 - DNA, 201 bp, Homo sapiens; identical to SEQ ID NO: 67126

SEQ ID NO: 67193 - DNA, 201 bp, Homo sapiens; identical to SEQ ID NO: 67127

SEQ ID NO: 67194 - DNA, 201 bp, Homo sapiens; identical to SEQ ID NO: 67128

SEQ ID NO: 67195 - DNA, 201 bp, Homo sapiens; identical to SEQ ID NO: 67129

SEQ ID NO: 67196 - DNA, 201 bp, Homo sapiens; identical to SEQ ID NO: 67130

SEQ ID NO: 67197 - DNA, 201 bp, Homo sapiens; identical to SEQ ID NO: 67131

SEQ ID NO: 67198 - DNA, 201 bp, Homo sapiens; identical to SEQ ID NO: 67132

SEQ ID NO: 67199 - DNA, 201 bp, Homo sapiens; identical to SEQ ID NO: 67133

SEQ ID NO: 67200 - DNA, 201 bp, Homo sapiens; identical to SEQ ID NO: 67134

SEQ ID NO: 67201 - DNA, 201 bp, Homo sapiens; identical to SEQ ID NO: 67135

SEQ ID NO: 67202 - DNA, 201 bp, Homo sapiens; identical to SEQ ID NO: 67136

SEQ ID NO: 67203 - DNA, 201 bp, Homo sapiens; identical to SEQ ID NO: 67137

SEQ ID NO: 67204 - DNA, 201 bp, Homo sapiens; identical to SEQ ID NO: 67138

SEQ ID NO: 67205 - DNA, 201 bp, Homo sapiens; identical to SEQ ID NO: 67139

SEQ ID NO: 67206 - DNA, 201 bp, Homo sapiens; identical to SEQ ID NO: 67140

SEQ ID NO: 67207 - DNA, 201 bp, Homo sapiens; identical to SEQ ID NO: 67141

SEQ ID NO: 67208 - DNA, 201 bp, Homo sapiens; identical to SEQ ID NO: 67142

SEQ ID NO: 67209 - DNA, 201 bp, Homo sapiens; identical to SEQ ID NO: 67143

SEQ ID NO: 67210 - DNA, 197 bp, Homo sapiens; identical to SEQ ID NO: 67144

SEQ ID NO: 67211 - DNA, 201 bp, Homo sapiens
agcccgaggggctgcggcggctgcaccgcgccggggtgcaaatagccatcatgaccttcaaagattatttttactgctggaatacttttgtagaaaaccaygaaagaactttcaaagcctgggaagggctgcatgaaaattcagttcgtctctccagacagcttcggcgcatccttttgcccctgtatgaggttgatgact

SEQ ID NO: 67212 - DNA, 201 bp, Homo sapiens
agggaggcaagaagacactctggacaccactatggacagcctcttgatgaaccggaggaagtttctttaccaattcaaaaatgtccgctgggctaagggtyggcgtgagacctacctgtgctacgtagtgaagaggcgtgacagtgctacatccttttcactggactttggttatcttcgcaataagaacggctgccacgt

SEQ ID NO: 67213 - DNA, 201 bp, Homo sapiens
cacctggttcacctcctggagcccctgctacgactgtgcccgacatgtggccgactttctgcgagggaaccccaacctcagtctgaggatcttcaccgcgygcctctacttctgtgaggaccgcaaggctgagcccgaggggctgcggcggctgcaccgcgccggggtgcaaatagccatcatgaccttcaaagattattt

SEQ ID NO: 67214 - DNA, 201 bp, Homo sapiens
tggttatcttcgcaataagaacggctgccacgtggaattgctcttcctccgctacatctcggactgggacctagaccctggccgctgctaccgcgtcaccyggttcacctcctggagcccctgctacgactgtgcccgacatgtggccgactttctgcgagggaaccccaacctcagtctgaggatcttcaccgcgcgcct

SEQ ID NO: 67215 - DNA, 201 bp, Homo sapiens
aggcaagaagacactctggacaccactatggacagcctcttgatgaaccggaggaagtttctttaccaattcaaaaatgtccgctgggctaagggtcggcrtgagacctacctgtgctacgtagtgaagaggcgtgacagtgctacatccttttcactggactttggttatcttcgcaataagaacggctgccacgtggaa

SEQ ID NO: 67216 - DNA, 201 bp, Homo sapiens
acctggttcacctcctggagcccctgctacgactgtgcccgacatgtggccgactttctgcgagggaaccccaacctcagtctgaggatcttcaccgcgcrcctctacttctgtgaggaccgcaaggctgagcccgaggggctgcggcggctgcaccgcgccggggtgcaaatagccatcatgaccttcaaagattatttt

SEQ ID NO: 67217 - DNA, 201 bp, Homo sapiens
ttgggactttgatagcaacttccaggaatgtcacacacgatgaaatatctctgctgaagacagtggataaaaaacagtccttcaagtcttctctgtttttmttcttcaactctcactttcttagagtttacagaaaaaatatttatatacgactctttaaaaagatctatgtcttgaaaatagagaaggaacacaggtctg

SEQ ID NO: 67218 - DNA, 201 bp, Homo sapiens
aagtaacacaaactcttccatcaggccatgatctataggacctcctaatgagagtatctgggtgattgtgaccccaaaccatctctccaaagcattaatakccaatcatgcgctgtatgttttaatcagcagaagcatgtttttatgtttgtacaaaagaagattgttatgggtggggatggaggtatagaccatgcatgg

SEQ ID NO: 67219 - DNA, 201 bp, Homo sapiens
aggcgtgacagtgctacatccttttcactggactttggttatcttcgcaataagaacggctgccacgtggaattgctcttcctccgctacatctcggactrggacctagaccctggccgctgctaccgcgtcacctggttcacctcctggagcccctgctacgactgtgcccgacatgtggccgactttctgcgagggaac

SEQ ID NO: 67220 - DNA, 201 bp, Homo sapiens
ggccgctgctaccgcgtcacctggttcacctcctggagcccctgctacgactgtgcccgacatgtggccgactttctgcgagggaaccccaacctcagtcygaggatcttcaccgcgcgcctctacttctgtgaggaccgcaaggctgagcccgaggggctgcggcggctgcaccgcgccggggtgcaaatagccatcatg

SEQ ID NO: 67221 - DNA, 201 bp, Homo sapiens
aataagaacggctgccacgtggaattgctcttcctccgctacatctcggactgggacctagaccctggccgctgctaccgcgtcacctggttcacctcctrgagcccctgctacgactgtgcccgacatgtggccgactttctgcgagggaaccccaacctcagtctgaggatcttcaccgcgcgcctctacttctgtgag

SEQ ID NO: 67222 - DNA, 201 bp, Homo sapiens
tctgaggatcttcaccgcgcgcctctacttctgtgaggaccgcaaggctgagcccgaggggctgcggcggctgcaccgcgccggggtgcaaatagccatcrtgaccttcaaagattatttttactgctggaatacttttgtagaaaaccacgaaagaactttcaaagcctgggaagggctgcatgaaaattcagttcgtct

SEQ ID NO: 67223 - DNA, 201 bp, Homo sapiens
acttctgtgaggaccgcaaggctgagcccgaggggctgcggcggctgcaccgcgccggggtgcaaatagccatcatgaccttcaaagattatttttactgmtggaatacttttgtagaaaaccacgaaagaactttcaaagcctgggaagggctgcatgaaaattcagttcgtctctccagacagcttcggcgcatccttt

SEQ ID NO: 67224 - DNA, 201 bp, Homo sapiens
gtggaatacactttgtttgcttcatgtgcagataaccaaaaatcattttaaaagatatcaaacttattgatgggcaatttatttttttttattgcaaaagktttttcagaaaactttttaaatgtaattaataaaccacctgaatctgtcattctagtcctataaattataatcaaggtatcttgatggttatatgtggta

SEQ ID NO: 67225 - DNA, 201 bp, Homo sapiens
aattgtactcacaagagataaatgacaactctttctgttctttctggcagctatcttaccagactgtgcctaaagaattttgtggaatacactttgtttgyttcatgtgcagataaccaaaaatcattttaaaagatatcaaacttattgatgggcaatttatttttttttattgcaaaagttttttcagaaaacttttta

SEQ ID NO: 67226 - DNA, 166 bp, Homo sapiens
cgcgtcactgtccgccgccgtgtccgcggctgcgccagacagtgtagaacctgcggcctcgatgtycttctcccgtgccctattgtgggctcggctcccggcggggcgccaggctggccaccgggcagccatctgctctgcccttcgtccccactttgggcccttt

SEQ ID NO: 67227 - DNA, 201 bp, Homo sapiens
acctgcggcctcgatgtccttctcccgtgccctattgtgggctcggctcccggcggggcgccaggctggccaccgggcagccatctgctctgcccttcgtmcccactttgggccctttcccggggttctggggcaagtttctgtccttgccaccgcctcctcctctgcctccggtggctccaaaataccaaacacgtcctt

SEQ ID NO: 67228 - DNA, 180 bp, Homo sapiens
cgcgtcactgtccgccgccgtgtccgcggctgcgccagacagtgtagaacctgcggcctcgatgtccttctcccgtgccytattgtgggctcggctcccggcggggcgccaggctggccaccgggcagccatctgctctgcccttcgtccccactttgggccctttcccggggttctggg

SEQ ID NO: 67229 - DNA, 132 bp, Homo sapiens
caaactgaacacaacaaagaaaaaacagagtctgggactcatccaaaagggacgagaagaaagaagaaggaacctgattcggactagttttctgttcctgtttttttttttttatttaattttgcaaataaa

SEQ ID NO: 67230 - DNA, 201 bp, Homo sapiens
ggaaattttgaagaggcctgtggatcctataagggcagctggtcttcatccaactgctgagcagattgaaatgtttgcctaccatctccctgatgcaacaytgtccaatctcattgatatttttgtagacttttcacaagttgatgggcagtattttgtctgcaatatggatgattttaaattttctgcagagttgatcca

SEQ ID NO: 67231 - DNA, 201 bp, Homo sapiens
ggcgccaggctggccaccgggcagccatctgctctgcccttcgtccccactttgggccctttcccggggttctggggcaagtttctgtccttgccaccgcytcctcctctgcctccggtggctccaaaataccaaacacgtccttgttcgtgcccctgactgtgaaacctcagggccccagcgccgacggcgacgtcgggg

SEQ ID NO: 67232 - DNA, 201 bp, Homo sapiens
cagaaagaactagatggtattatccaagatggtgtgcacaatatcactaaattgattaaaatgtctgagacgcataagctgttgaatttggagggctttcyatcagggagccagtcacgattgtcaggaaccttaaagagccaagctagaaggacacgcggcaccaaagctctagggagtaaagctactgagccacccagc

SEQ ID NO: 67233 - DNA, 201 bp, Homo sapiens
ccaaaataccaaacacgtccttgttcgtgcccctgactgtgaaacctcagggccccagcgccgacggcgacgtcggggccgagctaacccggcctctggayaagaatgaagtaaagaaggtcttagacaaattttacaagaggaaagaaattcagaaactgggtgctgattatggacttgatgctcgtctcttccaccaag

SEQ ID NO: 67234 - DNA, 166 bp, Homo sapiens; identical to SEQ ID NO: 67226

SEQ ID NO: 67235 - DNA, 201 bp, Homo sapiens; identical to SEQ ID NO: 67227

SEQ ID NO: 67236 - DNA, 180 bp, Homo sapiens; identical to SEQ ID NO: 67228

SEQ ID NO: 67237 - DNA, 132 bp, Homo sapiens; identical to SEQ ID NO: 67229

SEQ ID NO: 67238 - DNA, 201 bp, Homo sapiens; identical to SEQ ID NO: 67230

SEQ ID NO: 67239 - DNA, 201 bp, Homo sapiens; identical to SEQ ID NO: 67231

SEQ ID NO: 67240 - DNA, 201 bp, Homo sapiens; identical to SEQ ID NO: 67232

SEQ ID NO: 67241 - DNA, 201 bp, Homo sapiens; identical to SEQ ID NO: 67233

SEQ ID NO: 67242 - DNA, 201 bp, Homo sapiens
ctttccctggatctcggagggtccaagttccgagtgctgaaggtgcaagtcgctgaagaggggaagcgacacgtgcagatggagagtcagttctacccaaygcccaatgaaatcatccgcgggaacggcacagagctgtttgaatatgtagctgactgtctggcagatttcatgaagaccaaagatttaaagcataagaaa

SEQ ID NO: 67243 - DNA, 201 bp, Homo sapiens
gcactggtgaggagctctttgatcacattgtgcagtgcatcgccgacttcctggactacatgggcctcaagggagcctccctacctttgggcttcacattytcatttccctgcaggcagatgagcattgacaagggaacactcatagggtggaccaaaggtttcaaggccactgactgtgaaggggaggacgtggtggaca

SEQ ID NO: 67244 - DNA, 201 bp, Homo sapiens
ggacggcaccctctacaagatacaccctcagtacccaaaacgcctgcacaaggtggtgaggaaactggtcccaagctgtgatgtccgcttcctcctgtcasagagtggcagcaccaagggggccgccatggtgaccgcggtggcctcccgcgtgcaggcccagcggaagcagatcgacagggtgctggctttgttccagct

SEQ ID NO: 67245 - DNA, 201 bp, Homo sapiens
ggacatgaggaacatcgagatggtggaggggggtgaagggaagatgtgcatcaatacagagtggggaggatttggagacaatggctgcatagatgacatcyggacccgatacgacacggaggtggatgaggggtccttgaatcctggcaagcagagatacgagaaaatgaccagtgggatgtacttgggggagattgtgcg

SEQ ID NO: 67246 - DNA, 201 bp, Homo sapiens
gatgtgatgtgacattcatgctgtcagaagatggcagtggaaaaggggcagcactgatcactgctgtggccaagaggttacagcaggcacagaaggagaamtaggaacccctgggattggacctgatgcatcttggatactgaacagcttttcctctggcagatcagttggtcagagaccaatgggcaccctcctggctga

SEQ ID NO: 67247 - DNA, 201 bp, Homo sapiens
atgaacattggagagcaagaggaactcacgttatgaactagggggatctcatctaacttgtccttaacttgccatgttgacttcaaacctgttaagagaacaaagactttgaagtatccagccccagggtgcagagaggttgattgccagggagcactgcaggaatcattgcatgcttaaagcgagttatgtcagcaccct

SEQ ID NO: 67248 - DNA, 201 bp, Homo sapiens
tggacaaaaaagtttaaggcacgaggagttcaggacacggatgtggtgagccgtctgaccaaagccatgagaagacacaaggacatggacgtggacatccyggccctggtcaatgacaccgtggggaccatgatgacctgtgcctatgacgacccctactgcgaagttggtgtcatcatcggaactggcaccaatgcgtgt

SEQ ID NO: 67249 - DNA, 175 bp, Homo sapiens
cagcaccctgtaggattttgttccttattaagtgtgtgccatgtggtggggtgctgtctggggcatctgtttttcattttgcctgtggtttgtgttgcagstgttgatagttgttttaaggattgttaggtataggaaatccagtaaattaataaaaaaattttgattttccaat

SEQ ID NO: 67250 - DNA, 201 bp, Homo sapiens
agtggggaggatttggagacaatggctgcatagatgacatccggacccgatacgacacggaggtggatgaggggtccttgaatcctggcaagcagagataygagaaaatgaccagtgggatgtacttgggggagattgtgcggcagatcctgatcgacctgaccaagcagggtctcctcttccgagggcagatttcagagc

SEQ ID NO: 67251 - DNA, 201 bp, Homo sapiens
gaagaccaaagatttaaagcataagaaattgccccttggcctaactttttctttcccctgtcgacagactaaactggaagagggtgtcctactttcgtggrcaaaaaagtttaaggcacgaggagttcaggacacggatgtggtgagccgtctgaccaaagccatgagaagacacaaggacatggacgtggacatcctggc

SEQ ID NO: 67252 - DNA, 201 bp, Homo sapiens
cgagtgctgaaggtgcaagtcgctgaagaggggaagcgacacgtgcagatggagagtcagttctacccaacgcccaatgaaatcatccgcgggaacggcayagagctgtttgaatatgtagctgactgtctggcagatttcatgaagaccaaagatttaaagcataagaaattgccccttggcctaactttttctttcccc

SEQ ID NO: 67253 - DNA, 201 bp, Homo sapiens
gtacttgtggatgaacattggagagcaagaggaactcacgttatgaactagggggatctcatctaacttgtccttaacttgccatgttgacttcaaacctrttaagagaacaaagactttgaagtatccagccccagggtgcagagaggttgattgccagggagcactgcaggaatcattgcatgcttaaagcgagttatg

SEQ ID NO: 67254 - DNA, 201 bp, Homo sapiens
aaggtggacaggttcctgtatcacatgcggctctccgatgacacccttttggacatcatgaggcggttccgggctgagatggagaagggcctggcaaaggrcaccaaccccacggctgcagtgaagatgttgcccaccttcgtcagggccattcccgatggttccgaaaatggggagttcctttccctggatctcggaggg

SEQ ID NO: 67255 - DNA, 201 bp, Homo sapiens
tacagcaggcacagaaggagaactaggaacccctgggattggacctgatgcatcttggatactgaacagcttttcctctggcagatcagttggtcagagascaatgggcaccctcctggctgacctcaccttctggatggccgaaagagaaccccaggttctcgggtactcttagtatcttgtactggatttgcagtgaca

SEQ ID NO: 67256 - DNA, 201 bp, Homo sapiens; identical to SEQ ID NO: 67243

SEQ ID NO: 67257 - DNA, 201 bp, Homo sapiens; identical to SEQ ID NO: 67244

SEQ ID NO: 67258 - DNA, 175 bp, Homo sapiens
catgtgctacatggaggacatgaggaacatcgagatggtggaggggggtgaagggaagatgggcatctgtttttcattttgcctgtggtttgtgttgcagstgttgatagttgttttaaggattgttaggtataggaaatccagtaaattaataaaaaaattttgattttccaat

SEQ ID NO: 67259 - DNA, 120 bp, Homo sapiens
gacatggacgtggacatccyggccctggtcaatgacaccgtggggaccatgatgacctgtgcctatgacgacccctactgcgaagttggtgtcatcatcggaactggcaccaatgcgtgt

SEQ ID NO: 67260 - DNA, 201 bp, Homo sapiens; identical to SEQ ID NO: 67242

SEQ ID NO: 67261 - DNA, 201 bp, Homo sapiens; identical to SEQ ID NO: 67251

SEQ ID NO: 67262 - DNA, 201 bp, Homo sapiens; identical to SEQ ID NO: 67243

SEQ ID NO: 67263 - DNA, 201 bp, Homo sapiens; identical to SEQ ID NO: 67252

SEQ ID NO: 67264 - DNA, 201 bp, Homo sapiens; identical to SEQ ID NO: 67244

SEQ ID NO: 67265 - DNA, 175 bp, Homo sapiens; identical to SEQ ID NO: 67258

SEQ ID NO: 67266 - DNA, 201 bp, Homo sapiens; identical to SEQ ID NO: 67254

SEQ ID NO: 67267 - DNA, 201 bp, Homo sapiens; identical to SEQ ID NO: 67248

SEQ ID NO: 67268 - DNA, 201 bp, Homo sapiens
gtaaaggcccgggagcggctagagctctatgatgagcatgtatcctctcgatcacatacagaagaggattgcacggaggagctctttgacttcttgcatgyaaaggaccattgcgtggcccacaaactctttaacaacttgaaataaatgtgtggacttaattcaccccagccttcatcatctgggcatcagaatatttcc

SEQ ID NO: 67269 - DNA, 201 bp, Homo sapiens
ccgaatccggagatcctgaggatggatcccctaacaacagtgagagagcaatgcgagcagttggagaaatgtgtaaaggcccgggagcggctagagctctrtgatgagcatgtatcctctcgatcacatacagaagaggattgcacggaggagctctttgacttcttgcatgcaaaggaccattgcgtggcccacaaactc

SEQ ID NO: 67270 - DNA, 201 bp, Homo sapiens
tgtgtaaaggcccgggagcggctagagctctatgatgagcatgtatcctctcgatcacatacagaagaggattgcacggaggagctctttgacttcttgcrtgcaaaggaccattgcgtggcccacaaactctttaacaacttgaaataaatgtgtggacttaattcaccccagccttcatcatctgggcatcagaatatt

SEQ ID NO: 67271 - DNA, 163 bp, Homo sapiens
aggtgccgctgttgctgctcgtgttaaatctagaaccgtagccagacatgggactggaggacragcaaaagatgcttaccgaatccggagatcctgaggatggatcccctaacaacagtgagagagcaatgcgagcagttggagaaatgtgtaaaggcccggg

SEQ ID NO: 67272 - DNA, 201 bp, Homo sapiens
ggagctctttgacttcttgcatgcaaaggaccattgcgtggcccacaaactctttaacaacttgaaataaatgtgtggacttaattcaccccagccttcawcatctgggcatcagaatatttccttatggtttcggatgtaccatttgtttcttatttgtgtaactgtaagttcacatgaacctcgtgggttttggcttag

SEQ ID NO: 67273 - DNA, 201 bp, Homo sapiens
aggtgccgctgttgctgctcgtgttaaatctagaaccgtagccagacatgggactggaggacgagcaaaagatgcttaccgaatccggagatcctgaggasggatcccctaacaacagtgagagagcaatgcgagcagttggagaaatgtgtaaaggcccgggagcggctagagctctatgatgagcatgtatcctctcga

SEQ ID NO: 67274 - DNA, 201 bp, Homo sapiens
taaaggcccgggagcggctagagctctatgatgagcatgtatcctctcgatcacatacagaagaggattgcacggaggagctctttgacttcttgcatgcsaaggaccattgcgtggcccacaaactctttaacaacttgaaataaatgtgtggacttaattcaccccagccttcatcatctgggcatcagaatatttcct

SEQ ID NO: 67275 - DNA, 201 bp, Homo sapiens; identical to SEQ ID NO: 67268

SEQ ID NO: 67276 - DNA, 201 bp, Homo sapiens; identical to SEQ ID NO: 67270

SEQ ID NO: 67277 - DNA, 201 bp, Homo sapiens; identical to SEQ ID NO: 67272

SEQ ID NO: 67278 - DNA, 201 bp, Homo sapiens
ttgctgctcgtgttaaatctagaaccgtagccagacatgggactggaggacgagcaaaagatgcttaccgaatccggagatcctgaggaggaggaagaggragaggaggaattagtggatcccctaacaacagtgagagagcaatgcgagcagttggagaaatgtgtaaaggcccgggagcggctagagctctatgatgag

SEQ ID NO: 67279 - DNA, 201 bp, Homo sapiens
gaagaggaagaggaggaattagtggatcccctaacaacagtgagagagcaatgcgagcagttggagaaatgtgtaaaggcccgggagcggctagagctctrtgatgagcatgtatcctctcgatcacatacagaagaggattgcacggaggagctctttgacttcttgcatgcaaaggaccattgcgtggcccacaaactc

SEQ ID NO: 67280 - DNA, 201 bp, Homo sapiens
cgtgttaaatctagaaccgtagccagacatgggactggaggacgagcaaaagatgcttaccgaatccggagatcctgaggaggaggaagaggaagaggagraattagtggatcccctaacaacagtgagagagcaatgcgagcagttggagaaatgtgtaaaggcccgggagcggctagagctctatgatgagcatgtatc

SEQ ID NO: 67281 - DNA, 166 bp, Homo sapiens
ttgaggtgccgctgttgctgctcgtgttaaatctagaaccgtagccagacatgggactggaggacragcaaaagatgcttaccgaatccggagatcctgaggaggaggaagaggaagaggaggaattagtggatcccctaacaacagtgagagagcaatgcgagca

SEQ ID NO: 67282 - DNA, 201 bp, Homo sapiens
aaatctagaaccgtagccagacatgggactggaggacgagcaaaagatgcttaccgaatccggagatcctgaggaggaggaagaggaagaggaggaattastggatcccctaacaacagtgagagagcaatgcgagcagttggagaaatgtgtaaaggcccgggagcggctagagctctatgatgagcatgtatcctctcg

SEQ ID NO: 67283 - DNA, 201 bp, Homo sapiens; identical to SEQ ID NO: 67274

SEQ ID NO: 67284 - DNA, 201 bp, Homo sapiens
agattggcatccggggctcttccacgaccttggatccctacagatacaaccggagccagggcttccgggtagtcctggctgaagactgctggatgaagtcrctggttcctctgatgggggaagtcaggcagcagatgggaggcaaacccatttatatcagctttgatattgacgctctggatcctgcctatgcgccaggga

SEQ ID NO: 67285 - DNA, 201 bp, Homo sapiens
ctctggatcctgcctatgcgccagggacagggacacctgaaattgctggtctcactcctagtcaggctctggagatcatcaggggttgtcaaggcctgaaygtgatgggctgtgatcttgtcgaagtttcaccaccgtatgatctttctgggaacacagccctgctggcggctaacctgctgtttgagatgctatgtgctc

SEQ ID NO: 67286 - DNA, 201 bp, Homo sapiens
ggacgctgccttcatcggggtgcccctggatactgggacctccaaccggcctggggcgagattcggacctcgccgcatccgggaagaatcagtgatgcttsggacagtcaatcctagcacgggggccctccccttccagtccctcatggttgcagacctaggcgatgtgaatgtcaatctttacaaccttcaggacagctg

SEQ ID NO: 67287 - DNA, 201 bp, Homo sapiens
gtcaatcctagcacgggggccctccccttccagtccctcatggttgcagacctaggcgatgtgaatgtcaatctttacaaccttcaggacagctgccggcraattcaagaggcctatgagaaaattgtagcagctggctgtattcctctgaccttgggtggagatcacacaatcacatatcccatattgcaagcgatggca

SEQ ID NO: 67288 - DNA, 201 bp, Homo sapiens
tgggtggagatcacacaatcacatatcccatattgcaagcgatggcaaaaaagcatggcccagtggggctgctgcacgtggatgcgcacacggacacgacygacaaggccctaggagagaagctctaccacggggcgcccttccgccggtgtgtggatgagggtctcctggactgtaagcgtgtggtgcagattggcatcc

SEQ ID NO: 67289 - DNA, 201 bp, Homo sapiens
tggcgtccgggtgcgcccggggcccggggcccggcgtgggcgcgcgtcctgccgcagggctctttcatccggggcgccgccagagccgccaggcttccgaygcgccccggaaccagccccccagccccgagttcgtggcccggccggtgggcgtctgctccatgatgcgcctgccggtgcagacctcccccgaggggctgg

SEQ ID NO: 67290 - DNA, 201 bp, Homo sapiens
cagacctcccccgaggggctggacgctgccttcatcggggtgcccctggatactgggacctccaaccggcctggggcgagattcggacctcgccgcatccrggaagaatcagtgatgcttgggacagtcaatcctagcacgggggccctccccttccagtccctcatggttgcagacctaggcgatgtgaatgtcaatctt

SEQ ID NO: 67291 - DNA, 201 bp, Homo sapiens; identical to SEQ ID NO: 67284

SEQ ID NO: 67292 - DNA, 201 bp, Homo sapiens; identical to SEQ ID NO: 67285

SEQ ID NO: 67293 - DNA, 201 bp, Homo sapiens; identical to SEQ ID NO: 67286

SEQ ID NO: 67294 - DNA, 201 bp, Homo sapiens; identical to SEQ ID NO: 67287

SEQ ID NO: 67295 - DNA, 201 bp, Homo sapiens; identical to SEQ ID NO: 67288

SEQ ID NO: 67296 - DNA, 201 bp, Homo sapiens; identical to SEQ ID NO: 67289

SEQ ID NO: 67297 - DNA, 201 bp, Homo sapiens; identical to SEQ ID NO: 67290

SEQ ID NO: 67298 - DNA, 201 bp, Homo sapiens
tttctttcaagattatctaaacattagaaacatgacatttaaaaaaactatgaaataatactgtataagcattccatatttctatatcttccttttaaacwtttttttttttgagatagagttttgcttgtcacccaggctggagtgcaatggcatgatctcgtggctcacgcctgtaatcccaggcctaggcgggaggat

SEQ ID NO: 67299 - DNA, 201 bp, Homo sapiens; identical to SEQ ID NO: 67284

SEQ ID NO: 67300 - DNA, 201 bp, Homo sapiens; identical to SEQ ID NO: 67285

SEQ ID NO: 67301 - DNA, 201 bp, Homo sapiens; identical to SEQ ID NO: 67286

SEQ ID NO: 67302 - DNA, 201 bp, Homo sapiens; identical to SEQ ID NO: 67287

SEQ ID NO: 67303 - DNA, 201 bp, Homo sapiens; identical to SEQ ID NO: 67288

SEQ ID NO: 67304 - DNA, 201 bp, Homo sapiens; identical to SEQ ID NO: 67289

SEQ ID NO: 67305 - DNA, 201 bp, Homo sapiens; identical to SEQ ID NO: 67290

SEQ ID NO: 67306 - DNA, 201 bp, Homo sapiens
gtatgtaatattcagtaataaatgtcatcaggtgatgactggatgagctgctgaagacattcgtattatgtgttagatgctttaatgtttgcaaaatctgycttgtgaatggactgtcagctgttaaactgttcctgttttgaagtgctattacctttctcagttaccagaatcttgctgctaaagttgcaagtgattgat

SEQ ID NO: 67307 - DNA, 201 bp, Homo sapiens
tccgaggcaaagacagtccacagcatggtccaacctgagcaggccccaaaggtactgaatgttgtcgtggaccctcaaggccgaggtgctcctgagatcaragctaccaccgctacctctgtttgcccttctcctttcaaaatgaagcccataggacttcaagagagaagagggtccaacgtatctcttacattggacatg

SEQ ID NO: 67308 - DNA, 201 bp, Homo sapiens
gaactctatccactgtatttccacatcgtgagtcattttactttaaaagggaaaaacaaatttgtagcaactctgaagtatcaagagttttaactacttgwctctcttttgctaagaagggatttttgaatatgctatctacctggaatctctctctcaacaaaaggtatatgccttcaggaatgatataatctgtcccat

SEQ ID NO: 67309 - DNA, 201 bp, Homo sapiens
cattggctgtcaacagctgaaagaagaaggagttgtggatgcactaagcattgtctgccagcttcgtatggatagaggtggaatggtgcaaaccagtgagmagtatgaatttgtgcaccatgctctgtgcctgtatgagagcagactttcagcagagactgtccagtgagtcattgaagacttgtcagaccatcaatctct

SEQ ID NO: 67310 - DNA, 201 bp, Homo sapiens
ggatcccaaagaaattgatattccgcgtcatggaactaaaaatcgctataagaccattttaccaaatcccctcagcagagtgtgtttaagaccaaaaaatrtaaccgattcattgagcacctacattaatgctaattatattaggggctacagtggcaaggagaaagccttcattgccacgcagggccccatgatcaacac

SEQ ID NO: 67311 - DNA, 201 bp, Homo sapiens
cattgaaccctttgtgtctataccaacaccacgggagaaggtagcaatggagtatctgcagtcagccagccgaattctcacaaggtctcagctgagggacrtcgtggcaagttcacatttactccaaagtgaattcatggaaataccaatgaactttgtggatcccaaagaaattgatattccgcgtcatggaactaaaaa

SEQ ID NO: 67312 - DNA, 201 bp, Homo sapiens
gcagcatgaagcggacaaaatctggagcaaagaaggattttatgctgttgtcatttttctcagcatctttgttattatagtaacgtgtttgatgattcttyacagattaaaagaaagatttcagctttccttaagacaagacaaagagaaaaaccaggagatccacctatcgcccatcacattacagccagcactgtccga

SEQ ID NO: 67313 - DNA, 201 bp, Homo sapiens; identical to SEQ ID NO: 67306

SEQ ID NO: 67314 - DNA, 201 bp, Homo sapiens; identical to SEQ ID NO: 67308

SEQ ID NO: 67315 - DNA, 201 bp, Homo sapiens; identical to SEQ ID NO: 67311

SEQ ID NO: 67316 - DNA, 201 bp, Homo sapiens; identical to SEQ ID NO: 67312

SEQ ID NO: 67317 - DNA, 201 bp, Homo sapiens
ctgcgctgtgcctgctccttaatcttcacgctgcagggtgcttttcaggaaacaatgatcattttttggcaattaatcagaagaagagtgggaagccggtrttcatttataagcattcacaagacattgagaagagcctggatatagccccacaaaaaatctacagacatagctaccattcctcttccgaagctcaagtaa

SEQ ID NO: 67318 - DNA, 201 bp, Homo sapiens
ttcggatcttccgccaaggagtggctgcagctttaggactcttaccccagcaagtgcacatcaatcgcctcattggaaagaagaacagtattgaactgttygtgtctcccataaaccgaaaaacaggaatttctgatgctctgccctctgaggaagttcttcgttcacttaatatcaatgttttgcatcaaagtttatccc

SEQ ID NO: 67319 - DNA, 201 bp, Homo sapiens; identical to SEQ ID NO: 67307

SEQ ID NO: 67320 - DNA, 201 bp, Homo sapiens; identical to SEQ ID NO: 67310

SEQ ID NO: 67321 - DNA, 201 bp, Homo sapiens; identical to SEQ ID NO: 67309

SEQ ID NO: 67322 - DNA, 103 bp, Homo sapiens
tayaggagtattgaatagttgggaattggaacccctccagggggaaccaaacattgtcgttcagaagaagacaaagagagattgaaatgaagctgttgatttc

SEQ ID NO: 67323 - DNA, 201 bp, Homo sapiens
gctttttcatattgcttgcacacatttagatgtggatttagtctgcataactgtaacagagaaactaccattttacttcaaaagacctcctattaatgtgrcgattgaccgaggcctggcttttgaacttgtctatagccctgctatcaaagactccacaatgagaaggtatacaatttccagtgccctcaatttgatgca

SEQ ID NO: 67324 - DNA, 201 bp, Homo sapiens
tgcttttggaattatctctacagtgaagaaacctcggccatcagaaggagatgaagattgtcttccagcttccaagaaagccaagtgtgagggctgaaaasaatgccccagtctctgtcagcactcccttcttcccttttatagttcatcagccacaacaaaaataaaacctttgtgtgatttactgttttcatttggagc

SEQ ID NO: 67325 - DNA, 201 bp, Homo sapiens
gagtagagccagaggtataactgaataagaaatttttttaagcaagagaaagacaactgttctgcgggttggagaaaatacaattttttttttttttttttgagacagtctcgctctgtcccccaggctggagtgcagtggctcgatctctgctcactgcaagctccgcctcctgggttcatgccattctcctgcctcagc

SEQ ID NO: 67326 - DNA, 201 bp, Homo sapiens
gggtctcactctgtcacccaggctggagtgcagtggcacaatctcggctcactgcaacctttgcctcttgggctcaagccatcctcccacctcagcctccmaagtaagtgggaccagaagcatgcaccaccacatcccagctaatttttgtatttttttgtagagatggggttttgccatgtccaggctagtctcaaactc

SEQ ID NO: 67327 - DNA, 201 bp, Homo sapiens
tcaccctaagacgtgatcctgaaggtgtggcaggcatcctcaaagtgaaaggtggcacaggtgcaatcgtggaataccacaggcctggcatagactccatstcctgtgctggcatggcgacaatctgcaacatgggcgcagaaattggggccaccacttccgtgttcccttacaaccacaggatgaggaggtacctaagca

SEQ ID NO: 67328 - DNA, 201 bp, Homo sapiens
tggccaagcaggcactggcccatgacttcaagtgcaagtcccacttcaccatcactccaggctccgagcagatccacgccaccattgagcgggacagctaygcacagattttgaggaatgtgggtggcatcgtcctggccaatgcttgtggcccctgcattggccgctgggacacgaaggacatcaagaaggggaagaagt

SEQ ID NO: 67329 - DNA, 201 bp, Homo sapiens
gttaaagctatgaagatcccgggcgctcagcagctgtggccaagcaggcactggcccatgacttcaagtgcaagtcccacttcaccatcactccaggctcygagcagatccacgccaccattgagcgggacagctacgcacagattttgaggaatgtgggtggcatcgtcctggccaatgcttgtggcccctgcattggcc

SEQ ID NO: 67330 - DNA, 201 bp, Homo sapiens
cctggccattgtgggaatcctcaagttcaacccagagaccaactacctgatgggcaaagataggaagaagttcaagctagaggctctggatgcagacgacyttccccaagaggagtttgacccagggcaggacccctaccagcaccccccacaggacagcagtggccagcacgtggatgtgagccccactagccagcgcct

SEQ ID NO: 67331 - DNA, 201 bp, Homo sapiens
tgcctgaccctggctgccattatgaccaactaattgaaattaacctcagtgagctgaagccgcacatcaatgggcccttcacccccgaccaggctcacccygtggcagaagtgggcaaggtggcagagaaggaaggatggcctctggacatccgagtaggtctgactggtacctgcaacagttaaagctatgaagatcccg

SEQ ID NO: 67332 - DNA, 201 bp, Homo sapiens
caggacagcagtggccagcacgtggatgtgagccccactagccagcgcctgcagctcctggaggcttttgacaagtgggatagcaaggacctggaggaccygcagatactcatcaaggtcaaagggaagtgtactactgaccacatctcggctgctggcccctggctcaagttttgtgggcacttggacaacatctccaac

SEQ ID NO: 67333 - DNA, 201 bp, Homo sapiens
tcagcagctgtggccaagcaggcactggcccatgacttcaagtgcaagtcccacttcaccatcactccaggctccgagcagatccacgccaccattgagcrggacagctacgcacagattttgaggaatgtgggtggcatcgtcctggccaatgcttgtggcccctgcattggccgctgggacacgaaggacatcaagaag

SEQ ID NO: 67334 - DNA, 201 bp, Homo sapiens
aggacatcaagaaggggaagaagtacacaatcgtcacctcctacaacaggaacttcacgggctgcaatgatgcgaaccctgagacccatgtcttcgtcacrtccccagagattgtcacagccctggccattgtgggaatcctcaagttcaacccagagaccaactacctgatgggcaaagataggaagaagttcaagctag

SEQ ID NO: 67335 - DNA, 201 bp, Homo sapiens
ctggctcaagttttgtgggcacttggacaacatctccaacaacctgctcactggtgccatcaacattgaaaacagccaggccaactccgtgtgcagtgccvtcacccaggagtttggccccgtccctgacactgcccgctactacaagaaacatggcatcaggtgggtggtgatcggggacgagaactcgagccgggagca

SEQ ID NO: 67336 - DNA, 201 bp, Homo sapiens
gcccgctactacaagaaacatggcatcaggtgggtggtgatcggggacgagaactcgagccgggagcacgcagtgctggagcctccccacctctggggccrggccatcatcaccaagagctttgccaggatccacaagaccaacccgaagaagcagggcctgctgcccctgacttttgctgacccaggcgactacaacaag

SEQ ID NO: 67337 - DNA, 201 bp, Homo sapiens
cctgcattggccgctgggacacgaaggacatcaagaaggggaagaagtacacaatcgtcacctcctacaacaggaacttcacgggctgcaatgatgcgaaycctgagacccatgtcttcgtcacatccccagagattgtcacagccctggccattgtgggaatcctcaagttcaacccagagaccaactacctgatgggca

SEQ ID NO: 67338 - DNA, 201 bp, Homo sapiens
cagccaggaaatcgagcagggcaagacacctgtggctgtggccggaccacgtggccatgctgcagttcatcagcagtgggctgcccaaggtggccatgccrtccaccatccactgtgaccatctgaaagaggcccagctcggaggcgagaaagacctgcgccaggccaaggacatcaaccaggaagtttataatttcctgg

SEQ ID NO: 67339 - DNA, 201 bp, Homo sapiens
aatgtggagctgtccacattcggtatcttttcatttttatatatattttacagtttcaagaaaacttagtactactagtatctgccttattttcttaagtytgatgttaatttttgtttcaggagtgagatataaacattttgctttttttcagttttgaaatatagtttgtcatcctgtgaaaaccacctcgtttgcttt

SEQ ID NO: 67340 - DNA, 194 bp, Homo sapiens
atgtctgtgctcaggcggatgatgcgggtttccaatcgctctctcctcgccttcatcttcttcttctccctctcttcgtcctgtctgtacttcrtctatgtggccccaggcatcgattatcccgaaggcaataattcaagtgattatcttgttcaaacaacaacgtatctcccggaaaacttcacatactcacc

SEQ ID NO: 67341 - DNA, 201 bp, Homo sapiens
gtacatcgatggactgaacaatttaatatataggccaaaaatactggttgataggttgtatacaaacatatctgtaaacctcatgccagagttagctccartcgaagactattaaaagaagtggctgtcgtggcaaggtagaccacaatgctggatcataaacttggagcgcgctcttagtggaggtcagtgattggctgt

SEQ ID NO: 67342 - DNA, 201 bp, Homo sapiens
gagcaccgcagaaacgggaagccactacttaagatcggaagttaagagagctccctccgaagagaaaatttttatactaaaatctataatttaattcaagmgaatgcttttatttccgtttaaacatattttgtatatatgtgatataaattaatgtgtgcaaattgtttaaaaattagatgtgttgcagttttgcatgta

SEQ ID NO: 67343 - DNA, 201 bp, Homo sapiens
gcagtccacagtgtttacagagtgggactatatacagtcacccttctctcacccgtcctccctgctctgagacacacccctgtggcgagcaccgcagaaaygggaagccactacttaagatcggaagttaagagagctccctccgaagagaaaatttttatactaaaatctataatttaattcaagagaatgcttttattt

SEQ ID NO: 67344 - DNA, 201 bp, Homo sapiens
ttatcttaaaatacatgatcagtattcagtgcgctgatattataatgtcttctatatgtagtatctaaaagcataatttaatagcattgtcttaaaatacrtgatgagttatttggtgcactgatgccataatgtcttctatatgtaatatcttacatgtttgcatgagtgtcagggctttgtccagttatcttcatatga

SEQ ID NO: 67345 - DNA, 201 bp, Homo sapiens
ttggtgcactgatgccataatgtcttctatatgtaatatcttacatgtttgcatgagtgtcagggctttgtccagttatcttcatatgactgttctctgaraaaaggtcttactacctgatatcaagtacatatcttaattttggatgaatttttccacagtaaagccgaacagtattcttttttgaaaattagcaattat

SEQ ID NO: 67346 - DNA, 201 bp, Homo sapiens
gtttttttatggtactcgaaaaatcaaaccttctgaaaattatgatatttgtacttcatttgtgtattagttcattttctgtttctattacatagtttttmaagtcaatgaaagagattgagaatgttaacatttgttgatcaatgtggagctgtccacattcggtatcttttcatttttatatatattttacagtttcaa

SEQ ID NO: 67347 - DNA, 201 bp, Homo sapiens; identical to SEQ ID NO: 67339

SEQ ID NO: 67348 - DNA, 201 bp, Homo sapiens
gaggaagatgtctgtgctcaggcggatgatgcgggtttccaatcgctctctcctcgccttcatcttcttcttctccctctcttcgtcctgtctgtacttcrtctatgtggccccaggcatcgccaacacatatctctttatggtacaagctcgaggtataatgttgagagaaaatgtgaaaacaataggtcatatgatcag

SEQ ID NO: 67349 - DNA, 201 bp, Homo sapiens; identical to SEQ ID NO: 67341

SEQ ID NO: 67350 - DNA, 201 bp, Homo sapiens; identical to SEQ ID NO: 67342

SEQ ID NO: 67351 - DNA, 201 bp, Homo sapiens; identical to SEQ ID NO: 67343

SEQ ID NO: 67352 - DNA, 201 bp, Homo sapiens; identical to SEQ ID NO: 67344

SEQ ID NO: 67353 - DNA, 201 bp, Homo sapiens; identical to SEQ ID NO: 67345

SEQ ID NO: 67354 - DNA, 201 bp, Homo sapiens; identical to SEQ ID NO: 67346

SEQ ID NO: 67355 - DNA, 201 bp, Homo sapiens
acgcactgaagctgcgcttcccggccgaggacgagttccccgacctgagcgcccacaacaaccacatggccaaggtgctgacccccgagctgtacgcggasctgcgcgccaagagcacgccgagcggcttcacgctggacgacgtcatccagacaggcgtggacaacccgggccacccgtacatcatgaccgtgggctgcg

SEQ ID NO: 67356 - DNA, 201 bp, Homo sapiens
gcggggtcttcgacgtctccaacgctgaccgcctgggcttctcagaggtggagctggtgcagatggtggtggacggagtgaagctgctcatcgagatggarcagcggctggagcagggccaggccatcgacgacctcatgcctgcccagaaatgaagcccggcccacacccgacaccagccctgctgcttcctaacttatt

SEQ ID NO: 67357 - DNA, 201 bp, Homo sapiens
cacggctgcggtgggcggggtcttcgacgtctccaacgctgaccgcctgggcttctcagaggtggagctggtgcagatggtggtggacggagtgaagctgytcatcgagatggaacagcggctggagcagggccaggccatcgacgacctcatgcctgcccagaaatgaagcccggcccacacccgacaccagccctgctg

SEQ ID NO: 67358 - DNA, 185 bp, Homo sapiens
ccgacaccagccctgctgcttcctaacttattgcctgggcagtgcccaccatgcacccctgatgttcgccgtctggcgagcccttagccttgctgtagagrcttccgtcacccttggtagagtttatttttttgatggctaagatactgctgatgctgaaataaactagggttttggcctgcctg

SEQ ID NO: 67359 - DNA, 201 bp, Homo sapiens
cgcactgaagctgcgcttcccggccgaggacgagttccccgacctgagcgcccacaacaaccacatggccaaggtgctgacccccgagctgtacgcggagstgcgcgccaagagcacgccgagcggcttcacgctggacgacgtcatccagacaggcgtggacaacccgggccacccgtacatcatgaccgtgggctgcgt

SEQ ID NO: 67360 - DNA, 201 bp, Homo sapiens
acctgggcaagcatgagaagttctcggaggtgcttaagcggctgcgacttcagaagcgaggcacaggcggtgtggacacggctgcggtgggcggggtcttmgacgtctccaacgctgaccgcctgggcttctcagaggtggagctggtgcagatggtggtggacggagtgaagctgctcatcgagatggaacagcggctgg

SEQ ID NO: 67361 - DNA, 201 bp, Homo sapiens
aggtggagctggtgcagatggtggtggacggagtgaagctgctcatcgagatggaacagcggctggagcagggccaggccatcgacgacctcatgcctgcycagaaatgaagcccggcccacacccgacaccagccctgctgcttcctaacttattgcctgggcagtgcccaccatgcacccctgatgttcgccgtctggc

SEQ ID NO: 67362 - DNA, 201 bp, Homo sapiens
acgacctggaccccaactacgtgctgagctcgcgggtgcgcacgggccgcagcatccgtggcttctgcctccccccgcactgcagccgcggggagcgccgmgccatcgagaagctcgcggtggaagccctgtccagcctggacggcgacctggcgggccgatactacgcgctcaagagcatgacggaggcggagcagcagc

SEQ ID NO: 67363 - DNA, 201 bp, Homo sapiens
ccacctgcgggtcatctccatgcagaaggggggcaacatgaaggaggtgttcacccgcttctgcaccggcctcacccagattgaaactctcttcaagtctraggactatgagttcatgtggaaccctcacctgggctacatcctcacctgcccatccaacctgggcaccgggctgcgggcaggtgtgcatatcaagctgcc

SEQ ID NO: 67364 - DNA, 201 bp, Homo sapiens; identical to SEQ ID NO: 67355

SEQ ID NO: 67365 - DNA, 201 bp, Homo sapiens; identical to SEQ ID NO: 67356

SEQ ID NO: 67366 - DNA, 201 bp, Homo sapiens; identical to SEQ ID NO: 67357

SEQ ID NO: 67367 - DNA, 185 bp, Homo sapiens; identical to SEQ ID NO: 67358

SEQ ID NO: 67368 - DNA, 201 bp, Homo sapiens; identical to SEQ ID NO: 67359

SEQ ID NO: 67369 - DNA, 201 bp, Homo sapiens; identical to SEQ ID NO: 67360

SEQ ID NO: 67370 - DNA, 201 bp, Homo sapiens; identical to SEQ ID NO: 67361

SEQ ID NO: 67371 - DNA, 201 bp, Homo sapiens; identical to SEQ ID NO: 67362

SEQ ID NO: 67372 - DNA, 201 bp, Homo sapiens; identical to SEQ ID NO: 67363

SEQ ID NO: 67373 - DNA, 201 bp, Homo sapiens; identical to SEQ ID NO: 67355

SEQ ID NO: 67374 - DNA, 201 bp, Homo sapiens; identical to SEQ ID NO: 67356

SEQ ID NO: 67375 - DNA, 201 bp, Homo sapiens; identical to SEQ ID NO: 67357

SEQ ID NO: 67376 - DNA, 185 bp, Homo sapiens; identical to SEQ ID NO: 67358

SEQ ID NO: 67377 - DNA, 201 bp, Homo sapiens; identical to SEQ ID NO: 67359

SEQ ID NO: 67378 - DNA, 201 bp, Homo sapiens; identical to SEQ ID NO: 67360

SEQ ID NO: 67379 - DNA, 201 bp, Homo sapiens; identical to SEQ ID NO: 67361

SEQ ID NO: 67380 - DNA, 201 bp, Homo sapiens; identical to SEQ ID NO: 67362

SEQ ID NO: 67381 - DNA, 201 bp, Homo sapiens; identical to SEQ ID NO: 67363

SEQ ID NO: 67382 - DNA, 201 bp, Homo sapiens; identical to SEQ ID NO: 67355

SEQ ID NO: 67383 - DNA, 201 bp, Homo sapiens
gcggggtcttcgacgtctccaacgctgaccgcctgggcttctcagaggtggagctggtgcagatggtggtggacggagtgaagctgctcatcgagatggarcagcggctggagcagggccaggccatcgacgacctcatccctgctgcttcctaacttattgcctgggcagtgcccaccatgcacccctgatgttcgccgt

SEQ ID NO: 67384 - DNA, 201 bp, Homo sapiens
cacggctgcggtgggcggggtcttcgacgtctccaacgctgaccgcctgggcttctcagaggtggagctggtgcagatggtggtggacggagtgaagctgytcatcgagatggaacagcggctggagcagggccaggccatcgacgacctcatccctgctgcttcctaacttattgcctgggcagtgcccaccatgcaccc

SEQ ID NO: 67385 - DNA, 183 bp, Homo sapiens
acgacctcatccctgctgcttcctaacttattgcctgggcagtgcccaccatgcacccctgatgttcgccgtctggcgagcccttagccttgctgtagagrcttccgtcacccttggtagagtttatttttttgatggctaagatactgctgatgctgaaataaactagggttttggcctgcc

SEQ ID NO: 67386 - DNA, 201 bp, Homo sapiens; identical to SEQ ID NO: 67359

SEQ ID NO: 67387 - DNA, 201 bp, Homo sapiens; identical to SEQ ID NO: 67360

SEQ ID NO: 67388 - DNA, 201 bp, Homo sapiens; identical to SEQ ID NO: 67362

SEQ ID NO: 67389 - DNA, 201 bp, Homo sapiens; identical to SEQ ID NO: 67363

SEQ ID NO: 67390 - DNA, 201 bp, Homo sapiens; identical to SEQ ID NO: 67355

SEQ ID NO: 67391 - DNA, 201 bp, Homo sapiens; identical to SEQ ID NO: 67356

SEQ ID NO: 67392 - DNA, 201 bp, Homo sapiens; identical to SEQ ID NO: 67357

SEQ ID NO: 67393 - DNA, 185 bp, Homo sapiens; identical to SEQ ID NO: 67358

SEQ ID NO: 67394 - DNA, 201 bp, Homo sapiens; identical to SEQ ID NO: 67359

SEQ ID NO: 67395 - DNA, 201 bp, Homo sapiens; identical to SEQ ID NO: 67360

SEQ ID NO: 67396 - DNA, 201 bp, Homo sapiens; identical to SEQ ID NO: 67361

SEQ ID NO: 67397 - DNA, 201 bp, Homo sapiens; identical to SEQ ID NO: 67362

SEQ ID NO: 67398 - DNA, 201 bp, Homo sapiens; identical to SEQ ID NO: 67363

SEQ ID NO: 67399 - DNA, 201 bp, Homo sapiens
tttggtataggagatggcaatttgcagtattacctgtacaattggaggtgtccaggtacagattctgaaaagggctctggtaacttcgttaacgccaatgrcaagctgcttcctgacgtgtgcaggcgtccaccctgacacttgctgcttagcatctgttttcttctccttcagattctcactaatatcaacagcaatgct

SEQ ID NO: 67400 - DNA, 201 bp, Homo sapiens
cctcaagcgtctgtaggatgaagtgcatatcctcgctctccagagcgctccagcggatgatgtatgggttgttcaacgacgtcttcacaaccagaggtctygtcttacggagagatccccgccccggtgcttgaggagctgcagccattttgaaaatccttccaagaagcaaaatgacaacagaaaaaattcatgttagcg

SEQ ID NO: 67401 - DNA, 201 bp, Homo sapiens
catctgttttcttctccttcagattctcactaatatcaacagcaatgctgcatttctctctgctttcttttttcagaaaaggtgttttgttctttttcttyttatcttcaatcttctgaagtccaatagctttaagcctgtcctcaagcgtctgtaggatgaagtgcatatcctcgctctccagagcgctccagcggatga

SEQ ID NO: 67402 - DNA, 201 bp, Homo sapiens
tcgttaacgccaatggcaagctgcttcctgacgtgtgcaggcgtccaccctgacacttgctgcttagcatctgttttcttctccttcagattctcactaayatcaacagcaatgctgcatttctctctgctttcttttttcagaaaaggtgttttgttctttttcttcttatcttcaatcttctgaagtccaatagcttta

SEQ ID NO: 67403 - DNA, 201 bp, Homo sapiens
tggtaacttcgttaacgccaatggcaagctgcttcctgacgtgtgcaggcgtccaccctgacacttgctgcttagcatctgttttcttctccttcagattmtcactaatatcaacagcaatgctgcatttctctctgctttcttttttcagaaaaggtgttttgttctttttcttcttatcttcaatcttctgaagtccaa

SEQ ID NO: 67404 - DNA, 201 bp, Homo sapiens
tagacttgagtgatgccgaagtgctcaaggagttatacacgttgttaaatgagaattacgtagaagatgatgacaatatgttccgatttgactattcaccygagttcctgttgtgggctctgcgtccaccaggctggctcctgcagtggcactgtggggtcagagtgtcttcaaataaaaaactggtcgggttcataagtg

SEQ ID NO: 67405 - DNA, 201 bp, Homo sapiens
gaaaccccatctctactaaaaatacaaaaattagccgggcgtggtggcgtgtgcctgtagtcccagctgcttgggaggctgaggcaggagaatcgcttgarcctgagaggtgaggttgcagtgagccgagatcgagccactgcactccagcctgggtgacagagcgtgagactccgtctcaaaaaaaaaaaaaaagaaaga

SEQ ID NO: 67406 - DNA, 201 bp, Homo sapiens
aaagtcaaaagagatgcctggtggaacttattcgtgctatcagggcattgatagtttgaatgtttttattacttatgcaaaattgcacatactcctctatrctgattttatcatgaaaactgtcatgtgtcatgctaatggaaaatgtcttatttgtaaataagtattcataattttgttactgatggtgtttttaatcta

SEQ ID NO: 67407 - DNA, 201 bp, Homo sapiens
cccatctctactaaaaatacaaaaattagccgggcgtggtggcgtgtgcctgtagtcccagctgcttgggaggctgaggcaggagaatcgcttgaacctgrgaggtgaggttgcagtgagccgagatcgagccactgcactccagcctgggtgacagagcgtgagactccgtctcaaaaaaaaaaaaaaagaaagagcctg

SEQ ID NO: 67408 - DNA, 201 bp, Homo sapiens; identical to SEQ ID NO: 67404

SEQ ID NO: 67409 - DNA, 201 bp, Homo sapiens; identical to SEQ ID NO: 67405

SEQ ID NO: 67410 - DNA, 201 bp, Homo sapiens; identical to SEQ ID NO: 67406

SEQ ID NO: 67411 - DNA, 201 bp, Homo sapiens; identical to SEQ ID NO: 67407

SEQ ID NO: 67412 - DNA, 201 bp, Homo sapiens
gtatgtacactctgaagtacagcctgggttagtctcttataagggatcggatcattgctcagcctctcccttgagtggcacttagaaaatggcgctattcrtaagctgactggtattgggcccaggactctggctgaaggggtgggcatgctggtaaccatttgcaacctatgctcaggtcctacttgttgggaagccctg

SEQ ID NO: 67413 - DNA, 201 bp, Homo sapiens
ttgagctcatttacattgatattgtaggacttgctcaattcaagaaaactcttggaccatcctgggttcattaccagtgcatgctccgagtccttgattcrtttggtactgaacccgaatttaatcatgcaaattatgcccaatcgaaaggccacaagaccccttggggaaaatggaatctgaaccctcagcagttttata

SEQ ID NO: 67414 - DNA, 201 bp, Homo sapiens
ccgtttttgctgacattccgccaaatatccttctgtctcctccccaccttgcaaaacaaacttcctgttttgaatttggtccaggctggaacagccccacyacacctgttaacacacgcagacgcacacttcccccttcataattgcttagcttcttgttgcctagccagatttcccctcagcttacagttcctgaatcat

SEQ ID NO: 67415 - DNA, 173 bp, Homo sapiens
taatactcctttattccctgttttaaaaatttttttaaatttgatacaataattatacataataatggagtaycatgtgagattcaatccacatatacattgtgaaatgatcaaattaggatagttagcatgcacatcacccccaaataattattacttttgtggtgagaaca

SEQ ID NO: 67416 - DNA, 201 bp, Homo sapiens
atcagaatcacctcgaggcttgttaaaggataggctgtggaccacatctcctcagttgctgattcagtgggtgtgggtggggcctgagaattcacatttcycactggtgatgctgctgttactgagtttgggaccacatttggagaaccactggtctagaattgagaggttggcaaaccttctctgttaagaggtagatag

SEQ ID NO: 67417 - DNA, 201 bp, Homo sapiens
tatacgttattattaaccatagtcaccttgctgtgcaatagaacaccagaacttattcctcctaaatgtaactttttacccattgaccactccctcctcayccccctctctcctccccacccctggtaaccactgttctgttatctcctatgatagcaactttttagcttctgcatgtgagattgtacggtagttgccttt

SEQ ID NO: 67418 - DNA, 201 bp, Homo sapiens
ttagcatgcacatcacccccaaataattattacttttgtggtgagaacacttaaaattgtctcttttagaaatatacgttattattaaccatagtcacctygctgtgcaatagaacaccagaacttattcctcctaaatgtaactttttacccattgaccactccctcctcatccccctctctcctccccacccctggtaa

SEQ ID NO: 67419 - DNA, 201 bp, Homo sapiens; identical to SEQ ID NO: 67412

SEQ ID NO: 67420 - DNA, 201 bp, Homo sapiens; identical to SEQ ID NO: 67413

SEQ ID NO: 67421 - DNA, 201 bp, Homo sapiens; identical to SEQ ID NO: 67414

SEQ ID NO: 67422 - DNA, 173 bp, Homo sapiens; identical to SEQ ID NO: 67415

SEQ ID NO: 67423 - DNA, 201 bp, Homo sapiens; identical to SEQ ID NO: 67416

SEQ ID NO: 67424 - DNA, 201 bp, Homo sapiens; identical to SEQ ID NO: 67418

SEQ ID NO: 67425 - DNA, 201 bp, Homo sapiens; identical to SEQ ID NO: 67417

SEQ ID NO: 67426 - DNA, 201 bp, Homo sapiens
gctcagagctggccaaggacatcctggtgccctcctttgaccctaagaataagcactgtgtgtttcaaggtgacctcctgctcttcagctgtgcaggcgcmcaccccaggcaccagagggtctgcccctgccgggacttcatcaagggccaggtggctctctgcaaagactgcctatagcagctacctgctcagccctgca

SEQ ID NO: 67427 - DNA, 201 bp, Homo sapiens; identical to SEQ ID NO: 67413

SEQ ID NO: 67428 - DNA, 201 bp, Homo sapiens; identical to SEQ ID NO: 67426

SEQ ID NO: 67429 - DNA, 201 bp, Homo sapiens
ctataatgaagtatgcagagaagctaattcaagaagggaaggcttatgtggatgatactcctgctgaacagatgaaagcagaacgtgagcagaggatagamtctaaacatagaaaaaaccctattgagaagaatctacaaatgtgggaagaaatgaaaaaagggagccagtttggtcagtcctgttgtttgcgagcaaaaa

SEQ ID NO: 67430 - DNA, 201 bp, Homo sapiens
actcctctcactttttaaagcattgatattagtatcttctcagatacagaccgttttatgattttttaaaaagtaaaagttctaaaatgaagtcacacagracaattattcttatgcctaagttaacagtggataaaagacttttctgtaaacaactccagtaataaatatcatgaactaatatggtttttgtattcattt

SEQ ID NO: 67431 - DNA, 201 bp, Homo sapiens
catgaactaatatggtttttgtattcatttgtttctgaaaaatgtgcattatgtactatgaggaaatttctacaaagagatgaagacaattgaaagccagmtatctgttattgatctaagcactcccaacatgtctcagaccctgaaccgccagttataccctacactgataggtctcgaagcactttctttccatagctc

SEQ ID NO: 67432 - DNA, 201 bp, Homo sapiens
agacttgaagttgggccacgtgatatgaagagctgtcagtttgtagccgtcagacgagatactggagaaaagctgacagttgctgaaaatgaggcagagamtaaacttcaagctattttggaagacatccaggtcacccttttcacaagggcttctgaagaccttaagactcatatggttgtggctaatacaatggaagac

SEQ ID NO: 67433 - DNA, 201 bp, Homo sapiens
gtttctgaaaatgtgatattcacagatgtgaattctatacttcgctacttggctagagttgcaactacagctgggttatatggctctaatctgatggaacwtactgagattgatcactggttggagttcagtgctacaaaattatcttcatgtgattcctttacttctacaattaatgaactcaatcattgcctgtctctg

SEQ ID NO: 67434 - DNA, 201 bp, Homo sapiens
ctgggaaggagtacatacctggtcagcccccattatctcaaagttcggattcaagcccaaccagaaattctgaacctgctggtttagaaacaccagaagcraaagtactttttgacaaagtagcttctcaaggggaagtagttcggaaacttaaaactgaaaaagcccctaaggatcaagtagatatagctgttcaagaac

SEQ ID NO: 67435 - DNA, 201 bp, Homo sapiens
tgaacctgctggtttagaaacaccagaagcgaaagtactttttgacaaagtagcttctcaaggggaagtagttcggaaacttaaaactgaaaaagcccctmaggatcaagtagatatagctgttcaagaactccttcagctaaaggcacagtacaagtctttgataggagtagagtataagcctgtgtcggccactggagc

SEQ ID NO: 67436 - DNA, 201 bp, Homo sapiens
cagaacgtgagcagaggatagaatctaaacatagaaaaaaccctattgagaagaatctacaaatgtgggaagaaatgaaaaaagggagccagtttggtcastcctgttgtttgcgagcaaaaattgacatgagtagtaacaatggatgcatgagagatccaaccctttatcgctgcaaaattcaaccacatccaagaactg

SEQ ID NO: 67437 - DNA, 201 bp, Homo sapiens
gagcaggagaagggcaggggcctaagaaacagaccaggttgggtcttgaggcaaaaaaagaagaaaatcttgctgattggtattctcaggtcatcacaaartcagaaatgattgaataccatgacataagtggctgttatattcttcgtccctgggcctatgccatttgggaagccatcaaggacttttttgatgctgaga

SEQ ID NO: 67438 - DNA, 201 bp, Homo sapiens
ccttatttggtcgcagctactgagggatgaacgaaagccccctcttcaactcctctcactttttaaagcattgatattagtatcttctcagatacagaccrttttatgattttttaaaaagtaaaagttctaaaatgaagtcacacaggacaattattcttatgcctaagttaacagtggataaaagacttttctgtaaac

SEQ ID NO: 67439 - DNA, 201 bp, Homo sapiens
aactcctctcactttttaaagcattgatattagtatcttctcagatacagaccgttttatgattttttaaaaagtaaaagttctaaaatgaagtcacacargacaattattcttatgcctaagttaacagtggataaaagacttttctgtaaacaactccagtaataaatatcatgaactaatatggtttttgtattcatt

SEQ ID NO: 67440 - DNA, 201 bp, Homo sapiens
ctgaaggctcagtataaagaaaaaactgggaaggagtacatacctggtcagcccccattatctcaaagttcggattcaagcccaaccagaaattctgaacmtgctggtttagaaacaccagaagcgaaagtactttttgacaaagtagcttctcaaggggaagtagttcggaaacttaaaactgaaaaagcccctaaggat

SEQ ID NO: 67441 - DNA, 201 bp, Homo sapiens
accagatcaatttacttatacttcggatcattttgaaactataatgaagtatgcagagaagctaattcaagaagggaaggcttatgtggatgatactcctsctgaacagatgaaagcagaacgtgagcagaggatagaatctaaacatagaaaaaaccctattgagaagaatctacaaatgtgggaagaaatgaaaaaagg

SEQ ID NO: 67442 - DNA, 201 bp, Homo sapiens
ctgtggggaaattgactgtgaggactggatcaaaaagaccactgccagggatcaagatcttgaacctggtgctccatccatgggagctaaaagcctttgcrtccccttcaaaccactctgtgaactgcagcctggagccaaatgtgtctgtggcaagaaccctgccaagtactacaccttatttggtcgcagctactgagg

SEQ ID NO: 67443 - DNA, 201 bp, Homo sapiens
gaaacagaccaggttgggtcttgaggcaaaaaaagaagaaaatcttgctgattggtattctcaggtcatcacaaagtcagaaatgattgaataccatgacrtaagtggctgttatattcttcgtccctgggcctatgccatttgggaagccatcaaggacttttttgatgctgagatcaagaaacttggtgttgaaaactg

SEQ ID NO: 67444 - DNA, 201 bp, Homo sapiens
gcaagaaccctgccaagtactacaccttatttggtcgcagctactgagggatgaacgaaagccccctcttcaactcctctcactttttaaagcattgataytagtatcttctcagatacagaccgttttatgattttttaaaaagtaaaagttctaaaatgaagtcacacaggacaattattcttatgcctaagttaacag

SEQ ID NO: 67445 - DNA, 201 bp, Homo sapiens
tcattgcctgtctctgagaacatacttagttggaaactccttgagtttagcagatttatgtgtttgggccaccctaaaaggaaatgctgcctggcaagaayagttgaaacagaagaaagctccagttcatgtaaaacgttggtttggctttcttgaagcccagcaggccttccagtcagtaggtaccaagtgggatgtttc

SEQ ID NO: 67446 - DNA, 201 bp, Homo sapiens
cttgggttacaagatctggcaaaaccgagctggcagaaccaattgccattcgtcctactagtgaaacagtaatgtatcctgcatatgcaaaatgggtacartcacacagagacctgcccatcaagctcaatcagtggtgcaatgtggtgcgttgggaattcaagcatcctcagcctttcctacgtactcgtgaatttcttt

SEQ ID NO: 67447 - DNA, 201 bp, Homo sapiens; identical to SEQ ID NO: 67429

SEQ ID NO: 67448 - DNA, 201 bp, Homo sapiens; identical to SEQ ID NO: 67430

SEQ ID NO: 67449 - DNA, 201 bp, Homo sapiens; identical to SEQ ID NO: 67431

SEQ ID NO: 67450 - DNA, 201 bp, Homo sapiens; identical to SEQ ID NO: 67433

SEQ ID NO: 67451 - DNA, 201 bp, Homo sapiens; identical to SEQ ID NO: 67432

SEQ ID NO: 67452 - DNA, 201 bp, Homo sapiens; identical to SEQ ID NO: 67434

SEQ ID NO: 67453 - DNA, 201 bp, Homo sapiens; identical to SEQ ID NO: 67436

SEQ ID NO: 67454 - DNA, 201 bp, Homo sapiens; identical to SEQ ID NO: 67435

SEQ ID NO: 67455 - DNA, 201 bp, Homo sapiens; identical to SEQ ID NO: 67437

SEQ ID NO: 67456 - DNA, 201 bp, Homo sapiens; identical to SEQ ID NO: 67438

SEQ ID NO: 67457 - DNA, 201 bp, Homo sapiens; identical to SEQ ID NO: 67439

SEQ ID NO: 67458 - DNA, 201 bp, Homo sapiens; identical to SEQ ID NO: 67440

SEQ ID NO: 67459 - DNA, 201 bp, Homo sapiens; identical to SEQ ID NO: 67441

SEQ ID NO: 67460 - DNA, 201 bp, Homo sapiens; identical to SEQ ID NO: 67442

SEQ ID NO: 67461 - DNA, 201 bp, Homo sapiens; identical to SEQ ID NO: 67443

SEQ ID NO: 67462 - DNA, 201 bp, Homo sapiens; identical to SEQ ID NO: 67444

SEQ ID NO: 67463 - DNA, 201 bp, Homo sapiens; identical to SEQ ID NO: 67445

SEQ ID NO: 67464 - DNA, 201 bp, Homo sapiens; identical to SEQ ID NO: 67446

SEQ ID NO: 67465 - DNA, 201 bp, Homo sapiens
cggactggtggagatggcgacgctctctctgaccgtgaattcaggagaccctccgctagtttcgctgtgtcattcaggcaggaacgcagtggtgcaatcakggctcactgcggccatgacttcccaggctcaagcagtcctgccacctcagccccctgggtagctgggaccacaggagctttgctggcagtagaacacgtg

SEQ ID NO: 67466 - DNA, 201 bp, Homo sapiens
tccagaactcccaggtggcagcccagtgtgggatttggagcatgacaacaaaggcattttctcaacatttactaaaggagagtggggtgttctatacgctrctgatggggactgtacatgaacacatttaaattgaattacaacaacattttagataggaaatatagaatcttataagaacataatctaaattataaccaa

SEQ ID NO: 67467 - DNA, 201 bp, Homo sapiens
ataggaaagaaagccaagatttaggtaatgagtggatgagtaaatggtggaggatgggagtcaaaatcagaattatagaagaagtatttcctgtaactatrgaaagaattatgtatatatacatgcagaaatatatatgtgtgtgtgtatctgtggatggatatatgtatatctcttcctatatatatccatagtggactt

SEQ ID NO: 67468 - DNA, 201 bp, Homo sapiens
tgatggcttctgagtcaactttactggctcaggaaccacgagagatgactgcagatgtaatcgagcttaaagggaaattcctcatcaacttagaaggtggkgatattcgtgaagagtcttcctataaagtaattgtcatgccgactacgaaagaaaaatgcccccgttgttggaagtatacagcggagtcttcagatacac

SEQ ID NO: 67469 - DNA, 201 bp, Homo sapiens
  misc_feature (1)...(201): n = A,T,C or G
taagactgcagccaaggaattgttaaaaaaggtgaaatttattcctggatcagcactgaatggcatggttgaaatgatggacaggcggccatattggtgtntatcaaggcaaagagtttggggtgttccaattcctgtgtttcatcataagaccaaggatgaatacttgatcaacagccaaaccactgagcatattgttaa

SEQ ID NO: 67470 - DNA, 201 bp, Homo sapiens
ggagtcttcagatacactgtgtcctcgatgtgcagaagttgtcagtggaaaatagtattaacagctcactcgagcaagaaccctcctgacagtactggctrgaagtttggatggattatttacaatataggaaagaaagccaagatttaggtaatgagtggatgagtaaatggtggaggatgggagtcaaaatcagaatta

SEQ ID NO: 67471 - DNA, 201 bp, Homo sapiens
taatgatggcttctgagtcaactttactggctcaggaaccacgagagatgactgcagatgtaatcgagcttaaagggaaattcctcatcaacttagaaggkggtgatattcgtgaagagtcttcctataaagtaattgtcatgccgactacgaaagaaaaatgcccccgttgttggaagtatacagcggagtcttcagata

SEQ ID NO: 67472 - DNA, 201 bp, Homo sapiens
gtcctgccccttcaagctggggcgggagcggaggaccccgctctcaggggttgccggaccatgcgttgggggctgcgccctcgcgggccgggcgcggccgycctggccactgcccgaagtttgtgggggacgccccgccttccctgcagcccgggatggcaaggggcgacgaagaggcttctggtgcggtcggtctccggg

SEQ ID NO: 67473 - DNA, 201 bp, Homo sapiens
tctctgataatgacttggctctgttactaaggcttgatgaaaaagaactgcttaagctccaggcattactagagaaatataagcaagagaacaccaggacraatgttcgattttctgatgataaagatggtgtgttgcctgtaaaaacattcttggaatatttagaatatgaaaaggatgtgctcaacataaagaaaataa

SEQ ID NO: 67474 - DNA, 201 bp, Homo sapiens
aatacgttcttagttaaaagattttctgctgctacatacttaatggataaggttggaaaatcaccaaaagataggttatgccgaagggatgtgggaatgastgacacagcaatgacatctttcctcggctcctgtttggatcttcttcagatcttaatggaggcagatgttagcagggatgaaatacaggtgcctgtgctg

SEQ ID NO: 67475 - DNA, 201 bp, Homo sapiens
ttggttataatttagattatgttcttataagattctatatttcctatctaaaatgttgttgtaattcaatttaaatgtgttcatgtacagtccccatcagyagcgtatagaacaccccactctcctttagtaaatgttgagaaaatgcctttgttgtcatgctccaaatcccacactgggctgccacctgggagttctgga

SEQ ID NO: 67476 - DNA, 201 bp, Homo sapiens
tctccgtggaaggaccaatctccatagtggaactggcccttgaacagaagcacatccactacccactggtggagcaccactccatcctgtgctccatcttrtatgcagtcatgaggttttctctgaagaccgtgaagccactttcactttttgacagtaagggaaaaaatgcatttttcaaagacctaacttcaattcagt

SEQ ID NO: 67477 - DNA, 201 bp, Homo sapiens
tcagtctgagaacaatggagccgctctgttgtctgcgcatgttgggcattctgttgctgcacagatatcaaacaacatgacagagaaaaaattttcccaarcagttttgggtgctgattcagaggccctcactgattcctgggaggcactttctcttgacactgagtactggaaactccttctgaaacagctggaggattg

SEQ ID NO: 67478 - DNA, 201 bp, Homo sapiens
aaagaccaagattggccagctctagctgtggatttagcccatcaccttcaagttagtgaagatgttgttagaaggcattatgtgggggaactatacaactrtggagttgaccacttaggagaagaggccattctacaggttcatgacaaagaggtccttgcctctcagctgctggtgctcacggggcaaaggctggctcat

SEQ ID NO: 67479 - DNA, 201 bp, Homo sapiens; identical to SEQ ID NO: 67473

SEQ ID NO: 67480 - DNA, 201 bp, Homo sapiens; identical to SEQ ID NO: 67474

SEQ ID NO: 67481 - DNA, 201 bp, Homo sapiens; identical to SEQ ID NO: 67475

SEQ ID NO: 67482 - DNA, 201 bp, Homo sapiens; identical to SEQ ID NO: 67476

SEQ ID NO: 67483 - DNA, 201 bp, Homo sapiens; identical to SEQ ID NO: 67477

SEQ ID NO: 67484 - DNA, 201 bp, Homo sapiens; identical to SEQ ID NO: 67478

SEQ ID NO: 67485 - DNA, 201 bp, Homo sapiens
cggtgggagaccatgcaagcaagcagatggttaaatttgctgccaacatcaacaaagagagcattgtggatgtagaaggtgttgtgagaaaagtgaatcasaaaattggaagctgtacacagcaagacgttgagttacatgttcagaagatttatgtgatcagtttggctgaaccccgtctgcccctgcagctggatgatg

SEQ ID NO: 67486 - DNA, 201 bp, Homo sapiens
tattgtcaggagctcaaagaatacatgatcctcaactgctaacagagagagctttacatcatggaattgatttggagaaaattaaggcttacattgattcyttccgctttggagcccctcctcatgctggtggaggcattggattggaacgagttactatgctgtttctgggattgcataatgttcgtcagacctccatgt

SEQ ID NO: 67487 - DNA, 190 bp, Homo sapiens
ccgggatctcgagatagccgcagctctcgcgatctttctggagccgcacctccacgcggagtccgagcgcgtgtgctgagaccccagggycgggagggcggagactgggagggagggagaagcccctttggcctgccttacggaagcctgcgagggagggtggtgtccactgcccagttccgtgtcccga

SEQ ID NO: 67488 - DNA, 201 bp, Homo sapiens
aatatccattggctgtaagacctttctataccatgcctgacccaagaaatcccaaacagtccaactcttacgatatgttcatgagaggagaagaaatattktcaggagctcaaagaatacatgatcctcaactgctaacagagagagctttacatcatggaattgatttggagaaaattaaggcttacattgattccttcc

SEQ ID NO: 67489 - DNA, 185 bp, Homo sapiens
ccgggatctcgagatagccgcagctctcgcgatctttctggagccgcacctccacgcggagtccgagcgcgtgtgctgagacccsagggtcgggagggcggagactgggagggagggagaagcccctttggcctgccttacggaagcctgcgagggagggtggtgtccactgcccagttccgtgt

SEQ ID NO: 67490 - DNA, 156 bp, Homo sapiens
ccgggatctcgagatagccgcagctctcgcgatctttctggagccgcacctccacrcggagtccgagcgcgtgtgctgagaccccagggtcgggagggcggagactgggagggagggagaagcccctttggcctgccttacggaagcctgcgaggg

SEQ ID NO: 67491 - DNA, 201 bp, Homo sapiens
acgttaagagttttaaacagttaagattgtacaatttttcttcttttctatattacaagggccccagtgttaatgtcttagattttcagtatttgaacttwtttttttaaattctgtcattgagataagaataattcaggtagcatctgaaattttaatgaatgtataattggcatatcatggaaaattaaccagaaagta

SEQ ID NO: 67492 - DNA, 201 bp, Homo sapiens; identical to SEQ ID NO: 67485

SEQ ID NO: 67493 - DNA, 201 bp, Homo sapiens
tgaaattttaatgaatgtataattggcatatcatggaaaattaaccagaaagtatcagttcttaaaagttatgcctagaaattatgtaaagctaaactacyggttagaaagtattcagtgtaatattgtattaatttgttaaattctaaacttgaatttcaataaaattttaaagctaattgtagtttttgtgtaactttg

SEQ ID NO: 67494 - DNA, 201 bp, Homo sapiens; identical to SEQ ID NO: 67486

SEQ ID NO: 67495 - DNA, 201 bp, Homo sapiens; identical to SEQ ID NO: 67488

SEQ ID NO: 67496 - DNA, 201 bp, Homo sapiens; identical to SEQ ID NO: 67491

SEQ ID NO: 67497 - DNA, 201 bp, Homo sapiens; identical to SEQ ID NO: 67485

SEQ ID NO: 67498 - DNA, 201 bp, Homo sapiens; identical to SEQ ID NO: 67493

SEQ ID NO: 67499 - DNA, 201 bp, Homo sapiens; identical to SEQ ID NO: 67486

SEQ ID NO: 67500 - DNA, 201 bp, Homo sapiens; identical to SEQ ID NO: 67488

SEQ ID NO: 67501 - DNA, 201 bp, Homo sapiens; identical to SEQ ID NO: 67491

SEQ ID NO: 67502 - DNA, 201 bp, Homo sapiens; identical to SEQ ID NO: 67485

SEQ ID NO: 67503 - DNA, 201 bp, Homo sapiens; identical to SEQ ID NO: 67493

SEQ ID NO: 67504 - DNA, 201 bp, Homo sapiens; identical to SEQ ID NO: 67486

SEQ ID NO: 67505 - DNA, 201 bp, Homo sapiens; identical to SEQ ID NO: 67488

SEQ ID NO: 67506 - DNA, 185 bp, Homo sapiens; identical to SEQ ID NO: 67489

SEQ ID NO: 67507 - DNA, 201 bp, Homo sapiens; identical to SEQ ID NO: 67491

SEQ ID NO: 67508 - DNA, 190 bp, Homo sapiens; identical to SEQ ID NO: 67487

SEQ ID NO: 67509 - DNA, 156 bp, Homo sapiens; identical to SEQ ID NO: 67490

SEQ ID NO: 67510 - DNA, 201 bp, Homo sapiens
gtggtgttgatggatatgagacagaaggcattcgaggactccgggcccttggtgttagggacctttcttataggctggtctttcttgcctgctgtgttgcrccaaccaacccaaggtttggggggaaagagctcagagatgaggaacagacagctgagagcattaagaaccaaatgactgtgaaagaatgggagaaagtgt

SEQ ID NO: 67511 - DNA, 201 bp, Homo sapiens
ctataaccaatacctttgttttcatgtgtaagaaaaggcccattacttttaaggtatgtgctgtcctattgagcaaataactttttttcaattgccagctwctgcttttattcatcaaaataaaataacttgttctgaagttgtctattggatttctttctactgtaccctgattattacttccatctacttctgaatgtg

SEQ ID NO: 67512 - DNA, 201 bp, Homo sapiens
aactgtggtattatggatgaggtttctatgagaaggagtcattagagaactcatatgaaagctagaggccttagagatgactttccaaggttaattccagttgtttttttttttttttaagtttataaaagtttattatacttttttaaaattactctttagtaatttattttacttctgtgtcctaagggtaatttctca

SEQ ID NO: 67513 - DNA, 157 bp, Homo sapiens
cgcgcgcaaagctgcagcgtctggaaaaaagcgacttgtggcggtcgagcgtggcgyaggcgaatcctcggcactaagcaaatatggacctcgcggcggcagcggagccgggcgccggcagccagcacctggaggtccgcgacgaggtggccgagaa

SEQ ID NO: 67514 - DNA, 201 bp, Homo sapiens
ctgtggtattatggatgaggtttctatgagaaggagtcattagagaactcatatgaaagctagaggccttagagatgactttccaaggttaattccagttgtttttttttttttttaagtttataaaagtttattatacttttttaaaattactctttagtaatttattttacttctgtgtcctaagggtaatttctcagg

SEQ ID NO: 67515 - DNA, 201 bp, Homo sapiens
acactatgatcatgttctaattgagctcacccaggctggattgaaaggctccacagagggaagtgagagctatgaagaagatccctacttggtagttaacmctaactacttgctcgaagattgagatagtgaaagtaactgaccagagctgaggaactgtggcacagcacctcgtggcctggagcctggctggagctctgc

SEQ ID NO: 67516 - DNA, 201 bp, Homo sapiens
ctttgatgttggctgataatggtgtgtgttgtattgatgaatttgataagatggacgtgcgggatcaagttgctattcatgaagctatggaacagcagacyatatccatcactaaagcaggagtgaaggctactctgaacgcccggacgtccattttggcagcagcaaacccaatcagtggacactatgacagatcaaaat

SEQ ID NO: 67517 - DNA, 201 bp, Homo sapiens
aaagttattaccgtttatgatactaacagttcctgagacttagctatgatcagtatgttcatgaggtggagcagttcctgtgttgcagcttttaacaacasatggcattcattaaatcacaaagtatgttaaaggtcacaaaagcaaaataactgtctgaggctaaggcccacgtgggacagtctaatacccatgagtact

SEQ ID NO: 67518 - DNA, 201 bp, Homo sapiens
aggtatgtgctgtcctattgagcaaataactttttttcaattgccagctactgcttttattcatcaaaataaaataacttgttctgaagttgtctattggrtttctttctactgtaccctgattattacttccatctacttctgaatgtgagactttccctttttgcttaacctggagtgaagaggtagaactgtggtatt

SEQ ID NO: 67519 - DNA, 201 bp, Homo sapiens
tcccccgcagtttagaagtaattttaagggctgaagctgtggaatcagctcaagctggtgacaagtgtgactttacagggacactgattgttgtgcctgaygtctccaagcttagcacaccaggagcacgtgcagaaactaattcccgtgtcagtggtgttgatggatatgagacagaaggcattcgaggactccgggccc

SEQ ID NO: 67520 - DNA, 201 bp, Homo sapiens
ccagtgaagttggaaccaaataatgtgtagtctctataaccaatacctttgttttcatgtgtaagaaaaggcccattacttttaaggtatgtgctgtcctmttgagcaaataactttttttcaattgccagctactgcttttattcatcaaaataaaataacttgttctgaagttgtctattggatttctttctactgtac

SEQ ID NO: 67521 - DNA, 201 bp, Homo sapiens
gttgtctattggatttctttctactgtaccctgattattacttccatctacttctgaatgtgagactttccctttttgcttaacctggagtgaagaggtakaactgtggtattatggatgaggtttctatgagaaggagtcattagagaactcatatgaaagctagaggccttagagatgactttccaaggttaattccag

SEQ ID NO: 67522 - DNA, 201 bp, Homo sapiens
ctcgaagattgagatagtgaaagtaactgaccagagctgaggaactgtggcacagcacctcgtggcctggagcctggctggagctctgctagggacagaartgtttctggaagtgatgcttccaggatttgttttcagaaacaagaattgagttgatggtcctatgtgtcacattcatcacaggtttcataccaacacagg

SEQ ID NO: 67523 - DNA, 143 bp, Homo sapiens
cgcgcgcaaagctgcagcgtctggaaaaaagcgacttgtggcrgtcgagcgtggcgcaggcgaatcctcggcactaagcaaatatggacctcgcggcggcagcggagccgggcgccggcagccagcacctggaggtccgcgac

SEQ ID NO: 67524 - DNA, 201 bp, Homo sapiens
atgaagaagatccctacttggtagttaaccctaactacttgctcgaagattgagatagtgaaagtaactgaccagagctgaggaactgtggcacagcaccycgtggcctggagcctggctggagctctgctagggacagaagtgtttctggaagtgatgcttccaggatttgttttcagaaacaagaattgagttgatggt

SEQ ID NO: 67525 - DNA, 201 bp, Homo sapiens
gacctcgcggcggcagcggagccgggcgccggcagccagcacctggaggtccgcgacgaggtggccgagaagtgccagaaactgttcctggacttcttggwggagtttcagagcagcgatggagaaattaaatacttgcaattagcagaggaactgattcgtcctgagagaaacacattggttgtgagttttgtggacctg

SEQ ID NO: 67526 - DNA, 201 bp, Homo sapiens
cactcccttctgccccttttttgtctctgaaatttgcactacgtcttggacgggaatcactggggcagagggcgcctgaagtagggtcccgcccccccccmccccattcagacacatggatgttgggtctctgtgcggacggtgacaatgtttacaagcaccacatttacacatccacacacgcacacgggcactcgcgag

SEQ ID NO: 67527 - DNA, 201 bp, Homo sapiens
cagaggccgggctggccgagcgactgtgcgaggagagccccaccttcgcctacaacctctcccgcaagacccacatcctcatcctggccaccacgcgcagyggctcctccttcgtgggccagctcttcaaccagcacctggacgtcttctacctgtttgagcccctctaccacgtccagaacacgctcatcccccgcttca

SEQ ID NO: 67528 - DNA, 201 bp, Homo sapiens
aggatggagccggcgctgggcgctgcagctgctcccggcgcgtccccgaccagactctatgaggtgcatcgaggtcaggaatgctccctggtccactttcrctttgagtttcaggtagctggtgtcacttcggtgtggttggaagaagactttctccccagctgcattcccggaggcgccctttcgacctggaggccgggt

SEQ ID NO: 67529 - DNA, 201 bp, Homo sapiens
tggcccagctgggctacaagatcgccgcctcggaggaggagctgaagaacccctcggtcagcctggtggaggagcgggacttccgccccttctcgtgaccygggcggtgcgggtgggggcgggaggcgcaaggtgtcggttttgataaaatggaccgtttttaactgttgccttattaacccctccctctcccacctcatc

SEQ ID NO: 67530 - DNA, 201 bp, Homo sapiens
aaccctatgaagaagaccgaggagatctacgggttcctgggcatcccgctggacagccacgtggcccgctggatccagaacaacacgcggggcgaccccaycctgggcaagcacaaatacggcaccgtgcgaaactcggcggccacggccgagaagtggcgcttccgcctctcctacgacatcgtggcctttgcccagaac

SEQ ID NO: 67531 - DNA, 201 bp, Homo sapiens
ccactcccttctgccccttttttgtctctgaaatttgcactacgtcttggacgggaatcactggggcagagggcgcctgaagtagggtcccgccccccccmcccccattcagacacatggatgttgggtctctgtgcggacggtgacaatgtttacaagcaccacatttacacatccacacacgcacacgggcactcgcga

SEQ ID NO: 67532 - DNA, 201 bp, Homo sapiens
aggtgctggcccagctgggctacaagatcgccgcctcggaggaggagctgaagaacccctcggtcagcctggtggaggagcgggacttccgccccttctcstgacccgggcggtgcgggtgggggcgggaggcgcaaggtgtcggttttgataaaatggaccgtttttaactgttgccttattaacccctccctctcccac

SEQ ID NO: 67533 - DNA, 201 bp, Homo sapiens; identical to SEQ ID NO: 67526

SEQ ID NO: 67534 - DNA, 201 bp, Homo sapiens; identical to SEQ ID NO: 67527

SEQ ID NO: 67535 - DNA, 201 bp, Homo sapiens; identical to SEQ ID NO: 67529

SEQ ID NO: 67536 - DNA, 201 bp, Homo sapiens; identical to SEQ ID NO: 67530

SEQ ID NO: 67537 - DNA, 201 bp, Homo sapiens; identical to SEQ ID NO: 67531

SEQ ID NO: 67538 - DNA, 201 bp, Homo sapiens; identical to SEQ ID NO: 67532

SEQ ID NO: 67539 - DNA, 201 bp, Homo sapiens
gctatcccagtagctgagctccaaggactcaggcagagggactcagggatggggactgccaggggcagttggcaaaagtccaagtagagattacacccagmacaccattccttccaggagcagtaggtgggaggtttgacccagagaagccaatccttgcattccaggagtggcctgtgcctcccacctcttccttcccac

SEQ ID NO: 67540 - DNA, 201 bp, Homo sapiens
tgagctccaaggactcaggcagagggactcagggatggggactgccaggggcagttggcaaaagtccaagtagagattacacccagcacaccattccttcyaggagcagtaggtgggaggtttgacccagagaagccaatccttgcattccaggagtggcctgtgcctcccacctcttccttcccactgccaaaggcctgt

SEQ ID NO: 67541 - DNA, 201 bp, Homo sapiens
actgaggcaggagggctggatccaccacctggcccggcatgccgtggcctgcttcctgacccgcggggacctctgggtcagctgggagagcggggtccggrtatttgatgagctgctcctggatgcagatttcagcgtgaacgcaggcagctggatgtggctgtcctgcagtgctttcttccagcagttcttccactgcta

SEQ ID NO: 67542 - DNA, 201 bp, Homo sapiens
atttgggcaactcctatggcgagagttcttctacacggcagctaccaacaaccccaggtttgaccgcatggaggggaaccccatctgcatccagatcccckgggaccgcaatcctgaggccctggccaagtgggctgagggcaagacaggcttcccttggattgatgccatcatgacccaactgaggcaggagggctggat

SEQ ID NO: 67543 - DNA, 154 bp, Homo sapiens
gcctcaaatcctgacccaagggccagcatggggaagagatggttgcaggcaaaatgcactttatagagattttctattgctgggaaggtgtgtttctcccmcaatttgtttgtgaatattcacttgttttataaatgtctgacctgtcttgagt

SEQ ID NO: 67544 - DNA, 119 bp, Homo sapiens
tcgcctaccggggcggagmgggggtggctggagcagtctggacagtcatggcggcgactgtggcgacggcggcagctgtggccccggcgccagcgcccggcacggacagcgcctcttcg

SEQ ID NO: 67545 - DNA, 201 bp, Homo sapiens
ctctggcccgcctggataagcacttggaacggaaggcctgggttgccaactatgagagaccccgaatgaacgccaactccctcctggccagccccacaggyctcagcccctacctgcgctttggttgtctctcctgccgcctcttctactaccgcctgtgggacctgtataaaaaggtgaagcggaacagcacacctcccc

SEQ ID NO: 67546 - DNA, 201 bp, Homo sapiens
tgggcaactcctatggcgagagttcttctacacggcagctaccaacaaccccaggtttgaccgcatggaggggaaccccatctgcatccagatcccctggkaccgcaatcctgaggccctggccaagtgggctgagggcaagacaggcttcccttggattgatgccatcatgacccaactgaggcaggagggctggatcca

SEQ ID NO: 67547 - DNA, 201 bp, Homo sapiens
tagcagcgccttcgggtagcaggatgattccttttcctgcctgtctgctgctggctctcttccctaaggtacaggttggcaggaccacctccgcctacttytccaccatccctagcatgccagcccgttcccagatcaacctgccagtggagtcaggcagtgcactcctggagccaagagggaagggcagggtagagaggg

SEQ ID NO: 67548 - DNA, 201 bp, Homo sapiens
ccacctccgcctacttctccaccatccctagcatgccagcccgttcccagatcaacctgccagtggagtcaggcagtgcactcctggagccaagagggaakggcagggtagagagggtatgtccagtagcctggagctccatggtggcttcatgcctcccttctcccagctcaggtggccctgagggctccctcggaacag

SEQ ID NO: 67549 - DNA, 201 bp, Homo sapiens; identical to SEQ ID NO: 67539

SEQ ID NO: 67550 - DNA, 201 bp, Homo sapiens
tagcatgccagcccgttcccagatcaacctgccagtggagtcaggcagtgcactcctggagccaagagggaagggcagggtagagagggtatgtccagtascctggagctccatggtggcttcatgcctcccttctcccagctcaggtggccctgagggctccctcggaacagtgcctcaaatcctgacccaagggccagc

SEQ ID NO: 67551 - DNA, 201 bp, Homo sapiens; identical to SEQ ID NO: 67540

SEQ ID NO: 67552 - DNA, 201 bp, Homo sapiens; identical to SEQ ID NO: 67541

SEQ ID NO: 67553 - DNA, 201 bp, Homo sapiens; identical to SEQ ID NO: 67542

SEQ ID NO: 67554 - DNA, 201 bp, Homo sapiens
caggatgattccttttcctgcctgtctgctgctggctctcttccctaaggtacaggttggcaggaccacctccgcctacttctccaccatccctagcatgycagcccgttcccagatcaacctgccagtggagtcaggcagtgcactcctggagccaagagggaagggcagggtagagagggtatgtccagtagcctggag

SEQ ID NO: 67555 - DNA, 119 bp, Homo sapiens; identical to SEQ ID NO: 67544

SEQ ID NO: 67556 - DNA, 201 bp, Homo sapiens; identical to SEQ ID NO: 67545

SEQ ID NO: 67557 - DNA, 158 bp, Homo sapiens
gcctcaaatcctgacccaagggccagcatggggaagagatggttgcaggcaaaatgcactttatagagattttctattgctgggaaggtgtgtttctcccmcaatttgtttgtgaatattcacttgttttataaatgtctgacctgtcttgagtaagt

SEQ ID NO: 67558 - DNA, 201 bp, Homo sapiens; identical to SEQ ID NO: 67546

SEQ ID NO: 67559 - DNA, 201 bp, Homo sapiens
accctgcgctaccgcttcagcttcccccattccaaggtggagctgttggccttgctggatgcgggcactctctacaccttcaggtaccacgagtggccccraggccacgcacccacagactatgcccgctggcgggaggctcaggccccgtaccgtgtgcaatgggcggccaactatgaaccctacgtggtggtgccacga

SEQ ID NO: 67560 - DNA, 201 bp, Homo sapiens
ccctgcgctaccgcttcagcttcccccattccaaggtggagctgttggccttgctggatgcgggcactctctacaccttcaggtaccacgagtggccccgmggccacgcacccacagactatgcccgctggcgggaggctcaggccccgtaccgtgtgcaatgggcggccaactatgaaccctacgtggtggtgccacgag

SEQ ID NO: 67561 - DNA, 201 bp, Homo sapiens
acttcctgcctgcctattctctctacgactacctcagggcctccattgagcagctggggctgggcagccggcgcaaggcagcactggtggtgccggcattygagaccctgcgctaccgcttcagcttcccccattccaaggtggagctgttggccttgctggatgcgggcactctctacaccttcaggtaccacgagtggc

SEQ ID NO: 67562 - DNA, 201 bp, Homo sapiens
atttcgtcgaggcctcaccagtgcttgctgcccggcaggacgtggcctaccatgtggtgtaccgtgaggggcccctataccccgtcaaccagcttcgcaaygtggccttggcccaggccctcacgccttacgtcttcctcagtgacattgacttcctgcctgcctattctctctacgactacctcagggcctccattgagc

SEQ ID NO: 67563 - DNA, 201 bp, Homo sapiens
cattgtggagctggatgcccaggaatatgagctcctggtgctgcccgaggccttcaccatccatctgccccacgctccaagcctggacatctcccgcttcygctccagccccacctatcgtgactgcctccaggccctcaaggacgaattccaccaggacttgtcccgccaccatggggctgctgccctcaaatacctccc

SEQ ID NO: 67564 - DNA, 201 bp, Homo sapiens
cacgagactgtccccgctatgatcctcgctttgtgggcttcggctggaacaaagtggcccacattgtggagctggatgcccaggaatatgagctcctggtrctgcccgaggccttcaccatccatctgccccacgctccaagcctggacatctcccgcttccgctccagccccacctatcgtgactgcctccaggccctca

SEQ ID NO: 67565 - DNA, 174 bp, Homo sapiens
tgccttgtttcatggcagtgaaatgcctcttggtcctgtccaagtgtatctttcactgatttctgaatcatgttctagttgcttgaccctgccacatgggyccagtgttcatctgagcataactgtactaaatcctttttccatatcagtataataaaggagtgatgtgcaata

SEQ ID NO: 67566 - DNA, 135 bp, Homo sapiens
ccaagtgtatctttcactgatttctgaatcatgttctagttgcttgaccctgccacatgggtccagtgttcatctgagcataactgtactaaatccttttwccatatcagtataataaaggagtgatgtgcaata

SEQ ID NO: 67567 - DNA, 201 bp, Homo sapiens
cagcggctggtacgacgccgacctgagcccggcgggccacgaggaggcgaagcgcggcgggcaggcgctacgagatgctggctatgagtttgacatctgcytcacctcagtgaagatctggaggcgctcctatgatgtcccaccacctccgatggagcccgaccatcctttctacagcaacatcagtaaggatcgcaggta

SEQ ID NO: 67568 - DNA, 173 bp, Homo sapiens
tgccttgtttcatggcagtgaaatgcctcttggtcctgtccaagtgtatctttcactgatttctgaatcatgttctagttgcttgaccctgccacatgggyccagtgttcatctgagcataactgtactaaatcctttttccatatcagtataataaaggagtgatgtgcaat

SEQ ID NO: 67569 - DNA, 134 bp, Homo sapiens
ccaagtgtatctttcactgatttctgaatcatgttctagttgcttgaccctgccacatgggtccagtgttcatctgagcataactgtactaaatccttttwccatatcagtataataaaggagtgatgtgcaat

SEQ ID NO: 67570 - DNA, 201 bp, Homo sapiens
agaaccgcttcagcggctggtacgacgccgacctgagcccggcgggccacgaggaggcgaagcgcggcgggcagatgctggctatgagtttgacatctgcytcacctcagtgcagaagagagcgatccggaccctctggacagtgctagatgccattgatcagatgtggctgccagtggtgaggacttggcgcctcaatga

SEQ ID NO: 67571 - DNA, 169 bp, Homo sapiens
tgccttgtttcatggcagtgaaatgcctcttggtcctgtccaagtgtatctttcactgatttctgaatcatgttctagttgcttgaccctgccacatgggyccagtgttcatctgagcataactgtactaaatcctttttccatatcagtataataaaggagtgatgtg

SEQ ID NO: 67572 - DNA, 130 bp, Homo sapiens
ccaagtgtatctttcactgatttctgaatcatgttctagttgcttgaccctgccacatgggtccagtgttcatctgagcataactgtactaaatccttttwccatatcagtataataaaggagtgatgtg

SEQ ID NO: 67573 - DNA, 169 bp, Homo sapiens; identical to SEQ ID NO: 67571

SEQ ID NO: 67574 - DNA, 130 bp, Homo sapiens; identical to SEQ ID NO: 67572

SEQ ID NO: 67575 - DNA, 201 bp, Homo sapiens; identical to SEQ ID NO: 67570

SEQ ID NO: 67576 - DNA, 201 bp, Homo sapiens
cagcggctggtacgacgccgacctgagcccggcgggccacgaggaggcgaagcgcggcgggcaggcgctacgagatgctggctatgagtttgacatctgcytcacctcagtgcagaagagagcgatccggaccctctggacagtgctagatgccattgatcagatgtggctgccagtggtgaggacttggcgcctcaatga

SEQ ID NO: 67577 - DNA, 180 bp, Homo sapiens
gccgagctgctccggagcagcgcggcagccagcgaattggggccgcccccacaacccgccgcccgccgcccgccgccctccgccctccgccctccgccctccgccctccgccctccgccctccgccctccgccctccgccctccgccctccgccctccgcgtgcttacgtgcgctccgtg

SEQ ID NO: 67578 - DNA, 171 bp, Homo sapiens
gccgagctgctccggagcagcgcggcagccagcgaattggggccgcccccacaacccgccgcccgccgccygccgccctccgccctccgccctccgccctccgccctccgccctccgccctccgccctccgccctccgccctccgccctccgccctccgcgtgcttacgtg

SEQ ID NO: 67579 - DNA, 165 bp, Homo sapiens
gccgagctgctccggagcagcgcggcagccagcgaattggggccgcccccacaacccgccgccckccgcccgccgccctccgccctccgccctccgccctccgccctccgccctccgccctccgccctccgccctccgccctccgccctccgccctccgcgtgct

SEQ ID NO: 67580 - DNA, 175 bp, Homo sapiens
tgccttgtttcatggcagtgaaatgcctcttggtcctgtccaagtgtatctttcactgatttctgaatcatgttctagttgcttgaccctgccacatgggyccagtgttcatctgagcataactgtactaaatcctttttccatatcagtataataaaggagtgatgtgcaatag

SEQ ID NO: 67581 - DNA, 136 bp, Homo sapiens
ccaagtgtatctttcactgatttctgaatcatgttctagttgcttgaccctgccacatgggtccagtgttcatctgagcataactgtactaaatccttttwccatatcagtataataaaggagtgatgtgcaatag

SEQ ID NO: 67582 - DNA, 193 bp, Homo sapiens
gccgagctgctccggagcagcgcggcagccagcgaattggggccgcccccacaacccgccgcccgccgcccgccgccctccgccctccgccckccgccctccgccctccgccctccgccctccgccctccgccctccgccctccgccctccgccctccgcgtgcttacgtgcgctccgtgactgcggcgaccg

SEQ ID NO: 67583 - DNA, 186 bp, Homo sapiens
gccgagctgctccggagcagcgcggcagccagcgaattggggccgcccccacaacccgccgcccgccgcccgccgccctccgccckccgccctccgccctccgccctccgccctccgccctccgccctccgccctccgccctccgccctccgccctccgcgtgcttacgtgcgctccgtgactgcg

SEQ ID NO: 67584 - DNA, 185 bp, Homo sapiens
gccgagctgctccggagcagcgcggcagccagcgaattggggccgcccccacaacccgccgcccgccgcccgccgccctccgccctccgccctccgccctccgccctccgccctccgccctccgccctccgccctccgccctccgccctccgccctccgcgtgcttacgtgcgctccgtgactgc

SEQ ID NO: 67585 - DNA, 181 bp, Homo sapiens
gccgagctgctccggagcagcgcggcagccagcgaattggggccgcccccacaacccgccgcccgccgcccgccgccctccgccctccgccctccgccctccgccctccgccctccgccctccgccctccgccctccgccctccgccctccgccctccgcgtgcttacgtgcgctccgtga

SEQ ID NO: 67586 - DNA, 201 bp, Homo sapiens; identical to SEQ ID NO: 67576

SEQ ID NO: 67587 - DNA, 180 bp, Homo sapiens; identical to SEQ ID NO: 67577

SEQ ID NO: 67588 - DNA, 171 bp, Homo sapiens; identical to SEQ ID NO: 67578

SEQ ID NO: 67589 - DNA, 165 bp, Homo sapiens; identical to SEQ ID NO: 67579

SEQ ID NO: 67590 - DNA, 174 bp, Homo sapiens; identical to SEQ ID NO: 67565

SEQ ID NO: 67591 - DNA, 135 bp, Homo sapiens; identical to SEQ ID NO: 67566

SEQ ID NO: 67592 - DNA, 193 bp, Homo sapiens; identical to SEQ ID NO: 67582

SEQ ID NO: 67593 - DNA, 186 bp, Homo sapiens; identical to SEQ ID NO: 67583

SEQ ID NO: 67594 - DNA, 185 bp, Homo sapiens; identical to SEQ ID NO: 67584

SEQ ID NO: 67595 - DNA, 181 bp, Homo sapiens; identical to SEQ ID NO: 67585

SEQ ID NO: 67596 - DNA, 174 bp, Homo sapiens; identical to SEQ ID NO: 67565

SEQ ID NO: 67597 - DNA, 135 bp, Homo sapiens; identical to SEQ ID NO: 67566

SEQ ID NO: 67598 - DNA, 201 bp, Homo sapiens; identical to SEQ ID NO: 67576

SEQ ID NO: 67599 - DNA, 201 bp, Homo sapiens
ttttttcagatcaaaaccattctgtaaaatctttgttgtttaattaaatgtgccgttatttacccctgatgttatttatgactatgtgccgattcctgctygggctgtttgctgttggctggtaataatatatttgatttaaatgctgttgactgtgctattaactgctgccgtcagtaaactccaaagatctttttgttt

SEQ ID NO: 67600 - DNA, 201 bp, Homo sapiens
agcaaatagtgtgattttcaagacttcaaatacaaatttagtttaagtgtttgaacaactatatgcacttacggttgtgtgtttaaaatgtctctctctcmccctagcttcatgatgtgactcttaaaaaactataatagttaacaactgttagtaagatagaccaattctgattagactttatcagggaatctgtttaag

SEQ ID NO: 67601 - DNA, 201 bp, Homo sapiens
agtctaaaaagcgaagggatgtgcaactgcagctctttaagaagttttttttttttagcttctagggtaaagataaattcagaaatgctctaagctaccaragttattctgaaagtatgggaactgctacaactaacaaacatttgtttccaagcctgtcattaagagtctgcatcaagagatttgtcctccttgggggac

SEQ ID NO: 67602 - DNA, 201 bp, Homo sapiens
gaagcaaatagtgtgattttcaagacttcaaatacaaatttagtttaagtgtttgaacaactatatgcacttacggttgtgtgtttaaaatgtctctctcwcaccctagcttcatgatgtgactcttaaaaaactataatagttaacaactgttagtaagatagaccaattctgattagactttatcagggaatctgttta

SEQ ID NO: 67603 - DNA, 201 bp, Homo sapiens
gcatgtatgacttctcagggcagtttgctttccatgttggtcttcctgcaaaatctggagttgctgggggcattcttttagttgtccccaatgttatgggyatgatgtgctggtctcctcctctggataagatgggcaacagtgttaagggaattcacttttgtcacgatcttgtttctctgtgtaatttccataactatg

SEQ ID NO: 67604 - DNA, 201 bp, Homo sapiens
cctgtggcatgtatgacttctcagggcagtttgctttccatgttggtcttcctgcaaaatctggagttgctgggggcattcttttagttgtccccaatgtyatgggtatgatgtgctggtctcctcctctggataagatgggcaacagtgttaagggaattcacttttgtcacgatcttgtttctctgtgtaatttccata

SEQ ID NO: 67605 - DNA, 201 bp, Homo sapiens
cctcctatttctggcatcagaactttgccatttgtctacagaagacgaaccagagacaaaattactaagtataaattagtcaagtttatcagtctaaaaarcgaagggatgtgcaactgcagctctttaagaagttttttttttttagcttctagggtaaagataaattcagaaatgctctaagctaccaaagttattctg

SEQ ID NO: 67606 - DNA, 201 bp, Homo sapiens
attcctgtggcatgtatgacttctcagggcagtttgctttccatgttggtcttcctgcaaaatctggagttgctgggggcattcttttagttgtccccaaygttatgggtatgatgtgctggtctcctcctctggataagatgggcaacagtgttaagggaattcacttttgtcacgatcttgtttctctgtgtaatttcc

SEQ ID NO: 67607 - DNA, 201 bp, Homo sapiens
ttgctttccatgttggtcttcctgcaaaatctggagttgctgggggcattcttttagttgtccccaatgttatgggtatgatgtgctggtctcctcctctkgataagatgggcaacagtgttaagggaattcacttttgtcacgatcttgtttctctgtgtaatttccataactatgataatttgagacactttgcaaaaa

SEQ ID NO: 67608 - DNA, 201 bp, Homo sapiens
aacactcccatggatgaagcactgcactttggacaccatgatgtatttaaaattctccaagaataccaagtccagtacacacctcaaggagattctgacarcgggaaggaaaatcaaaccgtccataagaatcttgatggattgttgtaatggtctcaaatcccaagatttaaatcacttacctatttaattgtggaaaat

SEQ ID NO: 67609 - DNA, 201 bp, Homo sapiens
ttccagtctaagccagtggctcctgccactgccctcccattacctagatggcacctcctttggtgaaaccacggccaatgttccttagctgcaccaggccsgaagctgttcccatgcttgagcttccatggggaggatgctgagtgagcagtttcctaccccgtggatctagcaagccatggagacaggtagcatttgtaa

SEQ ID NO: 67610 - DNA, 201 bp, Homo sapiens
ataactatgataatttgagacactttgcaaaaaaacttgatcctcgaagagaaggtggtgatcaaagggtaaagtcagtgataaatcttttgtttgctgcmtatactggagatgtgtctgcacttcgaagatttgctttgtcagctatggacatggaacagcgggactatgattctagaacagcactccatgtagctgctg

SEQ ID NO: 67611 - DNA, 201 bp, Homo sapiens
ttggtgaaaccacggccaatgttccttagctgcaccaggcccgaagctgttcccatgcttgagcttccatggggaggatgctgagtgagcagtttcctacsccgtggatctagcaagccatggagacaggtagcatttgtaagatgctgcacaggagcagcattatccccaaagatattacagggtagacacgttttaact

SEQ ID NO: 67612 - DNA, 201 bp, Homo sapiens
gataagatgggcaacagtgttaagggaattcacttttgtcacgatcttgtttctctgtgtaatttccataactatgataatttgagacactttgcaaaaamacttgatcctcgaagagaaggtggtgatcaaagggtaaagtcagtgataaatcttttgtttgctgcatatactggagatgtgtctgcacttcgaagattt

SEQ ID NO: 67613 - DNA, 201 bp, Homo sapiens; identical to SEQ ID NO: 67607

SEQ ID NO: 67614 - DNA, 201 bp, Homo sapiens
ctttaaatgcatacttaaaaatgaagtactgttatctaagctactgtgtttagaaaatgttaagaatgagcagaaatttttatagaaaagtataaacggargaagagataagatactgcgaataggccctcaaacttaaaaaagaaaaaactttgccagttttaaggacatattttgattctttcagtattcttaacacct

SEQ ID NO: 67615 - DNA, 201 bp, Homo sapiens; identical to SEQ ID NO: 67603

SEQ ID NO: 67616 - DNA, 201 bp, Homo sapiens; identical to SEQ ID NO: 67604

SEQ ID NO: 67617 - DNA, 201 bp, Homo sapiens; identical to SEQ ID NO: 67606

SEQ ID NO: 67618 - DNA, 201 bp, Homo sapiens
gataagatgggcaacagtgttaagggaattcacttttgtcacgatcttgtttctctgtgtaatttccataactatgataatttgagacactttgcaaaaamacttgatcctcgaagagaaggtggtgatcaaaggcattcctttggaccattggactatgaaagtctccaacaagaacttgctttaaaagagacagtatgg

SEQ ID NO: 67619 - DNA, 201 bp, Homo sapiens; identical to SEQ ID NO: 67599

SEQ ID NO: 67620 - DNA, 201 bp, Homo sapiens; identical to SEQ ID NO: 67600

SEQ ID NO: 67621 - DNA, 201 bp, Homo sapiens; identical to SEQ ID NO: 67601

SEQ ID NO: 67622 - DNA, 201 bp, Homo sapiens; identical to SEQ ID NO: 67602

SEQ ID NO: 67623 - DNA, 201 bp, Homo sapiens; identical to SEQ ID NO: 67603

SEQ ID NO: 67624 - DNA, 201 bp, Homo sapiens; identical to SEQ ID NO: 67604

SEQ ID NO: 67625 - DNA, 201 bp, Homo sapiens; identical to SEQ ID NO: 67605

SEQ ID NO: 67626 - DNA, 201 bp, Homo sapiens; identical to SEQ ID NO: 67606

SEQ ID NO: 67627 - DNA, 201 bp, Homo sapiens; identical to SEQ ID NO: 67607

SEQ ID NO: 67628 - DNA, 201 bp, Homo sapiens; identical to SEQ ID NO: 67608

SEQ ID NO: 67629 - DNA, 201 bp, Homo sapiens; identical to SEQ ID NO: 67609

SEQ ID NO: 67630 - DNA, 201 bp, Homo sapiens; identical to SEQ ID NO: 67610

SEQ ID NO: 67631 - DNA, 201 bp, Homo sapiens; identical to SEQ ID NO: 67611

SEQ ID NO: 67632 - DNA, 201 bp, Homo sapiens; identical to SEQ ID NO: 67612

SEQ ID NO: 67633 - DNA, 201 bp, Homo sapiens; identical to SEQ ID NO: 67599

SEQ ID NO: 67634 - DNA, 201 bp, Homo sapiens; identical to SEQ ID NO: 67600

SEQ ID NO: 67635 - DNA, 201 bp, Homo sapiens; identical to SEQ ID NO: 67601

SEQ ID NO: 67636 - DNA, 201 bp, Homo sapiens; identical to SEQ ID NO: 67602

SEQ ID NO: 67637 - DNA, 201 bp, Homo sapiens; identical to SEQ ID NO: 67603

SEQ ID NO: 67638 - DNA, 201 bp, Homo sapiens; identical to SEQ ID NO: 67604

SEQ ID NO: 67639 - DNA, 201 bp, Homo sapiens; identical to SEQ ID NO: 67605

SEQ ID NO: 67640 - DNA, 201 bp, Homo sapiens; identical to SEQ ID NO: 67606

SEQ ID NO: 67641 - DNA, 201 bp, Homo sapiens; identical to SEQ ID NO: 67607

SEQ ID NO: 67642 - DNA, 172 bp, Homo sapiens
tcaacatatgggtattaaataacatgaaaaaaagtttatataaatgttaaattactttagaactatttcctrgatttaaaaatactaatgcagtatattataatagtagctttgaaattttgatattggcttgaaacttaactgtagtggtacctatattaacgtatttatg

SEQ ID NO: 67643 - DNA, 201 bp, Homo sapiens; identical to SEQ ID NO: 67608

SEQ ID NO: 67644 - DNA, 201 bp, Homo sapiens; identical to SEQ ID NO: 67610

SEQ ID NO: 67645 - DNA, 201 bp, Homo sapiens; identical to SEQ ID NO: 67609

SEQ ID NO: 67646 - DNA, 201 bp, Homo sapiens; identical to SEQ ID NO: 67612

SEQ ID NO: 67647 - DNA, 201 bp, Homo sapiens; identical to SEQ ID NO: 67611

SEQ ID NO: 67648 - DNA, 201 bp, Homo sapiens
cggctccgggtgactcgggccagtgtagaggtccccaggccgccggcaggagcagctgggccaattccctggccgggagcggaaggggatggcgtcgggcytgggctccccgtccccctgctcggcgggcagtgaggaggaggatatggatgcacttttgaacaacagcctgcccccaccccacccagaggacccagaaga

SEQ ID NO: 67649 - DNA, 201 bp, Homo sapiens
gaggagaaagtggaaaaggcagaggtgaaggagagaacagaggaacctatggagacagagcccaaaggtgctgctgatgtagagaaggtggaggaaaagtyagcaatagatctgacccctattgtggtagaagacaaagaagagaagaaagaagaagaagagaaaaaagaggtgatgcttcagaatggagagacccccaag

SEQ ID NO: 67650 - DNA, 201 bp, Homo sapiens
cgagccggacccagcgcgacctgcggcggctccgggtgactcgggccagtgtagaggtccccaggccgccggcaggagcagctgggccaattccctggccsggagcggaaggggatggcgtcgggcctgggctccccgtccccctgctcggcgggcagtgaggaggaggatatggatgcacttttgaacaacagcctgccc

SEQ ID NO: 67651 - DNA, 201 bp, Homo sapiens
gggaagctaaagaggacaattcggagggtgaggagatcctggaagaggttgggggagacctcgaagaggaggatgaccaccatatggaattctgtcgggtytgcaaggatggtggggaactgctctgctgtgatacctgtccttcttcctaccacatccactgcctgaatcccccacttccagagatccccaacggtgaat

SEQ ID NO: 67652 - DNA, 201 bp, Homo sapiens
cttcggccgcggcgaggaggagccggagcgggagtgacaccgagccggacccagcgcgacctgcggcggctccgggtgactcgggccagtgtagaggtccycaggccgccggcaggagcagctgggccaattccctggccgggagcggaaggggatggcgtcgggcctgggctccccgtccccctgctcggcgggcagtga

SEQ ID NO: 67653 - DNA, 201 bp, Homo sapiens
ttggtgttatgtctttgattcgcaagaaggttcaggagtttgaacatgttaatgggcgctggagcatgcctgaactggctgaggtggaggaaaacaagaaratgtcccagccagggtcaccctccccaaaaactcctacaccctccactccaggggacacgcagcccaacactcctgcacctgtcccacctgctgaagatg

SEQ ID NO: 67654 - DNA, 201 bp, Homo sapiens
ctgagttgcactccctttggcagaatgaagagcgggcagccacagttaccaagaagacttatgagatctggcatcgacggcatgactactggctgctagcyggcattataaaccatggctatgcccggtggcaagacatccagaatgacccacgctatgccatcctcaatgagcctttcaagggtgaaatgaaccgtggca

SEQ ID NO: 67655 - DNA, 201 bp, Homo sapiens
gaacctaccccacagcaggtagtccaccgctgagcagtgaccttcctcactttctcttgtcccagcttctcccctgggggcctgagagaccctcaccttcyttctgcccatcttccatgttgtaaaggaacagccccagtgcactgggggaggggagggagtgaggggcagtggtgcccttcctgcagaagagacatgcag

SEQ ID NO: 67656 - DNA, 201 bp, Homo sapiens
agggcagcgactatactcctggcaagaagaagaagaagaagcttggacctaagaaagagaagaagagcaaatccaagcggaaggaggaggaggaggaggakgatgatgatgatgattcaaaggagcctaaatcatctgctcagctcctggaagactggggcatggaagacattgaccacgtgttctcagaggaggattatc

SEQ ID NO: 67657 - DNA, 201 bp, Homo sapiens
cggctccgggtgactcgggccagtgtagaggtccccaggccgccggcaggagcagctgggccaattccctggccgggagcggaaggggatggcgtcgggcytgggctccccgtccccctgctcggcgggcagtgaggaggaggatatggatgcacttttgaacaacagcctgcccccaccccacccagaaaatgaagagga

SEQ ID NO: 67658 - DNA, 201 bp, Homo sapiens; identical to SEQ ID NO: 67649

SEQ ID NO: 67659 - DNA, 201 bp, Homo sapiens; identical to SEQ ID NO: 67650

SEQ ID NO: 67660 - DNA, 201 bp, Homo sapiens
tgttacacacaaactgttgtgggttcctgccaggcttgaagaaaatgatctgaattttttcctccttttggttttattttgttggtttattttgtgttttyttttctcctttttggggggtattcagagtgggctgggcccctgggcgagacacagctacctctgttggcatctttttaataccaggaacccagcggctct

SEQ ID NO: 67661 - DNA, 201 bp, Homo sapiens; identical to SEQ ID NO: 67651

SEQ ID NO: 67662 - DNA, 201 bp, Homo sapiens; identical to SEQ ID NO: 67652

SEQ ID NO: 67663 - DNA, 201 bp, Homo sapiens; identical to SEQ ID NO: 67653

SEQ ID NO: 67664 - DNA, 201 bp, Homo sapiens; identical to SEQ ID NO: 67654

SEQ ID NO: 67665 - DNA, 201 bp, Homo sapiens; identical to SEQ ID NO: 67656

SEQ ID NO: 67666 - DNA, 201 bp, Homo sapiens
gaagatgcagactgataccacctccaccgctgagcagtgaccttcctcactttctcttgtcccagcttctcccctgggggcctgagagaccctcaccttcyttctgcccatcttccatgttgtaaaggaacagccccagtgcactgggggaggggagggagtgaggggcagtggtgcccttcctgcagaagagacatgcag

SEQ ID NO: 67667 - DNA, 150 bp, Homo sapiens
tctttttaataccaggaacccagcggctctagccactgagcggctaaatgaaataaagtggaaaaaaaaaaaaaggaaaaaaccaaaagcataaaaaaccmcagcaaatttcttgatgaaaattgaaaataaaagtttccttgtatttta

SEQ ID NO: 67668 - DNA, 191 bp, Homo sapiens
tgactcgggccagtgtagaggtccccaggccgccggcaggagcagctgggccaattccctggccgggagcggaaggggatggcgtcgggcytgggctccccgtccccctgctcggcgggcagtgaggaggaggatatggatgcacttttgaacaacagcctgcccccaccccacccagaaaatgaagagga

SEQ ID NO: 67669 - DNA, 201 bp, Homo sapiens; identical to SEQ ID NO: 67649

SEQ ID NO: 67670 - DNA, 165 bp, Homo sapiens
tgactcgggccagtgtagaggtccccaggccgccggcaggagcagctgggccaattccctggccsggagcggaaggggatggcgtcgggcctgggctccccgtccccctgctcggcgggcagtgaggaggaggatatggatgcacttttgaacaacagcctgccc

SEQ ID NO: 67671 - DNA, 201 bp, Homo sapiens; identical to SEQ ID NO: 67660

SEQ ID NO: 67672 - DNA, 201 bp, Homo sapiens; identical to SEQ ID NO: 67651

SEQ ID NO: 67673 - DNA, 125 bp, Homo sapiens
tgactcgggccagtgtagaggtccycaggccgccggcaggagcagctgggccaattccctggccgggagcggaaggggatggcgtcgggcctgggctccccgtccccctgctcggcgggcagtga

SEQ ID NO: 67674 - DNA, 201 bp, Homo sapiens; identical to SEQ ID NO: 67653

SEQ ID NO: 67675 - DNA, 201 bp, Homo sapiens; identical to SEQ ID NO: 67654

SEQ ID NO: 67676 - DNA, 201 bp, Homo sapiens; identical to SEQ ID NO: 67656

SEQ ID NO: 67677 - DNA, 201 bp, Homo sapiens; identical to SEQ ID NO: 67666

SEQ ID NO: 67678 - DNA, 150 bp, Homo sapiens; identical to SEQ ID NO: 67667

SEQ ID NO: 67679 - DNA, 201 bp, Homo sapiens; identical to SEQ ID NO: 67657

SEQ ID NO: 67680 - DNA, 201 bp, Homo sapiens; identical to SEQ ID NO: 67649

SEQ ID NO: 67681 - DNA, 201 bp, Homo sapiens; identical to SEQ ID NO: 67650

SEQ ID NO: 67682 - DNA, 201 bp, Homo sapiens; identical to SEQ ID NO: 67651

SEQ ID NO: 67683 - DNA, 201 bp, Homo sapiens; identical to SEQ ID NO: 67652

SEQ ID NO: 67684 - DNA, 201 bp, Homo sapiens; identical to SEQ ID NO: 67653

SEQ ID NO: 67685 - DNA, 201 bp, Homo sapiens; identical to SEQ ID NO: 67654

SEQ ID NO: 67686 - DNA, 201 bp, Homo sapiens; identical to SEQ ID NO: 67655

SEQ ID NO: 67687 - DNA, 201 bp, Homo sapiens; identical to SEQ ID NO: 67656

SEQ ID NO: 67688 - DNA, 201 bp, Homo sapiens
tggctgagagatggaaggcgtggtgggatttgctcctgggttccctaggccctagtgagggcagaagagaaaccatcctctcccttcttacaccgtgaggycaagatcccctcagaaggcaggagtgctgccctctcccatggtgcccgtgcctctgtgctgtgtatgtgaaccacccatgtgagggaataaacctggcac

SEQ ID NO: 67689 - DNA, 201 bp, Homo sapiens
tcttcaccctgtaatggttgggaccaggccaatcccttctccacttactataatggttggaactaaacgtcaccaaggtggcttctccttggctgagagayggaaggcgtggtgggatttgctcctgggttccctaggccctagtgagggcagaagagaaaccatcctctcccttcttacaccgtgaggccaagatcccct

SEQ ID NO: 67690 - DNA, 201 bp, Homo sapiens
catttatggaggctctgtgactggggcaacctgcaaggagctggccagccagcctgatgtggatggcttccttgtgggtggtgcttccctcaagcccgaaytcgtggacatcatcaatgccaaacaatgagccccatccatcttccctacccttcctgccaagccagggactaagcagcccagaagcccagtaactgccct

SEQ ID NO: 67691 - DNA, 119 bp, Homo sapiens
gtctgccttcactggacttgcccagataatcttcctttttgaggcagctatataaatgatcatttgtgcaagaaaaaaaaaaaaacaagaacaggtttctwtaacaacatctcttacta

SEQ ID NO: 67692 - DNA, 201 bp, Homo sapiens
tccttgtgggtggtgcttccctcaagcccgaattcgtggacatcatcaatgccaaacaatgagccccatccatcttccctacccttcctgccaagccaggractaagcagcccagaagcccagtaactgccctttccctgcatatgcttctgatggtgtcatctgctccttcctgtggcctcatccaaactgtatcttcct

SEQ ID NO: 67693 - DNA, 201 bp, Homo sapiens
gccaagatcccctcagaaggcaggagtgctgccctctcccatggtgcccgtgcctctgtgctgtgtatgtgaaccacccatgtgagggaataaacctggcmctaggtcttgtggtttgtctgccttcactggacttgcccagataatcttcctttttgaggcagctatataaatgatcatttgtgcaagaaaaaaaaaaaa

SEQ ID NO: 67694 - DNA, 153 bp, Homo sapiens
tggccgcgactgcgcgcagacactgaccttcagcgcctcggctccagcgccawggcgccctccaggaagttcttcgttgggggaaactggaagatgaacgggcggaagcagagtctgggggagctcatcggcactctgaacgcggccaaggtg

SEQ ID NO: 67695 - DNA, 201 bp, Homo sapiens
ctgtgtgggccattggtactggcaagactgcaacaccccaacaggcccaggaagtacacgagaagctccgaggatggctgaagtccaacgtctctgatgcrgtggctcagagcacccgtatcatttatggaggctctgtgactggggcaacctgcaaggagctggccagccagcctgatgtggatggcttccttgtgggtg

SEQ ID NO: 67696 - DNA, 201 bp, Homo sapiens
tcagagggtagggtcaggccctggagcctgtcttggtccccatgctgatccagaaaaggaaaaaggggagggggagtgacaatctttgcttggggcctatsacttctccagccccaaggtagatgccacctggaaatcccccaatgtccactagggggcagtaggccaccgttcttcgtactccggagaacctggctggag

SEQ ID NO: 67697 - DNA, 201 bp, Homo sapiens
gctagatcccaagattgctgtggctgcgcagaactgctacaaagtgactaatggggcttttactggggagatcagccctggcatgatcaaagactgcggasccacgtgggtggtcctggggcactcagagagaaggcatgtctttggggagtcagatgaggttagtagccaagagagaagataagggatgtctttttccaa

SEQ ID NO: 67698 - DNA, 201 bp, Homo sapiens
tgcgggagaccgggggaggctgggccgcgtgggcttcccgctccctgcgccctggcctcccgcgccgtgcgccgccgcacgtagccccagactcctccccytcctcgccggcgtccgcgtccccgcgccgagctgctcgggctccctgagcccccagatctgaccccttcccttcggcaacctgaacgactcccgccttcc

SEQ ID NO: 67699 - DNA, 109 bp, Homo sapiens
tggccgcgrctgcgcgcagacactgaccttcagcgcctcggctccagcgccatggcgccctccaggaagttcttcgttgggggaaactggaagatgaacgggcggaagc

SEQ ID NO: 67700 - DNA, 201 bp, Homo sapiens
cccagactcctccccttcctcgccggcgtccgcgtccccgcgccgagctgctcgggctccctgagcccccagatctgaccccttcccttcggcaacctgarcgactcccgccttccacggaagggaccgagcccgtgccaaacaggctgagcgatttgggagtgaggagccatcctaccgctttccccaacctggaaacag

SEQ ID NO: 67701 - DNA, 201 bp, Homo sapiens
gtgggacgagggccgctggggtccgggcaggggcctcgcagccgcagccccgtcggtgcgtcgagggggcagggcggagcacatgatgccccttggactayggggcaggtaaggacgttttgggtctcctggaggaaggtggccccggggcgcgcactggggctgtgcccgccaggcgacggggttaggagcggagcccga

SEQ ID NO: 67702 - DNA, 201 bp, Homo sapiens
tatatcttcaccctgtaatggttgggaccaggccaatcccttctccacttactataatggttggaactaaacgtcaccaaggtggcttctccttggctgaragatggaaggcgtggtgggatttgctcctgggttccctaggccctagtgagggcagaagagaaaccatcctctcccttcttacaccgtgaggccaagatc

SEQ ID NO: 67703 - DNA, 201 bp, Homo sapiens
attccccagaggcctcaatacaaaccccaggagttggcccctctccttttgctacaaatccttgccttgcaaaggggaggtgaggatgggctattttagargggaagcagggttgctccctggagaatgctgagtctgtgaggtgcctatgccgagaatagctcgaggaaattggagccccagctgttaaaagagcagagg

SEQ ID NO: 67704 - DNA, 106 bp, Homo sapiens
tggccrcgactgcgcgcagacactgaccttcagcgcctcggctccagcgccatggcgccctccaggaagttcttcgttgggggaaactggaagatgaacgggcgga

SEQ ID NO: 67705 - DNA, 201 bp, Homo sapiens; identical to SEQ ID NO: 67688

SEQ ID NO: 67706 - DNA, 201 bp, Homo sapiens
gctagatcccaagattgctgtggctgcgcagaactgctacaaagtgactaatggggcttttactggggagatcagccctggcatgatcaaagactgcggasccacgtgggtggtcctggggcactcagagagaaggcatgtctttggggagtcagatgagctgattgggcagaaagtggcccatgctctggcagagggact

SEQ ID NO: 67707 - DNA, 201 bp, Homo sapiens; identical to SEQ ID NO: 67689

SEQ ID NO: 67708 - DNA, 201 bp, Homo sapiens
ggggggcagggctccgggggactgggcgggccatggcggaggacggcgaggaggcggagttccacttcgcggcgctctatataagtgggcagtggccgcgrctgcgcgcagacactgaccttcagcgcctcggctccagcgccatggcgccctccaggaagttcttcgttgggggaaactggaagatgaacgggcggaagc

SEQ ID NO: 67709 - DNA, 201 bp, Homo sapiens; identical to SEQ ID NO: 67690

SEQ ID NO: 67710 - DNA, 119 bp, Homo sapiens; identical to SEQ ID NO: 67691

SEQ ID NO: 67711 - DNA, 201 bp, Homo sapiens; identical to SEQ ID NO: 67692

SEQ ID NO: 67712 - DNA, 201 bp, Homo sapiens; identical to SEQ ID NO: 67693

SEQ ID NO: 67713 - DNA, 201 bp, Homo sapiens
ggcgaggaggcggagttccacttcgcggcgctctatataagtgggcagtggccgcgactgcgcgcagacactgaccttcagcgcctcggctccagcgccawggcgccctccaggaagttcttcgttgggggaaactggaagatgaacgggcggaagcagagtctgggggagctcatcggcactctgaacgcggccaaggtg

SEQ ID NO: 67714 - DNA, 201 bp, Homo sapiens; identical to SEQ ID NO: 67695

SEQ ID NO: 67715 - DNA, 201 bp, Homo sapiens; identical to SEQ ID NO: 67702

SEQ ID NO: 67716 - DNA, 201 bp, Homo sapiens
cggcggcaggagggcgggcggggggcagggctccgggggactgggcgggccatggcggaggacggcgaggaggcggagttccacttcgcggcgctctatakaagtgggcagtggccgcgactgcgcgcagacactgaccttcagcgcctcggctccagcgccatggcgccctccaggaagttcttcgttgggggaaactgg

SEQ ID NO: 67717 - DNA, 201 bp, Homo sapiens
ggcggggggcagggctccgggggactgggcgggccatggcggaggacggcgaggaggcggagttccacttcgcggcgctctatataagtgggcagtggccrcgactgcgcgcagacactgaccttcagcgcctcggctccagcgccatggcgccctccaggaagttcttcgttgggggaaactggaagatgaacgggcgga

SEQ ID NO: 67718 - DNA, 201 bp, Homo sapiens; identical to SEQ ID NO: 67688

SEQ ID NO: 67719 - DNA, 201 bp, Homo sapiens; identical to SEQ ID NO: 67706

SEQ ID NO: 67720 - DNA, 201 bp, Homo sapiens
tccctgcatatgcttctgatggtgtcatctgctcctttctccacttactataatggttggaactaaacgtcaccaaggtggcttctccttggctgagagayggaaggcgtggtgggatttgctcctgggttccctaggccctagtgagggcagaagagaaaccatcctctcccttcttacaccgtgaggccaagatcccct

SEQ ID NO: 67721 - DNA, 201 bp, Homo sapiens; identical to SEQ ID NO: 67708

SEQ ID NO: 67722 - DNA, 201 bp, Homo sapiens; identical to SEQ ID NO: 67690

SEQ ID NO: 67723 - DNA, 102 bp, Homo sapiens
gtctgccttcactggacttgcccagataatcttcctttttgaggcagctatataaatgatcatttgtgcaagaaaaaaaaaaaaacaagaacaggtttctwt

SEQ ID NO: 67724 - DNA, 201 bp, Homo sapiens
tccttgtgggtggtgcttccctcaagcccgaattcgtggacatcatcaatgccaaacaatgagccccatccatcttccctacccttcctgccaagccaggractaagcagcccagaagcccagtaactgccctttccctgcatatgcttctgatggtgtcatctgctcctttctccacttactataatggttggaactaaa

SEQ ID NO: 67725 - DNA, 201 bp, Homo sapiens; identical to SEQ ID NO: 67693

SEQ ID NO: 67726 - DNA, 201 bp, Homo sapiens; identical to SEQ ID NO: 67713

SEQ ID NO: 67727 - DNA, 201 bp, Homo sapiens; identical to SEQ ID NO: 67695

SEQ ID NO: 67728 - DNA, 201 bp, Homo sapiens
cctttccctgcatatgcttctgatggtgtcatctgctcctttctccacttactataatggttggaactaaacgtcaccaaggtggcttctccttggctgaragatggaaggcgtggtgggatttgctcctgggttccctaggccctagtgagggcagaagagaaaccatcctctcccttcttacaccgtgaggccaagatc

SEQ ID NO: 67729 - DNA, 201 bp, Homo sapiens; identical to SEQ ID NO: 67716

SEQ ID NO: 67730 - DNA, 201 bp, Homo sapiens; identical to SEQ ID NO: 67717

SEQ ID NO: 67731 - DNA, 201 bp, Homo sapiens
ctccgcccgccgcccgggagccgcagccgccgccgccactgccactcccgctctctcagcgccgccgtcgccaccgccaccgccaccgccactaccaccgkctgagtctgcagtcccgagatcccagccatcatgtccatagagaagatctgggcccgggagatcctggactcccgcgggaaccccacagtggaggtggat

SEQ ID NO: 67732 - DNA, 201 bp, Homo sapiens
ccctactcattggggttccgcactttccacttcttcctttctctttctctcttccctcagaaactagaaatgtgaatgaggattattataaaagggggtcygtggaagaatgatcagcatctgtgatgggagcgtcagggttggtgtgctgaggtgttagagagggaccatgtgtcacttgtgctttgctcttgtcccacg

SEQ ID NO: 67733 - DNA, 201 bp, Homo sapiens
cctactcattggggttccgcactttccacttcttcctttctctttctctcttccctcagaaactagaaatgtgaatgaggattattataaaagggggtccrtggaagaatgatcagcatctgtgatgggagcgtcagggttggtgtgctgaggtgttagagagggaccatgtgtcacttgtgctttgctcttgtcccacgt

SEQ ID NO: 67734 - DNA, 201 bp, Homo sapiens
ccaatatcctggagaacagtgaagccttggagctggtgaaggaagccatcgacaaggctggctacacggaaaagatcgttattggcatggatgttgctgcytcagagttttatcgtgatggcaaatatgacttggacttcaagtctcccactgatccttcccgatacatcactggggaccagctgggggcactctaccagg

SEQ ID NO: 67735 - DNA, 150 bp, Homo sapiens
ttcctctatacatctctccccaaccctaggttccctgttcttcctccagctgcaccagagcaacctctcactccccatgccacgttccacagttgccaccmcctctgtggcattgaaatgagcacctccattaaagtctgaatcagtgca

SEQ ID NO: 67736 - DNA, 121 bp, Homo sapiens
cgccaccgccactaccaccgkctgagtctgcagtcccgagcctcccgccccgcccattgatctcaggctccacccctctaagcctcttatctttctccttccttcccttccacccgaggag

SEQ ID NO: 67737 - DNA, 201 bp, Homo sapiens
ccctactcattggggttccgcactttccacttcttcctttctctttctctcttccctcagaaactagaaatgtgaatgaggattattataaaagggggtcygtggaagaatgatcagcatctgtgatgggagcgtcagggttggtgtgctgaggtgttagagagggaccatatgagccgtgaactgtgcatagtgctggga

SEQ ID NO: 67738 - DNA, 201 bp, Homo sapiens
cctactcattggggttccgcactttccacttcttcctttctctttctctcttccctcagaaactagaaatgtgaatgaggattattataaaagggggtccrtggaagaatgatcagcatctgtgatgggagcgtcagggttggtgtgctgaggtgttagagagggaccatatgagccgtgaactgtgcatagtgctgggat

SEQ ID NO: 67739 - DNA, 201 bp, Homo sapiens; identical to SEQ ID NO: 67734

SEQ ID NO: 67740 - DNA, 201 bp, Homo sapiens
acagtaacatccccgggtccgactacatcaatgccaactacatcaagaaccagctgctaggccctgatgagaacgctaagacctacatcgccagccagggytgtctggaggccacggtcaatgacttctggcagatggcgtggcaggagaacagccgtgtcatcgtcatgaccacccgagaggtggagaaaggccggaaca

SEQ ID NO: 67741 - DNA, 171 bp, Homo sapiens
tttcgcgatggacagactcacaacctgaacctaggagtgccccattcttttgtaatttaaatggctgcatcccccccacctctccctgaccctgtatatakcccagccaggccccaggcagggccaacccttctcctcttgtaaataaagccctgggatcactgtgtgtcg

SEQ ID NO: 67742 - DNA, 201 bp, Homo sapiens
tcggatccagaactcaggggatttctatgacctgtatggaggggagaagtttgcgactctgacagagctggtggagtactacactcagcagcagggtgtcstgcaggaccgcgacggcaccatcatccacctcaagtacccgctgaactgctccgatcccactagtgagaggtggtaccatggccacatgtctggcgggca

SEQ ID NO: 67743 - DNA, 201 bp, Homo sapiens
ggccacatgtctggcgggcaggcagagacgctgctgcaggccaagggcgagccctggacgtttcttgtgcgtgagagcctcagccagcctggagacttcgwgctttctgtgctcagtgaccagcccaaggctggcccaggctccccgctcagggtcacccacatcaaggtcatgtgcgagggtggacgctacacagtgggt

SEQ ID NO: 67744 - DNA, 201 bp, Homo sapiens
caggctccccgctcagggtcacccacatcaaggtcatgtgcgagggtggacgctacacagtgggtggtttggagaccttcgacagcctcacggacctggtrgagcatttcaagaagacggggattgaggaggcctcaggcgcctttgtctacctgcggcagccgtactatgccacgagggtgaatgcggctgacattgaga

SEQ ID NO: 67745 - DNA, 201 bp, Homo sapiens
atgagaacctgcacactaagaacaagagggaggagaaagtgaagaagcagcggtcagcagacaaggagaagagcaagggttccctcaagaggaagtgagcrgtgctgtcctcaggtggccatgcctcagccctgaccctgtggaagcatttcgcgatggacagactcacaacctgaacctaggagtgccccattcttttgt

SEQ ID NO: 67746 - DNA, 201 bp, Homo sapiens
ccgaggtgggcatgcagcgtgcttatgggccctactctgtgaccaactgcggggagcatgacacaaccgaatacaaactccgtaccttacaggtctccccvctggacaatggagacctgattcgggagatctggcattaccagtacctgagctggcccgaccatggggtccccagtgagcctgggggtgtcctcagcttcc

SEQ ID NO: 67747 - DNA, 201 bp, Homo sapiens
ttcggatccagaactcaggggatttctatgacctgtatggaggggagaagtttgcgactctgacagagctggtggagtactacactcagcagcagggtgtsctgcaggaccgcgacggcaccatcatccacctcaagtacccgctgaactgctccgatcccactagtgagaggtggtaccatggccacatgtctggcgggc

SEQ ID NO: 67748 - DNA, 201 bp, Homo sapiens
gcccgaccatggggtccccagtgagcctgggggtgtcctcagcttcctggaccagatcaaccagcggcaggaaagtctgcctcacgcagggcccatcatcrtgcactgcagcgccggcatcggccgcacaggcaccatcattgtcatcgacatgctcatggagaacatctccaccaagggcctggactgtgacattgacat

SEQ ID NO: 67749 - DNA, 201 bp, Homo sapiens; identical to SEQ ID NO: 67740

SEQ ID NO: 67750 - DNA, 171 bp, Homo sapiens; identical to SEQ ID NO: 67741

SEQ ID NO: 67751 - DNA, 201 bp, Homo sapiens; identical to SEQ ID NO: 67742

SEQ ID NO: 67752 - DNA, 201 bp, Homo sapiens; identical to SEQ ID NO: 67743

SEQ ID NO: 67753 - DNA, 201 bp, Homo sapiens; identical to SEQ ID NO: 67744

SEQ ID NO: 67754 - DNA, 201 bp, Homo sapiens; identical to SEQ ID NO: 67745

SEQ ID NO: 67755 - DNA, 201 bp, Homo sapiens; identical to SEQ ID NO: 67746

SEQ ID NO: 67756 - DNA, 201 bp, Homo sapiens; identical to SEQ ID NO: 67748

SEQ ID NO: 67757 - DNA, 201 bp, Homo sapiens; identical to SEQ ID NO: 67747

SEQ ID NO: 67758 - DNA, 201 bp, Homo sapiens
gacgggacagtaacatccccgggtccgactacatcaatgccaactacatcaaggtcagcagccctgatgagaacgctaagacctacatcgccagccagggytgtctggaggccacggtcaatgacttctggcagatggcgtggcaggagaacagccgtgtcatcgtcatgaccacccgagaggtggagaaaggccgggtag

SEQ ID NO: 67759 - DNA, 166 bp, Homo sapiens
tttcgcgatggacagactcacaacctgaacctaggagtgccccattcttttgtaatttaaatggctgcatcccccccacctctccctgaccctgtatatakcccagccaggccccaggcagggccaacccttctcctcttgtaaataaagccctgggatcactgtg

SEQ ID NO: 67760 - DNA, 201 bp, Homo sapiens; identical to SEQ ID NO: 67742

SEQ ID NO: 67761 - DNA, 201 bp, Homo sapiens; identical to SEQ ID NO: 67745

SEQ ID NO: 67762 - DNA, 201 bp, Homo sapiens; identical to SEQ ID NO: 67743

SEQ ID NO: 67763 - DNA, 201 bp, Homo sapiens; identical to SEQ ID NO: 67744

SEQ ID NO: 67764 - DNA, 201 bp, Homo sapiens; identical to SEQ ID NO: 67748

SEQ ID NO: 67765 - DNA, 201 bp, Homo sapiens; identical to SEQ ID NO: 67747

SEQ ID NO: 67766 - DNA, 201 bp, Homo sapiens; identical to SEQ ID NO: 67740

SEQ ID NO: 67767 - DNA, 171 bp, Homo sapiens; identical to SEQ ID NO: 67741

SEQ ID NO: 67768 - DNA, 201 bp, Homo sapiens; identical to SEQ ID NO: 67742

SEQ ID NO: 67769 - DNA, 201 bp, Homo sapiens; identical to SEQ ID NO: 67743

SEQ ID NO: 67770 - DNA, 201 bp, Homo sapiens; identical to SEQ ID NO: 67744

SEQ ID NO: 67771 - DNA, 201 bp, Homo sapiens; identical to SEQ ID NO: 67745

SEQ ID NO: 67772 - DNA, 197 bp, Homo sapiens
gaggaagtggctgattactgagcggttcttcctcacctggcttgggccactgtgcacagctgtgccgctggctcagccccgccccctgcggccctcygccgtggcttccccctccctacagagagatgctgtcccgtgggtggtttcaccgagacctcagtgggctggatgcagagaccctgctcaagggccgaggt

SEQ ID NO: 67773 - DNA, 201 bp, Homo sapiens; identical to SEQ ID NO: 67746

SEQ ID NO: 67774 - DNA, 201 bp, Homo sapiens; identical to SEQ ID NO: 67748

SEQ ID NO: 67775 - DNA, 201 bp, Homo sapiens; identical to SEQ ID NO: 67747

SEQ ID NO: 67776 - DNA, 201 bp, Homo sapiens; identical to SEQ ID NO: 67740

SEQ ID NO: 67777 - DNA, 166 bp, Homo sapiens; identical to SEQ ID NO: 67759

SEQ ID NO: 67778 - DNA, 201 bp, Homo sapiens; identical to SEQ ID NO: 67742

SEQ ID NO: 67779 - DNA, 201 bp, Homo sapiens; identical to SEQ ID NO: 67743

SEQ ID NO: 67780 - DNA, 201 bp, Homo sapiens; identical to SEQ ID NO: 67744

SEQ ID NO: 67781 - DNA, 201 bp, Homo sapiens; identical to SEQ ID NO: 67745

SEQ ID NO: 67782 - DNA, 201 bp, Homo sapiens; identical to SEQ ID NO: 67746

SEQ ID NO: 67783 - DNA, 201 bp, Homo sapiens; identical to SEQ ID NO: 67748

SEQ ID NO: 67784 - DNA, 201 bp, Homo sapiens; identical to SEQ ID NO: 67747

SEQ ID NO: 67785 - DNA, 201 bp, Homo sapiens; identical to SEQ ID NO: 67740

SEQ ID NO: 67786 - DNA, 166 bp, Homo sapiens; identical to SEQ ID NO: 67759

SEQ ID NO: 67787 - DNA, 201 bp, Homo sapiens; identical to SEQ ID NO: 67742

SEQ ID NO: 67788 - DNA, 201 bp, Homo sapiens; identical to SEQ ID NO: 67743

SEQ ID NO: 67789 - DNA, 201 bp, Homo sapiens; identical to SEQ ID NO: 67744

SEQ ID NO: 67790 - DNA, 201 bp, Homo sapiens; identical to SEQ ID NO: 67745

SEQ ID NO: 67791 - DNA, 197 bp, Homo sapiens; identical to SEQ ID NO: 67772

SEQ ID NO: 67792 - DNA, 201 bp, Homo sapiens; identical to SEQ ID NO: 67746

SEQ ID NO: 67793 - DNA, 201 bp, Homo sapiens; identical to SEQ ID NO: 67748

SEQ ID NO: 67794 - DNA, 201 bp, Homo sapiens; identical to SEQ ID NO: 67747

SEQ ID NO: 67795 - DNA, 201 bp, Homo sapiens
gtaccggatgctcgtgcaaaaagaccttaagagatataaattcaagagtctgcggcactgcttgaccggaggggagccactcaacccagaagtgctggagyagtggagggtgcaaactgggctggagctatatgagggctatggacagacggaagtgggaatgatttgtgccaatcagaaaggccaagaaattaaaccagg

SEQ ID NO: 67796 - DNA, 201 bp, Homo sapiens
agattatagatgaaaatggcaatgttctaccacctggcaaagaaggggaaattgccctcagactcaaacctacacggcccttctgtttcttctctaaataygtggacaatccacagaaaactgctgccacgataagaggagatttttatgtcactggagacagaggagtgatggacagtgatgggtatttctggtttgtcg

SEQ ID NO: 67797 - DNA, 169 bp, Homo sapiens
ctttaagtcctacaacccagagaaattaactcttgaacttcaggatcatgtgaaaaaatcaactgcaccttacaaatatccaagaaaggcaagtgctttgyccaaaaaactcccaaagacaatcactgggaaaatcaaacgcaacgttttaagagaccaagaatggaga

SEQ ID NO: 67798 - DNA, 201 bp, Homo sapiens
tcttcatgccgggaacaatccagctgacagcaaaagacatcctctaccggctgcgagcatccaaggccaagtgcattgtggccagtgaggaggtggccccwgcggtggagtccattgtattggagtgtcctgaccttaagacaaaactcctggtgtctccacaaagctggaatgggtggctcagcttccaggagttatttc

SEQ ID NO: 67799 - DNA, 103 bp, Homo sapiens
agccacttggagggaggaagaaagggagccggcgttcaaggctatgacagtctgctacgcaaaacattttttcaagtaaaaatagtaagagatgttgttawag

SEQ ID NO: 67800 - DNA, 201 bp, Homo sapiens
gagggaggagcgggcccgttggcaaacttgggtgaaaggatggggtacctgggtgacgagcccccgccaggattctgctcttcacgccccttttctcccarctcccttccaggtcaatccaaactggagctcaactttcagaagagaaagacgccccagcaagcctctttcggggagtcctctagctcctcacctccatgg

SEQ ID NO: 67801 - DNA, 201 bp, Homo sapiens
gaggcccggcgacctccagggctgggaagtcaaccgaggttcgggggcagcggcgagggctccgggcgagtaagggggatggtccatgctgaggcccaaakggggcgaactcgcgagagtctctggcgacctggatcagatggggcgagggcagatgaagggcccaggagctttggggcagcgaggagggaggagcgggcc

SEQ ID NO: 67802 - DNA, 201 bp, Homo sapiens
ggggagtcctctagctcctcacctccatgggccagacagctctggcagggggcagcagcagcacccccacgccacaggccctgtaccctgacctctcctgycccgagggcttggaagagctgctgtctgcaccccctcctgacctgggggcccagcggcgccacggttggaaccccaaagactgttcagagaacatcgagg

SEQ ID NO: 67803 - DNA, 201 bp, Homo sapiens
cagcattccgcggactgaagggcaggaccctctatccggcagtaagcgctgtctggggccagtgccaggtccgcatccgctacctgggcgaaaggagagcrgagccacactcccttctgcacctgagccgcctgtgtgtgcgccacaacctgggggatacccggctcggccaggtgtctgccctgcccttgccccctgcca

SEQ ID NO: 67804 - DNA, 201 bp, Homo sapiens
ttttctcccagctcccttccaggtcaatccaaactggagctcaactttcagaagagaaagacgccccagcaagcctctttcggggagtcctctagctcctyacctccatgggccagacagctctggcagggggcagcagcagcacccccacgccacaggccctgtaccctgacctctcctgtcccgagggcttggaagagc

SEQ ID NO: 67805 - DNA, 201 bp, Homo sapiens
gggcggaagcggccggcggtctgcgccctgcgcgcctcggcttctttccgcccggctccttcagaggcccggcgacctccagggctgggaagtcaaccgakgttcgggggcagcggcgagggctccgggcgagtaagggggatggtccatgctgaggcccaaatggggcgaactcgcgagagtctctggcgacctggatca

SEQ ID NO: 67806 - DNA, 167 bp, Homo sapiens
ggagctgggggcggaagcggccggcggtctgcgccctgcgcgcctcggcttctttccgcccggctcyttcagaggcccggcgacctccagggctgggaagtcaaccgaggttcgggggcagcggcgagggctccgggcgagtaagggggatggtccatgctgaggcc

SEQ ID NO: 67807 - DNA, 201 bp, Homo sapiens
agtaagcgctgtctggggccagtgccaggtccgcatccgctacctgggcgaaaggagagcggagccacactcccttctgcacctgagccgcctgtgtgtgygccacaacctgggggatacccggctcggccaggtgtctgccctgcccttgccccctgccatgaagcgctacctgctctaccagtgagccctgtgatacca

SEQ ID NO: 67808 - DNA, 201 bp, Homo sapiens
tgttcagagaacatcgaggtcaaggaaggagggttgtactttgagcggcggcccgtggcccagagcactgatggggcccggggtaagaggggctattcaargggcctgcacgcctgggagatcagctggcccctagagcagaggggcacgcatgccgtggtgggcgtggccacggccctcgccccgctgcagactgaccac

SEQ ID NO: 67809 - DNA, 201 bp, Homo sapiens
tgccaccacccctccccttggggaggtggggaggcactgctggcctagaccagctgctgaaagctggtgaggctgagcccctaccccaacccaagctctgsggaaatcaacagccccagagccacttggagggaggaagaaagggagccggcgttcaaggctatgacagtctgctacgcaaaacattttttcaagtaaaaa

SEQ ID NO: 67810 - DNA, 201 bp, Homo sapiens
ctttggggcagcgaggagggaggagcgggcccgttggcaaacttgggtgaaaggatggggtacctgggtgacgagcccccgccaggattctgctcttcacrccccttttctcccagctcccttccaggtcaatccaaactggagctcaactttcagaagagaaagacgccccagcaagcctctttcggggagtcctctagc

SEQ ID NO: 67811 - DNA, 103 bp, Homo sapiens; identical to SEQ ID NO: 67799

SEQ ID NO: 67812 - DNA, 201 bp, Homo sapiens
cgagctcccttccaggtcaatccaaactggagctcaactttcagaagagaaagacgccccagcaagcctctttcggggagtcctctagctcctcacctccrtgggccagacagctctggcagggggcagcagcagcacccccacgccacaggccctgtaccctgacctctcctgtcccgagggcttggaagagctgctgtc

SEQ ID NO: 67813 - DNA, 201 bp, Homo sapiens; identical to SEQ ID NO: 67802

SEQ ID NO: 67814 - DNA, 201 bp, Homo sapiens; identical to SEQ ID NO: 67803

SEQ ID NO: 67815 - DNA, 201 bp, Homo sapiens
agtcaaccgagctcccttccaggtcaatccaaactggagctcaactttcagaagagaaagacgccccagcaagcctctttcggggagtcctctagctcctyacctccatgggccagacagctctggcagggggcagcagcagcacccccacgccacaggccctgtaccctgacctctcctgtcccgagggcttggaagagc

SEQ ID NO: 67816 - DNA, 201 bp, Homo sapiens
gggcggaagcggccggcggtctgcgccctgcgcgcctcggcttctttccgcccggctccttcagaggcccggcgacctccagggctgggaagtcaaccgakctcccttccaggtcaatccaaactggagctcaactttcagaagagaaagacgccccagcaagcctctttcggggagtcctctagctcctcacctccatgg

SEQ ID NO: 67817 - DNA, 161 bp, Homo sapiens
gggggcggaagcggccggcggtctgcgccctgcgcgcctcggcttctttccgcccggctcyttcagaggcccggcgacctccagggctgggaagtcaaccgagctcccttccaggtcaatccaaactggagctcaactttcagaagagaaagacgccccag

SEQ ID NO: 67818 - DNA, 201 bp, Homo sapiens; identical to SEQ ID NO: 67807

SEQ ID NO: 67819 - DNA, 201 bp, Homo sapiens; identical to SEQ ID NO: 67808

SEQ ID NO: 67820 - DNA, 201 bp, Homo sapiens; identical to SEQ ID NO: 67809

SEQ ID NO: 67821 - DNA, 198 bp, Homo sapiens
gcggtacgggaagacagctttgggatgtcggaagatcctagaggtcccaaggtagctgacttgcgaagctgaggctccagccgagggctccaggcctstgaccggcccagcagtgagcgcggctgcccgacgcttcagggccgggagcagggagcgtgagtcgccatggcgacgccggcgggtctggagcgctgggtt

SEQ ID NO: 67822 - DNA, 201 bp, Homo sapiens
  misc_feature (1)...(201): n = A,T,C or G
tttggattgatcaaggatgttgctcgcttccgacctgagctcaaggtcctggtggcttcagccacaatggacactgcccgtttttccaccttctttgatgncgcccctgtgtttcgaatccccggacgcaggtttcctgtggacatcttctacaccaaggctccagaggctgactacttggaagcttgtgtagtatctgtg

SEQ ID NO: 67823 - DNA, 201 bp, Homo sapiens
tccggtaatgctcgtctttgtcacgcttgtagaaccgcaaaaagagcaagtggacgggcagccccacaagccgccaccgggcttgcagggtccagttctcmgggtggcgggtcagctgtaaaacctccaaacgaaggtgtgcaaaataattccaggccaggaaacggcagagggtcagtgaaagaatgtaccattctcact

SEQ ID NO: 67824 - DNA, 201 bp, Homo sapiens
acccacttcaactcaggcccagcagaaagagtccatccaggccgtccgccgcagcctcccggtgttcccatttcgagaggagctcctggctgctattgcaratcaccaagtcctcatcattgaaggcgagacaggctcagggaagaccacccagatcccgcagtatctctttgaggagggttatacaaacaagggtatgaa

SEQ ID NO: 67825 - DNA, 201 bp, Homo sapiens
tcaacttctttctccctggcggtgaccacctggttctgctaaatgtttacacacagtgggctgagagtggttactcttcccagtggtgctatgagaacttygtacagttcagatcgatgcgccgagcccgggatgtgcgggaacagctggaagggctcttggaacgtgtggaagttggtctcagttcctgccagggggact

SEQ ID NO: 67826 - DNA, 201 bp, Homo sapiens
tccccatgctaagaaaatgcccaaaaaaataggcaaaacacgagaagagctagggtaagagaaggacgtaaacagaacctgacaccagctccttttccttytatacattatttaatacctattaaataaaattatttttggaataaagcttgtgggaacatttgggatctagagaaagtgatatgtgaaattctatctcat

SEQ ID NO: 67827 - DNA, 201 bp, Homo sapiens
agctgcactcggtgttggggctgagcgagcggcacgtcgcccagtttctgatcggtaccgcacagcgctgcacctctgccgaggagttcgtgcagcgcctrcgagacactgataccttggatctcagtgggccggcccgggacttcgccctgagactctggaacaaggtaccacgaaaggcagtggtagaaaagccagctc

SEQ ID NO: 67828 - DNA, 201 bp, Homo sapiens
cagcttgggcaatgtcgtgttgctgctcaagagcttagggatccatgacctaatgcactttgatttcctggaccctccaccatatgagacactgctgctgrctttggagcagctgtatgctctgggagccctcaaccaccttggggagctcaccacgtctggtcgaaagatggcagagctgccggtggaccccatgctgtc

SEQ ID NO: 67829 - DNA, 201 bp, Homo sapiens
gagtgtgaaggcatcagctgcagggagaaaggttaatgccagttgggggaggcacacaaatgttctaccctttaccccacccagccctacctaggactcamtttatctagacgatggcgacaaatgaggccactggaattcaggtagaaagtggagtaggcatcataggtccggtaatgctcgtctttgtcacgcttgtag

SEQ ID NO: 67830 - DNA, 201 bp, Homo sapiens
gagatgctgcctctcaggagcccaagtatcaactggtgctggaggaggaggagaccattgagtttgtccgggccactcagctccagggtgatgaggagccrtcagctccacccacttcaactcaggcccagcagaaagagtccatccaggccgtccgccgcagcctcccggtgttcccatttcgagaggagctcctggctg

SEQ ID NO: 67831 - DNA, 201 bp, Homo sapiens
atcaggagcccctggggaggagcagcggcgctgggaggaggcgcggcttggggcagcgtccctgaagtttggggcccgagatgctgcctctcaggagcccragtatcaactggtgctggaggaggaggagaccattgagtttgtccgggccactcagctccagggtgatgaggagccgtcagctccacccacttcaactca

SEQ ID NO: 67832 - DNA, 161 bp, Homo sapiens
gcggtacgggaagacagctttgggatgtcggaagatcctagaggtcccaaggtagctgacytgcgaagctgaggctccagccgagggctccaggcctctgaccggcccagcagtgagcgcggctgcccgacgcttcagggccgggagcagggagcgtgagt

SEQ ID NO: 67833 - DNA, 201 bp, Homo sapiens
taagcggcgagtgcgggatctcgcccgggagtaccgggcagctggggagcaggagaagctggaggccaccaatcgctaccacatgcccaaggaaacccgargacagccagcccgagctgtggatctagtggaggaggaatcaggagcccctggggaggagcagcggcgctgggaggaggcgcggcttggggcagcgtccct

SEQ ID NO: 67834 - DNA, 201 bp, Homo sapiens
gctccaaaatccgggagctcctggtgctgcccatttatgccaatctgccctctgacatgcaggcccgtatcttccagcccacaccacctggggcacgaaakgtggttgtggcaacgaacattgctgagacatcactcaccattgagggcatcatttatgtgctggatccagggttctgtaagcagaagagctacaaccccc

SEQ ID NO: 67835 - DNA, 101 bp, Homo sapiens
ctctcatacatgacagacagatgttcctccatactaggatctcctgacggggtggcaggggaagggtgggcagttccagggacttggaaaggtatccaagr

SEQ ID NO: 67836 - DNA, 198 bp, Homo sapiens; identical to SEQ ID NO: 67821

SEQ ID NO: 67837 - DNA, 201 bp, Homo sapiens; identical to SEQ ID NO: 67822
  misc_feature (1)...(201): n = A,T,C or G

SEQ ID NO: 67838 - DNA, 201 bp, Homo sapiens; identical to SEQ ID NO: 67824

SEQ ID NO: 67839 - DNA, 201 bp, Homo sapiens; identical to SEQ ID NO: 67825

SEQ ID NO: 67840 - DNA, 201 bp, Homo sapiens; identical to SEQ ID NO: 67826

SEQ ID NO: 67841 - DNA, 201 bp, Homo sapiens; identical to SEQ ID NO: 67827

SEQ ID NO: 67842 - DNA, 201 bp, Homo sapiens; identical to SEQ ID NO: 67828

SEQ ID NO: 67843 - DNA, 171 bp, Homo sapiens
gagtgtgaaggcatcagctgcagggagaaaggttaatgccagttgggggaggcacacaaatgttctaccctttaccccacccagccctacctaggactcamtttatctagacgatggcgacaaatgaggccactggaattcaggtagaaagtggagtaggcatcataggtc

SEQ ID NO: 67844 - DNA, 201 bp, Homo sapiens; identical to SEQ ID NO: 67830

SEQ ID NO: 67845 - DNA, 201 bp, Homo sapiens; identical to SEQ ID NO: 67831

SEQ ID NO: 67846 - DNA, 161 bp, Homo sapiens; identical to SEQ ID NO: 67832

SEQ ID NO: 67847 - DNA, 201 bp, Homo sapiens; identical to SEQ ID NO: 67833

SEQ ID NO: 67848 - DNA, 201 bp, Homo sapiens; identical to SEQ ID NO: 67834

SEQ ID NO: 67849 - DNA, 198 bp, Homo sapiens; identical to SEQ ID NO: 67821

SEQ ID NO: 67850 - DNA, 201 bp, Homo sapiens; identical to SEQ ID NO: 67822
  misc_feature (1)...(201): n = A,T,C or G

SEQ ID NO: 67851 - DNA, 201 bp, Homo sapiens
tccggtaatgctcgtctttgtcacgcttgtagaaccgcaaaaagagcaagtggacgggcagccccacaagccgccaccgggcttgcagggtccagttctcmgggtggcgggtcagctgtaaaacctccaaacgaaggtgtgcaaaataattccaggccaggaaacggcagagggtcagtgaaagaatgtaccatgtccggc

SEQ ID NO: 67852 - DNA, 201 bp, Homo sapiens; identical to SEQ ID NO: 67824

SEQ ID NO: 67853 - DNA, 201 bp, Homo sapiens; identical to SEQ ID NO: 67825

SEQ ID NO: 67854 - DNA, 201 bp, Homo sapiens; identical to SEQ ID NO: 67826

SEQ ID NO: 67855 - DNA, 201 bp, Homo sapiens; identical to SEQ ID NO: 67827

SEQ ID NO: 67856 - DNA, 201 bp, Homo sapiens; identical to SEQ ID NO: 67828

SEQ ID NO: 67857 - DNA, 101 bp, Homo sapiens
ctctcatacatgacagacagatgttcctccatactaggatctcctgacggggtggcaggggaagggtgggcagttccagggacttggaaaggtatccaagm

SEQ ID NO: 67858 - DNA, 201 bp, Homo sapiens; identical to SEQ ID NO: 67830

SEQ ID NO: 67859 - DNA, 201 bp, Homo sapiens; identical to SEQ ID NO: 67831

SEQ ID NO: 67860 - DNA, 161 bp, Homo sapiens; identical to SEQ ID NO: 67832

SEQ ID NO: 67861 - DNA, 201 bp, Homo sapiens; identical to SEQ ID NO: 67833

SEQ ID NO: 67862 - DNA, 201 bp, Homo sapiens; identical to SEQ ID NO: 67834

SEQ ID NO: 67863 - DNA, 201 bp, Homo sapiens; identical to SEQ ID NO: 67822
  misc_feature (1)...(201): n = A,T,C or G

SEQ ID NO: 67864 - DNA, 201 bp, Homo sapiens; identical to SEQ ID NO: 67851

SEQ ID NO: 67865 - DNA, 201 bp, Homo sapiens
tgcctttttgactcttcagaggctgtgaatttctggtcttggaagatcacagtggagcaattggacagataggattttatccttcatatcccttgcaaaaratctctaagaacccatggagagccagccagcgcaagagtgtctgatgcagatgtttttgcccatcgagccagcctgctttgtggaatggctggggacttc

SEQ ID NO: 67866 - DNA, 201 bp, Homo sapiens; identical to SEQ ID NO: 67825

SEQ ID NO: 67867 - DNA, 201 bp, Homo sapiens; identical to SEQ ID NO: 67826

SEQ ID NO: 67868 - DNA, 201 bp, Homo sapiens; identical to SEQ ID NO: 67828

SEQ ID NO: 67869 - DNA, 101 bp, Homo sapiens; identical to SEQ ID NO: 67857

SEQ ID NO: 67870 - DNA, 201 bp, Homo sapiens; identical to SEQ ID NO: 67834

SEQ ID NO: 67871 - DNA, 201 bp, Homo sapiens
tgccctgaagagcgctcctccttccggtgaaagtcgtcgggttcccagccgggagtctgcggagttctcatactctgttacccagcttcctttgtatgagkgctgttgcgcacttccggtggaagcgctgaagcgagtgggtggagtttacggagccggtgggcggtaggcggtgctacgggtagctgggtgctgtccaaa

SEQ ID NO: 67872 - DNA, 201 bp, Homo sapiens
atgaaactggcaaggatacttttcgagtctacaagagtggttcagagggtccagtcctgctccttctgcatggaggaggtcattctgccctttcttgggcygtgttcacggcagcgattattagtagagttcagtgtaggattgtagctttggatctgcgaagtcatggtgaaacaaaggtcaagaatcctgaagatctgt

SEQ ID NO: 67873 - DNA, 201 bp, Homo sapiens
tctgttgtaaatacgtcgcaccagaggccactgtgatgccactgtctcctctccatcccgcccagccatgtgacactggctcccggtagacgggcaccccragatgtaccaaccttttcatgtattctgccaaaagcattgttttccagggcccttgaccaacatcggcttccccagtccagggctcccctgctcctttcc

SEQ ID NO: 67874 - DNA, 201 bp, Homo sapiens
tagacgggcaccccgagatgtaccaaccttttcatgtattctgccaaaagcattgttttccagggcccttgaccaacatcggcttccccagtccagggctyccctgctcctttcccttccctgtactggggtagctcctgcctgctctccctgcgttgcctagggtaaagcctccagatttgccatactgagcccctcttc

SEQ ID NO: 67875 - DNA, 201 bp, Homo sapiens
cgatcccagaaggaagtcttgttcctgcatgtaaatgatgggtcatctttggaaagccttcaggttgttgcagattcaggccttgacagtagagaattaamttttgggagttctgtggaagtacaagggcagctgataaaaagtccatccaaaaggcaaaatgtggaactgaaggcagaaaaaattaaagttattggaaat

SEQ ID NO: 67876 - DNA, 201 bp, Homo sapiens
ggcaaaatgtggaactgaaggcagaaaaaattaaagttattggaaattgtgatgccaaggatttccccatcaaatataaagagaggcatcctctggagtayctgcgacaatatcctcactttaggtgtaggactaacgttctgggttctatattgaggattcgcagtgaagcgacagctgctattcattctttctttaagg

SEQ ID NO: 67877 - DNA, 103 bp, Homo sapiens
tgwggtaggagtggttgcgcgtgttgcggcccgggttctgttcgtaggtttacaattgtcgcgggtagtggggcgccccagctgccaactgcacgtggtttct

SEQ ID NO: 67878 - DNA, 143 bp, Homo sapiens
tgtttaataactgttgcttttcaattttcaaagctgttgagatattacattaagtatttcaactctttaatcactgttgttataatttgtttatatttgaygtttataatttgtctaataaaatagatttttttaatagacac

SEQ ID NO: 67879 - DNA, 201 bp, Homo sapiens
gatgggatttgaacgctacctgcagtgcatcttgggtgttgacaatatcaaagatgttatccctttcccaaggtttcctcattcatgccttttatagctgraagattggttaaggaaaagcaccccccatggcagagacactgcacatgattgtgcatacagcagaatgcatgtttggattttagaaatgcagatttcaat

SEQ ID NO: 67880 - DNA, 201 bp, Homo sapiens
atcttgggtgttgacaatatcaaagatgttatccctttcccaaggtttcctcattcatgccttttatagctggaagattggttaaggaaaagcaccccccrtggcagagacactgcacatgattgtgcatacagcagaatgcatgtttggattttagaaatgcagatttcaatatgtaattgttgtgccataagatatcat

SEQ ID NO: 67881 - DNA, 201 bp, Homo sapiens
cacctggccaaaaggacagattagaacatatgctaaaaaacaactttttaatcatttcttatactgaagcagtggagatcttaaagcaagcatcccagaasttcacctttaccccagagtggggtgctgacctacggactgaacatgaaaagtacctggtgaagcactgtggcaacatacctgtcttcgttattaattatc

SEQ ID NO: 67882 - DNA, 201 bp, Homo sapiens
cgatcccagaaggaagtcttgttcctgcatgtaaatgatgggtcatctttggaaagccttcaggttgttgcagattcaggccttgacagtagagaattaamttttgggagttctgtggaagtacaagggcagctgataaaaagtccatccaaaaggcaaaatgtggaactgaaggcagaaaaaattaaagatttccccatc

SEQ ID NO: 67883 - DNA, 201 bp, Homo sapiens
agctgataaaaagtccatccaaaaggcaaaatgtggaactgaaggcagaaaaaattaaagatttccccatcaaatataaagagaggcatcctctggagtayctgcgacaatatcctcactttaggtgtaggactaacgttctgggttctatattgaggattcgcagtgaagcgacagctgctattcattctttctttaagg

SEQ ID NO: 67884 - DNA, 103 bp, Homo sapiens; identical to SEQ ID NO: 67877

SEQ ID NO: 67885 - DNA, 143 bp, Homo sapiens; identical to SEQ ID NO: 67878

SEQ ID NO: 67886 - DNA, 201 bp, Homo sapiens; identical to SEQ ID NO: 67879

SEQ ID NO: 67887 - DNA, 201 bp, Homo sapiens; identical to SEQ ID NO: 67880

SEQ ID NO: 67888 - DNA, 201 bp, Homo sapiens; identical to SEQ ID NO: 67881

SEQ ID NO: 67889 - DNA, 201 bp, Homo sapiens
cgatcccagaaggaagtcttgttcctgcatgtaaatgatgggtcatctttggaaagccttcaggttgttgcagattcaggccttgacagtagagaattaamttttgggagttctgtggaagtacaagggcagctgataaaaagtccatccaaaaggcaaaatgtggaactgaaggcagaaaaaagaggcatcctctggagt

SEQ ID NO: 67890 - DNA, 201 bp, Homo sapiens
tttgggagttctgtggaagtacaagggcagctgataaaaagtccatccaaaaggcaaaatgtggaactgaaggcagaaaaaagaggcatcctctggagtayctgcgacaatatcctcactttaggtgtaggactaacgttctgggttctatattgaggattcgcagtgaagcgacagctgctattcattctttctttaagg

SEQ ID NO: 67891 - DNA, 103 bp, Homo sapiens; identical to SEQ ID NO: 67877

SEQ ID NO: 67892 - DNA, 143 bp, Homo sapiens; identical to SEQ ID NO: 67878

SEQ ID NO: 67893 - DNA, 201 bp, Homo sapiens; identical to SEQ ID NO: 67879

SEQ ID NO: 67894 - DNA, 201 bp, Homo sapiens; identical to SEQ ID NO: 67880

SEQ ID NO: 67895 - DNA, 201 bp, Homo sapiens; identical to SEQ ID NO: 67881

SEQ ID NO: 67896 - DNA, 201 bp, Homo sapiens
agctccaaagagaattgttttttccagaatgccaatactggggctcagagctccagctacccactttggattttgaagatgttttaagatatgatgaacaygcatacaagtggctctccaccctcaagaaagtaggcatagtaagactcaccggagcatctgacaaaccaggagaagtttcaaaacttgggaaaaggatgg

SEQ ID NO: 67897 - DNA, 201 bp, Homo sapiens
ttgtaatcatatacaatgtcaactttttagatgtttcaccactcttttgcaaataaagcatcctttctgctctgttgcatgcctgctctaatttcttttgyccatatatgagtatctccagaatgtctacaaatagtttttgtagcaaatgaaaatttcttcaaataagccttttgtttcaaataaaacttgtctcaaaac

SEQ ID NO: 67898 - DNA, 201 bp, Homo sapiens
tttctgtacaatcaaaacataaaattatagagttagatgataaaggccaagtggttcgcatcaacttcaataacgcaactagggacacaatatttgatgtrcctgttgaaagagttcagcctttttatgctgctctgaaggagtttgttgacctcatgaacagcaaagaatccaagtttaccttcaagatgaatccaggtg

SEQ ID NO: 67899 - DNA, 201 bp, Homo sapiens
cgggcaccagaatgctccctctccaaaggatctaaggaccaaagctgacagtttctttacttgcaggtagctgacagcatctactcctgaagaccggaaayatggcttgtaccatccaaaaggcagaagcacttgacggggctcatttgatgcagatcctctggtatgatgaggaagagtctctctacccagctgtatggt

SEQ ID NO: 67900 - DNA, 201 bp, Homo sapiens; identical to SEQ ID NO: 67896

SEQ ID NO: 67901 - DNA, 201 bp, Homo sapiens; identical to SEQ ID NO: 67897

SEQ ID NO: 67902 - DNA, 201 bp, Homo sapiens; identical to SEQ ID NO: 67898

SEQ ID NO: 67903 - DNA, 201 bp, Homo sapiens
tgacgggcaccagaatgctccctctccaaaggatctaaggaccaaagctgacagtttctttacttggtagctgacagcatctactcctgaagaccggaaayatggcttgtaccatccaaaaggcagaagcacttgacggggctcatttgatgcagatcctctggtatgatgaggaagagtctctctacccagctgtatggt

SEQ ID NO: 67904 - DNA, 201 bp, Homo sapiens; identical to SEQ ID NO: 67896

SEQ ID NO: 67905 - DNA, 201 bp, Homo sapiens; identical to SEQ ID NO: 67897

SEQ ID NO: 67906 - DNA, 201 bp, Homo sapiens; identical to SEQ ID NO: 67898

SEQ ID NO: 67907 - DNA, 201 bp, Homo sapiens; identical to SEQ ID NO: 67899

SEQ ID NO: 67908 - DNA, 201 bp, Homo sapiens
ctggacaagtacaatgctgagaagcctaagaatgcgattcacacctttgtgcagtccggatctcacttggcggcaagggagaaggcaaatctgtgaggccrgggccctgcacctgtgcagcgaagcttagcgttcatccgtgtaacccgctcatcactggatgaagattctcctgtgctagatgtgcaaatgcaagctagt

SEQ ID NO: 67909 - DNA, 141 bp, Homo sapiens
agggggtggtgctgattggctgagcctgaagtcgccacggwctcggggcaacaggcagatttgcctgctgagggtggagacccacgagccgaggcctcctgcagtgttctgcacagcaaaccgcacgctatggctgacagc

SEQ ID NO: 67910 - DNA, 201 bp, Homo sapiens
ctaccagcgtgacggcccgatgtgcatgcaggacaatcagggtggtgctccaaattactaccccaacagctttggtgctccggaacaacagccttctgccytggagcacagcatccaatattctggagaagtgcggagattcaacactgccaatgatgataacgttactcaggtgcgggcattctatgtgaacgtgctgaa

SEQ ID NO: 67911 - DNA, 201 bp, Homo sapiens
tgctgattggctgagcctgaagtcgccacggactcggggcaacaggcagatttgcctgctgagggtggagacccacgagccgaggcctcctgcagtgttcygcacagcaaaccgcacgctatggctgacagccgggatcccgccagcgaccagatgcagcactggaaggagcagcgggccgcgcagaaagctgatgtcctg

SEQ ID NO: 67912 - DNA, 159 bp, Homo sapiens
tactcagaaatttttatttttctaaggttctcataggaaaagcttaatgtttattcctgataataattgatcaaattcatttttttcactggagttacatyaatgttaattcagcactgatttcacaacagatcaatttgtaattgcttacatttttac

SEQ ID NO: 67913 - DNA, 201 bp, Homo sapiens
ttgcctatcctgacactcaccgccatcgcctgggacccaattatcttcatatacctgtgaactgtccctaccgtgctcgagtggccaactaccagcgtgayggcccgatgtgcatgcaggacaatcagggtggtgctccaaattactaccccaacagctttggtgctccggaacaacagccttctgccctggagcacagca

SEQ ID NO: 67914 - DNA, 201 bp, Homo sapiens
agattctcctgtgctagatgtgcaaatgcaagctagtggcttcaaaatagagaatcccactttctatagcagattgtgtaacaattttaatgctatttccmcaggggaaaatgaaggttaggatttaacagtcatttaaaaaaaaaatttgttttgacggatgattggattattcatttaaaatgattagaaggcaagttt

SEQ ID NO: 67915 - DNA, 201 bp, Homo sapiens
atcaggtttctttcttgttcagtgatcgggggattccagatggacatcgccacatgaatggatatggatcacatactttcaagctggttaatgcaaatggrgaggcagtttattgcaaattccattataagactgaccagggcatcaaaaacctttctgttgaagatgcggcgagactttcccaggaagatcctgactatg

SEQ ID NO: 67916 - DNA, 201 bp, Homo sapiens
acagtcatttaaaaaaaaaatttgttttgacggatgattggattattcatttaaaatgattagaaggcaagtttctagctagaaatatgattttatttgayaaaatttgttgaaattatgtatgtttacatatcacctcatggcctattatattaaaatatggctataaatatataaaaagaaaagataaagatgatctac

SEQ ID NO: 67917 - DNA, 201 bp, Homo sapiens
tgattggattattcatttaaaatgattagaaggcaagtttctagctagaaatatgattttatttgacaaaatttgttgaaattatgtatgtttacatatcmcctcatggcctattatattaaaatatggctataaatatataaaaagaaaagataaagatgatctactcagaaatttttatttttctaaggttctcatagg

SEQ ID NO: 67918 - DNA, 201 bp, Homo sapiens
tgtgtgagaacattgccggccacctgaaggatgcacaaattttcatccagaagaaagcggtcaagaacttcactgaggtccaccctgactacgggagccayatccaggctcttctggacaagtacaatgctgagaagcctaagaatgcgattcacacctttgtgcagtccggatctcacttggcggcaagggagaaggcaa

SEQ ID NO: 67919 - DNA, 201 bp, Homo sapiens; identical to SEQ ID NO: 67908

SEQ ID NO: 67920 - DNA, 141 bp, Homo sapiens; identical to SEQ ID NO: 67909

SEQ ID NO: 67921 - DNA, 201 bp, Homo sapiens; identical to SEQ ID NO: 67910

SEQ ID NO: 67922 - DNA, 201 bp, Homo sapiens; identical to SEQ ID NO: 67911

SEQ ID NO: 67923 - DNA, 188 bp, Homo sapiens
atacagcagtgtcatcagaagataacttgagcaccgtcatggcttaatgtttattcctgataataattgatcaaattcatttttttcactggagttacatyaatgttaattcagcactgatttcacaacagatcaatttgtaattgcttacatttttacaataaataatctgtacgtaagaacagaga

SEQ ID NO: 67924 - DNA, 109 bp, Homo sapiens
tttttttcactggagttacattaatgttaattcagcactgatttcacaacagatcaatttgtaattgcttacatttttacaataaataatctgtacgtaaraacagaga

SEQ ID NO: 67925 - DNA, 201 bp, Homo sapiens; identical to SEQ ID NO: 67913

SEQ ID NO: 67926 - DNA, 201 bp, Homo sapiens; identical to SEQ ID NO: 67914

SEQ ID NO: 67927 - DNA, 201 bp, Homo sapiens; identical to SEQ ID NO: 67916

SEQ ID NO: 67928 - DNA, 201 bp, Homo sapiens; identical to SEQ ID NO: 67915

SEQ ID NO: 67929 - DNA, 201 bp, Homo sapiens; identical to SEQ ID NO: 67917

SEQ ID NO: 67930 - DNA, 201 bp, Homo sapiens
atatataaaaagaaaagataaagatgatctactcagaaatttttatttttctaaggttctcataggaaaagtacatttaatacagcagtgtcatcagaagrtaacttgagcaccgtcatggcttaatgtttattcctgataataattgatcaaattcatttttttcactggagttacattaatgttaattcagcactgatt

SEQ ID NO: 67931 - DNA, 201 bp, Homo sapiens
gaaaagataaagatgatctactcagaaatttttatttttctaaggttctcataggaaaagtacatttaatacagcagtgtcatcagaagataacttgagcmccgtcatggcttaatgtttattcctgataataattgatcaaattcatttttttcactggagttacattaatgttaattcagcactgatttcacaacagat

SEQ ID NO: 67932 - DNA, 201 bp, Homo sapiens; identical to SEQ ID NO: 67918

SEQ ID NO: 67933 - DNA, 201 bp, Homo sapiens
tgcaacaggcccagatgttgctgagcatgaacagcctggaggcggtgaatgcgggcgtgcagcagaacaacacagagtcctttgctgtcgcactctgccayctcgcagagctacacgcggagcagggctgttttgctgcagcttctgaagtgttaaagcacttgaaggaacgatttccgcctaatagtcagcacgcccagt

SEQ ID NO: 67934 - DNA, 201 bp, Homo sapiens
tatcctgagggcaaggttgctggcactgggaggcatctgctcccaagaaagccagagcctgtgaggtgtatgactttacgcctccactcaagatagctgaygggcatggccaaagcgcagccaggtctgctgctgaaaggaaatcctgttccctctccccacccagcaccatggcactgcaacaggcccagatgttgctga

SEQ ID NO: 67935 - DNA, 201 bp, Homo sapiens
ccggcagctgcatcaggagctgccctctcatggggtacccttgataaaccatctctagagaggacatccctgctgggctgctgtgcagagtataagatttwggacttgttcatgtcccctctctccctataaatgatgtatttgtgacaccctatcttgtcaataaacagcattctgattagtttgtcttattttgttgct

SEQ ID NO: 67936 - DNA, 201 bp, Homo sapiens; identical to SEQ ID NO: 67933

SEQ ID NO: 67937 - DNA, 201 bp, Homo sapiens; identical to SEQ ID NO: 67935

SEQ ID NO: 67938 - DNA, 190 bp, Homo sapiens
acgcggatgtctgtttcctgggatattgtgagggcgggcggagatgtagacccggtagtgttgtgccttgtggtgacaactggcggcagygcgccgcgggcccgagacttagtctcgggccgccatggccagcgtccacgagagcctctacttcaatcccatgatgaccaatggggttgtgcacgccaat

SEQ ID NO: 67939 - DNA, 201 bp, Homo sapiens
ggtgctgctgaacgagatgagccgcacaggcgagggcgccgtcagcctcatggagcggcggaggctcaaccagctgctcctgcccctgctgcagggcccakatattacactgtcaaaactttacaagttaattgaagagtcttgtccacagctggcaaattcagtgcagatcagaatcaaactgatggctgaaggcgagtt

SEQ ID NO: 67940 - DNA, 201 bp, Homo sapiens
cagcttccttgcagaaggaattaaacaatttgttgaaatttaatcctgattttgctgaagcgcattatctcagctacttaaacaacctccgtgtccaagaygttttcagttcaacacacagtctcctccattattttgatcgtctgattcttaccggagccgaaagcaaaagtaatggggaagagggctatggccggagct

SEQ ID NO: 67941 - DNA, 201 bp, Homo sapiens
gagagtctttagacctgtgcacagccccgcaccaaggggtgctgtatgctctaggcatcccctcccccaggggattttctaagtagatggggggacacggygaactggctgtgtccatctttgtcactgagtgaaatctctgttttctattctctgagaagataagtttgtatgttctgagaataaatacatgaatattaa

SEQ ID NO: 67942 - DNA, 201 bp, Homo sapiens
atgccaggctatgggggcagccagttggcattgctccccagactgaacagaaacctggccgccggatgggacctcctttggcacagacttgactgtgtaaktgcataaactgcagtagcatcattgccctagatgccccaggagacctggcaccatgaggattacagacagtggaatcttactgtcatctggacagctgtt

SEQ ID NO: 67943 - DNA, 201 bp, Homo sapiens
aagcagcgctgggatgatcgtcattggtctcagaaaaagttagatgagatgacggacagggactggcggatcttccgtgaggactacagcatcaccaccamaggtggcaagatccccaatcccatccgatcctggaaagactcttctctgcccccacacatcttggaggtcattgataagtgtggctacaaggaaccaaca

SEQ ID NO: 67944 - DNA, 201 bp, Homo sapiens
agaaggataagagcaaggaactgcatgccattaaggagcgttacctgggtggcatcaaaaagcggcgccgaacgagacatctcaatgaccggaaatttgtytttgagtgggatgcatctgaggacacatccattgactacaaccccctgtacaaagaacggcaccaggtgcagttgttagggcgaggcttcattgcaggca

SEQ ID NO: 67945 - DNA, 201 bp, Homo sapiens
gaaacctggccgccggatgggacctcctttggcacagacttgactgtgtaactgcataaactgcagtagcatcattgccctagatgccccaggagacctgrcaccatgaggattacagacagtggaatcttactgtcatctggacagctgttttcctgtttggatggtaaaggaagttgagagtctttagacctgtgcaca

SEQ ID NO: 67946 - DNA, 136 bp, Homo sapiens
taagtagatggggggacacggtgaactggctgtgtccatctttgtcactgagtgaaatctctgttttctattctctgagaagataagtttgtatgttctgygaataaatacatgaatattaagactgttagatcta

SEQ ID NO: 67947 - DNA, 201 bp, Homo sapiens
ggcacagacttgactgtgtaactgcataaactgcagtagcatcattgccctagatgccccaggagacctggcaccatgaggattacagacagtggaatctkactgtcatctggacagctgttttcctgtttggatggtaaaggaagttgagagtctttagacctgtgcacagccccgcaccaaggggtgctgtatgctcta

SEQ ID NO: 67948 - DNA, 201 bp, Homo sapiens
ctagatgccccaggagacctggcaccatgaggattacagacagtggaatcttactgtcatctggacagctgttttcctgtttggatggtaaaggaagttgrgagtctttagacctgtgcacagccccgcaccaaggggtgctgtatgctctaggcatcccctcccccaggggattttctaagtagatggggggacacggtg

SEQ ID NO: 67949 - DNA, 136 bp, Homo sapiens; identical to SEQ ID NO: 67946

SEQ ID NO: 67950 - DNA, 201 bp, Homo sapiens; identical to SEQ ID NO: 67947

SEQ ID NO: 67951 - DNA, 201 bp, Homo sapiens; identical to SEQ ID NO: 67948

SEQ ID NO: 67952 - DNA, 201 bp, Homo sapiens
agcggttcatggcccggaaggccttgctgcaggagcaggggctgctgagcatgcctccagaaccagggtcctccccactgcccacccctttcggggcagcracagcaactgaagctgccagcagtgggaagcagtgtctgagggctggatctggcagtgccccatgcagcagaaggcctgctcccgggaaagcctcagggc

SEQ ID NO: 67953 - DNA, 201 bp, Homo sapiens
atgcctccagaaccagggtcctccccactgcccacccctttcggggcagcgacagcaactgaagctgccagcagtgggaagcagtgtctgagggctggatstggcagtgccccatgcagcagaaggcctgctcccgggaaagcctcagggcccttgcccagcaagtgtgtggctatcgactgtgagatggtgggcacggga

SEQ ID NO: 67954 - DNA, 201 bp, Homo sapiens
actgtgagatggtgggcacgggaccccgagggcgggtaagcgagctggcccgctgttccattgtgagctaccatggcgatgtcctctatgacaagtacatyaggcctgagatgcccatcgctgactaccgtacccgctggagtggcatcactcggcagcacatgcgcaaggctgtccccttccaggtggcccagaaagaga

SEQ ID NO: 67955 - DNA, 201 bp, Homo sapiens
gcccagcaagtgtgtggctatcgactgtgagatggtgggcacgggaccccgagggcgggtaagcgagctggcccgctgttccattgtgagctaccatggcratgtcctctatgacaagtacatcaggcctgagatgcccatcgctgactaccgtacccgctggagtggcatcactcggcagcacatgcgcaaggctgtccc

SEQ ID NO: 67956 - DNA, 201 bp, Homo sapiens
ccccattggaagattactccccaggcttcccttgccccaagcagtgagctgactggaatggtaccccgggaggcccctgagtctgctcagtgcctgtgccyttccctcaccatcccaaatgccaaggatgtgcttcggaagaggcacaagagaaggagccgacagcaccagcggttcatggcccggaaggccttgctgcag

SEQ ID NO: 67957 - DNA, 201 bp, Homo sapiens
tgcttcggaagaggcacaagagaaggagccgacagcaccagcggttcatggcccggaaggccttgctgcaggagcaggggctgctgagcatgcctccagarccagggtcctccccactgcccacccctttcggggcagcgacagcaactgaagctgccagcagtgggaagcagtgtctgagggctggatctggcagtgccc

SEQ ID NO: 67958 - DNA, 201 bp, Homo sapiens
accagcggttcatggcccggaaggccttgctgcaggagcaggggctgctgagcatgcctccagaaccagggtcctccccactgcccacccctttcggggcrgcgacagcaactgaagctgccagcagtgggaagcagtgtctgagggctggatctggcagtgccccatgcagcagaaggcctgctcccgggaaagcctcag

SEQ ID NO: 67959 - DNA, 201 bp, Homo sapiens
tccttaagctcctgaagggcaaggtggtggtggggcacgcgctgcacaacgacttccaggcgctcaagtatgtccaccctcggagccagacccgggatacsacctatgtcccaaacttcctcagcgagcccggcctccacacccgggcccgggtctctctaaaggacctggccctgcagctgctgcacaagaagatccagg

SEQ ID NO: 67960 - DNA, 201 bp, Homo sapiens
cctggagctcccttaccccaactcaatgacttgggggtaaagttctcttccttttgttgcctacctcttcctccactcatttgggttcagaataaacatgycctgaagttaaagaggagttaagtcctaaaggaggcatttcttccccacctccctgacctggaactctggctacagccattgtaggaactccgtgcctgg

SEQ ID NO: 67961 - DNA, 201 bp, Homo sapiens
cttgtctgtggccaccaggcacaggtttggcttccggtcagtgtcccgacactgtgcgggaggtgacaacagagcaaagcagcgcaggggtcagggaggtrcagacactgctgaaatcacactaccccaccctcagctgaagccccacgttccacaaacttggggtcatagattgtccagtcactggctccctccctgtca

SEQ ID NO: 67962 - DNA, 201 bp, Homo sapiens; identical to SEQ ID NO: 67956

SEQ ID NO: 67963 - DNA, 201 bp, Homo sapiens
ttgtctgtggccaccaggcacaggtttggcttccggtcagtgtcccgacactgtgcgggaggtgacaacagagcaaagcagcgcaggggtcagggaggtasagacactgctgaaatcacactaccccaccctcagctgaagccccacgttccacaaacttggggtcatagattgtccagtcactggctccctccctgtcag

SEQ ID NO: 67964 - DNA, 201 bp, Homo sapiens; identical to SEQ ID NO: 67957

SEQ ID NO: 67965 - DNA, 201 bp, Homo sapiens
gagccagccccagggccagaggagttggggtcatctgttaccttgacaccctctgcacacagcatagccctctctctctccagggctgttggttctttctyctgactcctgtggttttgctaatggcactttacagactccatggagatgtcaggtggaccatcttctagggcccagcaggagtagggaatgtgccaacag

SEQ ID NO: 67966 - DNA, 201 bp, Homo sapiens; identical to SEQ ID NO: 67958

SEQ ID NO: 67967 - DNA, 201 bp, Homo sapiens; identical to SEQ ID NO: 67959

SEQ ID NO: 67968 - DNA, 201 bp, Homo sapiens
ttggataaccaagagctcaggtcacacagaccttggagccccatctttgcttgcagcttagctttgagatactaagcaagcgagggacttcactcttgagsctgttttttcctcatctgtaaagtggggatagtggtacggcctacctcatagggttgtaatgagcactaaatgtgaagtgcttggcacagtgcctggcac

SEQ ID NO: 67969 - DNA, 187 bp, Homo sapiens
tccagaactttgttctagattccttaaaagtcggtagctgatgtcaaactcaattgagcagtagctttgatcccttggtctgggggtcgaaggaagatggygctgttatcagcggggaaatgtactatttaagatcagctttgttgtaaaaccatttgttctagaataaaactcaattggaaacgtg

SEQ ID NO: 67970 - DNA, 201 bp, Homo sapiens
ggtgtggccggtaggaagtgggggccaggagagcagcgggcactccttcctgggcagggtggggcaggatgcagtgagccagccccagggccagaggagtwggggtcatctgttaccttgacaccctctgcacacagcatagccctctctctctccagggctgttggttctttctcctgactcctgtggttttgctaatgg

SEQ ID NO: 67971 - DNA, 201 bp, Homo sapiens; identical to SEQ ID NO: 67952

SEQ ID NO: 67972 - DNA, 201 bp, Homo sapiens; identical to SEQ ID NO: 67953

SEQ ID NO: 67973 - DNA, 201 bp, Homo sapiens
gtactggcccgatgacctggcccacggcagcagaggaggagccagggaggcacaggacagaaggaattgagaagggggcggggctccctggctgggcttcyggtgtggccggtaggaagtgggggccaggagagcagcgggcactccttcctgggcagggtggggcaggatgcagtgagccagccccagggccagaggagt

SEQ ID NO: 67974 - DNA, 201 bp, Homo sapiens; identical to SEQ ID NO: 67954

SEQ ID NO: 67975 - DNA, 201 bp, Homo sapiens; identical to SEQ ID NO: 67955

SEQ ID NO: 67976 - DNA, 201 bp, Homo sapiens; identical to SEQ ID NO: 67960

SEQ ID NO: 67977 - DNA, 201 bp, Homo sapiens; identical to SEQ ID NO: 67961

SEQ ID NO: 67978 - DNA, 201 bp, Homo sapiens; identical to SEQ ID NO: 67956

SEQ ID NO: 67979 - DNA, 201 bp, Homo sapiens; identical to SEQ ID NO: 67963

SEQ ID NO: 67980 - DNA, 201 bp, Homo sapiens; identical to SEQ ID NO: 67957

SEQ ID NO: 67981 - DNA, 201 bp, Homo sapiens; identical to SEQ ID NO: 67965

SEQ ID NO: 67982 - DNA, 201 bp, Homo sapiens; identical to SEQ ID NO: 67958

SEQ ID NO: 67983 - DNA, 201 bp, Homo sapiens; identical to SEQ ID NO: 67959

SEQ ID NO: 67984 - DNA, 201 bp, Homo sapiens; identical to SEQ ID NO: 67968

SEQ ID NO: 67985 - DNA, 187 bp, Homo sapiens; identical to SEQ ID NO: 67969

SEQ ID NO: 67986 - DNA, 201 bp, Homo sapiens; identical to SEQ ID NO: 67970

SEQ ID NO: 67987 - DNA, 201 bp, Homo sapiens; identical to SEQ ID NO: 67952

SEQ ID NO: 67988 - DNA, 201 bp, Homo sapiens; identical to SEQ ID NO: 67953

SEQ ID NO: 67989 - DNA, 201 bp, Homo sapiens; identical to SEQ ID NO: 67973

SEQ ID NO: 67990 - DNA, 201 bp, Homo sapiens; identical to SEQ ID NO: 67954

SEQ ID NO: 67991 - DNA, 201 bp, Homo sapiens; identical to SEQ ID NO: 67955

SEQ ID NO: 67992 - DNA, 201 bp, Homo sapiens; identical to SEQ ID NO: 67960

SEQ ID NO: 67993 - DNA, 201 bp, Homo sapiens; identical to SEQ ID NO: 67961

SEQ ID NO: 67994 - DNA, 201 bp, Homo sapiens; identical to SEQ ID NO: 67956

SEQ ID NO: 67995 - DNA, 201 bp, Homo sapiens; identical to SEQ ID NO: 67963

SEQ ID NO: 67996 - DNA, 201 bp, Homo sapiens; identical to SEQ ID NO: 67957

SEQ ID NO: 67997 - DNA, 201 bp, Homo sapiens; identical to SEQ ID NO: 67965

SEQ ID NO: 67998 - DNA, 201 bp, Homo sapiens; identical to SEQ ID NO: 67958

SEQ ID NO: 67999 - DNA, 201 bp, Homo sapiens; identical to SEQ ID NO: 67959

SEQ ID NO: 68000 - DNA, 201 bp, Homo sapiens; identical to SEQ ID NO: 67968

SEQ ID NO: 68001 - DNA, 187 bp, Homo sapiens; identical to SEQ ID NO: 67969

SEQ ID NO: 68002 - DNA, 201 bp, Homo sapiens; identical to SEQ ID NO: 67970

SEQ ID NO: 68003 - DNA, 201 bp, Homo sapiens; identical to SEQ ID NO: 67952

SEQ ID NO: 68004 - DNA, 201 bp, Homo sapiens; identical to SEQ ID NO: 67953

SEQ ID NO: 68005 - DNA, 201 bp, Homo sapiens; identical to SEQ ID NO: 67973

SEQ ID NO: 68006 - DNA, 201 bp, Homo sapiens; identical to SEQ ID NO: 67954

SEQ ID NO: 68007 - DNA, 201 bp, Homo sapiens; identical to SEQ ID NO: 67955

SEQ ID NO: 68008 - DNA, 201 bp, Homo sapiens
tattttaagaaaaaaggttttcttctgattttctgcacaaccagacgtttgtttgtttgctttaaaatgtttcaacaaaatcctggtttgtttcgaaataygttggattagcatttaacacctcatcggtcactaaagcccagtcagttcaccagccccaacacagcctcggctaaaagaacatcagagcaaacagagctg

SEQ ID NO: 68009 - DNA, 201 bp, Homo sapiens
ggtgcagagagaacctccggctttacttctgtctcgtctgccccaaccgctagcctcggcttgggtaaggcgaggcggaattaaaccccgctccgagagcrgcagcttcgcgcgcggtgcgctcggcctatgcctgccccgaggggcgtctggtaggcaccccgccctctcccgcagctcgacccccatgatagatacgct

SEQ ID NO: 68010 - DNA, 201 bp, Homo sapiens
atcaacgtggccatcccgggcatcatgctgcggcgcctgcagaagggtaacctgccggtgcgcgcgctcttcacgcgcggcgaggaccgggaccgcttcayccggcgctgtggcaccgacacagtggtgctctacgacgagagcagcagcgactggaacgagaatacgggcggcgagtcggtgctcgggctgctgctcaag

SEQ ID NO: 68011 - DNA, 201 bp, Homo sapiens
atcctagtgtgagaatgctgaatccagaatgatgtctccactttttcccctagcatgcgcatggcaaggcatatctaagcttcctcaccgtgtcaggatayggctttagaattttacattggcacttaggaggcaactttgtcatccctgttgtaatgtgcttttttgtttaactggcttgggatgtgggtcagaaaccct

SEQ ID NO: 68012 - DNA, 201 bp, Homo sapiens
aaacctgtcccagtttttccctgaggccatttctttcatagatgaagcccggggcaagaactgtggtgtcttggtacattgcttggctggcattagccgckcagtcactgtgactgtggcttaccttatgcagaagctcaatctgtcgatgaacgatgcctatgacattgtcaaaatgaaaaaatccaacatatcccctaa

SEQ ID NO: 68013 - DNA, 201 bp, Homo sapiens
acaagttttcctaaagctagctcgcgaacgcaagcgtcgcgaacaagggcttttgtgcatgctaattgcgccattggtgcgcaaaagttccgacgcgaagkgtgaactctcaacagaaggaaacatgagacaactgaagtgccctggtttatgtgccctgctcctcctccgctgccgcctccccttctttctccttcctcc

SEQ ID NO: 68014 - DNA, 201 bp, Homo sapiens
atacaatttggatattaaccacagagaggtgtagcagaataccaagatgacagccacatgttaacctcctccctatccttcactgtcaggatcttctgctytataatgctgagataatgccaaagaggaagtagggataattctttttccagtctgttgtcatgggcaattctacctgcagatatcctagtgtgagaatgc

SEQ ID NO: 68015 - DNA, 201 bp, Homo sapiens
caagagatagcaaatcgagtcttaaataatccggggagaaagacgcccgggtagatttgaggtgcagccttggagggagggattagaagccgctagacttyttttcctcccctctcagtagcacggagtccgaattaattggatttcattcactggggaggaacaaaaactatctgggcagcttcattgagagagattcat

SEQ ID NO: 68016 - DNA, 201 bp, Homo sapiens
tagtttgactatgccttacctttgtaaatatttttgcttgtgttgtcgcaaaggggataatctgggaaagacaccaaatcatgggctcactttaaaaaaaraaagaataaaaaaaccttcagctgtgctaaacagtatattacctctgtataaaattcttcagggagtgtcacctcaaatgcaatactttgggttggtttc

SEQ ID NO: 68017 - DNA, 201 bp, Homo sapiens
ttaaaagaaattatccaaagggagaaagagcagtatgccacttcttaaaacagaacaaaacaaaaaaagaaaattgtgctcttttctaatccaaagggtakatttgcagcatgcttgactttaccaattctgatgacatctttacggacactattatcactaagaccttgttatggcgaagtctttagtctttttcatgta

SEQ ID NO: 68018 - DNA, 201 bp, Homo sapiens
catctttacggacactattatcactaagaccttgttatggcgaagtctttagtctttttcatgtattttcctcatgattttttctctttatgtagtttgastatgccttacctttgtaaatatttttgcttgtgttgtcgcaaaggggataatctgggaaagacaccaaatcatgggctcactttaaaaaaagaaagaata

SEQ ID NO: 68019 - DNA, 201 bp, Homo sapiens
ttttttcctttgatgggcttaaaagaaattatccaaagggagaaagagcagtatgccacttcttaaaacagaacaaaacaaaaaaagaaaattgtgctctkttctaatccaaagggtatatttgcagcatgcttgactttaccaattctgatgacatctttacggacactattatcactaagaccttgttatggcgaagtc

SEQ ID NO: 68020 - DNA, 201 bp, Homo sapiens
gcttaaaagaaattatccaaagggagaaagagcagtatgccacttcttaaaacagaacaaaacaaaaaaagaaaattgtgctcttttctaatccaaagggkatatttgcagcatgcttgactttaccaattctgatgacatctttacggacactattatcactaagaccttgttatggcgaagtctttagtctttttcatg

SEQ ID NO: 68021 - DNA, 201 bp, Homo sapiens
cttttctaatccaaagggtatatttgcagcatgcttgactttaccaattctgatgacatctttacggacactattatcactaagaccttgttatggcgaastctttagtctttttcatgtattttcctcatgattttttctctttatgtagtttgactatgccttacctttgtaaatatttttgcttgtgttgtcgcaaag

SEQ ID NO: 68022 - DNA, 201 bp, Homo sapiens
ctgactatataattgtcttcaatgaagactaattcaattttgcatatagaggagccaaagagagatttcagctctgtatttgtggtatcagtttggaaaaraaaatctgatactccatttgattattgtaaatatttgatcttgaatcacttgacagtgtttgtttgaattgtgtttgttttttcctttgatgggcttaaa

SEQ ID NO: 68023 - DNA, 201 bp, Homo sapiens
tttcctttgatgggcttaaaagaaattatccaaagggagaaagagcagtatgccacttcttaaaacagaacaaaacaaaaaaagaaaattgtgctcttttstaatccaaagggtatatttgcagcatgcttgactttaccaattctgatgacatctttacggacactattatcactaagaccttgttatggcgaagtcttt

SEQ ID NO: 68024 - DNA, 201 bp, Homo sapiens
ctacctgcagatatcctagtgtgagaatgctgaatccagaatgatgtctccactttttcccctagcatgcgcatggcaaggcatatctaagcttcctcacygtgtcaggatatggctttagaattttacattggcacttaggaggcaactttgtcatccctgttgtaatgtgcttttttgtttaactggcttgggatgtgg

SEQ ID NO: 68025 - DNA, 201 bp, Homo sapiens
acctatgtgtgaagtgacacattttagaactttttcattcagggattgattttgacttgtaggcatagtagggcaaggttcttttaagcttttcctagaaygtttttcagcagcagtttatgaaattcatcgtttgccacgaataaagatgacatcctagaatggaccgactgtaccgtgtatatgaacaatacctcttat

SEQ ID NO: 68026 - DNA, 201 bp, Homo sapiens
tgtgtgtgtgtgagcatgggtacccatttgataagagaaatgcatttgattgtgaagaagggagagttaaattctccattatgttcgtggtgtaaagtttwgagctggaatttattataagaatgtaaaaccttaaattattaataaataactattttggctattgaatgtgtgtttttaaaaactcagttatacctatgt

SEQ ID NO: 68027 - DNA, 201 bp, Homo sapiens
catgctgtatagatacaggcagtaggtttgctctgtacccatgtgtacagcctacccatgcagggactgggattcgaggacttccaggcgcatagggtagraccaaatgatagggtaggagcatgtgttctttagggccttgtaaggctgtttccttttgcatctggaactgactatataattgtcttcaatgaagactaa

SEQ ID NO: 68028 - DNA, 201 bp, Homo sapiens
agaactgtggtgtcttggtacattgcttggctggcattagccgctcagtcactgtgactgtggcttaccttatgcagaagctcaatctgtcgatgaacgaygcctatgacattgtcaaaatgaaaaaatccaacatatcccctaacttcaacttcatgggtcagctgctggacttcgagaggacgctgggactcagcagcc

SEQ ID NO: 68029 - DNA, 201 bp, Homo sapiens
cggcgagtcggtgctcgggctgctgctcaagaagctcaaggacgagggctgccgggcgttctacctggaaggtggcttcagtaagttccaagccgagttckccctgcattgcgagaccaatctagacggctcgtgtagcagcagctcgccgccgttgccagtgctggggctcgggggcctgcggatcagctctgactcttc

SEQ ID NO: 68030 - DNA, 201 bp, Homo sapiens
cgaggaccgggaccgcttcacccggcgctgtggcaccgacacagtggtgctctacgacgagagcagcagcgactggaacgagaatacgggcggcgagtcgktgctcgggctgctgctcaagaagctcaaggacgagggctgccgggcgttctacctggaaggtggcttcagtaagttccaagccgagttctccctgcattg

SEQ ID NO: 68031 - DNA, 201 bp, Homo sapiens; identical to SEQ ID NO: 68008

SEQ ID NO: 68032 - DNA, 201 bp, Homo sapiens; identical to SEQ ID NO: 68009

SEQ ID NO: 68033 - DNA, 201 bp, Homo sapiens; identical to SEQ ID NO: 68010

SEQ ID NO: 68034 - DNA, 201 bp, Homo sapiens; identical to SEQ ID NO: 68012

SEQ ID NO: 68035 - DNA, 201 bp, Homo sapiens; identical to SEQ ID NO: 68013

SEQ ID NO: 68036 - DNA, 201 bp, Homo sapiens; identical to SEQ ID NO: 68015

SEQ ID NO: 68037 - DNA, 201 bp, Homo sapiens; identical to SEQ ID NO: 68016

SEQ ID NO: 68038 - DNA, 201 bp, Homo sapiens; identical to SEQ ID NO: 68018

SEQ ID NO: 68039 - DNA, 201 bp, Homo sapiens; identical to SEQ ID NO: 68017

SEQ ID NO: 68040 - DNA, 201 bp, Homo sapiens; identical to SEQ ID NO: 68019

SEQ ID NO: 68041 - DNA, 201 bp, Homo sapiens; identical to SEQ ID NO: 68021

SEQ ID NO: 68042 - DNA, 201 bp, Homo sapiens; identical to SEQ ID NO: 68020

SEQ ID NO: 68043 - DNA, 201 bp, Homo sapiens; identical to SEQ ID NO: 68022

SEQ ID NO: 68044 - DNA, 201 bp, Homo sapiens; identical to SEQ ID NO: 68023

SEQ ID NO: 68045 - DNA, 201 bp, Homo sapiens; identical to SEQ ID NO: 68027

SEQ ID NO: 68046 - DNA, 169 bp, Homo sapiens
tgtgtgtgtgtgagcatgggtacccatttgataagagaaatgcatttgattgtgaagaagggagagttaaattctccattatgttcgtggtgtaaagtttwgagctggaatttattataagaatgtaaaaccttaaattattaataaataactattttggctattgaat

SEQ ID NO: 68047 - DNA, 201 bp, Homo sapiens; identical to SEQ ID NO: 68028

SEQ ID NO: 68048 - DNA, 201 bp, Homo sapiens; identical to SEQ ID NO: 68029

SEQ ID NO: 68049 - DNA, 201 bp, Homo sapiens; identical to SEQ ID NO: 68030

SEQ ID NO: 68050 - DNA, 201 bp, Homo sapiens; identical to SEQ ID NO: 68008

SEQ ID NO: 68051 - DNA, 201 bp, Homo sapiens; identical to SEQ ID NO: 68009

SEQ ID NO: 68052 - DNA, 201 bp, Homo sapiens; identical to SEQ ID NO: 68010

SEQ ID NO: 68053 - DNA, 201 bp, Homo sapiens; identical to SEQ ID NO: 68011

SEQ ID NO: 68054 - DNA, 201 bp, Homo sapiens
gaagctcaaggacgagggctgccgggcgttctacctggaagatgaagcccggggcaagaactgtggtgtcttggtacattgcttggctggcattagccgckcagtcactgtgactgtggcttaccttatgcagaagctcaatctgtcgatgaacgatgcctatgacattgtcaaaatgaaaaaatccaacatatcccctaa

SEQ ID NO: 68055 - DNA, 201 bp, Homo sapiens; identical to SEQ ID NO: 68013

SEQ ID NO: 68056 - DNA, 201 bp, Homo sapiens; identical to SEQ ID NO: 68014

SEQ ID NO: 68057 - DNA, 201 bp, Homo sapiens; identical to SEQ ID NO: 68015

SEQ ID NO: 68058 - DNA, 201 bp, Homo sapiens; identical to SEQ ID NO: 68016

SEQ ID NO: 68059 - DNA, 201 bp, Homo sapiens; identical to SEQ ID NO: 68017

SEQ ID NO: 68060 - DNA, 201 bp, Homo sapiens; identical to SEQ ID NO: 68018

SEQ ID NO: 68061 - DNA, 201 bp, Homo sapiens; identical to SEQ ID NO: 68019

SEQ ID NO: 68062 - DNA, 201 bp, Homo sapiens; identical to SEQ ID NO: 68020

SEQ ID NO: 68063 - DNA, 201 bp, Homo sapiens; identical to SEQ ID NO: 68021

SEQ ID NO: 68064 - DNA, 201 bp, Homo sapiens; identical to SEQ ID NO: 68022

SEQ ID NO: 68065 - DNA, 201 bp, Homo sapiens; identical to SEQ ID NO: 68023

SEQ ID NO: 68066 - DNA, 201 bp, Homo sapiens; identical to SEQ ID NO: 68024

SEQ ID NO: 68067 - DNA, 201 bp, Homo sapiens; identical to SEQ ID NO: 68025

SEQ ID NO: 68068 - DNA, 201 bp, Homo sapiens; identical to SEQ ID NO: 68026

SEQ ID NO: 68069 - DNA, 201 bp, Homo sapiens; identical to SEQ ID NO: 68027

SEQ ID NO: 68070 - DNA, 201 bp, Homo sapiens; identical to SEQ ID NO: 68028

SEQ ID NO: 68071 - DNA, 201 bp, Homo sapiens
cgaggaccgggaccgcttcacccggcgctgtggcaccgacacagtggtgctctacgacgagagcagcagcgactggaacgagaatacgggcggcgagtcgktgctcgggctgctgctcaagaagctcaaggacgagggctgccgggcgttctacctggaagatgaagcccggggcaagaactgtggtgtcttggtacattg

SEQ ID NO: 68072 - DNA, 201 bp, Homo sapiens
atacaggaggaaccggacagagacgcgggggatccagtttgaagatttcgtgcgctacctcggcgatccgaaccacagatggctagaccttcagtttgggraccacatcattcactgggtgacgtatgtagagctctgtgctccctgtgagataatgtacagtgtgattggacaccacgagaccctggaggacgatgcccc

SEQ ID NO: 68073 - DNA, 201 bp, Homo sapiens
gggaccacatcattcactgggtgacgtatgtagagctctgtgctccctgtgagataatgtacagtgtgattggacaccacgagaccctggaggacgatgcyccatacatcttaaaagaggctggcattgaccacctggtgtcatacccgactatccctccgggcattaccgtgtataacagaaccaaggtggagcactatt

SEQ ID NO: 68074 - DNA, 201 bp, Homo sapiens
aatatttgtctgtgacaagcacaagattcttttctgccagactcccaaagtgggcaacacccagtggaagaaagtgctgattgttctaaatggagcatttycttccattgaggagatccccgaaaacgtggtgcacgaccacgagaagaacggccttcctcggctctcttccttcagtgatgcagaaattcagaagcgatt

SEQ ID NO: 68075 - DNA, 201 bp, Homo sapiens
tgtcgctggcctttgctcacctcagaggggagaaaaggctaaagatttgcagtttgacagcccagcagggaggaagcatcacacagcgttaggagccgttyccttcaggtgttaaggaaggggatgcccctgaggttctcctggctagtcggggtggcttcacccatcactggtgggttgcaggaacagcacccaggactc

SEQ ID NO: 68076 - DNA, 201 bp, Homo sapiens
agtttgacagcccagcagggaggaagcatcacacagcgttaggagccgtttccttcaggtgttaaggaaggggatgcccctgaggttctcctggctagtcrgggtggcttcacccatcactggtgggttgcaggaacagcacccaggactctgaggagggacagagaagcaagggggctgctgaaatcgcagagacttttg

SEQ ID NO: 68077 - DNA, 201 bp, Homo sapiens
ttaaggataaatttgttcacaatccccggtttgagccttggtacaggcatgagattgctcctggcatcatcagaaaatacaggaggaaccggacagagacscgggggatccagtttgaagatttcgtgcgctacctcggcgatccgaaccacagatggctagaccttcagtttggggaccacatcattcactgggtgacgt

SEQ ID NO: 68078 - DNA, 201 bp, Homo sapiens
cttggtgctgcgacaattgtggaggcaaagcattctttctgtgactattttgttcctgtagacagtcagcgatggccagagggtggtgtggtgtccagggrtccatctttccagaatccatgcctgtgtaatgctggtccatgcttctgaacctgtgtctgccaagcgcctatttcattcagcacaagacatacgatttta

SEQ ID NO: 68079 - DNA, 201 bp, Homo sapiens
taaagacccagatgtgtacagtgccaaacaggagtttctgttcctgacaaccatgccggaagtgaggaagttgccagaagagaagcacattcctgaggaaytgaagccaactgggaaggagcttccagacagccagctcgttcagcccctggtctacatggagcgcctggaactcatcagaaacgtctgcagggatgatgc

SEQ ID NO: 68080 - DNA, 201 bp, Homo sapiens
gcattaggatgtcgctggcctttgctcacctcagaggggagaaaaggctaaagatttgcagtttgacagcccagcagggaggaagcatcacacagcgttargagccgtttccttcaggtgttaaggaaggggatgcccctgaggttctcctggctagtcggggtggcttcacccatcactggtgggttgcaggaacagcac

SEQ ID NO: 68081 - DNA, 201 bp, Homo sapiens
tcacaccaccatcctggaccatgtgactggaaggtgggtaaccaagttcaccagcaataaaacccagcgcccaggtagcctccagcagtgcggcttcctgkcaacaaggtaggccctggtgcagggcaagccgcagcgaccatttcagataccgtccacagccaggaccgctgagaactgggacagtttcctgggatgagt

SEQ ID NO: 68082 - DNA, 201 bp, Homo sapiens
ggctgcagaaggaagagtcagtgaatggctgcggtgtgacaacatgcaccaccagtggcttctgctggccgcatgcttttgggtgattttcatgttcatgktggctagcaagttcatcacgttgacctttaaagacccagatgtgtacagtgccaaacaggagtttctgttcctgacaaccatgccggaagtgaggaagtt

SEQ ID NO: 68083 - DNA, 201 bp, Homo sapiens
cacaccaccatcctggaccatgtgactggaaggtgggtaaccaagttcaccagcaataaaacccagcgcccaggtagcctccagcagtgcggcttcctggyaacaaggtaggccctggtgcagggcaagccgcagcgaccatttcagataccgtccacagccaggaccgctgagaactgggacagtttcctgggatgagtg

SEQ ID NO: 68084 - DNA, 201 bp, Homo sapiens
ggtacaggcatgagattgctcctggcatcatcagaaaatacaggaggaaccggacagagacgcgggggatccagtttgaagatttcgtgcgctacctcggygatccgaaccacagatggctagaccttcagtttggggaccacatcattcactgggtgacgtatgtagagctctgtgctccctgtgagataatgtacagtg

SEQ ID NO: 68085 - DNA, 201 bp, Homo sapiens
ggggaggggaggctttttctacctgagaaggggagtgtctttgagggccttaaaaggaccatggcccaggaatgggggcgctggttgggcttggagctcakgctgctgtggatcccggcgcatcagttctgacttgccttacctgggtggacagcagtgaatctccacctgtcttctccagggagctcccatgttggggct

SEQ ID NO: 68086 - DNA, 201 bp, Homo sapiens
tcctggctagtcggggtggcttcacccatcactggtgggttgcaggaacagcacccaggactctgaggagggacagagaagcaagggggctgctgaaatcrcagagacttttgcagcatcagatctgaggagtaaaacggcacctctggccttcatcttggtgctgcgacaattgtggaggcaaagcattctttctgtgac

SEQ ID NO: 68087 - DNA, 201 bp, Homo sapiens
agacctatgaattcaaatatctttattagacctggggctaaccaggtgaagatctgagcccagaaatgacccttcctccaccacacccctcctttgaggaygcccggggtctcccacaggcctgtgagttgcctcggcatatgacgcagaaccccaactgttacaacttagtttggatgtaagatgctctgaggaccctgc

SEQ ID NO: 68088 - DNA, 175 bp, Homo sapiens
ctcggggacgcgcaggcgggtgggtttcagcgcctgggcccctctccccgccgcggggcgcacggaaaaaccggrgaacccgcgggttttgtcctggcgagccacatcccgtgacaagaggaaacaagaacctcagttcaggggaaacacagcaaggaaatgtgagccccaggct

SEQ ID NO: 68089 - DNA, 201 bp, Homo sapiens
acagtgtgattggacaccacgagaccctggaggacgatgccccatacatcttaaaagaggctggcattgaccacctggtgtcatacccgactatccctccrggcattaccgtgtataacagaaccaaggtggagcactatttcctgggcatcagcaaacgagacatccgacgcctgtatgcccgtttcgaaggggacttta

SEQ ID NO: 68090 - DNA, 201 bp, Homo sapiens
cgcgggggatccagtttgaagatttcgtgcgctacctcggcgatccgaaccacagatggctagaccttcagtttggggaccacatcattcactgggtgacrtatgtagagctctgtgctccctgtgagataatgtacagtgtgattggacaccacgagaccctggaggacgatgccccatacatcttaaaagaggctggca

SEQ ID NO: 68091 - DNA, 201 bp, Homo sapiens; identical to SEQ ID NO: 68087

SEQ ID NO: 68092 - DNA, 201 bp, Homo sapiens; identical to SEQ ID NO: 68086

SEQ ID NO: 68093 - DNA, 201 bp, Homo sapiens; identical to SEQ ID NO: 68072

SEQ ID NO: 68094 - DNA, 201 bp, Homo sapiens; identical to SEQ ID NO: 68073

SEQ ID NO: 68095 - DNA, 201 bp, Homo sapiens; identical to SEQ ID NO: 68089

SEQ ID NO: 68096 - DNA, 201 bp, Homo sapiens; identical to SEQ ID NO: 68074

SEQ ID NO: 68097 - DNA, 201 bp, Homo sapiens; identical to SEQ ID NO: 68075

SEQ ID NO: 68098 - DNA, 201 bp, Homo sapiens; identical to SEQ ID NO: 68090

SEQ ID NO: 68099 - DNA, 201 bp, Homo sapiens; identical to SEQ ID NO: 68076

SEQ ID NO: 68100 - DNA, 201 bp, Homo sapiens; identical to SEQ ID NO: 68077

SEQ ID NO: 68101 - DNA, 201 bp, Homo sapiens; identical to SEQ ID NO: 68078

SEQ ID NO: 68102 - DNA, 201 bp, Homo sapiens; identical to SEQ ID NO: 68079

SEQ ID NO: 68103 - DNA, 201 bp, Homo sapiens; identical to SEQ ID NO: 68080

SEQ ID NO: 68104 - DNA, 201 bp, Homo sapiens; identical to SEQ ID NO: 68081

SEQ ID NO: 68105 - DNA, 201 bp, Homo sapiens; identical to SEQ ID NO: 68083

SEQ ID NO: 68106 - DNA, 201 bp, Homo sapiens; identical to SEQ ID NO: 68082

SEQ ID NO: 68107 - DNA, 201 bp, Homo sapiens; identical to SEQ ID NO: 68084

SEQ ID NO: 68108 - DNA, 201 bp, Homo sapiens; identical to SEQ ID NO: 68085

SEQ ID NO: 68109 - DNA, 201 bp, Homo sapiens; identical to SEQ ID NO: 68072

SEQ ID NO: 68110 - DNA, 201 bp, Homo sapiens; identical to SEQ ID NO: 68073

SEQ ID NO: 68111 - DNA, 201 bp, Homo sapiens; identical to SEQ ID NO: 68074

SEQ ID NO: 68112 - DNA, 201 bp, Homo sapiens; identical to SEQ ID NO: 68075

SEQ ID NO: 68113 - DNA, 201 bp, Homo sapiens; identical to SEQ ID NO: 68076

SEQ ID NO: 68114 - DNA, 201 bp, Homo sapiens; identical to SEQ ID NO: 68077

SEQ ID NO: 68115 - DNA, 201 bp, Homo sapiens; identical to SEQ ID NO: 68078

SEQ ID NO: 68116 - DNA, 201 bp, Homo sapiens; identical to SEQ ID NO: 68079

SEQ ID NO: 68117 - DNA, 201 bp, Homo sapiens; identical to SEQ ID NO: 68080

SEQ ID NO: 68118 - DNA, 201 bp, Homo sapiens; identical to SEQ ID NO: 68081

SEQ ID NO: 68119 - DNA, 201 bp, Homo sapiens; identical to SEQ ID NO: 68082

SEQ ID NO: 68120 - DNA, 201 bp, Homo sapiens; identical to SEQ ID NO: 68083

SEQ ID NO: 68121 - DNA, 201 bp, Homo sapiens; identical to SEQ ID NO: 68084

SEQ ID NO: 68122 - DNA, 201 bp, Homo sapiens; identical to SEQ ID NO: 68085

SEQ ID NO: 68123 - DNA, 201 bp, Homo sapiens; identical to SEQ ID NO: 68086

SEQ ID NO: 68124 - DNA, 201 bp, Homo sapiens; identical to SEQ ID NO: 68087

SEQ ID NO: 68125 - DNA, 183 bp, Homo sapiens
cgcggggcgcacggaaaaaccggagaacccgcgggttttgtcctggcgagccacatcccggtgtgttttggcgacttgaagayctccctagttcgcgggagtagcgggaagagccttcctcgcgttaattatgcaataagaaggcgtccttgtgcgggatgctgtgacccgcggaattattga

SEQ ID NO: 68126 - DNA, 124 bp, Homo sapiens
cgcggggcgcacggaaaaaccggrgaacccgcgggttttgtcctggcgagccacatcccggtgtgttttggcgacttgaagatctccctagttcgcgggagtagcgggaagagccttcctcgcg

SEQ ID NO: 68127 - DNA, 201 bp, Homo sapiens; identical to SEQ ID NO: 68089

SEQ ID NO: 68128 - DNA, 201 bp, Homo sapiens; identical to SEQ ID NO: 68090

SEQ ID NO: 68129 - DNA, 201 bp, Homo sapiens; identical to SEQ ID NO: 68072

SEQ ID NO: 68130 - DNA, 201 bp, Homo sapiens; identical to SEQ ID NO: 68073

SEQ ID NO: 68131 - DNA, 201 bp, Homo sapiens; identical to SEQ ID NO: 68074

SEQ ID NO: 68132 - DNA, 201 bp, Homo sapiens; identical to SEQ ID NO: 68075

SEQ ID NO: 68133 - DNA, 201 bp, Homo sapiens; identical to SEQ ID NO: 68076

SEQ ID NO: 68134 - DNA, 201 bp, Homo sapiens; identical to SEQ ID NO: 68077

SEQ ID NO: 68135 - DNA, 201 bp, Homo sapiens; identical to SEQ ID NO: 68078

SEQ ID NO: 68136 - DNA, 201 bp, Homo sapiens; identical to SEQ ID NO: 68079

SEQ ID NO: 68137 - DNA, 201 bp, Homo sapiens; identical to SEQ ID NO: 68080

SEQ ID NO: 68138 - DNA, 201 bp, Homo sapiens; identical to SEQ ID NO: 68081

SEQ ID NO: 68139 - DNA, 201 bp, Homo sapiens; identical to SEQ ID NO: 68082

SEQ ID NO: 68140 - DNA, 201 bp, Homo sapiens; identical to SEQ ID NO: 68083

SEQ ID NO: 68141 - DNA, 201 bp, Homo sapiens; identical to SEQ ID NO: 68084

SEQ ID NO: 68142 - DNA, 201 bp, Homo sapiens; identical to SEQ ID NO: 68085

SEQ ID NO: 68143 - DNA, 201 bp, Homo sapiens; identical to SEQ ID NO: 68086

SEQ ID NO: 68144 - DNA, 201 bp, Homo sapiens; identical to SEQ ID NO: 68087

SEQ ID NO: 68145 - DNA, 201 bp, Homo sapiens
caaagaaatacctgagcagaaaattctcttcttcgctgaaatgaaaattggagtgtttgcaaaactgaacaaagaaaggaaagaatttgtaaacatcacargcaacttgcagttatattcggatcatttttcagtgtttgaggagttcatacaataaaaagtgacaagaggaaacaagaacctcagttcaggggaaacaca

SEQ ID NO: 68146 - DNA, 150 bp, Homo sapiens
ttcagcgcctgggcccctctccccgccgcggggcgcacggaaaaaccggrgaacccgcgggttttgtcctggcgagccacatcccgtgactgggttaaaatgaaaagacacaaagagagaagtggtcttttcccttccctccccattata

SEQ ID NO: 68147 - DNA, 201 bp, Homo sapiens; identical to SEQ ID NO: 68089

SEQ ID NO: 68148 - DNA, 201 bp, Homo sapiens; identical to SEQ ID NO: 68090

SEQ ID NO: 68149 - DNA, 201 bp, Homo sapiens
tcggcttgtctgaccctgtgaaccgcgcctactttgctgtgtttgatggtcacggaggcgtggatgctgcgaggtacgccgctgtccacgtgcacaccaaygctgcccgccagccagagctgcccacagaccctgagggagccctcagagaagccttccggcgcaccgaccagatgtttctcaggaaagccaagcgagagc

SEQ ID NO: 68150 - DNA, 201 bp, Homo sapiens
gagcaggcagtgcacctctgagtgtcccttttgtaaggcccaggggttgcactgagtctgcagaggccgcgacctcctagaacgctgtgggtgcaggtgasccggcgtgtcctggggagatgctgccagcacacaggggccctcctgctgccagcaggttggggtggttaagtcttattagtgtctattcttaaaattaag

SEQ ID NO: 68151 - DNA, 201 bp, Homo sapiens
agcggcagtggctggtctccatccacgccatccggaacactcgccgcaagatggaggaccggcacgtgtccctcccttccttcaaccagctcttcggcttrtctgaccctgtgaaccgcgcctactttgctgtgtttgatggtcacggaggcgtggatgctgcgaggtacgccgctgtccacgtgcacaccaacgctgccc

SEQ ID NO: 68152 - DNA, 201 bp, Homo sapiens
cgccaccacttgctgctgctctggcccacgaagcagtttcacagctgctacagacagacctttccgaattcaggaagttgcccagggaggaagaagaagargaggaggacgatgacgaggaggaaaaggcccctgtgaccttgctggatgcccaaagcctggcacagagtttctttaaccgcctttgggaagtcgccggcc

SEQ ID NO: 68153 - DNA, 136 bp, Homo sapiens
tcctgtgcaagggggagctttgctccaggacaggatgactgtcttccctattcttagggacaagtcccaagatgccagaaaggcagtctcccaaggacccmccatgcagaagtgtcaataaaccacaagttctgaa

SEQ ID NO: 68154 - DNA, 105 bp, Homo sapiens
aggatgactgtcttccctattcttagggacaagtcccaagatgccagaaaggcagtctcccaaggacccaccatgcagaagtgtcaataaaccacaagttytgaa

SEQ ID NO: 68155 - DNA, 201 bp, Homo sapiens
tagcctgaggctccactggaagatctcgcagcctcagtgtatgggaaaccctttccccaggcttgtcccagcactgccgctccccacccctgagccaggaycccagaggatggccatgccccgtgcctggcagaggtctggtgccagcactgggagctgctccgcccttgccttggggccgagggagccctcgtccacccc

SEQ ID NO: 68156 - DNA, 201 bp, Homo sapiens
gcccagggaggaagaagaagaggaggaggacgatgacgaggaggaaaaggcccctgtgaccttgctggatgcccaaagcctggcacagagtttctttaacygcctttgggaagtcgccggccagtggcagaagcaggtgccattggctgcccgggcctcacagcggcagtggctggtctccatccacgccatccggaacac

SEQ ID NO: 68157 - DNA, 201 bp, Homo sapiens
aagcctcaggacccaacaggtggcaggcagtggacagggtgcccgccccacagtgctttccccagcaccccagagccagtcgggacaccccccgcagcccrtcctggtggctgtggaactgcactgggtggcgggcagatggtggaaggcagcttaggagacctcaccaaagagaagatggaccggctcttgctcccagct

SEQ ID NO: 68158 - DNA, 201 bp, Homo sapiens
cctgagggagccctcagagaagccttccggcgcaccgaccagatgtttctcaggaaagccaagcgagagcggctgcagagcggcaccacaggtgtgtgtgygctcattgcaggagcgaccctgcacgtcgcctggctcggggattcccaggtcattttggtacagcagggacaggtggtgaagctgatggagccacacaga

SEQ ID NO: 68159 - DNA, 201 bp, Homo sapiens
ctccgtgtcgccgaggagctggtggctgcggcccgggagcggggctcccacgacaacatcacggtcatggtggtcttcctcagggacccccaagagctgcbggagggcgggaaccagggagaaggggacccccaggcagaagggaggaggcaggacttgccctccagccttccagaacctgagacccaggctccaccaaga

SEQ ID NO: 68160 - DNA, 201 bp, Homo sapiens
tttgctaataattctgttcctggctgccgagagtgaagtttcaccatgtggaggtttggctcctatcacctggtggtctgattcataccctagcctgaggytccactggaagatctcgcagcctcagtgtatgggaaaccctttccccaggcttgtcccagcactgccgctccccacccctgagccaggaccccagaggat

SEQ ID NO: 68161 - DNA, 112 bp, Homo sapiens
ccaggacaggatgactgtcttccctattcttagggacaagtcccaagatgccagaaaggcagtctcccaaggacccaccatgcagaagtgtcaataaaccmcaagttctgaa

SEQ ID NO: 68162 - DNA, 201 bp, Homo sapiens
gaaagggacggggtgcagacggcagggccagtatggggccccctccctctcctctcctctcctatggtgagcccagcgtgggcaccgggccgtctcagccrtgttcccagggctgggaggacagctctggcccttcttaggcctagcctcgtcccaagctaaatgtaagccagttgggctgtgttaaaggaagcagtgttt

SEQ ID NO: 68163 - DNA, 201 bp, Homo sapiens
aggactacctgctgcttgcctgtgatggcttctttgacgtcgtaccccaccaggaagttgttggcctggtccagagccacctgaccaggcagcagggcagygggctccgtgtcgccgaggagctggtggctgcggcccgggagcggggctcccacgacaacatcacggtcatggtggtcttcctcagggacccccaagagc

SEQ ID NO: 68164 - DNA, 201 bp, Homo sapiens; identical to SEQ ID NO: 68156

SEQ ID NO: 68165 - DNA, 201 bp, Homo sapiens; identical to SEQ ID NO: 68158

SEQ ID NO: 68166 - DNA, 201 bp, Homo sapiens; identical to SEQ ID NO: 68149

SEQ ID NO: 68167 - DNA, 201 bp, Homo sapiens; identical to SEQ ID NO: 68151

SEQ ID NO: 68168 - DNA, 201 bp, Homo sapiens; identical to SEQ ID NO: 68152

SEQ ID NO: 68169 - DNA, 201 bp, Homo sapiens; identical to SEQ ID NO: 68149

SEQ ID NO: 68170 - DNA, 201 bp, Homo sapiens; identical to SEQ ID NO: 68150

SEQ ID NO: 68171 - DNA, 201 bp, Homo sapiens; identical to SEQ ID NO: 68151

SEQ ID NO: 68172 - DNA, 201 bp, Homo sapiens; identical to SEQ ID NO: 68152

SEQ ID NO: 68173 - DNA, 136 bp, Homo sapiens; identical to SEQ ID NO: 68153

SEQ ID NO: 68174 - DNA, 105 bp, Homo sapiens; identical to SEQ ID NO: 68154

SEQ ID NO: 68175 - DNA, 201 bp, Homo sapiens
tagcctgaggctccactggaagatctcgcagcctcagtgtatgggaaaccctttccccaggcttgtcccagcactgccgctccccacccctgagccaggaycccagaggatggccatgccccgtgcctggcagaggtctggtgccagcatgcacagcagctgggcacagaggagcgctcttccatcttgaccaggactgca

SEQ ID NO: 68176 - DNA, 201 bp, Homo sapiens; identical to SEQ ID NO: 68156

SEQ ID NO: 68177 - DNA, 201 bp, Homo sapiens; identical to SEQ ID NO: 68157

SEQ ID NO: 68178 - DNA, 201 bp, Homo sapiens; identical to SEQ ID NO: 68158

SEQ ID NO: 68179 - DNA, 201 bp, Homo sapiens; identical to SEQ ID NO: 68159

SEQ ID NO: 68180 - DNA, 201 bp, Homo sapiens; identical to SEQ ID NO: 68160

SEQ ID NO: 68181 - DNA, 112 bp, Homo sapiens; identical to SEQ ID NO: 68161

SEQ ID NO: 68182 - DNA, 201 bp, Homo sapiens; identical to SEQ ID NO: 68162

SEQ ID NO: 68183 - DNA, 201 bp, Homo sapiens; identical to SEQ ID NO: 68163

SEQ ID NO: 68184 - DNA, 201 bp, Homo sapiens
gtagttatagaccctcaagagaaacccagtgaggagccccttggggaccgaaggactgtcattgacaaatgctctccacccctagagttcttggatgactstgactctcatttagaaatccaaaagcataaagatagggaggtggtgatggagcacccctcttctggaagtgactggtctgatgttgaggagatctccaca

SEQ ID NO: 68185 - DNA, 201 bp, Homo sapiens
tctgcctgggaggcccgggaagccttgaggcagatcccactggagagaatcatcgtggaaacggatgctccctatttcctccctcgccaggttcccaaaarcctttgccagtatgcccacccgggcctggccttgcatacggtccgagagattgccagagtcaaagatcagccactctccctcaccttggctgccttgcgt

SEQ ID NO: 68186 - DNA, 201 bp, Homo sapiens
aagcgcttcgtagccccggaagcgcttaggcatctccgaagtagcgctgggcaaagtgaaggcttcctgatctcagaagcacgttgtgggcttggaaacckacggcagcctttagtcaattttggatcgctttgacttctccaacacggtttggcatctctgaaaccttgagaactgtgatgggcagtggaaagaagaggg

SEQ ID NO: 68187 - DNA, 201 bp, Homo sapiens
tcctcctcctccttctccccacatttcttgggccctggtgtgggcggggccgcctccaaaggctgcctgattcggaacactcgggggttcctgtcttcagrgggatcccctctgcgtcctgccaacgcctctttggaagaaatggcttctctagaggaggaagcctgcagccttaaggttgattccaaagatagttctcat

SEQ ID NO: 68188 - DNA, 201 bp, Homo sapiens
gcagctccttccctaaggaatttcagggctgcatctctgacttctgtgatccccgcaccctgacagattgcctatgggaggagctgttgaaagaggatctrgtctggggggcctttggctgtcaccctcattttgcacgttactacagtgagagtcaagaaagaaatcttttgcaagccttaaggcaccctaaggctgtgg

SEQ ID NO: 68189 - DNA, 201 bp, Homo sapiens
gccagctattggaccagcagccccaagccttctagctacccctccacaggcagcagcagcaacgatgcagcccaggttgggaagagcagccggagccgcaygagtgattattcccccaactctacagggagtgtccaaaacacctccagagacatggaggcctcagaggaaggctggtcccagaattctcgttcatttcgc

SEQ ID NO: 68190 - DNA, 201 bp, Homo sapiens
ctcagggctgctgtgtgggtgtgttaagctgataaggttcagtttgcggcggaaactacctgctagtcttgtgtcaggggctgccagcctccttttgtttyacttttgcccccttcttgggaacatttgaccaaaaataatcctcatttcatcttgtgtacagtcctttgtgtaccccgcccaggttgagaggtgaatcag

SEQ ID NO: 68191 - DNA, 201 bp, Homo sapiens
gaacaccagtcgcctctacagtctttaagcagagaagggcgaccagcagcctgacagaacacaggctggcttgaagtctgtgtctcaggtcgaggatgtgwttagagagctgattggaacacagaaaaccaggacaggatgttttcctccaagcgggtcataaggcttcagcttctgggtggtgggtggggtggggtgggc

SEQ ID NO: 68192 - DNA, 201 bp, Homo sapiens
ttatgttgtctgtgctgcagattggcccatgtgggaagtcgggggggacctgatttcctgcttggaagacttgggggactgccgagcatatcaaagtgttyatagtcaccaagtgaactgcagcacaaccatctcctctccagcaagccctgaagtcagtagtgcctgcaggtgaaaccaaccagccctgtgttagaggag

SEQ ID NO: 68193 - DNA, 201 bp, Homo sapiens
caggggctgccagcctccttttgtttcacttttgcccccttcttgggaacatttgaccaaaaataatcctcatttcatcttgtgtacagtcctttgtgtamcccgcccaggttgagaggtgaatcagcgtaattctccgaagctctgctgggcagctcagccatgttacattgtctatgcagaataagcaggcctggtgtc

SEQ ID NO: 68194 - DNA, 201 bp, Homo sapiens
cagtttgactgtcactgttctggtgtcaactccagcgtcggcacaggcagaaggacttcagctgctggtctcattggttccactgccattgatatgggggrgtgcagaggagcactcattgtccatgatggagatccaggacagactgggggactccgggaagaggctttcttggggaagaggaccccaaaggaggtactt

SEQ ID NO: 68195 - DNA, 201 bp, Homo sapiens
ttgcagctgaagctgagggtcagaatgatacaattgaggaacccaacaaggtccagaaaaggaagagggatagacttcgagaccagggctccacaatgatytacctgaaggctatccagggcatcctggggaaatcgatgccaaaaaggaagggagaggctgccactcgggcaaaaccaagcgcagcagagcatcccagcc

SEQ ID NO: 68196 - DNA, 201 bp, Homo sapiens
aggaccagccaggagtgaaggaccagccaagactgcagaaggagcagccaggagtgtcacagtcactgctgctcagaaggagaaagacgcaaccccagagrtcagcatggaggaggataagacagtgccagagaggagcagcttctatgacaggagagtagttatagaccctcaagagaaacccagtgaggagccccttgg

SEQ ID NO: 68197 - DNA, 201 bp, Homo sapiens
atgctccagggtaggcagcaaagaagaaagagtgcgatatgagggtacagtgagtttggcagtccaaattctgttctctgcagcctgtttttgagtagttkgtgaataaagtcacccgcctacttgtctaagcacatgtgggtgtgtaactcagttcctggttctcggttctaaaaacagacttccaactgggaaactttt

SEQ ID NO: 68198 - DNA, 201 bp, Homo sapiens
cctttacaaagttcagaaaaatttacagcagctccttccctaaggaatttcagggctgcatctctgacttctgtgatccccgcaccctgacagattgcctrtgggaggagctgttgaaagaggatctggtctggggggcctttggctgtcaccctcattttgcacgttactacagtgagagtcaagaaagaaatcttttgc

SEQ ID NO: 68199 - DNA, 201 bp, Homo sapiens
gagcacccctcttctggaagtgactggtctgatgttgaggagatctccacagtcagattctctcaggaggaacctgtctccctgaaaccttcagccgttcyggagccttcttccttcaccaccgactatgtcatgtaccctcctcatttgtacagtagtccttggtgtgactacgccagctattggaccagcagccccaag

SEQ ID NO: 68200 - DNA, 201 bp, Homo sapiens
accagggctccacaatgatctacctgaaggctatccagggcatcctggggaaatcgatgccaaaaaggaagggagaggctgccactcgggcaaaaccaagygcagcagagcatcccagccatggagaaggaccagccaggagtgaaggaccagccaagactgcagaaggagcagccaggagtgtcacagtcactgctgctc

SEQ ID NO: 68201 - DNA, 201 bp, Homo sapiens
acaatgatctacctgaaggctatccagggcatcctggggaaatcgatgccaaaaaggaagggagaggctgccactcgggcaaaaccaagcgcagcagagcrtcccagccatggagaaggaccagccaggagtgaaggaccagccaagactgcagaaggagcagccaggagtgtcacagtcactgctgctcagaaggagaaa

SEQ ID NO: 68202 - DNA, 201 bp, Homo sapiens; identical to SEQ ID NO: 68184

SEQ ID NO: 68203 - DNA, 201 bp, Homo sapiens; identical to SEQ ID NO: 68185

SEQ ID NO: 68204 - DNA, 201 bp, Homo sapiens; identical to SEQ ID NO: 68186

SEQ ID NO: 68205 - DNA, 201 bp, Homo sapiens; identical to SEQ ID NO: 68187

SEQ ID NO: 68206 - DNA, 201 bp, Homo sapiens; identical to SEQ ID NO: 68188

SEQ ID NO: 68207 - DNA, 201 bp, Homo sapiens; identical to SEQ ID NO: 68189

SEQ ID NO: 68208 - DNA, 201 bp, Homo sapiens; identical to SEQ ID NO: 68190

SEQ ID NO: 68209 - DNA, 201 bp, Homo sapiens
cagagaaggtacagtcctcgggagtctcctagaaaagggcgaccagcagcctgacagaacacaggctggcttgaagtctgtgtctcaggtcgaggatgtgwttagagagctgattggaacacagaaaaccaggacaggatgttttcctccaagcgggtcataaggcttcagcttctgggtggtgggtggggtggggtgggc

SEQ ID NO: 68210 - DNA, 201 bp, Homo sapiens; identical to SEQ ID NO: 68193

SEQ ID NO: 68211 - DNA, 201 bp, Homo sapiens; identical to SEQ ID NO: 68194

SEQ ID NO: 68212 - DNA, 201 bp, Homo sapiens; identical to SEQ ID NO: 68195

SEQ ID NO: 68213 - DNA, 201 bp, Homo sapiens; identical to SEQ ID NO: 68196

SEQ ID NO: 68214 - DNA, 201 bp, Homo sapiens; identical to SEQ ID NO: 68197

SEQ ID NO: 68215 - DNA, 201 bp, Homo sapiens; identical to SEQ ID NO: 68198

SEQ ID NO: 68216 - DNA, 201 bp, Homo sapiens; identical to SEQ ID NO: 68200

SEQ ID NO: 68217 - DNA, 201 bp, Homo sapiens; identical to SEQ ID NO: 68199

SEQ ID NO: 68218 - DNA, 201 bp, Homo sapiens; identical to SEQ ID NO: 68201

SEQ ID NO: 68219 - DNA, 201 bp, Homo sapiens; identical to SEQ ID NO: 68184

SEQ ID NO: 68220 - DNA, 201 bp, Homo sapiens; identical to SEQ ID NO: 68185

SEQ ID NO: 68221 - DNA, 201 bp, Homo sapiens; identical to SEQ ID NO: 68186

SEQ ID NO: 68222 - DNA, 201 bp, Homo sapiens; identical to SEQ ID NO: 68187

SEQ ID NO: 68223 - DNA, 201 bp, Homo sapiens; identical to SEQ ID NO: 68188

SEQ ID NO: 68224 - DNA, 201 bp, Homo sapiens; identical to SEQ ID NO: 68189

SEQ ID NO: 68225 - DNA, 201 bp, Homo sapiens; identical to SEQ ID NO: 68190

SEQ ID NO: 68226 - DNA, 201 bp, Homo sapiens; identical to SEQ ID NO: 68191

SEQ ID NO: 68227 - DNA, 201 bp, Homo sapiens; identical to SEQ ID NO: 68192

SEQ ID NO: 68228 - DNA, 201 bp, Homo sapiens; identical to SEQ ID NO: 68193

SEQ ID NO: 68229 - DNA, 201 bp, Homo sapiens; identical to SEQ ID NO: 68194

SEQ ID NO: 68230 - DNA, 201 bp, Homo sapiens; identical to SEQ ID NO: 68195

SEQ ID NO: 68231 - DNA, 201 bp, Homo sapiens; identical to SEQ ID NO: 68196

SEQ ID NO: 68232 - DNA, 201 bp, Homo sapiens; identical to SEQ ID NO: 68197

SEQ ID NO: 68233 - DNA, 201 bp, Homo sapiens; identical to SEQ ID NO: 68198

SEQ ID NO: 68234 - DNA, 201 bp, Homo sapiens; identical to SEQ ID NO: 68199

SEQ ID NO: 68235 - DNA, 201 bp, Homo sapiens; identical to SEQ ID NO: 68200

SEQ ID NO: 68236 - DNA, 201 bp, Homo sapiens; identical to SEQ ID NO: 68201

SEQ ID NO: 68237 - DNA, 201 bp, Homo sapiens
gcttcgtttatatgaatttgatctcattgatggatacttccccaccgtgaattatacaactatgattcacacccctgaaaacccagttatccattacaaaygaagatcaaaatgaaaaatgttgcaaggaagtaatatatgtgatcatcactgtaagccacaaaggcattcaaagagaatgaagtgtacaaaacaactctt

SEQ ID NO: 68238 - DNA, 201 bp, Homo sapiens
cacaatgaaaaggtagcacagctgtatgcagatttggatggaggtttcagccatgcagcctggctcttaccaggttggctgcctttgcctagtttcagacscagggacagagctcatcaggaaatcaaggatattttctataaggcaatccagaaacgcagacagtctcaagaaaaaattgatgacattctccaaacttta

SEQ ID NO: 68239 - DNA, 201 bp, Homo sapiens
ctgaatgcagaagatgtctacagtcgcctgacaacacctgtgtttgggtagggagttgcatacgatgtgcctaatccagttttcttggagcagaagaaaaygttaaaaagtggccttaatatagcccactttaaatagcatgtttctataattgaaaaagaaacaaaggaatactttgagagttggggagaaagtggagaa

SEQ ID NO: 68240 - DNA, 201 bp, Homo sapiens
gcgtcctttgactgatgatgaagtagcagggatgcttactggattactcttggcagagcagcatacatcctcaactagtgcttagatgggcttctttttgrccagagacaaaacacttcaagaaaaatgttatttagaacagaaaacagtctgtggagagaatctgcctcctttaacttatgaccagctcaaggatctaaa

SEQ ID NO: 68241 - DNA, 201 bp, Homo sapiens
atcatggttgtactggggaaaattttgcctatgttcaaattaagacaatttggtccactatgcttcgtttatatgaatttgatctcattgatggatacttycccaccgtgaattatacaactatgattcacacccctgaaaacccagttatccattacaaacgaagatcaaaatgaaaaatgttgcaaggaagtaatatat

SEQ ID NO: 68242 - DNA, 201 bp, Homo sapiens
tcccgcggctcggcccgaggactacgaggcggcgctcaatgccgccctggctgacgtgcccgaactggccagactcctggagatcgacccgtacttgaagmcctacgccgtggacttccagcgcaggtataagcagtttagccaaattttgaagaacattggagaaaatgaaggtggtattgataagttttccagaggcta

SEQ ID NO: 68243 - DNA, 201 bp, Homo sapiens
ggcattttggttgatggatgccgaaatgtatacaaacatgagtgtcctgactccttttactccagttattgatcgtggaatacagcttcataaaatgattygactcattacgcatgggcttggtggagaaggctatctcaatttcatgggtaatgaatttgggcatcctgaatggttagacttcccaagaaaaggaaataa

SEQ ID NO: 68244 - DNA, 201 bp, Homo sapiens
ccaaagaagccacggagtctaagaatttatgaatctcatgtgggaatttcttcccatgaaggaaaagtagcttcttataaacattttacatgcaatgtacyaccaagaatcaaaggccttggatacaactgcattcagttgatggcaatcatggagcatgcttactatgccagctttggttaccaaatcacaagcttcttt

SEQ ID NO: 68245 - DNA, 201 bp, Homo sapiens
taccaagaatcaaaggccttggatacaactgcattcagttgatggcaatcatggagcatgcttactatgccagctttggttaccaaatcacaagcttcttwgcagcttccagccgttatggaacacctgaagagctacaagaactggtagacacagctcattccatgggtatcatagtcctcttagatgtggtacacagcc

SEQ ID NO: 68246 - DNA, 201 bp, Homo sapiens
tgggtaatgaatttgggcatcctgaatggttagacttcccaagaaaaggaaataatgagagttaccattatgccaggcggcagtttcatttaactgacgaygaccttcttcgctacaagttcctaaataattttgacagggatatgaatagattggaagaaagatatggttggcttgcagctccacagctgtacattcaaa

SEQ ID NO: 68247 - DNA, 201 bp, Homo sapiens
cattgcttatgcagagagccatgatcaggcattggttggggataagtcgctggcattttggttgatggatgccgaaatgtatacaaacatgagtgtcctgrctccttttactccagttattgatcgtggaatacagcttcataaaatgattcgactcattacgcatgggcttggtggagaaggctatctcaatttcatggg

SEQ ID NO: 68248 - DNA, 201 bp, Homo sapiens
aaagggccccggaccgccgcggctcgcctcggcttgcctcgacacgcctaggcgccctccggctccgccctagccgccgcgtcccagctagagctccagcrcccgctcaggccccactcgacctctcgggcctcggctacttggactgcggcggaatatggcggctccgatgactcccgcggctcggcccgaggactacga

SEQ ID NO: 68249 - DNA, 201 bp, Homo sapiens
gggcaaagtatgtggttcgtgaaggtgataatgtgaattatgattggatacactgggatccagaacactcatatgagtttaagcattccagaccaaagaarccacggagtctaagaatttatgaatctcatgtgggaatttcttcccatgaaggaaaagtagcttcttataaacattttacatgcaatgtactaccaagaa

SEQ ID NO: 68250 - DNA, 201 bp, Homo sapiens
tatttcaccgtgggcaaagtatgtggttcgtgaaggtgataatgtgaattatgattggatacactgggatccagaacactcatatgagtttaagcattccrgaccaaagaagccacggagtctaagaatttatgaatctcatgtgggaatttcttcccatgaaggaaaagtagcttcttataaacattttacatgcaatgt

SEQ ID NO: 68251 - DNA, 201 bp, Homo sapiens
attttgaagaacattggagaaaatgaaggtggtattgataagttttccagaggctatgaatcatttggcgtccacagatgtgctgatggtggtttatactscaaagaatgggccccgggagcagaaggagtttttcttactggagattttaatggttggaatccattttcgtacccatacaaaaaactggattatggaaaa

SEQ ID NO: 68252 - DNA, 201 bp, Homo sapiens
ggttggaagaatatcgctttgatggatttcgttttgatggtgttacgtccatgctttatcatcaccatggagtgggtcaaggtttctcaggtgattacagkgaatatttcggactacaagtagatgaagatgccttgacttacctcatgttggcaaatcatttggttcacacgctgtgtcccgattctataacaatagctg

SEQ ID NO: 68253 - DNA, 201 bp, Homo sapiens
tcaggcattggttggggataagtcgctggcattttggttgatggatgccgaaatgtatacaaacatgagtgtcctgactccttttactccagttattgatygtggaatacagcttcataaaatgattcgactcattacgcatgggcttggtggagaaggctatctcaatttcatgggtaatgaatttgggcatcctgaatg

SEQ ID NO: 68254 - DNA, 201 bp, Homo sapiens
caggcattggttggggataagtcgctggcattttggttgatggatgccgaaatgtatacaaacatgagtgtcctgactccttttactccagttattgatcrtggaatacagcttcataaaatgattcgactcattacgcatgggcttggtggagaaggctatctcaatttcatgggtaatgaatttgggcatcctgaatgg

SEQ ID NO: 68255 - DNA, 201 bp, Homo sapiens
cacacagcttataacatgtatgcttttcagaatacagttgtctagccaagccatcaagtgtctgaaattcaatattggtttatgcaaatacagcaaacttdtatttaagtagatgggagaatatgtttaaaatattaggaatcctagaccatattttcaagtcatcttagcagctaggattctcaaatggaagtgttatat

SEQ ID NO: 68256 - DNA, 201 bp, Homo sapiens
aaatactgtaataaatatgcagtagtgatataaagaattatatccaaggtaatataaaagccattacgtatgaactcatccgtgtctcattttgtgttttwttttgtgatctcttgtccactaagtatcttgttaaatgccagtatctcagtctttctgaagccctgaaatggtaattgtagcatttcagaaaatgtcttt

SEQ ID NO: 68257 - DNA, 201 bp, Homo sapiens
cgctggcggggggagaaagggcaggaggccttccgtcccggctataaagggccccggaccgccgcggctcgcctcggcttgcctcgacacgcctaggcgcyctccggctccgccctagccgccgcgtcccagctagagctccagcgcccgctcaggccccactcgacctctcgggcctcggctacttggactgcggcggaa

SEQ ID NO: 68258 - DNA, 201 bp, Homo sapiens
gtgctgatggtggtttatactgcaaagaatgggccccgggagcagaaggagtttttcttactggagattttaatggttggaatccattttcgtacccatayaaaaaactggattatggaaaatgggagctgtatatcccaccaaagcagaataaatctgtactcgtgcctcatggatccaaattaaaggtagttattacta

SEQ ID NO: 68259 - DNA, 201 bp, Homo sapiens
catgtatgcttttcagaatacagttgtctagccaagccatcaagtgtctgaaattcaatattggtttatgcaaatacagcaaacttttatttaagtagatrggagaatatgtttaaaatattaggaatcctagaccatattttcaagtcatcttagcagctaggattctcaaatggaagtgttatatataatatgttaaaa

SEQ ID NO: 68260 - DNA, 201 bp, Homo sapiens
gaatatgtttgatgggacagattcctgttattttcattctggacctagagggactcatgatctttgggatagcagattgtttgcctactccagctgggaarttttaagattccttctgtcaaacataagatggtggttggaagaatatcgctttgatggatttcgttttgatggtgttacgtccatgctttatcatcacca

SEQ ID NO: 68261 - DNA, 201 bp, Homo sapiens
gcattttggttgatggatgccgaaatgtatacaaacatgagtgtcctgactccttttactccagttattgatcgtggaatacagcttcataaaatgattcractcattacgcatgggcttggtggagaaggctatctcaatttcatgggtaatgaatttgggcatcctgaatggttagacttcccaagaaaaggaaataat

SEQ ID NO: 68262 - DNA, 201 bp, Homo sapiens; identical to SEQ ID NO: 68242

SEQ ID NO: 68263 - DNA, 201 bp, Homo sapiens; identical to SEQ ID NO: 68243

SEQ ID NO: 68264 - DNA, 201 bp, Homo sapiens; identical to SEQ ID NO: 68244

SEQ ID NO: 68265 - DNA, 201 bp, Homo sapiens; identical to SEQ ID NO: 68245

SEQ ID NO: 68266 - DNA, 201 bp, Homo sapiens
tgggtaatgaatttgggcatcctgaatggttagacttcccaagaaaaggaaataatgagagttaccattatgccaggcggcagtttcatttaactgacgaygaccttcttcgctacaagttcctaaataattttgacagggatatgaatagattggaagaaagatatggttggcttgcagctccacaggcctacgtgagtg

SEQ ID NO: 68267 - DNA, 201 bp, Homo sapiens; identical to SEQ ID NO: 68247

SEQ ID NO: 68268 - DNA, 201 bp, Homo sapiens; identical to SEQ ID NO: 68248

SEQ ID NO: 68269 - DNA, 201 bp, Homo sapiens; identical to SEQ ID NO: 68249

SEQ ID NO: 68270 - DNA, 201 bp, Homo sapiens; identical to SEQ ID NO: 68250

SEQ ID NO: 68271 - DNA, 201 bp, Homo sapiens; identical to SEQ ID NO: 68251

SEQ ID NO: 68272 - DNA, 201 bp, Homo sapiens; identical to SEQ ID NO: 68252

SEQ ID NO: 68273 - DNA, 201 bp, Homo sapiens; identical to SEQ ID NO: 68253

SEQ ID NO: 68274 - DNA, 201 bp, Homo sapiens; identical to SEQ ID NO: 68254

SEQ ID NO: 68275 - DNA, 201 bp, Homo sapiens; identical to SEQ ID NO: 68255

SEQ ID NO: 68276 - DNA, 201 bp, Homo sapiens; identical to SEQ ID NO: 68256

SEQ ID NO: 68277 - DNA, 201 bp, Homo sapiens; identical to SEQ ID NO: 68257

SEQ ID NO: 68278 - DNA, 201 bp, Homo sapiens; identical to SEQ ID NO: 68258

SEQ ID NO: 68279 - DNA, 201 bp, Homo sapiens; identical to SEQ ID NO: 68259

SEQ ID NO: 68280 - DNA, 201 bp, Homo sapiens; identical to SEQ ID NO: 68260

SEQ ID NO: 68281 - DNA, 201 bp, Homo sapiens; identical to SEQ ID NO: 68261

SEQ ID NO: 68282 - DNA, 201 bp, Homo sapiens; identical to SEQ ID NO: 68243

SEQ ID NO: 68283 - DNA, 201 bp, Homo sapiens; identical to SEQ ID NO: 68244

SEQ ID NO: 68284 - DNA, 201 bp, Homo sapiens; identical to SEQ ID NO: 68245

SEQ ID NO: 68285 - DNA, 201 bp, Homo sapiens; identical to SEQ ID NO: 68266

SEQ ID NO: 68286 - DNA, 201 bp, Homo sapiens; identical to SEQ ID NO: 68247

SEQ ID NO: 68287 - DNA, 201 bp, Homo sapiens; identical to SEQ ID NO: 68249

SEQ ID NO: 68288 - DNA, 201 bp, Homo sapiens; identical to SEQ ID NO: 68251

SEQ ID NO: 68289 - DNA, 201 bp, Homo sapiens; identical to SEQ ID NO: 68250

SEQ ID NO: 68290 - DNA, 201 bp, Homo sapiens; identical to SEQ ID NO: 68252

SEQ ID NO: 68291 - DNA, 201 bp, Homo sapiens; identical to SEQ ID NO: 68253

SEQ ID NO: 68292 - DNA, 201 bp, Homo sapiens; identical to SEQ ID NO: 68254

SEQ ID NO: 68293 - DNA, 201 bp, Homo sapiens; identical to SEQ ID NO: 68255

SEQ ID NO: 68294 - DNA, 201 bp, Homo sapiens; identical to SEQ ID NO: 68256

SEQ ID NO: 68295 - DNA, 201 bp, Homo sapiens; identical to SEQ ID NO: 68259

SEQ ID NO: 68296 - DNA, 201 bp, Homo sapiens; identical to SEQ ID NO: 68258

SEQ ID NO: 68297 - DNA, 201 bp, Homo sapiens; identical to SEQ ID NO: 68260

SEQ ID NO: 68298 - DNA, 201 bp, Homo sapiens; identical to SEQ ID NO: 68261

SEQ ID NO: 68299 - DNA, 201 bp, Homo sapiens
tacatcatcaatcagagaagtttagaagacaccgagtgggagctcttgcctctgaaactaaccccattgattttatctatgagccactggatcctgtaaayccctatccagagtttttcgagctgtacaggaaaatgctgtcacggtccatgatgtcaattctggatgaccacattagccacgatccacagctagaggatc

SEQ ID NO: 68300 - DNA, 201 bp, Homo sapiens
taactgccagttcagttaatcaaatgtcatttgttcaattgttaatgtcactttaaattaaaagtggtttattacttgtttaatgacataactacacagttagttaaaaaaaatttttttacagtaatgatagcctccaaggcagaaacacttttcagtgttaagtttttgtttacttgttcacaagccattagggaaatt

SEQ ID NO: 68301 - DNA, 127 bp, Homo sapiens
ctgtgatgtactttcactggctctgtttgtacattgagattgtttgtttaacaatgctttctatgttcatatactgtttacctttttccatggagtctcckggcaaagaataaaatatatttatttt

SEQ ID NO: 68302 - DNA, 201 bp, Homo sapiens
tgaccttgttcaatcactatgaagcagagtgaaagctgtggtagagtggttaacagatacaagtgtcagtttcttagttctcatttaagcactagtggaattttttttttttgatatattagcaagtctgtgatgtactttcactggctctgtttgtacattgagattgtttgtttaacaatgctttctatgttcatatac

SEQ ID NO: 68303 - DNA, 201 bp, Homo sapiens
gtgtaactgccagttcagttaatcaaatgtcatttgttcaattgttaatgtcactttaaattaaaagtggtttattacttgtttaatgacataactacacagttagttaaaaaaaatttttttacagtaatgatagcctccaaggcagaaacacttttcagtgttaagtttttgtttacttgttcacaagccattagggaa

SEQ ID NO: 68304 - DNA, 201 bp, Homo sapiens
tgtaactgccagttcagttaatcaaatgtcatttgttcaattgttaatgtcactttaaattaaaagtggtttattacttgtttaatgacataactacacagttagttaaaaaaaatttttttacagtaatgatagcctccaaggcagaaacacttttcagtgttaagtttttgtttacttgttcacaagccattagggaaa

SEQ ID NO: 68305 - DNA, 201 bp, Homo sapiens
taaaaatttatatcagaaaaagacgacccagcaagcctcacatgtttccaaagatcttaatgaaaatcacagatctccgtagcatcagtgctaaaggtgcrgagcgtgtaattaccttgaaaatggaaattcctggatcaatgccacctctcattcaagaaatgctggagaattctgaaggacatgaacccttgaccccaa

SEQ ID NO: 68306 - DNA, 201 bp, Homo sapiens
gtaactgccagttcagttaatcaaatgtcatttgttcaattgttaatgtcactttaaattaaaagtggtttattacttgtttaatgacataactacacagttagttaaaaaaaatttttttacagtaatgatagcctccaaggcagaaacacttttcagtgttaagtttttgtttacttgttcacaagccattagggaaat

SEQ ID NO: 68307 - DNA, 201 bp, Homo sapiens; identical to SEQ ID NO: 68300

SEQ ID NO: 68308 - DNA, 127 bp, Homo sapiens; identical to SEQ ID NO: 68301

SEQ ID NO: 68309 - DNA, 201 bp, Homo sapiens; identical to SEQ ID NO: 68302

SEQ ID NO: 68310 - DNA, 201 bp, Homo sapiens; identical to SEQ ID NO: 68303

SEQ ID NO: 68311 - DNA, 201 bp, Homo sapiens; identical to SEQ ID NO: 68304

SEQ ID NO: 68312 - DNA, 201 bp, Homo sapiens; identical to SEQ ID NO: 68305

SEQ ID NO: 68313 - DNA, 201 bp, Homo sapiens; identical to SEQ ID NO: 68306

SEQ ID NO: 68314 - DNA, 201 bp, Homo sapiens
gctcttatttttcttatgtttttaaccgcttaggtctatttggatgtaagggtgaaaattcatttgatggaaatacttgtgtatatttaaagacccaattkctcctctggagcttgtactttcaagaatgattaatctgtgtaataaactggttactacagtcattacatataattttgtgtgaataggctttttcatttt

SEQ ID NO: 68315 - DNA, 201 bp, Homo sapiens
cctgcattttaaggtctaagtttaactggtcaacatttaaatggattggagctattagtacatcaagtgtgatgggctttgttcccaactcttttacatcwccctaccccttcaacctttggcctttcagcccttctttctctcttccatattctttggtttgtatgtggtttctcagttaatacatagctaatagctctt

SEQ ID NO: 68316 - DNA, 201 bp, Homo sapiens; identical to SEQ ID NO: 68314

SEQ ID NO: 68317 - DNA, 201 bp, Homo sapiens; identical to SEQ ID NO: 68315

SEQ ID NO: 68318 - DNA, 201 bp, Homo sapiens; identical to SEQ ID NO: 68314

SEQ ID NO: 68319 - DNA, 201 bp, Homo sapiens; identical to SEQ ID NO: 68315

SEQ ID NO: 68320 - DNA, 201 bp, Homo sapiens; identical to SEQ ID NO: 68314

SEQ ID NO: 68321 - DNA, 201 bp, Homo sapiens; identical to SEQ ID NO: 68315

SEQ ID NO: 68322 - DNA, 201 bp, Homo sapiens
cagattctggagtgaatattttaccactgatagatcacttgaaaaagccatgctttccagacaacatgtacctgtggaatcaagtcatctcttcaaatttrttaattggagttccctgctccctgagaggtttataaaaggacatgtttataacaatccaaattatggcagttctgagctggctaaaaaatatccagggtt

SEQ ID NO: 68323 - DNA, 201 bp, Homo sapiens
tgtcgtcgtatcaaccaactacagattagcacctaagtatcatttcccaattcaatttgaagatgtatataatgccttaaggtggttcttacgtaaaaaarttcttgcaaaatatggtgtgaaccctgagagaatcggtatttctggagatagtgcaggagggaatttagctgcagcagtgactcaacagctccttgatga

SEQ ID NO: 68324 - DNA, 201 bp, Homo sapiens
aatttgcattagaaattggtctttcttagaatggtctagttaagttccacatgtagcataattcttaaataggcacttttctgttttttttttcttactgkgggatttcatttcaattttctacattgtctatctgctttttctgagattttccttcttacactgttaatcttattttaaaaaatattacattcttgtata

SEQ ID NO: 68325 - DNA, 201 bp, Homo sapiens
ccatgttgaggatggattccatggagcattttcatttctgggacttaaaattagtcacagacttataaatcagtatattgagtggctaaaggaaaatctayagtaaaacatgtagctataacatattttaaaaataaaatctgaaaacctcagaaaatttgcattagaaattggtctttcttagaatggtctagttaagtt

SEQ ID NO: 68326 - DNA, 201 bp, Homo sapiens
tcaggcatatcatgtaggtttactttctgtgtttctagagaccaagaagcgggacgttcaccatgggaagaaaatcgctgtaccttctgattgtggggatmctcatagcatattatatttatacgcctctcccagataacgttgaggagccatggagaatgatgtggataaacgcacatctgaaaactatacaaaatttgg

SEQ ID NO: 68327 - DNA, 201 bp, Homo sapiens
gtcaatatgatctcttaagagatgatggactcatgtatgtcacccgacttcgcaacactggggttcaggtgactcataaccatgttgaggatggattccayggagcattttcatttctgggacttaaaattagtcacagacttataaatcagtatattgagtggctaaaggaaaatctatagtaaaacatgtagctataac

SEQ ID NO: 68328 - DNA, 177 bp, Homo sapiens
actaagtgagcaactctgttttcaaagcttttgggtggagctgaagcacactgcttattaaagtacactattcaggyatatcatgtaggtttactttctgtgtttctagagaccaagaagcgggacgttcaccatgggaagaaaatcgctgtaccttctgattgtggggatcctcat

SEQ ID NO: 68329 - DNA, 201 bp, Homo sapiens
ggctaaaggaaaatctatagtaaaacatgtagctataacatattttaaaaataaaatctgaaaacctcagaaaatttgcattagaaattggtctttcttaraatggtctagttaagttccacatgtagcataattcttaaataggcacttttctgttttttttttcttactgtgggatttcatttcaattttctacattgt

SEQ ID NO: 68330 - DNA, 201 bp, Homo sapiens; identical to SEQ ID NO: 68322

SEQ ID NO: 68331 - DNA, 201 bp, Homo sapiens; identical to SEQ ID NO: 68323

SEQ ID NO: 68332 - DNA, 201 bp, Homo sapiens; identical to SEQ ID NO: 68324

SEQ ID NO: 68333 - DNA, 201 bp, Homo sapiens; identical to SEQ ID NO: 68325

SEQ ID NO: 68334 - DNA, 201 bp, Homo sapiens
cactgctttggagcccagggtaactctgccagtaacagagaccaagaagcgggacgttcaccatgggaagaaaatcgctgtaccttctgattgtggggatmctcatagcatattatatttatacgcctctcccagataacgttgaggagccatggagaatgatgtggataaacgcacatctgaaaactatacaaaatttgg

SEQ ID NO: 68335 - DNA, 201 bp, Homo sapiens; identical to SEQ ID NO: 68327

SEQ ID NO: 68336 - DNA, 201 bp, Homo sapiens; identical to SEQ ID NO: 68329

SEQ ID NO: 68337 - DNA, 201 bp, Homo sapiens
agctgaagggaccaaggtgggcattgagtggactctgtgctcactgggtggagctgtggcagggggcactgagcctccagaccctgctaaccacaaaaggsaacatcccagcaggctgtgcttggatcatgctcgtctgccctcaagctggaaaacaaggggctacctaccgagaggattatgcaagtgactttctttctt

SEQ ID NO: 68338 - DNA, 201 bp, Homo sapiens
gtctggggtttgatggacagaggctgaggaatttcctggcttccccagatagtgtcctgggacatggtatgctttggggctggggtagcatggaatccctytgaggacctggatactggtactacggggtggggaagaggaaccttaaacttggctttccccagccttcagcctgagtctagcatgtttctagctccccag

SEQ ID NO: 68339 - DNA, 201 bp, Homo sapiens
gcggaaggaccatgtgcgccggtttctgctcaccttccagagagaggatcttgagaagaagtactcccggaaggtggatccccgcttcggagcctacgttkcctgtgccctgttggtcttctgcttcatctgcttcatccagcttctcatcttcccacactccaccctgatgcttgggatctatgccagcatcttcctgct

SEQ ID NO: 68340 - DNA, 201 bp, Homo sapiens
catggtttagtggcctcctggtccctaaagtggatgaacggaaaacagcctggggtgaacgcaatgggcagaagcgttcgcggcgccgtggcactcgggcmggtggcttctgcacgccccgctatatgagctgcctccgggatgcagagccacccagccccacccctgcgggcccccctcggtgcccctggcaggatgacg

SEQ ID NO: 68341 - DNA, 201 bp, Homo sapiens
ggggctgcgggcagtggccctgggcttcgaggataccgaggtgacaacgacagcgggcgggacggctgaggtggcgcccgacgcggtgcccaggagtgggmgatcctgctggcgccgtctggtgcaggtgttccagtcgaagcagttccgttcggccaagctggagcgcctgtaccagcggtacttcttccagatgaacca

SEQ ID NO: 68342 - DNA, 201 bp, Homo sapiens
ttgatcagctgcggaaggaccatgtgcgccggtttctgctcaccttccagagagaggatcttgagaagaagtactcccggaaggtggatccccgcttcggrgcctacgttgcctgtgccctgttggtcttctgcttcatctgcttcatccagcttctcatcttcccacactccaccctgatgcttgggatctatgccagca

SEQ ID NO: 68343 - DNA, 201 bp, Homo sapiens
ccatgtgcgccggtttctgctcaccttccagagagaggatcttgagaagaagtactcccggaaggtggatccccgcttcggagcctacgttgcctgtgccmtgttggtcttctgcttcatctgcttcatccagcttctcatcttcccacactccaccctgatgcttgggatctatgccagcatcttcctgctgctgctaat

SEQ ID NO: 68344 - DNA, 201 bp, Homo sapiens
agtacctgaacggggactacgaggtggagccaggccgtggtggcgagcgcaacgcgtacctcaaggagcagcacattgagactttcctcatcctgggcgcmagccagaaacggaaagaggagaaggccatgctggccaagctgcagcggactcgggccaactccatggaagggctgatgccgcgctgggttcctgatcgtg

SEQ ID NO: 68345 - DNA, 201 bp, Homo sapiens
cggaggcccgggccgaccatgcccactgctgtgtggagatgggggtagacatgattgaggccatctcgctggtacgtgaggtgacaggtgtgaatgtgaayatgcgcgtgggcatccacagcgggcgcgtgcactgcggcgtccttggcttgcggaaatggcagttcgatgtgtggtccaatgatgtgaccctggccaacc

SEQ ID NO: 68346 - DNA, 201 bp, Homo sapiens
cctatgtggcactgttggcctgtgccgccgccctgttcgtggggctcatggtggtgtgtaaccggcatagcttccgccaggactccatgtgggtggtgagytacgtggtgctgggcatcctggcggcagtgcaggtcgggggcgctctcgcagcagacccgcgcagcccctctgcgggcctctggtgccctgtgttctttg

SEQ ID NO: 68347 - DNA, 201 bp, Homo sapiens
acttcctcaatgggggccccagcagttaacagggcccagccacaaattcagctgaagggaccaaggtgggcattgagtggactctgtgctcactgggtggrgctgtggcagggggcactgagcctccagaccctgctaaccacaaaagggaacatcccagcaggctgtgcttggatcatgctcgtctgccctcaagctgga

SEQ ID NO: 68348 - DNA, 201 bp, Homo sapiens
agtgcctgcggctgctcaacgagatcatcgctgactttgatgagattatcagcgaggagcggttccggcagctggaaaagatcaagacgattggtagcacytacatggctgcctcagggctgaacgccagcacctacgatcaggtgggccgctcccacatcactgccctggctgactacgccatgcggctcatggagcaga

SEQ ID NO: 68349 - DNA, 191 bp, Homo sapiens
ccggtctataggtgcataccaccacaccaggctaatttttttttttttgagacggagtctcactctgtcacccaggctggagtgcaatggygcgatctttgctcactgcaacctctgccacccgggttcaagcaattctcctgcctcagctcctgagtagctgggattacaggcgcccgccaccacgcccg

SEQ ID NO: 68350 - DNA, 201 bp, Homo sapiens
aagggctgatgccgcgctgggttcctgatcgtgccttctcccggaccaaggactccaaggccttccgccagatgggcattgatgattccagcaaagacaarcggggcacccaagatgccctgaaccctgaggatgaggtggatgagttcctgagccgtgccatcgatgcccgcagcattgatcagctgcggaaggaccatg

SEQ ID NO: 68351 - DNA, 201 bp, Homo sapiens; identical to SEQ ID NO: 68337

SEQ ID NO: 68352 - DNA, 201 bp, Homo sapiens; identical to SEQ ID NO: 68338

SEQ ID NO: 68353 - DNA, 201 bp, Homo sapiens; identical to SEQ ID NO: 68339

SEQ ID NO: 68354 - DNA, 201 bp, Homo sapiens; identical to SEQ ID NO: 68340

SEQ ID NO: 68355 - DNA, 201 bp, Homo sapiens; identical to SEQ ID NO: 68341

SEQ ID NO: 68356 - DNA, 201 bp, Homo sapiens; identical to SEQ ID NO: 68342

SEQ ID NO: 68357 - DNA, 201 bp, Homo sapiens; identical to SEQ ID NO: 68343

SEQ ID NO: 68358 - DNA, 201 bp, Homo sapiens; identical to SEQ ID NO: 68344

SEQ ID NO: 68359 - DNA, 201 bp, Homo sapiens; identical to SEQ ID NO: 68345

SEQ ID NO: 68360 - DNA, 201 bp, Homo sapiens; identical to SEQ ID NO: 68346

SEQ ID NO: 68361 - DNA, 201 bp, Homo sapiens; identical to SEQ ID NO: 68347

SEQ ID NO: 68362 - DNA, 201 bp, Homo sapiens; identical to SEQ ID NO: 68348

SEQ ID NO: 68363 - DNA, 191 bp, Homo sapiens; identical to SEQ ID NO: 68349

SEQ ID NO: 68364 - DNA, 201 bp, Homo sapiens; identical to SEQ ID NO: 68350

SEQ ID NO: 68365 - DNA, 201 bp, Homo sapiens
tttgcttggaaataagattataaattagtaaatcaaaatcttgacctctcatgataatcgtggtgtgctgcaggcatcacgatgaaggcggggctgtctgyactcctgtgcttgcgacactaatactgttctctccactgcaccggagcacctttgttcggtatatatatgcctttgttacctctgactcacgtcgcttaa

SEQ ID NO: 68366 - DNA, 201 bp, Homo sapiens
agaacctcgctgtcagtgagagtcctgtcacaccctctgcactcgctgagcttcttgacctgctggacagcagaacaatttcttcatcagcagctaaacakgtaatggatgtgaagaacagaaaccccagagctataaataaactgattgggttggtccggaaagcgactcaaagccgagcagatccagtcatgataaagg

SEQ ID NO: 68367 - DNA, 201 bp, Homo sapiens
cctggagttacaatggcggcgcccatgctgcgctggggctgccgtggaagacgttgggctttcgcccgggttgacggtggttcttgccaccgaagaggggmtccgactgggtccacatccaaccagattaggggagagagctcagtggctcagcagcccctccacacggcccagaagacgaggaaaggtgaacacaaatgg

SEQ ID NO: 68368 - DNA, 201 bp, Homo sapiens
tggatctcaagttcgcttttcagcacctccaaattctttggtttctttttttgatgcatctctacctggaactttgccggttctcaacaggaggtgtgtaraagcggcggtgatgacaggcctggctctgaactgccacataaacaagaagtccttgtttgacaggaagcactacttctatgcagacctccctgcaggcta

SEQ ID NO: 68369 - DNA, 201 bp, Homo sapiens
caaacagtgcagcctgactgggaacaggatcctgtgaaagctgatgcccatgtgccctgagagctgcctctcaatccctgtcccaagccacagctatggcrttaatgtcaccagtgttctcaccctctaggccctgtgcctggaggtgcctccacagccgaccagcagccaccccgcctgcttcatccacatcaggagggt

SEQ ID NO: 68370 - DNA, 201 bp, Homo sapiens
atcacaagctggggtgcaccatgtcaatgagagacaaagaaggaaaacaggactacaggttcatgccagaacccaacctgcctcccctggtgctctacgaygccacatctctgcccgcaggtgcagacccacagcaagtgatcaatattgaccagattcgggagacactcccggagctccccagtgtgacccgagagaagc

SEQ ID NO: 68371 - DNA, 201 bp, Homo sapiens
acgacaacctgaggtctcagacgctcattgatttgaacagggcaggagtgggccttctggaggtggtcctggagcccgacatgtcctgtggagaagaggcrgcaacagctgtcagggagctgcagctgatccttcaagccctggggaccagccaggcgaacatggcagagggccagttgagagtggatgccaatatatccg

SEQ ID NO: 68372 - DNA, 201 bp, Homo sapiens
agacgttgggctttcgcccgggttgacggtggttcttgccaccgaagaggggctccgactgggtccacatccaaccagattaggggagagagctcagtggytcagcagcccctccacacggcccagaagacgaggaaaggtgaacacaaatgggctgctgtggtaggtttggaaattcatgcccagatttcctccaactct

SEQ ID NO: 68373 - DNA, 201 bp, Homo sapiens
agaacctcgctgtcagtgagagtcctgtcacaccctctgcactcgctgagcttcttgacctgctggacagcagaacaatttcttcatcagcagctaaacakacctgcacatcatctggcactggataatcacagaggagcatcccatcagaatgattcctgctttacctcacctgaaacgcaagtcagacacaaaaatgag

SEQ ID NO: 68374 - DNA, 201 bp, Homo sapiens; identical to SEQ ID NO: 68367

SEQ ID NO: 68375 - DNA, 201 bp, Homo sapiens; identical to SEQ ID NO: 68368

SEQ ID NO: 68376 - DNA, 170 bp, Homo sapiens
tctggcactggataatcacagaggagcatcccatcagaatgattcctgctttacctcacctgaaacgcaagtcagacacaaaaatgaggggacagcaagcyctcaaaaaaaacttagtgtgcggtgagagaaaatttagcaagaagataaaataaacagactaaactcct

SEQ ID NO: 68377 - DNA, 201 bp, Homo sapiens; identical to SEQ ID NO: 68371

SEQ ID NO: 68378 - DNA, 201 bp, Homo sapiens; identical to SEQ ID NO: 68370

SEQ ID NO: 68379 - DNA, 201 bp, Homo sapiens; identical to SEQ ID NO: 68372

SEQ ID NO: 68380 - DNA, 201 bp, Homo sapiens; identical to SEQ ID NO: 68365

SEQ ID NO: 68381 - DNA, 201 bp, Homo sapiens
agaacctcgctgtcagtgagagtcctgtcacaccctctgcactcgctgagcttcttgacctgctggacagcagaacaatttcttcatcagcagctaaacakgtgtttgaggaactgtggaagagggaaggcaagactccagggcagattgtttcagaaaagcagcttgaactgatgcaggaccagggggcactggagcagc

SEQ ID NO: 68382 - DNA, 201 bp, Homo sapiens; identical to SEQ ID NO: 68367

SEQ ID NO: 68383 - DNA, 201 bp, Homo sapiens; identical to SEQ ID NO: 68368

SEQ ID NO: 68384 - DNA, 201 bp, Homo sapiens; identical to SEQ ID NO: 68369

SEQ ID NO: 68385 - DNA, 201 bp, Homo sapiens; identical to SEQ ID NO: 68370

SEQ ID NO: 68386 - DNA, 201 bp, Homo sapiens; identical to SEQ ID NO: 68371

SEQ ID NO: 68387 - DNA, 201 bp, Homo sapiens; identical to SEQ ID NO: 68372

SEQ ID NO: 68388 - DNA, 201 bp, Homo sapiens
aactgtggtcactggctgtggcagcaactattataagatgctctgaaaactcttcagacactgaggggcaccagaggagcagactacaagaatggcacacrctatggaaaactcctggacaatcagtaaagagtaccatattgatgaagaagtgggctttgctctgccaaatccacaggaaaatctacctgatttttataa

SEQ ID NO: 68389 - DNA, 201 bp, Homo sapiens
aaacatctgcctgatctcatagagtctggccagcttcgagaaagagttgagaagttaaacatgctcagcattgatcatctcacagaccacaagtcacagcrccttgcacgtctagttctgggatgcatcaccatggcatatgtgtggggcaaaggtcatggagatgtccgtaaggtcttgccaagaaatattgctgttcct

SEQ ID NO: 68390 - DNA, 201 bp, Homo sapiens
tgggatgcatcaccatggcatatgtgtggggcaaaggtcatggagatgtccgtaaggtcttgccaagaaatattgctgttccttactgccaactctccaaraaactggaactgcctcctattttggtttatgcagactgtgtcttggcaaactggaagaaaaaggatcctaataagtatgtaaacagaacatggacgtttt

SEQ ID NO: 68391 - DNA, 140 bp, Homo sapiens
ccaaaagtggaagtaatttctcactgcccctgtgataaaytgtggtcactggctgtggcagcaactattataagatgctctgaaaactcttcagacactgaggggcaccagaggagcagactacaagaatggcacacgct

SEQ ID NO: 68392 - DNA, 201 bp, Homo sapiens; identical to SEQ ID NO: 68388

SEQ ID NO: 68393 - DNA, 201 bp, Homo sapiens; identical to SEQ ID NO: 68389

SEQ ID NO: 68394 - DNA, 201 bp, Homo sapiens; identical to SEQ ID NO: 68390

SEQ ID NO: 68395 - DNA, 140 bp, Homo sapiens; identical to SEQ ID NO: 68391

SEQ ID NO: 68396 - DNA, 201 bp, Homo sapiens
gttaggagggtatttttacatccctccagttaacaaatacagcactggcatggttcaccttctcctgcaggtgaccattgacggcaggaattacattgtcratgctgggtctggaagctcctcccagatgtggcagcctctagaattaatttctgggaaggatcagcctcaggtgccttgcattttctgcttgacagaaga

SEQ ID NO: 68397 - DNA, 201 bp, Homo sapiens
gcatggttcaccttctcctgcaggtgaccattgacggcaggaattacattgtcgatgctgggtctggaagctcctcccagatgtggcagcctctagaattwatttctgggaaggatcagcctcaggtgccttgcattttctgcttgacagaagagagaggaatctggtacctggaccaaatcaggagagagcagtatatta

SEQ ID NO: 68398 - DNA, 201 bp, Homo sapiens
atcaggagagagcagtatattacaaacaaagaatttcttaattctcatctcctgccaaagaagaaacaccaaaaaatatacttatttacgcttgaacctcraacaattgaagattttgagtctatgaatacatacctgcagacgtctccaacatcttcatttataaccacatcattttgttccttgcagaccccagaaggg

SEQ ID NO: 68399 - DNA, 201 bp, Homo sapiens
ctcctcccagatgtggcagcctctagaattaatttctgggaaggatcagcctcaggtgccttgcattttctgcttgacagaagagagaggaatctggtacytggaccaaatcaggagagagcagtatattacaaacaaagaatttcttaattctcatctcctgccaaagaagaaacaccaaaaaatatacttatttacgct

SEQ ID NO: 68400 - DNA, 201 bp, Homo sapiens
cagcactggcatggttcaccttctcctgcaggtgaccattgacggcaggaattacattgtcgatgctgggtctggaagctcctcccagatgtggcagcctstagaattaatttctgggaaggatcagcctcaggtgccttgcattttctgcttgacagaagagagaggaatctggtacctggaccaaatcaggagagagca

SEQ ID NO: 68401 - DNA, 201 bp, Homo sapiens
acaatcggttttcagaccacaatgttaggagggtatttttacatccctccagttaacaaatacagcactggcatggttcaccttctcctgcaggtgaccaytgacggcaggaattacattgtcgatgctgggtctggaagctcctcccagatgtggcagcctctagaattaatttctgggaaggatcagcctcaggtgcct

SEQ ID NO: 68402 - DNA, 201 bp, Homo sapiens
ccagatccgggctgttccctttgagaaccttaacatgcattgtgggcaagccatggagttgggcttagaggctatttttgatcacattgtaagaagaaacyggggtgggtggtgtctccaggtcaatcaacttctgtactgggctctgaccacaatcggttttcagaccacaatgttaggagggtatttttacatccctcc

SEQ ID NO: 68403 - DNA, 201 bp, Homo sapiens
gaagaaaccggggtgggtggtgtctccaggtcaatcaacttctgtactgggctctgaccacaatcggttttcagaccacaatgttaggagggtatttttayatccctccagttaacaaatacagcactggcatggttcaccttctcctgcaggtgaccattgacggcaggaattacattgtcgatgctgggtctggaagct

SEQ ID NO: 68404 - DNA, 201 bp, Homo sapiens
gtcgagtttaaaactctcactgaggaagaggttgaagaagtgctgaaaaatatatttaagatttccttggggagaaatctcgtgcccaaacctggtgatgratcccttactatttagaataaggaacaaaataaacccttgtgtatgtatcacccaactcactaattatcaacttatgtgctatcagatatcctctctacc

SEQ ID NO: 68405 - DNA, 201 bp, Homo sapiens
cagatccgggctgttccctttgagaaccttaacatgcattgtgggcaagccatggagttgggcttagaggctatttttgatcacattgtaagaagaaaccrgggtgggtggtgtctccaggtcaatcaacttctgtactgggctctgaccacaatcggttttcagaccacaatgttaggagggtatttttacatccctcca

SEQ ID NO: 68406 - DNA, 201 bp, Homo sapiens
gtgaccattgacggcaggaattacattgtcgatgctgggtctggaagctcctcccagatgtggcagcctctagaattaatttctgggaaggatcagcctcmggtgccttgcattttctgcttgacagaagagagaggaatctggtacctggaccaaatcaggagagagcagtatattacaaacaaagaatttcttaattct

SEQ ID NO: 68407 - DNA, 201 bp, Homo sapiens
attatcaacttatgtgctatcagatatcctctctaccctcacgttattttgaagaaaatcctaaacatcaaatactttcatccataaaaatgtcagcattyattaaaaaacaataactttttaaagaaacataaggacacattttcaaattaataaaaataaaggcattttaaggatggcctgtgattatcttgggaagca

SEQ ID NO: 68408 - DNA, 201 bp, Homo sapiens
aatacagatctggtcgagtttaaaactctcactgaggaagaggttgaagaagtgctgaaaaatatatttaagatttccttggggagaaatctcgtgcccamacctggtgatggatcccttactatttagaataaggaacaaaataaacccttgtgtatgtatcacccaactcactaattatcaacttatgtgctatcagat

SEQ ID NO: 68409 - DNA, 201 bp, Homo sapiens
  misc_feature (1)...(201): n = A,T,C or G
gtgggcttcatcctcacctatagaaaattcaattataaagacaatacagatctggtcgagtttaaaactctcactgaggaagaggttgaagaagtgctganaaatatatttaagatttccttggggagaaatctcgtgcccaaacctggtgatggatcccttactatttagaataaggaacaaaataaacccttgtgtatg

SEQ ID NO: 68410 - DNA, 201 bp, Homo sapiens
gagagcactttattacagaccttggaagcaagaggattgcattcagcctagttcctggttgctggccaaagtgaccattgacggcaggaattacattgtcratgctgggtctggaagctcctcccagatgtggcagcctctagaattaatttctgggaaggatcagcctcaggtgccttgcattttctgcttgacagaaga

SEQ ID NO: 68411 - DNA, 201 bp, Homo sapiens
ctagttcctggttgctggccaaagtgaccattgacggcaggaattacattgtcgatgctgggtctggaagctcctcccagatgtggcagcctctagaattwatttctgggaaggatcagcctcaggtgccttgcattttctgcttgacagaagagagaggaatctggtacctggaccaaatcaggagagagcagtatatta

SEQ ID NO: 68412 - DNA, 201 bp, Homo sapiens; identical to SEQ ID NO: 68406

SEQ ID NO: 68413 - DNA, 201 bp, Homo sapiens; identical to SEQ ID NO: 68407

SEQ ID NO: 68414 - DNA, 201 bp, Homo sapiens; identical to SEQ ID NO: 68398

SEQ ID NO: 68415 - DNA, 201 bp, Homo sapiens; identical to SEQ ID NO: 68399

SEQ ID NO: 68416 - DNA, 201 bp, Homo sapiens
cattcagcctagttcctggttgctggccaaagtgaccattgacggcaggaattacattgtcgatgctgggtctggaagctcctcccagatgtggcagcctstagaattaatttctgggaaggatcagcctcaggtgccttgcattttctgcttgacagaagagagaggaatctggtacctggaccaaatcaggagagagca

SEQ ID NO: 68417 - DNA, 201 bp, Homo sapiens; identical to SEQ ID NO: 68408

SEQ ID NO: 68418 - DNA, 201 bp, Homo sapiens
cttcccttgcagactttggaagggagagcactttattacagaccttggaagcaagaggattgcattcagcctagttcctggttgctggccaaagtgaccaytgacggcaggaattacattgtcgatgctgggtctggaagctcctcccagatgtggcagcctctagaattaatttctgggaaggatcagcctcaggtgcct

SEQ ID NO: 68419 - DNA, 201 bp, Homo sapiens; identical to SEQ ID NO: 68409
  misc_feature (1)...(201): n = A,T,C or G

SEQ ID NO: 68420 - DNA, 201 bp, Homo sapiens; identical to SEQ ID NO: 68404

SEQ ID NO: 68421 - DNA, 201 bp, Homo sapiens
accttcctcctgccagcgggctggatcctgtcacacctggagacctacaggaggccagagtgaaggggtccgttctgtccctcacactgtgacctgaccasccccaccggcccatcctggtcatgttactgcatttgtggccggcctcccctggatcatgtcattcaattccagtcacctcttctgcaatcatgacctctt

SEQ ID NO: 68422 - DNA, 201 bp, Homo sapiens
cgggctggatcctgtcacacctggagacctacaggaggccagagtgaaggggtccgttctgtccctcacactgtgacctgaccagccccaccggcccatcytggtcatgttactgcatttgtggccggcctcccctggatcatgtcattcaattccagtcacctcttctgcaatcatgacctcttgatgtctccatggtga

SEQ ID NO: 68423 - DNA, 201 bp, Homo sapiens
agatccattcgttgccgccggaggggaagcttgggatcatggaattggccgttgggcttacctcctgcttcgtgaccttcctcctgccagcgggctggatmctgtcacacctggagacctacaggaggccagagtgaaggggtccgttctgtccctcacactgtgacctgaccagccccaccggcccatcctggtcatgtt

SEQ ID NO: 68424 - DNA, 201 bp, Homo sapiens
gaagtgctctttggcagatctgctcccagtcctgccagtgaaatacacccgctgacattcttcaacacctgcctggacacctcccagaaagaagcggtttyatttgcgctgtctcagaaagaacttgccatcatccatggacctcctggcactgggaaaaccacgactgtggttgagatcattcttcaagctgtgaaacaa

SEQ ID NO: 68425 - DNA, 201 bp, Homo sapiens
gggcagcccgccagcaaggagcagcaggcctcagggcagcagaaacttccagaaaagaaaaagaaaaaagccaaaggacatccggccacagatctgcccamggaggaggactttgaggccctggtttctgccgccgttaaggctgataacacctgcggctttgccaagtgcacagccggcgtcacaaccctgggccagttc

SEQ ID NO: 68426 - DNA, 117 bp, Homo sapiens
cggcggggaacaccggyccgctgtaacaccggcccggcgcagaagcgggacgtcggcttctaggggcccaggccggcggcggcgatggcctcggcagctgtggagagcttcgtgacc

SEQ ID NO: 68427 - DNA, 201 bp, Homo sapiens
agatccatggctgcggtgagagggctcgcgcccatgcccggcagagaatcagccgggaaggggtcctctatgccggcagcgggaccaagaacggatccctrgacccagccaagagggcccagctgcagaggaggctggataagaagctgagtgagctcagcaaccagaggaccagccggaggaaggagagggggacgtgac

SEQ ID NO: 68428 - DNA, 201 bp, Homo sapiens
agcgcaggtcctggcaggagaacatctctctgaaagagctccagagccgaggcgtgtgtttgctgaagctgcaggtatccagccagcgcactgggctgtayggacggctgctggtcacctttgagcccaggcgatacgggtccgcggcagctcttcccagtaacagctttacttctggtgatatcgtgggcctgtacgatg

SEQ ID NO: 68429 - DNA, 201 bp, Homo sapiens
ggcacctctttctggcctgtgcacctctctctggcttataaaggtgcctggcctgtgccagcccctccttgttgcgcctcaccgtggggaccaggtgagcyggctctcccacgtggttgtcccgggaaagctgccccacagcctcagcatcttcagcacttaccgatccagagcctcccggccttctccggtgtcctgtac

SEQ ID NO: 68430 - DNA, 201 bp, Homo sapiens
gcctcaaacttgaagtcactcctccaatgtctgggacttgccagctcagcccgttaggatgagggtgctgagaggaaacaggaaacaagactgcgaatggygctcaggcagggagcagggagtggcgtttggcttgcacgttcccatgtggccagatgctggggccactttccttctgtctgctggtgactgcagtgttcc

SEQ ID NO: 68431 - DNA, 201 bp, Homo sapiens
gcccaggcgatacgggtccgcggcagctcttcccagtaacagctttacttctggtgatatcgtgggcctgtacgatgctgctaatgagggcagtcagctgkccactgggatcttgacccgggtcacccagaagtcggtcacggtggcctttgatgagtcccacgatttccagttgagcttggaccgagagaattcctacag

SEQ ID NO: 68432 - DNA, 201 bp, Homo sapiens
cgccccctccaacatcgccgtggacaatctggtggagcgcctggctctgtgtaagcagcggattctgcgcctgggacaccctgcccgcctcctggagtccrttcagcagcactccctggatgcggttttagcgcggagcgacagtgcccagattgttgcagatatcaggaaggacatcgaccaggtctttgtgaaaaacaa

SEQ ID NO: 68433 - DNA, 201 bp, Homo sapiens
cccgagagctacttcgacgtggtggtcattgacgagtgtgcccaggccctcgaggcgagctgctggatccccctgctgaaggccagaaagtgcatcctggygggcgatcacaagcagctgccccccaccacagtctctcacaaggctgcgctggcaggactgtcactcagcctgatggaacgcctggctgaggagtacggc

SEQ ID NO: 68434 - DNA, 183 bp, Homo sapiens
cggcggggaacaccggtccgctgtaacaccggcccggcgcagaagcgggacgtcggcttctaggggcccaggccggcggcggygatggcctcggcagctgtggagagcttcgtgaccaagcaactggacctgctggagctcgagagagacgcggaggtggaggagcgcaggtcctggcaggag

SEQ ID NO: 68435 - DNA, 201 bp, Homo sapiens
agtgaaatacacccgctgacattcttcaacacctgcctggacacctcccagaaagaagcggtttcatttgcgctgtctcagaaagaacttgccatcatccrtggacctcctggcactgggaaaaccacgactgtggttgagatcattcttcaagctgtgaaacaaggcttaaaggttctgtgctgcgccccctccaacatc

SEQ ID NO: 68436 - DNA, 201 bp, Homo sapiens
gcgctgtctcagaaagaacttgccatcatccatggacctcctggcactgggaaaaccacgactgtggttgagatcattcttcaagctgtgaaacaaggctkaaaggttctgtgctgcgccccctccaacatcgccgtggacaatctggtggagcgcctggctctgtgtaagcagcggattctgcgcctgggacaccctgcc

SEQ ID NO: 68437 - DNA, 201 bp, Homo sapiens
cctccaccagggccacagaggagcggaggggcctatgggggaggagcggagggccctgttggggaaggttgggtttttggaccccagggataagcttttcygatgtcacaatgtggaggaaagcacctgggggacaacagtgctcgtgcaggtggggcttgggaaatgcacgtcccttcccctcactccccgccaaaaccc

SEQ ID NO: 68438 - DNA, 201 bp, Homo sapiens
accagccggaggaaggagagggggacgtgaccggccgcatccttgcacgccccgcggagctctctccatggtagcccagggcgctggcagaccatgctccrcctccaccagggccacagaggagcggaggggcctatgggggaggagcggagggccctgttggggaaggttgggtttttggaccccagggataagcttttc

SEQ ID NO: 68439 - DNA, 201 bp, Homo sapiens
ccagggataagcttttccgatgtcacaatgtggaggaaagcacctgggggacaacagtgctcgtgcaggtggggcttgggaaatgcacgtcccttcccctyactccccgccaaaacccacatcccagcctctggatcctggggaaggttccagtccctggagaatacccagggcctcaaacttgaagtcactcctccaatg

SEQ ID NO: 68440 - DNA, 201 bp, Homo sapiens
ctgtgcacctctctctggcttataaaggtgcctggcctgtgccagcccctccttgttgcgcctcaccgtggggaccaggtgagccggctctcccacgtggytgtcccgggaaagctgccccacagcctcagcatcttcagcacttaccgatccagagcctcccggccttctccggtgtcctgtaccaactcttctatttaa

SEQ ID NO: 68441 - DNA, 201 bp, Homo sapiens
agtaccgcatgcaccaggctatcatgcgctgggcctcagacaccatgtaccttgggcagctcacagcccactcttccgtggcaaggcacctcctgagggamctcccaggtgtggctgccacagaagagacgggtgtgcccctgctcttggtggacaccgccggctgcgggctgtttgagctggaggaggaggacgaacagt

SEQ ID NO: 68442 - DNA, 201 bp, Homo sapiens
ccgtgatactgtccttcgtcagatccaacaggaaaggtgaagttggttttcttgctgaggaccggaggatcaacgtggctgtcacccgtgcccgacgccaygtggcggtcatctgtgactcccgtactgtcaacaaccatgcatttttgaagaccctggtggagtatttcacacagcatggggaagtacgcacggcctttg

SEQ ID NO: 68443 - DNA, 201 bp, Homo sapiens
gcctgtgccagcccctccttgttgcgcctcaccgtggggaccaggtgagccggctctcccacgtggttgtcccgggaaagctgccccacagcctcagcatyttcagcacttaccgatccagagcctcccggccttctccggtgtcctgtaccaactcttctatttaagagaacctcagatgatgtacctgagcctcagggt

SEQ ID NO: 68444 - DNA, 201 bp, Homo sapiens
ggggaccaggtgagccggctctcccacgtggttgtcccgggaaagctgccccacagcctcagcatcttcagcacttaccgatccagagcctcccggccttytccggtgtcctgtaccaactcttctatttaagagaacctcagatgatgtacctgagcctcagggttttgtttcagagggatataaattatttaaaaatta

SEQ ID NO: 68445 - DNA, 201 bp, Homo sapiens
acgtggtccttgcaacaaacacaggtgcgtctgccgatggccccctgaagttgctgcccgagagctacttcgacgtggtggtcattgacgagtgtgcccargccctcgaggcgagctgctggatccccctgctgaaggccagaaagtgcatcctggcgggcgatcacaagcagctgccccccaccacagtctctcacaagg

SEQ ID NO: 68446 - DNA, 201 bp, Homo sapiens
gtgtgcccctgctcttggtggacaccgccggctgcgggctgtttgagctggaggaggaggacgaacagtcgaaagggaaccctggcgaagtccgcctcgtyagtttgcacatccaggctctggtggacgctggtgttccagcccgtgacattgctgtggtctcgccatacaacctccaggtggacctgctcagacagagcc

SEQ ID NO: 68447 - DNA, 201 bp, Homo sapiens
taacacctgcggctttgccaagtgcacagccggcgtcacaaccctgggccagttctgccagctctgcagccgccgctactgcctcagccaccacctgcccragatccatggctgcggtgagagggctcgcgcccatgcccggcagagaatcagccgggaaggggtcctctatgccggcagcgggaccaagaacggatccct

SEQ ID NO: 68448 - DNA, 201 bp, Homo sapiens
cacagaagagacgggtgtgcccctgctcttggtggacaccgccggctgcgggctgtttgagctggaggaggaggacgaacagtcgaaagggaaccctggcraagtccgcctcgtcagtttgcacatccaggctctggtggacgctggtgttccagcccgtgacattgctgtggtctcgccatacaacctccaggtggacct

SEQ ID NO: 68449 - DNA, 201 bp, Homo sapiens
cctgctcagacagagccttgtgcacaggcaccctgagcttgaaatcaagtctgtcgatggcttccaaggccgagagaaggaggccgtgatactgtccttcrtcagatccaacaggaaaggtgaagttggttttcttgctgaggaccggaggatcaacgtggctgtcacccgtgcccgacgccacgtggcggtcatctgtga

SEQ ID NO: 68450 - DNA, 201 bp, Homo sapiens
cccctgcgcagacagagcagcctcccagggagcagcgtggcccagaccagcctgatctgaggacgctgcacctggagagactgcagagggtcaggagcgcrcaggggcagcccgccagcaaggagcagcaggcctcagggcagcagaaacttccagaaaagaaaaagaaaaaagccaaaggacatccggccacagatctgc

SEQ ID NO: 68451 - DNA, 201 bp, Homo sapiens
atcgtgggcctgtacgatgctgctaatgagggcagtcagctggccactgggatcttgacccgggtcacccagaagtcggtcacggtggcctttgatgagtyccacgatttccagttgagcttggaccgagagaattcctacagactgttaaaacttgccaatgatgtcacttacaggcgactgaaaaaagccctgattgct

SEQ ID NO: 68452 - DNA, 201 bp, Homo sapiens
gagccgaggcgtgtgtttgctgaagctgcaggtatccagccagcgcactgggctgtacggacggctgctggtcacctttgagcccaggcgatacgggtccrcggcagctcttcccagtaacagctttacttctggtgatatcgtgggcctgtacgatgctgctaatgagggcagtcagctggccactgggatcttgacccg

SEQ ID NO: 68453 - DNA, 201 bp, Homo sapiens
cacggcctttgagtatcttgacgatattgtcccagaaaactattcccatgagaactcccagggttccagccacgctgccaccaagccccagggacctgctrcgtccaccaggaccggaagccagcggcaggagggaggccaggaggctgcagcacctgccagacagggccggaagaagccggctgggaagtctctggcctc

SEQ ID NO: 68454 - DNA, 201 bp, Homo sapiens
tcactgtgagcaagagggccccgcgaccccgagcagccctgggacccccagcagggaccggtggcccagcccctctccagccagtgccccctacccctgcrcagacagagcagcctcccagggagcagcgtggcccagaccagcctgatctgaggacgctgcacctggagagactgcagagggtcaggagcgcgcaggggc

SEQ ID NO: 68455 - DNA, 201 bp, Homo sapiens
gctgcagaggaggctggataagaagctgagtgagctcagcaaccagaggaccagccggaggaaggagagggggacgtgaccggccgcatccttgcacgccycgcggagctctctccatggtagcccagggcgctggcagaccatgctccgcctccaccagggccacagaggagcggaggggcctatgggggaggagcggag

SEQ ID NO: 68456 - DNA, 201 bp, Homo sapiens
ccacgctgccaccaagccccagggacctgctacgtccaccaggaccggaagccagcggcaggagggaggccaggaggctgcagcacctgccagacagggcyggaagaagccggctgggaagtctctggcctctgaagctccatctcagcccagcctcaacggaggcagcccagagggagtggagagccaagatggcgtgga

SEQ ID NO: 68457 - DNA, 201 bp, Homo sapiens
gcaagaagatgcagttggagtttcctccttccctcaattcccacgacaggctgcgggtccaccaaatagccgaggagcacgggctgaggcacgacagttcyggggaagggaagaggaggttcatcactgtgagcaagagggccccgcgaccccgagcagccctgggacccccagcagggaccggtggcccagcccctctcc

SEQ ID NO: 68458 - DNA, 201 bp, Homo sapiens
agaagcgggacgtcggcttctaggggcccaggccggcggcggcgatggcctcggcagctgtggagagcttcgtgaccaagcaactggacctgctggagctygagagagacgcggaggtggaggagcgcaggtcctggcaggagaacatctctctgaaagagctccagagccgaggcgtgtgtttgctgaagctgcaggtat

SEQ ID NO: 68459 - DNA, 201 bp, Homo sapiens
tgaggagtacggcgcgagggtggtgcggacactgacggtgcagtaccgcatgcaccaggctatcatgcgctgggcctcagacaccatgtaccttgggcagytcacagcccactcttccgtggcaaggcacctcctgagggacctcccaggtgtggctgccacagaagagacgggtgtgcccctgctcttggtggacaccgc

SEQ ID NO: 68460 - DNA, 201 bp, Homo sapiens
tgatctggcagactcattgcagcaggtggtaatgataaaatactaaactacattttatttttgtatcttaaaaatctatgcctaaaaagtatcattacatrtaggaaaacaataattttaacttttaaggttgaaaagacaatagcccaaagccaagaaagaaaaattatcttgaatgtagtattcaatgattttttatga

SEQ ID NO: 68461 - DNA, 201 bp, Homo sapiens
gattctgatctgcaaacttgttattgtgtttttgatgtattgatggttaataataaaaagctagggcatgagactctgagaaagaggtatgagattcttartagtatttttacaccaattccaggtagaatagaaatagtgcagaaaacacaagctcatactaagaatgaagtaattgatgcattgaatgaagcaatagat

SEQ ID NO: 68462 - DNA, 201 bp, Homo sapiens
gcatttaaaccaatgctagctgctattgcagatattgagcacattgagaaggatatgaaacatcagagtttctacatagaaaccaagctagatggtgaacrtatgcaaatgcacaaagatggagatgtatataaatacttctctcgaaatggatataactacactgatcagtttggtgcttctcctactgaaggttctctt

SEQ ID NO: 68463 - DNA, 201 bp, Homo sapiens
cagtgatatgtataaaactggctgcaccttgcgttttccacgaattgaaaagataagagatgacaaggagtggcatgagtgcatgaccctggacgacctaraacaacttagggggaaggcatctggtaagctcgcatctaaacacctttatataggtggtgatgatgaaccacaagaaaaaaagcggaaagctgccccaaa

SEQ ID NO: 68464 - DNA, 201 bp, Homo sapiens
tataaaactggctgcaccttgcgttttccacgaattgaaaagataagagatgacaaggagtggcatgagtgcatgaccctggacgacctagaacaacttakggggaaggcatctggtaagctcgcatctaaacacctttatataggtggtgatgatgaaccacaagaaaaaaagcggaaagctgccccaaagatgaagaaa

SEQ ID NO: 68465 - DNA, 201 bp, Homo sapiens
caagatctcattttacagctgggattctctggttcacagaggtaacggagcttgcccgaggccagttaaacgagaagattcatcaccgctttgatggctgyctcacaaacttcacaaactgttgcatctcacgttccttttgcagatttgtgttcaactttagaacgaatacagaaaagtaaaggacgtgcagaaaaaatc

SEQ ID NO: 68466 - DNA, 201 bp, Homo sapiens
taggtttcctagtgaggaaagcctctgatctggcagactcattgcagcaggtggtaatgataaaatactaaactacattttatttttgtatcttaaaaatstatgcctaaaaagtatcattacatataggaaaacaataattttaacttttaaggttgaaaagacaatagcccaaagccaagaaagaaaaattatcttgaa

SEQ ID NO: 68467 - DNA, 201 bp, Homo sapiens
cgtcaggaaaccatcaagatctcattttacagctgggattctctggttcacagaggtaacggagcttgcccgaggccagttaaacgagaagattcatcacygctttgatggctgcctcacaaacttcacaaactgttgcatctcacgttccttttgcagatttgtgttcaactttagaacgaatacagaaaagtaaaggac

SEQ ID NO: 68468 - DNA, 201 bp, Homo sapiens
acgtcaggaaaccatcaagatctcattttacagctgggattctctggttcacagaggtaacggagcttgcccgaggccagttaaacgagaagattcatcamcgctttgatggctgcctcacaaacttcacaaactgttgcatctcacgttccttttgcagatttgtgttcaactttagaacgaatacagaaaagtaaagga

SEQ ID NO: 68469 - DNA, 201 bp, Homo sapiens
caatagacaagtgtgaattacaagaagaaaaccagtatttgatttaaagctaggtttcctagtgaggaaagcctctgatctggcagactcattgcagcagrtggtaatgataaaatactaaactacattttatttttgtatcttaaaaatctatgcctaaaaagtatcattacatataggaaaacaataattttaactttt

SEQ ID NO: 68470 - DNA, 201 bp, Homo sapiens
agaaaaaaagcggaaagctgccccaaagatgaagaaagttattggaattattgagcacttaaaagcacctaaccttactaacgttaacaaaatttctaatrtatttgaagatgtagagttttgtgttatgagtggaacagatagccagccaaagcctgacctggagaacagaattgcagaatttggtggttatatagtaca

SEQ ID NO: 68471 - DNA, 201 bp, Homo sapiens
caagcagcattttatgtggaacagagaagccagaagtatacattgaaccttgtaattctgtcattgttcagattaaagcagcagagatcgtacccagtgayatgtataaaactggctgcaccttgcgttttccacgaattgaaaagataagagatgacaaggagtggcatgagtgcatgaccctggacgacctagaacaac

SEQ ID NO: 68472 - DNA, 201 bp, Homo sapiens
ggaattatggtaaaacaacctctatccatctacaagccagacaaaagaggtgaagggtggttaaaaattaaaccagagtatgtcagtggactaatggatgrattggacattttaattgttggaggatattggggtaaaggatcacggggtggaatgatgtctcattttctgtgtgcagtagcagagaagccccctcctggt

SEQ ID NO: 68473 - DNA, 201 bp, Homo sapiens
ctgggattctctggttcacagaggtaacggagcttgcccgaggccagttaaacgagaagattcatcaccgctttgatggctgcctcacaaacttcacaaaytgttgcatctcacgttccttttgcagatttgtgttcaactttagaacgaatacagaaaagtaaaggacgtgcagaaaaaatcagacacttcagggaattt

SEQ ID NO: 68474 - DNA, 201 bp, Homo sapiens
ccaagctagatggtgaacgtatgcaaatgcacaaagatggagatgtatataaatacttctctcgaaatggatataactacactgatcagtttggtgcttcycctactgaaggttctcttaccccattcattcataatgcattcaaagcagatatacaaatctgtattcttgatggtgagatgatggcctataatcctaata

SEQ ID NO: 68475 - DNA, 201 bp, Homo sapiens
gtgatatttctatcactttattttctgcatttaaaccaatgctagctgctattgcagatattgagcacattgagaaggatatgaaacatcagagtttctayatagaaaccaagctagatggtgaacgtatgcaaatgcacaaagatggagatgtatataaatacttctctcgaaatggatataactacactgatcagtttg

SEQ ID NO: 68476 - DNA, 201 bp, Homo sapiens
agaaaagtaaaggacgtgcagaaaaaatcagacacttcagggaatttttagattcttggagaaaatttcatgatgctcttcataagaaccacaaagatgtyacagactctttttatccagcaatgagactaattcttcctcagctagaaagagagagaatggcctatggaattaaagaaactatgcttgctaagctttata

SEQ ID NO: 68477 - DNA, 201 bp, Homo sapiens
acgttccttttgcagatttgtgttcaactttagaacgaatacagaaaagtaaaggacgtgcagaaaaaatcagacacttcagggaatttttagattcttgragaaaatttcatgatgctcttcataagaaccacaaagatgtcacagactctttttatccagcaatgagactaattcttcctcagctagaaagagagagaa

SEQ ID NO: 68478 - DNA, 201 bp, Homo sapiens
tccatctacaagccagacaaaagaggtgaagggtggttaaaaattaaaccagagtatgtcagtggactaatggatgaattggacattttaattgttggagratattggggtaaaggatcacggggtggaatgatgtctcattttctgtgtgcagtagcagagaagccccctcctggtgagaagccatctgtgtttcatact

SEQ ID NO: 68479 - DNA, 201 bp, Homo sapiens
agtatacattgaaccttgtaattctgtcattgttcagattaaagcagcagagatcgtacccagtgatatgtataaaactggctgcaccttgcgttttccaygaattgaaaagataagagatgacaaggagtggcatgagtgcatgaccctggacgacctagaacaacttagggggaaggcatctggtaagctcgcatctaa

SEQ ID NO: 68480 - DNA, 201 bp, Homo sapiens
aattaaaaattctaacgagcagactcctgaagaaatggcttctctgattgctgatttagaatatcggtattcctgggattgctctcctctcagtatgtttygacgccacaccgtttatttggactcgtatgctgttattaatgacctgagtaccaaaaatgaggggacaaggttagctattaaagccttggagcttcggtt

SEQ ID NO: 68481 - DNA, 201 bp, Homo sapiens
ttgggtctggctgcaccatgaaagaactgtatgatctgggtttgaaattggccaagtattggaagccttttcatagaaaagctccaccaagcagcattttwtgtggaacagagaagccagaagtatacattgaaccttgtaattctgtcattgttcagattaaagcagcagagatcgtacccagtgatatgtataaaactg

SEQ ID NO: 68482 - DNA, 201 bp, Homo sapiens
tgctgttattaatgacctgagtaccaaaaatgaggggacaaggttagctattaaagccttggagcttcggtttcatggagcaaaagtagtttcttgtttarctgagggagtgtctcatgtaataattggggaagatcatagtcgtgttgcagattttaaagcttttagaagaacttttaagagaaagtttaaaatcctaaa

SEQ ID NO: 68483 - DNA, 201 bp, Homo sapiens; identical to SEQ ID NO: 68460

SEQ ID NO: 68484 - DNA, 201 bp, Homo sapiens; identical to SEQ ID NO: 68461

SEQ ID NO: 68485 - DNA, 201 bp, Homo sapiens; identical to SEQ ID NO: 68462

SEQ ID NO: 68486 - DNA, 201 bp, Homo sapiens; identical to SEQ ID NO: 68463

SEQ ID NO: 68487 - DNA, 201 bp, Homo sapiens; identical to SEQ ID NO: 68464

SEQ ID NO: 68488 - DNA, 201 bp, Homo sapiens
ggcggaaccggcatcttctggcgccagcttccggcttagcggctgagcttcaggcttgacgtcagttaaacgagaagattcatcaccgctttgatggctgyctcacaaacttcacaaactgttgcatctcacgttccttttgcagatttgtgttcaactttagaacgaatacagaaaagtaaaggacgtgcagaaaaaatc

SEQ ID NO: 68489 - DNA, 201 bp, Homo sapiens; identical to SEQ ID NO: 68466

SEQ ID NO: 68490 - DNA, 200 bp, Homo sapiens
gcggcgagcagctggcggaaccggcatcttctggcgccagcttccggcttagcggctgagcttcaggcttgacgtcagttaaacgagaagattcatcacygctttgatggctgcctcacaaacttcacaaactgttgcatctcacgttccttttgcagatttgtgttcaactttagaacgaatacagaaaagtaaaggac

SEQ ID NO: 68491 - DNA, 199 bp, Homo sapiens
gcggcgagcagctggcggaaccggcatcttctggcgccagcttccggcttagcggctgagcttcaggcttgacgtcagttaaacgagaagattcatcamcgctttgatggctgcctcacaaacttcacaaactgttgcatctcacgttccttttgcagatttgtgttcaactttagaacgaatacagaaaagtaaagga

SEQ ID NO: 68492 - DNA, 201 bp, Homo sapiens; identical to SEQ ID NO: 68469

SEQ ID NO: 68493 - DNA, 201 bp, Homo sapiens; identical to SEQ ID NO: 68470

SEQ ID NO: 68494 - DNA, 201 bp, Homo sapiens; identical to SEQ ID NO: 68471

SEQ ID NO: 68495 - DNA, 201 bp, Homo sapiens; identical to SEQ ID NO: 68472

SEQ ID NO: 68496 - DNA, 201 bp, Homo sapiens
tggcgccagcttccggcttagcggctgagcttcaggcttgacgtcagttaaacgagaagattcatcaccgctttgatggctgcctcacaaacttcacaaaytgttgcatctcacgttccttttgcagatttgtgttcaactttagaacgaatacagaaaagtaaaggacgtgcagaaaaaatcagacacttcagggaattt

SEQ ID NO: 68497 - DNA, 201 bp, Homo sapiens; identical to SEQ ID NO: 68474

SEQ ID NO: 68498 - DNA, 201 bp, Homo sapiens; identical to SEQ ID NO: 68475

SEQ ID NO: 68499 - DNA, 201 bp, Homo sapiens; identical to SEQ ID NO: 68476

SEQ ID NO: 68500 - DNA, 201 bp, Homo sapiens; identical to SEQ ID NO: 68477

SEQ ID NO: 68501 - DNA, 201 bp, Homo sapiens; identical to SEQ ID NO: 68478

SEQ ID NO: 68502 - DNA, 201 bp, Homo sapiens; identical to SEQ ID NO: 68479

SEQ ID NO: 68503 - DNA, 201 bp, Homo sapiens; identical to SEQ ID NO: 68480

SEQ ID NO: 68504 - DNA, 201 bp, Homo sapiens; identical to SEQ ID NO: 68481

SEQ ID NO: 68505 - DNA, 201 bp, Homo sapiens; identical to SEQ ID NO: 68482

SEQ ID NO: 68506 - DNA, 201 bp, Homo sapiens; identical to SEQ ID NO: 68460

SEQ ID NO: 68507 - DNA, 201 bp, Homo sapiens; identical to SEQ ID NO: 68461

SEQ ID NO: 68508 - DNA, 201 bp, Homo sapiens; identical to SEQ ID NO: 68462

SEQ ID NO: 68509 - DNA, 201 bp, Homo sapiens; identical to SEQ ID NO: 68463

SEQ ID NO: 68510 - DNA, 201 bp, Homo sapiens; identical to SEQ ID NO: 68464

SEQ ID NO: 68511 - DNA, 201 bp, Homo sapiens; identical to SEQ ID NO: 68465

SEQ ID NO: 68512 - DNA, 201 bp, Homo sapiens; identical to SEQ ID NO: 68466

SEQ ID NO: 68513 - DNA, 201 bp, Homo sapiens
ccgcaggaaaccatcaagatctcattttacagctgggattctctggttcacagaggtaacggagcttgcccgaggccagttaaacgagaagattcatcacygctttgatggctgcctcacaaacttcacaaactgttgcatctcacgttccttttgcagatttgtgttcaactttagaacgaatacagaaaagtaaaggac

SEQ ID NO: 68514 - DNA, 201 bp, Homo sapiens
cccgcaggaaaccatcaagatctcattttacagctgggattctctggttcacagaggtaacggagcttgcccgaggccagttaaacgagaagattcatcamcgctttgatggctgcctcacaaacttcacaaactgttgcatctcacgttccttttgcagatttgtgttcaactttagaacgaatacagaaaagtaaagga

SEQ ID NO: 68515 - DNA, 201 bp, Homo sapiens; identical to SEQ ID NO: 68469

SEQ ID NO: 68516 - DNA, 178 bp, Homo sapiens
ccacagcgctgtagactgcgccgcattagaagcctggcctcctgatgctgtgctcttcatctagacccaagccccagrtcgtgggacgatttctcccgtttttgactccctggaactgtattgcctgctttacctgcgtacatgttgattctttctcatggcaaccccgcaggaaacc

SEQ ID NO: 68517 - DNA, 101 bp, Homo sapiens
ycacagcgctgtagactgcgccgcattagaagcctggcctcctgatgctgtgctcttcatctagacccaagccccaggtcgtgggacgatttctcccgttt

SEQ ID NO: 68518 - DNA, 201 bp, Homo sapiens; identical to SEQ ID NO: 68470

SEQ ID NO: 68519 - DNA, 201 bp, Homo sapiens; identical to SEQ ID NO: 68471

SEQ ID NO: 68520 - DNA, 201 bp, Homo sapiens; identical to SEQ ID NO: 68472

SEQ ID NO: 68521 - DNA, 201 bp, Homo sapiens; identical to SEQ ID NO: 68473

SEQ ID NO: 68522 - DNA, 201 bp, Homo sapiens; identical to SEQ ID NO: 68474

SEQ ID NO: 68523 - DNA, 201 bp, Homo sapiens; identical to SEQ ID NO: 68475

SEQ ID NO: 68524 - DNA, 201 bp, Homo sapiens; identical to SEQ ID NO: 68476

SEQ ID NO: 68525 - DNA, 201 bp, Homo sapiens; identical to SEQ ID NO: 68477

SEQ ID NO: 68526 - DNA, 201 bp, Homo sapiens; identical to SEQ ID NO: 68478

SEQ ID NO: 68527 - DNA, 201 bp, Homo sapiens; identical to SEQ ID NO: 68479

SEQ ID NO: 68528 - DNA, 201 bp, Homo sapiens; identical to SEQ ID NO: 68480

SEQ ID NO: 68529 - DNA, 201 bp, Homo sapiens; identical to SEQ ID NO: 68481

SEQ ID NO: 68530 - DNA, 201 bp, Homo sapiens; identical to SEQ ID NO: 68482

SEQ ID NO: 68531 - DNA, 147 bp, Homo sapiens
cccgaggccaggagtcccagactcacgcaccctgggccacagggagccgggaatcggggcctgctgctcctgctggcctggaagactctgtggggtcagcmctgtactccgttgctgtttttttataaacacactcttggaagtggc

SEQ ID NO: 68532 - DNA, 201 bp, Homo sapiens
ggacatgatgggcctcatggaggtccttccggagcgctgcgtgcagatcgccaagcgggagctgctcttcctggggcccgtgggcctcatcatgtacctcrggggcgtcttcttcatcaaccggcagcgctctagcactgccatgacagtgatggccgacctgggcgagcgcatggtcagggagaacgtgcccatcgtccc

SEQ ID NO: 68533 - DNA, 201 bp, Homo sapiens
gagaacgtgcccatcgtccccgtggtgtactcttccttctcctccttctacaacaccaagaagaagttcttcacttcaggaacagtcacagtgcaggtgcyggaagccatccccaccagcggcctcactgcggcggacgtccctgcgctcgtggacacctgccaccgggccatgaggaccaccttcctccacatctccaag

SEQ ID NO: 68534 - DNA, 201 bp, Homo sapiens
tccttctcctccttctacaacaccaagaagaagttcttcacttcaggaacagtcacagtgcaggtgctggaagccatccccaccagcggcctcactgcggyggacgtccctgcgctcgtggacacctgccaccgggccatgaggaccaccttcctccacatctccaagaccccccaggagaacggggccactgcggggtct

SEQ ID NO: 68535 - DNA, 201 bp, Homo sapiens
gatgggcagaggggactcctcccggcttccaaataccactctgtccggctcccccagctctcactcagcccgggaagcaggaagccccttctgtcactggyctcagacacaggcccctggtgtcccctgcagggggctcagctggaccctccccgggctcgagggcagggactcgcgcccacggcacctctgggagctggg

SEQ ID NO: 68536 - DNA, 193 bp, Homo sapiens
ggctgagccacaaggcccccgatggcccaggagcagatgggaggaccccgaggccaggagtcccagactcacgcaccctgggccacagggagccgggaatyggggcctgctgctcctgctggcctggaagactctgtggggtcagcactgtactccgttgctgtttttttataaacacactcttggaagtggc

SEQ ID NO: 68537 - DNA, 147 bp, Homo sapiens; identical to SEQ ID NO: 68531

SEQ ID NO: 68538 - DNA, 201 bp, Homo sapiens
ggacatgatgggcctcatggaggtccttccggagcgctgcgtgcagatcgccaagcgggagctgctcttcctggggcccgtgggcctcatcatgtacctcrggggcgtcttcttcatcaaccggcagcgctctagcactgccatgacagtgatggccgacctgggcgagcgcatggtcagggagaacctcaaagtgtggat

SEQ ID NO: 68539 - DNA, 201 bp, Homo sapiens
gcacaggtgcccatcgtccccgtggtgtactcttccttctcctccttctacaacaccaagaagaagttcttcacttcaggaacagtcacagtgcaggtgcyggaagccatccccaccagcggcctcactgcggcggacgtccctgcgctcgtggacacctgccaccgggccatgaggaccaccttcctccacatctccaag

SEQ ID NO: 68540 - DNA, 201 bp, Homo sapiens; identical to SEQ ID NO: 68534

SEQ ID NO: 68541 - DNA, 201 bp, Homo sapiens; identical to SEQ ID NO: 68535

SEQ ID NO: 68542 - DNA, 193 bp, Homo sapiens; identical to SEQ ID NO: 68536

SEQ ID NO: 68543 - DNA, 151 bp, Homo sapiens
tggagggccaggagtcccagactcacgcaccctgggccacagggagccgggaatcggggcctgctgctcctgctggcctggaagactctgtggggtcagcmctgtactccgttgctgtttttttataaacacactcttggaagtggctggg

SEQ ID NO: 68544 - DNA, 201 bp, Homo sapiens; identical to SEQ ID NO: 68538

SEQ ID NO: 68545 - DNA, 201 bp, Homo sapiens; identical to SEQ ID NO: 68539

SEQ ID NO: 68546 - DNA, 201 bp, Homo sapiens; identical to SEQ ID NO: 68534

SEQ ID NO: 68547 - DNA, 201 bp, Homo sapiens
cccgaggccagacgcacactgtccgagccctctgctcagccgcctgggacccaccagggtgcagctgggctccagggtccagcccacaagctgcatcaggstctctgggagaggaggggcctggagggccaggagtcccagactcacgcaccctgggccacagggagccgggaatcggggcctgctgctcctgctggcctg

SEQ ID NO: 68548 - DNA, 201 bp, Homo sapiens; identical to SEQ ID NO: 68535

SEQ ID NO: 68549 - DNA, 197 bp, Homo sapiens
ggtccagcccacaagctgcatcaggctctctgggagaggaggggcctggagggccaggagtcccagactcacgcaccctgggccacagggagccgggaatyggggcctgctgctcctgctggcctggaagactctgtggggtcagcactgtactccgttgctgtttttttataaacacactcttggaagtggctggg

SEQ ID NO: 68550 - DNA, 201 bp, Homo sapiens
cttctggacttaagtaaagaagaaaagaaccactttgtccgggccctggatatggcaaagcgcacaactcaccctttatttgtcattgccaccaggagatsagaagaaatactggggccagatggcaacacgccacaatttgagaacatttccatttataactactttgtttggacacactattactcagtcaaaaagact

SEQ ID NO: 68551 - DNA, 201 bp, Homo sapiens
ctctttttgatcttgtgctatgaaacaatcttccaaagaactgtataaggtggtcataagtgaatattttaattaaaattggtaaaaataaataataataacagtaataatcatgcactatagaaaatggctaaactgagattctaaattctacaaacagaaacaagtttaagttatgtatccctgattggttactgggtt

SEQ ID NO: 68552 - DNA, 201 bp, Homo sapiens
tctctttttgatcttgtgctatgaaacaatcttccaaagaactgtataaggtggtcataagtgaatattttaattaaaattggtaaaaataaataataataacagtaataatcatgcactatagaaaatggctaaactgagattctaaattctacaaacagaaacaagtttaagttatgtatccctgattggttactgggt

SEQ ID NO: 68553 - DNA, 201 bp, Homo sapiens
cgccacaatttgagaacatttccatttataactactttgtttggacacactattactcagtcaaaaagactttccttggggtaggacaggaaagctttggwgaagtggatttctctcatgagggaccagcttttctcacatggcacaggtaccacctcctgcgtctggagaaagacatgcaggaaatgttgcaagagcctt

SEQ ID NO: 68554 - DNA, 201 bp, Homo sapiens
aatggccaagtcgggagtttagtgtacctgagataattgccatagcagtagttggcgctttgttactggttgcactcatttttgggactgcttcttatctrattcgtgccagacgcagtatggatgaagctaaccagcctctcctcactgatcagtatcaatgctatgctgaagaatatgaaaaactccagaatcctaatc

SEQ ID NO: 68555 - DNA, 201 bp, Homo sapiens
ttctctttttgatcttgtgctatgaaacaatcttccaaagaactgtataaggtggtcataagtgaatattttaattaaaattggtaaaaataaataataataacagtaataatcatgcactatagaaaatggctaaactgagattctaaattctacaaacagaaacaagtttaagttatgtatccctgattggttactggg

SEQ ID NO: 68556 - DNA, 201 bp, Homo sapiens
tctataaatagtattccaatcactgtgcttaatttaaatagcattctcttatcatttatcagccttttatgtattttccaagtaaaatattaacatattayttcattggtcttcttttttatctggttctatatgaatgctattttttcccttctcttctaacatgaaatatattttctctttttgatcttgtgctatgaa

SEQ ID NO: 68557 - DNA, 201 bp, Homo sapiens
aagtggatttctctcatgagggaccagcttttctcacatggcacaggtaccacctcctgcgtctggagaaagacatgcaggaaatgttgcaagagccttcyttctcccttccttactggaattttgcaacggggaaaaatgtctgtgatatctgcacggatgacttgatgggatccagaagcaactttgattccactctaa

SEQ ID NO: 68558 - DNA, 201 bp, Homo sapiens
ttggaagattatgataccctgggaacactttgtaacagcaccgaggatgggccaattaggagaaatccagctggaaatgtggccagaccaatggtgcaacrtcttcctgaaccacaggatgtcgctcagtgcttggaagttggtttatttgacacgcctcctttttattccaactctacaaacagtttccgaaacacagtg

SEQ ID NO: 68559 - DNA, 201 bp, Homo sapiens
tctaacatcttagaggtccatggagaaggcatatggagaacatgttttatactgctctataaatagtattccaatcactgtgcttaatttaaatagcattmtcttatcatttatcagccttttatgtattttccaagtaaaatattaacatattacttcattggtcttcttttttatctggttctatatgaatgctatttt

SEQ ID NO: 68560 - DNA, 201 bp, Homo sapiens
actaccatgctttgtttacgtgtaaaggaaaataatgtttgatagtaaatgtccacttaaaatacatgaatgggcatttctaaaatgttaaaacataaacwcatttccattcatggatatttgtcaacagatttaaagaaaaccacagttattaattaaagaaaattatgtgtagttataaaccaatgaaattttgattaa

SEQ ID NO: 68561 - DNA, 201 bp, Homo sapiens
tctacaaacagaaacaagtttaagttatgtatccctgattggttactgggttttcctatattcaaaaatattaaggctatatatacacaagataaacaaayaaaatatatcaaagagcatgcatataacaataggatgttttacactagcattattcaatttattctcttggaatacattgcgatttgttaaaatacagta

SEQ ID NO: 68562 - DNA, 201 bp, Homo sapiens
agaccgctgtggctcatcatcagggaggggcagatgtgaggcagtgactgcagactcccggccccacagccctcagtatccccatgatggcagagatgatmgggaggtctggcccttgcgcttcttcaataggacatgtcactgcaacggcaatttctcaggacacaactgtgggacgtgccgtcctggctggagaggagc

SEQ ID NO: 68563 - DNA, 201 bp, Homo sapiens
attagtatcacaaaaccacctggttgaatataatagattgagttattaactgtattttctttcactttattaccttctttctaatacaagcatatgttagmattaaagttctaggcatacttttcaaagctgggaagaccctttcagaatcttttcaatgggttttaattttcagttctatttaaaatggtgaatgacact

SEQ ID NO: 68564 - DNA, 201 bp, Homo sapiens
ggtggaaaaaaagaccagccccccgcctagtttgggtgagcagatttgggattaattatcaggcagcaatccacatgcacttaacagttctgacgtgagakgacaagaaacacaagcaaatataaaacattcaattctaagagaagttcatcagagacatccttcaggattgtgagctggattttcctctacgtgcttcag

SEQ ID NO: 68565 - DNA, 201 bp, Homo sapiens; identical to SEQ ID NO: 68550

SEQ ID NO: 68566 - DNA, 201 bp, Homo sapiens; identical to SEQ ID NO: 68551

SEQ ID NO: 68567 - DNA, 201 bp, Homo sapiens; identical to SEQ ID NO: 68552

SEQ ID NO: 68568 - DNA, 201 bp, Homo sapiens; identical to SEQ ID NO: 68553

SEQ ID NO: 68569 - DNA, 201 bp, Homo sapiens; identical to SEQ ID NO: 68554

SEQ ID NO: 68570 - DNA, 201 bp, Homo sapiens; identical to SEQ ID NO: 68555

SEQ ID NO: 68571 - DNA, 201 bp, Homo sapiens; identical to SEQ ID NO: 68556

SEQ ID NO: 68572 - DNA, 201 bp, Homo sapiens; identical to SEQ ID NO: 68557

SEQ ID NO: 68573 - DNA, 201 bp, Homo sapiens; identical to SEQ ID NO: 68558

SEQ ID NO: 68574 - DNA, 201 bp, Homo sapiens; identical to SEQ ID NO: 68559

SEQ ID NO: 68575 - DNA, 201 bp, Homo sapiens; identical to SEQ ID NO: 68560

SEQ ID NO: 68576 - DNA, 201 bp, Homo sapiens; identical to SEQ ID NO: 68561

SEQ ID NO: 68577 - DNA, 201 bp, Homo sapiens; identical to SEQ ID NO: 68562

SEQ ID NO: 68578 - DNA, 201 bp, Homo sapiens; identical to SEQ ID NO: 68563

SEQ ID NO: 68579 - DNA, 201 bp, Homo sapiens; identical to SEQ ID NO: 68564

SEQ ID NO: 68580 - DNA, 201 bp, Homo sapiens
cttctggacttaagtaaagaagaaaagaaccactttgtccgggccctggatatggcaaagcgcacaactcaccctttatttgtcattgccaccaggagatsagaagaaatactggggccagatggcaacacgccacaatttgagaacatttccatttataactactttgtttggacacactatggacataatagacaatac

SEQ ID NO: 68581 - DNA, 201 bp, Homo sapiens; identical to SEQ ID NO: 68551

SEQ ID NO: 68582 - DNA, 201 bp, Homo sapiens; identical to SEQ ID NO: 68552

SEQ ID NO: 68583 - DNA, 201 bp, Homo sapiens; identical to SEQ ID NO: 68554

SEQ ID NO: 68584 - DNA, 201 bp, Homo sapiens; identical to SEQ ID NO: 68555

SEQ ID NO: 68585 - DNA, 201 bp, Homo sapiens; identical to SEQ ID NO: 68556

SEQ ID NO: 68586 - DNA, 201 bp, Homo sapiens; identical to SEQ ID NO: 68560

SEQ ID NO: 68587 - DNA, 201 bp, Homo sapiens; identical to SEQ ID NO: 68559

SEQ ID NO: 68588 - DNA, 201 bp, Homo sapiens; identical to SEQ ID NO: 68561

SEQ ID NO: 68589 - DNA, 201 bp, Homo sapiens; identical to SEQ ID NO: 68562

SEQ ID NO: 68590 - DNA, 201 bp, Homo sapiens; identical to SEQ ID NO: 68563

SEQ ID NO: 68591 - DNA, 201 bp, Homo sapiens; identical to SEQ ID NO: 68564

SEQ ID NO: 68592 - DNA, 201 bp, Homo sapiens; identical to SEQ ID NO: 68550

SEQ ID NO: 68593 - DNA, 201 bp, Homo sapiens; identical to SEQ ID NO: 68551

SEQ ID NO: 68594 - DNA, 201 bp, Homo sapiens; identical to SEQ ID NO: 68552

SEQ ID NO: 68595 - DNA, 201 bp, Homo sapiens; identical to SEQ ID NO: 68553

SEQ ID NO: 68596 - DNA, 201 bp, Homo sapiens
acaatgctggtcgggagtttagtgtacctgagataattgccatagcagtagttggcgctttgttactggttgcactcatttttgggactgcttcttatctrattcgtgccagacgcagtatggatgaagctaaccagcctctcctcactgatcagtatcaatgctatgctgaagaatatgaaaaactccagaatcctaatc

SEQ ID NO: 68597 - DNA, 201 bp, Homo sapiens; identical to SEQ ID NO: 68555

SEQ ID NO: 68598 - DNA, 201 bp, Homo sapiens; identical to SEQ ID NO: 68556

SEQ ID NO: 68599 - DNA, 201 bp, Homo sapiens; identical to SEQ ID NO: 68557

SEQ ID NO: 68600 - DNA, 201 bp, Homo sapiens; identical to SEQ ID NO: 68558

SEQ ID NO: 68601 - DNA, 201 bp, Homo sapiens; identical to SEQ ID NO: 68559

SEQ ID NO: 68602 - DNA, 201 bp, Homo sapiens; identical to SEQ ID NO: 68560

SEQ ID NO: 68603 - DNA, 201 bp, Homo sapiens; identical to SEQ ID NO: 68561

SEQ ID NO: 68604 - DNA, 201 bp, Homo sapiens; identical to SEQ ID NO: 68562

SEQ ID NO: 68605 - DNA, 201 bp, Homo sapiens; identical to SEQ ID NO: 68563

SEQ ID NO: 68606 - DNA, 201 bp, Homo sapiens; identical to SEQ ID NO: 68564

SEQ ID NO: 68607 - DNA, 201 bp, Homo sapiens
agcagctgaacgcgccctacagctgccaggcggaggggccgtgcctcacgcgggaggtggcgcagctccgggccgagaactgcgacctgcgccaccgcctrtgcagcctgcggctgtgcctcgccgaggagcggagccgccaggccacgctggagagcgcggagctagaggcggcgcaggaggccggcgcacagcctcctc

SEQ ID NO: 68608 - DNA, 201 bp, Homo sapiens
tggactttggagaaccgtggaaaatgaacccaggagatggagcattttatggccctaaaattgacataaaaatcaaggatgctattggcagataccatcartgtgctacaattcagctggacttccaactgcctattagatttaatctcacatatgttagtaaggatggggatgataagaagagacctgtgatcattcatc

SEQ ID NO: 68609 - DNA, 201 bp, Homo sapiens
gagggaggccgcgatggcggccgaggccctggcggcggaggccgtggcgtcgcgcctggagcggcaggaggaggacatccgctggctgtggtcggaggtcsagcgcctgagggacgagcagctgaacgcgccctacagctgccaggcggaggggccgtgcctcacgcgggaggtggcgcagctccgggccgagaactgcga

SEQ ID NO: 68610 - DNA, 201 bp, Homo sapiens
cctggcggcggaggccgtggcgtcgcgcctggagcggcaggaggaggacatccgctggctgtggtcggaggtcgagcgcctgagggacgagcagctgaackcgccctacagctgccaggcggaggggccgtgcctcacgcgggaggtggcgcagctccgggccgagaactgcgacctgcgccaccgcctgtgcagcctgcg

SEQ ID NO: 68611 - DNA, 201 bp, Homo sapiens
tccacgatcttggagggaaatgcctattagatttgctgattttggagttctgcatagaaatgaactgtcggggactctcagtggcttgaccagagtgaggygcttccagcaggacgatgctcacattttttgcacagtggagcagattgaagaagaaataaaggggtgtttgcagtttttgcaatctgtttactcaacatt

SEQ ID NO: 68612 - DNA, 201 bp, Homo sapiens
ggaggccatggagctttactatggaggccacctgtgctacggtccgcccattgaaaatggattttattatgacatgttcattgaagacagagcagtgtccrgcacagaattgtcagccctggagaatatatgtaaagccatcataaaagaaaagcaaccttttgaaagactagaagtcagcaaggaaatcctcctggaaat

SEQ ID NO: 68613 - DNA, 201 bp, Homo sapiens
ttacatttgataatgaggaagctcaagctgtgtactggcactccagtgctcacattcttggggaggccatggagctttactatggaggccacctgtgctayggtccgcccattgaaaatggattttattatgacatgttcattgaagacagagcagtgtccagcacagaattgtcagccctggagaatatatgtaaagcca

SEQ ID NO: 68614 - DNA, 201 bp, Homo sapiens
ttttatgacttctactaaaattcacactgaaactttatcttctaaactggaatcattacttaattttaactaaccaacaaccacaaaagcagcagctactrctaaatattggattactgacaaaggaattcagttttgtggaatctggtgtttgcactataggttaagagttgccatttaaatgtttcttattcataatta

SEQ ID NO: 68615 - DNA, 201 bp, Homo sapiens
ctaggaaatgattatgaaatgttagtgattttcaaaagatgggcttcaaataaaagtctgcagagttttttttaaataggagggaaaatcttattttctartatgtctcaggtatttttatgacttctactaaaattcacactgaaactttatcttctaaactggaatcattacttaattttaactaaccaacaaccacaa

SEQ ID NO: 68616 - DNA, 201 bp, Homo sapiens
gtctaatgtttgcccatcgtccacgatcttggagggaaatgcctattagatttgctgattttggagttctgcatagaaatgaactgtcggggactctcagyggcttgaccagagtgaggcgcttccagcaggacgatgctcacattttttgcacagtggagcagattgaagaagaaataaaggggtgtttgcagtttttgc

SEQ ID NO: 68617 - DNA, 201 bp, Homo sapiens
gcagccagctcctctggttccgccgcctctacattatcttctcccggtacatgagaatcaactcactgagcttcctctgaagccttgaagggttttcaggkccaaggaacaaaggggaaaatagacaaaggagtgcagaggacctggcctggcactggcttatttacctgagctcaaggagatccccgctggagcagcctc

SEQ ID NO: 68618 - DNA, 201 bp, Homo sapiens
ctgagcttcctctgaagccttgaagggttttcaggtccaaggaacaaaggggaaaatagacaaaggagtgcagaggacctggcctggcactggcttatttrcctgagctcaaggagatccccgctggagcagcctctgcaaaagggagcccatgtaggccaggggctgtccaaactccagcttcttcccctgggaaaaaac

SEQ ID NO: 68619 - DNA, 201 bp, Homo sapiens
cgcagccagctcctctggttccgccgcctctacattatcttctcccggtacatgagaatcaactcactgagcttcctctgaagccttgaagggttttcagrtccaaggaacaaaggggaaaatagacaaaggagtgcagaggacctggcctggcactggcttatttacctgagctcaaggagatccccgctggagcagcct

SEQ ID NO: 68620 - DNA, 201 bp, Homo sapiens
acctcttcagggctaccgtctaaaatttggccgcaaggatatggagccacttactactcttgagttctctgaaaaagaagatcactttacagctacagacrtccacaagggagcatcatacgtcttcaggctctcagccagaaacaaagtgggctttggggaggagatggtgaaggagatttccattccagaagaagtacc

SEQ ID NO: 68621 - DNA, 201 bp, Homo sapiens
ggtgaaggagatttccattccagaagaagtaccaactggattccctcaaaaccttcactcagaaggcaccacttcaacctccgtccagttatcttggcaascacctgtcctggcagagagaaatggcattatcaccaagtatacccttctttatagggatatcaacatcccccttctcccgatggagcagcttattgttcc

SEQ ID NO: 68622 - DNA, 201 bp, Homo sapiens
ggtcctgtccttgcagtggtctttatcatctgcattgtcattgctattcttctttataaaaggaagagggcagagtccgactctagaaaaagcagcatacygaacaataaggagatcccttcacaccacccaacagaccctgtagaactgaggcgccttaactttcaaacaccgggtatggctagccatcctccaataccc

SEQ ID NO: 68623 - DNA, 201 bp, Homo sapiens
ccacttcaacctccgtccagttatcttggcaaccacctgtcctggcagagagaaatggcattatcaccaagtatacccttctttatagggatatcaacatyccccttctcccgatggagcagcttattgttccagctgacaccactatgacactcactggcttaaaaccagataccacatacgatgtaaaagtacgtgctc

SEQ ID NO: 68624 - DNA, 201 bp, Homo sapiens
acacatttggacctcttcagggctaccgtctaaaatttggccgcaaggatatggagccacttactactcttgagttctctgaaaaagaagatcactttacmgctacagacatccacaagggagcatcatacgtcttcaggctctcagccagaaacaaagtgggctttggggaggagatggtgaaggagatttccattccag

SEQ ID NO: 68625 - DNA, 201 bp, Homo sapiens
agagcaagcaccatccagtgccccgagggatgtccaggcacgaatgttgagttcgaccaccattttggtacagtggaaggaacctgaagagccaaatggasagatccaaggatatagagtttattatacaatggatcccactcaacatgtcaacaactggatgaaacacaatgtagctgacagccaaatcactactattgg

SEQ ID NO: 68626 - DNA, 201 bp, Homo sapiens
cagcaagcccaaactggtgtccaccactggggcagttccagggaaacctcggcttgtgattaaccacactcagatgaatactgctcttattcagtggcacyctccggtggacacatttggacctcttcagggctaccgtctaaaatttggccgcaaggatatggagccacttactactcttgagttctctgaaaaagaaga

SEQ ID NO: 68627 - DNA, 201 bp, Homo sapiens
acacaaaacaaattaaaaacaaattattccaggtggaccaagaattcacactttgacatcgccccttcccaccatactgctcataataacattttaggggsaaaggggagggaatgtttaaaaagaaagtccttgatttagttttttagtattgtaaagatactgctgacctgtgcttcatttctaactgtgtaaactttt

SEQ ID NO: 68628 - DNA, 201 bp, Homo sapiens
cacaaaacaaattaaaaacaaattattccaggtggaccaagaattcacactttgacatcgccccttcccaccatactgctcataataacattttagggggmaaggggagggaatgtttaaaaagaaagtccttgatttagttttttagtattgtaaagatactgctgacctgtgcttcatttctaactgtgtaaacttttt

SEQ ID NO: 68629 - DNA, 201 bp, Homo sapiens
tcatttctaactgtgtaaacttttttttaacaaaatgtatcattcgataaagtgaattttaaaaaagttacataactcttcatttttttatttccaaatcrtaggtttttttaagctgtagaactgttatctgtaatatcttgctgtagaaatatcaaatcatttgaaaatttgcacatttttgtgcaaaactcaatctac

SEQ ID NO: 68630 - DNA, 201 bp, Homo sapiens
tggtaagttggcaacctccaccagtggaaaaacagaatggcattatcactgaatactccatcaagtacactgcagtggatggggaagatgacaagcctcaygagattttgggaattccttcggacactaccaaataccttttggaacagctggaaaaatggactgaataccggatcactgtgacagcccatacagatgtcg

SEQ ID NO: 68631 - DNA, 201 bp, Homo sapiens
  misc_feature (1)...(201): n = A,T,C or G
caacatcccccttctcccgatggagcagcttattgttccagctgacaccactatgacactcactggcttaaaaccagataccacatacgatgtaaaagtangtgctcatacgagcaaagggcccgggccatatagtcccagtgtccagttcaggacactgcctgtggatcaagtgtttgcaaaaaattttcatgtcaaagc

SEQ ID NO: 68632 - DNA, 201 bp, Homo sapiens
atgatgacaaaactagaagaaagatcaagggtgaagtgtgaccagtattggcctagcagaggcacagaaacccacggactcgttcaagtaacgctgcttgwtactgtggagctggccacatattgtgttcgaacatttgcactttacaagaatggttcaagtgagaagagagaagtgagacaattccagttcaccgcctgg

SEQ ID NO: 68633 - DNA, 201 bp, Homo sapiens
gatacgcgaatgtaatcgcatatgatcattcccgggttctcctatcagctatagaagggatcccaggaagtgactatgtgaatgccaactacatagatggstataggaagcaaaatgcctatattgcaacacagggatctctccccgaaacatttggggacttttggagaatgatatgggaacaacggagtgccacagttg

SEQ ID NO: 68634 - DNA, 201 bp, Homo sapiens
attacacctgtgttgctatgtcaacactgggtgtcattgaagcaatagcacagatcactgtcaaagccttacccaaacctccaggaactcctgtagtgacygagagcacagctacaagcatcacactgacgtgggactctgggaaccctgagcctgtttcttattacataattcagcataaacctaaaaactctgaggaac

SEQ ID NO: 68635 - DNA, 201 bp, Homo sapiens
attctcttcaaataatcaaagataattattattttgttttgtttttggaatcaacagggaggcgcaaagtataaagttgctgctaacatatatacatatayatccatattttataagggtgtctatgtatatatagacagtgtgtccacacaaaaaatagatacagttatcagtcagtcagttcttccatgatttagtttt

SEQ ID NO: 68636 - DNA, 201 bp, Homo sapiens
cagatgaaatggaattagatgagctgcttaaggagatatctaggaagcgcagaagcatccgttatgggagagaagttgaattaaagccatatattgccgcycactttgatgtccttcccactgagttcaccctgggggatgacaagcattatggtggatttacaaacaagcaactccaaagtggtcaagaatatgtcttct

SEQ ID NO: 68637 - DNA, 201 bp, Homo sapiens
ggtacagacagaggatcaatatcagttttcctatcgtgccgcactagagtacctgggcagctttgaccactatgcaacgtagaaacccctgacccattctsgatttttactacaggcccttcaatatccatggagtctcttctgagccatacagggcacttgagaagtccttcttaacttctagctaacaactacttagtg

SEQ ID NO: 68638 - DNA, 201 bp, Homo sapiens
tggccgagccacacagaagttaattgtcaacctgaagcctgagaaatcatattcatttgtgctgacaaatcgtggaaacagtgctggtgggctgcagcacmgggtcacggcaaagactgcaccagatgtattacgtaccaagcctgccttcattgggaagaccaacttggatggcatgattactgtgcaactgcctgaagt

SEQ ID NO: 68639 - DNA, 201 bp, Homo sapiens
tgcacaggacatgatcatttctgggctccagcctgaaacttcctactccctcaccgtcacagcctacacaaccaaaggagatggtgctcgcagcaagcccraactggtgtccaccactggggcagttccagggaaacctcggcttgtgattaaccacactcagatgaatactgctcttattcagtggcaccctccggtgga

SEQ ID NO: 68640 - DNA, 201 bp, Homo sapiens
attcatttgtgctgacaaatcgtggaaacagtgctggtgggctgcagcacagggtcacggcaaagactgcaccagatgtattacgtaccaagcctgccttyattgggaagaccaacttggatggcatgattactgtgcaactgcctgaagtacctgcaaatgagaatataaaaggttactacataataattgtgcctttga

SEQ ID NO: 68641 - DNA, 201 bp, Homo sapiens
taagtccctactcggattatgaattcagggttgttgctgtcaataacattgggcgggggcctcccagcgaacctgtgctaacacaaacctcagagcaagcrccatccagtgccccgagggatgtccaggcacgaatgttgagttcgaccaccattttggtacagtggaaggaacctgaagagccaaatggacagatccaag

SEQ ID NO: 68642 - DNA, 201 bp, Homo sapiens
cacccgtgggatctaaagaacaagctctgaaagtgttccagctgaaatttcagatcggacagactcgctgcggctccggaggcagtgattccaagctgctygcgcacgctgctgccaagctgcaggatggtgcacgtagccaggctgctgctgctgctcctcactttcttcctccgcacggatgctgagacacctccaagg

SEQ ID NO: 68643 - DNA, 201 bp, Homo sapiens
atgtcatgctggctgatgcacaggacatgatcatttctgggctccagcctgaaacttcctactccctcaccgtcacagcctacacaaccaaaggagatggwgctcgcagcaagcccaaactggtgtccaccactggggcagttccagggaaacctcggcttgtgattaaccacactcagatgaatactgctcttattcagt

SEQ ID NO: 68644 - DNA, 201 bp, Homo sapiens; identical to SEQ ID NO: 68622

SEQ ID NO: 68645 - DNA, 201 bp, Homo sapiens; identical to SEQ ID NO: 68625

SEQ ID NO: 68646 - DNA, 201 bp, Homo sapiens; identical to SEQ ID NO: 68628

SEQ ID NO: 68647 - DNA, 201 bp, Homo sapiens; identical to SEQ ID NO: 68629

SEQ ID NO: 68648 - DNA, 201 bp, Homo sapiens; identical to SEQ ID NO: 68634

SEQ ID NO: 68649 - DNA, 201 bp, Homo sapiens; identical to SEQ ID NO: 68633

SEQ ID NO: 68650 - DNA, 201 bp, Homo sapiens; identical to SEQ ID NO: 68632

SEQ ID NO: 68651 - DNA, 201 bp, Homo sapiens; identical to SEQ ID NO: 68635

SEQ ID NO: 68652 - DNA, 201 bp, Homo sapiens; identical to SEQ ID NO: 68637

SEQ ID NO: 68653 - DNA, 201 bp, Homo sapiens; identical to SEQ ID NO: 68627

SEQ ID NO: 68654 - DNA, 201 bp, Homo sapiens; identical to SEQ ID NO: 68636

SEQ ID NO: 68655 - DNA, 201 bp, Homo sapiens; identical to SEQ ID NO: 68638

SEQ ID NO: 68656 - DNA, 201 bp, Homo sapiens; identical to SEQ ID NO: 68640

SEQ ID NO: 68657 - DNA, 201 bp, Homo sapiens; identical to SEQ ID NO: 68641

SEQ ID NO: 68658 - DNA, 201 bp, Homo sapiens; identical to SEQ ID NO: 68642

SEQ ID NO: 68659 - DNA, 201 bp, Homo sapiens; identical to SEQ ID NO: 68620

SEQ ID NO: 68660 - DNA, 201 bp, Homo sapiens; identical to SEQ ID NO: 68621

SEQ ID NO: 68661 - DNA, 201 bp, Homo sapiens; identical to SEQ ID NO: 68622

SEQ ID NO: 68662 - DNA, 201 bp, Homo sapiens; identical to SEQ ID NO: 68623

SEQ ID NO: 68663 - DNA, 201 bp, Homo sapiens; identical to SEQ ID NO: 68624

SEQ ID NO: 68664 - DNA, 201 bp, Homo sapiens; identical to SEQ ID NO: 68625

SEQ ID NO: 68665 - DNA, 201 bp, Homo sapiens; identical to SEQ ID NO: 68626

SEQ ID NO: 68666 - DNA, 201 bp, Homo sapiens; identical to SEQ ID NO: 68627

SEQ ID NO: 68667 - DNA, 201 bp, Homo sapiens; identical to SEQ ID NO: 68628

SEQ ID NO: 68668 - DNA, 201 bp, Homo sapiens; identical to SEQ ID NO: 68629

SEQ ID NO: 68669 - DNA, 201 bp, Homo sapiens; identical to SEQ ID NO: 68630

SEQ ID NO: 68670 - DNA, 201 bp, Homo sapiens; identical to SEQ ID NO: 68631
  misc_feature (1)...(201): n = A,T,C or G

SEQ ID NO: 68671 - DNA, 201 bp, Homo sapiens; identical to SEQ ID NO: 68632

SEQ ID NO: 68672 - DNA, 201 bp, Homo sapiens; identical to SEQ ID NO: 68633

SEQ ID NO: 68673 - DNA, 201 bp, Homo sapiens; identical to SEQ ID NO: 68634

SEQ ID NO: 68674 - DNA, 201 bp, Homo sapiens; identical to SEQ ID NO: 68635

SEQ ID NO: 68675 - DNA, 201 bp, Homo sapiens; identical to SEQ ID NO: 68636

SEQ ID NO: 68676 - DNA, 201 bp, Homo sapiens; identical to SEQ ID NO: 68637

SEQ ID NO: 68677 - DNA, 201 bp, Homo sapiens; identical to SEQ ID NO: 68638

SEQ ID NO: 68678 - DNA, 201 bp, Homo sapiens
tgaacatgacatgatcatttctgggctccagcctgaaacttcctactccctcaccgtcacagcctacacaaccaaaggagatggtgctcgcagcaagcccraactggtgtccaccactggggcagttccagggaaacctcggcttgtgattaaccacactcagatgaatactgctcttattcagtggcaccctccggtgga

SEQ ID NO: 68679 - DNA, 201 bp, Homo sapiens; identical to SEQ ID NO: 68640

SEQ ID NO: 68680 - DNA, 201 bp, Homo sapiens; identical to SEQ ID NO: 68641

SEQ ID NO: 68681 - DNA, 201 bp, Homo sapiens
aatttgatgatactactgaacatgacatgatcatttctgggctccagcctgaaacttcctactccctcaccgtcacagcctacacaaccaaaggagatggwgctcgcagcaagcccaaactggtgtccaccactggggcagttccagggaaacctcggcttgtgattaaccacactcagatgaatactgctcttattcagt

SEQ ID NO: 68682 - DNA, 201 bp, Homo sapiens; identical to SEQ ID NO: 68620

SEQ ID NO: 68683 - DNA, 201 bp, Homo sapiens; identical to SEQ ID NO: 68621

SEQ ID NO: 68684 - DNA, 201 bp, Homo sapiens; identical to SEQ ID NO: 68622

SEQ ID NO: 68685 - DNA, 201 bp, Homo sapiens; identical to SEQ ID NO: 68623

SEQ ID NO: 68686 - DNA, 201 bp, Homo sapiens; identical to SEQ ID NO: 68624

SEQ ID NO: 68687 - DNA, 201 bp, Homo sapiens; identical to SEQ ID NO: 68625

SEQ ID NO: 68688 - DNA, 201 bp, Homo sapiens; identical to SEQ ID NO: 68626

SEQ ID NO: 68689 - DNA, 201 bp, Homo sapiens; identical to SEQ ID NO: 68627

SEQ ID NO: 68690 - DNA, 201 bp, Homo sapiens; identical to SEQ ID NO: 68628

SEQ ID NO: 68691 - DNA, 201 bp, Homo sapiens; identical to SEQ ID NO: 68629

SEQ ID NO: 68692 - DNA, 201 bp, Homo sapiens; identical to SEQ ID NO: 68630

SEQ ID NO: 68693 - DNA, 201 bp, Homo sapiens; identical to SEQ ID NO: 68631
  misc_feature (1)...(201): n = A,T,C or G

SEQ ID NO: 68694 - DNA, 201 bp, Homo sapiens; identical to SEQ ID NO: 68632

SEQ ID NO: 68695 - DNA, 201 bp, Homo sapiens; identical to SEQ ID NO: 68633

SEQ ID NO: 68696 - DNA, 201 bp, Homo sapiens; identical to SEQ ID NO: 68634

SEQ ID NO: 68697 - DNA, 201 bp, Homo sapiens; identical to SEQ ID NO: 68635

SEQ ID NO: 68698 - DNA, 201 bp, Homo sapiens; identical to SEQ ID NO: 68636

SEQ ID NO: 68699 - DNA, 201 bp, Homo sapiens; identical to SEQ ID NO: 68637

SEQ ID NO: 68700 - DNA, 201 bp, Homo sapiens; identical to SEQ ID NO: 68638

SEQ ID NO: 68701 - DNA, 201 bp, Homo sapiens; identical to SEQ ID NO: 68639

SEQ ID NO: 68702 - DNA, 201 bp, Homo sapiens; identical to SEQ ID NO: 68640

SEQ ID NO: 68703 - DNA, 201 bp, Homo sapiens; identical to SEQ ID NO: 68641

SEQ ID NO: 68704 - DNA, 201 bp, Homo sapiens; identical to SEQ ID NO: 68642

SEQ ID NO: 68705 - DNA, 201 bp, Homo sapiens; identical to SEQ ID NO: 68643

SEQ ID NO: 68706 - DNA, 201 bp, Homo sapiens
tcagcacaagatatgtgctggtgtggcttctcacaatgaaacggactctgctttgacatcgccccttcccaccatactgctcataataacattttaggggsaaaggggagggaatgtttaaaaagaaagtccttgatttagttttttagtattgtaaagatactgctgacctgtgcttcatttctaactgtgtaaactttt

SEQ ID NO: 68707 - DNA, 201 bp, Homo sapiens
cagcacaagatatgtgctggtgtggcttctcacaatgaaacggactctgctttgacatcgccccttcccaccatactgctcataataacattttagggggmaaggggagggaatgtttaaaaagaaagtccttgatttagttttttagtattgtaaagatactgctgacctgtgcttcatttctaactgtgtaaacttttt

SEQ ID NO: 68708 - DNA, 201 bp, Homo sapiens; identical to SEQ ID NO: 68629

SEQ ID NO: 68709 - DNA, 201 bp, Homo sapiens; identical to SEQ ID NO: 68635

SEQ ID NO: 68710 - DNA, 201 bp, Homo sapiens; identical to SEQ ID NO: 68622

SEQ ID NO: 68711 - DNA, 201 bp, Homo sapiens; identical to SEQ ID NO: 68625

SEQ ID NO: 68712 - DNA, 201 bp, Homo sapiens; identical to SEQ ID NO: 68628

SEQ ID NO: 68713 - DNA, 201 bp, Homo sapiens; identical to SEQ ID NO: 68629

SEQ ID NO: 68714 - DNA, 201 bp, Homo sapiens; identical to SEQ ID NO: 68634

SEQ ID NO: 68715 - DNA, 201 bp, Homo sapiens; identical to SEQ ID NO: 68633

SEQ ID NO: 68716 - DNA, 201 bp, Homo sapiens; identical to SEQ ID NO: 68632

SEQ ID NO: 68717 - DNA, 201 bp, Homo sapiens; identical to SEQ ID NO: 68635

SEQ ID NO: 68718 - DNA, 201 bp, Homo sapiens; identical to SEQ ID NO: 68637

SEQ ID NO: 68719 - DNA, 201 bp, Homo sapiens; identical to SEQ ID NO: 68627

SEQ ID NO: 68720 - DNA, 201 bp, Homo sapiens; identical to SEQ ID NO: 68636

SEQ ID NO: 68721 - DNA, 201 bp, Homo sapiens; identical to SEQ ID NO: 68638

SEQ ID NO: 68722 - DNA, 201 bp, Homo sapiens; identical to SEQ ID NO: 68640

SEQ ID NO: 68723 - DNA, 201 bp, Homo sapiens; identical to SEQ ID NO: 68641

SEQ ID NO: 68724 - DNA, 201 bp, Homo sapiens; identical to SEQ ID NO: 68642

SEQ ID NO: 68725 - DNA, 201 bp, Homo sapiens; identical to SEQ ID NO: 68620

SEQ ID NO: 68726 - DNA, 201 bp, Homo sapiens; identical to SEQ ID NO: 68621

SEQ ID NO: 68727 - DNA, 201 bp, Homo sapiens; identical to SEQ ID NO: 68622

SEQ ID NO: 68728 - DNA, 201 bp, Homo sapiens; identical to SEQ ID NO: 68623

SEQ ID NO: 68729 - DNA, 201 bp, Homo sapiens; identical to SEQ ID NO: 68624

SEQ ID NO: 68730 - DNA, 201 bp, Homo sapiens; identical to SEQ ID NO: 68625

SEQ ID NO: 68731 - DNA, 201 bp, Homo sapiens; identical to SEQ ID NO: 68626

SEQ ID NO: 68732 - DNA, 201 bp, Homo sapiens; identical to SEQ ID NO: 68627

SEQ ID NO: 68733 - DNA, 201 bp, Homo sapiens; identical to SEQ ID NO: 68628

SEQ ID NO: 68734 - DNA, 201 bp, Homo sapiens; identical to SEQ ID NO: 68629

SEQ ID NO: 68735 - DNA, 201 bp, Homo sapiens; identical to SEQ ID NO: 68630

SEQ ID NO: 68736 - DNA, 201 bp, Homo sapiens; identical to SEQ ID NO: 68631
  misc_feature (1)...(201): n = A,T,C or G

SEQ ID NO: 68737 - DNA, 201 bp, Homo sapiens; identical to SEQ ID NO: 68632

SEQ ID NO: 68738 - DNA, 201 bp, Homo sapiens; identical to SEQ ID NO: 68633

SEQ ID NO: 68739 - DNA, 201 bp, Homo sapiens; identical to SEQ ID NO: 68634

SEQ ID NO: 68740 - DNA, 201 bp, Homo sapiens; identical to SEQ ID NO: 68635

SEQ ID NO: 68741 - DNA, 201 bp, Homo sapiens; identical to SEQ ID NO: 68636

SEQ ID NO: 68742 - DNA, 201 bp, Homo sapiens; identical to SEQ ID NO: 68637

SEQ ID NO: 68743 - DNA, 201 bp, Homo sapiens; identical to SEQ ID NO: 68638

SEQ ID NO: 68744 - DNA, 201 bp, Homo sapiens; identical to SEQ ID NO: 68678

SEQ ID NO: 68745 - DNA, 201 bp, Homo sapiens; identical to SEQ ID NO: 68640

SEQ ID NO: 68746 - DNA, 201 bp, Homo sapiens; identical to SEQ ID NO: 68641

SEQ ID NO: 68747 - DNA, 201 bp, Homo sapiens; identical to SEQ ID NO: 68642

SEQ ID NO: 68748 - DNA, 201 bp, Homo sapiens; identical to SEQ ID NO: 68681

SEQ ID NO: 68749 - DNA, 201 bp, Homo sapiens; identical to SEQ ID NO: 68620

SEQ ID NO: 68750 - DNA, 201 bp, Homo sapiens; identical to SEQ ID NO: 68621

SEQ ID NO: 68751 - DNA, 201 bp, Homo sapiens; identical to SEQ ID NO: 68622

SEQ ID NO: 68752 - DNA, 201 bp, Homo sapiens; identical to SEQ ID NO: 68623

SEQ ID NO: 68753 - DNA, 201 bp, Homo sapiens; identical to SEQ ID NO: 68624

SEQ ID NO: 68754 - DNA, 201 bp, Homo sapiens; identical to SEQ ID NO: 68625

SEQ ID NO: 68755 - DNA, 201 bp, Homo sapiens; identical to SEQ ID NO: 68626

SEQ ID NO: 68756 - DNA, 201 bp, Homo sapiens; identical to SEQ ID NO: 68627

SEQ ID NO: 68757 - DNA, 201 bp, Homo sapiens; identical to SEQ ID NO: 68628

SEQ ID NO: 68758 - DNA, 201 bp, Homo sapiens; identical to SEQ ID NO: 68629

SEQ ID NO: 68759 - DNA, 201 bp, Homo sapiens; identical to SEQ ID NO: 68630

SEQ ID NO: 68760 - DNA, 201 bp, Homo sapiens; identical to SEQ ID NO: 68631
  misc_feature (1)...(201): n = A,T,C or G

SEQ ID NO: 68761 - DNA, 201 bp, Homo sapiens; identical to SEQ ID NO: 68632

SEQ ID NO: 68762 - DNA, 201 bp, Homo sapiens; identical to SEQ ID NO: 68633

SEQ ID NO: 68763 - DNA, 201 bp, Homo sapiens; identical to SEQ ID NO: 68634

SEQ ID NO: 68764 - DNA, 201 bp, Homo sapiens; identical to SEQ ID NO: 68635

SEQ ID NO: 68765 - DNA, 201 bp, Homo sapiens; identical to SEQ ID NO: 68636

SEQ ID NO: 68766 - DNA, 201 bp, Homo sapiens; identical to SEQ ID NO: 68637

SEQ ID NO: 68767 - DNA, 201 bp, Homo sapiens; identical to SEQ ID NO: 68638

SEQ ID NO: 68768 - DNA, 201 bp, Homo sapiens; identical to SEQ ID NO: 68678

SEQ ID NO: 68769 - DNA, 201 bp, Homo sapiens; identical to SEQ ID NO: 68640

SEQ ID NO: 68770 - DNA, 201 bp, Homo sapiens; identical to SEQ ID NO: 68641

SEQ ID NO: 68771 - DNA, 201 bp, Homo sapiens; identical to SEQ ID NO: 68681

SEQ ID NO: 68772 - DNA, 201 bp, Homo sapiens; identical to SEQ ID NO: 68620

SEQ ID NO: 68773 - DNA, 201 bp, Homo sapiens; identical to SEQ ID NO: 68621

SEQ ID NO: 68774 - DNA, 201 bp, Homo sapiens; identical to SEQ ID NO: 68622

SEQ ID NO: 68775 - DNA, 201 bp, Homo sapiens; identical to SEQ ID NO: 68623

SEQ ID NO: 68776 - DNA, 201 bp, Homo sapiens; identical to SEQ ID NO: 68624

SEQ ID NO: 68777 - DNA, 201 bp, Homo sapiens; identical to SEQ ID NO: 68625

SEQ ID NO: 68778 - DNA, 201 bp, Homo sapiens; identical to SEQ ID NO: 68626

SEQ ID NO: 68779 - DNA, 201 bp, Homo sapiens; identical to SEQ ID NO: 68627

SEQ ID NO: 68780 - DNA, 201 bp, Homo sapiens; identical to SEQ ID NO: 68628

SEQ ID NO: 68781 - DNA, 201 bp, Homo sapiens; identical to SEQ ID NO: 68629

SEQ ID NO: 68782 - DNA, 201 bp, Homo sapiens; identical to SEQ ID NO: 68630

SEQ ID NO: 68783 - DNA, 201 bp, Homo sapiens; identical to SEQ ID NO: 68631
  misc_feature (1)...(201): n = A,T,C or G

SEQ ID NO: 68784 - DNA, 201 bp, Homo sapiens; identical to SEQ ID NO: 68632

SEQ ID NO: 68785 - DNA, 201 bp, Homo sapiens; identical to SEQ ID NO: 68633

SEQ ID NO: 68786 - DNA, 201 bp, Homo sapiens; identical to SEQ ID NO: 68634

SEQ ID NO: 68787 - DNA, 201 bp, Homo sapiens; identical to SEQ ID NO: 68635

SEQ ID NO: 68788 - DNA, 201 bp, Homo sapiens; identical to SEQ ID NO: 68636

SEQ ID NO: 68789 - DNA, 201 bp, Homo sapiens; identical to SEQ ID NO: 68637

SEQ ID NO: 68790 - DNA, 201 bp, Homo sapiens; identical to SEQ ID NO: 68638

SEQ ID NO: 68791 - DNA, 201 bp, Homo sapiens; identical to SEQ ID NO: 68678

SEQ ID NO: 68792 - DNA, 201 bp, Homo sapiens; identical to SEQ ID NO: 68640

SEQ ID NO: 68793 - DNA, 201 bp, Homo sapiens; identical to SEQ ID NO: 68641

SEQ ID NO: 68794 - DNA, 201 bp, Homo sapiens; identical to SEQ ID NO: 68642

SEQ ID NO: 68795 - DNA, 201 bp, Homo sapiens; identical to SEQ ID NO: 68681

SEQ ID NO: 68796 - DNA, 201 bp, Homo sapiens
gcctggtgaggagggggctgcagttcctcaggaaactgccagtggacaaagtcataaacaagagttccagttccctggaacctgagtcgggaggcctgcarctcactttctccctgtttgctggcccagacaggcctgtgctagagggctggatagtgtggtagtgtggtggatagagtgctgcctctatccacaacgcag

SEQ ID NO: 68797 - DNA, 201 bp, Homo sapiens
actgaaaatgttttagtttattacccagtatatttgggtaataatgaaagtttaattctcataacaaatgatatcagattccagttatcagaatagtttaytgtgtttgctcttattcactctactaaaaaattattttaaaaggctggaggcaaggtggtgacaggcagcagggtggcgacatggagagagggaagctca

SEQ ID NO: 68798 - DNA, 201 bp, Homo sapiens
cctgtttgctggccagcagggtttgtggccgcctctgctgtgacgccacagcctggtgaggagggggctgcagttcctcaggaaactgccagtggacaaaktcataaacaagagttccagttccctggaacctgagtcgggaggcctgcaactcactttctccctgtttgctggcccagacaggcctgtgctagagggctg

SEQ ID NO: 68799 - DNA, 201 bp, Homo sapiens
tagagtgctgcctctatccacaacgcagccatatgctgactgaagataactttgtgtctggaagagccctctgatttcttacactaatggccttacacgasatggaggattttacatttgatggaacaaagcgcttaagtgtcaactacgtgaagggaattcttcaaccgacagacacctgtgacatctgggataagatct

SEQ ID NO: 68800 - DNA, 201 bp, Homo sapiens
acaagagctccagttccctggaacctgagtcgggagacctgcagctcactttctccctgtttgctggccagcagggtttgtggccgcctctgctgtgacgycacagcctggtgaggagggggctgcagttcctcaggaaactgccagtggacaaagtcataaacaagagttccagttccctggaacctgagtcgggaggcc

SEQ ID NO: 68801 - DNA, 201 bp, Homo sapiens
gcaactcactttctccctgtttgctggcccagacaggcctgtgctagagggctggatagtgtggtagtgtggtggatagagtgctgcctctatccacaacrcagccatatgctgactgaagataactttgtgtctggaagagccctctgatttcttacactaatggccttacacgacatggaggattttacatttgatgga

SEQ ID NO: 68802 - DNA, 110 bp, Homo sapiens
ccactcccggctaatttttttttttgtattcttagtagagacgaggtttcaccgtgttagccaggatgttctcgatctcctgaccccatgatccacccgcytcggcctcc

SEQ ID NO: 68803 - DNA, 201 bp, Homo sapiens
tttttttttttttttgagacggagtctcgctctgtcgcccaggctggagtgcagtggcacgatctcggctcactgcaagctctgcttcctgggttcacgcyattcccctgcctcagcctcccgagtagctgggactatgggcgcccaccaccactcccggctaatttttttttttgtattcttagtagagacgaggtttca

SEQ ID NO: 68804 - DNA, 201 bp, Homo sapiens
acatgaagaagaacccaaagcatgaaattcagaagctggcagaatttattgggaagaaattagatgacaaagttctagataaaattgtccattacacttcrtttgatgtcatgaaacagaatccaatggcaaactattcatcgattcctgctgaaatcatggaccactccatttctccattcatgagaaaaggggcagtgg

SEQ ID NO: 68805 - DNA, 201 bp, Homo sapiens
tccattcatgagaaaaggggcagtgggagactggaagaaacacttcaccgtggctcagaatgagagatttgatgaagattacaagaagaaaatgactgatmccagactaactttccacttccagttctagtaaggaagaaaaactgaaaatgttttagtttattacccagtatatttgggtaataatgaaagtttaattct

SEQ ID NO: 68806 - DNA, 201 bp, Homo sapiens; identical to SEQ ID NO: 68796

SEQ ID NO: 68807 - DNA, 201 bp, Homo sapiens; identical to SEQ ID NO: 68801

SEQ ID NO: 68808 - DNA, 201 bp, Homo sapiens; identical to SEQ ID NO: 68798

SEQ ID NO: 68809 - DNA, 201 bp, Homo sapiens; identical to SEQ ID NO: 68799

SEQ ID NO: 68810 - DNA, 201 bp, Homo sapiens; identical to SEQ ID NO: 68800

SEQ ID NO: 68811 - DNA, 201 bp, Homo sapiens
atcccacaggcttcctgggctccctgtgcacggccctgtttgtgtcgttcgccgcacaaggaaagcccctggtccagtgggggagagacatgctgcgggcrgtgcctctggcagaagagtactgcaggaagaccatccggcacacggcagaataccaggagcactggttttactttgaagctaaatggcaattttatttgg

SEQ ID NO: 68812 - DNA, 201 bp, Homo sapiens
gatgttgctggggagcgtcggcgatgctcttggctacagaaatgtctgcaaggagaacagcactgtaggcatgaagatccaggaggagctgcaacgttccsggggcctggaccacctcgtactctcgccaggagaatggcccgtgagtgacaacaccatcatgcacatcgcaaccgccgaggccctcaccacagactactg

SEQ ID NO: 68813 - DNA, 201 bp, Homo sapiens
cctgcagagatagacaaggagcgcctggccatcagaggacgctcctgacagtgacacagtgaccactataaaagtcaggcgggctgaggaggagacaaagkccaggacgctccgcagctgttggggaagaggagctgcctcctgggatggagaaatttaaggctgcgatgttgctggggagcgtcggcgatgctcttggct

SEQ ID NO: 68814 - DNA, 201 bp, Homo sapiens
actaactgcggtggtggcctccagcaggcccccccgctgcagaccctctgtcctgcctctgcctccaggcatgcgtttccccgtgagggccaatgcacctmcccccaccccccaccctcccatgtccacagtgggtcgtgtgttcctggacagagaaacagtccacactggggcctgcgggacacatatagcagcatattt

SEQ ID NO: 68815 - DNA, 201 bp, Homo sapiens
ctcttggctacagaaatgtctgcaaggagaacagcactgtaggcatgaagatccaggaggagctgcaacgttccgggggcctggaccacctcgtactctcrccaggagaatggcccgtgagtgacaacaccatcatgcacatcgcaaccgccgaggccctcaccacagactactggtgcctggatgatctgtaccgggaga

SEQ ID NO: 68816 - DNA, 201 bp, Homo sapiens
aggaagtggagctcggaaggtcgagggggaagacgaggccacgatgcccccatgatagcctatgacgccctccttgcagcaggaaacagctggactgagckgtgtcaccgggccatgtttcatggaggggagagcgcggccacgggcaccattgcaggctgcctgttcgggttgctgtacggcctggacctcgttcccaaa

SEQ ID NO: 68817 - DNA, 201 bp, Homo sapiens; identical to SEQ ID NO: 68811

SEQ ID NO: 68818 - DNA, 164 bp, Homo sapiens
ggtccctccttcccggtgagcctctctgactggggctgcctccttccgggtgagcctctctgastggggctgcctccttccgggtgagcctctctgactggggctgcctccttccgggtgagcctctctgaacagggcacgagagcagactctgaaccaggaag

SEQ ID NO: 68819 - DNA, 201 bp, Homo sapiens; identical to SEQ ID NO: 68814

SEQ ID NO: 68820 - DNA, 201 bp, Homo sapiens; identical to SEQ ID NO: 68816

SEQ ID NO: 68821 - DNA, 201 bp, Homo sapiens; identical to SEQ ID NO: 68811

SEQ ID NO: 68822 - DNA, 201 bp, Homo sapiens
cgggtgtgtctctctgaacggggctcactccttccagggtccctccttcccggtgagcctctctgactggggctgcctccttccgggtgagcctctctgastggggctgcctccttccgggtgagcctctctgactggggctgcctccttccgggtgagcctctctgaacagggcacgagagcagactctgaaccaggaag

SEQ ID NO: 68823 - DNA, 201 bp, Homo sapiens; identical to SEQ ID NO: 68814

SEQ ID NO: 68824 - DNA, 201 bp, Homo sapiens; identical to SEQ ID NO: 68816

SEQ ID NO: 68825 - DNA, 201 bp, Homo sapiens
tgcttgaggccaggagtttaagttacagaactatgatcacactgccgcactgaagcctggatgacagagtgagaccttatctcaaaaaaaaaaaaaaaaaragagagagagagaaaaagaaatgctgtgtttaatcttcttaaaatgtatcttgtcctacatagttctcagaatacatatggggtatagttaggagataac

SEQ ID NO: 68826 - DNA, 201 bp, Homo sapiens
tagagaattttcttcagcctagtaagaatggactgatctggcgttctgtttaggggtacaccaatatgtcatgacactgtgtgggcatatggaacagagcmaccgagaactgcatacattgaaccttgtgttagcattctctctctatctcatctggccgagtatctttttccttttattttctttctttttggtcaactg

SEQ ID NO: 68827 - DNA, 201 bp, Homo sapiens
atacattgaaccttgtgttagcattctctctctatctcatctggccgagtatctttttccttttattttctttctttttggtcaactggctagactaaacmaagtataagtttgaaatgaaatggtctagagggaaatgattcaaattttttcataattcaaacaaaagttattacactaaaagtattatagtaacgtatt

SEQ ID NO: 68828 - DNA, 201 bp, Homo sapiens
ctagagggaaatgattcaaattttttcataattcaaacaaaagttattacactaaaagtattatagtaacgtattgtccttccgttaacagaaacatcacmattcaaaagtgagttttcttattatagtgtgattaagcctagttctgtatctcgtaattgtgtatagcatggtaaaagaaaaaaaaaaagacaggtaaat

SEQ ID NO: 68829 - DNA, 201 bp, Homo sapiens
atcatatttcaaaaacttcctatttcttgtgttatgaaccacctaccatcaaaagtatatttgaaaggcttcgtaattttgattctccaaaagaatatccmaaattttgtggaacatttgctatattgcatgtacgggacattaccactggatatgacagtagccagcctaataagaaatcagtgctgcctgtgagtaaaa

SEQ ID NO: 68830 - DNA, 201 bp, Homo sapiens
aaaaaagacaggtaaatgttatataattgtagggttagttaaggaaattagtccataaaattggcaagaaaatggtactttccttgattgttatgaaaaastgtcattgtgacatcacaggtattaatttacaaattagagtatttgaaataggatatttagcatttctgtagtttagaacagatgttacagtgtgtggtt

SEQ ID NO: 68831 - DNA, 201 bp, Homo sapiens
tatttaaaattctgatgtttactgaacataaaacaatagtggcaacactcctattggctttgttcttatcaaatttctcagtgccttctcagggtctggtrtgaacagaaaaaacagtgttcctgcatttaccataatttaatcagtcaatttgcagatagctaaggaaaatcttccaaaatctgtaggtgcttcctctat

SEQ ID NO: 68832 - DNA, 201 bp, Homo sapiens
acctaccatcaaaagtatatttgaaaggcttcgtaattttgattctccaaaagaatatccaaaattttgtggaacatttgctatattgcatgtacgggacrttaccactggatatgacagtagccagcctaataagaaatcagtgctgcctgtgagtaaaaacagccaaatgattacatttacttttcaaaatggctgtgt

SEQ ID NO: 68833 - DNA, 201 bp, Homo sapiens
cttgatgtagtaggtgcacatttgcctaacaggataaattcagtgatagcccaagctggtcaggagagacagaagtgctggctaggaggtctcagcctcgsgcactacaatgtttatctttttctttttgaacaatattgtgaaaatgattgcattctcattgagcatgaaagtcaaaactggaattttctaaagctttgg

SEQ ID NO: 68834 - DNA, 201 bp, Homo sapiens
aaatgaggccaaggtttaggaggtgagaaaaagtatcccttttacggattcagttcctgctaggatgttgtatcagaatcatgtgagaactcaggaagagrtagagcagaaataaaaaggaagaaaatgtagattagaaaataagacttctgagaaaaagttcaaggaataaagattgtttgactctggagaggagaaagc

SEQ ID NO: 68835 - DNA, 201 bp, Homo sapiens
gaggaagaactgaagaaactcattgatgctctgatagagaattttcttcagcctagtaagaatggactgatctggcgttctgtttaggggtacaccaataygtcatgacactgtgtgggcatatggaacagagcaaccgagaactgcatacattgaaccttgtgttagcattctctctctatctcatctggccgagtatct

SEQ ID NO: 68836 - DNA, 201 bp, Homo sapiens
agtcttctgaaaaggtttaatagagaaatgctgtttaggctgggcttggtggctcacatctgtaataccagcgctttgggaggctgaggcaggaggattgyttgaggccaggagtttaagttacagaactatgatcacactgccgcactgaagcctggatgacagagtgagaccttatctcaaaaaaaaaaaaaaaaagag

SEQ ID NO: 68837 - DNA, 201 bp, Homo sapiens
cagtcacttcgcccagagacccggacctggtccgctggggagcaggcggccataaaccccctctctcccggttccctgacgccgcggcaggagctgttacraacaccctgcggttggtctccgatgcccttcagtgaggtggggacgcctggaccctggtgagcgaaccccaagccaccccccaccccaactcagtgtctt

SEQ ID NO: 68838 - DNA, 201 bp, Homo sapiens
gtagccagcctaataagaaatcagtgctgcctgtgagtaaaaacagccaaatgattacatttacttttcaaaatggctgtgttgctacccttcggacaagyggaacagaaccaaagataaagtattatgcagagatgtgtgcgtcacctgaccagagtgacactgctttactggaggaagaactgaagaaactcattgatg

SEQ ID NO: 68839 - DNA, 201 bp, Homo sapiens
acttgatgtagtaggtgcacatttgcctaacaggataaattcagtgatagcccaagctggtcaggagagacagaagtgctggctaggaggtctcagcctcrggcactacaatgtttatctttttctttttgaacaatattgtgaaaatgattgcattctcattgagcatgaaagtcaaaactggaattttctaaagctttg

SEQ ID NO: 68840 - DNA, 201 bp, Homo sapiens
aagataaagtattatgcagagatgtgtgcgtcacctgaccagagtgacactgctttactggaggaagaactgaagaaactcattgatgctctgatagagawttttcttcagcctagtaagaatggactgatctggcgttctgtttaggggtacaccaatatgtcatgacactgtgtgggcatatggaacagagcaaccgag

SEQ ID NO: 68841 - DNA, 201 bp, Homo sapiens
accccccaccccaactcagtgtcttcgccggcccccggcccgtacgcctgtctggtcgccatggctgaaaacacagagggggatctgaactccaacctgcyccacgccccctaccacaccggggaccctcagctggacacggccatcgggcagtggctccgctgggataagaatcccaaaacaaaagagcagattgaaaac

SEQ ID NO: 68842 - DNA, 201 bp, Homo sapiens
acctaaacaaattgcttatgggagatagcactgtaattagagaatttatttcatataaaataataatataaagtttgaactgattagaatgttccttaaaycatggtttcgtttgttgcagctgtcagctaacatttggttgagctcatataatccaaacctaattgtccaactattgtattgccactattgttaatttgt

SEQ ID NO: 68843 - DNA, 201 bp, Homo sapiens
tgaacgaggacaagaagacctcattctttcctatgagcctgttacaaggcaggaaataaactacacccggccggtgattatcctggggcccatgaaggatmggatcaatgacgacttgatatctgaattccctgataaatttggctcctgtgtgcctcatactacgaggccaaagcgagactacgaggtggatggcagaga

SEQ ID NO: 68844 - DNA, 201 bp, Homo sapiens
ttgtgtccttcattctggctggtggaccagcagacctaagtggggagctccagagaggagaccagatcctatcggtgaatggcattgacctccgtggtgcwtcccacgagcaggcagctgctgcactaaagggggctggacagacagtgacgattatagcacaatatcaacctgaagattacgctcgatttgaggccaaaa

SEQ ID NO: 68845 - DNA, 201 bp, Homo sapiens
aacactgcgtggccctactttctgccaatgttgaatcgccaggatcccttcactgttcatatggcagcaagaattattgccaagttagcagcttggggaaragaactgatggaaggcagtgacttaaattactatttcaattggataaaaactcagctgagttcacagaaactgcgtggtagcggtgttgctgttgaaaca

SEQ ID NO: 68846 - DNA, 201 bp, Homo sapiens
gggcggaggtcctcggcctcccctaggcgaggcactaggtctgggggcggcgggtcttagcgtgcccgccacgctcgccgcctcccacctgccctggctgkctggggcccgacccttgcgtcgctccggggcccaagttacggactcgggaatccagttgtccgcaccgaacaagccccgccgcagcgcccgcccctcctc

SEQ ID NO: 68847 - DNA, 201 bp, Homo sapiens
cggaggtcctcggcctcccctaggcgaggcactaggtctgggggcggcgggtcttagcgtgcccgccacgctcgccgcctcccacctgccctggctggctsgggcccgacccttgcgtcgctccggggcccaagttacggactcgggaatccagttgtccgcaccgaacaagccccgccgcagcgcccgcccctcctcttg

SEQ ID NO: 68848 - DNA, 201 bp, Homo sapiens
cagcccggctgtgtccccggcgccccggaccaccctccctgccggctttgggtgcgttgtggggtcccgaggattcgcgagatttgttgaaagacattcargattacgaagtttagatgaccaaaatggatatccgaggtgctgtggatgctgctgtccccaccaatattattgctgccaaggctgcagaagttcgtgcaa

SEQ ID NO: 68849 - DNA, 201 bp, Homo sapiens
aacactgcgtggccctactttctgccaatgttgaatcgccaggatcccttcactgttcatatggcagcaagaattattgccaagttagcagcttggggaaragaactgatggaaggcagtgacttaaattactatttcaattggataaaaactcagctgagttcacagagttcgcagtatgtgcagtgcgtggccgggtgt

SEQ ID NO: 68850 - DNA, 201 bp, Homo sapiens; identical to SEQ ID NO: 68846

SEQ ID NO: 68851 - DNA, 201 bp, Homo sapiens; identical to SEQ ID NO: 68847

SEQ ID NO: 68852 - DNA, 201 bp, Homo sapiens; identical to SEQ ID NO: 68848

SEQ ID NO: 68853 - DNA, 201 bp, Homo sapiens; identical to SEQ ID NO: 68845

SEQ ID NO: 68854 - DNA, 201 bp, Homo sapiens; identical to SEQ ID NO: 68846

SEQ ID NO: 68855 - DNA, 201 bp, Homo sapiens; identical to SEQ ID NO: 68847

SEQ ID NO: 68856 - DNA, 201 bp, Homo sapiens; identical to SEQ ID NO: 68848

SEQ ID NO: 68857 - DNA, 201 bp, Homo sapiens; identical to SEQ ID NO: 68845

SEQ ID NO: 68858 - DNA, 201 bp, Homo sapiens
gcggcgccccagcccggctgtgtccccggcgccccggaccaccctccctgccggctttgggtgcgttgtggggtcccgaggatttgttgaaagacattcargattacgaagtttagatgaccaaaatggatatccgaggtgctgtggatgctgctgtccccaccaatattattgctgccaaggctgcagaagttcgtgcaa

SEQ ID NO: 68859 - DNA, 201 bp, Homo sapiens
agagtgcccggctgctgacctggcgcgctgccatgctgaaggataacaagaagcctttcatcaaggaggcagccatggccaagctggccgcctcggaggcsgcgaccgccatcagccaccaggccatccagatcctgggcggcatgggctacgtgacagagatgccggcagagcggcactaccgcgacgcccgcatcactg

SEQ ID NO: 68860 - DNA, 201 bp, Homo sapiens
gcatggccttcggggcgcccctcaccaagctccaggtcatccagttcaagttggcagacatggccctggccctggagagtgcccggctgctgacctggcgygctgccatgctgaaggataacaagaagcctttcatcaaggaggcagccatggccaagctggccgcctcggaggccgcgaccgccatcagccaccaggcca

SEQ ID NO: 68861 - DNA, 201 bp, Homo sapiens
taccgcgacgcccgcatcactgagatctacgagggcaccagcgaaatccagcggctggtgatcgccgggcatctgctcaggagctaccggagctgagcccrcggcggactgccccaggactgcgggaaggcgcgggagccaggggcctccaccccaaccccggctcagagactgggcggcccggcgggggctccctgggga

SEQ ID NO: 68862 - DNA, 201 bp, Homo sapiens
gccccaggactgcgggaaggcgcgggagccaggggcctccaccccaaccccggctcagagactgggcggcccggcgggggctccctggggaccccagatgrgctcagtgctgccacccagatcagatcacatgggaatgaggccctccgaccattggcagctccgcctctgggcctttccgcctcctcaccactgtgcctc

SEQ ID NO: 68863 - DNA, 201 bp, Homo sapiens
ccaggtggataaggaacatctcttcccagcggctcaggtgaagaagatgggcgggcttgggcttctggccatggacgtgcccgaggagcttggcggtgctkgcctcgattacctggcctacgccatcgccatggaggagatcagccgtggctgcgcctccaccggagtcatcatgagtgtcaacaactctctctacctggg

SEQ ID NO: 68864 - DNA, 201 bp, Homo sapiens
tgcagcccaggtggataaggaacatctcttcccagcggctcaggtgaagaagatgggcgggcttgggcttctggccatggacgtgcccgaggagcttggcrgtgctggcctcgattacctggcctacgccatcgccatggaggagatcagccgtggctgcgcctccaccggagtcatcatgagtgtcaacaactctctcta

SEQ ID NO: 68865 - DNA, 201 bp, Homo sapiens
aacggcagtgatgcaggagctgcgtccaccaccgcccgggccgagggcgactcatgggttctgaatggaaccaaagcctggatcaccaatgcctgggaggyttcggctgccgtggtctttgccagcacggacagagccctgcaaaacaagggcatcagtgccttcctggtccccatgccaacgcctgggctcacgttgggg

SEQ ID NO: 68866 - DNA, 201 bp, Homo sapiens
gaactacgctgagaatcgcatggccttcggggcgcccctcaccaagctccaggtcatccagttcaagttggcagacatggccctggccctggagagtgccyggctgctgacctggcgcgctgccatgctgaaggataacaagaagcctttcatcaaggaggcagccatggccaagctggccgcctcggaggccgcgaccgc

SEQ ID NO: 68867 - DNA, 133 bp, Homo sapiens
tgttgggcaggtggtggggctgggccatggagctggcccagaggcccctcagccctttgtaaagtctgatgaaggcaggggtggtgattcatgctgtgtgrctgactgtgggtaataaacacacctgtccccc

SEQ ID NO: 68868 - DNA, 201 bp, Homo sapiens
gctggccgcctcggaggccgcgaccgccatcagccaccaggccatccagatcctgggcggcatgggctacgtgacagagatgccggcagagcggcactacygcgacgcccgcatcactgagatctacgagggcaccagcgaaatccagcggctggtgatcgccgggcatctgctcaggagctaccggagctgagcccgcgg

SEQ ID NO: 68869 - DNA, 201 bp, Homo sapiens
tcactgagatctacgagggcaccagcgaaatccagcggctggtgatcgccgggcatctgctcaggagctaccggagctgagcccgcggcggactgccccasgactgcgggaaggcgcgggagccaggggcctccaccccaaccccggctcagagactgggcggcccggcgggggctccctggggaccccagatgggctcag

SEQ ID NO: 68870 - DNA, 201 bp, Homo sapiens
catggccaagctggccgcctcggaggccgcgaccgccatcagccaccaggccatccagatcctgggcggcatgggctacgtgacagagatgccggcagagyggcactaccgcgacgcccgcatcactgagatctacgagggcaccagcgaaatccagcggctggtgatcgccgggcatctgctcaggagctaccggagctg

SEQ ID NO: 68871 - DNA, 201 bp, Homo sapiens
ctcatgggttctgaatggaaccaaagcctggatcaccaatgcctgggaggcttcggctgccgtggtctttgccagcacggacagagccctgcaaaacaagrgcatcagtgccttcctggtccccatgccaacgcctgggctcacgttggggaagaaagaagacaagctgggcatccggggctcatccacggccaacctcat

SEQ ID NO: 68872 - DNA, 160 bp, Homo sapiens
tcaggatgacgaggcctggggtcctggtgttgggcaggtggtggggctgggccatggagctggcccagaggcccctcagccctttgtaaagtctgatgaargcaggggtggtgattcatgctgtgtgactgactgtgggtaataaacacacctgtccccc

SEQ ID NO: 68873 - DNA, 201 bp, Homo sapiens
gaatgaggccctccgaccattggcagctccgcctctgggcctttccgcctcctcaccactgtgcctcaagttcctcatctaagtggccctggcctcctggrggcggggttgtgggggggctgagcgacactcagggacacctcagttgtcctcccgcgggccctggtgccctggcatgaaggcccagtgcgacaggccctt

SEQ ID NO: 68874 - DNA, 201 bp, Homo sapiens
ggcgtgggtcacgcctttcaccagtggtgacaaaattggctgctttgccctcagcgaaccagggaacggcagtgatgcaggagctgcgtccaccaccgccygggccgagggcgactcatgggttctgaatggaaccaaagcctggatcaccaatgcctgggaggcttcggctgccgtggtctttgccagcacggacagagc

SEQ ID NO: 68875 - DNA, 201 bp, Homo sapiens
caccagtggtgacaaaattggctgctttgccctcagcgaaccagggaacggcagtgatgcaggagctgcgtccaccaccgcccgggccgagggcgactcaygggttctgaatggaaccaaagcctggatcaccaatgcctgggaggcttcggctgccgtggtctttgccagcacggacagagccctgcaaaacaagggcat

SEQ ID NO: 68876 - DNA, 201 bp, Homo sapiens
cgcatcggcatcgcctcccaggccctgggcattgcccagaccgccctcgattgtgctgtgaactacgctgagaatcgcatggccttcggggcgcccctcascaagctccaggtcatccagttcaagttggcagacatggccctggccctggagagtgcccggctgctgacctggcgcgctgccatgctgaaggataacaag

SEQ ID NO: 68877 - DNA, 201 bp, Homo sapiens
tgggcgggcttgggcttctggccatggacgtgcccgaggagcttggcggtgctggcctcgattacctggcctacgccatcgccatggaggagatcagccgyggctgcgcctccaccggagtcatcatgagtgtcaacaactctctctacctggggcccatcttgaagtttggctccaaggagcagaagcaggcgtgggtca

SEQ ID NO: 68878 - DNA, 201 bp, Homo sapiens
ctggccgcctcggaggccgcgaccgccatcagccaccaggccatccagatcctgggcggcatgggctacgtgacagagatgccggcagagcggcactaccrcgacgcccgcatcactgagatctacgagggcaccagcgaaatccagcggctggtgatcgccgggcatctgctcaggagctaccggagctgagcccgcggc

SEQ ID NO: 68879 - DNA, 201 bp, Homo sapiens
gatgggcgggcttgggcttctggccatggacgtgcccgaggagcttggcggtgctggcctcgattacctggcctacgccatcgccatggaggagatcagcygtggctgcgcctccaccggagtcatcatgagtgtcaacaactctctctacctggggcccatcttgaagtttggctccaaggagcagaagcaggcgtgggt

SEQ ID NO: 68880 - DNA, 201 bp, Homo sapiens
gctgcgcctccaccggagtcatcatgagtgtcaacaactctctctacctggggcccatcttgaagtttggctccaaggagcagaagcaggcgtgggtcacrcctttcaccagtggtgacaaaattggctgctttgccctcagcgaaccagggaacggcagtgatgcaggagctgcgtccaccaccgcccgggccgagggcg

SEQ ID NO: 68881 - DNA, 201 bp, Homo sapiens
tgcccgcagagctctctgtcctagggcctggcggcagttacacaccatctaccagtctgtggaactgcccgagacacaccagatgttgctccagacatgcygggactttgccgagaaggagttgtttcccattgcagcccaggtggataaggaacatctcttcccagcggctcaggtgaagaagatgggcgggcttgggct

SEQ ID NO: 68882 - DNA, 201 bp, Homo sapiens
gtgggagctacgcctatgccatcaaccccaacagcttcatcctgggtctgaagcagcagattgaagaccagcaggggcttcctaaaaagcagcagcagctsgaattccaaggccaagtcctgcaggactggttgggtctggggatctatggcatccaagacagtgacactctcatcctctcgaagaagaaaggagaggctc

SEQ ID NO: 68883 - DNA, 201 bp, Homo sapiens
gaccccaccctcaacgtggcagaagggtacagatgggacatcgttgctcagagggcctcccagtgcctgaaacaggactgttgctatgacaacagggagawccccatctccagctggaacgtgaagagggcacgagacatccacttgacagtggagcagaggggttacccagatttcaacctcatcgtgaacccttatgag

SEQ ID NO: 68884 - DNA, 201 bp, Homo sapiens
cagaccagggggactgcggagcccatcacggtcaccattgtgcctgcctacagagccctggggccttctcttcccaactcccagccaccccctgaggtctrtgtgagcctgatcaaggcctgcggtggtcctggaaatttctgcccatccttcagcgagctgcagagaaatttcgtgaaacatcggccaactaagctgaag

SEQ ID NO: 68885 - DNA, 201 bp, Homo sapiens
tgatatggaaaaccatgtggcaaagccaggacctgctggacctcgggctcgaggacctgaggatggagcagagagtccccgatgctctcgtcttcaccatycagaccagggggactgcggagcccatcacggtcaccattgtgcctgcctacagagccctggggccttctcttcccaactcccagccaccccctgaggtct

SEQ ID NO: 68886 - DNA, 144 bp, Homo sapiens
aggccagacgtggtagctcacacctgtaatcccagaactttgggaggccgaggtgggaggagcgcttgagccgaggagttcaagaccagcctgggtatcayagggagaccccgtctctacaaaataaaaaaataattcactggg

SEQ ID NO: 68887 - DNA, 201 bp, Homo sapiens
tcgggctcgaggacctgaggatggagcagagagtccccgatgctctcgtcttcaccatccagaccagggggactgcggagcccatcacggtcaccattgtrcctgcctacagagccctggggccttctcttcccaactcccagccaccccctgaggtctatgtgagcctgatcaaggcctgcggtggtcctggaaatttct

SEQ ID NO: 68888 - DNA, 129 bp, Homo sapiens
cgggacagagatggcactgatgcaggaastgtatagcacaccagcctccaggctggactccttcgtggctcagtggctgcagccccaccgggagtggaaggaagaggtgctagacgctgtgcggaccgt

SEQ ID NO: 68889 - DNA, 201 bp, Homo sapiens
atgttctgaggctgatatggaaaaccatgtggcaaagccaggacctgctggacctcgggctcgaggacctgaggatggagcagagagtccccgatgctctygtcttcaccatccagaccagggggactgcggagcccatcacggtcaccattgtgcctgcctacagagccctggggccttctcttcccaactcccagccac

SEQ ID NO: 68890 - DNA, 201 bp, Homo sapiens
ctaaaaagcagcagcagctggaattccaaggccaagtcctgcaggactggttgggtctggggatctatggcatccaagacagtgacactctcatcctctcraagaagaaaggagaggctctgtttccagccagttagttttctctgggagacttctctgtacatttctgccatgtactccagaactcatcctgtcaatcac

SEQ ID NO: 68891 - DNA, 201 bp, Homo sapiens; identical to SEQ ID NO: 68887

SEQ ID NO: 68892 - DNA, 104 bp, Homo sapiens
aggccagacgtggtagctcacacctgtaatcccagaactttgggaggccgaggtgggaggagcgcttgagccgaggagttcaagaccagcctgggtatcayagg

SEQ ID NO: 68893 - DNA, 129 bp, Homo sapiens; identical to SEQ ID NO: 68888

SEQ ID NO: 68894 - DNA, 201 bp, Homo sapiens; identical to SEQ ID NO: 68882

SEQ ID NO: 68895 - DNA, 201 bp, Homo sapiens; identical to SEQ ID NO: 68889

SEQ ID NO: 68896 - DNA, 201 bp, Homo sapiens; identical to SEQ ID NO: 68884

SEQ ID NO: 68897 - DNA, 201 bp, Homo sapiens; identical to SEQ ID NO: 68890

SEQ ID NO: 68898 - DNA, 201 bp, Homo sapiens; identical to SEQ ID NO: 68885

SEQ ID NO: 68899 - DNA, 144 bp, Homo sapiens; identical to SEQ ID NO: 68886

SEQ ID NO: 68900 - DNA, 115 bp, Homo sapiens
cactgatgcaggaastgtatagcacaccagcctccaggctggactccttcgtggctcagtggctgcagccccaccgggagtggaaggaagaggtgctagacgctgtgcggaccgt

SEQ ID NO: 68901 - DNA, 201 bp, Homo sapiens; identical to SEQ ID NO: 68882

SEQ ID NO: 68902 - DNA, 201 bp, Homo sapiens; identical to SEQ ID NO: 68883

SEQ ID NO: 68903 - DNA, 201 bp, Homo sapiens
ggagcatttccaggggaagcgtgggctggaccaggatgtgcgggtgctgaaggtagtcaagggccttctcttcccaactcccagccaccccctgaggtctrtgtgagcctgatcaaggcctgcggtggtcctggaaatttctgcccatccttcagcgagctgcagagaaatttcgtgaaacatcggccaactaagctgaag

SEQ ID NO: 68904 - DNA, 201 bp, Homo sapiens; identical to SEQ ID NO: 68890

SEQ ID NO: 68905 - DNA, 201 bp, Homo sapiens; identical to SEQ ID NO: 68882

SEQ ID NO: 68906 - DNA, 201 bp, Homo sapiens; identical to SEQ ID NO: 68884

SEQ ID NO: 68907 - DNA, 201 bp, Homo sapiens; identical to SEQ ID NO: 68883

SEQ ID NO: 68908 - DNA, 201 bp, Homo sapiens; identical to SEQ ID NO: 68885

SEQ ID NO: 68909 - DNA, 201 bp, Homo sapiens; identical to SEQ ID NO: 68887

SEQ ID NO: 68910 - DNA, 144 bp, Homo sapiens; identical to SEQ ID NO: 68886

SEQ ID NO: 68911 - DNA, 129 bp, Homo sapiens; identical to SEQ ID NO: 68888

SEQ ID NO: 68912 - DNA, 201 bp, Homo sapiens; identical to SEQ ID NO: 68889

SEQ ID NO: 68913 - DNA, 201 bp, Homo sapiens; identical to SEQ ID NO: 68890

SEQ ID NO: 68914 - DNA, 201 bp, Homo sapiens
agctctgcctctgacaatcagatcgctctggcggcctcatcatctcaggatgagctctttgtggccaggatattacaaagcccagatccaggtggacccaraaatggaaccagtgaccatctggagactgaccagaggcaggatcccaccccacttgaagagaataaatctaaattacaggatgtaatacctcagccgctg

SEQ ID NO: 68915 - DNA, 201 bp, Homo sapiens
ttgtcaggcagtggtgagcaaggagtgtgtccccgtggaccagttcatggagcacctgcttcccagcctcctgagcctcgcatcagatcctgtgcccaacrtgagggttctgctagccaaggccctaaggcagatgctgttggaaaaggcgtattttagaaatgctggtaaccctcatcttgaagtcattgaagagaccat

SEQ ID NO: 68916 - DNA, 201 bp, Homo sapiens
tttttgatcccaaagttctttgagctctgctctgatgctgtttggggcatgcggaaagcctgtgcagaatgcttcacggctgtgtcgcacagctcctcccmtggggtccgcagaacccagctcttcccgctcttcatcagacttgtcagcgacccctgccgatgggtgcaccaggctgccttccagtccctcggccccttc

SEQ ID NO: 68917 - DNA, 201 bp, Homo sapiens
aggtggacccagaaatggaaccagtgaccatctggagactgaccagaggcaggatcccaccccacttgaagagaataaatctaaattacaggatgtaatamctcagccgctgctagatcagtatgtgtccatgactgacccagctcgagcccagactgtcgatactgacatagccaaacactgtgcctacagcctcccagg

SEQ ID NO: 68918 - DNA, 201 bp, Homo sapiens
ctgtgcccaacgtgagggttctgctagccaaggccctaaggcagatgctgttggaaaaggcgtattttagaaatgctggtaaccctcatcttgaagtcatkgaagagaccatcttagcattgcagtcagaccgggaccaagatgtttccttttttgcagccctagaaccaaagcggcggaatatcatagacactgctgtac

SEQ ID NO: 68919 - DNA, 201 bp, Homo sapiens
gctcctcccctggggtccgcagaacccagctcttcccgctcttcatcagacttgtcagcgacccctgccgatgggtgcaccaggctgccttccagtccctyggccccttcacttccacctttgcaaacccctccagggctggcctttatcttcgagaggatggcgccctgagcatctggccactcacccaggatttggact

SEQ ID NO: 68920 - DNA, 201 bp, Homo sapiens
ttggacaagaagccactgagaaatttttgatcccaaagttctttgagctctgctctgatgctgtttggggcatgcggaaagcctgtgcagaatgcttcacrgctgtgtcgcacagctcctcccctggggtccgcagaacccagctcttcccgctcttcatcagacttgtcagcgacccctgccgatgggtgcaccaggctg

SEQ ID NO: 68921 - DNA, 201 bp, Homo sapiens
cagtcagaccgggaccaagatgtttccttttttgcagccctagaaccaaagcggcggaatatcatagacactgctgtactagaaaaacagaattaactacktccgtgatgagttgcaatctgattatttcatgcttggcacatatggcttaccataacttgaaggggaactgattgtattataccagctgggggagatttt

SEQ ID NO: 68922 - DNA, 201 bp, Homo sapiens
aatctgattatttcatgcttggcacatatggcttaccataacttgaaggggaactgattgtattataccagctgggggagattttggaacctttcatactrtgcactcagtgattgacgccttttccatctgtaccccgaagggactgaacctgatgggggctttttctggatggctgggccatcctgatcaagcctgatc

SEQ ID NO: 68923 - DNA, 201 bp, Homo sapiens
acagctgtgtggcccggagtgagattcagaaagtccttggtagcttgcaggagcatctgatgaatgatccagatgttcaagctcaagttcaggtattatcygctgcactgagagctgcacagctcgactgcgtgaatgaagctgagagcaagccaacagcaggcctaaaggaagtgtccatttcacatcccagctctgcct

SEQ ID NO: 68924 - DNA, 201 bp, Homo sapiens
cttcccctgccagcaaggacttagagctgcttctgagtgaggctgggcctcaggaggacgactgcagcagacctggggttgtgcacaacagctgtgtggcmcggagtgagattcagaaagtccttggtagcttgcaggagcatctgatgaatgatccagatgttcaagctcaagttcaggtattatccgctgcactgagag

SEQ ID NO: 68925 - DNA, 201 bp, Homo sapiens
ctgcttctgagtgaggctgggcctcaggaggacgactgcagcagacctggggttgtgcacaacagctgtgtggcccggagtgagattcagaaagtccttgrtagcttgcaggagcatctgatgaatgatccagatgttcaagctcaagttcaggtattatccgctgcactgagagctgcacagctcgactgcgtgaatgaa

SEQ ID NO: 68926 - DNA, 201 bp, Homo sapiens
gatggaacagattcctcctattgccatttttttacaagaaaacagatcaaattttccagtggtgctctctgaatatctcatacctattgtagtgaggtacytcacagatccaaacaatcagataatctgcaaaatggcttcaatgctgagtaagagtaccgttgaacgcctgctactcccccgattctgtgaactgtgtgg

SEQ ID NO: 68927 - DNA, 201 bp, Homo sapiens; identical to SEQ ID NO: 68916

SEQ ID NO: 68928 - DNA, 201 bp, Homo sapiens; identical to SEQ ID NO: 68919

SEQ ID NO: 68929 - DNA, 201 bp, Homo sapiens; identical to SEQ ID NO: 68920

SEQ ID NO: 68930 - DNA, 201 bp, Homo sapiens
gatggaacagattcctcctattgccatttttttacaagaaaacagatcaaattttccagtggtgctctctgaatatctcatacctattgtagtgaggtacytcacagatccaaacaatcaggaagtgctcttgattcttctggaacaagacctaattttccagcatgatgttgaaaacaaagtatgtcccattctcctgca

SEQ ID NO: 68931 - DNA, 201 bp, Homo sapiens
cttaagcacccacctaaaatttcagcaattatcttgtctcgagttttagtagtgaccttctgggcaagatggaatattagagctttaattatgtaaagaakcaaaaagtaattgcaataatgattttgaaacatgactactgggttataaataatgaagctactatgtctcctaaatttagataaaatattcattgagatt

SEQ ID NO: 68932 - DNA, 201 bp, Homo sapiens; identical to SEQ ID NO: 68914

SEQ ID NO: 68933 - DNA, 201 bp, Homo sapiens; identical to SEQ ID NO: 68916

SEQ ID NO: 68934 - DNA, 201 bp, Homo sapiens; identical to SEQ ID NO: 68915

SEQ ID NO: 68935 - DNA, 201 bp, Homo sapiens; identical to SEQ ID NO: 68917

SEQ ID NO: 68936 - DNA, 201 bp, Homo sapiens; identical to SEQ ID NO: 68918

SEQ ID NO: 68937 - DNA, 201 bp, Homo sapiens; identical to SEQ ID NO: 68919

SEQ ID NO: 68938 - DNA, 201 bp, Homo sapiens; identical to SEQ ID NO: 68920

SEQ ID NO: 68939 - DNA, 201 bp, Homo sapiens; identical to SEQ ID NO: 68921

SEQ ID NO: 68940 - DNA, 201 bp, Homo sapiens; identical to SEQ ID NO: 68922

SEQ ID NO: 68941 - DNA, 201 bp, Homo sapiens; identical to SEQ ID NO: 68923

SEQ ID NO: 68942 - DNA, 201 bp, Homo sapiens
acacagcagtagctcctctgacggcccagcggaaagccctgtggaaagctgtgtgtcggctggagctgagtggaccagggtttccccagagaccagcgccygctcaaagctttctgacatgaatgacctccccatcagcagctaccctggatcagattcctgggcctgcccagggaacactgaggatgtgttcagtcattt

SEQ ID NO: 68943 - DNA, 201 bp, Homo sapiens
tccctgacataagcaaggacttagagctgcttctgagtgaggctgggcctcaggaggacgactgcagcagacctggggttgtgcacaacagctgtgtggcmcggagtgagattcagaaagtccttggtagcttgcaggagcatctgatgaatgatccagatgttcaagctcaagttcaggtattatccgctgcactgagag

SEQ ID NO: 68944 - DNA, 201 bp, Homo sapiens; identical to SEQ ID NO: 68925

SEQ ID NO: 68945 - DNA, 201 bp, Homo sapiens
ttgcctctggctcccctgctcccagcagtggtggtaacacttcccctgccagtttaactcgttcagcaaagcctgtgcggagcgagccagagctacctgtrgaagggacctcagcgaaaaccagtgattgcccacacagcagtagctcctctgacggcccagcggaaagccctgtggaaagctgtgtgtcggctggagctg

SEQ ID NO: 68946 - DNA, 201 bp, Homo sapiens; identical to SEQ ID NO: 68926

SEQ ID NO: 68947 - DNA, 201 bp, Homo sapiens; identical to SEQ ID NO: 68914

SEQ ID NO: 68948 - DNA, 201 bp, Homo sapiens; identical to SEQ ID NO: 68915

SEQ ID NO: 68949 - DNA, 201 bp, Homo sapiens; identical to SEQ ID NO: 68916

SEQ ID NO: 68950 - DNA, 201 bp, Homo sapiens; identical to SEQ ID NO: 68917

SEQ ID NO: 68951 - DNA, 201 bp, Homo sapiens; identical to SEQ ID NO: 68918

SEQ ID NO: 68952 - DNA, 201 bp, Homo sapiens; identical to SEQ ID NO: 68919

SEQ ID NO: 68953 - DNA, 201 bp, Homo sapiens; identical to SEQ ID NO: 68920

SEQ ID NO: 68954 - DNA, 201 bp, Homo sapiens; identical to SEQ ID NO: 68921

SEQ ID NO: 68955 - DNA, 201 bp, Homo sapiens; identical to SEQ ID NO: 68922

SEQ ID NO: 68956 - DNA, 201 bp, Homo sapiens; identical to SEQ ID NO: 68923

SEQ ID NO: 68957 - DNA, 201 bp, Homo sapiens; identical to SEQ ID NO: 68924

SEQ ID NO: 68958 - DNA, 201 bp, Homo sapiens; identical to SEQ ID NO: 68925

SEQ ID NO: 68959 - DNA, 201 bp, Homo sapiens; identical to SEQ ID NO: 68930

SEQ ID NO: 68960 - DNA, 201 bp, Homo sapiens
tttcggagaacaggttacctaccacaacccccctctgctcttcgatctctccagggacccctcagagtccacacccctgacacctgccacagagcccctcyatgattttgtgattaaaaaggtggccaacgccctgaaggaacaccaggaaaccatcgtgcctgtgacctaccaactctcagaactgaatcagggcaggac

SEQ ID NO: 68961 - DNA, 201 bp, Homo sapiens; identical to SEQ ID NO: 68960

SEQ ID NO: 68962 - DNA, 201 bp, Homo sapiens; identical to SEQ ID NO: 68960

SEQ ID NO: 68963 - DNA, 201 bp, Homo sapiens
ccggcgtccagctctgccccgacagagacggaggagccggggtccagtgcagaggtcatggaagaagtgacaacatgctccttcaacagccctctgttccrgcaggaagatgacagagggattacctaccggatcccagccctgctctacataccccccacccacaccttcctggcctttgcagagaagcgttccacgagg

SEQ ID NO: 68964 - DNA, 201 bp, Homo sapiens
gccaattcaaaagcaattaattggcttaggacccaatttccatagatgcaaatggcagttacagacaggttaacagaagctactgaagtctacagataatmaaaaaacttaatattctgttccctaccttttttcacttttcctcctccaaagagcaaaatgaaaattttgccttagctactgcagtggaaagagcactga

SEQ ID NO: 68965 - DNA, 201 bp, Homo sapiens
tgaggttacaagcaggtgtcatggcaggaaggaagaccagatctgtatgatttgttccatttttaataacaaaaatatccacacccttttaataatgctcagagttctgtaggctctctatcctagaggaattgagcaaaacagaagaatcatgaagtctcctaccttctacagccttgtagttctgcttaccttctcttc

SEQ ID NO: 68966 - DNA, 201 bp, Homo sapiens
gaggttacaagcaggtgtcatggcaggaaggaagaccagatctgtatgatttgttccatttttaataacaaaaatatccacacccttttaataatgctcagagttctgtaggctctctatcctagaggaattgagcaaaacagaagaatcatgaagtctcctaccttctacagccttgtagttctgcttaccttctcttcc

SEQ ID NO: 68967 - DNA, 201 bp, Homo sapiens
tgttccggcaggaagatgacagagggattacctaccggatcccagccctgctctacataccccccacccacaccttcctggcctttgcagagaagcgttcyacgaggagagatgaggatgctctccacctggtgctgaggcgagggttgaggattgggcagttggtacagtgggggcccctgaagccactgatggaagcca

SEQ ID NO: 68968 - DNA, 201 bp, Homo sapiens; identical to SEQ ID NO: 68963

SEQ ID NO: 68969 - DNA, 201 bp, Homo sapiens; identical to SEQ ID NO: 68964

SEQ ID NO: 68970 - DNA, 201 bp, Homo sapiens; identical to SEQ ID NO: 68965

SEQ ID NO: 68971 - DNA, 201 bp, Homo sapiens; identical to SEQ ID NO: 68966

SEQ ID NO: 68972 - DNA, 201 bp, Homo sapiens; identical to SEQ ID NO: 68967

SEQ ID NO: 68973 - DNA, 115 bp, Homo sapiens
tttccttttattggygtttgtaaaatttcttctttttaaaattgttatattttagagacagggtctcgctctgtcacccaggctggagtgcagtggtgcaatcacagctcaccac

SEQ ID NO: 68974 - DNA, 201 bp, Homo sapiens
ctggggctgcaggaccgctggctgcggcggctgcaggccgagccaggcattgaggccccgtcggggactgaggcgggcgcgctcctgctctgcgagcccgyggggcccgtgtatacggccgggctgcgcggcggcctgacgcccgaggaaactgcgcggctacgggccttgggcgccgaggtgcgcgtcacaggccgcggt

SEQ ID NO: 68975 - DNA, 122 bp, Homo sapiens
atgcggcaacccgccgttcggytggtgcgcctgggtcgggtgccgtacgccgagctactggggctgcaggaccgctggctgcggcggctgcaggccgagccaggcattgaggccccgtcggg

SEQ ID NO: 68976 - DNA, 201 bp, Homo sapiens
agtccgctgtggaaggcacatcacatcccacggcctggctctcaactgctctaccgacctcacgtggtttgagcacatcgtgccctgtggactggttgggwcaggcgtcacttccttgagtaaggagctccagaggcacgtcaccgtggaagaagtaatgccacctttccttgtggcctttaaggagatctacaagtgcac

SEQ ID NO: 68977 - DNA, 201 bp, Homo sapiens; identical to SEQ ID NO: 68974

SEQ ID NO: 68978 - DNA, 201 bp, Homo sapiens
cccccgagtccccgcccctcaggccacgcccccaggcccacggagagggcggggccccgcggacgcaacggtgggcacgatgcggcaacccgccgttcggytggtgcgcctgggtcgggtgccgtacgccgagctactggggctgcaggaccgctggctgcggcggctgcaggccgagccaggcattgaggccccgtcggg

SEQ ID NO: 68979 - DNA, 201 bp, Homo sapiens; identical to SEQ ID NO: 68976

SEQ ID NO: 68980 - DNA, 201 bp, Homo sapiens
ttttatttatatcttccccacctacctcagagatactagatgtgacaatactgtgaaaagcaacacatgctatataaaacattagcactgctattgacagmagtgtctcagagaaattcagatgtcatagattgttatttctcgattgttgatgtcatagattgtcatttctcgattgttgcttcctcaatactgtgtcta

SEQ ID NO: 68981 - DNA, 201 bp, Homo sapiens
acgcatgccatttaattactttttgtgggaatgcatggggaaatccaggtgtgagcagaaaaactgcagcagaagagagctgggggggtcttttttcccaytggggatgttgcatgaactgggtgttgtgcacctgtgttttgactgcaactcacataaggtcaggtatgaaattttccatttgtggcataatgtcagcac

SEQ ID NO: 68982 - DNA, 117 bp, Homo sapiens
agaataagcaaaaaaaygcagtgagtaatgcacacaggtcttggccccatgtggggcattgtgggaaacctgttgttggcgtgtccagcctgcacgcatgccatttaattacttttt

SEQ ID NO: 68983 - DNA, 201 bp, Homo sapiens
gattttagacctggcctgtcattcactgatcatgaaactaaggacataccatgagctctgagccactattttcatatgtatcctgttttatttatatcttycccacctacctcagagatactagatgtgacaatactgtgaaaagcaacacatgctatataaaacattagcactgctattgacagcagtgtctcagagaaa

SEQ ID NO: 68984 - DNA, 201 bp, Homo sapiens
gtaaggctgcgtattatctgttgctgtgtaacaaatcatcaaaacttagtgacttaacagtaaacattaattatctcgtttgtgggtcaggaatttggggraagcttagctgggtgtttctaggttagggtctcacacgaacttgcagttaagatgtcagctggaactgcacttattcaaaggcttggctgggctggagga

SEQ ID NO: 68985 - DNA, 201 bp, Homo sapiens
ccatttgtggcataatgtcagcactcaaaaagtttaggattttggagcatttcagatttcagatttttatattacggatgctcagccaggacagatctttytcatacgctatgcaccgctgtatcaagcgcctatggcagggcctgcagaacacagcaggcactaaatactggttgttgaatgaaccgatgagtctggccc

SEQ ID NO: 68986 - DNA, 196 bp, Homo sapiens
agaataagcaaaaaaatgcagtgagtaatgcacacaggtcttggccccatgtggggcattgtgggaaacctgttgttggcgtgtccagcctgcacrcatgccatttaattactttttgtgggaatgcatggggaaatccaggtgtgagcagaaaaactgcagcagaagagagctgggggggtcttttttcccattg

SEQ ID NO: 68987 - DNA, 201 bp, Homo sapiens
ataaaacattagcactgctattgacagcagtgtctcagagaaattcagatgtcatagattgttatttctcgattgttgatgtcatagattgtcatttctcrattgttgcttcctcaatactgtgtctaactgagcaattctgggctctagttcctttgattttgtgggaatcaaatctctgaatggcccaggtgaaggtga

SEQ ID NO: 68988 - DNA, 121 bp, Homo sapiens
agaataagcaaaaaaatgcartgagtaatgcacacaggtcttggccccatgtggggcattgtgggaaacctgttgttggcgtgtccagcctgcacgcatgccatttaattactttttgtgg

SEQ ID NO: 68989 - DNA, 201 bp, Homo sapiens
aagtgtgtgcgagtgtgtatgtgtgtgtgccgtgtcgggctccccccttccccccgttttcccgtcgagtgatgcacttggaatgagaatcagaggatggraatagtctgggaggtgctttttcttcttcaagccaatttcatcgtctgcatatcagctcaacagaattcaccaaaaatccatgaaggctggtgggcatac

SEQ ID NO: 68990 - DNA, 201 bp, Homo sapiens
taatgaacaaacctgtctatataaccaggatgcagatgcattccttgcgcctgctcagccagaaccagccatctcagatctttctgagcatgagtgacaayttcaggcctgtccagccactcaacaaccgctgcatccgcaccaatatcaacttcagtttacaggggaaggactgtccaaacaaccgagcccagaagcttc

SEQ ID NO: 68991 - DNA, 201 bp, Homo sapiens
aagctgcaaagagtccaaatggattggtggtagtttctatatttataaaagtttctgattcatcaaacccatttcttaatcgaatgctcaacagagatacwatcacaagaataacatataaaaatgatgcatatttactacaggggcttaatatagaggaactatatccagagacctctagtttcatcacttacgatgggt

SEQ ID NO: 68992 - DNA, 201 bp, Homo sapiens; identical to SEQ ID NO: 68989

SEQ ID NO: 68993 - DNA, 201 bp, Homo sapiens
ccatggcagaggaatacatctctcacacatactcacaaacacacacacaagcacttgcacatacatacaaacacatgcaaacatacctacacacacacacwctcttacaacctccatcatgggaagtcaagtttcagaaacaaaagtctcattcataagaggtcttagaagaaaataaccagttaacctgatttcaatttt

SEQ ID NO: 68994 - DNA, 201 bp, Homo sapiens
atatcaacttcagtttacaggggaaggactgtccaaacaaccgagcccagaagcttcagtatagagtaaatgaatggctcctcaagtagggaacaaagccmagaagaatcccacctcagtgaaatgctacaactgtgaattgacgtaacctagaatgtcccccttcttgcttctctctccttctttcccccaagcctcatt

SEQ ID NO: 68995 - DNA, 201 bp, Homo sapiens
aagcttcagtatagagtaaatgaatggctcctcaagtagggaacaaagccaagaagaatcccacctcagtgaaatgctacaactgtgaattgacgtaacckagaatgtcccccttcttgcttctctctccttctttcccccaagcctcattcattcttgggattggccctttcttcatgaaaagtgtctgcaaaaccatgg

SEQ ID NO: 68996 - DNA, 201 bp, Homo sapiens
gagatactatcacaagaataacatataaaaatgatgcatatttactacaggggcttaatatagaggaactatatccagagacctctagtttcatcacttaygatgggtcgatgactatcccaccctgctatgagacagcaagttggatcataatgaacaaacctgtctatataaccaggatgcagatgcattccttgcgcc

SEQ ID NO: 68997 - DNA, 201 bp, Homo sapiens
cattcataagaggtcttagaagaaaataaccagttaacctgatttcaattttgataccgttttcctgaactaataaatctacccaatgagacttttcagcytttgtacatacaaaattcttccaaaagagagaggagaaaatacagctctgatggcatcaaacggactttgcatcaagtaatttcagatagtgtcctagga

SEQ ID NO: 68998 - DNA, 201 bp, Homo sapiens
ggcccgacctggcggataaagtggccagtgtgtacgaagccccgggctttttcctggacctggagcccatcccgggagccttggacgctgtgcgggagatraacgacctaccggacacgcaggtcttcatctgcaccagccccctgctgaagtaccaccactgtgtgggtgagaaggtgtggctgccccgcccctactccg

SEQ ID NO: 68999 - DNA, 201 bp, Homo sapiens
ccgtcggcactggtttacgacctgggcggggcggcccggacactctatgcaaatcagcccggcggactccggaagcagcgctccctccgcttccggccgarcccgcgccccccagaccccgagagctcgcagctccggcccggcggcgatggcgcggagcgtgcgcgtgctggtggacatggacggcgtcctggccgactt

SEQ ID NO: 69000 - DNA, 181 bp, Homo sapiens
gatggggacaaaggctgggtcccgaagaagcgcagggtcagaaaagtgccccccaaagccgtccctgcacccgaaccctasgaaggcctcgcgcaaccgcagggccgtcggcactggtttacgacctgggcggggcggcccggacactctatgcaaatcagcccggcggactccggaagca

SEQ ID NO: 69001 - DNA, 201 bp, Homo sapiens
acctaccggacacgcaggtcttcatctgcaccagccccctgctgaagtaccaccactgtgtgggtgagaaggtgtggctgccccgcccctactccgcacgwggagctgcctaaatcctgattttaaaaagaaaccaccagaaacccagaagtaccgctgggtggagcagcacctggggccccagttcgtagaacgaattat

SEQ ID NO: 69002 - DNA, 201 bp, Homo sapiens
ccctgcacccgaaccctaggaaggcctcgcgcaaccgcagggccgtcggcactggtttacgacctgggcggggcggcccggacactctatgcaaatcagcycggcggactccggaagcagcgctccctccgcttccggccgagcccgcgccccccagaccccgagagctcgcagctccggcccggcggcgatggcgcggag

SEQ ID NO: 69003 - DNA, 201 bp, Homo sapiens
cggcactggtttacgacctgggcggggcggcccggacactctatgcaaatcagcccggcggactccggaagcagcgctccctccgcttccggccgagcccrcgccccccagaccccgagagctcgcagctccggcccggcggcgatggcgcggagcgtgcgcgtgctggtggacatggacggcgtcctggccgacttcgag

SEQ ID NO: 69004 - DNA, 201 bp, Homo sapiens
tgctggtggacatggacggcgtcctggccgacttcgaggccggcctcctgcggggcttccgccgccgcttccctgaggagccgcacgtgccgctggagcarcgccgcggcttcctggcccgcgagcagtaccgcgccctgcggcccgacctggcggataaagtggccagtgtgtacgaagccccgggctttttcctggacc

SEQ ID NO: 69005 - DNA, 201 bp, Homo sapiens
ctggagctaaaggaagggcaggcccacaggggccaccgcagagccgagtcggggcggcatcgtgctggtgcctctggccccgtggagtggagcaggcagayaccgttaagcgctgtgctaccgggccccaggcccagccacccggtacctcccgagaggctgtccctggaccctggctggcatggaaatacagtgggaaaa

SEQ ID NO: 69006 - DNA, 184 bp, Homo sapiens
gatggggacaaaggctgggtcccgaagaagcgcagggtcagaaaagtgccccccaaagccgtccctgcacccgaaccctaggawggcctcgcgcaaccgcagggccgtcggcactggtttacgacctgggcggggcggcccggacactctatgcaaatcagcccggcggactccggaagcagcg

SEQ ID NO: 69007 - DNA, 201 bp, Homo sapiens
ggcccgacctggcggataaagtggccagtgtgtacgaagccccgggctttttcctggacctggagcccatcccgggagccttggacgctgtgcgggagatraacgacctaccggacacgcaggtcttcatctgcaccagccccctgctgaagtaccaccactgtgtgggtgagaagtaccgctgggtggagcagcacctgg

SEQ ID NO: 69008 - DNA, 201 bp, Homo sapiens; identical to SEQ ID NO: 68999

SEQ ID NO: 69009 - DNA, 201 bp, Homo sapiens; identical to SEQ ID NO: 69002

SEQ ID NO: 69010 - DNA, 181 bp, Homo sapiens; identical to SEQ ID NO: 69000

SEQ ID NO: 69011 - DNA, 201 bp, Homo sapiens; identical to SEQ ID NO: 69003

SEQ ID NO: 69012 - DNA, 201 bp, Homo sapiens; identical to SEQ ID NO: 69004

SEQ ID NO: 69013 - DNA, 184 bp, Homo sapiens; identical to SEQ ID NO: 69006

SEQ ID NO: 69014 - DNA, 201 bp, Homo sapiens; identical to SEQ ID NO: 69005

SEQ ID NO: 69015 - DNA, 201 bp, Homo sapiens
ggcccgacctggcggataaagtggccagtgtgtacgaagccccgggctttttcctggacctggagcccatcccgggagccttggacgctgtgcgggagatraacgacctaccggaccccctgctgaagtaccaccactgtgtgggtgagaaggtgtggctgccccgcccctactccgcacgtggagctgcctaaatcctga

SEQ ID NO: 69016 - DNA, 201 bp, Homo sapiens; identical to SEQ ID NO: 68999

SEQ ID NO: 69017 - DNA, 181 bp, Homo sapiens; identical to SEQ ID NO: 69000

SEQ ID NO: 69018 - DNA, 201 bp, Homo sapiens
tggacgctgtgcgggagatgaacgacctaccggaccccctgctgaagtaccaccactgtgtgggtgagaaggtgtggctgccccgcccctactccgcacgwggagctgcctaaatcctgattttaaaaagaaaccaccagaaacccagaagtaccgctgggtggagcagcacctggggccccagttcgtagaacgaattat

SEQ ID NO: 69019 - DNA, 201 bp, Homo sapiens; identical to SEQ ID NO: 69002

SEQ ID NO: 69020 - DNA, 201 bp, Homo sapiens; identical to SEQ ID NO: 69003

SEQ ID NO: 69021 - DNA, 201 bp, Homo sapiens; identical to SEQ ID NO: 69004

SEQ ID NO: 69022 - DNA, 184 bp, Homo sapiens; identical to SEQ ID NO: 69006

SEQ ID NO: 69023 - DNA, 115 bp, Homo sapiens
gagtgacaactggagggagatcttagatagggccaccgcagagccgagtcggggcggcatcgtgctggtgcctctggccccgtggagtggagcaggcagayaccgttaagcgctg

SEQ ID NO: 69024 - DNA, 201 bp, Homo sapiens
gggagccttggacgctgtgcgggagatgaacgacctaccggagtaaggagagaggggggcgggcggagtcctgggcgggctcctggctcccggcggtaacsgcgtccttctccgcagcacgcaggtcttcatctgcaccagccccctgctgaagtaccaccactgtgtgggtgagaagtaccgctgggtggagcagcacct

SEQ ID NO: 69025 - DNA, 201 bp, Homo sapiens
ctcttgtctttcaggataaagtggccagtgtgtacgaagccccgggctttttcctggacctggagcccatcccgggagccttggacgctgtgcgggagatraacgacctaccggagtaaggagagaggggggcgggcggagtcctgggcgggctcctggctcccggcggtaaccgcgtccttctccgcagcacgcaggtct

SEQ ID NO: 69026 - DNA, 201 bp, Homo sapiens; identical to SEQ ID NO: 68999

SEQ ID NO: 69027 - DNA, 188 bp, Homo sapiens
ggcggctgatggggacaaaggctgggtcccgaagaagcgcagggtcagaaaagtgccccccaaagccgtccctgcacccgaaccctasgaaggcctcgcgcaaccgcagggccgtcggcactggtttacgacctgggcggggcggcccggacactctatgcaaatcagcccggcggactccggaagca

SEQ ID NO: 69028 - DNA, 201 bp, Homo sapiens; identical to SEQ ID NO: 69002

SEQ ID NO: 69029 - DNA, 201 bp, Homo sapiens; identical to SEQ ID NO: 69003

SEQ ID NO: 69030 - DNA, 201 bp, Homo sapiens
tgctggtggacatggacggcgtcctggccgacttcgaggccggcctcctgcggggcttccgccgccgcttccctgaggagccgcacgtgccgctggagcarcgccgcggcttcctggcccgcgagcagtaccgcgccctgcggcccgacctggcggtagggggcgcagggtccccacccgggcagggcccgctcgctccgt

SEQ ID NO: 69031 - DNA, 201 bp, Homo sapiens; identical to SEQ ID NO: 69005

SEQ ID NO: 69032 - DNA, 191 bp, Homo sapiens
ggcggctgatggggacaaaggctgggtcccgaagaagcgcagggtcagaaaagtgccccccaaagccgtccctgcacccgaaccctaggawggcctcgcgcaaccgcagggccgtcggcactggtttacgacctgggcggggcggcccggacactctatgcaaatcagcccggcggactccggaagcagcg

SEQ ID NO: 69033 - DNA, 201 bp, Homo sapiens
tgaaacaaatccattttgctgctgtttcatgtggactgaataaaccaggcaccgaaaatgctgatgtccagaagccacgccggagcttggaagtcataccygaaaaagcaaacgatgaaactggagaatgaggaaacttacaataaaccattatggagtttataactctaggaccaattgtagtcagatgggacatttgct

SEQ ID NO: 69034 - DNA, 201 bp, Homo sapiens
ttcctttaatgaagtgcttgccagcaagtacgccaatgaaaatccaggggactttgtaaattacaacaaacgttttcttgctagggtttttcccagtccartgagaattgattccagtaacatgaatcctcaagatttttggaaatgtggttgccaaattgtagccatgaactttcagacaccaggactgatgatggacct

SEQ ID NO: 69035 - DNA, 201 bp, Homo sapiens
agatctgagagaaaacatgcagaatgcggtggtgtcattcaaggagctgtgtggcctctcctctgtggccaatctcatgcagtgcatgttggcggtgtctycccgctttctggggcccgataacacacccctagtggtcctaaatctcagcgagcagtaccccacaatggagctgcagggaattgtgccggaggttctgaa

SEQ ID NO: 69036 - DNA, 201 bp, Homo sapiens
gcctaaggtgggagccatctaagaaggattctgagaaagccaagattgacattaaatccatcaaggaagtgagaacaggaaaaaacacagacatattccgmagcaatggcatttctgaccagatatctgaagattgtgcgttttccgtcatatatggagagaattatgagtcactggatttggttgccaactccgcagatg

SEQ ID NO: 69037 - DNA, 201 bp, Homo sapiens
acgaagatgaaggagcagaaatgtctcagaggatgggaaaagagaacatggagcaacccaataatgtgcctgtgaagcgatttcagctttgtaaagaactstctgaactggtcagcatctgcaaatcagttcagttcaaagaatttcaggtgtcgtttcaggttcagaagtactgggaagtctgttcctttaatgaagtgc

SEQ ID NO: 69038 - DNA, 201 bp, Homo sapiens
atgccacagatctgagagaaaacatgcagaatgcggtggtgtcattcaaggagctgtgtggcctctcctctgtggccaatctcatgcagtgcatgttggcrgtgtctccccgctttctggggcccgataacacacccctagtggtcctaaatctcagcgagcagtaccccacaatggagctgcagggaattgtgccggagg

SEQ ID NO: 69039 - DNA, 201 bp, Homo sapiens
ggcaccgaaaatgctgatgtccagaagccacgccggagcttggaagtcatacccgaaaaagcaaacgatgaaactggagaatgaggaaacttacaataaaycattatggagtttataactctaggaccaattgtagtcagatgggacatttgctttgcactcactaatgagaataatattcgggattttaaagcacaactg

SEQ ID NO: 69040 - DNA, 201 bp, Homo sapiens
ggggttgccagagtctctgggttctagatgattttggtggcatgcttgctgagccataattactaaagagaatgtaagtggacgggttccctgaatccccrgggtccttggagagccatcgaggagaatgtgcaattggactgaagctccctggctgaagatacatgccgagtcagcacatgggtagagatgatgtaaaag

SEQ ID NO: 69041 - DNA, 201 bp, Homo sapiens
atgtggactgaataaaccaggcaccgaaaatgctgatgtccagaagccacgccggagcttggaagtcatacccgaaaaagcaaacgatgaaactggagaakgaggaaacttacaataaaccattatggagtttataactctaggaccaattgtagtcagatgggacatttgctttgcactcactaatgagaataatattcg

SEQ ID NO: 69042 - DNA, 201 bp, Homo sapiens
ttttgctgctgtttcatgtggactgaataaaccaggcaccgaaaatgctgatgtccagaagccacgccggagcttggaagtcatacccgaaaaagcaaacratgaaactggagaatgaggaaacttacaataaaccattatggagtttataactctaggaccaattgtagtcagatgggacatttgctttgcactcactaa

SEQ ID NO: 69043 - DNA, 201 bp, Homo sapiens
ggggcctttctgtgagaaaagggaagaaatccagggaatatgcatctttgagaacactgtggattaaaaccgtggatgaggtattcaagaatgcccagccycctatacgggatgccacagatctgagagaaaacatgcagaatgcggtggtgtcattcaaggagctgtgtggcctctcctctgtggccaatctcatgcagt

SEQ ID NO: 69044 - DNA, 201 bp, Homo sapiens
atcctcaagatttttggaaatgtggttgccaaattgtagccatgaactttcagacaccaggactgatgatggacctgaatattggctggtttaggcagaayggaaactgtggctatgtcctccggccagccatcatgagggaggaggtctccttcttcagcgccaatacaaaagactctgtcccaggggtctcacctcaac

SEQ ID NO: 69045 - DNA, 201 bp, Homo sapiens
gaagaagatcagcagtgcaagtgattgtattaattcaatggttgagggttcagaactcaaaaaggttcgctccaactctagaatttatcataggtactttytactggatgctgacatgcagagcctaaggtgggagccatctaagaaggattctgagaaagccaagattgacattaaatccatcaaggaagtgagaacagg

SEQ ID NO: 69046 - DNA, 201 bp, Homo sapiens
cgggctaccgccatgtccccctgcagtccttaactggagaggtccttgcacatgcttctttatttgtccacgtggctattactaaccgaagaggaggaggraagcctcataaaaggggcctttctgtgagaaaagggaagaaatccagggaatatgcatctttgagaacactgtggattaaaaccgtggatgaggtattca

SEQ ID NO: 69047 - DNA, 201 bp, Homo sapiens
atgaggaaacttacaataaaccattatggagtttataactctaggaccaattgtagtcagatgggacatttgctttgcactcactaatgagaataatattygggattttaaagcacaactggaatagctaattacagtctattaaaactgtgaatgtatgtagcaatcctgcgtgtgaaggcaaataaactctttaacagg

SEQ ID NO: 69048 - DNA, 201 bp, Homo sapiens; identical to SEQ ID NO: 69034

SEQ ID NO: 69049 - DNA, 201 bp, Homo sapiens; identical to SEQ ID NO: 69035

SEQ ID NO: 69050 - DNA, 201 bp, Homo sapiens; identical to SEQ ID NO: 69036

SEQ ID NO: 69051 - DNA, 201 bp, Homo sapiens; identical to SEQ ID NO: 69037

SEQ ID NO: 69052 - DNA, 201 bp, Homo sapiens; identical to SEQ ID NO: 69038

SEQ ID NO: 69053 - DNA, 201 bp, Homo sapiens; identical to SEQ ID NO: 69043

SEQ ID NO: 69054 - DNA, 201 bp, Homo sapiens; identical to SEQ ID NO: 69044

SEQ ID NO: 69055 - DNA, 201 bp, Homo sapiens; identical to SEQ ID NO: 69045

SEQ ID NO: 69056 - DNA, 201 bp, Homo sapiens; identical to SEQ ID NO: 69046

SEQ ID NO: 69057 - DNA, 201 bp, Homo sapiens
ccgcccccagccatcgcccccagccggcttcgttcccctgagcgagacaggaagctgcggtcccgagaaagcggaggagacgtcgctggagccgggaggcsccgggttcggcggagcgcggagcggggctctgggccgcgtgaaagtttttcttcccgagccgcagggcgcccgctgcccggaaactgcccagggataagt

SEQ ID NO: 69058 - DNA, 201 bp, Homo sapiens
gccgcgtgaaagtttttcttcccgagccgcagggcgcccgctgcccggaaactgcccagggataagtcggccgactccccagacccctcgaaggtgcgggkacccccagcggaagcgagagggagcgaaatcgaggaacgagtgacagccggacagtccgccgggcggtgatccggggccgctcccgggcgcgccctcggc

SEQ ID NO: 69059 - DNA, 201 bp, Homo sapiens
tcggccgactccccagacccctcgaaggtgcggggacccccagcggaagcgagagggagcgaaatcgaggaacgagtgacagccggacagtccgccgggcrgtgatccggggccgctcccgggcgcgccctcggctccaggtcctacccggagccgctgccatgggagagccagccttgggcgctggggaccagccgccgc

SEQ ID NO: 69060 - DNA, 173 bp, Homo sapiens
gagtaatttggatgtgggggtgggggtggagaaaggggaagtggtccagaaacaaaaagccccattgggcatgataagccgaggaggcattcttctaaagyagacttttgtgtaaaaagcaaaggttacatgtgagtattaataaagaagataataaataatattctttttaa

SEQ ID NO: 69061 - DNA, 201 bp, Homo sapiens
ggtgatccggggccgctcccgggcgcgccctcggctccaggtcctacccggagccgctgccatgggagagccagccttgggcgctggggaccagccgccgygcccgcctcggagtcgcggcccgagtcccggcgccagcagccagcccgctgcgtccccttcccgggctgcagggctgcctccgccgcgccgccggcccgg

SEQ ID NO: 69062 - DNA, 201 bp, Homo sapiens
gcccgctgcccggaaactgcccagggataagtcggccgactccccagacccctcgaaggtgcggggacccccagcggaagcgagagggagcgaaatcgagsaacgagtgacagccggacagtccgccgggcggtgatccggggccgctcccgggcgcgccctcggctccaggtcctacccggagccgctgccatgggagag

SEQ ID NO: 69063 - DNA, 201 bp, Homo sapiens
ccggcttcgttcccctgagcgagacaggaagctgcggtcccgagaaagcggaggagacgtcgctggagccgggaggcgccgggttcggcggagcgcggagyggggctctgggccgcgtgaaagtttttcttcccgagccgcagggcgcccgctgcccggaaactgcccagggataagtcggccgactccccagacccctcg

SEQ ID NO: 69064 - DNA, 201 bp, Homo sapiens
gtcaatgttttgagtcagtgcatttcaaggaacagccacaaaatacacacccctaagaaaaggcaagacttgaacgttctgaccaggtgcccctcttcttmtttgccttctcttgtcctctttctcctatttcttaccctgtcctccacctgccttccattttgaagtgggatgttaatgaaatcaagttccagtaaccca

SEQ ID NO: 69065 - DNA, 201 bp, Homo sapiens
agcggaggagacgtcgctggagccgggaggcgccgggttcggcggagcgcggagcggggctctgggccgcgtgaaagtttttcttcccgagccgcagggckcccgctgcccggaaactgcccagggataagtcggccgactccccagacccctcgaaggtgcggggacccccagcggaagcgagagggagcgaaatcgagg

SEQ ID NO: 69066 - DNA, 201 bp, Homo sapiens
accccgtcaagacactacggagagtgtacgattttgtgggactgttggtgagccccgaaatggagcagtttgccctgaacatgaccagtggctcgggctcmtcctccaagcctttcgtggtatctgcacgcaatgccacgcaggccgccaatgcctggcggaccgccctcaccttccagcagatcaaacaggtggaggagt

SEQ ID NO: 69067 - DNA, 201 bp, Homo sapiens
agagcctacaggtggtgcgcagccgagacccgcgagctcaccgcatgcccttcttggaggccgcgggccacaagcttggcgccaagaaggagggcgtgggsggccccgcagactaccacgctctgggcgctatggaggtcatctgcaatagtatggctaagacgctgcagacagccctgcagccccctgactggctgcagg

SEQ ID NO: 69068 - DNA, 201 bp, Homo sapiens; identical to SEQ ID NO: 69057

SEQ ID NO: 69069 - DNA, 201 bp, Homo sapiens; identical to SEQ ID NO: 69058

SEQ ID NO: 69070 - DNA, 201 bp, Homo sapiens; identical to SEQ ID NO: 69059

SEQ ID NO: 69071 - DNA, 173 bp, Homo sapiens; identical to SEQ ID NO: 69060

SEQ ID NO: 69072 - DNA, 201 bp, Homo sapiens; identical to SEQ ID NO: 69061

SEQ ID NO: 69073 - DNA, 201 bp, Homo sapiens; identical to SEQ ID NO: 69062

SEQ ID NO: 69074 - DNA, 201 bp, Homo sapiens; identical to SEQ ID NO: 69063

SEQ ID NO: 69075 - DNA, 201 bp, Homo sapiens; identical to SEQ ID NO: 69064

SEQ ID NO: 69076 - DNA, 201 bp, Homo sapiens; identical to SEQ ID NO: 69065

SEQ ID NO: 69077 - DNA, 201 bp, Homo sapiens; identical to SEQ ID NO: 69066

SEQ ID NO: 69078 - DNA, 201 bp, Homo sapiens; identical to SEQ ID NO: 69067

SEQ ID NO: 69079 - DNA, 201 bp, Homo sapiens; identical to SEQ ID NO: 69057

SEQ ID NO: 69080 - DNA, 201 bp, Homo sapiens; identical to SEQ ID NO: 69058

SEQ ID NO: 69081 - DNA, 201 bp, Homo sapiens; identical to SEQ ID NO: 69059

SEQ ID NO: 69082 - DNA, 173 bp, Homo sapiens; identical to SEQ ID NO: 69060

SEQ ID NO: 69083 - DNA, 201 bp, Homo sapiens; identical to SEQ ID NO: 69061

SEQ ID NO: 69084 - DNA, 201 bp, Homo sapiens; identical to SEQ ID NO: 69062

SEQ ID NO: 69085 - DNA, 201 bp, Homo sapiens; identical to SEQ ID NO: 69063

SEQ ID NO: 69086 - DNA, 201 bp, Homo sapiens; identical to SEQ ID NO: 69064

SEQ ID NO: 69087 - DNA, 201 bp, Homo sapiens; identical to SEQ ID NO: 69065

SEQ ID NO: 69088 - DNA, 201 bp, Homo sapiens; identical to SEQ ID NO: 69066

SEQ ID NO: 69089 - DNA, 201 bp, Homo sapiens; identical to SEQ ID NO: 69067

SEQ ID NO: 69090 - DNA, 201 bp, Homo sapiens
agagtctgagtcagacacttcccgagaaaacaaagttcaagcaaaaccaccgaaagttgatggagctgagttttggaaatctagtcctagtattctggccrttcagagatctgcaatcctcaagaagcagcaacagcagcagcagcaacaacaacatcaagcctcatctaatagcggatcagaagaggattcctctagcag

SEQ ID NO: 69091 - DNA, 201 bp, Homo sapiens
taaatattaaaggaactttccttacttccttccctttctcaggctttttttgactgttcctttccctaccaactcaggccttcttattaaaaaaaaaaaaatcagtgtaataacactttttaatgatttgtcttgatggaatcattgtttagaatgtaaaaatggggaaaggggccacttaattccattagtcctcttttt

SEQ ID NO: 69092 - DNA, 201 bp, Homo sapiens; identical to SEQ ID NO: 69090

SEQ ID NO: 69093 - DNA, 201 bp, Homo sapiens
aaaatgtttactattacagggacctcaacactgccctcccatacaggctggataaaactgtttttaagtcagtgattttagactgacctccatttaaattrtgtttatatatgaactttactctgacctgtgatcatgtttcaggaaggaatgaaagagagttctttcttaataaagaaaaacactcaaggactttgttca

SEQ ID NO: 69094 - DNA, 201 bp, Homo sapiens
agacattcagcatttgtaaagaaagaatgaggcctgttaaagcagctttgaaacaacttgataggcctgagaaaggcctttcagaaagagaacaactagarcatactagacaatgtttaataaaaattggagaccatatcacagaatgtctaaaagagtatacaaatcctgaacaaattaagcaatggagaaaaaacctgt

SEQ ID NO: 69095 - DNA, 201 bp, Homo sapiens
cctgcccctgctccctggggctggccacgcccacggctgtcatggtgggcaccggggtggccgcgcagaacggcatcctcatcaagggaggcaagcccctrgagatggcgcacaagataaagactgtgatgtttgacaagactggcaccattacccatggcgtccccagggtcatgcgggtgctcctgctgggggatgtgg

SEQ ID NO: 69096 - DNA, 201 bp, Homo sapiens
gatactgcacggacttccaggcagtgccaggctgtggaattgggtgcaaagtcagcaacgtggaaggcatcctggcccacagtgagcgccctttgagtgcrccggccagtcacctgaatgaggctggcagccttcccgcagaaaaagatgcagtcccccagaccttctctgtgctgattggaaaccgtgagtggctgaggc

SEQ ID NO: 69097 - DNA, 201 bp, Homo sapiens
actgcacggacttccaggcagtgccaggctgtggaattgggtgcaaagtcagcaacgtggaaggcatcctggcccacagtgagcgccctttgagtgcaccrgccagtcacctgaatgaggctggcagccttcccgcagaaaaagatgcagtcccccagaccttctctgtgctgattggaaaccgtgagtggctgaggcgca

SEQ ID NO: 69098 - DNA, 201 bp, Homo sapiens
ccacaagcattgcttatgtttattctctggtcatcctggtggttgctgtggctgagaaggcggagaggagccctgtgacattcttcgacacgccccccatkctctttgtgttcattgccctgggccggtggctggaacacttggcaaagagcaaaacctcagaagccctggctaaactcatgtctctccaagccacagaag

SEQ ID NO: 69099 - DNA, 201 bp, Homo sapiens
ccttcgcacaaggtggccaaggtccaggagctccagaataaagggaagaaagtcgccatggtgggggatggggtcaatgactccccggccttggcccaggyagacatgggtgtggccattggcaccggcacggatgtggccatcgaggcagccgacgtcgtccttatcagaaatgatttgctggatgtggtggctagcatt

SEQ ID NO: 69100 - DNA, 201 bp, Homo sapiens
ttgctttccagacgtccatcacggtgctgtgcattgcctgcccctgctccctggggctggccacgcccacggctgtcatggtgggcaccggggtggccgcrcagaacggcatcctcatcaagggaggcaagcccctggagatggcgcacaagataaagactgtgatgtttgacaagactggcaccattacccatggcgtcc

SEQ ID NO: 69101 - DNA, 201 bp, Homo sapiens
caccggcacggatgtggccatcgaggcagccgacgtcgtccttatcagaaatgatttgctggatgtggtggctagcattcacctttccaagaggactgtcygaaggatacgcatcaacctggtcctggcactgatttataacctggttgggatacccattgcagcaggtgtcttcatgcccatcggcattgtgctgcagcc

SEQ ID NO: 69102 - DNA, 201 bp, Homo sapiens
gatgtggccatcgaggcagccgacgtcgtccttatcagaaatgatttgctggatgtggtggctagcattcacctttccaagaggactgtccgaaggatacscatcaacctggtcctggcactgatttataacctggttgggatacccattgcagcaggtgtcttcatgcccatcggcattgtgctgcagccctggatgggc

SEQ ID NO: 69103 - DNA, 201 bp, Homo sapiens
ggcagccgacgtcgtccttatcagaaatgatttgctggatgtggtggctagcattcacctttccaagaggactgtccgaaggatacgcatcaacctggtcstggcactgatttataacctggttgggatacccattgcagcaggtgtcttcatgcccatcggcattgtgctgcagccctggatgggctcagcggccatggc

SEQ ID NO: 69104 - DNA, 201 bp, Homo sapiens
attgcagcaggtgtcttcatgcccatcggcattgtgctgcagccctggatgggctcagcggccatggcagcctcctctgtgtctgtggtgctctcatcccygcagctcaagtgctataagaagcctgacctggagaggtatgaggcacaggcgcatggccacatgaagcccctgacggcatcccagaactttgtcagcgag

SEQ ID NO: 69105 - DNA, 201 bp, Homo sapiens
gcaggtgtcttcatgcccatcggcattgtgctgcagccctggatgggctcagcggccatggcagcctcctctgtgtctgtggtgctctcatccctgcagcycaagtgctataagaagcctgacctggagaggtatgaggcacaggcgcatggccacatgaagcccctgacggcatcccagaactttgtcagcgagcaagaa

SEQ ID NO: 69106 - DNA, 201 bp, Homo sapiens
tcttgaatattgaagaaaatattggccagctcctaggggttcaaagtattcaagtgtccttggagaacaaaactgcccaagtaaagtatgacccttcttgwaccagcccagtggctctgcagagggctatcgaggcacttccacctgggaattttaaagtttctcttcctgatggagccgaagggagtgggacagatcaca

SEQ ID NO: 69107 - DNA, 201 bp, Homo sapiens
cctggtgtttggcatccctgtcatggccttaatgatctatatgctgatacccagcaacgagccccaccagtccatggtcctggaccacaacatcattccargactgtccattctaaatctcatcttctttatcttgtgtacctttgtccagctcctcggtgggtggtacttctacgttcaggcctacaaatctctgagaca

SEQ ID NO: 69108 - DNA, 201 bp, Homo sapiens
acgcatcaacctggtcctggcactgatttataacctggttgggatacccattgcagcaggtgtcttcatgcccatcggcattgtgctgcagccctggatgrgctcagcggccatggcagcctcctctgtgtctgtggtgctctcatccctgcagctcaagtgctataagaagcctgacctggagaggtatgaggcacaggc

SEQ ID NO: 69109 - DNA, 201 bp, Homo sapiens
cgccatggtgggggatggggtcaatgactccccggccttggcccaggcagacatgggtgtggccattggcaccggcacggatgtggccatcgaggcagccracgtcgtccttatcagaaatgatttgctggatgtggtggctagcattcacctttccaagaggactgtccgaaggatacgcatcaacctggtcctggcact

SEQ ID NO: 69110 - DNA, 201 bp, Homo sapiens
acccttggtgaggacaatttaatcatcagggaggagcaagtccccatggagctggtgcagcggggcgatatcgtcaaggtggtccctgggggaaagtttcyagtggatgggaaagtcctggaaggcaataccatggctgatgagtccctcatcacaggagaagccatgccagtcactaagaaacccggaagcactgtaatt

SEQ ID NO: 69111 - DNA, 201 bp, Homo sapiens
gtttgctttccagacgtccatcacggtgctgtgcattgcctgcccctgctccctggggctggccacgcccacggctgtcatggtgggcaccggggtggccrcgcagaacggcatcctcatcaagggaggcaagcccctggagatggcgcacaagataaagactgtgatgtttgacaagactggcaccattacccatggcgt

SEQ ID NO: 69112 - DNA, 201 bp, Homo sapiens
tgagtgcaccggccagtcacctgaatgaggctggcagccttcccgcagaaaaagatgcagtcccccagaccttctctgtgctgattggaaaccgtgagtgkctgaggcgcaacggtttaaccatttctagcgatgtcagtgacgctatgacagaccacgagatgaaaggacagacagccatcctggtggctattgacggtg

SEQ ID NO: 69113 - DNA, 201 bp, Homo sapiens
acctacatctgtgcaggaagtggctccccacactgggaggctccctgcaaaccatgccccggacatcttggcaaagtccccacaatcaaccagagcagtgkcaccgcagaagtgcttcttacagatcaaaggcatgacctgtgcatcctgtgtgtctaacatagaaaggaatctgcagaaagaagctggtgttctctccgt

SEQ ID NO: 69114 - DNA, 201 bp, Homo sapiens
tgaacaccccttgggcgtggcagtcaccaaatactgtaaagaggaacttggaacagagaccttgggatactgcacggacttccaggcagtgccaggctgtrgaattgggtgcaaagtcagcaacgtggaaggcatcctggcccacagtgagcgccctttgagtgcaccggccagtcacctgaatgaggctggcagccttcc

SEQ ID NO: 69115 - DNA, 201 bp, Homo sapiens
acaggagaagccatgccagtcactaagaaacccggaagcactgtaattgcggggtctataaatgcacatggctctgtgctcattaaagctacccacgtggkcaatgacaccactttggctcagattgtgaaactggtggaagaggctcagatgtcaaaggcacccattcagcagctggctgaccggtttagtggatatttt

SEQ ID NO: 69116 - DNA, 201 bp, Homo sapiens
atcctggtggctattgacggtgtgctctgtgggatgatcgcaatcgcagacgctgtcaagcaggaggctgccctggctgtgcacacgctgcagagcatggktgtggacgtggttctgatcacgggggacaaccggaagacagccagagctattgccacccaggttggcatcaacaaagtctttgcagaggtgctgccttcg

SEQ ID NO: 69117 - DNA, 201 bp, Homo sapiens
catcattccaggactgtccattctaaatctcatcttctttatcttgtgtacctttgtccagctcctcggtgggtggtacttctacgttcaggcctacaaayctctgagacacaggtcagccaacatggacgtgctcatcgtcctggccacaagcattgcttatgtttattctctggtcatcctggtggttgctgtggctga

SEQ ID NO: 69118 - DNA, 201 bp, Homo sapiens
caccccttgggcgtggcagtcaccaaatactgtaaagaggaacttggaacagagaccttgggatactgcacggacttccaggcagtgccaggctgtggaaytgggtgcaaagtcagcaacgtggaaggcatcctggcccacagtgagcgccctttgagtgcaccggccagtcacctgaatgaggctggcagccttcccgca

SEQ ID NO: 69119 - DNA, 201 bp, Homo sapiens
gccaacatggacgtgctcatcgtcctggccacaagcattgcttatgtttattctctggtcatcctggtggttgctgtggctgagaaggcggagaggagccytgtgacattcttcgacacgccccccatgctctttgtgttcattgccctgggccggtggctggaacacttggcaaagagcaaaacctcagaagccctggct

SEQ ID NO: 69120 - DNA, 201 bp, Homo sapiens
ctggtggaagaggctcagatgtcaaaggcacccattcagcagctggctgaccggtttagtggatattttgtcccatttatcatcatcatgtcaactttgaygttggtggtatggattgtaatcggttttatcgattttggtgttgttcagagatactttcctaaccccaacaagcacatctcccagacagaggtgatcatc

SEQ ID NO: 69121 - DNA, 201 bp, Homo sapiens
cagcagtgaacaccccttgggcgtggcagtcaccaaatactgtaaagaggaacttggaacagagaccttgggatactgcacggacttccaggcagtgccargctgtggaattgggtgcaaagtcagcaacgtggaaggcatcctggcccacagtgagcgccctttgagtgcaccggccagtcacctgaatgaggctggcag

SEQ ID NO: 69122 - DNA, 201 bp, Homo sapiens
ttgggcgtggcagtcaccaaatactgtaaagaggaacttggaacagagaccttgggatactgcacggacttccaggcagtgccaggctgtggaattgggtkcaaagtcagcaacgtggaaggcatcctggcccacagtgagcgccctttgagtgcaccggccagtcacctgaatgaggctggcagccttcccgcagaaaaa

SEQ ID NO: 69123 - DNA, 201 bp, Homo sapiens
gtggcagtcaccaaatactgtaaagaggaacttggaacagagaccttgggatactgcacggacttccaggcagtgccaggctgtggaattgggtgcaaagwcagcaacgtggaaggcatcctggcccacagtgagcgccctttgagtgcaccggccagtcacctgaatgaggctggcagccttcccgcagaaaaagatgca

SEQ ID NO: 69124 - DNA, 201 bp, Homo sapiens
ttataatccctctgtaattagcccagaagaactcagagctgctatagaagacatgggatttgaggcttcagtcgtttctgaaagctgttctactaaccctsttggaaaccacagtgctgggaattccatggtgcaaactacagatggtacacctacatctgtgcaggaagtggctccccacactgggaggctccctgcaaa

SEQ ID NO: 69125 - DNA, 201 bp, Homo sapiens
gagtccaaactcacgaggacaaatggcatcacttatgcctccgttgcccttgccaccagcaaagcccttgttaagtttgacccggaaattatcggtccacrggatattatcaaaattattgaggaaattggctttcatgcttccctggcccagagaaaccccaacgctcatcacttggaccacaagatggaaataaagcag

SEQ ID NO: 69126 - DNA, 201 bp, Homo sapiens
acttatgcctccgttgcccttgccaccagcaaagcccttgttaagtttgacccggaaattatcggtccacgggatattatcaaaattattgaggaaattgsctttcatgcttccctggcccagagaaaccccaacgctcatcacttggaccacaagatggaaataaagcagtggaagaagtctttcctgtgcagcctggtg

SEQ ID NO: 69127 - DNA, 201 bp, Homo sapiens
tttgagtgcaccggccagtcacctgaatgaggctggcagccttcccgcagaaaaagatgcagtcccccagaccttctctgtgctgattggaaaccgtgagyggctgaggcgcaacggtttaaccatttctagcgatgtcagtgacgctatgacagaccacgagatgaaaggacagacagccatcctggtggctattgacgg

SEQ ID NO: 69128 - DNA, 201 bp, Homo sapiens
attatcggtccacgggatattatcaaaattattgaggaaattggctttcatgcttccctggcccagagaaaccccaacgctcatcacttggaccacaagakggaaataaagcagtggaagaagtctttcctgtgcagcctggtgtttggcatccctgtcatggccttaatgatctatatgctgatacccagcaacgagccc

SEQ ID NO: 69129 - DNA, 201 bp, Homo sapiens
tcgcacaaggtggccaaggtccaggagctccagaataaagggaagaaagtcgccatggtgggggatggggtcaatgactccccggccttggcccaggcagrcatgggtgtggccattggcaccggcacggatgtggccatcgaggcagccgacgtcgtccttatcagaaatgatttgctggatgtggtggctagcattcac

SEQ ID NO: 69130 - DNA, 201 bp, Homo sapiens
cgggatattatcaaaattattgaggaaattggctttcatgcttccctggcccagagaaaccccaacgctcatcacttggaccacaagatggaaataaagcrgtggaagaagtctttcctgtgcagcctggtgtttggcatccctgtcatggccttaatgatctatatgctgatacccagcaacgagccccaccagtccatg

SEQ ID NO: 69131 - DNA, 201 bp, Homo sapiens
ctgctaaccagaattttaataattctgagaccttggggcaccaaggaagccatgtggtcaccctccaactgagaatagatggaatgcattgtaagtcttgmgtcttgaatattgaagaaaatattggccagctcctaggggttcaaagtattcaagtgtccttggagaacaaaactgcccaagtaaagtatgacccttctt

SEQ ID NO: 69132 - DNA, 201 bp, Homo sapiens
agcaacgagccccaccagtccatggtcctggaccacaacatcattccaggactgtccattctaaatctcatcttctttatcttgtgtacctttgtccagcycctcggtgggtggtacttctacgttcaggcctacaaatctctgagacacaggtcagccaacatggacgtgctcatcgtcctggccacaagcattgcttat

SEQ ID NO: 69133 - DNA, 201 bp, Homo sapiens
gagccccaccagtccatggtcctggaccacaacatcattccaggactgtccattctaaatctcatcttctttatcttgtgtacctttgtccagctcctcgstgggtggtacttctacgttcaggcctacaaatctctgagacacaggtcagccaacatggacgtgctcatcgtcctggccacaagcattgcttatgtttat

SEQ ID NO: 69134 - DNA, 201 bp, Homo sapiens
cgagccccaccagtccatggtcctggaccacaacatcattccaggactgtccattctaaatctcatcttctttatcttgtgtacctttgtccagctcctcvgtgggtggtacttctacgttcaggcctacaaatctctgagacacaggtcagccaacatggacgtgctcatcgtcctggccacaagcattgcttatgttta

SEQ ID NO: 69135 - DNA, 201 bp, Homo sapiens
tgtggtcaccctccaactgagaatagatggaatgcattgtaagtcttgcgtcttgaatattgaagaaaatattggccagctcctaggggttcaaagtattyaagtgtccttggagaacaaaactgcccaagtaaagtatgacccttcttgtaccagcccagtggctctgcagagggctatcgaggcacttccacctgggaa

SEQ ID NO: 69136 - DNA, 201 bp, Homo sapiens
ggcttcagtcgtttctgaaagctgttctactaaccctcttggaaaccacagtgctgggaattccatggtgcaaactacagatggtacacctacatctgtgyaggaagtggctccccacactgggaggctccctgcaaaccatgccccggacatcttggcaaagtccccacaatcaaccagagcagtggcaccgcagaagtg

SEQ ID NO: 69137 - DNA, 201 bp, Homo sapiens
ggcccttcttctcaggtggccaccagcacagtcaggatcttgggcatgacttgccagtcatgtgtgaagtccattgaggacaggatttccaatttgaaagkcatcatcagcatgaaggtttccctggaacaaggcagtgccactgtgaaatatgtgccatcggttgtgtgcctgcaacaggtttgccatcaaattggggac

SEQ ID NO: 69138 - DNA, 201 bp, Homo sapiens
gcagaaagaagctggtgttctctccgtgttggttgccttgatggcaggaaaggcagagatcaagtatgacccagaggtcatccagcccctcgagatagctyagttcatccaggacctgggttttgaggcagcagtcatggaggactacgcaggctccgatggcaacattgagctgacaatcacagggatgacctgcgcgtc

SEQ ID NO: 69139 - DNA, 201 bp, Homo sapiens
ggacaggatttccaatttgaaaggcatcatcagcatgaaggtttccctggaacaaggcagtgccactgtgaaatatgtgccatcggttgtgtgcctgcaayaggtttgccatcaaattggggacatgggcttcgaggccagcattgcagaaggaaaggcagcctcctggccctcaaggtccttgcctgcccaggaggctgt

SEQ ID NO: 69140 - DNA, 201 bp, Homo sapiens
aggaagtggctccccacactgggaggctccctgcaaaccatgccccggacatcttggcaaagtccccacaatcaaccagagcagtggcaccgcagaagtgmttcttacagatcaaaggcatgacctgtgcatcctgtgtgtctaacatagaaaggaatctgcagaaagaagctggtgttctctccgtgttggttgccttga

SEQ ID NO: 69141 - DNA, 201 bp, Homo sapiens
cggtttagtggatattttgtcccatttatcatcatcatgtcaactttgacgttggtggtatggattgtaatcggttttatcgattttggtgttgttcagaratactttcctaaccccaacaagcacatctcccagacagaggtgatcatccggtttgctttccagacgtccatcacggtgctgtgcattgcctgcccctgc

SEQ ID NO: 69142 - DNA, 201 bp, Homo sapiens
cctcatcaagggaggcaagcccctggagatggcgcacaagataaagactgtgatgtttgacaagactggcaccattacccatggcgtccccagggtcatgygggtgctcctgctgggggatgtggccacactgcccctcaggaaggttctggctgtggtggggactgcggaggccagcagtgaacaccccttgggcgtggc

SEQ ID NO: 69143 - DNA, 201 bp, Homo sapiens
gtggaagaggctcagatgtcaaaggcacccattcagcagctggctgaccggtttagtggatattttgtcccatttatcatcatcatgtcaactttgacgtwggtggtatggattgtaatcggttttatcgattttggtgttgttcagagatactttcctaaccccaacaagcacatctcccagacagaggtgatcatccgg

SEQ ID NO: 69144 - DNA, 201 bp, Homo sapiens
tcccaaatgaaggggcggttcccggacccctgtttgctttagagccgagccgcgccgatgccctcacactctgcgcctcctctcccgggactttaacaccmcgctctcctccaccgaccaggtgaccttttgctctgagccagatcagagaagaattcggtgtccgtgcgggacgatgcctgagcaggagagacagatcac

SEQ ID NO: 69145 - DNA, 201 bp, Homo sapiens
aacaaagtctttgcagaggtgctgccttcgcacaaggtggccaaggtccaggagctccagaataaagggaagaaagtcgccatggtgggggatggggtcavtgactccccggccttggcccaggcagacatgggtgtggccattggcaccggcacggatgtggccatcgaggcagccgacgtcgtccttatcagaaatgat

SEQ ID NO: 69146 - DNA, 201 bp, Homo sapiens
gatcacgggggacaaccggaagacagccagagctattgccacccaggttggcatcaacaaagtctttgcagaggtgctgccttcgcacaaggtggccaagrtccaggagctccagaataaagggaagaaagtcgccatggtgggggatggggtcaatgactccccggccttggcccaggcagacatgggtgtggccattgg

SEQ ID NO: 69147 - DNA, 201 bp, Homo sapiens
tttatcgattttggtgttgttcagagatactttcctaaccccaacaagcacatctcccagacagaggtgatcatccggtttgctttccagacgtccatcayggtgctgtgcattgcctgcccctgctccctggggctggccacgcccacggctgtcatggtgggcaccggggtggccgcgcagaacggcatcctcatcaag

SEQ ID NO: 69148 - DNA, 201 bp, Homo sapiens
ctgtgtccattccattgaaggcatgatctcccaactggaaggggtgcagcaaatatcggtgtctttggccgaagggactgcaacagttctttataatccckctgtaattagcccagaagaactcagagctgctatagaagacatgggatttgaggcttcagtcgtttctgaaagctgttctactaaccctcttggaaacca

SEQ ID NO: 69149 - DNA, 201 bp, Homo sapiens
agaaaaagatgcagtcccccagaccttctctgtgctgattggaaaccgtgagtggctgaggcgcaacggtttaaccatttctagcgatgtcagtgacgctrtgacagaccacgagatgaaaggacagacagccatcctggtggctattgacggtgtgctctgtgggatgatcgcaatcgcagacgctgtcaagcaggaggc

SEQ ID NO: 69150 - DNA, 201 bp, Homo sapiens
tgaggcttcagtcgtttctgaaagctgttctactaaccctcttggaaaccacagtgctgggaattccatggtgcaaactacagatggtacacctacatctstgcaggaagtggctccccacactgggaggctccctgcaaaccatgccccggacatcttggcaaagtccccacaatcaaccagagcagtggcaccgcagaa

SEQ ID NO: 69151 - DNA, 201 bp, Homo sapiens
cattacccatggcgtccccagggtcatgcgggtgctcctgctgggggatgtggccacactgcccctcaggaaggttctggctgtggtggggactgcggagsccagcagtgaacaccccttgggcgtggcagtcaccaaatactgtaaagaggaacttggaacagagaccttgggatactgcacggacttccaggcagtgcc

SEQ ID NO: 69152 - DNA, 201 bp, Homo sapiens
gaaaaagatgcagtcccccagaccttctctgtgctgattggaaaccgtgagtggctgaggcgcaacggtttaaccatttctagcgatgtcagtgacgctaygacagaccacgagatgaaaggacagacagccatcctggtggctattgacggtgtgctctgtgggatgatcgcaatcgcagacgctgtcaagcaggaggct

SEQ ID NO: 69153 - DNA, 201 bp, Homo sapiens
aagcacatctcccagacagaggtgatcatccggtttgctttccagacgtccatcacggtgctgtgcattgcctgcccctgctccctggggctggccacgcycacggctgtcatggtgggcaccggggtggccgcgcagaacggcatcctcatcaagggaggcaagcccctggagatggcgcacaagataaagactgtgatg

SEQ ID NO: 69154 - DNA, 201 bp, Homo sapiens
atcgtcctggccacaagcattgcttatgtttattctctggtcatcctggtggttgctgtggctgagaaggcggagaggagccctgtgacattcttcgacaygccccccatgctctttgtgttcattgccctgggccggtggctggaacacttggcaaagagcaaaacctcagaagccctggctaaactcatgtctctccaa

SEQ ID NO: 69155 - DNA, 201 bp, Homo sapiens
gtggctccccacactgggaggctccctgcaaaccatgccccggacatcttggcaaagtccccacaatcaaccagagcagtggcaccgcagaagtgcttctyacagatcaaaggcatgacctgtgcatcctgtgtgtctaacatagaaaggaatctgcagaaagaagctggtgttctctccgtgttggttgccttgatggca

SEQ ID NO: 69156 - DNA, 201 bp, Homo sapiens
cttctacgttcaggcctacaaatctctgagacacaggtcagccaacatggacgtgctcatcgtcctggccacaagcattgcttatgtttattctctggtcwtcctggtggttgctgtggctgagaaggcggagaggagccctgtgacattcttcgacacgccccccatgctctttgtgttcattgccctgggccggtggct

SEQ ID NO: 69157 - DNA, 201 bp, Homo sapiens
gtggatgggaaagtcctggaaggcaataccatggctgatgagtccctcatcacaggagaagccatgccagtcactaagaaacccggaagcactgtaattgyggggtctataaatgcacatggctctgtgctcattaaagctacccacgtgggcaatgacaccactttggctcagattgtgaaactggtggaagaggctcag

SEQ ID NO: 69158 - DNA, 201 bp, Homo sapiens
ggctattgacggtgtgctctgtgggatgatcgcaatcgcagacgctgtcaagcaggaggctgccctggctgtgcacacgctgcagagcatgggtgtggacrtggttctgatcacgggggacaaccggaagacagccagagctattgccacccaggttggcatcaacaaagtctttgcagaggtgctgccttcgcacaaggt

SEQ ID NO: 69159 - DNA, 201 bp, Homo sapiens
cctggtcctggcactgatttataacctggttgggatacccattgcagcaggtgtcttcatgcccatcggcattgtgctgcagccctggatgggctcagcgkccatggcagcctcctctgtgtctgtggtgctctcatccctgcagctcaagtgctataagaagcctgacctggagaggtatgaggcacaggcgcatggcca

SEQ ID NO: 69160 - DNA, 201 bp, Homo sapiens
cccagagaaaccccaacgctcatcacttggaccacaagatggaaataaagcagtggaagaagtctttcctgtgcagcctggtgtttggcatccctgtcatrgccttaatgatctatatgctgatacccagcaacgagccccaccagtccatggtcctggaccacaacatcattccaggactgtccattctaaatctcatct

SEQ ID NO: 69161 - DNA, 201 bp, Homo sapiens
ctcctcggtgggtggtacttctacgttcaggcctacaaatctctgagacacaggtcagccaacatggacgtgctcatcgtcctggccacaagcattgcttrtgtttattctctggtcatcctggtggttgctgtggctgagaaggcggagaggagccctgtgacattcttcgacacgccccccatgctctttgtgttcatt

SEQ ID NO: 69162 - DNA, 201 bp, Homo sapiens
tgtgaaactggtggaagaggctcagatgtcaaaggcacccattcagcagctggctgaccggtttagtggatattttgtcccatttatcatcatcatgtcamctttgacgttggtggtatggattgtaatcggttttatcgattttggtgttgttcagagatactttcctaaccccaacaagcacatctcccagacagaggt

SEQ ID NO: 69163 - DNA, 201 bp, Homo sapiens
gttggcatcaacaaagtctttgcagaggtgctgccttcgcacaaggtggccaaggtccaggagctccagaataaagggaagaaagtcgccatggtgggggmtggggtcaatgactccccggccttggcccaggcagacatgggtgtggccattggcaccggcacggatgtggccatcgaggcagccgacgtcgtccttatc

SEQ ID NO: 69164 - DNA, 201 bp, Homo sapiens
gccccaccagtccatggtcctggaccacaacatcattccaggactgtccattctaaatctcatcttctttatcttgtgtacctttgtccagctcctcggtdggtggtacttctacgttcaggcctacaaatctctgagacacaggtcagccaacatggacgtgctcatcgtcctggccacaagcattgcttatgtttattc

SEQ ID NO: 69165 - DNA, 201 bp, Homo sapiens
ccccaccagtccatggtcctggaccacaacatcattccaggactgtccattctaaatctcatcttctttatcttgtgtacctttgtccagctcctcggtgrgtggtacttctacgttcaggcctacaaatctctgagacacaggtcagccaacatggacgtgctcatcgtcctggccacaagcattgcttatgtttattct

SEQ ID NO: 69166 - DNA, 201 bp, Homo sapiens
cagtccatggtcctggaccacaacatcattccaggactgtccattctaaatctcatcttctttatcttgtgtacctttgtccagctcctcggtgggtggtrcttctacgttcaggcctacaaatctctgagacacaggtcagccaacatggacgtgctcatcgtcctggccacaagcattgcttatgtttattctctggtc

SEQ ID NO: 69167 - DNA, 201 bp, Homo sapiens
tttggcatccctgtcatggccttaatgatctatatgctgatacccagcaacgagccccaccagtccatggtcctggaccacaacatcattccaggactgtscattctaaatctcatcttctttatcttgtgtacctttgtccagctcctcggtgggtggtacttctacgttcaggcctacaaatctctgagacacaggtca

SEQ ID NO: 69168 - DNA, 201 bp, Homo sapiens
ctggtcatcctggtggttgctgtggctgagaaggcggagaggagccctgtgacattcttcgacacgccccccatgctctttgtgttcattgccctgggccdgtggctggaacacttggcaaagagcaaaacctcagaagccctggctaaactcatgtctctccaagccacagaagccaccgttgtgacccttggtgaggac

SEQ ID NO: 69169 - DNA, 201 bp, Homo sapiens
gtcatcctggtggttgctgtggctgagaaggcggagaggagccctgtgacattcttcgacacgccccccatgctctttgtgttcattgccctgggccggtrgctggaacacttggcaaagagcaaaacctcagaagccctggctaaactcatgtctctccaagccacagaagccaccgttgtgacccttggtgaggacaat

SEQ ID NO: 69170 - DNA, 201 bp, Homo sapiens
ctggtggttgctgtggctgagaaggcggagaggagccctgtgacattcttcgacacgccccccatgctctttgtgttcattgccctgggccggtggctggracacttggcaaagagcaaaacctcagaagccctggctaaactcatgtctctccaagccacagaagccaccgttgtgacccttggtgaggacaatttaatc

SEQ ID NO: 69171 - DNA, 201 bp, Homo sapiens
ctggtgcagcggggcgatatcgtcaaggtggtccctgggggaaagtttccagtggatgggaaagtcctggaaggcaataccatggctgatgagtccctcaycacaggagaagccatgccagtcactaagaaacccggaagcactgtaattgcggggtctataaatgcacatggctctgtgctcattaaagctacccacgtg

SEQ ID NO: 69172 - DNA, 201 bp, Homo sapiens
tttgctttccagacgtccatcacggtgctgtgcattgcctgcccctgctccctggggctggccacgcccacggctgtcatggtgggcaccggggtggccgygcagaacggcatcctcatcaagggaggcaagcccctggagatggcgcacaagataaagactgtgatgtttgacaagactggcaccattacccatggcgtc

SEQ ID NO: 69173 - DNA, 201 bp, Homo sapiens
tctgtgctcattaaagctacccacgtgggcaatgacaccactttggctcagattgtgaaactggtggaagaggctcagatgtcaaaggcacccattcagcrgctggctgaccggtttagtggatattttgtcccatttatcatcatcatgtcaactttgacgttggtggtatggattgtaatcggttttatcgattttggt

SEQ ID NO: 69174 - DNA, 201 bp, Homo sapiens
cattaaagctacccacgtgggcaatgacaccactttggctcagattgtgaaactggtggaagaggctcagatgtcaaaggcacccattcagcagctggctraccggtttagtggatattttgtcccatttatcatcatcatgtcaactttgacgttggtggtatggattgtaatcggttttatcgattttggtgttgttca

SEQ ID NO: 69175 - DNA, 201 bp, Homo sapiens
tgctccctggggctggccacgcccacggctgtcatggtgggcaccggggtggccgcgcagaacggcatcctcatcaagggaggcaagcccctggagatggygcacaagataaagactgtgatgtttgacaagactggcaccattacccatggcgtccccagggtcatgcgggtgctcctgctgggggatgtggccacactg

SEQ ID NO: 69176 - DNA, 201 bp, Homo sapiens
gccgcgcagaacggcatcctcatcaagggaggcaagcccctggagatggcgcacaagataaagactgtgatgtttgacaagactggcaccattacccatgkcgtccccagggtcatgcgggtgctcctgctgggggatgtggccacactgcccctcaggaaggttctggctgtggtggggactgcggaggccagcagtgaa

SEQ ID NO: 69177 - DNA, 201 bp, Homo sapiens
aacggcatcctcatcaagggaggcaagcccctggagatggcgcacaagataaagactgtgatgtttgacaagactggcaccattacccatggcgtccccarggtcatgcgggtgctcctgctgggggatgtggccacactgcccctcaggaaggttctggctgtggtggggactgcggaggccagcagtgaacaccccttg

SEQ ID NO: 69178 - DNA, 201 bp, Homo sapiens
ctcactcagcaaccaagaggccgtcatcacttatcagccttatctcattcagcccgaagacctcagggaccatgtaaatgacatgggatttgaagctgccrtcaagagcaaagtggctcccttaagcctgggaccaattgatattgagcggttacaaagcactaacccaaagagacctttatcttctgctaaccagaattt

SEQ ID NO: 69179 - DNA, 201 bp, Homo sapiens
  misc_feature (1)...(201): n = A,T,C or G
caagccacagaagccaccgttgtgacccttggtgaggacaatttaatcatcagggaggagcaagtccccatggagctggtgcagcggggcgatatcgtcanggtggtccctgggggaaagtttccagtggatgggaaagtcctggaaggcaataccatggctgatgagtccctcatcacaggagaagccatgccagtcact

SEQ ID NO: 69180 - DNA, 201 bp, Homo sapiens
ctcatcaagggaggcaagcccctggagatggcgcacaagataaagactgtgatgtttgacaagactggcaccattacccatggcgtccccagggtcatgcsggtgctcctgctgggggatgtggccacactgcccctcaggaaggttctggctgtggtggggactgcggaggccagcagtgaacaccccttgggcgtggca

SEQ ID NO: 69181 - DNA, 201 bp, Homo sapiens
gtgctctgtgggatgatcgcaatcgcagacgctgtcaagcaggaggctgccctggctgtgcacacgctgcagagcatgggtgtggacgtggttctgatcaygggggacaaccggaagacagccagagctattgccacccaggttggcatcaacaaagtctttgcagaggtgctgccttcgcacaaggtggccaaggtccag

SEQ ID NO: 69182 - DNA, 201 bp, Homo sapiens
ctccctgcaaaccatgccccggacatcttggcaaagtccccacaatcaaccagagcagtggcaccgcagaagtgcttcttacagatcaaaggcatgacctstgcatcctgtgtgtctaacatagaaaggaatctgcagaaagaagctggtgttctctccgtgttggttgccttgatggcaggaaaggcagagatcaagtat

SEQ ID NO: 69183 - DNA, 201 bp, Homo sapiens
aagggaggcaagcccctggagatggcgcacaagataaagactgtgatgtttgacaagactggcaccattacccatggcgtccccagggtcatgcgggtgcycctgctgggggatgtggccacactgcccctcaggaaggttctggctgtggtggggactgcggaggccagcagtgaacaccccttgggcgtggcagtcacc

SEQ ID NO: 69184 - DNA, 201 bp, Homo sapiens
agctattgccacccaggttggcatcaacaaagtctttgcagaggtgctgccttcgcacaaggtggccaaggtccaggagctccagaataaagggaagaaaktcgccatggtgggggatggggtcaatgactccccggccttggcccaggcagacatgggtgtggccattggcaccggcacggatgtggccatcgaggcagc

SEQ ID NO: 69185 - DNA, 201 bp, Homo sapiens
ccaggttggcatcaacaaagtctttgcagaggtgctgccttcgcacaaggtggccaaggtccaggagctccagaataaagggaagaaagtcgccatggtgrgggatggggtcaatgactccccggccttggcccaggcagacatgggtgtggccattggcaccggcacggatgtggccatcgaggcagccgacgtcgtcct

SEQ ID NO: 69186 - DNA, 201 bp, Homo sapiens
caggttggcatcaacaaagtctttgcagaggtgctgccttcgcacaaggtggccaaggtccaggagctccagaataaagggaagaaagtcgccatggtggkggatggggtcaatgactccccggccttggcccaggcagacatgggtgtggccattggcaccggcacggatgtggccatcgaggcagccgacgtcgtcctt

SEQ ID NO: 69187 - DNA, 201 bp, Homo sapiens
tttgcagaggtgctgccttcgcacaaggtggccaaggtccaggagctccagaataaagggaagaaagtcgccatggtgggggatggggtcaatgactcccyggccttggcccaggcagacatgggtgtggccattggcaccggcacggatgtggccatcgaggcagccgacgtcgtccttatcagaaatgatttgctggat

SEQ ID NO: 69188 - DNA, 201 bp, Homo sapiens
ctgtgcatcctgtgtgtctaacatagaaaggaatctgcagaaagaagctggtgttctctccgtgttggttgccttgatggcaggaaaggcagagatcaagyatgacccagaggtcatccagcccctcgagatagctcagttcatccaggacctgggttttgaggcagcagtcatggaggactacgcaggctccgatggcaa

SEQ ID NO: 69189 - DNA, 201 bp, Homo sapiens
agatactttcctaaccccaacaagcacatctcccagacagaggtgatcatccggtttgctttccagacgtccatcacggtgctgtgcattgcctgcccctrctccctggggctggccacgcccacggctgtcatggtgggcaccggggtggccgcgcagaacggcatcctcatcaagggaggcaagcccctggagatggcg

SEQ ID NO: 69190 - DNA, 201 bp, Homo sapiens
tgtgtgaagtccattgaggacaggatttccaatttgaaaggcatcatcagcatgaaggtttccctggaacaaggcagtgccactgtgaaatatgtgccatmggttgtgtgcctgcaacaggtttgccatcaaattggggacatgggcttcgaggccagcattgcagaaggaaaggcagcctcctggccctcaaggtccttg

SEQ ID NO: 69191 - DNA, 201 bp, Homo sapiens
cacactgcccctcaggaaggttctggctgtggtggggactgcggaggccagcagtgaacaccccttgggcgtggcagtcaccaaatactgtaaagaggaayttggaacagagaccttgggatactgcacggacttccaggcagtgccaggctgtggaattgggtgcaaagtcagcaacgtggaaggcatcctggcccacag

SEQ ID NO: 69192 - DNA, 201 bp, Homo sapiens
acaagcacatctcccagacagaggtgatcatccggtttgctttccagacgtccatcacggtgctgtgcattgcctgcccctgctccctggggctggccacrcccacggctgtcatggtgggcaccggggtggccgcgcagaacggcatcctcatcaagggaggcaagcccctggagatggcgcacaagataaagactgtga

SEQ ID NO: 69193 - DNA, 201 bp, Homo sapiens
tggaaggcatcctggcccacagtgagcgccctttgagtgcaccggccagtcacctgaatgaggctggcagccttcccgcagaaaaagatgcagtcccccasaccttctctgtgctgattggaaaccgtgagtggctgaggcgcaacggtttaaccatttctagcgatgtcagtgacgctatgacagaccacgagatgaaag

SEQ ID NO: 69194 - DNA, 201 bp, Homo sapiens
tcctcggtgggtggtacttctacgttcaggcctacaaatctctgagacacaggtcagccaacatggacgtgctcatcgtcctggccacaagcattgcttawgtttattctctggtcatcctggtggttgctgtggctgagaaggcggagaggagccctgtgacattcttcgacacgccccccatgctctttgtgttcattg

SEQ ID NO: 69195 - DNA, 201 bp, Homo sapiens
tgggtggtacttctacgttcaggcctacaaatctctgagacacaggtcagccaacatggacgtgctcatcgtcctggccacaagcattgcttatgtttatyctctggtcatcctggtggttgctgtggctgagaaggcggagaggagccctgtgacattcttcgacacgccccccatgctctttgtgttcattgccctggg

SEQ ID NO: 69196 - DNA, 201 bp, Homo sapiens
cgtggaaggcatcctggcccacagtgagcgccctttgagtgcaccggccagtcacctgaatgaggctggcagccttcccgcagaaaaagatgcagtccccyagaccttctctgtgctgattggaaaccgtgagtggctgaggcgcaacggtttaaccatttctagcgatgtcagtgacgctatgacagaccacgagatgaa

SEQ ID NO: 69197 - DNA, 201 bp, Homo sapiens
aaccgtgagtggctgaggcgcaacggtttaaccatttctagcgatgtcagtgacgctatgacagaccacgagatgaaaggacagacagccatcctggtggstattgacggtgtgctctgtgggatgatcgcaatcgcagacgctgtcaagcaggaggctgccctggctgtgcacacgctgcagagcatgggtgtggacgtg

SEQ ID NO: 69198 - DNA, 201 bp, Homo sapiens
gctcatcgtcctggccacaagcattgcttatgtttattctctggtcatcctggtggttgctgtggctgagaaggcggagaggagccctgtgacattcttcracacgccccccatgctctttgtgttcattgccctgggccggtggctggaacacttggcaaagagcaaaacctcagaagccctggctaaactcatgtctct

SEQ ID NO: 69199 - DNA, 201 bp, Homo sapiens
ggccacaagcattgcttatgtttattctctggtcatcctggtggttgctgtggctgagaaggcggagaggagccctgtgacattcttcgacacgccccccrtgctctttgtgttcattgccctgggccggtggctggaacacttggcaaagagcaaaacctcagaagccctggctaaactcatgtctctccaagccacaga

SEQ ID NO: 69200 - DNA, 201 bp, Homo sapiens
aaaccgtgagtggctgaggcgcaacggtttaaccatttctagcgatgtcagtgacgctatgacagaccacgagatgaaaggacagacagccatcctggtgrctattgacggtgtgctctgtgggatgatcgcaatcgcagacgctgtcaagcaggaggctgccctggctgtgcacacgctgcagagcatgggtgtggacgt

SEQ ID NO: 69201 - DNA, 201 bp, Homo sapiens
gtggctgaggcgcaacggtttaaccatttctagcgatgtcagtgacgctatgacagaccacgagatgaaaggacagacagccatcctggtggctattgacdgtgtgctctgtgggatgatcgcaatcgcagacgctgtcaagcaggaggctgccctggctgtgcacacgctgcagagcatgggtgtggacgtggttctgat

SEQ ID NO: 69202 - DNA, 201 bp, Homo sapiens
gccacaagcattgcttatgtttattctctggtcatcctggtggttgctgtggctgagaaggcggagaggagccctgtgacattcttcgacacgccccccakgctctttgtgttcattgccctgggccggtggctggaacacttggcaaagagcaaaacctcagaagccctggctaaactcatgtctctccaagccacagaa

SEQ ID NO: 69203 - DNA, 201 bp, Homo sapiens
cacaagataaagactgtgatgtttgacaagactggcaccattacccatggcgtccccagggtcatgcgggtgctcctgctgggggatgtggccacactgcycctcaggaaggttctggctgtggtggggactgcggaggccagcagtgaacaccccttgggcgtggcagtcaccaaatactgtaaagaggaacttggaaca

SEQ ID NO: 69204 - DNA, 201 bp, Homo sapiens
gtgcacacgctgcagagcatgggtgtggacgtggttctgatcacgggggacaaccggaagacagccagagctattgccacccaggttggcatcaacaaagkctttgcagaggtgctgccttcgcacaaggtggccaaggtccaggagctccagaataaagggaagaaagtcgccatggtgggggatggggtcaatgactcc

SEQ ID NO: 69205 - DNA, 201 bp, Homo sapiens
aagactggcaccattacccatggcgtccccagggtcatgcgggtgctcctgctgggggatgtggccacactgcccctcaggaaggttctggctgtggtggrgactgcggaggccagcagtgaacaccccttgggcgtggcagtcaccaaatactgtaaagaggaacttggaacagagaccttgggatactgcacggacttc

SEQ ID NO: 69206 - DNA, 201 bp, Homo sapiens
tccccggccttggcccaggcagacatgggtgtggccattggcaccggcacggatgtggccatcgaggcagccgacgtcgtccttatcagaaatgatttgcyggatgtggtggctagcattcacctttccaagaggactgtccgaaggatacgcatcaacctggtcctggcactgatttataacctggttgggatacccatt

SEQ ID NO: 69207 - DNA, 201 bp, Homo sapiens
ggcaccattacccatggcgtccccagggtcatgcgggtgctcctgctgggggatgtggccacactgcccctcaggaaggttctggctgtggtggggactgyggaggccagcagtgaacaccccttgggcgtggcagtcaccaaatactgtaaagaggaacttggaacagagaccttgggatactgcacggacttccaggca

SEQ ID NO: 69208 - DNA, 201 bp, Homo sapiens
gatttgctggatgtggtggctagcattcacctttccaagaggactgtccgaaggatacgcatcaacctggtcctggcactgatttataacctggttgggayacccattgcagcaggtgtcttcatgcccatcggcattgtgctgcagccctggatgggctcagcggccatggcagcctcctctgtgtctgtggtgctctca

SEQ ID NO: 69209 - DNA, 201 bp, Homo sapiens
gtggctagcattcacctttccaagaggactgtccgaaggatacgcatcaacctggtcctggcactgatttataacctggttgggatacccattgcagcagrtgtcttcatgcccatcggcattgtgctgcagccctggatgggctcagcggccatggcagcctcctctgtgtctgtggtgctctcatccctgcagctcaag

SEQ ID NO: 69210 - DNA, 201 bp, Homo sapiens
caccattacccatggcgtccccagggtcatgcgggtgctcctgctgggggatgtggccacactgcccctcaggaaggttctggctgtggtggggactgcgraggccagcagtgaacaccccttgggcgtggcagtcaccaaatactgtaaagaggaacttggaacagagaccttgggatactgcacggacttccaggcagt

SEQ ID NO: 69211 - DNA, 201 bp, Homo sapiens
accattacccatggcgtccccagggtcatgcgggtgctcctgctgggggatgtggccacactgcccctcaggaaggttctggctgtggtggggactgcggmggccagcagtgaacaccccttgggcgtggcagtcaccaaatactgtaaagaggaacttggaacagagaccttgggatactgcacggacttccaggcagtg

SEQ ID NO: 69212 - DNA, 201 bp, Homo sapiens
ggcgtccccagggtcatgcgggtgctcctgctgggggatgtggccacactgcccctcaggaaggttctggctgtggtggggactgcggaggccagcagtgracaccccttgggcgtggcagtcaccaaatactgtaaagaggaacttggaacagagaccttgggatactgcacggacttccaggcagtgccaggctgtgga

SEQ ID NO: 69213 - DNA, 201 bp, Homo sapiens
caagatggaaataaagcagtggaagaagtctttcctgtgcagcctggtgtttggcatccctgtcatggccttaatgatctatatgctgatacccagcaacragccccaccagtccatggtcctggaccacaacatcattccaggactgtccattctaaatctcatcttctttatcttgtgtacctttgtccagctcctcgg

SEQ ID NO: 69214 - DNA, 201 bp, Homo sapiens
gcccttgttaagtttgacccggaaattatcggtccacgggatattatcaaaattattgaggaaattggctttcatgcttccctggcccagagaaaccccarcgctcatcacttggaccacaagatggaaataaagcagtggaagaagtctttcctgtgcagcctggtgtttggcatccctgtcatggccttaatgatctat

SEQ ID NO: 69215 - DNA, 201 bp, Homo sapiens
tgtccattctaaatctcatcttctttatcttgtgtacctttgtccagctcctcggtgggtggtacttctacgttcaggcctacaaatctctgagacacagrtcagccaacatggacgtgctcatcgtcctggccacaagcattgcttatgtttattctctggtcatcctggtggttgctgtggctgagaaggcggagagga

SEQ ID NO: 69216 - DNA, 201 bp, Homo sapiens
  misc_feature (1)...(201): n = A,T,C or G
agcaacgtggaaggcatcctggcccacagtgagcgccctttgagtgcaccggccagtcacctgaatgaggctggcagccttcccgcagaaaaagatgcagncccccagaccttctctgtgctgattggaaaccgtgagtggctgaggcgcaacggtttaaccatttctagcgatgtcagtgacgctatgacagaccacgag

SEQ ID NO: 69217 - DNA, 201 bp, Homo sapiens
actgcggaggccagcagtgaacaccccttgggcgtggcagtcaccaaatactgtaaagaggaacttggaacagagaccttgggatactgcacggacttccmggcagtgccaggctgtggaattgggtgcaaagtcagcaacgtggaaggcatcctggcccacagtgagcgccctttgagtgcaccggccagtcacctgaat

SEQ ID NO: 69218 - DNA, 201 bp, Homo sapiens
agtcaggatcttgggcatgacttgccagtcatgtgtgaagtccattgaggacaggatttccaatttgaaaggcatcatcagcatgaaggtttccctggaayaaggcagtgccactgtgaaatatgtgccatcggttgtgtgcctgcaacaggtttgccatcaaattggggacatgggcttcgaggccagcattgcagaagg

SEQ ID NO: 69219 - DNA, 201 bp, Homo sapiens
gcgatgtcagtgacgctatgacagaccacgagatgaaaggacagacagccatcctggtggctattgacggtgtgctctgtgggatgatcgcaatcgcagaygctgtcaagcaggaggctgccctggctgtgcacacgctgcagagcatgggtgtggacgtggttctgatcacgggggacaaccggaagacagccagagcta

SEQ ID NO: 69220 - DNA, 201 bp, Homo sapiens
tgaggacaggatttccaatttgaaaggcatcatcagcatgaaggtttccctggaacaaggcagtgccactgtgaaatatgtgccatcggttgtgtgcctgyaacaggtttgccatcaaattggggacatgggcttcgaggccagcattgcagaaggaaaggcagcctcctggccctcaaggtccttgcctgcccaggaggc

SEQ ID NO: 69221 - DNA, 201 bp, Homo sapiens
atgaaaggacagacagccatcctggtggctattgacggtgtgctctgtgggatgatcgcaatcgcagacgctgtcaagcaggaggctgccctggctgtgcrcacgctgcagagcatgggtgtggacgtggttctgatcacgggggacaaccggaagacagccagagctattgccacccaggttggcatcaacaaagtcttt

SEQ ID NO: 69222 - DNA, 201 bp, Homo sapiens; identical to SEQ ID NO: 69098

SEQ ID NO: 69223 - DNA, 201 bp, Homo sapiens; identical to SEQ ID NO: 69100

SEQ ID NO: 69224 - DNA, 201 bp, Homo sapiens
attgcagcaggtgtcttcatgcccatcggcattgtgctgcagccctggatgggctcagcggccatggcagcctcctctgtgtctgtggtgctctcatcccygcagctcaagtgaatggctcagatgctgttgcgttcctgctttccagctataagaagcctgacctggagaggtatgaggcacaggcgcatggccacatga

SEQ ID NO: 69225 - DNA, 201 bp, Homo sapiens
gcaggtgtcttcatgcccatcggcattgtgctgcagccctggatgggctcagcggccatggcagcctcctctgtgtctgtggtgctctcatccctgcagcycaagtgaatggctcagatgctgttgcgttcctgctttccagctataagaagcctgacctggagaggtatgaggcacaggcgcatggccacatgaagcccc

SEQ ID NO: 69226 - DNA, 201 bp, Homo sapiens; identical to SEQ ID NO: 69106

SEQ ID NO: 69227 - DNA, 201 bp, Homo sapiens; identical to SEQ ID NO: 69107

SEQ ID NO: 69228 - DNA, 201 bp, Homo sapiens; identical to SEQ ID NO: 69109

SEQ ID NO: 69229 - DNA, 201 bp, Homo sapiens; identical to SEQ ID NO: 69110

SEQ ID NO: 69230 - DNA, 201 bp, Homo sapiens; identical to SEQ ID NO: 69111

SEQ ID NO: 69231 - DNA, 201 bp, Homo sapiens; identical to SEQ ID NO: 69112

SEQ ID NO: 69232 - DNA, 201 bp, Homo sapiens; identical to SEQ ID NO: 69113

SEQ ID NO: 69233 - DNA, 201 bp, Homo sapiens; identical to SEQ ID NO: 69114

SEQ ID NO: 69234 - DNA, 201 bp, Homo sapiens; identical to SEQ ID NO: 69116

SEQ ID NO: 69235 - DNA, 201 bp, Homo sapiens; identical to SEQ ID NO: 69117

SEQ ID NO: 69236 - DNA, 201 bp, Homo sapiens; identical to SEQ ID NO: 69118

SEQ ID NO: 69237 - DNA, 201 bp, Homo sapiens; identical to SEQ ID NO: 69119

SEQ ID NO: 69238 - DNA, 201 bp, Homo sapiens; identical to SEQ ID NO: 69120

SEQ ID NO: 69239 - DNA, 201 bp, Homo sapiens; identical to SEQ ID NO: 69121

SEQ ID NO: 69240 - DNA, 201 bp, Homo sapiens; identical to SEQ ID NO: 69122

SEQ ID NO: 69241 - DNA, 201 bp, Homo sapiens; identical to SEQ ID NO: 69123

SEQ ID NO: 69242 - DNA, 201 bp, Homo sapiens; identical to SEQ ID NO: 69127

SEQ ID NO: 69243 - DNA, 201 bp, Homo sapiens; identical to SEQ ID NO: 69129

SEQ ID NO: 69244 - DNA, 201 bp, Homo sapiens; identical to SEQ ID NO: 69135

SEQ ID NO: 69245 - DNA, 201 bp, Homo sapiens; identical to SEQ ID NO: 69136

SEQ ID NO: 69246 - DNA, 201 bp, Homo sapiens; identical to SEQ ID NO: 69137

SEQ ID NO: 69247 - DNA, 201 bp, Homo sapiens; identical to SEQ ID NO: 69138

SEQ ID NO: 69248 - DNA, 201 bp, Homo sapiens; identical to SEQ ID NO: 69139

SEQ ID NO: 69249 - DNA, 201 bp, Homo sapiens; identical to SEQ ID NO: 69140

SEQ ID NO: 69250 - DNA, 201 bp, Homo sapiens; identical to SEQ ID NO: 69141

SEQ ID NO: 69251 - DNA, 201 bp, Homo sapiens; identical to SEQ ID NO: 69142

SEQ ID NO: 69252 - DNA, 201 bp, Homo sapiens; identical to SEQ ID NO: 69152

SEQ ID NO: 69253 - DNA, 201 bp, Homo sapiens; identical to SEQ ID NO: 69155

SEQ ID NO: 69254 - DNA, 201 bp, Homo sapiens; identical to SEQ ID NO: 69156

SEQ ID NO: 69255 - DNA, 201 bp, Homo sapiens; identical to SEQ ID NO: 69157

SEQ ID NO: 69256 - DNA, 201 bp, Homo sapiens; identical to SEQ ID NO: 69158

SEQ ID NO: 69257 - DNA, 201 bp, Homo sapiens
cctggtcctggcactgatttataacctggttgggatacccattgcagcaggtgtcttcatgcccatcggcattgtgctgcagccctggatgggctcagcgkccatggcagcctcctctgtgtctgtggtgctctcatccctgcagctcaagtgaatggctcagatgctgttgcgttcctgctttccagctataagaagcct

SEQ ID NO: 69258 - DNA, 201 bp, Homo sapiens; identical to SEQ ID NO: 69161

SEQ ID NO: 69259 - DNA, 201 bp, Homo sapiens; identical to SEQ ID NO: 69181

SEQ ID NO: 69260 - DNA, 201 bp, Homo sapiens; identical to SEQ ID NO: 69184

SEQ ID NO: 69261 - DNA, 201 bp, Homo sapiens; identical to SEQ ID NO: 69185

SEQ ID NO: 69262 - DNA, 201 bp, Homo sapiens; identical to SEQ ID NO: 69186

SEQ ID NO: 69263 - DNA, 201 bp, Homo sapiens; identical to SEQ ID NO: 69187

SEQ ID NO: 69264 - DNA, 201 bp, Homo sapiens; identical to SEQ ID NO: 69190

SEQ ID NO: 69265 - DNA, 201 bp, Homo sapiens; identical to SEQ ID NO: 69194

SEQ ID NO: 69266 - DNA, 201 bp, Homo sapiens; identical to SEQ ID NO: 69195

SEQ ID NO: 69267 - DNA, 201 bp, Homo sapiens; identical to SEQ ID NO: 69198

SEQ ID NO: 69268 - DNA, 201 bp, Homo sapiens; identical to SEQ ID NO: 69199

SEQ ID NO: 69269 - DNA, 201 bp, Homo sapiens; identical to SEQ ID NO: 69202

SEQ ID NO: 69270 - DNA, 201 bp, Homo sapiens; identical to SEQ ID NO: 69095

SEQ ID NO: 69271 - DNA, 201 bp, Homo sapiens; identical to SEQ ID NO: 69096

SEQ ID NO: 69272 - DNA, 201 bp, Homo sapiens; identical to SEQ ID NO: 69097

SEQ ID NO: 69273 - DNA, 201 bp, Homo sapiens; identical to SEQ ID NO: 69099

SEQ ID NO: 69274 - DNA, 201 bp, Homo sapiens; identical to SEQ ID NO: 69101

SEQ ID NO: 69275 - DNA, 201 bp, Homo sapiens; identical to SEQ ID NO: 69102

SEQ ID NO: 69276 - DNA, 201 bp, Homo sapiens; identical to SEQ ID NO: 69103

SEQ ID NO: 69277 - DNA, 201 bp, Homo sapiens
acgcatcaacctggtcctggcactgatttataacctggttgggatacccattgcagcaggtgtcttcatgcccatcggcattgtgctgcagccctggatgrgctcagcggccatggcagcctcctctgtgtctgtggtgctctcatccctgcagctcaagtgaatggctcagatgctgttgcgttcctgctttccagctat

SEQ ID NO: 69278 - DNA, 201 bp, Homo sapiens; identical to SEQ ID NO: 69115

SEQ ID NO: 69279 - DNA, 201 bp, Homo sapiens; identical to SEQ ID NO: 69124

SEQ ID NO: 69280 - DNA, 201 bp, Homo sapiens; identical to SEQ ID NO: 69125

SEQ ID NO: 69281 - DNA, 201 bp, Homo sapiens; identical to SEQ ID NO: 69126

SEQ ID NO: 69282 - DNA, 201 bp, Homo sapiens; identical to SEQ ID NO: 69128

SEQ ID NO: 69283 - DNA, 201 bp, Homo sapiens; identical to SEQ ID NO: 69131

SEQ ID NO: 69284 - DNA, 201 bp, Homo sapiens; identical to SEQ ID NO: 69130

SEQ ID NO: 69285 - DNA, 201 bp, Homo sapiens; identical to SEQ ID NO: 69132

SEQ ID NO: 69286 - DNA, 201 bp, Homo sapiens; identical to SEQ ID NO: 69133

SEQ ID NO: 69287 - DNA, 201 bp, Homo sapiens; identical to SEQ ID NO: 69134

SEQ ID NO: 69288 - DNA, 201 bp, Homo sapiens
agtgtgcacataggcatggatgacaggtggcgggactcccccagggccacaccatgggaccaggtcagctatgtcagccaggtgtcgctgtcctccctgaygtccgacaagccatctcggcacagcgctgcagcagacgatgatggggacaagtggtctctgctcctgaatggcagggatgaggagcagtacatctgatga

SEQ ID NO: 69289 - DNA, 201 bp, Homo sapiens; identical to SEQ ID NO: 69143

SEQ ID NO: 69290 - DNA, 201 bp, Homo sapiens; identical to SEQ ID NO: 69144

SEQ ID NO: 69291 - DNA, 201 bp, Homo sapiens; identical to SEQ ID NO: 69145

SEQ ID NO: 69292 - DNA, 201 bp, Homo sapiens; identical to SEQ ID NO: 69148

SEQ ID NO: 69293 - DNA, 201 bp, Homo sapiens; identical to SEQ ID NO: 69147

SEQ ID NO: 69294 - DNA, 201 bp, Homo sapiens; identical to SEQ ID NO: 69146

SEQ ID NO: 69295 - DNA, 201 bp, Homo sapiens; identical to SEQ ID NO: 69150

SEQ ID NO: 69296 - DNA, 201 bp, Homo sapiens; identical to SEQ ID NO: 69149

SEQ ID NO: 69297 - DNA, 201 bp, Homo sapiens; identical to SEQ ID NO: 69153

SEQ ID NO: 69298 - DNA, 201 bp, Homo sapiens; identical to SEQ ID NO: 69151

SEQ ID NO: 69299 - DNA, 201 bp, Homo sapiens; identical to SEQ ID NO: 69154

SEQ ID NO: 69300 - DNA, 201 bp, Homo sapiens; identical to SEQ ID NO: 69160

SEQ ID NO: 69301 - DNA, 201 bp, Homo sapiens; identical to SEQ ID NO: 69162

SEQ ID NO: 69302 - DNA, 201 bp, Homo sapiens; identical to SEQ ID NO: 69164

SEQ ID NO: 69303 - DNA, 201 bp, Homo sapiens; identical to SEQ ID NO: 69163

SEQ ID NO: 69304 - DNA, 201 bp, Homo sapiens; identical to SEQ ID NO: 69165

SEQ ID NO: 69305 - DNA, 201 bp, Homo sapiens; identical to SEQ ID NO: 69166

SEQ ID NO: 69306 - DNA, 201 bp, Homo sapiens; identical to SEQ ID NO: 69168

SEQ ID NO: 69307 - DNA, 201 bp, Homo sapiens; identical to SEQ ID NO: 69167

SEQ ID NO: 69308 - DNA, 201 bp, Homo sapiens; identical to SEQ ID NO: 69169

SEQ ID NO: 69309 - DNA, 201 bp, Homo sapiens; identical to SEQ ID NO: 69170

SEQ ID NO: 69310 - DNA, 201 bp, Homo sapiens; identical to SEQ ID NO: 69171

SEQ ID NO: 69311 - DNA, 201 bp, Homo sapiens; identical to SEQ ID NO: 69173

SEQ ID NO: 69312 - DNA, 201 bp, Homo sapiens; identical to SEQ ID NO: 69172

SEQ ID NO: 69313 - DNA, 201 bp, Homo sapiens; identical to SEQ ID NO: 69174

SEQ ID NO: 69314 - DNA, 201 bp, Homo sapiens; identical to SEQ ID NO: 69175

SEQ ID NO: 69315 - DNA, 201 bp, Homo sapiens; identical to SEQ ID NO: 69176

SEQ ID NO: 69316 - DNA, 201 bp, Homo sapiens; identical to SEQ ID NO: 69178

SEQ ID NO: 69317 - DNA, 201 bp, Homo sapiens; identical to SEQ ID NO: 69177

SEQ ID NO: 69318 - DNA, 201 bp, Homo sapiens; identical to SEQ ID NO: 69179
  misc_feature (1)...(201): n = A,T,C or G

SEQ ID NO: 69319 - DNA, 201 bp, Homo sapiens; identical to SEQ ID NO: 69182

SEQ ID NO: 69320 - DNA, 201 bp, Homo sapiens; identical to SEQ ID NO: 69180

SEQ ID NO: 69321 - DNA, 201 bp, Homo sapiens; identical to SEQ ID NO: 69183

SEQ ID NO: 69322 - DNA, 201 bp, Homo sapiens; identical to SEQ ID NO: 69188

SEQ ID NO: 69323 - DNA, 201 bp, Homo sapiens; identical to SEQ ID NO: 69189

SEQ ID NO: 69324 - DNA, 201 bp, Homo sapiens; identical to SEQ ID NO: 69191

SEQ ID NO: 69325 - DNA, 201 bp, Homo sapiens; identical to SEQ ID NO: 69193

SEQ ID NO: 69326 - DNA, 201 bp, Homo sapiens; identical to SEQ ID NO: 69192

SEQ ID NO: 69327 - DNA, 201 bp, Homo sapiens; identical to SEQ ID NO: 69196

SEQ ID NO: 69328 - DNA, 201 bp, Homo sapiens; identical to SEQ ID NO: 69197

SEQ ID NO: 69329 - DNA, 201 bp, Homo sapiens; identical to SEQ ID NO: 69200

SEQ ID NO: 69330 - DNA, 201 bp, Homo sapiens; identical to SEQ ID NO: 69201

SEQ ID NO: 69331 - DNA, 201 bp, Homo sapiens; identical to SEQ ID NO: 69204

SEQ ID NO: 69332 - DNA, 201 bp, Homo sapiens; identical to SEQ ID NO: 69203

SEQ ID NO: 69333 - DNA, 201 bp, Homo sapiens; identical to SEQ ID NO: 69206

SEQ ID NO: 69334 - DNA, 201 bp, Homo sapiens; identical to SEQ ID NO: 69205

SEQ ID NO: 69335 - DNA, 201 bp, Homo sapiens; identical to SEQ ID NO: 69208

SEQ ID NO: 69336 - DNA, 201 bp, Homo sapiens; identical to SEQ ID NO: 69207

SEQ ID NO: 69337 - DNA, 201 bp, Homo sapiens; identical to SEQ ID NO: 69209

SEQ ID NO: 69338 - DNA, 201 bp, Homo sapiens; identical to SEQ ID NO: 69210

SEQ ID NO: 69339 - DNA, 201 bp, Homo sapiens; identical to SEQ ID NO: 69211

SEQ ID NO: 69340 - DNA, 201 bp, Homo sapiens; identical to SEQ ID NO: 69212

SEQ ID NO: 69341 - DNA, 201 bp, Homo sapiens; identical to SEQ ID NO: 69214

SEQ ID NO: 69342 - DNA, 201 bp, Homo sapiens; identical to SEQ ID NO: 69213

SEQ ID NO: 69343 - DNA, 201 bp, Homo sapiens; identical to SEQ ID NO: 69216
  misc_feature (1)...(201): n = A,T,C or G

SEQ ID NO: 69344 - DNA, 201 bp, Homo sapiens; identical to SEQ ID NO: 69215

SEQ ID NO: 69345 - DNA, 201 bp, Homo sapiens; identical to SEQ ID NO: 69218

SEQ ID NO: 69346 - DNA, 201 bp, Homo sapiens; identical to SEQ ID NO: 69217

SEQ ID NO: 69347 - DNA, 201 bp, Homo sapiens; identical to SEQ ID NO: 69220

SEQ ID NO: 69348 - DNA, 201 bp, Homo sapiens; identical to SEQ ID NO: 69219

SEQ ID NO: 69349 - DNA, 201 bp, Homo sapiens; identical to SEQ ID NO: 69221

SEQ ID NO: 69350 - DNA, 201 bp, Homo sapiens; identical to SEQ ID NO: 69095

SEQ ID NO: 69351 - DNA, 201 bp, Homo sapiens; identical to SEQ ID NO: 69096

SEQ ID NO: 69352 - DNA, 201 bp, Homo sapiens; identical to SEQ ID NO: 69097

SEQ ID NO: 69353 - DNA, 201 bp, Homo sapiens; identical to SEQ ID NO: 69099

SEQ ID NO: 69354 - DNA, 201 bp, Homo sapiens; identical to SEQ ID NO: 69100

SEQ ID NO: 69355 - DNA, 201 bp, Homo sapiens; identical to SEQ ID NO: 69101

SEQ ID NO: 69356 - DNA, 201 bp, Homo sapiens; identical to SEQ ID NO: 69102

SEQ ID NO: 69357 - DNA, 201 bp, Homo sapiens
attgcagcaggtgtcttcatgcccatcggcattgtgctgcagccctggatgggctcagcggccatggcagcctcctctgtgtctgtggtgctctcatcccygcagctcaagtgctataagaagcctgacctggagaggtatgaggcacaggcgcatggccacatgaagcccctgacggcatcccaggtcagtgtgcacata

SEQ ID NO: 69358 - DNA, 201 bp, Homo sapiens; identical to SEQ ID NO: 69103

SEQ ID NO: 69359 - DNA, 201 bp, Homo sapiens
gcaggtgtcttcatgcccatcggcattgtgctgcagccctggatgggctcagcggccatggcagcctcctctgtgtctgtggtgctctcatccctgcagcycaagtgctataagaagcctgacctggagaggtatgaggcacaggcgcatggccacatgaagcccctgacggcatcccaggtcagtgtgcacataggcatg

SEQ ID NO: 69360 - DNA, 201 bp, Homo sapiens; identical to SEQ ID NO: 69106

SEQ ID NO: 69361 - DNA, 201 bp, Homo sapiens; identical to SEQ ID NO: 69108

SEQ ID NO: 69362 - DNA, 201 bp, Homo sapiens; identical to SEQ ID NO: 69109

SEQ ID NO: 69363 - DNA, 201 bp, Homo sapiens; identical to SEQ ID NO: 69110

SEQ ID NO: 69364 - DNA, 201 bp, Homo sapiens; identical to SEQ ID NO: 69111

SEQ ID NO: 69365 - DNA, 201 bp, Homo sapiens; identical to SEQ ID NO: 69112

SEQ ID NO: 69366 - DNA, 201 bp, Homo sapiens; identical to SEQ ID NO: 69113

SEQ ID NO: 69367 - DNA, 201 bp, Homo sapiens; identical to SEQ ID NO: 69114

SEQ ID NO: 69368 - DNA, 201 bp, Homo sapiens
acaggagaagccatgccagtcactaagaaacccggaagcactgtaattgcggggtctataaatgcacatggctctgtgctcattaaagctacccacgtggkcaatgacaccactttggctcagattgtgaaactggtggaagaggctcagatgtcaaagaaccccaacaagcacatctcccagacagaggtgatcatccgg

SEQ ID NO: 69369 - DNA, 201 bp, Homo sapiens; identical to SEQ ID NO: 69116

SEQ ID NO: 69370 - DNA, 201 bp, Homo sapiens; identical to SEQ ID NO: 69118

SEQ ID NO: 69371 - DNA, 201 bp, Homo sapiens; identical to SEQ ID NO: 69121

SEQ ID NO: 69372 - DNA, 201 bp, Homo sapiens; identical to SEQ ID NO: 69122

SEQ ID NO: 69373 - DNA, 201 bp, Homo sapiens; identical to SEQ ID NO: 69123

SEQ ID NO: 69374 - DNA, 201 bp, Homo sapiens; identical to SEQ ID NO: 69124

SEQ ID NO: 69375 - DNA, 201 bp, Homo sapiens
gagtccaaactcacgaggacaaatggcatcacttatgcctccgttgcccttgccaccagcaaagcccttgttaagtttgacccggaaattatcggtccacrggatattatcaaaattattgagagcaaaacctcagaagccctggctaaactcatgtctctccaagccacagaagccaccgttgtgacccttggtgaggac

SEQ ID NO: 69376 - DNA, 201 bp, Homo sapiens; identical to SEQ ID NO: 69127

SEQ ID NO: 69377 - DNA, 201 bp, Homo sapiens; identical to SEQ ID NO: 69129

SEQ ID NO: 69378 - DNA, 201 bp, Homo sapiens; identical to SEQ ID NO: 69131

SEQ ID NO: 69379 - DNA, 201 bp, Homo sapiens; identical to SEQ ID NO: 69135

SEQ ID NO: 69380 - DNA, 201 bp, Homo sapiens; identical to SEQ ID NO: 69136

SEQ ID NO: 69381 - DNA, 201 bp, Homo sapiens; identical to SEQ ID NO: 69138

SEQ ID NO: 69382 - DNA, 201 bp, Homo sapiens; identical to SEQ ID NO: 69137

SEQ ID NO: 69383 - DNA, 201 bp, Homo sapiens; identical to SEQ ID NO: 69139

SEQ ID NO: 69384 - DNA, 201 bp, Homo sapiens; identical to SEQ ID NO: 69288

SEQ ID NO: 69385 - DNA, 201 bp, Homo sapiens; identical to SEQ ID NO: 69140

SEQ ID NO: 69386 - DNA, 201 bp, Homo sapiens; identical to SEQ ID NO: 69142

SEQ ID NO: 69387 - DNA, 201 bp, Homo sapiens; identical to SEQ ID NO: 69144

SEQ ID NO: 69388 - DNA, 201 bp, Homo sapiens; identical to SEQ ID NO: 69145

SEQ ID NO: 69389 - DNA, 201 bp, Homo sapiens; identical to SEQ ID NO: 69148

SEQ ID NO: 69390 - DNA, 201 bp, Homo sapiens
attgtgaaactggtggaagaggctcagatgtcaaagaaccccaacaagcacatctcccagacagaggtgatcatccggtttgctttccagacgtccatcayggtgctgtgcattgcctgcccctgctccctggggctggccacgcccacggctgtcatggtgggcaccggggtggccgcgcagaacggcatcctcatcaag

SEQ ID NO: 69391 - DNA, 201 bp, Homo sapiens; identical to SEQ ID NO: 69146

SEQ ID NO: 69392 - DNA, 201 bp, Homo sapiens; identical to SEQ ID NO: 69150

SEQ ID NO: 69393 - DNA, 201 bp, Homo sapiens; identical to SEQ ID NO: 69149

SEQ ID NO: 69394 - DNA, 201 bp, Homo sapiens; identical to SEQ ID NO: 69153

SEQ ID NO: 69395 - DNA, 201 bp, Homo sapiens; identical to SEQ ID NO: 69152

SEQ ID NO: 69396 - DNA, 201 bp, Homo sapiens; identical to SEQ ID NO: 69151

SEQ ID NO: 69397 - DNA, 201 bp, Homo sapiens; identical to SEQ ID NO: 69155

SEQ ID NO: 69398 - DNA, 201 bp, Homo sapiens; identical to SEQ ID NO: 69157

SEQ ID NO: 69399 - DNA, 201 bp, Homo sapiens; identical to SEQ ID NO: 69158

SEQ ID NO: 69400 - DNA, 201 bp, Homo sapiens; identical to SEQ ID NO: 69159

SEQ ID NO: 69401 - DNA, 201 bp, Homo sapiens; identical to SEQ ID NO: 69163

SEQ ID NO: 69402 - DNA, 201 bp, Homo sapiens; identical to SEQ ID NO: 69171

SEQ ID NO: 69403 - DNA, 201 bp, Homo sapiens; identical to SEQ ID NO: 69172

SEQ ID NO: 69404 - DNA, 201 bp, Homo sapiens; identical to SEQ ID NO: 69175

SEQ ID NO: 69405 - DNA, 201 bp, Homo sapiens; identical to SEQ ID NO: 69176

SEQ ID NO: 69406 - DNA, 201 bp, Homo sapiens; identical to SEQ ID NO: 69177

SEQ ID NO: 69407 - DNA, 201 bp, Homo sapiens; identical to SEQ ID NO: 69178

SEQ ID NO: 69408 - DNA, 201 bp, Homo sapiens; identical to SEQ ID NO: 69179
  misc_feature (1)...(201): n = A,T,C or G

SEQ ID NO: 69409 - DNA, 201 bp, Homo sapiens; identical to SEQ ID NO: 69181

SEQ ID NO: 69410 - DNA, 201 bp, Homo sapiens; identical to SEQ ID NO: 69180

SEQ ID NO: 69411 - DNA, 201 bp, Homo sapiens; identical to SEQ ID NO: 69182

SEQ ID NO: 69412 - DNA, 201 bp, Homo sapiens; identical to SEQ ID NO: 69183

SEQ ID NO: 69413 - DNA, 201 bp, Homo sapiens; identical to SEQ ID NO: 69184

SEQ ID NO: 69414 - DNA, 201 bp, Homo sapiens; identical to SEQ ID NO: 69185

SEQ ID NO: 69415 - DNA, 201 bp, Homo sapiens; identical to SEQ ID NO: 69186

SEQ ID NO: 69416 - DNA, 201 bp, Homo sapiens; identical to SEQ ID NO: 69187

SEQ ID NO: 69417 - DNA, 201 bp, Homo sapiens; identical to SEQ ID NO: 69188

SEQ ID NO: 69418 - DNA, 201 bp, Homo sapiens
cagatgtcaaagaaccccaacaagcacatctcccagacagaggtgatcatccggtttgctttccagacgtccatcacggtgctgtgcattgcctgcccctrctccctggggctggccacgcccacggctgtcatggtgggcaccggggtggccgcgcagaacggcatcctcatcaagggaggcaagcccctggagatggcg

SEQ ID NO: 69419 - DNA, 201 bp, Homo sapiens; identical to SEQ ID NO: 69190

SEQ ID NO: 69420 - DNA, 201 bp, Homo sapiens; identical to SEQ ID NO: 69191

SEQ ID NO: 69421 - DNA, 201 bp, Homo sapiens; identical to SEQ ID NO: 69192

SEQ ID NO: 69422 - DNA, 201 bp, Homo sapiens; identical to SEQ ID NO: 69193

SEQ ID NO: 69423 - DNA, 201 bp, Homo sapiens; identical to SEQ ID NO: 69196

SEQ ID NO: 69424 - DNA, 201 bp, Homo sapiens; identical to SEQ ID NO: 69197

SEQ ID NO: 69425 - DNA, 201 bp, Homo sapiens; identical to SEQ ID NO: 69200

SEQ ID NO: 69426 - DNA, 201 bp, Homo sapiens; identical to SEQ ID NO: 69201

SEQ ID NO: 69427 - DNA, 201 bp, Homo sapiens; identical to SEQ ID NO: 69203

SEQ ID NO: 69428 - DNA, 201 bp, Homo sapiens; identical to SEQ ID NO: 69204

SEQ ID NO: 69429 - DNA, 201 bp, Homo sapiens; identical to SEQ ID NO: 69205

SEQ ID NO: 69430 - DNA, 201 bp, Homo sapiens; identical to SEQ ID NO: 69206

SEQ ID NO: 69431 - DNA, 201 bp, Homo sapiens; identical to SEQ ID NO: 69207

SEQ ID NO: 69432 - DNA, 201 bp, Homo sapiens; identical to SEQ ID NO: 69208

SEQ ID NO: 69433 - DNA, 201 bp, Homo sapiens; identical to SEQ ID NO: 69209

SEQ ID NO: 69434 - DNA, 201 bp, Homo sapiens; identical to SEQ ID NO: 69210

SEQ ID NO: 69435 - DNA, 201 bp, Homo sapiens; identical to SEQ ID NO: 69211

SEQ ID NO: 69436 - DNA, 201 bp, Homo sapiens; identical to SEQ ID NO: 69212

SEQ ID NO: 69437 - DNA, 201 bp, Homo sapiens; identical to SEQ ID NO: 69216
  misc_feature (1)...(201): n = A,T,C or G

SEQ ID NO: 69438 - DNA, 201 bp, Homo sapiens; identical to SEQ ID NO: 69217

SEQ ID NO: 69439 - DNA, 201 bp, Homo sapiens; identical to SEQ ID NO: 69218

SEQ ID NO: 69440 - DNA, 201 bp, Homo sapiens; identical to SEQ ID NO: 69219

SEQ ID NO: 69441 - DNA, 201 bp, Homo sapiens; identical to SEQ ID NO: 69220

SEQ ID NO: 69442 - DNA, 201 bp, Homo sapiens; identical to SEQ ID NO: 69221

SEQ ID NO: 69443 - DNA, 201 bp, Homo sapiens; identical to SEQ ID NO: 69098

SEQ ID NO: 69444 - DNA, 201 bp, Homo sapiens; identical to SEQ ID NO: 69100

SEQ ID NO: 69445 - DNA, 201 bp, Homo sapiens; identical to SEQ ID NO: 69357

SEQ ID NO: 69446 - DNA, 201 bp, Homo sapiens; identical to SEQ ID NO: 69359

SEQ ID NO: 69447 - DNA, 201 bp, Homo sapiens; identical to SEQ ID NO: 69106

SEQ ID NO: 69448 - DNA, 201 bp, Homo sapiens; identical to SEQ ID NO: 69107

SEQ ID NO: 69449 - DNA, 201 bp, Homo sapiens; identical to SEQ ID NO: 69109

SEQ ID NO: 69450 - DNA, 201 bp, Homo sapiens; identical to SEQ ID NO: 69110

SEQ ID NO: 69451 - DNA, 201 bp, Homo sapiens; identical to SEQ ID NO: 69111

SEQ ID NO: 69452 - DNA, 201 bp, Homo sapiens; identical to SEQ ID NO: 69113

SEQ ID NO: 69453 - DNA, 201 bp, Homo sapiens; identical to SEQ ID NO: 69112

SEQ ID NO: 69454 - DNA, 201 bp, Homo sapiens; identical to SEQ ID NO: 69117

SEQ ID NO: 69455 - DNA, 201 bp, Homo sapiens; identical to SEQ ID NO: 69116

SEQ ID NO: 69456 - DNA, 201 bp, Homo sapiens; identical to SEQ ID NO: 69114

SEQ ID NO: 69457 - DNA, 201 bp, Homo sapiens; identical to SEQ ID NO: 69120

SEQ ID NO: 69458 - DNA, 201 bp, Homo sapiens; identical to SEQ ID NO: 69119

SEQ ID NO: 69459 - DNA, 201 bp, Homo sapiens; identical to SEQ ID NO: 69118

SEQ ID NO: 69460 - DNA, 201 bp, Homo sapiens; identical to SEQ ID NO: 69121

SEQ ID NO: 69461 - DNA, 201 bp, Homo sapiens; identical to SEQ ID NO: 69122

SEQ ID NO: 69462 - DNA, 201 bp, Homo sapiens; identical to SEQ ID NO: 69123

SEQ ID NO: 69463 - DNA, 201 bp, Homo sapiens; identical to SEQ ID NO: 69127

SEQ ID NO: 69464 - DNA, 201 bp, Homo sapiens; identical to SEQ ID NO: 69129

SEQ ID NO: 69465 - DNA, 201 bp, Homo sapiens; identical to SEQ ID NO: 69135

SEQ ID NO: 69466 - DNA, 201 bp, Homo sapiens; identical to SEQ ID NO: 69136

SEQ ID NO: 69467 - DNA, 201 bp, Homo sapiens; identical to SEQ ID NO: 69138

SEQ ID NO: 69468 - DNA, 201 bp, Homo sapiens; identical to SEQ ID NO: 69137

SEQ ID NO: 69469 - DNA, 201 bp, Homo sapiens; identical to SEQ ID NO: 69139

SEQ ID NO: 69470 - DNA, 201 bp, Homo sapiens; identical to SEQ ID NO: 69140

SEQ ID NO: 69471 - DNA, 201 bp, Homo sapiens; identical to SEQ ID NO: 69142

SEQ ID NO: 69472 - DNA, 201 bp, Homo sapiens; identical to SEQ ID NO: 69141

SEQ ID NO: 69473 - DNA, 201 bp, Homo sapiens; identical to SEQ ID NO: 69152

SEQ ID NO: 69474 - DNA, 201 bp, Homo sapiens; identical to SEQ ID NO: 69155

SEQ ID NO: 69475 - DNA, 201 bp, Homo sapiens; identical to SEQ ID NO: 69156

SEQ ID NO: 69476 - DNA, 201 bp, Homo sapiens; identical to SEQ ID NO: 69157

SEQ ID NO: 69477 - DNA, 201 bp, Homo sapiens; identical to SEQ ID NO: 69158

SEQ ID NO: 69478 - DNA, 201 bp, Homo sapiens; identical to SEQ ID NO: 69159

SEQ ID NO: 69479 - DNA, 201 bp, Homo sapiens; identical to SEQ ID NO: 69161

SEQ ID NO: 69480 - DNA, 201 bp, Homo sapiens; identical to SEQ ID NO: 69181

SEQ ID NO: 69481 - DNA, 201 bp, Homo sapiens; identical to SEQ ID NO: 69184

SEQ ID NO: 69482 - DNA, 201 bp, Homo sapiens; identical to SEQ ID NO: 69185

SEQ ID NO: 69483 - DNA, 201 bp, Homo sapiens; identical to SEQ ID NO: 69186

SEQ ID NO: 69484 - DNA, 201 bp, Homo sapiens; identical to SEQ ID NO: 69187

SEQ ID NO: 69485 - DNA, 201 bp, Homo sapiens; identical to SEQ ID NO: 69190

SEQ ID NO: 69486 - DNA, 201 bp, Homo sapiens; identical to SEQ ID NO: 69194

SEQ ID NO: 69487 - DNA, 201 bp, Homo sapiens; identical to SEQ ID NO: 69195

SEQ ID NO: 69488 - DNA, 201 bp, Homo sapiens; identical to SEQ ID NO: 69198

SEQ ID NO: 69489 - DNA, 201 bp, Homo sapiens; identical to SEQ ID NO: 69199

SEQ ID NO: 69490 - DNA, 201 bp, Homo sapiens; identical to SEQ ID NO: 69202

SEQ ID NO: 69491 - DNA, 201 bp, Homo sapiens; identical to SEQ ID NO: 69095

SEQ ID NO: 69492 - DNA, 201 bp, Homo sapiens; identical to SEQ ID NO: 69096

SEQ ID NO: 69493 - DNA, 201 bp, Homo sapiens; identical to SEQ ID NO: 69097

SEQ ID NO: 69494 - DNA, 201 bp, Homo sapiens; identical to SEQ ID NO: 69099

SEQ ID NO: 69495 - DNA, 201 bp, Homo sapiens; identical to SEQ ID NO: 69101

SEQ ID NO: 69496 - DNA, 201 bp, Homo sapiens; identical to SEQ ID NO: 69102

SEQ ID NO: 69497 - DNA, 201 bp, Homo sapiens; identical to SEQ ID NO: 69103

SEQ ID NO: 69498 - DNA, 201 bp, Homo sapiens; identical to SEQ ID NO: 69108

SEQ ID NO: 69499 - DNA, 201 bp, Homo sapiens
cccaaataggaggaaaacacagcctccctgagcctgcattctgcacgctgcccaggggcttcagaaaaggagtggccacagcaccccgaagggagcatctrtttacctggcagtggctctcagagcagcagaacgggttcagttttagactctgaagttggttgtgattgacagaaccctttgggagcaaactagtagagt

SEQ ID NO: 69500 - DNA, 201 bp, Homo sapiens; identical to SEQ ID NO: 69115

SEQ ID NO: 69501 - DNA, 201 bp, Homo sapiens; identical to SEQ ID NO: 69124

SEQ ID NO: 69502 - DNA, 201 bp, Homo sapiens; identical to SEQ ID NO: 69125

SEQ ID NO: 69503 - DNA, 201 bp, Homo sapiens; identical to SEQ ID NO: 69126

SEQ ID NO: 69504 - DNA, 201 bp, Homo sapiens; identical to SEQ ID NO: 69128

SEQ ID NO: 69505 - DNA, 201 bp, Homo sapiens; identical to SEQ ID NO: 69130

SEQ ID NO: 69506 - DNA, 201 bp, Homo sapiens; identical to SEQ ID NO: 69131

SEQ ID NO: 69507 - DNA, 201 bp, Homo sapiens; identical to SEQ ID NO: 69132

SEQ ID NO: 69508 - DNA, 201 bp, Homo sapiens; identical to SEQ ID NO: 69133

SEQ ID NO: 69509 - DNA, 201 bp, Homo sapiens; identical to SEQ ID NO: 69134

SEQ ID NO: 69510 - DNA, 201 bp, Homo sapiens; identical to SEQ ID NO: 69288

SEQ ID NO: 69511 - DNA, 201 bp, Homo sapiens; identical to SEQ ID NO: 69143

SEQ ID NO: 69512 - DNA, 201 bp, Homo sapiens; identical to SEQ ID NO: 69144

SEQ ID NO: 69513 - DNA, 201 bp, Homo sapiens; identical to SEQ ID NO: 69145

SEQ ID NO: 69514 - DNA, 201 bp, Homo sapiens; identical to SEQ ID NO: 69146

SEQ ID NO: 69515 - DNA, 201 bp, Homo sapiens; identical to SEQ ID NO: 69147

SEQ ID NO: 69516 - DNA, 201 bp, Homo sapiens; identical to SEQ ID NO: 69148

SEQ ID NO: 69517 - DNA, 201 bp, Homo sapiens
tggatggttagtttcactttttacatatagtttttgcagggttttattttataaaatccaagcgcgctgttgattgtgttttccttgttttcagccccccsactccagcccgcagcacatttccgctgtccgtcagtaattgtgtcctctctttatgcttgcttggggaatgttgttttctgactaggctgatcattatct

SEQ ID NO: 69518 - DNA, 201 bp, Homo sapiens; identical to SEQ ID NO: 69149

SEQ ID NO: 69519 - DNA, 201 bp, Homo sapiens; identical to SEQ ID NO: 69150

SEQ ID NO: 69520 - DNA, 201 bp, Homo sapiens; identical to SEQ ID NO: 69151

SEQ ID NO: 69521 - DNA, 201 bp, Homo sapiens; identical to SEQ ID NO: 69153

SEQ ID NO: 69522 - DNA, 201 bp, Homo sapiens; identical to SEQ ID NO: 69154

SEQ ID NO: 69523 - DNA, 201 bp, Homo sapiens; identical to SEQ ID NO: 69160

SEQ ID NO: 69524 - DNA, 201 bp, Homo sapiens; identical to SEQ ID NO: 69162

SEQ ID NO: 69525 - DNA, 201 bp, Homo sapiens; identical to SEQ ID NO: 69163

SEQ ID NO: 69526 - DNA, 201 bp, Homo sapiens; identical to SEQ ID NO: 69164

SEQ ID NO: 69527 - DNA, 201 bp, Homo sapiens; identical to SEQ ID NO: 69165

SEQ ID NO: 69528 - DNA, 201 bp, Homo sapiens; identical to SEQ ID NO: 69166

SEQ ID NO: 69529 - DNA, 201 bp, Homo sapiens; identical to SEQ ID NO: 69167

SEQ ID NO: 69530 - DNA, 201 bp, Homo sapiens; identical to SEQ ID NO: 69168

SEQ ID NO: 69531 - DNA, 201 bp, Homo sapiens; identical to SEQ ID NO: 69169

SEQ ID NO: 69532 - DNA, 201 bp, Homo sapiens; identical to SEQ ID NO: 69170

SEQ ID NO: 69533 - DNA, 201 bp, Homo sapiens; identical to SEQ ID NO: 69171

SEQ ID NO: 69534 - DNA, 201 bp, Homo sapiens; identical to SEQ ID NO: 69172

SEQ ID NO: 69535 - DNA, 201 bp, Homo sapiens; identical to SEQ ID NO: 69173

SEQ ID NO: 69536 - DNA, 201 bp, Homo sapiens; identical to SEQ ID NO: 69174

SEQ ID NO: 69537 - DNA, 201 bp, Homo sapiens; identical to SEQ ID NO: 69175

SEQ ID NO: 69538 - DNA, 201 bp, Homo sapiens; identical to SEQ ID NO: 69176

SEQ ID NO: 69539 - DNA, 201 bp, Homo sapiens; identical to SEQ ID NO: 69177

SEQ ID NO: 69540 - DNA, 201 bp, Homo sapiens; identical to SEQ ID NO: 69178

SEQ ID NO: 69541 - DNA, 201 bp, Homo sapiens; identical to SEQ ID NO: 69179
  misc_feature (1)...(201): n = A,T,C or G

SEQ ID NO: 69542 - DNA, 201 bp, Homo sapiens; identical to SEQ ID NO: 69180

SEQ ID NO: 69543 - DNA, 201 bp, Homo sapiens; identical to SEQ ID NO: 69182

SEQ ID NO: 69544 - DNA, 201 bp, Homo sapiens; identical to SEQ ID NO: 69183

SEQ ID NO: 69545 - DNA, 201 bp, Homo sapiens; identical to SEQ ID NO: 69188

SEQ ID NO: 69546 - DNA, 201 bp, Homo sapiens; identical to SEQ ID NO: 69189

SEQ ID NO: 69547 - DNA, 201 bp, Homo sapiens; identical to SEQ ID NO: 69191

SEQ ID NO: 69548 - DNA, 201 bp, Homo sapiens; identical to SEQ ID NO: 69192

SEQ ID NO: 69549 - DNA, 201 bp, Homo sapiens; identical to SEQ ID NO: 69193

SEQ ID NO: 69550 - DNA, 201 bp, Homo sapiens; identical to SEQ ID NO: 69196

SEQ ID NO: 69551 - DNA, 201 bp, Homo sapiens; identical to SEQ ID NO: 69197

SEQ ID NO: 69552 - DNA, 201 bp, Homo sapiens; identical to SEQ ID NO: 69200

SEQ ID NO: 69553 - DNA, 201 bp, Homo sapiens; identical to SEQ ID NO: 69201

SEQ ID NO: 69554 - DNA, 201 bp, Homo sapiens; identical to SEQ ID NO: 69203

SEQ ID NO: 69555 - DNA, 201 bp, Homo sapiens; identical to SEQ ID NO: 69204

SEQ ID NO: 69556 - DNA, 201 bp, Homo sapiens; identical to SEQ ID NO: 69205

SEQ ID NO: 69557 - DNA, 201 bp, Homo sapiens; identical to SEQ ID NO: 69206

SEQ ID NO: 69558 - DNA, 201 bp, Homo sapiens; identical to SEQ ID NO: 69207

SEQ ID NO: 69559 - DNA, 201 bp, Homo sapiens; identical to SEQ ID NO: 69208

SEQ ID NO: 69560 - DNA, 201 bp, Homo sapiens; identical to SEQ ID NO: 69209

SEQ ID NO: 69561 - DNA, 201 bp, Homo sapiens; identical to SEQ ID NO: 69210

SEQ ID NO: 69562 - DNA, 201 bp, Homo sapiens; identical to SEQ ID NO: 69211

SEQ ID NO: 69563 - DNA, 201 bp, Homo sapiens; identical to SEQ ID NO: 69212

SEQ ID NO: 69564 - DNA, 201 bp, Homo sapiens; identical to SEQ ID NO: 69213

SEQ ID NO: 69565 - DNA, 201 bp, Homo sapiens; identical to SEQ ID NO: 69214

SEQ ID NO: 69566 - DNA, 201 bp, Homo sapiens; identical to SEQ ID NO: 69215

SEQ ID NO: 69567 - DNA, 201 bp, Homo sapiens; identical to SEQ ID NO: 69216
  misc_feature (1)...(201): n = A,T,C or G

SEQ ID NO: 69568 - DNA, 201 bp, Homo sapiens; identical to SEQ ID NO: 69217

SEQ ID NO: 69569 - DNA, 201 bp, Homo sapiens; identical to SEQ ID NO: 69218

SEQ ID NO: 69570 - DNA, 201 bp, Homo sapiens; identical to SEQ ID NO: 69220

SEQ ID NO: 69571 - DNA, 201 bp, Homo sapiens; identical to SEQ ID NO: 69219

SEQ ID NO: 69572 - DNA, 201 bp, Homo sapiens; identical to SEQ ID NO: 69221

SEQ ID NO: 69573 - DNA, 201 bp, Homo sapiens; identical to SEQ ID NO: 69098

SEQ ID NO: 69574 - DNA, 201 bp, Homo sapiens; identical to SEQ ID NO: 69100

SEQ ID NO: 69575 - DNA, 201 bp, Homo sapiens; identical to SEQ ID NO: 69357

SEQ ID NO: 69576 - DNA, 201 bp, Homo sapiens; identical to SEQ ID NO: 69359

SEQ ID NO: 69577 - DNA, 201 bp, Homo sapiens; identical to SEQ ID NO: 69106

SEQ ID NO: 69578 - DNA, 201 bp, Homo sapiens; identical to SEQ ID NO: 69107

SEQ ID NO: 69579 - DNA, 201 bp, Homo sapiens; identical to SEQ ID NO: 69109

SEQ ID NO: 69580 - DNA, 201 bp, Homo sapiens; identical to SEQ ID NO: 69110

SEQ ID NO: 69581 - DNA, 201 bp, Homo sapiens; identical to SEQ ID NO: 69111

SEQ ID NO: 69582 - DNA, 201 bp, Homo sapiens; identical to SEQ ID NO: 69113

SEQ ID NO: 69583 - DNA, 201 bp, Homo sapiens; identical to SEQ ID NO: 69112

SEQ ID NO: 69584 - DNA, 201 bp, Homo sapiens; identical to SEQ ID NO: 69117

SEQ ID NO: 69585 - DNA, 201 bp, Homo sapiens; identical to SEQ ID NO: 69116

SEQ ID NO: 69586 - DNA, 201 bp, Homo sapiens; identical to SEQ ID NO: 69114

SEQ ID NO: 69587 - DNA, 201 bp, Homo sapiens; identical to SEQ ID NO: 69120

SEQ ID NO: 69588 - DNA, 201 bp, Homo sapiens; identical to SEQ ID NO: 69119

SEQ ID NO: 69589 - DNA, 201 bp, Homo sapiens; identical to SEQ ID NO: 69118

SEQ ID NO: 69590 - DNA, 201 bp, Homo sapiens; identical to SEQ ID NO: 69121

SEQ ID NO: 69591 - DNA, 201 bp, Homo sapiens; identical to SEQ ID NO: 69122

SEQ ID NO: 69592 - DNA, 201 bp, Homo sapiens; identical to SEQ ID NO: 69123

SEQ ID NO: 69593 - DNA, 201 bp, Homo sapiens; identical to SEQ ID NO: 69127

SEQ ID NO: 69594 - DNA, 201 bp, Homo sapiens; identical to SEQ ID NO: 69129

SEQ ID NO: 69595 - DNA, 201 bp, Homo sapiens; identical to SEQ ID NO: 69135

SEQ ID NO: 69596 - DNA, 201 bp, Homo sapiens; identical to SEQ ID NO: 69136

SEQ ID NO: 69597 - DNA, 201 bp, Homo sapiens; identical to SEQ ID NO: 69138

SEQ ID NO: 69598 - DNA, 201 bp, Homo sapiens; identical to SEQ ID NO: 69137

SEQ ID NO: 69599 - DNA, 201 bp, Homo sapiens; identical to SEQ ID NO: 69139

SEQ ID NO: 69600 - DNA, 201 bp, Homo sapiens; identical to SEQ ID NO: 69140

SEQ ID NO: 69601 - DNA, 201 bp, Homo sapiens; identical to SEQ ID NO: 69142

SEQ ID NO: 69602 - DNA, 201 bp, Homo sapiens; identical to SEQ ID NO: 69141

SEQ ID NO: 69603 - DNA, 201 bp, Homo sapiens; identical to SEQ ID NO: 69152

SEQ ID NO: 69604 - DNA, 201 bp, Homo sapiens; identical to SEQ ID NO: 69155

SEQ ID NO: 69605 - DNA, 201 bp, Homo sapiens; identical to SEQ ID NO: 69156

SEQ ID NO: 69606 - DNA, 201 bp, Homo sapiens; identical to SEQ ID NO: 69157

SEQ ID NO: 69607 - DNA, 201 bp, Homo sapiens; identical to SEQ ID NO: 69158

SEQ ID NO: 69608 - DNA, 201 bp, Homo sapiens; identical to SEQ ID NO: 69159

SEQ ID NO: 69609 - DNA, 201 bp, Homo sapiens; identical to SEQ ID NO: 69161

SEQ ID NO: 69610 - DNA, 201 bp, Homo sapiens; identical to SEQ ID NO: 69181

SEQ ID NO: 69611 - DNA, 201 bp, Homo sapiens; identical to SEQ ID NO: 69184

SEQ ID NO: 69612 - DNA, 201 bp, Homo sapiens; identical to SEQ ID NO: 69185

SEQ ID NO: 69613 - DNA, 201 bp, Homo sapiens; identical to SEQ ID NO: 69186

SEQ ID NO: 69614 - DNA, 201 bp, Homo sapiens; identical to SEQ ID NO: 69187

SEQ ID NO: 69615 - DNA, 201 bp, Homo sapiens; identical to SEQ ID NO: 69190

SEQ ID NO: 69616 - DNA, 201 bp, Homo sapiens; identical to SEQ ID NO: 69194

SEQ ID NO: 69617 - DNA, 201 bp, Homo sapiens; identical to SEQ ID NO: 69195

SEQ ID NO: 69618 - DNA, 201 bp, Homo sapiens; identical to SEQ ID NO: 69198

SEQ ID NO: 69619 - DNA, 201 bp, Homo sapiens; identical to SEQ ID NO: 69199

SEQ ID NO: 69620 - DNA, 201 bp, Homo sapiens; identical to SEQ ID NO: 69202

SEQ ID NO: 69621 - DNA, 201 bp, Homo sapiens; identical to SEQ ID NO: 69095

SEQ ID NO: 69622 - DNA, 201 bp, Homo sapiens; identical to SEQ ID NO: 69096

SEQ ID NO: 69623 - DNA, 201 bp, Homo sapiens; identical to SEQ ID NO: 69097

SEQ ID NO: 69624 - DNA, 201 bp, Homo sapiens; identical to SEQ ID NO: 69099

SEQ ID NO: 69625 - DNA, 201 bp, Homo sapiens; identical to SEQ ID NO: 69101

SEQ ID NO: 69626 - DNA, 201 bp, Homo sapiens; identical to SEQ ID NO: 69102

SEQ ID NO: 69627 - DNA, 201 bp, Homo sapiens; identical to SEQ ID NO: 69103

SEQ ID NO: 69628 - DNA, 201 bp, Homo sapiens; identical to SEQ ID NO: 69108

SEQ ID NO: 69629 - DNA, 201 bp, Homo sapiens; identical to SEQ ID NO: 69115

SEQ ID NO: 69630 - DNA, 201 bp, Homo sapiens; identical to SEQ ID NO: 69124

SEQ ID NO: 69631 - DNA, 201 bp, Homo sapiens; identical to SEQ ID NO: 69125

SEQ ID NO: 69632 - DNA, 201 bp, Homo sapiens; identical to SEQ ID NO: 69126

SEQ ID NO: 69633 - DNA, 201 bp, Homo sapiens; identical to SEQ ID NO: 69128

SEQ ID NO: 69634 - DNA, 201 bp, Homo sapiens; identical to SEQ ID NO: 69130

SEQ ID NO: 69635 - DNA, 201 bp, Homo sapiens; identical to SEQ ID NO: 69131

SEQ ID NO: 69636 - DNA, 201 bp, Homo sapiens; identical to SEQ ID NO: 69132

SEQ ID NO: 69637 - DNA, 201 bp, Homo sapiens; identical to SEQ ID NO: 69133

SEQ ID NO: 69638 - DNA, 201 bp, Homo sapiens; identical to SEQ ID NO: 69134

SEQ ID NO: 69639 - DNA, 201 bp, Homo sapiens; identical to SEQ ID NO: 69288

SEQ ID NO: 69640 - DNA, 201 bp, Homo sapiens; identical to SEQ ID NO: 69143

SEQ ID NO: 69641 - DNA, 201 bp, Homo sapiens; identical to SEQ ID NO: 69144

SEQ ID NO: 69642 - DNA, 201 bp, Homo sapiens; identical to SEQ ID NO: 69145

SEQ ID NO: 69643 - DNA, 201 bp, Homo sapiens; identical to SEQ ID NO: 69146

SEQ ID NO: 69644 - DNA, 201 bp, Homo sapiens; identical to SEQ ID NO: 69147

SEQ ID NO: 69645 - DNA, 201 bp, Homo sapiens; identical to SEQ ID NO: 69148

SEQ ID NO: 69646 - DNA, 201 bp, Homo sapiens; identical to SEQ ID NO: 69149

SEQ ID NO: 69647 - DNA, 201 bp, Homo sapiens; identical to SEQ ID NO: 69150

SEQ ID NO: 69648 - DNA, 201 bp, Homo sapiens; identical to SEQ ID NO: 69151

SEQ ID NO: 69649 - DNA, 201 bp, Homo sapiens; identical to SEQ ID NO: 69153

SEQ ID NO: 69650 - DNA, 201 bp, Homo sapiens; identical to SEQ ID NO: 69154

SEQ ID NO: 69651 - DNA, 201 bp, Homo sapiens; identical to SEQ ID NO: 69160

SEQ ID NO: 69652 - DNA, 201 bp, Homo sapiens; identical to SEQ ID NO: 69162

SEQ ID NO: 69653 - DNA, 201 bp, Homo sapiens; identical to SEQ ID NO: 69163

SEQ ID NO: 69654 - DNA, 201 bp, Homo sapiens; identical to SEQ ID NO: 69164

SEQ ID NO: 69655 - DNA, 201 bp, Homo sapiens; identical to SEQ ID NO: 69165

SEQ ID NO: 69656 - DNA, 201 bp, Homo sapiens; identical to SEQ ID NO: 69166

SEQ ID NO: 69657 - DNA, 201 bp, Homo sapiens; identical to SEQ ID NO: 69167

SEQ ID NO: 69658 - DNA, 201 bp, Homo sapiens; identical to SEQ ID NO: 69168

SEQ ID NO: 69659 - DNA, 201 bp, Homo sapiens; identical to SEQ ID NO: 69169

SEQ ID NO: 69660 - DNA, 201 bp, Homo sapiens; identical to SEQ ID NO: 69170

SEQ ID NO: 69661 - DNA, 201 bp, Homo sapiens; identical to SEQ ID NO: 69171

SEQ ID NO: 69662 - DNA, 201 bp, Homo sapiens; identical to SEQ ID NO: 69172

SEQ ID NO: 69663 - DNA, 201 bp, Homo sapiens; identical to SEQ ID NO: 69173

SEQ ID NO: 69664 - DNA, 201 bp, Homo sapiens; identical to SEQ ID NO: 69174

SEQ ID NO: 69665 - DNA, 201 bp, Homo sapiens; identical to SEQ ID NO: 69175

SEQ ID NO: 69666 - DNA, 201 bp, Homo sapiens; identical to SEQ ID NO: 69176

SEQ ID NO: 69667 - DNA, 201 bp, Homo sapiens; identical to SEQ ID NO: 69177

SEQ ID NO: 69668 - DNA, 201 bp, Homo sapiens; identical to SEQ ID NO: 69178

SEQ ID NO: 69669 - DNA, 201 bp, Homo sapiens; identical to SEQ ID NO: 69179
  misc_feature (1)...(201): n = A,T,C or G

SEQ ID NO: 69670 - DNA, 201 bp, Homo sapiens; identical to SEQ ID NO: 69180

SEQ ID NO: 69671 - DNA, 201 bp, Homo sapiens; identical to SEQ ID NO: 69182

SEQ ID NO: 69672 - DNA, 201 bp, Homo sapiens; identical to SEQ ID NO: 69183

SEQ ID NO: 69673 - DNA, 201 bp, Homo sapiens; identical to SEQ ID NO: 69188

SEQ ID NO: 69674 - DNA, 201 bp, Homo sapiens; identical to SEQ ID NO: 69189

SEQ ID NO: 69675 - DNA, 201 bp, Homo sapiens; identical to SEQ ID NO: 69191

SEQ ID NO: 69676 - DNA, 201 bp, Homo sapiens; identical to SEQ ID NO: 69192

SEQ ID NO: 69677 - DNA, 201 bp, Homo sapiens; identical to SEQ ID NO: 69193

SEQ ID NO: 69678 - DNA, 201 bp, Homo sapiens; identical to SEQ ID NO: 69196

SEQ ID NO: 69679 - DNA, 201 bp, Homo sapiens; identical to SEQ ID NO: 69197

SEQ ID NO: 69680 - DNA, 201 bp, Homo sapiens; identical to SEQ ID NO: 69200

SEQ ID NO: 69681 - DNA, 201 bp, Homo sapiens; identical to SEQ ID NO: 69201

SEQ ID NO: 69682 - DNA, 201 bp, Homo sapiens; identical to SEQ ID NO: 69203

SEQ ID NO: 69683 - DNA, 201 bp, Homo sapiens; identical to SEQ ID NO: 69204

SEQ ID NO: 69684 - DNA, 201 bp, Homo sapiens; identical to SEQ ID NO: 69205

SEQ ID NO: 69685 - DNA, 201 bp, Homo sapiens; identical to SEQ ID NO: 69206

SEQ ID NO: 69686 - DNA, 201 bp, Homo sapiens; identical to SEQ ID NO: 69207

SEQ ID NO: 69687 - DNA, 201 bp, Homo sapiens; identical to SEQ ID NO: 69208

SEQ ID NO: 69688 - DNA, 201 bp, Homo sapiens; identical to SEQ ID NO: 69209

SEQ ID NO: 69689 - DNA, 201 bp, Homo sapiens; identical to SEQ ID NO: 69210

SEQ ID NO: 69690 - DNA, 201 bp, Homo sapiens; identical to SEQ ID NO: 69211

SEQ ID NO: 69691 - DNA, 201 bp, Homo sapiens; identical to SEQ ID NO: 69212

SEQ ID NO: 69692 - DNA, 201 bp, Homo sapiens; identical to SEQ ID NO: 69213

SEQ ID NO: 69693 - DNA, 201 bp, Homo sapiens; identical to SEQ ID NO: 69214

SEQ ID NO: 69694 - DNA, 201 bp, Homo sapiens; identical to SEQ ID NO: 69215

SEQ ID NO: 69695 - DNA, 201 bp, Homo sapiens; identical to SEQ ID NO: 69216
  misc_feature (1)...(201): n = A,T,C or G

SEQ ID NO: 69696 - DNA, 201 bp, Homo sapiens; identical to SEQ ID NO: 69217

SEQ ID NO: 69697 - DNA, 201 bp, Homo sapiens; identical to SEQ ID NO: 69218

SEQ ID NO: 69698 - DNA, 201 bp, Homo sapiens; identical to SEQ ID NO: 69219

SEQ ID NO: 69699 - DNA, 201 bp, Homo sapiens; identical to SEQ ID NO: 69220

SEQ ID NO: 69700 - DNA, 201 bp, Homo sapiens; identical to SEQ ID NO: 69221

SEQ ID NO: 69701 - DNA, 201 bp, Homo sapiens
acgaagagaaatgatgcctgtagcatggcaaagtcggactacactcaaacttcaaggccagatgatctggatggagtccatgtggtgcatggtgtacctgygctctccgaagctccgcagcctgcaagagctggaagaactcaatatgcatctttctgacatcgccccccacgacaccaccagggatctcatcctcctgaa

SEQ ID NO: 69702 - DNA, 201 bp, Homo sapiens
cttctcttgcatcctggttattatgacgttctttgagctgggccgatagatccagctgaagagttctacatacattagtcttcaaggttcttctctgggcrtttcccatgcagctctctggtagctggggaatgatttgtaatgagtacatgaaacacgttaaatgtccttcagcctccctaccacgacatccaacagctg

SEQ ID NO: 69703 - DNA, 201 bp, Homo sapiens
agagaaatgatgcctgtagcatggcaaagtcggactacactcaaacttcaaggccagatgatctggatggagtccatgtggtgcatggtgtacctgtgctytccgaagctccgcagcctgcaagagctggaagaactcaatatgcatctttctgacatcgccccccacgacaccaccagggatctcatcctcctgaaccag

SEQ ID NO: 69704 - DNA, 201 bp, Homo sapiens
tgcacgattcttttcagcgatgtagtgacatttactaacatctgtactgcctgtgaacctatacaaatagtgaacgtgctgaattccatgtactccaagtktgacagattaaccagtgtgcacgcagtctataaagtagaaacaataggagatgcttatatggtggtaggaggtgtaccagtgcctattggaaaccatgct

SEQ ID NO: 69705 - DNA, 201 bp, Homo sapiens
ctggatgccctccacagttacctggcactctcttatcaggagatgaatgcaccatcgtttcgtgtggagagaggagcagatgggaaaatgtttctccattrctactcggatagaagtggtctgtgccacattgtaccaggtatcattgaggctgtggccaaagacttctttgatattgatgtaatcatggacattcttgac

SEQ ID NO: 69706 - DNA, 201 bp, Homo sapiens
gatggagtccatgtggtgcatggtgtacctgtgctctccgaagctccgcagcctgcaagagctggaagaactcaatatgcatctttctgacatcgcccccmacgacaccaccagggatctcatcctcctgaaccagcagcggctggctgagatagagctgtccaaccagctggaaaggaagaaggaggagctacaggtcct

SEQ ID NO: 69707 - DNA, 201 bp, Homo sapiens
aatagtgaacgtgctgaattccatgtactccaagtttgacagattaaccagtgtgcacgcagtctataaagtagaaacaataggagatgcttatatggtgrtaggaggtgtaccagtgcctattggaaaccatgctcaaagagtggctaattttgccttggggatgagaatttctgcaaaggaagtgacgaatcctgttac

SEQ ID NO: 69708 - DNA, 193 bp, Homo sapiens
gtctacagctcccagcgtgagcgacgcagaagacgggtgatttctgcatttccatctgaggtgactgaggacccaacagtgtgctccttgctyggaggctagtgatgagctcctaatttcactgtggactgcccagatttctacaagacaggcttctggagacgctgtggattctctcctgagtgactagggg

SEQ ID NO: 69709 - DNA, 201 bp, Homo sapiens
gcagatttatcaacagtcaatttgtcctgaagacacgaagagaaatgatgcctgtagcatggcaaagtcggactacactcaaacttcaaggccagatgatytggatggagtccatgtggtgcatggtgtacctgtgctctccgaagctccgcagcctgcaagagctggaagaactcaatatgcatctttctgacatcgccc

SEQ ID NO: 69710 - DNA, 201 bp, Homo sapiens
ctcacggttttttgcagaagcaagtgctcagggaaatgaagacaggagaactgctgccgtcatgagctatgccgacagtcagcagctgatccccgacagaracgcagcagatgcagacgctcctgatgaaatcatccctgtggggagtgcagggccagatggggactccatggagacagccgaccggcgacagccttcagc

SEQ ID NO: 69711 - DNA, 200 bp, Homo sapiens
gtctacagctcccagcgtgagcgacgcagaagacgggtgatttctgcatttccatctgaggtgactgaggacccaacagtgtgctccttgcttggaggcyagtgatgagctcctaatttcactgtggactgcccagatttctacaagacaggcttctggagacgctgtggattctctcctgagtgactaggggctggcag

SEQ ID NO: 69712 - DNA, 201 bp, Homo sapiens
tcattgagaggggtgaaattgaagtgaaaggtaaagggagaatgaccacatactttttgatccagaacttgaatgccacagaggatgagatcatggggagrtctaaaaccccagttgatcacaaggggtcaacacagaaagcatccttgcccaccaccaagctccagggctcagttcaaccatcttgccctgaacactctt

SEQ ID NO: 69713 - DNA, 201 bp, Homo sapiens
ggacagggaagaaggagcatgttgtgtttctgattgtacagaaggctcacaggaagatgagaaagacaaagccaaaaaggttacaagacagtcagggcatsgagagagaccaagaggccctccaggcagctttcctcaagatgaaggagaaatatttgaatgtctctgcttgtcctgtgaaaaaatcccactgggatgttg

SEQ ID NO: 69714 - DNA, 201 bp, Homo sapiens
atccttgcccaccaccaagctccagggctcagttcaaccatcttgccctgaacactcttctcttgcatcctggttattatgacgttctttgagctgggccratagatccagctgaagagttctacatacattagtcttcaaggttcttctctgggcgtttcccatgcagctctctggtagctggggaatgatttgtaatga

SEQ ID NO: 69715 - DNA, 201 bp, Homo sapiens
aaggtaaagggagaatgaccacatactttttgatccagaacttgaatgccacagaggatgagatcatggggagatctaaaaccccagttgatcacaagggktcaacacagaaagcatccttgcccaccaccaagctccagggctcagttcaaccatcttgccctgaacactcttctcttgcatcctggttattatgacgtt

SEQ ID NO: 69716 - DNA, 201 bp, Homo sapiens
aggagatgaatgcaccatcgtttcgtgtggagagaggagcagatgggaaaatgtttctccattgctactcggatagaagtggtctgtgccacattgtaccrggtatcattgaggctgtggccaaagacttctttgatattgatgtaatcatggacattcttgacatgaatgaagaagtggagaggacagggaagaaggagc

SEQ ID NO: 69717 - DNA, 201 bp, Homo sapiens
attcttgacatgaatgaagaagtggagaggacagggaagaaggagcatgttgtgtttctgattgtacagaaggctcacaggaagatgagaaagacaaagcyaaaaaggttacaagacagtcagggcatggagagagaccaagaggccctccaggcagctttcctcaagatgaaggagaaatatttgaatgtctctgcttgt

SEQ ID NO: 69718 - DNA, 201 bp, Homo sapiens; identical to SEQ ID NO: 69701

SEQ ID NO: 69719 - DNA, 201 bp, Homo sapiens; identical to SEQ ID NO: 69702

SEQ ID NO: 69720 - DNA, 201 bp, Homo sapiens; identical to SEQ ID NO: 69703

SEQ ID NO: 69721 - DNA, 201 bp, Homo sapiens; identical to SEQ ID NO: 69704

SEQ ID NO: 69722 - DNA, 201 bp, Homo sapiens; identical to SEQ ID NO: 69705

SEQ ID NO: 69723 - DNA, 201 bp, Homo sapiens; identical to SEQ ID NO: 69706

SEQ ID NO: 69724 - DNA, 201 bp, Homo sapiens; identical to SEQ ID NO: 69707

SEQ ID NO: 69725 - DNA, 133 bp, Homo sapiens
gtgactgaggacccaacagtgtgctccttgctyggaggctagtgatgagctcctaatttcactgtggactgcccagatttctacaagacaggcttctggagacgctgtggattctctcctgagtgactagggg

SEQ ID NO: 69726 - DNA, 201 bp, Homo sapiens; identical to SEQ ID NO: 69709

SEQ ID NO: 69727 - DNA, 201 bp, Homo sapiens; identical to SEQ ID NO: 69710

SEQ ID NO: 69728 - DNA, 140 bp, Homo sapiens
gtgactgaggacccaacagtgtgctccttgcttggaggcyagtgatgagctcctaatttcactgtggactgcccagatttctacaagacaggcttctggagacgctgtggattctctcctgagtgactaggggctggcag

SEQ ID NO: 69729 - DNA, 201 bp, Homo sapiens; identical to SEQ ID NO: 69712

SEQ ID NO: 69730 - DNA, 201 bp, Homo sapiens; identical to SEQ ID NO: 69713

SEQ ID NO: 69731 - DNA, 201 bp, Homo sapiens; identical to SEQ ID NO: 69714

SEQ ID NO: 69732 - DNA, 201 bp, Homo sapiens; identical to SEQ ID NO: 69715

SEQ ID NO: 69733 - DNA, 201 bp, Homo sapiens; identical to SEQ ID NO: 69716

SEQ ID NO: 69734 - DNA, 201 bp, Homo sapiens; identical to SEQ ID NO: 69717

SEQ ID NO: 69735 - DNA, 201 bp, Homo sapiens
ccctgcggccccgcctcgtgttccacacccagctggcccatggcagtcccactggccgcatcgagggcttcaccaacgtcaaggagctgtatggcaagatygccgaggccttccgcctgccaactgccgaggtgatgttctgcaccctgaacacccacaaagtggacatggacaagctcctggggggccagatcgggctgg

SEQ ID NO: 69736 - DNA, 201 bp, Homo sapiens
tgagctggccgaggccctggacgaacggctgggtgactttgccttccctgacgagttcgtctttgacgtctggggcgccattggggacgccaaggtcggcygctactaggactgcccccggaccctgcgatgatgacccgggcgcaacctggtgggggcccccagcagggacactgacgtcaggacccgagcctccagcct

SEQ ID NO: 69737 - DNA, 201 bp, Homo sapiens
gccattggggacgccaaggtcggccgctactaggactgcccccggaccctgcgatgatgacccgggcgcaacctggtgggggcccccagcagggacactgwcgtcaggacccgagcctccagcctgagcctagctcagcagcccaaggacgatggtgaggggaggtggggccaggccccctgccccgctccaatcggtacc

SEQ ID NO: 69738 - DNA, 201 bp, Homo sapiens
cgtaccttcacgctgaagctcacggagcctcgcaaggccttcgacatgatcagccagcgttcagcgggtggccgccctggctctggcccacaactgggcastggccgagggaccctgcggctccgatcccggggccccgccacggtggaggatctgccctctgcctttgaagagaaggccattgagaaggtggatgacctg

SEQ ID NO: 69739 - DNA, 201 bp, Homo sapiens
atggcaagatcgccgaggccttccgcctgccaactgccgaggtgatgttctgcaccctgaacacccacaaagtggacatggacaagctcctggggggccaratcgggctggaggacttcatcttcgcccacgtgaaggggcagcgcaaggaggtggaggtgttcaagtcggaggatgcactcgggctcaccatcacggaca

SEQ ID NO: 69740 - DNA, 201 bp, Homo sapiens
gttcccagtctggccggggtccccggcccccctgtgccctgttccccacctacctcagctgggtcaggcacagggaggggagggatcagccaaattgggcrgccacccccgcctccaccactttccaccatcagctgccaaactggtccctctgtctccctggggccttgggttctgtttgggggtcatgaccttcctagt

SEQ ID NO: 69741 - DNA, 201 bp, Homo sapiens
tgcaccctgaacacccacaaagtggacatggacaagctcctggggggccagatcgggctggaggacttcatcttcgcccacgtgaaggggcagcgcaaggmggtggaggtgttcaagtcggaggatgcactcgggctcaccatcacggacaacggggctggctacgccttcatcaagcgcatcaaggagggcagcgtgatc

SEQ ID NO: 69742 - DNA, 201 bp, Homo sapiens
ccacggtggaggatctgccctctgcctttgaagagaaggccattgagaaggtggatgacctgctggagagttacatgggtatcagggacacggagctggcrgccaccatggtggagctgggaaaggacaaaaggaacccggatgagctggccgaggccctggacgaacggctgggtgactttgccttccctgacgagttcg

SEQ ID NO: 69743 - DNA, 201 bp, Homo sapiens
acatgatcagccagcgttcagcgggtggccgccctggctctggcccacaactgggcactggccgagggaccctgcggctccgatcccggggccccgccacrgtggaggatctgccctctgcctttgaagagaaggccattgagaaggtggatgacctgctggagagttacatgggtatcagggacacggagctggcggcca

SEQ ID NO: 69744 - DNA, 201 bp, Homo sapiens
gcccccaaatgggcttgcccccccctcccccagccctgcggccccgcctcgtgttccacacccagctggcccatggcagtcccactggccgcatcgagggsttcaccaacgtcaaggagctgtatggcaagatcgccgaggccttccgcctgccaactgccgaggtgatgttctgcaccctgaacacccacaaagtggaca

SEQ ID NO: 69745 - DNA, 201 bp, Homo sapiens; identical to SEQ ID NO: 69735

SEQ ID NO: 69746 - DNA, 201 bp, Homo sapiens; identical to SEQ ID NO: 69736

SEQ ID NO: 69747 - DNA, 201 bp, Homo sapiens; identical to SEQ ID NO: 69737

SEQ ID NO: 69748 - DNA, 201 bp, Homo sapiens; identical to SEQ ID NO: 69738

SEQ ID NO: 69749 - DNA, 201 bp, Homo sapiens; identical to SEQ ID NO: 69739

SEQ ID NO: 69750 - DNA, 201 bp, Homo sapiens; identical to SEQ ID NO: 69740

SEQ ID NO: 69751 - DNA, 201 bp, Homo sapiens; identical to SEQ ID NO: 69741

SEQ ID NO: 69752 - DNA, 201 bp, Homo sapiens; identical to SEQ ID NO: 69742

SEQ ID NO: 69753 - DNA, 201 bp, Homo sapiens; identical to SEQ ID NO: 69743

SEQ ID NO: 69754 - DNA, 201 bp, Homo sapiens; identical to SEQ ID NO: 69744

SEQ ID NO: 69755 - DNA, 201 bp, Homo sapiens; identical to SEQ ID NO: 69735

SEQ ID NO: 69756 - DNA, 201 bp, Homo sapiens; identical to SEQ ID NO: 69736

SEQ ID NO: 69757 - DNA, 201 bp, Homo sapiens; identical to SEQ ID NO: 69737

SEQ ID NO: 69758 - DNA, 201 bp, Homo sapiens; identical to SEQ ID NO: 69738

SEQ ID NO: 69759 - DNA, 201 bp, Homo sapiens; identical to SEQ ID NO: 69739

SEQ ID NO: 69760 - DNA, 201 bp, Homo sapiens; identical to SEQ ID NO: 69740

SEQ ID NO: 69761 - DNA, 201 bp, Homo sapiens; identical to SEQ ID NO: 69741

SEQ ID NO: 69762 - DNA, 201 bp, Homo sapiens; identical to SEQ ID NO: 69742

SEQ ID NO: 69763 - DNA, 201 bp, Homo sapiens; identical to SEQ ID NO: 69743

SEQ ID NO: 69764 - DNA, 201 bp, Homo sapiens; identical to SEQ ID NO: 69744

SEQ ID NO: 69765 - DNA, 201 bp, Homo sapiens
ccctgcggccccgcctcgtgttccacacccagctggcccatggcagtcccactggccgcatcgagggcttcaccaacgtcaaggagctgtatggcaagatygccgaggccttccgcctgccaactgccgagcgtctcccacccctgcaggtgatgttctgcaccctgaacacccacaaagtggacatggacaagctcctgg

SEQ ID NO: 69766 - DNA, 201 bp, Homo sapiens; identical to SEQ ID NO: 69736

SEQ ID NO: 69767 - DNA, 201 bp, Homo sapiens; identical to SEQ ID NO: 69737

SEQ ID NO: 69768 - DNA, 201 bp, Homo sapiens; identical to SEQ ID NO: 69738

SEQ ID NO: 69769 - DNA, 201 bp, Homo sapiens
ccttccgcctgccaactgccgagcgtctcccacccctgcaggtgatgttctgcaccctgaacacccacaaagtggacatggacaagctcctggggggccaratcgggctggaggacttcatcttcgcccacgtgaaggggcagcgcaaggaggtggaggtgttcaagtcggaggatgcactcgggctcaccatcacggaca

SEQ ID NO: 69770 - DNA, 201 bp, Homo sapiens; identical to SEQ ID NO: 69740

SEQ ID NO: 69771 - DNA, 201 bp, Homo sapiens; identical to SEQ ID NO: 69741

SEQ ID NO: 69772 - DNA, 201 bp, Homo sapiens; identical to SEQ ID NO: 69742

SEQ ID NO: 69773 - DNA, 201 bp, Homo sapiens; identical to SEQ ID NO: 69743

SEQ ID NO: 69774 - DNA, 201 bp, Homo sapiens
gcccccaaatgggcttgcccccccctcccccagccctgcggccccgcctcgtgttccacacccagctggcccatggcagtcccactggccgcatcgagggsttcaccaacgtcaaggagctgtatggcaagatcgccgaggccttccgcctgccaactgccgagcgtctcccacccctgcaggtgatgttctgcaccctga

SEQ ID NO: 69775 - DNA, 201 bp, Homo sapiens
tggccgtgtcagcgccgggccgcgtcaacctcatcggggaacacacggactacaaccagggcctggtgctgcctatggctctggagctcatgacggtgctrgtgggcagcccccgcaaggatgggctggtgtctctcctcaccacctctgagggtgccgatgagccccagcggctgcagtttccactgcccacagcccagc

SEQ ID NO: 69776 - DNA, 201 bp, Homo sapiens
ctccgggaggtacaactggaagagctagaggctgccagggacctggtgagcaaagagggcttccggcgggcccggcacgtggtgggggagattcggcgcayggcccaggcagcggccgccctgagacgtggcgactacagagcctttggccgcctcatggtggagagccaccgctcactcagagacgactatgaggtgagc

SEQ ID NO: 69777 - DNA, 201 bp, Homo sapiens
gcccgcgcccaggtgtgtcagcaggccgagcacagcttcgcagggatgccctgtggcatcatggaccagttcatctcacttatgggacagaaaggccacgygctgctcattgactgcaggtccttggagaccagcctggtgccactctcggaccccaagctggccgtgctcatcaccaactctaatgtccgccactccctg

SEQ ID NO: 69778 - DNA, 201 bp, Homo sapiens
gtggagagccaccgctcactcagagacgactatgaggtgagctgcccagagctggaccagctggtggaggctgcgcttgctgtgcctggggtttatggcasccgcatgacgggcggtggcttcggtggctgcacggtgacactgctggaggcctccgctgctccccacgccatgcggcacatccaggagcactacggcggg

SEQ ID NO: 69779 - DNA, 201 bp, Homo sapiens
caccgctcactcagagacgactatgaggtgagctgcccagagctggaccagctggtggaggctgcgcttgctgtgcctggggtttatggcagccgcatgaygggcggtggcttcggtggctgcacggtgacactgctggaggcctccgctgctccccacgccatgcggcacatccaggagcactacggcgggactgccacc

SEQ ID NO: 69780 - DNA, 182 bp, Homo sapiens
ggcgggactgccaccttctacctctctcaagcagccgatggagccaaggtgctgtgcttgtgaggcacccccaggacagcacacggtgagggtgcggggcytgcaggccagtcccacggctctgtgcccggtgccatcttccatatccgggtgctcaataaacttgtgcctccaatgtggta

SEQ ID NO: 69781 - DNA, 201 bp, Homo sapiens
tggcgggaatgtgcgcacccccgcgcggggccccgcccgagcatcccgcgccgacggggctgtgccggagcagctgtgcagagctgcaggcgcgcgtcatkgctgctttgagacagccccaggtcgcggagctgctggccgaggcccggcgagccttccgggaggagttcggggccgagcccgagctggccgtgtcagcgc

SEQ ID NO: 69782 - DNA, 201 bp, Homo sapiens
agagctgcaggcgcgcgtcatggctgctttgagacagccccaggtcgcggagctgctggccgaggcccggcgagccttccgggaggagttcggggccgagmccgagctggccgtgtcagcgccgggccgcgtcaacctcatcggggaacacacggactacaaccagggcctggtgctgcctatggctctggagctcatgac

SEQ ID NO: 69783 - DNA, 201 bp, Homo sapiens
gccgggccgcgtcaacctcatcggggaacacacggactacaaccagggcctggtgctgcctatggctctggagctcatgacggtgctggtgggcagccccygcaaggatgggctggtgtctctcctcaccacctctgagggtgccgatgagccccagcggctgcagtttccactgcccacagcccagcgctcgctggagcc

SEQ ID NO: 69784 - DNA, 201 bp, Homo sapiens
ctcactcagagacgactatgaggtgagctgcccagagctggaccagctggtggaggctgcgcttgctgtgcctggggtttatggcagccgcatgacgggcrgtggcttcggtggctgcacggtgacactgctggaggcctccgctgctccccacgccatgcggcacatccaggagcactacggcgggactgccaccttcta

SEQ ID NO: 69785 - DNA, 201 bp, Homo sapiens
tgctttgagacagccccaggtcgcggagctgctggccgaggcccggcgagccttccgggaggagttcggggccgagcccgagctggccgtgtcagcgccgsgccgcgtcaacctcatcggggaacacacggactacaaccagggcctggtgctgcctatggctctggagctcatgacggtgctggtgggcagcccccgcaa

SEQ ID NO: 69786 - DNA, 201 bp, Homo sapiens
agacgactatgaggtgagctgcccagagctggaccagctggtggaggctgcgcttgctgtgcctggggtttatggcagccgcatgacgggcggtggcttcrgtggctgcacggtgacactgctggaggcctccgctgctccccacgccatgcggcacatccaggagcactacggcgggactgccaccttctacctctctca

SEQ ID NO: 69787 - DNA, 201 bp, Homo sapiens
ctgcacggtgacactgctggaggcctccgctgctccccacgccatgcggcacatccaggagcactacggcgggactgccaccttctacctctctcaagcasccgatggagccaaggtgctgtgcttgtgaggcacccccaggacagcacacggtgagggtgcggggcctgcaggccagtcccacggctctgtgcccggtgc

SEQ ID NO: 69788 - DNA, 201 bp, Homo sapiens
gcgcgtcatggctgctttgagacagccccaggtcgcggagctgctggccgaggcccggcgagccttccgggaggagttcggggccgagcccgagctggccrtgtcagcgccgggccgcgtcaacctcatcggggaacacacggactacaaccagggcctggtgctgcctatggctctggagctcatgacggtgctggtggg

SEQ ID NO: 69789 - DNA, 201 bp, Homo sapiens
ctacaaccagggcctggtgctgcctatggctctggagctcatgacggtgctggtgggcagcccccgcaaggatgggctggtgtctctcctcaccacctctkagggtgccgatgagccccagcggctgcagtttccactgcccacagcccagcgctcgctggagcctgggactcctcggtgggccaactatgtcaagggagt

SEQ ID NO: 69790 - DNA, 201 bp, Homo sapiens
cttttaactctactaataaatttcagctctccatccacgagatggatgacccccacggcaagcgcttcctcatggtgatgaagggggcccctgagcgcatyctagagaaatgcagcaccatcatgatcaacggcgaggagcacccactggacaagagcactgccaagaccttccacacagcctacatggagctgggcgggt

SEQ ID NO: 69791 - DNA, 201 bp, Homo sapiens
tagccaactaccaggagattgtctttgcccggacatccccccagcagaagctgatcattgtggagggctgtcagaggcaggatgctgttgttgctgtgacyggggatggagttaatgactctccggctctaaagaaggcagacattgggattgccatggggatagcaggttctgatgcagccaaaaatgcagccgacatgg

SEQ ID NO: 69792 - DNA, 201 bp, Homo sapiens
ccccccaccgtgcgctccgccgctgcggtcccggatccgcgctccacgcccgcagcccgcggcgccaccagcccagcatgcaccagctctttcagaaaacmccagaaatttactccgtggagctcagcggaactaaggacatcgtgaaaacagacaagggggatggcaaggagaagtataggggtctgaagaacaactgcc

SEQ ID NO: 69793 - DNA, 201 bp, Homo sapiens
agccccgctcctctgagtttacccatgaaaaccccctggaaacaaagaacatctgcttctattccacaacgtgtctggaaggcactgtcaccggcatggtyatcaacacgggtgaccgcaccatcattggccatattgcctcattggcctcaggagttggaaatgagaagacgcccattgccattgagatcgagcactttg

SEQ ID NO: 69794 - DNA, 201 bp, Homo sapiens
gacattatcccctccattgccttggcgtacgagaaagctgaaagtgacatcatgaacaggaagcctcgccacaagaataaggacaggctggtgaaccagcygctcgctgtgtactcatacctgcacattggcctcatgcaagccctgggagctttccttgtgtatttcaccgtctatgcacaagagggctttctgccccgc

SEQ ID NO: 69795 - DNA, 201 bp, Homo sapiens
tcccttcctatgtctctcagcagcacgttggggcacacttgttcatcttctgaccgtttgctgggctattcccctgcagtgcagacatcgtcaaaattcakacaagaggaaattttcatgcagaaagctgtatgcaggatgctcactgatgttttgcactttaaaactgaaattcaactctttatataggattttcttttc

SEQ ID NO: 69796 - DNA, 201 bp, Homo sapiens
ccattcaaaccaagtctttgaccaaagctctaggacttgggcctccttatccaagataataacattgtgtaaccgagcagagttcaagccaggacaggaamatgtccccatcatgaagaaagctgtgattggagatgcctcagaaactgctcttttaaaattctcagaggtcattttgggtgatgtgatggaaattagaaa

SEQ ID NO: 69797 - DNA, 201 bp, Homo sapiens
gtctggaaggcactgtcaccggcatggttatcaacacgggtgaccgcaccatcattggccatattgcctcattggcctcaggagttggaaatgagaagacrcccattgccattgagatcgagcactttgttcacattgtggcaggagtggctgtctccatcggcatccttttcttcatcatcgctgtgtccctgaagtatc

SEQ ID NO: 69798 - DNA, 201 bp, Homo sapiens
tggacaagagcactgccaagaccttccacacagcctacatggagctgggcgggttgggcgagcgtgtgctgggtttctgtcatctctacctgccagcagaygagtttccagaaacctactcatttgacatagacgctatgaactttccgacctccaacctctgttttgtgggactcttgtcaatgatcgatccccctcggt

SEQ ID NO: 69799 - DNA, 201 bp, Homo sapiens
gaaattagaaaaagaaaccgcaaagtagctgaaatcccttttaactctactaataaatttcagctctccatccacgagatggatgacccccacggcaagcrcttcctcatggtgatgaagggggcccctgagcgcatcctagagaaatgcagcaccatcatgatcaacggcgaggagcacccactggacaagagcactgcc

SEQ ID NO: 69800 - DNA, 201 bp, Homo sapiens
atattgcctcattggcctcaggagttggaaatgagaagacgcccattgccattgagatcgagcactttgttcacattgtggcaggagtggctgtctccatyggcatccttttcttcatcatcgctgtgtccctgaagtatcaagtcctggactccatcatcttcctcattggcatcattgtggccaatgtgcccgagggcc

SEQ ID NO: 69801 - DNA, 201 bp, Homo sapiens
agactgggacactgacccagaacaggatgacagtggcccatctgtggttcgacaatcagatctttgtggctgacaccagtgaggaccattcaaaccaagtmtttgaccaaagctctaggacttgggcctccttatccaagataataacattgtgtaaccgagcagagttcaagccaggacaggaaaatgtccccatcatga

SEQ ID NO: 69802 - DNA, 201 bp, Homo sapiens
cgctgtggtgactggcatggagctgaaggacatgagctcagaacagctggatgagatcttagccaactaccaggagattgtctttgcccggacatcccccmagcagaagctgatcattgtggagggctgtcagaggcaggatgctgttgttgctgtgaccggggatggagttaatgactctccggctctaaagaaggcaga

SEQ ID NO: 69803 - DNA, 201 bp, Homo sapiens
tgtgatggaaattagaaaaagaaaccgcaaagtagctgaaatcccttttaactctactaataaatttcagctctccatccacgagatggatgacccccacrgcaagcgcttcctcatggtgatgaagggggcccctgagcgcatcctagagaaatgcagcaccatcatgatcaacggcgaggagcacccactggacaagag

SEQ ID NO: 69804 - DNA, 201 bp, Homo sapiens
atgaggtgcggaagctcttcatcaggctctaccctggaagctggtgggataagaacatgtattattaagaccacctcccttcctatgtctctcagcagcaygttggggcacacttgttcatcttctgaccgtttgctgggctattcccctgcagtgcagacatcgtcaaaattcagacaagaggaaattttcatgcagaaa

SEQ ID NO: 69805 - DNA, 201 bp, Homo sapiens; identical to SEQ ID NO: 69792

SEQ ID NO: 69806 - DNA, 201 bp, Homo sapiens
ttctttgttggcatcctagtccagcaaatagcagatctgatcatcaggaaaacccggaggaattccatcttccagcagggtctcttcaggtactgcctgtkcccggcctcctggggcagccctgggcctgccgtgcaaggatgatgatgatttgtttttcacaagacagagttctggccacacttgtaaccccagaggcat

SEQ ID NO: 69807 - DNA, 201 bp, Homo sapiens
acagggactgaaatactgtctccctttaactttttgcatacatactggtttgagtcagtacatagcagtggaagctgcagagggccgaaacaaaaatgaarttttctaccaatgtccagaccaaatggctcgaaatccagctgctattgacatgtttattataggtgctacttttactgactggtttacctcttatgtcaa

SEQ ID NO: 69808 - DNA, 201 bp, Homo sapiens
gccagctatcaagtcatgatccgctgtggagaagacattgcaaaaaatactggctgatatctgaggaagagaaaacacagaagaatcagtgttggaaatcyctcttcatagatacttactctgatgtaggaagatacattgaccattatgctgctattaaaaaggcctgggatgatctcaagaaatatttggagcccaggt

SEQ ID NO: 69809 - DNA, 201 bp, Homo sapiens
ttgtttgggtttgctttgtgtttttgaggtagaggaagaaatgggaatcttttttttctcttccaggagtcagtggaagaatagttctctagctaaggaayggacatacctttgttttaaaatattttatacttacaaaaatctagaaatggagagggaactgttttgaataaggatttaaaatacctgcacaaggataga

SEQ ID NO: 69810 - DNA, 201 bp, Homo sapiens; identical to SEQ ID NO: 69807

SEQ ID NO: 69811 - DNA, 201 bp, Homo sapiens; identical to SEQ ID NO: 69808

SEQ ID NO: 69812 - DNA, 201 bp, Homo sapiens; identical to SEQ ID NO: 69809

SEQ ID NO: 69813 - DNA, 201 bp, Homo sapiens; identical to SEQ ID NO: 69807

SEQ ID NO: 69814 - DNA, 201 bp, Homo sapiens; identical to SEQ ID NO: 69808

SEQ ID NO: 69815 - DNA, 201 bp, Homo sapiens
ggcaggttgtctgggatcagaagttgtcactcattgtcatgttgacgactctcacagaacgagggcggaccaaatgtcaccagtactggccagatcccccygacgtcatgaaccacggcggctttcacatccagtgtcagtcagaggactgcaccatcgcctatgtgtcccgagaaatgctggtcacaaacacccagaccg

SEQ ID NO: 69816 - DNA, 201 bp, Homo sapiens
gattttttatacctgatcccaacacactgcagcaagaacaaaccaggcacttgtatttcttacaactgaagatggatatttgcgaaggaaggttaacctgycctcttaactcagcagtggttctagcgtcctatgccgtacaatctcattttggagactataattcttccatacatcatccaggctatctttccgatagtc

SEQ ID NO: 69817 - DNA, 201 bp, Homo sapiens
tattttacacgtacaagggctctctggcccctcaagacagcgattctgaagtttctcagaaccgaagcccgcaccaagagagtttatccgagaacaatccrgcacaaagctacctgacccagaagtcatccagttctgtgtctccatcttcaaatgctccaggctcctgctcacctgacggcgttgatcagcagctcttag

SEQ ID NO: 69818 - DNA, 201 bp, Homo sapiens
tcaaagccagccgggagtcccactcacgggagctggccctggtgatcaggaggagagctgtccgctcatttgctgacttcaagtctgaagatgaactgaaycagcttttccccgaagccattttccccatgtgtccggagggtggggacactttggagggatccatggcacagctaaagaagggcctcgaaagcgggacgg

SEQ ID NO: 69819 - DNA, 201 bp, Homo sapiens
ggaaacatgatctgctatgtagttctcattatctgtgagtccgtcagacagtatcgagaggatgggatctgacaggtatctgcactcacaagtaactgacrattcgcatattaaagcactaacaggtatattttatgttacaggttattcagcgatagttatgacctcccggttacgtgcgttgggtggaagaattaataa

SEQ ID NO: 69820 - DNA, 201 bp, Homo sapiens
tatggtgcacaaccacctgggtgtgactgaaaaggaatattttggtttacagcatgatgacgactccgtggactctcctagatggctggaagcaagcaaasccatcaggaagcagttaaaaggaggtttcccctgtaccctgcattttcgagtaagattttttatacctgatcccaacacactgcagcaagaacaaaccag

SEQ ID NO: 69821 - DNA, 201 bp, Homo sapiens
taaagttactaaacaagacactggccaggttcttctggatatggtgcacaaccacctgggtgtgactgaaaaggaatattttggtttacagcatgatgacractccgtggactctcctagatggctggaagcaagcaaagccatcaggaagcagttaaaaggaggtttcccctgtaccctgcattttcgagtaagattttt

SEQ ID NO: 69822 - DNA, 201 bp, Homo sapiens
gaacgtacaatttagcaatacatattgcttagagcatcttagaagtcaaaactcaattggaaacatgatctgctatgtagttctcattatctgtgagtccstcagacagtatcgagaggatgggatctgacaggtatctgcactcacaagtaactgacaattcgcatattaaagcactaacaggtatattttatgttacag

SEQ ID NO: 69823 - DNA, 201 bp, Homo sapiens
ttactaaacaagacactggccaggttcttctggatatggtgcacaaccacctgggtgtgactgaaaaggaatattttggtttacagcatgatgacgactcygtggactctcctagatggctggaagcaagcaaagccatcaggaagcagttaaaaggaggtttcccctgtaccctgcattttcgagtaagattttttatac

SEQ ID NO: 69824 - DNA, 201 bp, Homo sapiens
ttcaacatgctgaattaccgatcttgcaaaaacttgtggaaatcctgtgttgagcaccatacgttctttcaggcaaagaagctactacctcaggaaaagartgttctgtctcagtactggactatgggctctcggaacaccaaaaagtcggtaaataaccaatattgcaaaaaggtgattggcgggatggtgtggaaccca

SEQ ID NO: 69825 - DNA, 201 bp, Homo sapiens
gcaggttgtctgggatcagaagttgtcactcattgtcatgttgacgactctcacagaacgagggcggaccaaatgtcaccagtactggccagatccccccracgtcatgaaccacggcggctttcacatccagtgtcagtcagaggactgcaccatcgcctatgtgtcccgagaaatgctggtcacaaacacccagaccgg

SEQ ID NO: 69826 - DNA, 201 bp, Homo sapiens; identical to SEQ ID NO: 69816

SEQ ID NO: 69827 - DNA, 201 bp, Homo sapiens; identical to SEQ ID NO: 69819

SEQ ID NO: 69828 - DNA, 201 bp, Homo sapiens; identical to SEQ ID NO: 69822

SEQ ID NO: 69829 - DNA, 201 bp, Homo sapiens; identical to SEQ ID NO: 69820

SEQ ID NO: 69830 - DNA, 201 bp, Homo sapiens; identical to SEQ ID NO: 69824

SEQ ID NO: 69831 - DNA, 201 bp, Homo sapiens; identical to SEQ ID NO: 69823

SEQ ID NO: 69832 - DNA, 201 bp, Homo sapiens; identical to SEQ ID NO: 69821

SEQ ID NO: 69833 - DNA, 201 bp, Homo sapiens; identical to SEQ ID NO: 69815

SEQ ID NO: 69834 - DNA, 201 bp, Homo sapiens; identical to SEQ ID NO: 69816

SEQ ID NO: 69835 - DNA, 201 bp, Homo sapiens; identical to SEQ ID NO: 69817

SEQ ID NO: 69836 - DNA, 201 bp, Homo sapiens; identical to SEQ ID NO: 69818

SEQ ID NO: 69837 - DNA, 201 bp, Homo sapiens; identical to SEQ ID NO: 69820

SEQ ID NO: 69838 - DNA, 201 bp, Homo sapiens; identical to SEQ ID NO: 69821

SEQ ID NO: 69839 - DNA, 201 bp, Homo sapiens; identical to SEQ ID NO: 69823

SEQ ID NO: 69840 - DNA, 201 bp, Homo sapiens; identical to SEQ ID NO: 69824

SEQ ID NO: 69841 - DNA, 201 bp, Homo sapiens; identical to SEQ ID NO: 69825

SEQ ID NO: 69842 - DNA, 201 bp, Homo sapiens; identical to SEQ ID NO: 69815

SEQ ID NO: 69843 - DNA, 201 bp, Homo sapiens; identical to SEQ ID NO: 69816

SEQ ID NO: 69844 - DNA, 201 bp, Homo sapiens; identical to SEQ ID NO: 69817

SEQ ID NO: 69845 - DNA, 201 bp, Homo sapiens; identical to SEQ ID NO: 69818

SEQ ID NO: 69846 - DNA, 201 bp, Homo sapiens; identical to SEQ ID NO: 69820

SEQ ID NO: 69847 - DNA, 201 bp, Homo sapiens; identical to SEQ ID NO: 69821

SEQ ID NO: 69848 - DNA, 201 bp, Homo sapiens; identical to SEQ ID NO: 69823

SEQ ID NO: 69849 - DNA, 201 bp, Homo sapiens; identical to SEQ ID NO: 69824

SEQ ID NO: 69850 - DNA, 201 bp, Homo sapiens; identical to SEQ ID NO: 69825

SEQ ID NO: 69851 - DNA, 201 bp, Homo sapiens; identical to SEQ ID NO: 69815

SEQ ID NO: 69852 - DNA, 201 bp, Homo sapiens; identical to SEQ ID NO: 69816

SEQ ID NO: 69853 - DNA, 201 bp, Homo sapiens; identical to SEQ ID NO: 69817

SEQ ID NO: 69854 - DNA, 201 bp, Homo sapiens; identical to SEQ ID NO: 69818

SEQ ID NO: 69855 - DNA, 201 bp, Homo sapiens; identical to SEQ ID NO: 69820

SEQ ID NO: 69856 - DNA, 201 bp, Homo sapiens; identical to SEQ ID NO: 69821

SEQ ID NO: 69857 - DNA, 201 bp, Homo sapiens; identical to SEQ ID NO: 69823

SEQ ID NO: 69858 - DNA, 201 bp, Homo sapiens; identical to SEQ ID NO: 69824

SEQ ID NO: 69859 - DNA, 201 bp, Homo sapiens; identical to SEQ ID NO: 69825

SEQ ID NO: 69860 - DNA, 201 bp, Homo sapiens
agattgacgcccacagcttcgtcatcaggtgcaacctggccccagtacaggagtatgcccgggatgtggggctcaagacagacctggtaaccatgaacccstcggtcatccagcgggcctttgaggacttggtcaatgccacgtggcgggagaagctgctgcaacggctgcacagcctcaatggcagcatcctgtggatcc

SEQ ID NO: 69861 - DNA, 201 bp, Homo sapiens
atactggctgaccaacaaagtccacatcaaaagacccaccaccggcctcttgatgtataccctggccacacgtttctgcaaacaaatctacctcgaggcaktcctgaccactagaactgtgcttggcacagagtaggcacttaataaactcctgctgcatgaacaaaagaacaagtgtggatgcttcaaaggaagacttgc

SEQ ID NO: 69862 - DNA, 201 bp, Homo sapiens
accactagaactgtgcttggcacagagtaggcacttaataaactcctgctgcatgaacaaaagaacaagtgtggatgcttcaaaggaagacttgcacccgrctgacccccagagtggggaaggggtcccacctaataggaagaacaccaagacttccccaagaggagaaggaacggctccccctttctcggcgaggccatg

SEQ ID NO: 69863 - DNA, 201 bp, Homo sapiens; identical to SEQ ID NO: 69860

SEQ ID NO: 69864 - DNA, 201 bp, Homo sapiens
aaactaagtctactgtgtgtgttttttttttttgttttttgtttttgtttgtttactattatagtaagtctagtcttatttaaattggatttttgtattcmagtttatatgacaaaatagactagatcagcgctggttgtaaatgcatgctgtacctcactgttttctccccatcatgccgctaaacttgctcgccaggtt

SEQ ID NO: 69865 - DNA, 201 bp, Homo sapiens
tcccaggtgtctctcttctgaaaccactgaaaggggtagatcctaacttaatcaacaacctggaaacattctttgaattggattatcccaaatatgaagtrctcctttgtgtacaagatcatgatgatccagccattgatgtatgtaagaagcttcttggaaaatatccaaatgttgatgctagattgtttataggtggca

SEQ ID NO: 69866 - DNA, 201 bp, Homo sapiens
gcattaatcctaaaattaataatttaatgccaggatatgaagttgcaaagtatgatcttatatggatttgtgatagtggaataagagtaattccagatacrcttactgacatggtgaatcaaatgacagaaaaagtaggcttggttcacgggctgccttacgtagcagacagacagggctttgctgccaccttagagcagg

SEQ ID NO: 69867 - DNA, 201 bp, Homo sapiens
gtacctcactgttttctccccatcatgccgctaaacttgctcgccaggttgtgcttaacttgtggtgaactggacttgattctgttttgttttgttttttwaaaaaaaaaaaacaaaaatgtaagggacagtgcataagccttttctttgttaagtagtggtgttttgctttttcttcaggattggatggcatgttgtcca

SEQ ID NO: 69868 - DNA, 201 bp, Homo sapiens
agtgaatggttttgtgcagtgaacaacacatggcgaggtactaactgagaaactttttcatgctttatgcctacctcttgtagttgttgcagagcaaatayaaattgtaataagatagctaggccttgcagaaacaaacagaaaaacttaaaaaaaaatgatataagagctggagtctagtatttatatgaatctgtgaga

SEQ ID NO: 69869 - DNA, 201 bp, Homo sapiens
ctcaagttgcaatgcaaaactctggctcatattcaatttctcagtttcaatccagaatgatcaggtggaccaaactacgaattaacatgcttcctgctacrataatttgtgagccaatttcagaatgctttgttgccagtttaattattggatgggcagcccaccatgtgttcagatgggatattatggtatttttcatgt

SEQ ID NO: 69870 - DNA, 201 bp, Homo sapiens
ttacgggtggcagcagctttgctttagagtttagaagataatagaaggaatgactattcatgtccaaagtgaatggttttgtgcagtgaacaacacatggygaggtactaactgagaaactttttcatgctttatgcctacctcttgtagttgttgcagagcaaatataaattgtaataagatagctaggccttgcagaaa

SEQ ID NO: 69871 - DNA, 201 bp, Homo sapiens
gtctatatccatggtttaaatggcaacatatctataagtatgtatacacattatatttaagcttttctctgggccaaactgcttcatccttttttctttctttttttttttttttagccttatgatgaatttgtttgaagggcattttctttatgaacaaaggcacagtgaaaaccagtctggttgtgacccactacatgt

SEQ ID NO: 69872 - DNA, 201 bp, Homo sapiens
ctgtttaatgaagtttggttgatgccatcctttgcactgccgaagcgtaatcttgtgtattacttagctctctgctgatctcagtatggacagtgtaacarcaaaaccaaaatggctggacagacttcttgtgttttgtaaatataaactaggacagttctgtaggtttgttcagtgtgctagtggagtatttccttaatg

SEQ ID NO: 69873 - DNA, 190 bp, Homo sapiens
gcttggagtgatgataaaatggtaagaaataatataaatgttgaagaaagcatcacaacagaactataggagtctaaatttaataaatctttaaaaaaaamcagtgtctagaatatataccatgttttattatttaaaatcattgtcttaaatttttgttcaaaaaataaaaatttgaatacaatcaaaa

SEQ ID NO: 69874 - DNA, 201 bp, Homo sapiens; identical to SEQ ID NO: 69865

SEQ ID NO: 69875 - DNA, 201 bp, Homo sapiens; identical to SEQ ID NO: 69867

SEQ ID NO: 69876 - DNA, 201 bp, Homo sapiens; identical to SEQ ID NO: 69868

SEQ ID NO: 69877 - DNA, 201 bp, Homo sapiens; identical to SEQ ID NO: 69869

SEQ ID NO: 69878 - DNA, 201 bp, Homo sapiens; identical to SEQ ID NO: 69870

SEQ ID NO: 69879 - DNA, 201 bp, Homo sapiens
gtctatatccatggtttaaatggcaacatatctataagtatgtatacacattatatttaagcttttctctgggccaaactgcttcatccttttttctttctttttttttttttttagccttatgatgaatttgtttgaagggcattttctttatgaacaaaggcttggatgcatattcctttctttctgtgaatgggtatt

SEQ ID NO: 69880 - DNA, 201 bp, Homo sapiens; identical to SEQ ID NO: 69864

SEQ ID NO: 69881 - DNA, 201 bp, Homo sapiens; identical to SEQ ID NO: 69866

SEQ ID NO: 69882 - DNA, 201 bp, Homo sapiens
gagctggaggtgaagaggaagagaagaaagatgagaagaaaaaggaaaagaaaaataagaaacaagatggagctattgagaatcgcaacaaagcaaaagcmcaggatggtgcagccatggaaatgcagccattgaagagtgaagaaggtggagatggtgatgaaaaagataaaaagaaagcaaatttgccaaaaaaggaaa

SEQ ID NO: 69883 - DNA, 201 bp, Homo sapiens
atcccccttattgatgacactgatgccgaagatgatgctcctacaaaacgtaactccagtcctccaccctctcccaacaaaaataacaatgctgttgacartggaattcaccttacaatagaaatgaacaagtctgctacctcttcatccccaggaagcccactacatagtttggaaacatcactctgattgtaagctgaa

SEQ ID NO: 69884 - DNA, 201 bp, Homo sapiens
cattcagagattttccagcaggagaaccagaaccagagtgggataatgaaaatgatattgtcaccggccttacatgcattgctgttgtggggattgaagaycctgtgagacctgaggtgccagatgcaattaaaaagtgtcagagggctggaattactgtgcggatggtcactggtgataatattaatactgctcgggcca

SEQ ID NO: 69885 - DNA, 201 bp, Homo sapiens
ttgctggaactgatgtagctaaagaagcatccgatattattctcacagatgacaactttacaagcattgttaaagcagttatgtggggacgaaatgtctaygacagcatctcaaaattccttcagttccaacttactgttaatgtagtagcagtgattgttgcttttacgggcgcctgcattactcaagactcaccgctta

SEQ ID NO: 69886 - DNA, 201 bp, Homo sapiens
ttgatagtttaatttctgctgttggctgttaataatttggattatttatgtttataaatgatacagatctgtttacaaggtttgtagatactttttttgtycctgttcatagatgggaagcttccttataactgatgcagagaaaaattagtccttcaaatactgctgtattttcaggaaaaaaaaaaaaaggggtgtttc

SEQ ID NO: 69887 - DNA, 201 bp, Homo sapiens
aagaaggtgaaggtgaaactggttggattgaaggagctgcaatcctcttgtctgtagtgtgtgtggtgttagtaacagctttcaatgactggagtaaggaraaacagtttagaggtttgcagagccgaattgaacaagaacagaagttcactgtcatcaggggtggtcaggtcattcagatacctgtagctgacattactg

SEQ ID NO: 69888 - DNA, 201 bp, Homo sapiens
ttcctcttctactgcttctactactgtggggtattcgagtggtgaatgcatttcgtagttctttatatgaagggttagaaaaaccggaatcaagaagttckattcacaactttatgacacatcctgagtttaggatagaagattcagagcctcatatcccccttattgatgacactgatgccgaagatgatgctcctacaa

SEQ ID NO: 69889 - DNA, 201 bp, Homo sapiens
tagtatcattgggcctttctttttatcagcctccagaaggggataatgcactttgtggagaagtttctgttggggaggaagaaggtgaaggtgaaactggktggattgaaggagctgcaatcctcttgtctgtagtgtgtgtggtgttagtaacagctttcaatgactggagtaaggaaaaacagtttagaggtttgcaga

SEQ ID NO: 69890 - DNA, 201 bp, Homo sapiens
ggtttagaggtctgaacagaatccaaacacagattcgagtggtgaatgcatttcgtagttctttatatgaagggttagaaaaaccggaatcaagaagttckattcacaactttatgacacatcctgagtttaggatagaagattcagagcctcatatcccccttattgatgacactgatgccgaagatgatgctcctacaa

SEQ ID NO: 69891 - DNA, 201 bp, Homo sapiens; identical to SEQ ID NO: 69882

SEQ ID NO: 69892 - DNA, 201 bp, Homo sapiens; identical to SEQ ID NO: 69889

SEQ ID NO: 69893 - DNA, 201 bp, Homo sapiens; identical to SEQ ID NO: 69883

SEQ ID NO: 69894 - DNA, 201 bp, Homo sapiens; identical to SEQ ID NO: 69884

SEQ ID NO: 69895 - DNA, 201 bp, Homo sapiens; identical to SEQ ID NO: 69885

SEQ ID NO: 69896 - DNA, 201 bp, Homo sapiens; identical to SEQ ID NO: 69886

SEQ ID NO: 69897 - DNA, 201 bp, Homo sapiens; identical to SEQ ID NO: 69887

SEQ ID NO: 69898 - DNA, 201 bp, Homo sapiens
atgatgtaacaaatatttctacccctacacatattcgagtggtgaatgcatttcgtagttctttatatgaagggttagaaaaaccggaatcaagaagttckattcacaactttatgacacatcctgagtttaggatagaagattcagagcctcatatcccccttattgatgacactgatgccgaagatgatgctcctacaa

SEQ ID NO: 69899 - DNA, 201 bp, Homo sapiens; identical to SEQ ID NO: 69882

SEQ ID NO: 69900 - DNA, 201 bp, Homo sapiens; identical to SEQ ID NO: 69889

SEQ ID NO: 69901 - DNA, 201 bp, Homo sapiens; identical to SEQ ID NO: 69883

SEQ ID NO: 69902 - DNA, 201 bp, Homo sapiens; identical to SEQ ID NO: 69884

SEQ ID NO: 69903 - DNA, 201 bp, Homo sapiens; identical to SEQ ID NO: 69885

SEQ ID NO: 69904 - DNA, 201 bp, Homo sapiens; identical to SEQ ID NO: 69886

SEQ ID NO: 69905 - DNA, 201 bp, Homo sapiens; identical to SEQ ID NO: 69887

SEQ ID NO: 69906 - DNA, 201 bp, Homo sapiens
ggcaaccctccatcgccagccagcatcatgatattcgagtggtgaatgcatttcgtagttctttatatgaagggttagaaaaaccggaatcaagaagttckattcacaactttatgacacatcctgagtttaggatagaagattcagagcctcatatcccccttattgatgacactgatgccgaagatgatgctcctacaa

SEQ ID NO: 69907 - DNA, 201 bp, Homo sapiens; identical to SEQ ID NO: 69882

SEQ ID NO: 69908 - DNA, 201 bp, Homo sapiens; identical to SEQ ID NO: 69889

SEQ ID NO: 69909 - DNA, 201 bp, Homo sapiens; identical to SEQ ID NO: 69883

SEQ ID NO: 69910 - DNA, 201 bp, Homo sapiens; identical to SEQ ID NO: 69884

SEQ ID NO: 69911 - DNA, 201 bp, Homo sapiens; identical to SEQ ID NO: 69885

SEQ ID NO: 69912 - DNA, 201 bp, Homo sapiens; identical to SEQ ID NO: 69886

SEQ ID NO: 69913 - DNA, 201 bp, Homo sapiens; identical to SEQ ID NO: 69887

SEQ ID NO: 69914 - DNA, 201 bp, Homo sapiens; identical to SEQ ID NO: 69890

SEQ ID NO: 69915 - DNA, 201 bp, Homo sapiens; identical to SEQ ID NO: 69882

SEQ ID NO: 69916 - DNA, 201 bp, Homo sapiens; identical to SEQ ID NO: 69889

SEQ ID NO: 69917 - DNA, 201 bp, Homo sapiens; identical to SEQ ID NO: 69883

SEQ ID NO: 69918 - DNA, 201 bp, Homo sapiens; identical to SEQ ID NO: 69884

SEQ ID NO: 69919 - DNA, 201 bp, Homo sapiens; identical to SEQ ID NO: 69885

SEQ ID NO: 69920 - DNA, 201 bp, Homo sapiens; identical to SEQ ID NO: 69886

SEQ ID NO: 69921 - DNA, 201 bp, Homo sapiens; identical to SEQ ID NO: 69887

SEQ ID NO: 69922 - DNA, 201 bp, Homo sapiens; identical to SEQ ID NO: 69882

SEQ ID NO: 69923 - DNA, 201 bp, Homo sapiens; identical to SEQ ID NO: 69883

SEQ ID NO: 69924 - DNA, 201 bp, Homo sapiens; identical to SEQ ID NO: 69884

SEQ ID NO: 69925 - DNA, 201 bp, Homo sapiens; identical to SEQ ID NO: 69885

SEQ ID NO: 69926 - DNA, 201 bp, Homo sapiens; identical to SEQ ID NO: 69886

SEQ ID NO: 69927 - DNA, 201 bp, Homo sapiens; identical to SEQ ID NO: 69887

SEQ ID NO: 69928 - DNA, 201 bp, Homo sapiens
ttttcctcttctactgcttctactactgtgggattcgagtggtgaatgcatttcgtagttctttatatgaagggttagaaaaaccggaatcaagaagttckattcacaactttatgacacatcctgagtttaggatagaagattcagagcctcatatcccccttattgatgacactgatgccgaagatgatgctcctacaa

SEQ ID NO: 69929 - DNA, 201 bp, Homo sapiens; identical to SEQ ID NO: 69889

SEQ ID NO: 69930 - DNA, 201 bp, Homo sapiens
caatgccaacaggatattcccaataagactttagaagtatatgtaaatgtctgtttttcataattgctctttatattgtgtgttatctgacaagatagttrtttaagaaacatgggaattgcagaaatgactgcagtgcagcagtaattatggtgcactttttcgctatttaagttggatatttctctacattcctgaaac

SEQ ID NO: 69931 - DNA, 201 bp, Homo sapiens
aaattagttaaaaagaagtggaatcttgatgagctgcctaaatttgagaagaatttttatcaagagcaccctgatttggctaggcgcacagcacaagaggyggaaacatacagaagaagcaaggaaattacagttagaggtcacaactgcccgaagccagttctaaatttttatgaagccaatttccctgcaaatgtcatg

SEQ ID NO: 69932 - DNA, 155 bp, Homo sapiens
aggtcatagagcggctcccagcgttccctgcggcgtaggaggcggtccagactayaaaagcggctgccggaaagcggccggcacctcattcatttctaccggtctctagtagtgcagcttcggctggtgtcatcggtgtccttcctccgctgccg

SEQ ID NO: 69933 - DNA, 201 bp, Homo sapiens
gaagtatatgtaaatgtctgtttttcataattgctctttatattgtgtgttatctgacaagatagttatttaagaaacatgggaattgcagaaatgactgyagtgcagcagtaattatggtgcactttttcgctatttaagttggatatttctctacattcctgaaacaatttttaggttttttttgtactagaaaatgca

SEQ ID NO: 69934 - DNA, 201 bp, Homo sapiens
acctaataacataaagcaagtgagcgaccttatctctgtgcttcgtgaagctaatcaagcaattaatcccaagttgcttcagttggtcgaagacagaggtkcaggtcgttccaggggtagaggaggcatgaaggatgaccgtcgggacagatactctgcgggcaaaaggggtggatttaatacctttagagacagggaaaa

SEQ ID NO: 69935 - DNA, 200 bp, Homo sapiens
aggtcatagagcggctcccagcgttccctgcggcgtaggaggcggtccagactacaaaagcggctgccggaaagcggccggcacctcattcatttctacsggtctctagtagtgcagcttcggctggtgtcatcggtgtccttcctccgctgccgcccccgcaaggcttcgccgtcatcgaggccatttccagcgacttg

SEQ ID NO: 69936 - DNA, 201 bp, Homo sapiens
cttattcgtctaatggaagagatcatgagtgagaaggagaataaaaccattgtttttgtggaaaccaaaagaagatgtgatgagcttaccagaaaaatgargagagatgggtggcctgccatgggtatccatggtgacaagagtcaacaagagcgtgactgggttctaaatgaattcaaacatggaaaagctcctattctg

SEQ ID NO: 69937 - DNA, 201 bp, Homo sapiens
gaaaaaccaatctgagaagaacaacctaccttgtccttgatgaagcagatagaatgcttgatatgggctttgaaccccaaataaggaagattgtggatcarataagacctgataggcaaactctaatgtggagtgcgacttggccaaaagaagtaagacagcttgctgaagatttcctgaaagactatattcatataaaca

SEQ ID NO: 69938 - DNA, 201 bp, Homo sapiens; identical to SEQ ID NO: 69930

SEQ ID NO: 69939 - DNA, 201 bp, Homo sapiens; identical to SEQ ID NO: 69931

SEQ ID NO: 69940 - DNA, 201 bp, Homo sapiens; identical to SEQ ID NO: 69933

SEQ ID NO: 69941 - DNA, 201 bp, Homo sapiens; identical to SEQ ID NO: 69934

SEQ ID NO: 69942 - DNA, 201 bp, Homo sapiens; identical to SEQ ID NO: 69937

SEQ ID NO: 69943 - DNA, 201 bp, Homo sapiens; identical to SEQ ID NO: 69936

SEQ ID NO: 69944 - DNA, 162 bp, Homo sapiens
caggacgtgaaacgggggcggtttgggaagtttagagaccattctccgccgaccaaaacccstcaaaggattatcagacacgcgggtcggacggtccacatcagccggcagcccgggcgggtcccggggtgcgagcagcgcacttccgtagtgcagcttcgg

SEQ ID NO: 69945 - DNA, 161 bp, Homo sapiens
cctatgcaaagcaggtaagaagccgaactctgaggcctctcgccattgtctccgagtcggycagctggagcgttttcggggctgtaaagggagaatggcgcatgcgcatattcagggcggaaggcgcgctaagagcagatttgtggtctgcattatgtctg

SEQ ID NO: 69946 - DNA, 201 bp, Homo sapiens
actctgagatgatgtatgacaatttcaccctggtccctgtctggggaaaggaaggctatctccacgtctgttccaatggcctctgctgttatttactttaygagaggcccaccttatccaaagagctgtatgccctgggggtctttgatgggcttcacacagtacatggcacttactacatccaagtgtgtgccctggtca

SEQ ID NO: 69947 - DNA, 201 bp, Homo sapiens
ccatagtaagtttttaaaaattttgtcaggcgatccgtactgtgagaaggatgctcaggaagtccactgtgatgaggccaccaagtggaacgtgaatgctyctcccacatttcactctgagatgatgtatgacaatttcaccctggtccctgtctggggaaaggaaggctatctccacgtctgttccaatggcctctgctg

SEQ ID NO: 69948 - DNA, 201 bp, Homo sapiens
ctacaaggtgaagcatgttgtgtacccaactgcctggatgaaccagctcccactcttggcagcaattgagattcagaaagcttttgctgttgcctttggcrtcaacgttctggcagctaatgtccaccacccagttctggggatgacaggaagtggcatacacacccctctggagtccttttggtaccatgacatggaaaa

SEQ ID NO: 69949 - DNA, 201 bp, Homo sapiens
aggtggaacccatgcctggagcctcaccgcttcaatgacacagaggtgctccagcgcctgagttgtatggccatcaggggagatatgttcttggtggccartcttgggacaaaggagccttgtcatagcagtgacccaaggtgcccaaaagatgggagataccagttcaacacaaatgtcgtgttcagcaataatggaacc

SEQ ID NO: 69950 - DNA, 201 bp, Homo sapiens
ggctgaatattatgtggctgccgtgtatgagcatccatccatcctgagtctgaaccctctggctctcatcagccgccaagaggccttggagctcatgaacyagaaccttgacatctatgaacagcaagtgatgactgcagcccaaaaggatgtacagattatagtgtttccagaagatggcattcatggattcaactttac

SEQ ID NO: 69951 - DNA, 201 bp, Homo sapiens
ggaggagagcgtggctgaccatcacgaggctgaatattatgtggctgccgtgtatgagcatccatccatcctgagtctgaaccctctggctctcatcagcygccaagaggccttggagctcatgaaccagaaccttgacatctatgaacagcaagtgatgactgcagcccaaaaggatgtacagattatagtgtttccaga

SEQ ID NO: 69952 - DNA, 201 bp, Homo sapiens
tgtgagaaggatgctcaggaagtccactgtgatgaggccaccaagtggaacgtgaatgctcctcccacatttcactctgagatgatgtatgacaatttcaycctggtccctgtctggggaaaggaaggctatctccacgtctgttccaatggcctctgctgttatttactttacgagaggcccaccttatccaaagagctg

SEQ ID NO: 69953 - DNA, 201 bp, Homo sapiens
tgctcttttcctctgcggctgttacgtggttgccctgggagcccacaccggggaggagagcgtggctgaccatcacgaggctgaatattatgtggctgccdtgtatgagcatccatccatcctgagtctgaaccctctggctctcatcagccgccaagaggccttggagctcatgaaccagaaccttgacatctatgaaca

SEQ ID NO: 69954 - DNA, 201 bp, Homo sapiens
ccagaagtaagcttgctcttttcctctgcggctgttacgtggttgccctgggagcccacaccggggaggagagcgtggctgaccatcacgaggctgaataktatgtggctgccgtgtatgagcatccatccatcctgagtctgaaccctctggctctcatcagccgccaagaggccttggagctcatgaaccagaaccttg

SEQ ID NO: 69955 - DNA, 161 bp, Homo sapiens; identical to SEQ ID NO: 69945

SEQ ID NO: 69956 - DNA, 201 bp, Homo sapiens
cgctaagagcagatttgtggtctgcattatgtctggagccagaagtaagcttgctcttttcctctgcggctgttacgtggttgccctgggagcccacaccrgggaggagagcgtggctgaccatcacgaggctgaatattatgtggctgccgtgtatgagcatccatccatcctgagtctgaaccctctggctctcatcag

SEQ ID NO: 69957 - DNA, 201 bp, Homo sapiens
ggtcaggtggaacccatgcctggagcctcaccgcttcaatgacacagaggtgctccagcgcctgagttgtatggccatcaggggagatatgttcttggtgrccaatcttgggacaaaggagccttgtcatagcagtgacccaaggtgcccaaaagatgggagataccagttcaacacaaatgtcgtgttcagcaataatgg

SEQ ID NO: 69958 - DNA, 201 bp, Homo sapiens
tgctcctcccacatttcactctgagatgatgtatgacaatttcaccctggtccctgtctggggaaaggaaggctatctccacgtctgttccaatggcctcygctgttatttactttacgagaggcccaccttatccaaagagctgtatgccctgggggtctttgatgggcttcacacagtacatggcacttactacatcca

SEQ ID NO: 69959 - DNA, 201 bp, Homo sapiens
gaaggctatctccacgtctgttccaatggcctctgctgttatttactttacgagaggcccaccttatccaaagagctgtatgccctgggggtctttgatgkgcttcacacagtacatggcacttactacatccaagtgtgtgccctggtcaggtgtgggggtcttggcttcgacacctgtggacaggaaatcacagaggcc

SEQ ID NO: 69960 - DNA, 201 bp, Homo sapiens
ctacatccaagtgtgtgccctggtcaggtgtgggggtcttggcttcgacacctgtggacaggaaatcacagaggccacggggatatttgagtttcacctgyggggcaacttcagtacttcctatatctttcctttgtttctgacctcagggatgaccctagaagtccctgaccagcttggctgggagaatgaccactattt

SEQ ID NO: 69961 - DNA, 201 bp, Homo sapiens
ctgttatttactttacgagaggcccaccttatccaaagagctgtatgccctgggggtctttgatgggcttcacacagtacatggcacttactacatccaartgtgtgccctggtcaggtgtgggggtcttggcttcgacacctgtggacaggaaatcacagaggccacggggatatttgagtttcacctgtggggcaactt

SEQ ID NO: 69962 - DNA, 201 bp, Homo sapiens
gtactgtgagaaggatgctcaggaagtccactgtgatgaggccaccaagtggaacgtgaatgctcctcccacatttcactctgagatgatgtatgacaatktcaccctggtccctgtctggggaaaggaaggctatctccacgtctgttccaatggcctctgctgttatttactttacgagaggcccaccttatccaaaga

SEQ ID NO: 69963 - DNA, 201 bp, Homo sapiens
aaacggacccatcccatagtaagtttttaaaaattttgtcaggcgatccgtactgtgagaaggatgctcaggaagtccactgtgatgaggccaccaagtgraacgtgaatgctcctcccacatttcactctgagatgatgtatgacaatttcaccctggtccctgtctggggaaaggaaggctatctccacgtctgttcca

SEQ ID NO: 69964 - DNA, 201 bp, Homo sapiens
atccaagtgtgtgccctggtcaggtgtgggggtcttggcttcgacacctgtggacaggaaatcacagaggccacggggatatttgagtttcacctgtgggrcaacttcagtacttcctatatctttcctttgtttctgacctcagggatgaccctagaagtccctgaccagcttggctgggagaatgaccactatttcctg

SEQ ID NO: 69965 - DNA, 201 bp, Homo sapiens
gttgcctttggcatcaacgttctggcagctaatgtccaccacccagttctggggatgacaggaagtggcatacacacccctctggagtccttttggtaccrtgacatggaaaatcccaaaagtcaccttataattgcccaggtggccaaaaatccagtgggtctcattggtgcagagaatgcaacaggtgaaacggaccca

SEQ ID NO: 69966 - DNA, 201 bp, Homo sapiens
ttggcagcaattgagattcagaaagcttttgctgttgcctttggcatcaacgttctggcagctaatgtccaccacccagttctggggatgacaggaagtgrcatacacacccctctggagtccttttggtaccatgacatggaaaatcccaaaagtcaccttataattgcccaggtggccaaaaatccagtgggtctcatt

SEQ ID NO: 69967 - DNA, 201 bp, Homo sapiens
acagcaagtgatgactgcagcccaaaaggatgtacagattatagtgtttccagaagatggcattcatggattcaactttacaagaacatccatttatccakttttggacttcatgccgtctccccaggtggtcaggtggaacccatgcctggagcctcaccgcttcaatgacacagaggtgctccagcgcctgagttgtat

SEQ ID NO: 69968 - DNA, 201 bp, Homo sapiens
gaaccttgacatctatgaacagcaagtgatgactgcagcccaaaaggatgtacagattatagtgtttccagaagatggcattcatggattcaactttacargaacatccatttatccatttttggacttcatgccgtctccccaggtggtcaggtggaacccatgcctggagcctcaccgcttcaatgacacagaggtgct

SEQ ID NO: 69969 - DNA, 201 bp, Homo sapiens
tcatggattcaactttacaagaacatccatttatccatttttggacttcatgccgtctccccaggtggtcaggtggaacccatgcctggagcctcaccgcytcaatgacacagaggtgctccagcgcctgagttgtatggccatcaggggagatatgttcttggtggccaatcttgggacaaaggagccttgtcatagcag

SEQ ID NO: 69970 - DNA, 201 bp, Homo sapiens
aacatccatttatccatttttggacttcatgccgtctccccaggtggtcaggtggaacccatgcctggagcctcaccgcttcaatgacacagaggtgctcyagcgcctgagttgtatggccatcaggggagatatgttcttggtggccaatcttgggacaaaggagccttgtcatagcagtgacccaaggtgcccaaaaga

SEQ ID NO: 69971 - DNA, 201 bp, Homo sapiens
tccatttatccatttttggacttcatgccgtctccccaggtggtcaggtggaacccatgcctggagcctcaccgcttcaatgacacagaggtgctccagcrcctgagttgtatggccatcaggggagatatgttcttggtggccaatcttgggacaaaggagccttgtcatagcagtgacccaaggtgcccaaaagatggg

SEQ ID NO: 69972 - DNA, 201 bp, Homo sapiens
tgaccagcttggctgggagaatgaccactatttcctgaggaaaagtaggctgtcctctgggctggtgacggcggctctctatgggcgcttgtatgagaggsactaggaaaagtgtgtggtctgtggggcggactctggccatcatgttgacagccttgcacttccacaggctacaagccctgggaccatctttctgcctta

SEQ ID NO: 69973 - DNA, 201 bp, Homo sapiens
atgccctgggggtctttgatgggcttcacacagtacatggcacttactacatccaagtgtgtgccctggtcaggtgtgggggtcttggcttcgacacctgyggacaggaaatcacagaggccacggggatatttgagtttcacctgtggggcaacttcagtacttcctatatctttcctttgtttctgacctcagggatga

SEQ ID NO: 69974 - DNA, 201 bp, Homo sapiens
aaaggaaggctatctccacgtctgttccaatggcctctgctgttatttactttacgagaggcccaccttatccaaagagctgtatgccctgggggtctttsatgggcttcacacagtacatggcacttactacatccaagtgtgtgccctggtcaggtgtgggggtcttggcttcgacacctgtggacaggaaatcacaga

SEQ ID NO: 69975 - DNA, 201 bp, Homo sapiens
gcctggagcctcaccgcttcaatgacacagaggtgctccagcgcctgagttgtatggccatcaggggagatatgttcttggtggccaatcttgggacaaakgagccttgtcatagcagtgacccaaggtgcccaaaagatgggagataccagttcaacacaaatgtcgtgttcagcaataatggaacccttgttgaccgct

SEQ ID NO: 69976 - DNA, 201 bp, Homo sapiens
gaggtgctccagcgcctgagttgtatggccatcaggggagatatgttcttggtggccaatcttgggacaaaggagccttgtcatagcagtgacccaaggtrcccaaaagatgggagataccagttcaacacaaatgtcgtgttcagcaataatggaacccttgttgaccgctaccgtaaacacaacctctactttgaggca

SEQ ID NO: 69977 - DNA, 201 bp, Homo sapiens
ggccatcaggggagatatgttcttggtggccaatcttgggacaaaggagccttgtcatagcagtgacccaaggtgcccaaaagatgggagataccagttcracacaaatgtcgtgttcagcaataatggaacccttgttgaccgctaccgtaaacacaacctctactttgaggcagcattcgatgttcctcttaaagtgga

SEQ ID NO: 69978 - DNA, 201 bp, Homo sapiens
atcaggggagatatgttcttggtggccaatcttgggacaaaggagccttgtcatagcagtgacccaaggtgcccaaaagatgggagataccagttcaacasaaatgtcgtgttcagcaataatggaacccttgttgaccgctaccgtaaacacaacctctactttgaggcagcattcgatgttcctcttaaagtggatctc

SEQ ID NO: 69979 - DNA, 201 bp, Homo sapiens
gagccttgtcatagcagtgacccaaggtgcccaaaagatgggagataccagttcaacacaaatgtcgtgttcagcaataatggaacccttgttgaccgctrccgtaaacacaacctctactttgaggcagcattcgatgttcctcttaaagtggatctcatcacctttgataccccctttgctggcaggtttggcatcttc

SEQ ID NO: 69980 - DNA, 201 bp, Homo sapiens
cagtgacccaaggtgcccaaaagatgggagataccagttcaacacaaatgtcgtgttcagcaataatggaacccttgttgaccgctaccgtaaacacaacytctactttgaggcagcattcgatgttcctcttaaagtggatctcatcacctttgataccccctttgctggcaggtttggcatcttcacatgctttgatat

SEQ ID NO: 69981 - DNA, 201 bp, Homo sapiens
caacacaaatgtcgtgttcagcaataatggaacccttgttgaccgctaccgtaaacacaacctctactttgaggcagcattcgatgttcctcttaaagtgkatctcatcacctttgataccccctttgctggcaggtttggcatcttcacatgctttgatatattgttctttgaccctgccatcagagtcctcagagacta

SEQ ID NO: 69982 - DNA, 201 bp, Homo sapiens
gaagtccctgaccagcttggctgggagaatgaccactatttcctgaggaaaagtaggctgtcctctgggctggtgacggcggctctctatgggcgcttgtrtgagagggactaggaaaagtgtgtggtctgtggggcggactctggccatcatgttgacagccttgcacttccacaggctacaagccctgggaccatcttt

SEQ ID NO: 69983 - DNA, 201 bp, Homo sapiens
caagtgtgtgccctggtcaggtgtgggggtcttggcttcgacacctgtggacaggaaatcacagaggccacggggatatttgagtttcacctgtggggcamcttcagtacttcctatatctttcctttgtttctgacctcagggatgaccctagaagtccctgaccagcttggctgggagaatgaccactatttcctgagg

SEQ ID NO: 69984 - DNA, 201 bp, Homo sapiens
ctcttggcagcaattgagattcagaaagcttttgctgttgcctttggcatcaacgttctggcagctaatgtccaccacccagttctggggatgacaggaartggcatacacacccctctggagtccttttggtaccatgacatggaaaatcccaaaagtcaccttataattgcccaggtggccaaaaatccagtgggtctc

SEQ ID NO: 69985 - DNA, 201 bp, Homo sapiens
tttgatatattgttctttgaccctgccatcagagtcctcagagactacaaggtgaagcatgttgtgtacccaactgcctggatgaaccagctcccactctkggcagcaattgagattcagaaagcttttgctgttgcctttggcatcaacgttctggcagctaatgtccaccacccagttctggggatgacaggaagtggc

SEQ ID NO: 69986 - DNA, 201 bp, Homo sapiens
tgggggtcttggcttcgacacctgtggacaggaaatcacagaggccacggggatatttgagtttcacctgtggggcaacttcagtacttcctatatctttyctttgtttctgacctcagggatgaccctagaagtccctgaccagcttggctgggagaatgaccactatttcctgaggaaaagtaggctgtcctctgggct

SEQ ID NO: 69987 - DNA, 201 bp, Homo sapiens
tgttccaatggcctctgctgttatttactttacgagaggcccaccttatccaaagagctgtatgccctgggggtctttgatgggcttcacacagtacatgrcacttactacatccaagtgtgtgccctggtcaggtgtgggggtcttggcttcgacacctgtggacaggaaatcacagaggccacggggatatttgagttt

SEQ ID NO: 69988 - DNA, 201 bp, Homo sapiens
tttctgacctcagggatgaccctagaagtccctgaccagcttggctgggagaatgaccactatttcctgaggaaaagtaggctgtcctctgggctggtgayggcggctctctatgggcgcttgtatgagagggactaggaaaagtgtgtggtctgtggggcggactctggccatcatgttgacagccttgcacttccacag

SEQ ID NO: 69989 - DNA, 201 bp, Homo sapiens
ccactcttggcagcaattgagattcagaaagcttttgctgttgcctttggcatcaacgttctggcagctaatgtccaccacccagttctggggatgacagraagtggcatacacacccctctggagtccttttggtaccatgacatggaaaatcccaaaagtcaccttataattgcccaggtggccaaaaatccagtgggt

SEQ ID NO: 69990 - DNA, 201 bp, Homo sapiens
cagagtcctcagagactacaaggtgaagcatgttgtgtacccaactgcctggatgaaccagctcccactcttggcagcaattgagattcagaaagcttttsctgttgcctttggcatcaacgttctggcagctaatgtccaccacccagttctggggatgacaggaagtggcatacacacccctctggagtccttttggta

SEQ ID NO: 69991 - DNA, 201 bp, Homo sapiens
tgctttgatatattgttctttgaccctgccatcagagtcctcagagactacaaggtgaagcatgttgtgtacccaactgcctggatgaaccagctcccacycttggcagcaattgagattcagaaagcttttgctgttgcctttggcatcaacgttctggcagctaatgtccaccacccagttctggggatgacaggaagt

SEQ ID NO: 69992 - DNA, 201 bp, Homo sapiens
gcagcattcgatgttcctcttaaagtggatctcatcacctttgataccccctttgctggcaggtttggcatcttcacatgctttgatatattgttctttgrccctgccatcagagtcctcagagactacaaggtgaagcatgttgtgtacccaactgcctggatgaaccagctcccactcttggcagcaattgagattcag

SEQ ID NO: 69993 - DNA, 201 bp, Homo sapiens
gccttgtcatagcagtgacccaaggtgcccaaaagatgggagataccagttcaacacaaatgtcgtgttcagcaataatggaacccttgttgaccgctacygtaaacacaacctctactttgaggcagcattcgatgttcctcttaaagtggatctcatcacctttgataccccctttgctggcaggtttggcatcttcac

SEQ ID NO: 69994 - DNA, 201 bp, Homo sapiens
gaccctagaagtccctgaccagcttggctgggagaatgaccactatttcctgaggaaaagtaggctgtcctctgggctggtgacggcggctctctatgggygcttgtatgagagggactaggaaaagtgtgtggtctgtggggcggactctggccatcatgttgacagccttgcacttccacaggctacaagccctgggac

SEQ ID NO: 69995 - DNA, 201 bp, Homo sapiens
gctgttatttactttacgagaggcccaccttatccaaagagctgtatgccctgggggtctttgatgggcttcacacagtacatggcacttactacatccamgtgtgtgccctggtcaggtgtgggggtcttggcttcgacacctgtggacaggaaatcacagaggccacggggatatttgagtttcacctgtggggcaact

SEQ ID NO: 69996 - DNA, 201 bp, Homo sapiens; identical to SEQ ID NO: 69950

SEQ ID NO: 69997 - DNA, 201 bp, Homo sapiens; identical to SEQ ID NO: 69951

SEQ ID NO: 69998 - DNA, 201 bp, Homo sapiens; identical to SEQ ID NO: 69953

SEQ ID NO: 69999 - DNA, 201 bp, Homo sapiens
acagcaagtgatgactgcagcccaaaaggatgtacagattatagtgtttccagaagatggcattcatggattcaactttacaagaacatccatttatccakttttggacttcatgccgtctccccaggtggtcaggtggaacccatgcctggagcctcaccgcttcaatgacacagaggtgattcctgcctttttcctcag

SEQ ID NO: 70000 - DNA, 201 bp, Homo sapiens
gaagctgtgacatgttaactaagattgataggagaccttaacatccccaaaatccaacccaaactcccaaagatccatgtgccacatgttcattccattawagaatgtctgacgttacaaggcagttattcatctatggatctttccatttattaattacacaataaatacaggaatgtatacttaaaccaaaccaaaagt

SEQ ID NO: 70001 - DNA, 201 bp, Homo sapiens
gaaccttgacatctatgaacagcaagtgatgactgcagcccaaaaggatgtacagattatagtgtttccagaagatggcattcatggattcaactttacargaacatccatttatccatttttggacttcatgccgtctccccaggtggtcaggtggaacccatgcctggagcctcaccgcttcaatgacacagaggtgat

SEQ ID NO: 70002 - DNA, 201 bp, Homo sapiens; identical to SEQ ID NO: 69954

SEQ ID NO: 70003 - DNA, 201 bp, Homo sapiens
attacattccagatttgtggtctgcattatgtctggagccagaagtaagcttgctcttttcctctgcggctgttacgtggttgccctgggagcccacaccrgggaggagagcgtggctgaccatcacgaggctgaatattatgtggctgccgtgtatgagcatccatccatcctgagtctgaaccctctggctctcatcag

SEQ ID NO: 70004 - DNA, 201 bp, Homo sapiens
taagtcagggaccagaagctgtgacatgttaactaagattgataggagaccttaacatccccaaaatccaacccaaactcccaaagatccatgtgccacaygttcattccattaaagaatgtctgacgttacaaggcagttattcatctatggatctttccatttattaattacacaataaatacaggaatgtatacttaa

SEQ ID NO: 70005 - DNA, 201 bp, Homo sapiens
tcatggattcaactttacaagaacatccatttatccatttttggacttcatgccgtctccccaggtggtcaggtggaacccatgcctggagcctcaccgcytcaatgacacagaggtgattcctgcctttttcctcagtaggctgagggtacacagaggtgatctaagtcagggaccagaagctgtgacatgttaactaag

SEQ ID NO: 70006 - DNA, 201 bp, Homo sapiens
gccaagctgtgttattagggtcatgacaatcacagacattacggatggctgacctgtagtatggatagagggcagagggtagagtgtgaaatatatcacaraattatgtcaaataatctggatagttactactgcttaaaatctaagtgcacagctagaaaagtgggtagtgacgcactacagtcttgctgaacactgggt

SEQ ID NO: 70007 - DNA, 122 bp, Homo sapiens
atggcggactacctgatcaccrgcagcaccggctacgtgcccagggatgggctcactgtgccccagctcttcgtcggcgctgacggcctcacccacaacgacttcctgattcttccaggatt

SEQ ID NO: 70008 - DNA, 201 bp, Homo sapiens
cgttgaaagaggcaaaagagatcctaagtgtagcgagaaagggaagctgcctatcgtcaatgatcgcgattaactggtggccatcatcacccactccgacctgaagaagaacagagactaccctctggcctccaaggattcccacaagcagctgctgtgcagggcagctgtgggcacccgtgaggatgacaaatactgcct

SEQ ID NO: 70009 - DNA, 201 bp, Homo sapiens
gttgaaagaggcaaaagagatcctaagtgtagcgagaaagggaagctgcctatcgtcaatgatcgcgattaactggtggccatcatcacccactccgacctgaagaagaacagagactaccctctggcctccaaggattcccacaagcagctgctgtgcagggcagctgtgggcacccgtgaggatgacaaatactgcctg

SEQ ID NO: 70010 - DNA, 201 bp, Homo sapiens
ttgaaagaggcaaaagagatcctaagtgtagcgagaaagggaagctgcctatcgtcaatgatcgcgattaactggtggccatcatcacccactccgacctgaagaagaacagagactaccctctggcctccaaggattcccacaagcagctgctgtgcagggcagctgtgggcacccgtgaggatgacaaatactgcctgg

SEQ ID NO: 70011 - DNA, 201 bp, Homo sapiens
gccctgcaggccagtgcactggctgcctggggtggcaaggctgcaaacaaggaggcaacccaggaggcttttatgaagcgggccatggctaactgccaggyggccaaaggacagtatgttcacacgggttcttctggggctgcttccacccagtcgctcttcacagcctgctatacctactagggtccaatgcccgccagc

SEQ ID NO: 70012 - DNA, 201 bp, Homo sapiens
tgatgagaagtctataaaaattgtgtgctaccaaagatctgtcttatttggcagctgctgcctcacccacagcttttgatatctaggaggactcttctctyccaaactacctgtcaccatggcccaccgatttccagccctcacccaggagcagaagaaggagctctcagaaattgcccagagcattgttgccaatggaaa

SEQ ID NO: 70013 - DNA, 201 bp, Homo sapiens
ctacgccagcatctgtcagcagaatggactggtacctattgttgaaccagaggtaattcctgatggagaccatgacctggaacactgccagtatgttactsagaaggtcctggctgctgtctacaaggccctgaatgaccatcatgtttacctggagggcaccctgctaaagcccaacatggtgactgctggacatgcctg

SEQ ID NO: 70014 - DNA, 201 bp, Homo sapiens
tggaaaggggatcctggctgcagatgaatctgtaggtaccatggggaaccgcctgcagaggatcaaggtggaaaacactgaagagaaccgccggcagttcygagaaatcctcttctctgtggacagttccatcaaccagagcatcgggggtgtgatccttttccacgagaccctctaccagaaggacagccagggaaagct

SEQ ID NO: 70015 - DNA, 201 bp, Homo sapiens
ctaccaaagatctgtcttatttggcagctgctgcctcacccacagcttttgatatctaggaggactcttctctcccaaactacctgtcaccatggcccacygatttccagccctcacccaggagcagaagaaggagctctcagaaattgcccagagcattgttgccaatggaaaggggatcctggctgcagatgaatctgt

SEQ ID NO: 70016 - DNA, 201 bp, Homo sapiens
attgtgtgctaccaaagatctgtcttatttggcagctgctgcctcacccacagcttttgatatctaggaggactcttctctcccaaactacctgtcaccayggcccaccgatttccagccctcacccaggagcagaagaaggagctctcagaaattgcccagagcattgttgccaatggaaaggggatcctggctgcagat

SEQ ID NO: 70017 - DNA, 201 bp, Homo sapiens
ggtgttgactttgggaagtggcgtgctgtgctgaggattgccgaccagtgtccatccagcctcgctatccaggaaaacgccaacgccctggctcgctacgmcagcatctgtcagcagaatggactggtacctattgttgaaccagaggtaattcctgatggagaccatgacctggaacactgccagtatgttactgagaag

SEQ ID NO: 70018 - DNA, 201 bp, Homo sapiens
aacccaggaggcttttatgaagcgggccatggctaactgccaggcggccaaaggacagtatgttcacacgggttcttctggggctgcttccacccagtcgstcttcacagcctgctatacctactagggtccaatgcccgccagcctagctccagtgcttctagtaggagggctgaaagggagcaacttttcctccaatcc

SEQ ID NO: 70019 - DNA, 201 bp, Homo sapiens
tggctcgctacgccagcatctgtcagcagaatggactggtacctattgttgaaccagaggtaattcctgatggagaccatgacctggaacactgccagtawgttactgagaaggtcctggctgctgtctacaaggccctgaatgaccatcatgtttacctggagggcaccctgctaaagcccaacatggtgactgctggac

SEQ ID NO: 70020 - DNA, 201 bp, Homo sapiens
agtcgctcttcacagcctgctatacctactagggtccaatgcccgccagcctagctccagtgcttctagtaggagggctgaaagggagcaacttttcctcyaatcctggaaattcgacacaattagatttgaactgctggaaatacaacacatgttaaatcttaagtacaagggggaaaaaataaatcagttattgaaaca

SEQ ID NO: 70021 - DNA, 201 bp, Homo sapiens
tgcaggaacaaacaaagaaaccaccattcaagggcttgatggcctctcagagcgctgtgctcagtacaagaaagatggtgttgactttgggaagtggcgtsctgtgctgaggattgccgaccagtgtccatccagcctcgctatccaggaaaacgccaacgccctggctcgctacgccagcatctgtcagcagaatggact

SEQ ID NO: 70022 - DNA, 201 bp, Homo sapiens
ttgtctggtggcatgagtgaagaggatgccactctcaacctcaatgctatcaacctttgccctctaccaaagccctggaaactaagtttctcttatggacrggccctgcaggccagtgcactggctgcctggggtggcaaggctgcaaacaaggaggcaacccaggaggcttttatgaagcgggccatggctaactgccag

SEQ ID NO: 70023 - DNA, 201 bp, Homo sapiens
tttgtctggtggcatgagtgaagaggatgccactctcaacctcaatgctatcaacctttgccctctaccaaagccctggaaactaagtttctcttatggaygggccctgcaggccagtgcactggctgcctggggtggcaaggctgcaaacaaggaggcaacccaggaggcttttatgaagcgggccatggctaactgcca

SEQ ID NO: 70024 - DNA, 201 bp, Homo sapiens
atggacgggccctgcaggccagtgcactggctgcctggggtggcaaggctgcaaacaaggaggcaacccaggaggcttttatgaagcgggccatggctaastgccaggcggccaaaggacagtatgttcacacgggttcttctggggctgcttccacccagtcgctcttcacagcctgctatacctactagggtccaatgc

SEQ ID NO: 70025 - DNA, 201 bp, Homo sapiens
agaaggtcctggctgctgtctacaaggccctgaatgaccatcatgtttacctggagggcaccctgctaaagcccaacatggtgactgctggacatgcctgmaccaagaagtatactccagaacaagtagctatggccaccgtaacagctctccaccgtactgttcctgcagctgttcctggcatctgctttttgtctggtg

SEQ ID NO: 70026 - DNA, 201 bp, Homo sapiens
ctgaggattgccgaccagtgtccatccagcctcgctatccaggaaaacgccaacgccctggctcgctacgccagcatctgtcagcagaatggactggtacstattgttgaaccagaggtaattcctgatggagaccatgacctggaacactgccagtatgttactgagaaggtcctggctgctgtctacaaggccctgaat

SEQ ID NO: 70027 - DNA, 201 bp, Homo sapiens
tcctcttgcaggaacaaacaaagaaaccaccattcaagggcttgatggcctctcagagcgctgtgctcagtacaagaaagatggtgttgactttgggaagyggcgtgctgtgctgaggattgccgaccagtgtccatccagcctcgctatccaggaaaacgccaacgccctggctcgctacgccagcatctgtcagcagaa

SEQ ID NO: 70028 - DNA, 201 bp, Homo sapiens
ggcgtgctgtgctgaggattgccgaccagtgtccatccagcctcgctatccaggaaaacgccaacgccctggctcgctacgccagcatctgtcagcagaakggactggtacctattgttgaaccagaggtaattcctgatggagaccatgacctggaacactgccagtatgttactgagaaggtcctggctgctgtctaca

SEQ ID NO: 70029 - DNA, 201 bp, Homo sapiens
actggtacctattgttgaaccagaggtaattcctgatggagaccatgacctggaacactgccagtatgttactgagaaggtcctggctgctgtctacaagrccctgaatgaccatcatgtttacctggagggcaccctgctaaagcccaacatggtgactgctggacatgcctgcaccaagaagtatactccagaacaagt

SEQ ID NO: 70030 - DNA, 201 bp, Homo sapiens
agagcattgttgccaatggaaaggggatcctggctgcagatgaatctgtaggtaccatggggaaccgcctgcagaggatcaaggtggaaaacactgaagasaaccgccggcagttccgagaaatcctcttctctgtggacagttccatcaaccagagcatcgggggtgtgatccttttccacgagaccctctaccagaagg

SEQ ID NO: 70031 - DNA, 201 bp, Homo sapiens
gccctgcaggccagtgcactggctgcctggggtggcaaggctgcaaacaaggaggcaacccaggaggcttttatgaagcgggccatggctaactgccaggyggccaaaggacagtatgttcacacgggttcttctggggctgcttccacccagtcgctcttcacagcctgctatacctactagggtccaatgcttttcctc

SEQ ID NO: 70032 - DNA, 201 bp, Homo sapiens; identical to SEQ ID NO: 70012

SEQ ID NO: 70033 - DNA, 201 bp, Homo sapiens; identical to SEQ ID NO: 70013

SEQ ID NO: 70034 - DNA, 201 bp, Homo sapiens; identical to SEQ ID NO: 70014

SEQ ID NO: 70035 - DNA, 201 bp, Homo sapiens; identical to SEQ ID NO: 70015

SEQ ID NO: 70036 - DNA, 201 bp, Homo sapiens; identical to SEQ ID NO: 70016

SEQ ID NO: 70037 - DNA, 201 bp, Homo sapiens; identical to SEQ ID NO: 70017

SEQ ID NO: 70038 - DNA, 201 bp, Homo sapiens
aacccaggaggcttttatgaagcgggccatggctaactgccaggcggccaaaggacagtatgttcacacgggttcttctggggctgcttccacccagtcgstcttcacagcctgctatacctactagggtccaatgcttttcctccaatcctggaaattcgacacaattagatttgaactgctggaaatacaacacatgtt

SEQ ID NO: 70039 - DNA, 201 bp, Homo sapiens; identical to SEQ ID NO: 70019

SEQ ID NO: 70040 - DNA, 201 bp, Homo sapiens
ggccaaaggacagtatgttcacacgggttcttctggggctgcttccacccagtcgctcttcacagcctgctatacctactagggtccaatgcttttcctcyaatcctggaaattcgacacaattagatttgaactgctggaaatacaacacatgttaaatcttaagtacaagggggaaaaaataaatcagttattgaaaca

SEQ ID NO: 70041 - DNA, 201 bp, Homo sapiens; identical to SEQ ID NO: 70021

SEQ ID NO: 70042 - DNA, 201 bp, Homo sapiens; identical to SEQ ID NO: 70022

SEQ ID NO: 70043 - DNA, 201 bp, Homo sapiens; identical to SEQ ID NO: 70023

SEQ ID NO: 70044 - DNA, 201 bp, Homo sapiens; identical to SEQ ID NO: 70024

SEQ ID NO: 70045 - DNA, 201 bp, Homo sapiens; identical to SEQ ID NO: 70025

SEQ ID NO: 70046 - DNA, 201 bp, Homo sapiens; identical to SEQ ID NO: 70026

SEQ ID NO: 70047 - DNA, 201 bp, Homo sapiens; identical to SEQ ID NO: 70027

SEQ ID NO: 70048 - DNA, 201 bp, Homo sapiens; identical to SEQ ID NO: 70028

SEQ ID NO: 70049 - DNA, 201 bp, Homo sapiens; identical to SEQ ID NO: 70029

SEQ ID NO: 70050 - DNA, 201 bp, Homo sapiens; identical to SEQ ID NO: 70030

SEQ ID NO: 70051 - DNA, 201 bp, Homo sapiens
ctcttccttgggcgaggaaatagattctcatgatgcggttttgagatttaactctgctcctacacgtggttatgagaaagatgttgggaataaaaccaccrtacgcatcattaattcgcagattctgaccaaccccagccatcacttcattgacagttcactgtataaagacgtcattttggtggcctgggaccctgcccc

SEQ ID NO: 70052 - DNA, 201 bp, Homo sapiens
gccagctgcacccccgcggcctgcgcagctgcgctgtcgtcatgtctgcaggcgcaatcctcaactcttccttgggcgaggaaatagattctcatgatgcrgttttgagatttaactctgctcctacacgtggttatgagaaagatgttgggaataaaaccaccatacgcatcattaattcgcagattctgaccaacccca

SEQ ID NO: 70053 - DNA, 160 bp, Homo sapiens
caccctcggggcgtaccacccactactctatgagaagctcctggtgcagcgcctgaacatgggcacgcagggggatttgcatcgcaagggcaaggtggttsttcccggcttccaggcggtgcactgccctgcaccaagtccagtcattccacactcttaa

SEQ ID NO: 70054 - DNA, 155 bp, Homo sapiens
tcggggcgtaccacccactactctatgagaagctcctggtgcagcgcctgaacatgggcacgcagggggatttgcatcgcaagggcaaggtggttcttccyggcttccaggcggtgcactgccctgcaccaagtccagtcattccacactcttaa

SEQ ID NO: 70055 - DNA, 201 bp, Homo sapiens
gggagccaggcccacgggagggggcttttccggctgcacaggtccagaggaggcgggtgaagaagaggcaccggaggcagagaaggagccacgtgttggargagggcgacgacggcgacaggctgtactcctccatgtccagggccttcctgtaccggctctggaaggggaacgtctcttccaaaatgctgaacccgcgcc

SEQ ID NO: 70056 - DNA, 201 bp, Homo sapiens
atcctaaatttatatggcagctctgggatattatccaggagaacactaaagagaagattcaaccaaacccaccatcttctggtttcattggaatcctcatmatgatgtccatgtgcagagaggtgcacgtgtatgaatatatcccatccgtgcggcagacggagctgtgccactaccacgagctgtactacgacgcagcct

SEQ ID NO: 70057 - DNA, 201 bp, Homo sapiens
tcaaagtgctttctacccggaggatgacgactacttttttgctgctggtcagccagggtggcacagccacactcaggggacattgggattcccttcccccrgggagccaggcccacgggagggggcttttccggctgcacaggtccagaggaggcgggtgaagaagaggcaccggaggcagagaaggagccacgtgttgga

SEQ ID NO: 70058 - DNA, 201 bp, Homo sapiens
gaagcacaatatacaagcagtggtgcttgttccgactagagaacttgctctacaggtcagtcaaatttgcgtccaggtcaggaaacacatgggaggggccmaagtgatggcaaccacaggaggaaccaatttacgagatgacataattaggcttgatgatacaatgcacgtagtgattgctacccctaggagaatcctgga

SEQ ID NO: 70059 - DNA, 201 bp, Homo sapiens
gaccctcattaccctgggtgccaagctgcagtggtccagctgcaacatcacccaggaccatgaggcagctgccattgccaaggctggcattccagttgtaygcctggaagggcgaaacagaggaggagtacctgtggtgcaccaagcagacattatacttcaaagacggcctcctcaacgtgattctggatgtcgcttggg

SEQ ID NO: 70060 - DNA, 201 bp, Homo sapiens
gtacgcctggaagggcgaaacagaggaggagtacctgtggtgcaccaagcagacattatacttcaaagacggcctcctcaacgtgattctggatgtcgctkgggcccccaccaacctcatccacaccaagtacccacagctcttgtcggggatgtgaggcatcttcaaggagaccatgattggggtccacaagctacacaa

SEQ ID NO: 70061 - DNA, 201 bp, Homo sapiens
aagcagacattatacttcaaagacggcctcctcaacgtgattctggatgtcgcttgggcccccaccaacctcatccacaccaagtacccacagctcttgtyggggatgtgaggcatcttcaaggagaccatgattggggtccacaagctacacaagatgatggccaatgggatcctgaaagtgcctgccatcaatgtcaac

SEQ ID NO: 70062 - DNA, 201 bp, Homo sapiens; identical to SEQ ID NO: 70059

SEQ ID NO: 70063 - DNA, 201 bp, Homo sapiens; identical to SEQ ID NO: 70060

SEQ ID NO: 70064 - DNA, 201 bp, Homo sapiens; identical to SEQ ID NO: 70061

SEQ ID NO: 70065 - DNA, 201 bp, Homo sapiens
tgtgtgagcggcggaagtttcttcatgacaacatggttgaaattccaaaccggatcatgttctcagaaatgaagcgagtcacacatctctcttgtccctcygaaagctttggacttggctgacatgataacccgggtgatccaggagggattggaggggctggtgctgaaggatgtgaagggtacatatgagcctgggaag

SEQ ID NO: 70066 - DNA, 201 bp, Homo sapiens
aatcggaggctcatacagctgacgggatctccatccgattccctcgctgcacccgaatccgagatgataaggactggaaatctgccactaaccttccccarctcaaggaactgtaccagttgtccaaggagaaggcagacttcactgtagtggctggagatgaggggagctccactacagggggtagcagtgaagagaata

SEQ ID NO: 70067 - DNA, 201 bp, Homo sapiens
atgcagactgcaaagccttccgctatgaaggtgggggagaagctggccacaaagtcttctccagtgaaagtaggggagaagcggaaagctgctgatgagaygctgtgccaaacaaaggtattgctggacatcttcactggggtgcggctttacttgccaccctccacaccagacttcagccgtctcagacgctactttgtg

SEQ ID NO: 70068 - DNA, 201 bp, Homo sapiens
gagaggcagctatatgtctttggctttcaagatcttctttccacaaaccctccgtgcactcagccgaaaagaactgtgcctattccgaaaacatcactggygtgatgtaagacaattcagccagtggtcagaaacagatctgcttcatggacatcccctcttcctgagaagaaagcctgttctatcattccagggaagcca

SEQ ID NO: 70069 - DNA, 201 bp, Homo sapiens
acgtgccacctaccttgttttcttgccagggttgcatgtgggactctgcagtggcccctgtgagatggctgagcaacggttctgtgtggactatgccaagygtggcacagctggctgcaaaaaatgcaaggaaaagattgtgaagggcgtatgccgaattggcaaagtggtgcccaatcccttctcagagtctgggggtga

SEQ ID NO: 70070 - DNA, 201 bp, Homo sapiens
gtctcagacgctactttgtggcattcgacggggacctggtacaggaatttgatatgacttcagccacgcacgtgctgggtagcagggacaagaaccctgcrgcccagcaggtctccccagagtggatttgggcatgtatccggaaacggagactggtagctccctgctaggtttgctgtcttccctctccctcaggccata

SEQ ID NO: 70071 - DNA, 201 bp, Homo sapiens
agtgaagagaataagggtccctcagggtctgctgtgtcccgcaaggcccccagcaagccctcagccagtaccaagaaagcagaagggaagctgagtaactycaacagcaaagatggcaacatgcagactgcaaagccttccgctatgaaggtgggggagaagctggccacaaagtcttctccagtgaaagtaggggagaag

SEQ ID NO: 70072 - DNA, 201 bp, Homo sapiens
ctgccgtgtgggagatcacaggggctgaattctccaaatcggaggctcatacagctgacgggatctccatccgattccctcgctgcacccgaatccgagaygataaggactggaaatctgccactaaccttccccaactcaaggaactgtaccagttgtccaaggagaaggcagacttcactgtagtggctggagatgagg

SEQ ID NO: 70073 - DNA, 201 bp, Homo sapiens
tacaccaaagaagaaagctgttgtccaggctaagttgacaaccactggccaggtgacttctccagtgaaaggcgcctcatttgtcaccagtaccaatcccyggaaattttctggcttttcagccaagcccaacaactctggggaagccccctcgagccccacccctaagagaagtctgtcttcaagcaaatgtgaccccag

SEQ ID NO: 70074 - DNA, 158 bp, Homo sapiens
cccatccttgcctgttcctttgtacttccaggctcattttaaagttgtatttaaaggactgccctcggaaatgcttctgtttagcggaacttgtattcagsctgacacgctttgccaggaacaaacctcatgtgaaagaaaacaaaatgaattttttt

SEQ ID NO: 70075 - DNA, 201 bp, Homo sapiens
gagtggatttgggcatgtatccggaaacggagactggtagctccctgctaggtttgctgtcttccctctccctcaggccatactctcctttaccatactaytggactggactcaggctggaggcagatagacacagtatagggggaatgggcttgcttctcccaaacccaccagttctccactgtctcttctggaccagga

SEQ ID NO: 70076 - DNA, 201 bp, Homo sapiens
ctgtgtgagcggcggaagtttcttcatgacaacatggttgaaattccaaaccggatcatgttctcagaaatgaagcgagtcacacatctctcttgtccctyagaaagctttggacttggctgacatgataacccgggtgatccaggagggattggaggggctggtgctgaaggatgtgaagggtacatatgagcctgggaa

SEQ ID NO: 70077 - DNA, 201 bp, Homo sapiens
ataacccgggtgatccaggagggattggaggggctggtgctgaaggatgtgaagggtacatatgagcctgggaagcggcactggctgaaagtgaagaaagwctatttgaacgagggggccatggccgacacagctgacctggtggtccttggagccttctatgggcaagggagcaaaggcggcatgatgtcaatcttcctc

SEQ ID NO: 70078 - DNA, 201 bp, Homo sapiens
gtgtcccgcaaggcccccagcaagccctcagccagtaccaagaaagcagaagggaagctgagtaactccaacagcaaagatggcaacatgcagactgcaamgccttccgctatgaaggtgggggagaagctggccacaaagtcttctccagtgaaagtaggggagaagcggaaagctgctgatgagacgctgtgccaaaca

SEQ ID NO: 70079 - DNA, 201 bp, Homo sapiens
gagaaggcagacttcactgtagtggctggagatgaggggagctccactacagggggtagcagtgaagagaataagggtccctcagggtctgctgtgtcccrcaaggcccccagcaagccctcagccagtaccaagaaagcagaagggaagctgagtaactccaacagcaaagatggcaacatgcagactgcaaagccttcc

SEQ ID NO: 70080 - DNA, 201 bp, Homo sapiens
cagccgtctcagacgctactttgtggcattcgacggggacctggtacaggaatttgatatgacttcagccacgcacgtgctgggtagcagggacaagaacyctgcggcccagcaggtctccccagagtggatttgggcatgtatccggaaacggagactggtagctccctgctaggtttgctgtcttccctctccctcagg

SEQ ID NO: 70081 - DNA, 201 bp, Homo sapiens
ggatctccatccgattccctcgctgcacccgaatccgagatgataaggactggaaatctgccactaaccttccccaactcaaggaactgtaccagttgtcyaaggagaaggcagacttcactgtagtggctggagatgaggggagctccactacagggggtagcagtgaagagaataagggtccctcagggtctgctgtgt

SEQ ID NO: 70082 - DNA, 201 bp, Homo sapiens
cttgatggacagacctctgtgtgagcggcggaagtttcttcatgacaacatggttgaaattccaaaccggatcatgttctcagaaatgaagcgagtcacayaagctttggacttggctgacatgataacccgggtgatccaggagggattggaggggctggtgctgaaggatgtgaagggtacatatgagcctgggaagcg

SEQ ID NO: 70083 - DNA, 201 bp, Homo sapiens; identical to SEQ ID NO: 70066

SEQ ID NO: 70084 - DNA, 201 bp, Homo sapiens; identical to SEQ ID NO: 70067

SEQ ID NO: 70085 - DNA, 201 bp, Homo sapiens; identical to SEQ ID NO: 70068

SEQ ID NO: 70086 - DNA, 201 bp, Homo sapiens; identical to SEQ ID NO: 70069

SEQ ID NO: 70087 - DNA, 201 bp, Homo sapiens; identical to SEQ ID NO: 70070

SEQ ID NO: 70088 - DNA, 201 bp, Homo sapiens; identical to SEQ ID NO: 70071

SEQ ID NO: 70089 - DNA, 201 bp, Homo sapiens; identical to SEQ ID NO: 70072

SEQ ID NO: 70090 - DNA, 201 bp, Homo sapiens; identical to SEQ ID NO: 70073

SEQ ID NO: 70091 - DNA, 158 bp, Homo sapiens; identical to SEQ ID NO: 70074

SEQ ID NO: 70092 - DNA, 201 bp, Homo sapiens; identical to SEQ ID NO: 70075

SEQ ID NO: 70093 - DNA, 201 bp, Homo sapiens; identical to SEQ ID NO: 70077

SEQ ID NO: 70094 - DNA, 201 bp, Homo sapiens; identical to SEQ ID NO: 70078

SEQ ID NO: 70095 - DNA, 201 bp, Homo sapiens; identical to SEQ ID NO: 70079

SEQ ID NO: 70096 - DNA, 201 bp, Homo sapiens; identical to SEQ ID NO: 70080

SEQ ID NO: 70097 - DNA, 201 bp, Homo sapiens; identical to SEQ ID NO: 70081

SEQ ID NO: 70098 - DNA, 201 bp, Homo sapiens; identical to SEQ ID NO: 70071

SEQ ID NO: 70099 - DNA, 201 bp, Homo sapiens; identical to SEQ ID NO: 70082

SEQ ID NO: 70100 - DNA, 201 bp, Homo sapiens; identical to SEQ ID NO: 70072

SEQ ID NO: 70101 - DNA, 201 bp, Homo sapiens; identical to SEQ ID NO: 70073

SEQ ID NO: 70102 - DNA, 142 bp, Homo sapiens
ccagcaggcaggagatagaacagcccggcctagccaggagagactgcagggactcactcagctgctggccccaagtcaaaatttacattaaagggaaaagmccagtctgggtgtgggaatgcagcattgagtttgtggtcag

SEQ ID NO: 70103 - DNA, 201 bp, Homo sapiens; identical to SEQ ID NO: 70066

SEQ ID NO: 70104 - DNA, 201 bp, Homo sapiens; identical to SEQ ID NO: 70077

SEQ ID NO: 70105 - DNA, 147 bp, Homo sapiens
ctgtgccagcaggcaggagatagaacagcccggcctagccaggagagactgcagggactcactcagctgctggccccaagtcaaaatttacattaaagggraaagcccagtctgggtgtgggaatgcagcattgagtttgtggtcag

SEQ ID NO: 70106 - DNA, 201 bp, Homo sapiens
atgcagactgcaaagccttccgctatgaaggtgggggagaagctggccacaaagtcttctccagtgaaagtaggggagaagcggaaagctgctgatgagaygctgtgccaaacaaagaggcggccagccagtgagcagagaggaagaactgtgccagcaggcaggagatagaacagcccggcctagccaggagagactgca

SEQ ID NO: 70107 - DNA, 201 bp, Homo sapiens; identical to SEQ ID NO: 70078

SEQ ID NO: 70108 - DNA, 201 bp, Homo sapiens; identical to SEQ ID NO: 70068

SEQ ID NO: 70109 - DNA, 201 bp, Homo sapiens; identical to SEQ ID NO: 70079

SEQ ID NO: 70110 - DNA, 201 bp, Homo sapiens; identical to SEQ ID NO: 70081

SEQ ID NO: 70111 - DNA, 201 bp, Homo sapiens; identical to SEQ ID NO: 70069

SEQ ID NO: 70112 - DNA, 201 bp, Homo sapiens
gaaggaggtgggaaaagaggacttattgttgtcatggcccatgagatgattggaactcaaattgttactgagaggttggtggctctgctggaaagtggaayggaaaaagtgctgctaattgatagccggccatttgtggaatacaatacatcccacattttggaagccattaatatcaactgctccaagcttatgaagcga

SEQ ID NO: 70113 - DNA, 201 bp, Homo sapiens
tatatatatgtacatacatatatatttttggaaaatggagctatggtgtaaaagcaacaggtggatcaacccagttgttactctcttaacatctgcatttsagagatcagctaatacttctctcaacaaaaatggaagggcagatgctagaatcccccctagacggaggaaaaccattttattcagtgaattacacatcct

SEQ ID NO: 70114 - DNA, 201 bp, Homo sapiens
gcgaaggggtggcctcggaggcaggctctggagctgcttggatgtctttaggtggggtggtggctggctctcttcagcatgtaattggggaaaccctcgcktctactaggggtgatacagatggtgattttaaagagcaaaactagacttctatgtgagaagtgctggaaaatgatttaggacatgtgtaaagttagatgg

SEQ ID NO: 70115 - DNA, 201 bp, Homo sapiens
tggaatcggtcctggcagctgaacataggaggtcactggaacaagtgatagtgcagattggctttcaaacatcctcctggcttgagttttatcagctacartgtgggtcctcttttgaagccttaattcacaacagcagctttttgggggtggggctgggcgggtgttgtcattgttctttcccttcctgtaagtgtcgct

SEQ ID NO: 70116 - DNA, 201 bp, Homo sapiens
gggaagattaagaaaggtacaaattgctgaggagaagcaggaaacctgtttccttagtggcttttatcccctcggcatgcgatggggctgatgtttctatrattgcctcagactttcacatttactagtagggctgagagaggctttagtgaggaaggaatattcagaataaaacggttgagaaagctgagaagaccattg

SEQ ID NO: 70117 - DNA, 201 bp, Homo sapiens
ggcgaaggggtggcctcggaggcaggctctggagctgcttggatgtctttaggtggggtggtggctggctctcttcagcatgtaattggggaaaccctcgygtctactaggggtgatacagatggtgattttaaagagcaaaactagacttctatgtgagaagtgctggaaaatgatttaggacatgtgtaaagttagatg

SEQ ID NO: 70118 - DNA, 201 bp, Homo sapiens
aaagcaacaggtggatcaacccagttgttactctcttaacatctgcatttgagagatcagctaatacttctctcaacaaaaatggaagggcagatgctagratcccccctagacggaggaaaaccattttattcagtgaattacacatcctcttgttcttaaaaaagcaagtgtctttggtgttggaggacaaaatcccct

SEQ ID NO: 70119 - DNA, 201 bp, Homo sapiens
acaagctatgccagttctcccctgttcaggaactatcggagcagactcccgaaaccagtcctgataaggaggaagccagcatccccaagaagctgcagacygccaggccttcagacagccagagcaagcgattgcattcggtcagaaccagcagcagtggcaccgcccagaggtcccttttatctccactgcatcgaagtg

SEQ ID NO: 70120 - DNA, 201 bp, Homo sapiens
gtgtaacagttcaccacttccagagtgtggtcatgcccaaaacatgtttaagaaaggaaagcagtagctccttgctaacgatgtttcaggaggtttggggsacttggttttaatgagcttctgtcatttagggcttctcttggccatggtccccttccttctggaactgtgatgtagtcacatcctacagcctttagtgct

SEQ ID NO: 70121 - DNA, 135 bp, Homo sapiens
aatgcctctttatgccactcaccttatggggctgrtggagagtccacgtaaaggataaccgtttcctcaaaggatttatgctgtttcacctccatcaagaaaagggctttttaaagttaaggctttcagtccagt

SEQ ID NO: 70122 - DNA, 201 bp, Homo sapiens
gacagaaaagcgagacgcccctcagtccaccctgtgccgactctgctacctcagaggcagcaggacaaaggcccgtgcatcccgccagcgtgcccagcgtrcccagcgtgcagccgtcgctgttagaggacagcccgctggtacaggcgctcagtgggctgcacctgtccgcagacaggctggaagacagcaataagctca

SEQ ID NO: 70123 - DNA, 201 bp, Homo sapiens
aagcgagacgcccctcagtccaccctgtgccgactctgctacctcagaggcagcaggacaaaggcccgtgcatcccgccagcgtgcccagcgtgcccagcrtgcagccgtcgctgttagaggacagcccgctggtacaggcgctcagtgggctgcacctgtccgcagacaggctggaagacagcaataagctcaagcgttc

SEQ ID NO: 70124 - DNA, 201 bp, Homo sapiens
attggggaaaccctcgcgtctactaggggtgatacagatggtgattttaaagagcaaaactagacttctatgtgagaagtgctggaaaatgatttaggacatgtgtaaagttagatggaaagactgtaaatgtttaatatgaatatagtgttcttttgaagtaaggccagctgttgaacggttaaactgtgcatttctcat

SEQ ID NO: 70125 - DNA, 201 bp, Homo sapiens
ttggggaaaccctcgcgtctactaggggtgatacagatggtgattttaaagagcaaaactagacttctatgtgagaagtgctggaaaatgatttaggacatgtgtaaagttagatggaaagactgtaaatgtttaatatgaatatagtgttcttttgaagtaaggccagctgttgaacggttaaactgtgcatttctcatt

SEQ ID NO: 70126 - DNA, 201 bp, Homo sapiens
gcacagacctcactagttgtgcacaaataatgtgctatgatggggtgtaaagtgaaggcagaagagggtcagccgcattgttatgatactgggaaagtgcyggtcaacgatttgagttagtttttagatatacattgaaatctttaatcagacattctcaagtttcacacagtagtttttgatgttatgtacacacacacc

SEQ ID NO: 70127 - DNA, 201 bp, Homo sapiens
cagagggtggacagaaaagcgagacgcccctcagtccaccctgtgccgactctgctacctcagaggcagcaggacaaaggcccgtgcatcccgccagcgtrcccagcgtgcccagcgtgcagccgtcgctgttagaggacagcccgctggtacaggcgctcagtgggctgcacctgtccgcagacaggctggaagacagca

SEQ ID NO: 70128 - DNA, 201 bp, Homo sapiens; identical to SEQ ID NO: 70112

SEQ ID NO: 70129 - DNA, 201 bp, Homo sapiens; identical to SEQ ID NO: 70113

SEQ ID NO: 70130 - DNA, 201 bp, Homo sapiens; identical to SEQ ID NO: 70114

SEQ ID NO: 70131 - DNA, 201 bp, Homo sapiens; identical to SEQ ID NO: 70115

SEQ ID NO: 70132 - DNA, 201 bp, Homo sapiens; identical to SEQ ID NO: 70116

SEQ ID NO: 70133 - DNA, 201 bp, Homo sapiens; identical to SEQ ID NO: 70117

SEQ ID NO: 70134 - DNA, 201 bp, Homo sapiens; identical to SEQ ID NO: 70118

SEQ ID NO: 70135 - DNA, 201 bp, Homo sapiens; identical to SEQ ID NO: 70119

SEQ ID NO: 70136 - DNA, 201 bp, Homo sapiens; identical to SEQ ID NO: 70120

SEQ ID NO: 70137 - DNA, 135 bp, Homo sapiens; identical to SEQ ID NO: 70121

SEQ ID NO: 70138 - DNA, 201 bp, Homo sapiens; identical to SEQ ID NO: 70122

SEQ ID NO: 70139 - DNA, 201 bp, Homo sapiens; identical to SEQ ID NO: 70123

SEQ ID NO: 70140 - DNA, 201 bp, Homo sapiens; identical to SEQ ID NO: 70124

SEQ ID NO: 70141 - DNA, 201 bp, Homo sapiens; identical to SEQ ID NO: 70125

SEQ ID NO: 70142 - DNA, 201 bp, Homo sapiens; identical to SEQ ID NO: 70126

SEQ ID NO: 70143 - DNA, 201 bp, Homo sapiens; identical to SEQ ID NO: 70127

SEQ ID NO: 70144 - DNA, 201 bp, Homo sapiens; identical to SEQ ID NO: 70112

SEQ ID NO: 70145 - DNA, 135 bp, Homo sapiens; identical to SEQ ID NO: 70121

SEQ ID NO: 70146 - DNA, 201 bp, Homo sapiens
ttgtggaagaggaggaaactaaaacatttaaagacctgggtgtgacagatgtgttgtgtgaagcttgtgaccagttgggatggacaaaacccaccaagatycagattgaagctattcctttggccttacaagctgtgattgtaggtggaattgattcaatgtctcaatctttggcccttgcaaaaaaaccacatataataa

SEQ ID NO: 70147 - DNA, 201 bp, Homo sapiens
ttgtggaagaggaggaaactaaaacatttaaagacctgggtgtgacagatgtgttgtgtgaagcttgtgaccagttgggatggacaaaacccaccaagatycagattgaagctattcctttggccttacaaggtcgtgatatcattgggcttgcagaaactggctctggaaagacaggcgcctttgctttgcccattctaa

SEQ ID NO: 70148 - DNA, 201 bp, Homo sapiens; identical to SEQ ID NO: 70147

SEQ ID NO: 70149 - DNA, 201 bp, Homo sapiens
gaaagtcaaaccatcactgccatgtatctgcatatgaaaaatcttttcctattaaacctgttccaagtccatcttggagtggttcatgtcgtcgaagtctyttgagccccaagaaaactcagaggcgacatgttagtacagcagaagagacagttcaagaagaagaaagagagatttacagacagctgctacagatggtca

SEQ ID NO: 70150 - DNA, 201 bp, Homo sapiens
ccattacacgcaaagatattcaaactctaaaccatctgaattggctcaatgatgagatcatcaatttctacatgaatatgctgatggagcgaagtaaagaraagggcttgccaagtgtgcatgcatttaatacctttttcttcactaaattaaaaacggctggttatcaggcagtgaaacgttggacaaagaaagtagatg

SEQ ID NO: 70151 - DNA, 201 bp, Homo sapiens
gagatgtgatatcgctagtgccaccatcagaaagaaacgtctggaccctcctgctcaggttatgaaaatccccttaactgccacaatttgcttacctggcwcatcgcctcctggactttgtatctttgctaaagtcagtgatgtgaaaagacttgaaatggatgatattgctgataggatgaggatggatgctggagaagt

SEQ ID NO: 70152 - DNA, 201 bp, Homo sapiens
tagatgtattttctgttgacattcttttggtgcccattcacctgggagtacactggtgtctagctgttgtggactttagaaagaagaatattacctattaygactccatgggtgggataaacaatgaagcctgcagaatactcttgcaatacctaaagcaagaaagcattgacaagaaaaggaaagagtttgacaccaatg

SEQ ID NO: 70153 - DNA, 201 bp, Homo sapiens
tggctctgatacttcatcatctggatctgccagcattttaactaaccaggaacagctgtcccacagtgtatattccctatcttcttataccccagatgttrcatttggatccaaagattctggtactcttcatcatccccatcatcaccactctgttccacatcagccagataacttagcagcttcaaatacacaatctga

SEQ ID NO: 70154 - DNA, 201 bp, Homo sapiens
agaccgtctccctgccgttacagcaggccccatcccagcgcccagccgtacttggggaaaggccggttgcgattccggggctttcccgccagagctgggtsttctctggggagagctgttttcaccgggaagctcggctttctgtggtaccggcttcatctcccgccttccttgagacccgagtgatatttcttgactact

SEQ ID NO: 70155 - DNA, 201 bp, Homo sapiens
agcaagaaagcattgacaagaaaaggaaagagtttgacaccaatggctggcagcttttcagcaagaaaagccagattcctcagcagatgaatggaagtgaytgtgggatgtttgcctgcaaatatgctgactgtattaccaaagacagaccaatcaacttcacacagcaacacatgccatacttccggaagcggatggtct

SEQ ID NO: 70156 - DNA, 201 bp, Homo sapiens
aacagctgtcccacagtgtatattccctatcttcttataccccagatgttgcatttggatccaaagattctggtactcttcatcatccccatcatcaccaytctgttccacatcagccagataacttagcagcttcaaatacacaatctgaaggatcagactctgtgattttactgaaagtgaaagattcccagactccaa

SEQ ID NO: 70157 - DNA, 201 bp, Homo sapiens
cttggggaaaggccggttgcgattccggggctttcccgccagagctgggtcttctctggggagagctgttttcaccgggaagctcggctttctgtggtacyggcttcatctcccgccttccttgagacccgagtgatatttcttgactacttctgcgtctcacgtaaacatttctccaactctcctactctgtggtatctc

SEQ ID NO: 70158 - DNA, 201 bp, Homo sapiens
atctagtttggtctgtggctagtttaaatatgtttctaaccacagagaatttcatatatatatacatatatatatacacatacatatatatatatatatatgtatgtataaaatttcacagggatatgcttttttttttaaagactgaatgtgttcaccatttagcctgtagatttatttccattttccaaattccagcac

SEQ ID NO: 70159 - DNA, 201 bp, Homo sapiens
gatctagtttggtctgtggctagtttaaatatgtttctaaccacagagaatttcatatatatatacatatatatatacacatacatatatatatatatatatgtatgtataaaatttcacagggatatgcttttttttttaaagactgaatgtgttcaccatttagcctgtagatttatttccattttccaaattccagca

SEQ ID NO: 70160 - DNA, 201 bp, Homo sapiens
gtatttagcataaaattccagcgctggatgaatgcagatctagtttggtctgtggctagtttaaatatgtttctaaccacagagaatttcatatatatatmcatatatatatacacatacatatatatatatatatatgtatgtataaaatttcacagggatatgcttttttttttaaagactgaatgtgttcaccattta

SEQ ID NO: 70161 - DNA, 201 bp, Homo sapiens; identical to SEQ ID NO: 70149

SEQ ID NO: 70162 - DNA, 201 bp, Homo sapiens; identical to SEQ ID NO: 70150

SEQ ID NO: 70163 - DNA, 201 bp, Homo sapiens; identical to SEQ ID NO: 70151

SEQ ID NO: 70164 - DNA, 201 bp, Homo sapiens; identical to SEQ ID NO: 70152

SEQ ID NO: 70165 - DNA, 201 bp, Homo sapiens; identical to SEQ ID NO: 70153

SEQ ID NO: 70166 - DNA, 201 bp, Homo sapiens; identical to SEQ ID NO: 70154

SEQ ID NO: 70167 - DNA, 201 bp, Homo sapiens
aagaaagcattgacaagaaaaggaaagagtttgacaccaatggctggcagcttttcagcaagaaaagccaggagattcctcagcagatgaatggaagtgaytgtgggatgtttgcctgcaaatatgctgactgtattaccaaagacagaccaatcaacttcacacagcaacacatgccatacttccggaagcggatggtct

SEQ ID NO: 70168 - DNA, 201 bp, Homo sapiens; identical to SEQ ID NO: 70156

SEQ ID NO: 70169 - DNA, 201 bp, Homo sapiens; identical to SEQ ID NO: 70157

SEQ ID NO: 70170 - DNA, 201 bp, Homo sapiens
ggctctgcaaaccccagactttgcacacagcctcaggctccacacagaaatgtgaacttggcctcagacaggctggcccttcctaggctctaggggctagsggggagtggggagccaagaggtcccatattcctgagtgcaggggtagtccctctcacctgcttcctcagacgactctggaagcttccctctaccactggg

SEQ ID NO: 70171 - DNA, 201 bp, Homo sapiens
attcctcaggactgcacagaggaggactggctccggctccgtcgggctcacccttaaccactattcctggctctgcaaaccccagactttgcacacagccycaggctccacacagaaatgtgaacttggcctcagacaggctggcccttcctaggctctaggggctaggggggagtggggagccaagaggtcccatattcc

SEQ ID NO: 70172 - DNA, 201 bp, Homo sapiens
cagcatacccctgggacccctcggccactgcccactcggggagccttctctgtttctggggcctcccccaccatagctctgattcccaccccacataggartagcctgactgagggggaaggggtgggagagaagatacagacatggaggaggggaggctgctctggcaaagtcttcaaggcttttgggggtccaggcctg

SEQ ID NO: 70173 - DNA, 172 bp, Homo sapiens
caggagctcagccccagctcaccacggcatccccgaagagttgtgactcagacacacctgggtttaagtcccagctgggagctcaggtaagtcaaatcgtyttctggggcctctgtttatcagtagaaggctccagaagtatacactgttgatggctccttcccgctctgat

SEQ ID NO: 70174 - DNA, 201 bp, Homo sapiens
cactgctccgaaaggagagtgcgccccccagcctccggcggcggcccgcagagaccctcggagactcctccccaagtagtagcagcacgcccgcatcaggrtgcagctcccccaatgacagcgagcacggccccaatcccatcctgggctcggaggcgctcttgggccagcggctgcggctgcaggagacttctgtggccc

SEQ ID NO: 70175 - DNA, 201 bp, Homo sapiens
ccccctacatcaacctcctggcgatgccctggtggagcagatgggtgctctgggagtcctgtgcttcctgatccaatggtgccaaacccttcatctccccmagaagcgcagcatacccctgggacccctcggccactgcccactcggggagccttctctgtttctggggcctcccccaccatagctctgattcccacccca

SEQ ID NO: 70176 - DNA, 201 bp, Homo sapiens
taggggggagtggggagccaagaggtcccatattcctgagtgcaggggtagtccctctcacctgcttcctcagacgactctggaagcttccctctaccacygggcactgagacgaagctccctgacagccgagactggcagccctccatctggtccgtaccctcgccagaggcccccctacatcaacctcctggcgatgcc

SEQ ID NO: 70177 - DNA, 201 bp, Homo sapiens; identical to SEQ ID NO: 70170

SEQ ID NO: 70178 - DNA, 201 bp, Homo sapiens; identical to SEQ ID NO: 70171

SEQ ID NO: 70179 - DNA, 201 bp, Homo sapiens
tcgctgagctcagactgaaggatcttggtggtaccctgccccaccgtggccagatcctagggcttccggtgccagccaggtgacctgctgttggtctggartaagattcctgtgagtgacccaggcagcaatggtgagcaccccccagtgaggggttatcctctgagcccccccgatggagccagcagggcctaccagaca

SEQ ID NO: 70180 - DNA, 201 bp, Homo sapiens
ggactccctcacagccatgttgaacccactctgtgtaccctgtcaggctgtgcgggagtgggagcgaagtgaggagaggggcaggtgggagagccgacccyaagtggaggacaggcccgctcctccggggccctgggcctgagacaccaacctcaatatccggtctaggacgcagtgtggaggggcttgctttctccaacc

SEQ ID NO: 70181 - DNA, 201 bp, Homo sapiens
ccagattccaggacatggttcctcacagcagcaggcaggaggagcattctcctggcctgggcacccatgcagagcggccgtggtgatggtcagttctcccrtgttgtgttcgtcccacctcccaggccctcctttcctgagtgctgggctgagcactggtgggggctgtgtttaagtgggaggcccgagcttggggctctg

SEQ ID NO: 70182 - DNA, 201 bp, Homo sapiens; identical to SEQ ID NO: 70172

SEQ ID NO: 70183 - DNA, 201 bp, Homo sapiens
agatcctagggcttccggtgccagccaggtgacctgctgttggtctggagtaagattcctgtgagtgacccaggcagcaatggtgagcaccccccagtgargggttatcctctgagcccccccgatggagccagcagggcctaccagacagtggcccctcaaggtagggactggcctccatctctagcgacagccctagac

SEQ ID NO: 70184 - DNA, 130 bp, Homo sapiens
caggagctcagccccagctcaccacggcatccccgaagagttgtgactcagacacacctgggtttaagtcccagctgggagctcaggtaagtcaaatcgtyttctggggcctctgtttatcagtagaagg

SEQ ID NO: 70185 - DNA, 201 bp, Homo sapiens
accccccagtgaggggttatcctctgagcccccccgatggagccagcagggcctaccagacagtggcccctcaaggtagggactggcctccatctctagckacagccctagaccagggccaggtcaagagcaacactcaggccttgtttgccaaaaggcctggttcccatccctcccctcagtcctggccacaggcgtctc

SEQ ID NO: 70186 - DNA, 201 bp, Homo sapiens
aagagcaacactcaggccttgtttgccaaaaggcctggttcccatccctcccctcagtcctggccacaggcgtctcaggagctctgctggcttgggggctrcgtcttgggataacccccacatttgtaaagtactttaaattttcaacttcaactcaacatctattgagcatcttatgtcaagacccataatctatactag

SEQ ID NO: 70187 - DNA, 201 bp, Homo sapiens; identical to SEQ ID NO: 70175

SEQ ID NO: 70188 - DNA, 201 bp, Homo sapiens
tgagctcagactgaaggatcttggtggtaccctgccccaccgtggccagatcctagggcttccggtgccagccaggtgacctgctgttggtctggagtaasattcctgtgagtgacccaggcagcaatggtgagcaccccccagtgaggggttatcctctgagcccccccgatggagccagcagggcctaccagacagtgg

SEQ ID NO: 70189 - DNA, 201 bp, Homo sapiens; identical to SEQ ID NO: 70176

SEQ ID NO: 70190 - DNA, 201 bp, Homo sapiens; identical to SEQ ID NO: 70170

SEQ ID NO: 70191 - DNA, 201 bp, Homo sapiens; identical to SEQ ID NO: 70171

SEQ ID NO: 70192 - DNA, 201 bp, Homo sapiens; identical to SEQ ID NO: 70172

SEQ ID NO: 70193 - DNA, 201 bp, Homo sapiens; identical to SEQ ID NO: 70174

SEQ ID NO: 70194 - DNA, 201 bp, Homo sapiens; identical to SEQ ID NO: 70175

SEQ ID NO: 70195 - DNA, 201 bp, Homo sapiens; identical to SEQ ID NO: 70176

SEQ ID NO: 70196 - DNA, 201 bp, Homo sapiens; identical to SEQ ID NO: 70170

SEQ ID NO: 70197 - DNA, 201 bp, Homo sapiens; identical to SEQ ID NO: 70171

SEQ ID NO: 70198 - DNA, 201 bp, Homo sapiens; identical to SEQ ID NO: 70172

SEQ ID NO: 70199 - DNA, 172 bp, Homo sapiens; identical to SEQ ID NO: 70173

SEQ ID NO: 70200 - DNA, 201 bp, Homo sapiens
cactgctccgaaaggagagtgcgccccccagcctccggcggcggcccgcagagaccctcggagactcctccccaagtagtagcagcacgcccgcatcaggrtgcagctcccccaatgacagcgagcacggccccaatcccatcctgggctgacagtgaccgcaggacccatccgactctgggccctcgggggccaatcctg

SEQ ID NO: 70201 - DNA, 201 bp, Homo sapiens; identical to SEQ ID NO: 70175

SEQ ID NO: 70202 - DNA, 201 bp, Homo sapiens; identical to SEQ ID NO: 70176

SEQ ID NO: 70203 - DNA, 201 bp, Homo sapiens; identical to SEQ ID NO: 70170

SEQ ID NO: 70204 - DNA, 201 bp, Homo sapiens; identical to SEQ ID NO: 70171

SEQ ID NO: 70205 - DNA, 201 bp, Homo sapiens; identical to SEQ ID NO: 70172

SEQ ID NO: 70206 - DNA, 201 bp, Homo sapiens; identical to SEQ ID NO: 70175

SEQ ID NO: 70207 - DNA, 201 bp, Homo sapiens; identical to SEQ ID NO: 70176

SEQ ID NO: 70208 - DNA, 201 bp, Homo sapiens; identical to SEQ ID NO: 70170

SEQ ID NO: 70209 - DNA, 201 bp, Homo sapiens; identical to SEQ ID NO: 70171

SEQ ID NO: 70210 - DNA, 201 bp, Homo sapiens; identical to SEQ ID NO: 70172

SEQ ID NO: 70211 - DNA, 172 bp, Homo sapiens; identical to SEQ ID NO: 70173

SEQ ID NO: 70212 - DNA, 201 bp, Homo sapiens
cactgctccgaaaggagagtgcgccccccagcctccggcggcggcccgcagagaccctcggagactcctccccaagtagtagcagcacgcccgcatcaggrtgcagctcccccaatgacagcgagcacggccccaatcccatcctgggctcggaggctgacagtgaccgcaggacccatccgactctgggccctcgggggc

SEQ ID NO: 70213 - DNA, 201 bp, Homo sapiens; identical to SEQ ID NO: 70175

SEQ ID NO: 70214 - DNA, 201 bp, Homo sapiens; identical to SEQ ID NO: 70176

SEQ ID NO: 70215 - DNA, 201 bp, Homo sapiens
ggttttgccatgttggccaggctggtctcgaactcctgatctcaggtgattcacccgcctcagccttccaaagtgctgggattataggtgtgagccaccgygcccggcctggatctgttttcttagcacgcagtgaggaatctttgtacttaaggccagggcaacaaagtcaagaggtcaaggtgtagggccatgaggcct

SEQ ID NO: 70216 - DNA, 201 bp, Homo sapiens
ttttgagatggagtcttactctgtcacccaggctggagtgcagtagtgcgatctcagctcactgcaacctccgcctcccaggttcaagcaattctcctgcyttggcctctcaagtagctgggattacaggcatctgccaccatgcccggcaaatttttgtgtttttagtagagacagggttttgccatgttggccaggctg

SEQ ID NO: 70217 - DNA, 201 bp, Homo sapiens
gaggccagactcagggtcacggggaatgtgcttctgcccctgtaagggctttggggaagggggcaacatagtagaggctggaaagagcccccaaacctgtrcccatgcccctccagccctgcgtttccattctgccttctcagagtgcccttgctgcacccagaccaccggccaggagagaccttctctcccactccagcc

SEQ ID NO: 70218 - DNA, 201 bp, Homo sapiens
ttgggaggagtgggcagggagggagtggtagtggcagttctcgagctatctgattaagccattccgctagttcagttgtgccctggagggcaggggacagrgtcagtatctctggggctgcaggccctcttgccttggccctcctggcatggggtaaccaccagctcagctctcctcctccagctttcctctctctagcac

SEQ ID NO: 70219 - DNA, 201 bp, Homo sapiens
cacctaacttgggagggaaggggctgttggtacaaggatgattttctgttagactgccattttgcacggtctcccccttcccatctgatgtgtcctgcccytcagctctttgccttatctgtgtcactgtcactttagcaaaaatacagcggccatttgtatcagcctctggtggttgcttgtgaggtgggactcttgcgg

SEQ ID NO: 70220 - DNA, 201 bp, Homo sapiens
caggagagaccttctctcccactccagcccctctcactgcccttcaactagagctttcacctttttacatttcccttctgaaggacacaaatctgcttttytgcccatacactggcccaagggctcacctaacttgggagggaaggggctgttggtacaaggatgattttctgttagactgccattttgcacggtctcccc

SEQ ID NO: 70221 - DNA, 201 bp, Homo sapiens
agctacagcaacccctgcgggatttggtgtccacacccgagaggccaggccagatgggaaagggattagcgcctcttccctcacactctgccaggctgccrggagcttgggccaggtctaaggtaatgaggtgctcctcttcctgctggaaaaaccggacagactcagaaccacaaaggcaggtgctgccagcctggcgcc

SEQ ID NO: 70222 - DNA, 201 bp, Homo sapiens
ctcagtgtatgcttaatcaggcatggtgcatcagagcgggaaggagccatcaacagtgtatacttctggagccttctactgataaacagaggccccagaaracgatttgacttacctgagctcccagctgggacttaaacccaggtgtgtctgagtcacaactcttcggggatgccgtggtgagctggggctgagctcctg

SEQ ID NO: 70223 - DNA, 201 bp, Homo sapiens
cctctctctagcacaccccagccagggcaaggatgcccacgggcatagctacagcaacccctgcgggatttggtgtccacacccgagaggccaggccagaygggaaagggattagcgcctcttccctcacactctgccaggctgccgggagcttgggccaggtctaaggtaatgaggtgctcctcttcctgctggaaaaac

SEQ ID NO: 70224 - DNA, 201 bp, Homo sapiens
tctttgtccatgagggttatcaaggcctggtggatggtggagatcacatcaaggaagccacctgggagagcgtttcgatgatgcttcagctgggaggcacrgtgattggaagtgcccggtgcaaggactttcgggaacgagaaggacgactccgagctgcctacaacctggtgaagcgtgggatcaccaatctctgtgtca

SEQ ID NO: 70225 - DNA, 201 bp, Homo sapiens
gaagccacctgggagagcgtttcgatgatgcttcagctgggaggcacggtgattggaagtgcccggtgcaaggactttcgggaacgagaaggacgactccragctgcctacaacctggtgaagcgtgggatcaccaatctctgtgtcattgggggtgatggcagcctcactggggctgacaccttccgttctgagtggagt

SEQ ID NO: 70226 - DNA, 201 bp, Homo sapiens
tggagatcacatcaaggaagccacctgggagagcgtttcgatgatgcttcagctgggaggcacggtgattggaagtgcccggtgcaaggactttcgggaaygagaaggacgactccgagctgcctacaacctggtgaagcgtgggatcaccaatctctgtgtcattgggggtgatggcagcctcactggggctgacacctt

SEQ ID NO: 70227 - DNA, 201 bp, Homo sapiens
tgaggcccatcctcaaaatcctagccaagtacgagattgacttggacacttcagaccatgcccacctggagcacatcacccggaagcggtccggggaagckgccgtctaaacctctctggagtgaggggaatagattacctgatcatggtcagctcacaccctaataagtccacatcttctcagtgttttagctgtttttt

SEQ ID NO: 70228 - DNA, 201 bp, Homo sapiens
tgttttagctgtttttttcattaggtttccttttattctgtaccttgcagccatgaccagttctggccaggagctggaggagcaggcagtgggtgggagcyccttttaggtagaatttaacatgacttctgccccagctttatctgtcacacaaggctgggcacctctagtgctactgctagatatcacttactcagttag

SEQ ID NO: 70229 - DNA, 201 bp, Homo sapiens
ggagcaggcagtgggtgggagctccttttaggtagaatttaacatgacttctgccccagctttatctgtcacacaaggctgggcacctctagtgctactgmtagatatcacttactcagttagaattttcctaaaaataagctttatttatttctttgtgataacaaagagtcttggttcctctactacttttactacagt

SEQ ID NO: 70230 - DNA, 201 bp, Homo sapiens
aggtagaatttaacatgacttctgccccagctttatctgtcacacaaggctgggcacctctagtgctactgctagatatcacttactcagttagaattttyctaaaaataagctttatttatttctttgtgataacaaagagtcttggttcctctactacttttactacagtgacaaattgtaactacactaataaatgcc

SEQ ID NO: 70231 - DNA, 176 bp, Homo sapiens
tcacacaaggctgggcacctctagtgctactgctagatatcacttactcagttagaattttcctaaaaataagctttatttatttctttgtgataacaaaragtcttggttcctctactacttttactacagtgacaaattgtaactacactaataaatgccaactggtcactgtg

SEQ ID NO: 70232 - DNA, 201 bp, Homo sapiens
tccagaaagcaggtaagatcacagatgaggaggctacgaagtccagctacctgaacattgtgggcctggttgggtcaattgacaatgacttctgtggcacygatatgaccattggcactgactctgccctgcatcggatcatggaaattgtagatgccatcactaccactgcccagagccaccagaggacatttgtgttag

SEQ ID NO: 70233 - DNA, 201 bp, Homo sapiens
ggtgggagcccaaccccatttgataggaattttgccactaagatgggcgccaaggctatgaactggatgtctgggaaaatcaaagagagttaccgtaatgrgcggatctttgccaatactccagattcgggctgtgttctggggatgcgtaagagggctctggtcttccaaccagtggctgagctgaaggaccagacagat

SEQ ID NO: 70234 - DNA, 201 bp, Homo sapiens
gctgtgcgcctgcccctcatggaatgtgtccaggtgaccaaagatgtgaccaaggccatggatgagaagaaatttgacgaagccctgaagctgagaggccrgagcttcatgaacaactgggaggtgtacaagcttctagctcatgtcagacccccggtatctaagagtggttcgcacacagtggctgtgatgaacgtgggg

SEQ ID NO: 70235 - DNA, 201 bp, Homo sapiens
cagcagggtgggagcccaaccccatttgataggaattttgccactaagatgggcgccaaggctatgaactggatgtctgggaaaatcaaagagagttaccrtaatgggcggatctttgccaatactccagattcgggctgtgttctggggatgcgtaagagggctctggtcttccaaccagtggctgagctgaaggaccag

SEQ ID NO: 70236 - DNA, 182 bp, Homo sapiens
gagaaacgaggcatagatccagagatcacgttagggtacaccaagaaagagacggttcaagggaattaccaggaggcgatgwgccagagtggatcatgacccatgaagagcaccatgcagccaaaaccctggggattggcaaagccattgctgtcttaacctctggtggagatgcccaaggt

SEQ ID NO: 70237 - DNA, 201 bp, Homo sapiens; identical to SEQ ID NO: 70224

SEQ ID NO: 70238 - DNA, 201 bp, Homo sapiens; identical to SEQ ID NO: 70225

SEQ ID NO: 70239 - DNA, 201 bp, Homo sapiens; identical to SEQ ID NO: 70226

SEQ ID NO: 70240 - DNA, 201 bp, Homo sapiens; identical to SEQ ID NO: 70227

SEQ ID NO: 70241 - DNA, 201 bp, Homo sapiens; identical to SEQ ID NO: 70228

SEQ ID NO: 70242 - DNA, 201 bp, Homo sapiens; identical to SEQ ID NO: 70229

SEQ ID NO: 70243 - DNA, 201 bp, Homo sapiens; identical to SEQ ID NO: 70230

SEQ ID NO: 70244 - DNA, 176 bp, Homo sapiens; identical to SEQ ID NO: 70231

SEQ ID NO: 70245 - DNA, 116 bp, Homo sapiens
gagaaacgaggcatakatccagagatcacgttagggtacaccaagaaagagacggttcaagggaattaccaggaggcgatgagccagagtggatcatgacccatgaagagcaccat

SEQ ID NO: 70246 - DNA, 201 bp, Homo sapiens; identical to SEQ ID NO: 70232

SEQ ID NO: 70247 - DNA, 201 bp, Homo sapiens; identical to SEQ ID NO: 70233

SEQ ID NO: 70248 - DNA, 201 bp, Homo sapiens; identical to SEQ ID NO: 70234

SEQ ID NO: 70249 - DNA, 201 bp, Homo sapiens; identical to SEQ ID NO: 70235

SEQ ID NO: 70250 - DNA, 182 bp, Homo sapiens; identical to SEQ ID NO: 70236

SEQ ID NO: 70251 - DNA, 201 bp, Homo sapiens; identical to SEQ ID NO: 70224

SEQ ID NO: 70252 - DNA, 201 bp, Homo sapiens; identical to SEQ ID NO: 70225

SEQ ID NO: 70253 - DNA, 201 bp, Homo sapiens; identical to SEQ ID NO: 70226

SEQ ID NO: 70254 - DNA, 201 bp, Homo sapiens; identical to SEQ ID NO: 70227

SEQ ID NO: 70255 - DNA, 201 bp, Homo sapiens; identical to SEQ ID NO: 70228

SEQ ID NO: 70256 - DNA, 201 bp, Homo sapiens; identical to SEQ ID NO: 70229

SEQ ID NO: 70257 - DNA, 201 bp, Homo sapiens; identical to SEQ ID NO: 70230

SEQ ID NO: 70258 - DNA, 176 bp, Homo sapiens; identical to SEQ ID NO: 70231

SEQ ID NO: 70259 - DNA, 116 bp, Homo sapiens; identical to SEQ ID NO: 70245

SEQ ID NO: 70260 - DNA, 201 bp, Homo sapiens; identical to SEQ ID NO: 70232

SEQ ID NO: 70261 - DNA, 201 bp, Homo sapiens; identical to SEQ ID NO: 70233

SEQ ID NO: 70262 - DNA, 201 bp, Homo sapiens; identical to SEQ ID NO: 70234

SEQ ID NO: 70263 - DNA, 201 bp, Homo sapiens; identical to SEQ ID NO: 70235

SEQ ID NO: 70264 - DNA, 201 bp, Homo sapiens; identical to SEQ ID NO: 70224

SEQ ID NO: 70265 - DNA, 201 bp, Homo sapiens; identical to SEQ ID NO: 70225

SEQ ID NO: 70266 - DNA, 201 bp, Homo sapiens; identical to SEQ ID NO: 70226

SEQ ID NO: 70267 - DNA, 130 bp, Homo sapiens
gggaagcctctcctccttccccctccctckttgcctccacctggctcctccccatgttcgtccatcacccctcccccctttcccaaggacaatctgcaagaaagcagcggcggaggagagctaagactaa

SEQ ID NO: 70268 - DNA, 201 bp, Homo sapiens; identical to SEQ ID NO: 70227

SEQ ID NO: 70269 - DNA, 201 bp, Homo sapiens; identical to SEQ ID NO: 70228

SEQ ID NO: 70270 - DNA, 201 bp, Homo sapiens; identical to SEQ ID NO: 70229

SEQ ID NO: 70271 - DNA, 201 bp, Homo sapiens; identical to SEQ ID NO: 70230

SEQ ID NO: 70272 - DNA, 176 bp, Homo sapiens; identical to SEQ ID NO: 70231

SEQ ID NO: 70273 - DNA, 201 bp, Homo sapiens; identical to SEQ ID NO: 70232

SEQ ID NO: 70274 - DNA, 201 bp, Homo sapiens; identical to SEQ ID NO: 70233

SEQ ID NO: 70275 - DNA, 201 bp, Homo sapiens; identical to SEQ ID NO: 70234

SEQ ID NO: 70276 - DNA, 201 bp, Homo sapiens; identical to SEQ ID NO: 70235

SEQ ID NO: 70277 - DNA, 201 bp, Homo sapiens; identical to SEQ ID NO: 70224

SEQ ID NO: 70278 - DNA, 201 bp, Homo sapiens; identical to SEQ ID NO: 70225

SEQ ID NO: 70279 - DNA, 201 bp, Homo sapiens; identical to SEQ ID NO: 70226

SEQ ID NO: 70280 - DNA, 201 bp, Homo sapiens; identical to SEQ ID NO: 70227

SEQ ID NO: 70281 - DNA, 201 bp, Homo sapiens; identical to SEQ ID NO: 70228

SEQ ID NO: 70282 - DNA, 201 bp, Homo sapiens; identical to SEQ ID NO: 70229

SEQ ID NO: 70283 - DNA, 201 bp, Homo sapiens; identical to SEQ ID NO: 70230

SEQ ID NO: 70284 - DNA, 176 bp, Homo sapiens; identical to SEQ ID NO: 70231

SEQ ID NO: 70285 - DNA, 201 bp, Homo sapiens; identical to SEQ ID NO: 70232

SEQ ID NO: 70286 - DNA, 201 bp, Homo sapiens; identical to SEQ ID NO: 70233

SEQ ID NO: 70287 - DNA, 201 bp, Homo sapiens; identical to SEQ ID NO: 70234

SEQ ID NO: 70288 - DNA, 201 bp, Homo sapiens; identical to SEQ ID NO: 70235

SEQ ID NO: 70289 - DNA, 201 bp, Homo sapiens
gctgtgacatcatactcgtgatggaaatcaaggacagcaacaacaggatctgccccatactgatggagaagctgaacagaaattcaaggagaggcataacrtacaactatgtgattagctctcggcttggaagaaacacatataaagaacaatatgcctttctctacaaggaaaagctggtgtctgtgaagaggagttatc

SEQ ID NO: 70290 - DNA, 201 bp, Homo sapiens
acttcgtgattatccccctgcacaccaccccagagacatccgttaaggagatcgatgagttggttgaggtctacacggacgtgaaacaccgctggaaggcrgagaatttcattttcatgggtgacttcaatgccggctgcagctacgtccccaagaaggcctggaagaacatccgcttgaggactgaccccaggtttgttt

SEQ ID NO: 70291 - DNA, 201 bp, Homo sapiens
gtcagcaggcgctttataagtcagtggagcctgcggaagtggccagaatccagcactccaagcactgctgtcttctcacagagtcttgaagccagagcagygccaggatgtcacgggagctggccccactgctgcttctcctcctctccatccacagcgccctggccatgaggatctgctccttcaacgtcaggtcctttg

SEQ ID NO: 70292 - DNA, 201 bp, Homo sapiens
ccaagcactgctgtcttctcacagagtcttgaagccagagcagcgccaggatgtcacgggagctggccccactgctgcttctcctcctctccatccacagygccctggccatgaggatctgctccttcaacgtcaggtcctttggggaaagcaagcaggaagacaagaatgccatggatgtcattgtgaaggtcatcaaac

SEQ ID NO: 70293 - DNA, 201 bp, Homo sapiens
tctcttggtctcatacctcccctgaattgtctaaaagggaaccaggggcatttgtagaccaaaatgatgatcttcatgccctgagccagagccccatccactgtcactggccctgctcaaccctgtcatgcgagaggctgcagggggaggaagagcgtcagctttcagtcctcatgaggggtcctgttccacacgcaatga

SEQ ID NO: 70294 - DNA, 201 bp, Homo sapiens
cacggacgtgaaacaccgctggaaggcggagaatttcattttcatgggtgacttcaatgccggctgcagctacgtccccaagaaggcctggaagaacatcygcttgaggactgaccccaggtttgtttggctgatcggggaccaagaggacaccacggtgaagaagagcaccaactgtgcatatgacaggattgtgcttag

SEQ ID NO: 70295 - DNA, 201 bp, Homo sapiens
gctgtcaaagacttcgtgattatccccctgcacaccaccccagagacatccgttaaggagatcgatgagttggttgaggtctacacggacgtgaaacaccrctggaaggcggagaatttcattttcatgggtgacttcaatgccggctgcagctacgtccccaagaaggcctggaagaacatccgcttgaggactgacccc

SEQ ID NO: 70296 - DNA, 201 bp, Homo sapiens
tcagcaggcgctttataagtcagtggagcctgcggaagtggccagaatccagcactccaagcactgctgtcttctcacagagtcttgaagccagagcagcrccaggatgtcacgggagctggccccactgctgcttctcctcctctccatccacagcgccctggccatgaggatctgctccttcaacgtcaggtcctttgg

SEQ ID NO: 70297 - DNA, 201 bp, Homo sapiens
aaatcaaggacagcaacaacaggatctgccccatactgatggagaagctgaacagaaattcaaggagaggcataacgtacaactatgtgattagctctcgscttggaagaaacacatataaagaacaatatgcctttctctacaaggaaaagctggtgtctgtgaagaggagttatcactaccatgactatcaggatggag

SEQ ID NO: 70298 - DNA, 201 bp, Homo sapiens; identical to SEQ ID NO: 70289

SEQ ID NO: 70299 - DNA, 201 bp, Homo sapiens; identical to SEQ ID NO: 70290

SEQ ID NO: 70300 - DNA, 191 bp, Homo sapiens
gctttataagtcagtggagcctgcggaagtggccagaatccagcactccaagcactgctgtcttctcacagagtcttgaagccagagcagygccaggatgtcacgggagctggccccactgctgcttctcctcctctccatccacagcgccctggccatgaggatctgctccttcaacgtcaggtcctttg

SEQ ID NO: 70301 - DNA, 201 bp, Homo sapiens; identical to SEQ ID NO: 70292

SEQ ID NO: 70302 - DNA, 201 bp, Homo sapiens; identical to SEQ ID NO: 70293

SEQ ID NO: 70303 - DNA, 201 bp, Homo sapiens; identical to SEQ ID NO: 70294

SEQ ID NO: 70304 - DNA, 201 bp, Homo sapiens; identical to SEQ ID NO: 70295

SEQ ID NO: 70305 - DNA, 192 bp, Homo sapiens
gctttataagtcagtggagcctgcggaagtggccagaatccagcactccaagcactgctgtcttctcacagagtcttgaagccagagcagcrccaggatgtcacgggagctggccccactgctgcttctcctcctctccatccacagcgccctggccatgaggatctgctccttcaacgtcaggtcctttgg

SEQ ID NO: 70306 - DNA, 201 bp, Homo sapiens; identical to SEQ ID NO: 70297

SEQ ID NO: 70307 - DNA, 201 bp, Homo sapiens; identical to SEQ ID NO: 70294

SEQ ID NO: 70308 - DNA, 201 bp, Homo sapiens; identical to SEQ ID NO: 70295

SEQ ID NO: 70309 - DNA, 201 bp, Homo sapiens; identical to SEQ ID NO: 70293

SEQ ID NO: 70310 - DNA, 180 bp, Homo sapiens
ctagatgtcagagctggctcccggttgggatatgagtgactttgtggaggatggcgcctaaatgaggcatgccaatttcygcaccagggtgacgaacataagggctccttaaaggctagcccaatgtatctgtatttccttggggattaaaacccatgatcttcagttcctcagagaact

SEQ ID NO: 70311 - DNA, 201 bp, Homo sapiens
agagctggctcccggttgggatatgagtgactttgtggaggatggcgcctaaatgaggcatgccaatttctgcaccagggtgacgaacataagggctcctwaaaggctagcccaatgtatctgtatttccttggggattaaaacccatgatcttcagttcctcagagaactgaaagttgcaaggagaaatccagtaattcc

SEQ ID NO: 70312 - DNA, 201 bp, Homo sapiens; identical to SEQ ID NO: 70289

SEQ ID NO: 70313 - DNA, 201 bp, Homo sapiens; identical to SEQ ID NO: 70290

SEQ ID NO: 70314 - DNA, 201 bp, Homo sapiens
tatctgcaggctttataagtcagtggagcctgcggaagtggccagaatccagcactccaagcactgctgtcttctcacagagtcttgaagccagagcagcrccaggatgtcacgggagctggccccactgctgcttctcctcctctccatccacagcgccctggccatgaggatctgctccttcaacgtcaggtcctttgg

SEQ ID NO: 70315 - DNA, 201 bp, Homo sapiens; identical to SEQ ID NO: 70297

SEQ ID NO: 70316 - DNA, 201 bp, Homo sapiens
ttatctgcaggctttataagtcagtggagcctgcggaagtggccagaatccagcactccaagcactgctgtcttctcacagagtcttgaagccagagcagygccaggatgtcacgggagctggccccactgctgcttctcctcctctccatccacagcgccctggccatgaggatctgctccttcaacgtcaggtcctttg

SEQ ID NO: 70317 - DNA, 201 bp, Homo sapiens; identical to SEQ ID NO: 70292

SEQ ID NO: 70318 - DNA, 201 bp, Homo sapiens; identical to SEQ ID NO: 70289

SEQ ID NO: 70319 - DNA, 201 bp, Homo sapiens; identical to SEQ ID NO: 70290

SEQ ID NO: 70320 - DNA, 201 bp, Homo sapiens
caggcgttaggctttataagtcagtggagcctgcggaagtggccagaatccagcactccaagcactgctgtcttctcacagagtcttgaagccagagcagygccaggatgtcacgggagctggccccactgctgcttctcctcctctccatccacagcgccctggccatgaggatctgctccttcaacgtcaggtcctttg

SEQ ID NO: 70321 - DNA, 201 bp, Homo sapiens; identical to SEQ ID NO: 70292

SEQ ID NO: 70322 - DNA, 201 bp, Homo sapiens; identical to SEQ ID NO: 70293

SEQ ID NO: 70323 - DNA, 201 bp, Homo sapiens; identical to SEQ ID NO: 70294

SEQ ID NO: 70324 - DNA, 201 bp, Homo sapiens; identical to SEQ ID NO: 70295

SEQ ID NO: 70325 - DNA, 145 bp, Homo sapiens
cagcctatgacacttttgctcctcctgaaatctccatatcttgcytttctcaaattccaaggtagcctttgcgcaacatatcactctccactgactcttgtcccatcagggcccatagtggatggctgtatgggggccatgtgac

SEQ ID NO: 70326 - DNA, 201 bp, Homo sapiens
aggcgttaggctttataagtcagtggagcctgcggaagtggccagaatccagcactccaagcactgctgtcttctcacagagtcttgaagccagagcagcrccaggatgtcacgggagctggccccactgctgcttctcctcctctccatccacagcgccctggccatgaggatctgctccttcaacgtcaggtcctttgg

SEQ ID NO: 70327 - DNA, 201 bp, Homo sapiens; identical to SEQ ID NO: 70297

SEQ ID NO: 70328 - DNA, 201 bp, Homo sapiens
tggtatgggcactgcccaggcttaaaggtggtcagtccctggaattcagaggatgctaaaggacttattaaatcagccattcgggataacaatccagtggyggtgctagagaatgaattgatgtatggggttccttttgaatttcctccggaagctcagtcaaaagattttctgattcctattggaaaagccaaaatagaa

SEQ ID NO: 70329 - DNA, 201 bp, Homo sapiens
tctaaagcaacagcaggtatttttgtacagggaagtttaaatgtgtttgtgtatggaaaactctccactctcctcccctagatgccatgcttccttttgtstgttacggttgccatgttctttgaataacaaattatataacattttatcctctctcaccacaaggacaaagtatggatgtggcagagtcctgatgaaaga

SEQ ID NO: 70330 - DNA, 201 bp, Homo sapiens
aatatttagtttggacttgaatatcaagtcgttgaaatttatttgaaatacttgctggcactgcacctggatttgtactgcaagacctgactattcataamggaaaacgatttctaaagcaacagcaggtatttttgtacagggaagtttaaatgtgtttgtgtatggaaaactctccactctcctcccctagatgccatg

SEQ ID NO: 70331 - DNA, 201 bp, Homo sapiens
gtatccaaacaagataacttatatgtataaaattaaagcatataatatacatttactgttagtttgttttgataaggaataaaggaatttctaacatgactaattttttttttttttgagacaatgtttggctctgttccccaagctggagtgtgatggcacaatcttggctcactgcagcctccacctcccaggttcaag

SEQ ID NO: 70332 - DNA, 201 bp, Homo sapiens
agtttggacttgaatatcaagtcgttgaaatttatttgaaatacttgctggcactgcacctggatttgtactgcaagacctgactattcataacggaaaaygatttctaaagcaacagcaggtatttttgtacagggaagtttaaatgtgtttgtgtatggaaaactctccactctcctcccctagatgccatgcttcctt

SEQ ID NO: 70333 - DNA, 201 bp, Homo sapiens
tatccaaacaagataacttatatgtataaaattaaagcatataatatacatttactgttagtttgttttgataaggaataaaggaatttctaacatgactaattttttttttttttgagacaatgtttggctctgttccccaagctggagtgtgatggcacaatcttggctcactgcagcctccacctcccaggttcaagt

SEQ ID NO: 70334 - DNA, 201 bp, Homo sapiens
tcaatttctccatgcaagccattgaccaggttataaactcagctgccaagacctactacatgtctggtggccttcagcctgtgcctatagtcttcaggggrcccaatggtgcctcagcaggtgtagctgcccagcactcacagtgctttgctgcctggtatgggcactgcccaggcttaaaggtggtcagtccctggaatt

SEQ ID NO: 70335 - DNA, 201 bp, Homo sapiens
aatgtgtttgtgtatggaaaactctccactctcctcccctagatgccatgcttccttttgtctgttacggttgccatgttctttgaataacaaattatatmacattttatcctctctcaccacaaggacaaagtatggatgtggcagagtcctgatgaaagatgtatccaaacaagataacttatatgtataaaattaaag

SEQ ID NO: 70336 - DNA, 201 bp, Homo sapiens
atccaaacaagataacttatatgtataaaattaaagcatataatatacatttactgttagtttgttttgataaggaataaaggaatttctaacatgactaattttttttttttttgagacaatgtttggctctgttccccaagctggagtgtgatggcacaatcttggctcactgcagcctccacctcccaggttcaagtg

SEQ ID NO: 70337 - DNA, 201 bp, Homo sapiens
ccttttgtctgttacggttgccatgttctttgaataacaaattatataacattttatcctctctcaccacaaggacaaagtatggatgtggcagagtcctsatgaaagatgtatccaaacaagataacttatatgtataaaattaaagcatataatatacatttactgttagtttgttttgataaggaataaaggaatttc

SEQ ID NO: 70338 - DNA, 201 bp, Homo sapiens
cctctctcaccacaaggacaaagtatggatgtggcagagtcctgatgaaagatgtatccaaacaagataacttatatgtataaaattaaagcatataatayacatttactgttagtttgttttgataaggaataaaggaatttctaacatgactaattttttttttttttgagacaatgtttggctctgttccccaagctg

SEQ ID NO: 70339 - DNA, 201 bp, Homo sapiens
ggtgataaatatgcgtaccattagaccaatggacatggaaaccatagaagccagtgtcatgaagacaaatcatcttgtaactgtggaaggaggctggccamagtttggagtaggagctgaaatctgtgccaggatcatggaaggtcctgcgttcaatttcctggatgctcctgctgttcgtgtcactggtgctgatgtccc

SEQ ID NO: 70340 - DNA, 201 bp, Homo sapiens
ctctcaccacaaggacaaagtatggatgtggcagagtcctgatgaaagatgtatccaaacaagataacttatatgtataaaattaaagcatataatatacrtttactgttagtttgttttgataaggaataaaggaatttctaacatgactaattttttttttttttgagacaatgtttggctctgttccccaagctggag

SEQ ID NO: 70341 - DNA, 201 bp, Homo sapiens; identical to SEQ ID NO: 70328

SEQ ID NO: 70342 - DNA, 201 bp, Homo sapiens; identical to SEQ ID NO: 70329

SEQ ID NO: 70343 - DNA, 201 bp, Homo sapiens; identical to SEQ ID NO: 70330

SEQ ID NO: 70344 - DNA, 201 bp, Homo sapiens; identical to SEQ ID NO: 70331

SEQ ID NO: 70345 - DNA, 201 bp, Homo sapiens; identical to SEQ ID NO: 70332

SEQ ID NO: 70346 - DNA, 201 bp, Homo sapiens; identical to SEQ ID NO: 70333

SEQ ID NO: 70347 - DNA, 201 bp, Homo sapiens; identical to SEQ ID NO: 70334

SEQ ID NO: 70348 - DNA, 201 bp, Homo sapiens; identical to SEQ ID NO: 70335

SEQ ID NO: 70349 - DNA, 201 bp, Homo sapiens; identical to SEQ ID NO: 70336

SEQ ID NO: 70350 - DNA, 201 bp, Homo sapiens; identical to SEQ ID NO: 70337

SEQ ID NO: 70351 - DNA, 201 bp, Homo sapiens; identical to SEQ ID NO: 70338

SEQ ID NO: 70352 - DNA, 201 bp, Homo sapiens; identical to SEQ ID NO: 70339

SEQ ID NO: 70353 - DNA, 201 bp, Homo sapiens; identical to SEQ ID NO: 70340

SEQ ID NO: 70354 - DNA, 201 bp, Homo sapiens
tattatttttaaaaataggcctaataaagcaataatgttctagacatctgtctaagtaatcagactcaggttccacacacaagcaacaactcgtgggcctyttttctatttcaatgtgctactaagaacccttggatgtaacatactagttagttaatgaattctgtgaattctgtgaagagtaatgtgattgaaaataag

SEQ ID NO: 70355 - DNA, 201 bp, Homo sapiens
aataggcctaataaagcaataatgttctagacatctgtctaagtaatcagactcaggttccacacacaagcaacaactcgtgggcctcttttctatttcartgtgctactaagaacccttggatgtaacatactagttagttaatgaattctgtgaattctgtgaagagtaatgtgattgaaaataagtctaaacagctgt

SEQ ID NO: 70356 - DNA, 201 bp, Homo sapiens
tcctgccccaaatgcggtcggagcgccagtgaccctgaggaagcccgtcccttatccctggtatccacggttccccagagctttggggaccacgcgaaaayctccaagatatttttcacaaaatagaaactcatatggaacaaaataagaaaccccagccatgaaatctaccatgaagtcttcaagttcatgtcactgaca

SEQ ID NO: 70357 - DNA, 162 bp, Homo sapiens
tttcaatgtgctactaagaacccttggatgtaacatactagttagttaatgaattctgtgaattctgtgaagagtaatgtgattgaaaataagtctaaacrgctgtaaaagtgaccacaatgacatgaaataaatttaataagtctagatcagcaacatgca

SEQ ID NO: 70358 - DNA, 201 bp, Homo sapiens
ggctggggtgtatgctgcttactacccatcggatgtctccagcctgtgtctcgtgtgtcctgctggcctgcagtactcaactgacaatcaatttgtacaayggctcaaagaactgcagggctctgccgccgtggagaagattcccttgatcccgtctaccccagaagagatgagtgaaatgcttcagctctgctcctatgt

SEQ ID NO: 70359 - DNA, 201 bp, Homo sapiens
cattggctgcaagaccagggaggaaagtggcaagctgtagaaaatgtttacacgcatggaggggcattgctccagccctcagagcgtccggagcagcaggrtacatgggtgggaggttcattcagcacccaccagtcaggtatgttctgagtgaacccacagcagtcgcagaatgagcacctggcagggtgggtttcctag

SEQ ID NO: 70360 - DNA, 201 bp, Homo sapiens
acatagagacccatgtatgactgcagcccattggctgcaagaccagggaggaaagtggcaagctgtagaaaatgtttacacgcatggaggggcattgctcyagccctcagagcgtccggagcagcaggatacatgggtgggaggttcattcagcacccaccagtcaggtatgttctgagtgaacccacagcagtcgcagaa

SEQ ID NO: 70361 - DNA, 201 bp, Homo sapiens
acctccaagatatttttcacaaaatagaaactcatatggaacaaaataagaaaccccagccatgaaatctaccatgaagtcttcaagttcatgtcactgasaagcttgtgcaaagcagccaccttggaccataattaaatcaaggacattttctttgagacattccttatagttggagactcaagatatttttgttgcatc

SEQ ID NO: 70362 - DNA, 201 bp, Homo sapiens; identical to SEQ ID NO: 70358

SEQ ID NO: 70363 - DNA, 201 bp, Homo sapiens; identical to SEQ ID NO: 70354

SEQ ID NO: 70364 - DNA, 201 bp, Homo sapiens; identical to SEQ ID NO: 70355

SEQ ID NO: 70365 - DNA, 201 bp, Homo sapiens; identical to SEQ ID NO: 70356

SEQ ID NO: 70366 - DNA, 162 bp, Homo sapiens; identical to SEQ ID NO: 70357

SEQ ID NO: 70367 - DNA, 201 bp, Homo sapiens; identical to SEQ ID NO: 70358

SEQ ID NO: 70368 - DNA, 201 bp, Homo sapiens; identical to SEQ ID NO: 70359

SEQ ID NO: 70369 - DNA, 201 bp, Homo sapiens; identical to SEQ ID NO: 70360

SEQ ID NO: 70370 - DNA, 201 bp, Homo sapiens; identical to SEQ ID NO: 70361

SEQ ID NO: 70371 - DNA, 201 bp, Homo sapiens
agagcgcggccgctgggggacagcgcgcggcgccgggtcggggcggggcggcttttctgtcggaggacgcgaaccggcacgctgcgcctttaaggagtccrgctgggctgggcgccggagctgggagcggcgcgggtaggagcccggcggcaggtcccagcccggggctagagaccgagggccggggtccgggcccggcgg

SEQ ID NO: 70372 - DNA, 201 bp, Homo sapiens; identical to SEQ ID NO: 70354

SEQ ID NO: 70373 - DNA, 201 bp, Homo sapiens; identical to SEQ ID NO: 70355

SEQ ID NO: 70374 - DNA, 201 bp, Homo sapiens; identical to SEQ ID NO: 70356

SEQ ID NO: 70375 - DNA, 162 bp, Homo sapiens; identical to SEQ ID NO: 70357

SEQ ID NO: 70376 - DNA, 201 bp, Homo sapiens; identical to SEQ ID NO: 70358

SEQ ID NO: 70377 - DNA, 201 bp, Homo sapiens; identical to SEQ ID NO: 70359

SEQ ID NO: 70378 - DNA, 201 bp, Homo sapiens; identical to SEQ ID NO: 70360

SEQ ID NO: 70379 - DNA, 201 bp, Homo sapiens; identical to SEQ ID NO: 70361

SEQ ID NO: 70380 - DNA, 201 bp, Homo sapiens; identical to SEQ ID NO: 70354

SEQ ID NO: 70381 - DNA, 201 bp, Homo sapiens; identical to SEQ ID NO: 70355

SEQ ID NO: 70382 - DNA, 201 bp, Homo sapiens
cttctaccgaaagtgtaagtagccctactttcagcttggagcttgttacaagtgaagctctgtggatggatggcttttatttcttaaatctctgacacttygaatgtctccttgggcccctgaagagaggaagtggtggcctggatctggtgactatcccttgattctgcggtggtgccacaggcacagtccagcacatac

SEQ ID NO: 70383 - DNA, 201 bp, Homo sapiens; identical to SEQ ID NO: 70356

SEQ ID NO: 70384 - DNA, 162 bp, Homo sapiens; identical to SEQ ID NO: 70357

SEQ ID NO: 70385 - DNA, 201 bp, Homo sapiens; identical to SEQ ID NO: 70358

SEQ ID NO: 70386 - DNA, 201 bp, Homo sapiens; identical to SEQ ID NO: 70359

SEQ ID NO: 70387 - DNA, 201 bp, Homo sapiens; identical to SEQ ID NO: 70360

SEQ ID NO: 70388 - DNA, 201 bp, Homo sapiens
aagtgtaagtagccctactttcagcttggagcttgttacaagtgaagctctgtggatggatggcttttatttcttaaatctctgacactttgaatgtctcyttgggcccctgaagagaggaagtggtggcctggatctggtgactatcccttgattctgcggtggtgccacaggcacagtccagcacatactcactttgtt

SEQ ID NO: 70389 - DNA, 201 bp, Homo sapiens; identical to SEQ ID NO: 70361

SEQ ID NO: 70390 - DNA, 110 bp, Homo sapiens
aaggagtccrgctgggctgggcgccggagctgggagcggcgcgggtaggagcccggcggcaggtcccagcccggggctagagaccgagggccggggtccgggcccggcgg

SEQ ID NO: 70391 - DNA, 201 bp, Homo sapiens; identical to SEQ ID NO: 70354

SEQ ID NO: 70392 - DNA, 201 bp, Homo sapiens; identical to SEQ ID NO: 70355

SEQ ID NO: 70393 - DNA, 201 bp, Homo sapiens; identical to SEQ ID NO: 70356

SEQ ID NO: 70394 - DNA, 162 bp, Homo sapiens; identical to SEQ ID NO: 70357

SEQ ID NO: 70395 - DNA, 201 bp, Homo sapiens; identical to SEQ ID NO: 70358

SEQ ID NO: 70396 - DNA, 201 bp, Homo sapiens; identical to SEQ ID NO: 70359

SEQ ID NO: 70397 - DNA, 201 bp, Homo sapiens; identical to SEQ ID NO: 70360

SEQ ID NO: 70398 - DNA, 201 bp, Homo sapiens; identical to SEQ ID NO: 70361

SEQ ID NO: 70399 - DNA, 110 bp, Homo sapiens; identical to SEQ ID NO: 70390

SEQ ID NO: 70400 - DNA, 201 bp, Homo sapiens
attaatcaggaagtgttttattgagagcagtggtttaaagcatagggaataatccagtataaaactgatttgaggcatattacttcccaattagtaatatrtagaatgcaagtaatttattttttaaagttgatatgaaataaataggtaagaattttgaccatgacccagcaaatcagtaactgagctttttatagaatg

SEQ ID NO: 70401 - DNA, 201 bp, Homo sapiens
tatagaatatattagagaactgtgatttaaaagtactgttaatgtaaaaaataaagcaagtgtaattaattctttcagaatataaaatttgggcattctcygctgagcagttcccaaattaagtacaaggaatgtttattcattttctgcaatatactatatgtaatagggaataccttgctaaaataaaacttaggatat

SEQ ID NO: 70402 - DNA, 201 bp, Homo sapiens
acatacttgctttgttaatctattttctgtgcttatttcttgaagagctggaaaaaattcaaaaggtccagttaaattgcactaaggtgaagagtaagcamagtgagcccagcaagcactcagggttttctacctcagacaacagcatagccaacactccccaggattacagtgggaatatgaaatcatttccatcccgga

SEQ ID NO: 70403 - DNA, 201 bp, Homo sapiens
taatatggtttaattaaccttagtaacatctcatgaccactgactgctgaaagttctgaaaagaatttttgttttgttacactgcacatttaagggagagyccctcccctatcttatgagttaaaaaagacttcactaggtgacctaaattaaacttagtggggaaaagtggccatgtttggacataaataaatggtattc

SEQ ID NO: 70404 - DNA, 201 bp, Homo sapiens
agcaaggctgggtgctgatcgatcttagtgaagaatacacgcggatgggcctccctaatcattactggcagctcagcgatgtgaatagagactatagagtytgtgactcttatcctactgaactgtacgttcccaaatcggccacggcacacatcatagtggggagttccaaattccggagtagacggcgatttcctgtcc

SEQ ID NO: 70405 - DNA, 201 bp, Homo sapiens
aaataaataggtaagaattttgaccatgacccagcaaatcagtaactgagctttttatagaatggaaggtgatgatcagagacagaaaccatagaataaawttttattctttaagagcacattagtttactttcttctcctaaaaatgaatctgagctgtccttcaatttaagcatatatatgtgtcaagcaccctctatt

SEQ ID NO: 70406 - DNA, 201 bp, Homo sapiens
gtagacggcgatttcctgtcctttcttactattataaagataaccacgcctccatctgccggagcagccagcccctgtccggcttcagtgcccggtgcctrgaggacgagcagatgctccaggccattaggaaagccaatccaggaagtgacttcgtttatgtcgttgacacccggcctaaacttaatgcaatggcaaatc

SEQ ID NO: 70407 - DNA, 201 bp, Homo sapiens
aaagagagcaaggctgggtgctgatcgatcttagtgaagaatacacgcggatgggcctccctaatcattactggcagctcagcgatgtgaatagagactayagagtctgtgactcttatcctactgaactgtacgttcccaaatcggccacggcacacatcatagtggggagttccaaattccggagtagacggcgatttc

SEQ ID NO: 70408 - DNA, 201 bp, Homo sapiens
atgccaaacagcactatgcttttatttgaaaagcaaatagtataaatatttgatgttttaaaatgtagttttttaatatgacaacttccatatcagagtcrtaaacttttagtcccctcaacttttttacaagacagacattataatttatgtaacatgttcgtctgcttattagaagttaacctagcactgagatttata

SEQ ID NO: 70409 - DNA, 201 bp, Homo sapiens
tggtttaattaaccttagtaacatctcatgaccactgactgctgaaagttctgaaaagaatttttgttttgttacactgcacatttaagggagagtccctsccctatcttatgagttaaaaaagacttcactaggtgacctaaattaaacttagtggggaaaagtggccatgtttggacataaataaatggtattcacact

SEQ ID NO: 70410 - DNA, 201 bp, Homo sapiens
taagatattaacctttaaatctctacctatgacaaattcgtacactgattagcctagtaactcctaagtattcctctttaattctgatttctatctcatcktgtaaaatcagaatacaaactttcacatgcatttcatttttcctgtggcactgcttctccgatgtgaccaatttttatgaagaaaatatatagccataaa

SEQ ID NO: 70411 - DNA, 201 bp, Homo sapiens
aaatgtccgcttggtagatcgagtgtctcctaaaaaagcagctctaggtactttgtatttgacggctacccatgtcatattcgtggaaaattcacctgacscaagaaaagaaacatggattcttcacagtcagatttccaccattgagaaacaggcaacaaccgctaccggatgccctctgctgattcgctgcaagaactt

SEQ ID NO: 70412 - DNA, 201 bp, Homo sapiens
atatcctaagttttattttagcaaggtattccctattacatatagtatattgcagaaaatgaataaacattccttgtacttaatttgggaactgctcagcrgagaatgcccaaattttatattctgaaagaattaattacacttgctttattttttacattaacagtacttttaaatcacagttctctaatatattctata

SEQ ID NO: 70413 - DNA, 201 bp, Homo sapiens
gaataccatttatttatgtccaaacatggccacttttccccactaagtttaatttaggtcacctagtgaagtcttttttaactcataagataggggagggrctctcccttaaatgtgcagtgtaacaaaacaaaaattcttttcagaactttcagcagtcagtggtcatgagatgttactaaggttaattaaaccatatta

SEQ ID NO: 70414 - DNA, 201 bp, Homo sapiens
agtgtgaataccatttatttatgtccaaacatggccacttttccccactaagtttaatttaggtcacctagtgaagtcttttttaactcataagatagggsagggactctcccttaaatgtgcagtgtaacaaaacaaaaattcttttcagaactttcagcagtcagtggtcatgagatgttactaaggttaattaaacca

SEQ ID NO: 70415 - DNA, 201 bp, Homo sapiens
agcatgaacttagtgagagctgtagtgcaagtgcccttcaggcaagattgaaagtagctgcacatgaagctgaggaagaatctgataatattgcagaagayttcttggagggaaagatggaaatagatgattttctcagtagcttcatggaaaagagaacaatttgccactgtagaagagccaaggaagagaaacttcagc

SEQ ID NO: 70416 - DNA, 201 bp, Homo sapiens
tcttaccttgattaaatgcctatgcatgtacttttagctagtttttaatattttataaaacttcatttaaatttgtatttttaacttgaagttccatttckttatcaaggatggtatttagatttttttcctcttaaccttttttcaaaaactattttcaactgtgaggaaacccttatttttctttctttgtggataaaa

SEQ ID NO: 70417 - DNA, 201 bp, Homo sapiens
acaaacttctttccacttttgacttaataaagtatgactttcagaaagatgaacccatgagaaatgagcagggttggtgtattcatgtgaaaaaaggagarcctggacttctcatttctcgagtgaatgcaaaaaatcccttctttggctatgctgggccttataagcacacaaaagacaaattgctttgtgatgttttta

SEQ ID NO: 70418 - DNA, 201 bp, Homo sapiens
cccagcttttcccggctcgaattcagcctccaactcaagctcgcgggaaagactacctgagaggagaaaagcttctgtccctggaccttcttctgagggtrgagtcggaggctccctgctctccagccgcccagtgacccaagcttaatcttcagcaccacttggggcgaccttttcggtgcaaacctacgattctgtttc

SEQ ID NO: 70419 - DNA, 201 bp, Homo sapiens
cggtgcaaacctacgattctgtttctcaggattcctccccatcccgcttcgccccggaaaagctgacaagaacttcaggtgtaagccctgagtagtgaggmtctgcggtctccgtggagagctgtgcctggaagagaaggacgctggtgggggctgagatcagagctgtcttctggcccagtagcccccatgcttctgtca

SEQ ID NO: 70420 - DNA, 201 bp, Homo sapiens
ctggtgggggctgagatcagagctgtcttctggcccagtagcccccatgcttctgtcatggctaacagttctaggggctggaatggtcgtcctgcacttcktgcagaaactcctgttcccttacttttgggatgacttctggttcgtgttgaaggtggtgctcattataattcggctgaagaagtacgaaaagagagggga

SEQ ID NO: 70421 - DNA, 201 bp, Homo sapiens
aagccctgagtagtgaggctctgcggtctccgtggagagctgtgcctggaagagaaggacgctggtgggggctgagatcagagctgtcttctggcccagtwgcccccatgcttctgtcatggctaacagttctaggggctggaatggtcgtcctgcacttcgtgcagaaactcctgttcccttacttttgggatgacttct

SEQ ID NO: 70422 - DNA, 201 bp, Homo sapiens
agggagctaacattaattatgcatgtactatatttccttaatatgagagataattttttaattgcataagaattttaatttcttttaattgatataaacaktagttgattattctttttatctatttggagattcagtgcataactaagtattttccttaatactaaagattttaaataataaatagtggctagcggtttg

SEQ ID NO: 70423 - DNA, 201 bp, Homo sapiens
tctccagccgcccagtgacccaagcttaatcttcagcaccacttggggcgaccttttcggtgcaaacctacgattctgtttctcaggattcctccccatcycgcttcgccccggaaaagctgacaagaacttcaggtgtaagccctgagtagtgaggctctgcggtctccgtggagagctgtgcctggaagagaaggacgc

SEQ ID NO: 70424 - DNA, 201 bp, Homo sapiens
attcagcctccaactcaagctcgcgggaaagactacctgagaggagaaaagcttctgtccctggaccttcttctgagggtggagtcggaggctccctgctytccagccgcccagtgacccaagcttaatcttcagcaccacttggggcgaccttttcggtgcaaacctacgattctgtttctcaggattcctccccatccc

SEQ ID NO: 70425 - DNA, 201 bp, Homo sapiens
gcaggaatggcttctattattttaaaaccaaatacatctttagatttggaaaaagtttatgaacaagttgtaacatttctaccagcttatgcttgtccackatttttaagaattcaggaaaaaatggaagcaacaggaacattcaaactattgaagcatcagttggtggaagatggatttaatccactgaaaatttctgaa

SEQ ID NO: 70426 - DNA, 201 bp, Homo sapiens
atataacccttcctctgtatcatagttcagcagctatcctgggaatttctggatgtgttgagttgggtgccacttgtgtgttaaagaagaaattttcagcragccagttttggagtgactgcaagaagtatgatgtgactgtgtttcagtatattggagaactttgtcgctacctttgcaaacaatctaagagagaaggag

SEQ ID NO: 70427 - DNA, 201 bp, Homo sapiens
atcgctgcgcttctcagtcatcatcatcccagcttttcccggctcgaattcagcctccaactcaagctcgcgggaaagactacctgagaggagaaaagctkctgtccctggaccttcttctgagggtggagtcggaggctccctgctctccagccgcccagtgacccaagcttaatcttcagcaccacttggggcgacctt

SEQ ID NO: 70428 - DNA, 201 bp, Homo sapiens
tcgtcctgcacttcgtgcagaaactcctgttcccttacttttgggatgacttctggttcgtgttgaaggtggtgctcattataattcggctgaagaagtaygaaaagagaggggagctggtgactgtgctggataaattcttgagtcatgccaaaagacaacctcggaaacctttcatcatctatgagggagacatctaca

SEQ ID NO: 70429 - DNA, 201 bp, Homo sapiens
agccctgagtagtgaggctctgcggtctccgtggagagctgtgcctggaagagaaggacgctggtgggggctgagatcagagctgtcttctggcccagtarcccccatgcttctgtcatggctaacagttctaggggctggaatggtcgtcctgcacttcgtgcagaaactcctgttcccttacttttgggatgacttctg

SEQ ID NO: 70430 - DNA, 201 bp, Homo sapiens
cgattctgtttctcaggattcctccccatcccgcttcgccccggaaaagctgacaagaacttcaggtgtaagccctgagtagtgaggctctgcggtctccrtggagagctgtgcctggaagagaaggacgctggtgggggctgagatcagagctgtcttctggcccagtagcccccatgcttctgtcatggctaacagttc

SEQ ID NO: 70431 - DNA, 201 bp, Homo sapiens
agttcagcagctatcctgggaatttctggatgtgttgagttgggtgccacttgtgtgttaaagaagaaattttcagcaagccagttttggagtgactgcargaagtatgatgtgactgtgtttcagtatattggagaactttgtcgctacctttgcaaacaatctaagagagaaggagaaaaggatcataaggtgcgtttg

SEQ ID NO: 70432 - DNA, 201 bp, Homo sapiens
tgactttcagaaagatgaacccatgagaaatgagcagggttggtgtattcatgtgaaaaaaggagaacctggacttctcatttctcgagtgaatgcaaaamatcccttctttggctatgctgggccttataagcacacaaaagacaaattgctttgtgatgtttttaagaagggagatgtttaccttaatactggagactt

SEQ ID NO: 70433 - DNA, 201 bp, Homo sapiens; identical to SEQ ID NO: 70417

SEQ ID NO: 70434 - DNA, 201 bp, Homo sapiens; identical to SEQ ID NO: 70419

SEQ ID NO: 70435 - DNA, 201 bp, Homo sapiens; identical to SEQ ID NO: 70420

SEQ ID NO: 70436 - DNA, 201 bp, Homo sapiens; identical to SEQ ID NO: 70421

SEQ ID NO: 70437 - DNA, 201 bp, Homo sapiens; identical to SEQ ID NO: 70422

SEQ ID NO: 70438 - DNA, 201 bp, Homo sapiens; identical to SEQ ID NO: 70423

SEQ ID NO: 70439 - DNA, 120 bp, Homo sapiens
gagtcggaggctccctgctytccagccgcccagtgacccaagcttaatcttcagcaccacttggggcgaccttttcggtgcaaacctacgattctgtttctcaggattcctccccatccc

SEQ ID NO: 70440 - DNA, 201 bp, Homo sapiens; identical to SEQ ID NO: 70425

SEQ ID NO: 70441 - DNA, 201 bp, Homo sapiens; identical to SEQ ID NO: 70426

SEQ ID NO: 70442 - DNA, 201 bp, Homo sapiens; identical to SEQ ID NO: 70428

SEQ ID NO: 70443 - DNA, 201 bp, Homo sapiens; identical to SEQ ID NO: 70429

SEQ ID NO: 70444 - DNA, 201 bp, Homo sapiens; identical to SEQ ID NO: 70430

SEQ ID NO: 70445 - DNA, 201 bp, Homo sapiens; identical to SEQ ID NO: 70431

SEQ ID NO: 70446 - DNA, 201 bp, Homo sapiens; identical to SEQ ID NO: 70432

SEQ ID NO: 70447 - DNA, 201 bp, Homo sapiens
gctatggaggagagacgcaggctgcttcagaacaagcggaaggagccgccggaagatgtggcccagcgggctgcccggctcaagacatttccttgcaagakgtttaaggagggcacctgtcaacgcggggaccagtgctgctactcccacagccccccgacacccagggtttctgctgatgctgcccctgactgtccagag

SEQ ID NO: 70448 - DNA, 201 bp, Homo sapiens
tcctcccctcgcacaggggcaaggcggccgacgaagctatggaggagagacgcaggctgcttcagaacaagcggaaggagccgccggaagatgtggcccakcgggctgcccggctcaagacatttccttgcaagaggtttaaggagggcacctgtcaacgcggggaccagtgctgctactcccacagccccccgacaccca

SEQ ID NO: 70449 - DNA, 129 bp, Homo sapiens
cgcccacccactgtgccaacatggcggcrcccaggtcctaattcgggaaacgtgcaccttgactaattcggttttctgtggctacgagagcaggcttggcgggcggaggcgccagcggatgtctcatgc

SEQ ID NO: 70450 - DNA, 201 bp, Homo sapiens
gcgaggactcaagcgcttccaggctaacccggaggccaactggggtccccggcctcgtgcccggccagggtgagtggtggtaaggtgggggtggggctcakccagggaaagaaggggtaaagggcagatggggtcccacctactcctcccctcgcacaggggcaaggcggccgacgaagctatggaggagagacgcaggct

SEQ ID NO: 70451 - DNA, 201 bp, Homo sapiens
tccacgctgacttccgggtctcactctcccacgcctgtaagaacgctgtgaagacggatgcccctgcctctgccctctgggacatcatgcgttgctgggaraaggaatgtccggtgaaacgggagcgactatcagagactagcccagcgttccgcattctcagtgtggagcccaggctgcaggccaacttcaccatccggg

SEQ ID NO: 70452 - DNA, 201 bp, Homo sapiens
acctactcctcccctcgcacaggggcaaggcggccgacgaagctatggaggagagacgcaggctgcttcagaacaagcggaaggagccgccggaagatgtkgcccagcgggctgcccggctcaagacatttccttgcaagaggtttaaggagggcacctgtcaacgcggggaccagtgctgctactcccacagccccccga

SEQ ID NO: 70453 - DNA, 201 bp, Homo sapiens
tttctgtggctacgagagcaggaattcaatcgggacctgacgtgagcaggggtcagacgttagcctggcatcggctagtgggtcagtgtggatggcggggkcggggtatgagctagtcctctgtctcccaccagatgtgctgtgatcaccgagtttgctcgcattcagcttggggccaaaggaatccagatcaaggttcca

SEQ ID NO: 70454 - DNA, 101 bp, Homo sapiens
rcccaggtcctaattcgggaaacgtgcaccttgactaattcggttttctgtggctacgagagcaggaattcaatcgggacctgacgtgagcaggggtcaga

SEQ ID NO: 70455 - DNA, 120 bp, Homo sapiens
cttccaccttcagcgtctcggcaaagcgtcaggagtccccagcggccggtgagcagggaggaaggagaagaaggggagtcccagggttttcctccctcccyaccaaccacccctctctgt

SEQ ID NO: 70456 - DNA, 147 bp, Homo sapiens
ggtgttccagtgtgtgggctgcggggccttccaccttcagcgtctcggcaaagcgtcaggagtccccagcggccggtgagcagggaggaaggagaagaagsggagtcccagggttttcctccctccccaccaaccacccctctctgt

SEQ ID NO: 70457 - DNA, 201 bp, Homo sapiens
ggaaacgtgcaccttgactaattcggttttctgtggctacgagagcaggaattcaatcgggacctgacgtgagcaggggtcagacgttagcctggcatcgrctagtgggtcagtgtggatggcgggggcggggtatgagctagtcctctgtctcccaccagatgtgctgtgatcaccgagtttgctcgcattcagcttggg

SEQ ID NO: 70458 - DNA, 201 bp, Homo sapiens; identical to SEQ ID NO: 70447

SEQ ID NO: 70459 - DNA, 201 bp, Homo sapiens
ctcgtgcccggccagggggcaaggcggccgacgaagctatggaggagagacgcaggctgcttcagaacaagcggaaggagccgccggaagatgtggcccakcgggctgcccggctcaagacatttccttgcaagaggtttaaggagggcacctgtcaacgcggggaccagtgctgctactcccacagccccccgacaccca

SEQ ID NO: 70460 - DNA, 129 bp, Homo sapiens; identical to SEQ ID NO: 70449

SEQ ID NO: 70461 - DNA, 201 bp, Homo sapiens; identical to SEQ ID NO: 70451

SEQ ID NO: 70462 - DNA, 201 bp, Homo sapiens
cccggcctcgtgcccggccagggggcaaggcggccgacgaagctatggaggagagacgcaggctgcttcagaacaagcggaaggagccgccggaagatgtkgcccagcgggctgcccggctcaagacatttccttgcaagaggtttaaggagggcacctgtcaacgcggggaccagtgctgctactcccacagccccccga

SEQ ID NO: 70463 - DNA, 201 bp, Homo sapiens; identical to SEQ ID NO: 70447

SEQ ID NO: 70464 - DNA, 201 bp, Homo sapiens; identical to SEQ ID NO: 70459

SEQ ID NO: 70465 - DNA, 129 bp, Homo sapiens; identical to SEQ ID NO: 70449

SEQ ID NO: 70466 - DNA, 201 bp, Homo sapiens; identical to SEQ ID NO: 70451

SEQ ID NO: 70467 - DNA, 201 bp, Homo sapiens; identical to SEQ ID NO: 70462

SEQ ID NO: 70468 - DNA, 201 bp, Homo sapiens; identical to SEQ ID NO: 70447

SEQ ID NO: 70469 - DNA, 201 bp, Homo sapiens; identical to SEQ ID NO: 70459

SEQ ID NO: 70470 - DNA, 129 bp, Homo sapiens; identical to SEQ ID NO: 70449

SEQ ID NO: 70471 - DNA, 201 bp, Homo sapiens
ctgacttccgggtctcactctcccacgcctgtaagaacgctgtgaagacggatgcccctgcctctgccctctgggacatcatgcgttgctgggtgagggaraaggaatgtccggtgaaacgggagcgactatcagagactagcccagcgttccgcattctcagtgtggagcccaggctgcaggccaacttcaccatccggg

SEQ ID NO: 70472 - DNA, 201 bp, Homo sapiens; identical to SEQ ID NO: 70462

SEQ ID NO: 70473 - DNA, 201 bp, Homo sapiens
tcaggcacccccgtggatgaactggacaagtgctgccagacacatgacaactgctatgaccaggccaagaagctggacagctgtaaatttctgctggacamcccgtacacccacacctattcatactcgtgctctggctcggcaatcacctgtagcagcaaaaacaaagagtgtgaggccttcatttgcaactgcgaccgc

SEQ ID NO: 70474 - DNA, 201 bp, Homo sapiens
caggcacccccgtggatgaactggacaagtgctgccagacacatgacaactgctatgaccaggccaagaagctggacagctgtaaatttctgctggacaamccgtacacccacacctattcatactcgtgctctggctcggcaatcacctgtagcagcaaaaacaaagagtgtgaggccttcatttgcaactgcgaccgca

SEQ ID NO: 70475 - DNA, 183 bp, Homo sapiens
tggtcatctcagttcttttctcaccttgactgcaagatgaaactccttgtgctagctgtgctgctcacagtggccgccgccgmcagcggcatcagccctcgggccgtgtggcagttccgcaaaatgatcaagtgcgtgatcccggggagtgaccccttcttggaatacaacaactacggctgc

SEQ ID NO: 70476 - DNA, 201 bp, Homo sapiens
agtgctgccagacacatgacaactgctatgaccaggccaagaagctggacagctgtaaatttctgctggacaacccgtacacccacacctattcatactcrtgctctggctcggcaatcacctgtagcagcaaaaacaaagagtgtgaggccttcatttgcaactgcgaccgcaacgctgccatctgcttttcaaaagctc

SEQ ID NO: 70477 - DNA, 201 bp, Homo sapiens
tgctgctcacagtggccgccgccgacagcggcatcagccctcgggccgtgtggcagttccgcaaaatgatcaagtgcgtgatcccggggagtgaccccttyttggaatacaacaactacggctgctactgtggcttggggggctcaggcacccccgtggatgaactggacaagtgctgccagacacatgacaactgctatg

SEQ ID NO: 70478 - DNA, 201 bp, Homo sapiens
cgggccgtgtggcagttccgcaaaatgatcaagtgcgtgatcccggggagtgaccccttcttggaatacaacaactacggctgctactgtggcttgggggrctcaggcacccccgtggatgaactggacaagtgctgccagacacatgacaactgctatgaccaggccaagaagctggacagctgtaaatttctgctggac

SEQ ID NO: 70479 - DNA, 112 bp, Homo sapiens
gaacctggacaccaagaagtattgtcagagttgaatatcacctctcaaaagcatcacctctatctgcctcatctcacactgtactctccaataaagcaccytgttgaaagac

SEQ ID NO: 70480 - DNA, 201 bp, Homo sapiens
tcttggaatacaacaactacggctgctactgtggcttggggggctcaggcacccccgtggatgaactggacaagtgctgccagacacatgacaactgctaygaccaggccaagaagctggacagctgtaaatttctgctggacaacccgtacacccacacctattcatactcgtgctctggctcggcaatcacctgtagca

SEQ ID NO: 70481 - DNA, 103 bp, Homo sapiens
ggscgttgtcactcgactaccaagatggcggcccccgggagctgtgctctatggagctattgcggccgtgggtggtcgcgggcgatgcggggctgccagctcc

SEQ ID NO: 70482 - DNA, 201 bp, Homo sapiens
cctaaagctcagttttgaagtgagtgtatttatagcttctctgctggtgctgccttctagagggatgatagatcatttgaacccaatgacaatttttaacyagaaaatttaattgtacctgaatcaacctttcagcctaggacgaagtctaggcccaagtcagagtattaatgatcatgagaattgtgtgctgaaccagta

SEQ ID NO: 70483 - DNA, 174 bp, Homo sapiens
gctgccttctagagggatgatagatcatttgaacccaatgacaatttttaaccagaaaatttaattgtacctgaatcaacctttcagcctaggacgaagtytaggcccaagtcagagtattaatgatcatgagaattgtgtgctgaaccagtaaacgagtttaccttttgatgg

SEQ ID NO: 70484 - DNA, 201 bp, Homo sapiens
aaagcctggaactgaaggataatctggcaaatgagacagcagcagagcatctcctcttaaggatacgtgccttggactcatgtttgaatcgaacagtctcraagtggaagaacaaattcttgtcacttttttacagctttctttggagctgcttcagtccatctcccagaggcatttggtctgtatctttgctcaactgct

SEQ ID NO: 70485 - DNA, 201 bp, Homo sapiens
tgtttgaaagtgtggctaagaagtatgatgtgatgaatgatatgatgagtcttggtatccatcgtgtttggaaggatttgctgctctggaagatgcacccrcttcctgggacccagctgcttgatgttgctggaggcacaggtgacattgcattccggttccttaattatgttcagtcccagcatcagagaaaacagaaga

SEQ ID NO: 70486 - DNA, 201 bp, Homo sapiens
tgacattgcattccggttccttaattatgttcagtcccagcatcagagaaaacagaagaggcagttaagggcccaacaaaatttatcctgggaagaaattrccaaagagtaccagaatgaagaagattccttgggcgggtctcgtgtcgtggtgtgtgacatcaacaaggagatgctaaaggttggaaagcagaaagcctt

SEQ ID NO: 70487 - DNA, 148 bp, Homo sapiens
ggccgttgtcactcgactaccaagatggcggcccccgggagctgtgcyctatggagctattgcggccgtgggtggtcgcgggcgatgcggggctgccagctcctcgggcttcgtagctcttggcccggggacctactaagtgctcggc

SEQ ID NO: 70488 - DNA, 201 bp, Homo sapiens
taaggtacaaccacccctaaagctcagttttgaagtgagtgtatttatagcttctctgctggtgctgccttctagagggatgatagatcatttgaacccartgacaatttttaaccagaaaatttaattgtacctgaatcaacctttcagcctaggacgaagtctaggcccaagtcagagtattaatgatcatgagaattg

SEQ ID NO: 70489 - DNA, 201 bp, Homo sapiens
accccaagttcctgaggaacatgcgctttgccaagaagcacaacaagaaaggcctaaaaaagatgcaggccaacagtgccagggccacgagtgcacgtgcygacgctatcaaggcccttgtaaagcccaaggaggttaagcccgagatcccaaagggtgtcagccgcaagctcgatccacttgcctacattgcccaccccc

SEQ ID NO: 70490 - DNA, 170 bp, Homo sapiens
tgtttgaaagtgtggctaagaagtatgatgtgatgaatgatatgatgagtcttggtatccatcgtgtttggaaggatttgctgctctggaagatgcacccrcttcctgggacccagctgcttgatgttgctggaggcacaggtaatgtcgagtttggtatccttcactac

SEQ ID NO: 70491 - DNA, 201 bp, Homo sapiens
ctcaagctatgtcggtcaaaggccaaggccaaagatcaaaccaaggcccaggctgcagctccagcttaggctcccaaaggtgcccggacacctacgaaggyttcagagtagatatctctgtctgccaatgtgaggacagaaggactgcactattgtgtgtgtttctcccatgtcagtctatcaggtgtttgaaagtgtggc

SEQ ID NO: 70492 - DNA, 126 bp, Homo sapiens
gtctgccaaggaccatgggtgccgckctggggacaggcacgcggctggctccctggccgggccgggcctgcggcgccctcccgcgctggacacccaccgcgcccgcccaaggctgccactccaagc

SEQ ID NO: 70493 - DNA, 201 bp, Homo sapiens
tcaacaaataccgtaacaagtactgcatgttcaatgatgacatccaaggcacagcctccgttgctgtggcagggatcttggctgctctgcgaatcaccaasaacaagctttccaatcacgtgtttgttttccaaggtgcaggcgaggcagctatgggcattgcccacctccttgtcatggccctagagaaagaaggtgtac

SEQ ID NO: 70494 - DNA, 201 bp, Homo sapiens
tggactctaaagggctcattgtcaaggggaggagccacctgaaccatgaaaaggagatgtttgcccaagaccatcctgaagtcaactccctggaggaggtrgtgaggctggtgaagcccacagccatcataggtgttgctgccatcgcaggagccttcacggagcagattctgagggacatggcctccttccacgagcgcc

SEQ ID NO: 70495 - DNA, 201 bp, Homo sapiens
ccatcgcaggagccttcacggagcagattctgagggacatggcctccttccacgagcgccctatcatctttgccctgagcaaccccaccagcaaggccgartgcacggctgagaagtgctaccgggtcaccgagggccgagggatttttgccagtggaagtccttttaagagtgtgactctggaagatggcaagaccttca

SEQ ID NO: 70496 - DNA, 201 bp, Homo sapiens
ccggcgggatccggcacatcccagatgagatcttcctcctgacagcagagcaaattgcccaggaagtctctgagcagcatctgtcccaggggagactctayccaccactcagcaccatccgagacgtgtctttgagaattgccatcaaagttctcgactacgcgtacaaacacaacctggcttcctactacccagagccta

SEQ ID NO: 70497 - DNA, 201 bp, Homo sapiens
tcatgacactccaagaccggaacgagaagctcttctaccgagtgctgacttcggacgtggagaagttcatgccaatcgtgtacacgcctaccgtggggctrgcctgtcagcactatggcctgactttccgcaggccccgtggactgttcatcaccattcatgacaaaggtcatcttgcaacaatgctgaattcttggccag

SEQ ID NO: 70498 - DNA, 201 bp, Homo sapiens
ttctgagccaggacgtccagctcctccgaatcatgagatattacgagcggcagcagagtgacctggacaagtacatcattctcatgacactccaagaccgkaacgagaagctcttctaccgagtgctgacttcggacgtggagaagttcatgccaatcgtgtacacgcctaccgtggggctggcctgtcagcactatggcc

SEQ ID NO: 70499 - DNA, 201 bp, Homo sapiens
gtggtgaggctggtgaagcccacagccatcataggtgttgctgccatcgcaggagccttcacggagcagattctgagggacatggcctccttccacgagckccctatcatctttgccctgagcaaccccaccagcaaggccgagtgcacggctgagaagtgctaccgggtcaccgagggccgagggatttttgccagtgga

SEQ ID NO: 70500 - DNA, 141 bp, Homo sapiens
gatgaagcccagagtaacacccacaatataaatgggttccaaaatggcccaagtgaatccttgtcgctgtgttttttcttttaaactttctggtgtgagargagatgccaaggcatacagtgaataaaagccttgtctctg

SEQ ID NO: 70501 - DNA, 201 bp, Homo sapiens
atcttgcaacaatgctgaattcttggccagaagacaatattaaggccgtggtggtgactgatggggagcgcatcctgggcctgggagacctgggctgctayggcatgggcatccctgtgggcaagctggccctgtacacggcatgcggaggggtgaacccgcagcagtgcctccctgtgctgctggacgtcggcaccaaca

SEQ ID NO: 70502 - DNA, 201 bp, Homo sapiens
gatattacgagcggcagcagagtgacctggacaagtacatcattctcatgacactccaagaccggaacgagaagctcttctaccgagtgctgacttcggaygtggagaagttcatgccaatcgtgtacacgcctaccgtggggctggcctgtcagcactatggcctgactttccgcaggccccgtggactgttcatcacca

SEQ ID NO: 70503 - DNA, 201 bp, Homo sapiens; identical to SEQ ID NO: 70497

SEQ ID NO: 70504 - DNA, 201 bp, Homo sapiens
gacctcagctccccgagcagcgcaggtgggccagggaaggagaggaccgaggcaagccaccacgcgggattaggggtctgccaaggaccatgggtgccgckctggggacaggcacgcggctggctccctggccgggccgggcctgcggcgccctcccgcgctggacacccaccgcgcccgcccaaggctgccactccaagc

SEQ ID NO: 70505 - DNA, 128 bp, Homo sapiens
gtgcatttagtcttgccaagatggagagtctcaggcgggcattctgagctgcttcttgtcactggggaaaaccacgtgcacgcagtgctgaggcgccccacgcgcgtcctcaggggaagccaggcact

SEQ ID NO: 70506 - DNA, 201 bp, Homo sapiens; identical to SEQ ID NO: 70498

SEQ ID NO: 70507 - DNA, 127 bp, Homo sapiens
gtgcatttagtcttgccaagatggagagtctcaggcgggcattctgagctgcttcttgtcactggggaaaaccacgtgcacgcagtgctgaggcgccccacgcgcgtcctcaggggaagccaggcac

SEQ ID NO: 70508 - DNA, 201 bp, Homo sapiens; identical to SEQ ID NO: 70501

SEQ ID NO: 70509 - DNA, 201 bp, Homo sapiens; identical to SEQ ID NO: 70502

SEQ ID NO: 70510 - DNA, 201 bp, Homo sapiens
tcatgacactccaagaccggaacgagaagctcttctaccgagtgctgacttcggacgtggagaagttcatgccaatcgtgtacacgcctaccgtggggctrgcctgtcagcactatggcctgactttccgcaggccccggtgagcccccgtggagtgagggctctgggaggggctgcctcatagaggggaataaattcttt

SEQ ID NO: 70511 - DNA, 201 bp, Homo sapiens
ctcacagaccgcagctcctcaccccgcctgctccgcagcgggaccgcgtagacctcagctccccgagcagcgcaggtctgccaaggaccatgggtgccgckctggggacaggcacgcggctggctccctggccgggccgggcctgcggcgccctcccgcgctggacacccaccgcgcccgcccaaggctgccactccaagc

SEQ ID NO: 70512 - DNA, 201 bp, Homo sapiens; identical to SEQ ID NO: 70498

SEQ ID NO: 70513 - DNA, 201 bp, Homo sapiens
gatattacgagcggcagcagagtgacctggacaagtacatcattctcatgacactccaagaccggaacgagaagctcttctaccgagtgctgacttcggaygtggagaagttcatgccaatcgtgtacacgcctaccgtggggctggcctgtcagcactatggcctgactttccgcaggccccggtgagcccccgtggagt

SEQ ID NO: 70514 - DNA, 201 bp, Homo sapiens; identical to SEQ ID NO: 70504

SEQ ID NO: 70515 - DNA, 201 bp, Homo sapiens; identical to SEQ ID NO: 70493

SEQ ID NO: 70516 - DNA, 201 bp, Homo sapiens; identical to SEQ ID NO: 70494

SEQ ID NO: 70517 - DNA, 201 bp, Homo sapiens; identical to SEQ ID NO: 70495

SEQ ID NO: 70518 - DNA, 201 bp, Homo sapiens; identical to SEQ ID NO: 70496

SEQ ID NO: 70519 - DNA, 201 bp, Homo sapiens; identical to SEQ ID NO: 70497

SEQ ID NO: 70520 - DNA, 128 bp, Homo sapiens; identical to SEQ ID NO: 70505

SEQ ID NO: 70521 - DNA, 201 bp, Homo sapiens; identical to SEQ ID NO: 70499

SEQ ID NO: 70522 - DNA, 201 bp, Homo sapiens; identical to SEQ ID NO: 70498

SEQ ID NO: 70523 - DNA, 127 bp, Homo sapiens; identical to SEQ ID NO: 70507

SEQ ID NO: 70524 - DNA, 201 bp, Homo sapiens; identical to SEQ ID NO: 70501

SEQ ID NO: 70525 - DNA, 141 bp, Homo sapiens; identical to SEQ ID NO: 70500

SEQ ID NO: 70526 - DNA, 201 bp, Homo sapiens; identical to SEQ ID NO: 70502

SEQ ID NO: 70527 - DNA, 201 bp, Homo sapiens; identical to SEQ ID NO: 70504

SEQ ID NO: 70528 - DNA, 201 bp, Homo sapiens
gattactgaatttggccacctggaggtacttggggaccctgacaagaggcacagcctccgttgctgtggcagggatcttggctgctctgcgaatcaccaasaacaagctttccaatcacgtgtttgttttccaaggtgcaggcgaggcagctatgggcattgcccacctccttgtcatggccctagagaaagaaggtgtac

SEQ ID NO: 70529 - DNA, 201 bp, Homo sapiens
tggactctaaagggctcattgtcaaggggaggagccacctgaaccatgaaaaggagatgtttgcccaagaccatcctgaagtcaactccctggaggaggtrgtgaggctggtgaagcccacagccatcatagggccgagggatttttgccagtggaagtccttttaagagtgtgactctggaagatggcaagaccttcatt

SEQ ID NO: 70530 - DNA, 201 bp, Homo sapiens; identical to SEQ ID NO: 70497

SEQ ID NO: 70531 - DNA, 201 bp, Homo sapiens; identical to SEQ ID NO: 70496

SEQ ID NO: 70532 - DNA, 128 bp, Homo sapiens; identical to SEQ ID NO: 70505

SEQ ID NO: 70533 - DNA, 201 bp, Homo sapiens; identical to SEQ ID NO: 70498

SEQ ID NO: 70534 - DNA, 127 bp, Homo sapiens; identical to SEQ ID NO: 70507

SEQ ID NO: 70535 - DNA, 141 bp, Homo sapiens; identical to SEQ ID NO: 70500

SEQ ID NO: 70536 - DNA, 201 bp, Homo sapiens
tacatagattaactcattggattttcatggcaaccctgtaagaggccgtggtggtgactgatggggagcgcatcctgggcctgggagacctgggctgctayggcatgggcatccctgtgggcaagctggccctgtacacggcatgcggaggggtgaacccgcagcagtgcctccctgtgctgctggacgtcggcaccaaca

SEQ ID NO: 70537 - DNA, 201 bp, Homo sapiens; identical to SEQ ID NO: 70502

SEQ ID NO: 70538 - DNA, 201 bp, Homo sapiens; identical to SEQ ID NO: 70504

SEQ ID NO: 70539 - DNA, 201 bp, Homo sapiens; identical to SEQ ID NO: 70493

SEQ ID NO: 70540 - DNA, 201 bp, Homo sapiens; identical to SEQ ID NO: 70494

SEQ ID NO: 70541 - DNA, 201 bp, Homo sapiens; identical to SEQ ID NO: 70495

SEQ ID NO: 70542 - DNA, 201 bp, Homo sapiens; identical to SEQ ID NO: 70496

SEQ ID NO: 70543 - DNA, 201 bp, Homo sapiens; identical to SEQ ID NO: 70497

SEQ ID NO: 70544 - DNA, 128 bp, Homo sapiens; identical to SEQ ID NO: 70505

SEQ ID NO: 70545 - DNA, 201 bp, Homo sapiens; identical to SEQ ID NO: 70499

SEQ ID NO: 70546 - DNA, 201 bp, Homo sapiens; identical to SEQ ID NO: 70498

SEQ ID NO: 70547 - DNA, 127 bp, Homo sapiens; identical to SEQ ID NO: 70507

SEQ ID NO: 70548 - DNA, 201 bp, Homo sapiens; identical to SEQ ID NO: 70501

SEQ ID NO: 70549 - DNA, 141 bp, Homo sapiens; identical to SEQ ID NO: 70500

SEQ ID NO: 70550 - DNA, 201 bp, Homo sapiens; identical to SEQ ID NO: 70502

SEQ ID NO: 70551 - DNA, 201 bp, Homo sapiens
ttactcagttcattttggataactacattgaaagaggaaaaggatctgcttgcagaatagtttgtactcagccaagaagaattagtgccatttcagttgcrgaaagagtagctgcagaaagggcagaatcttgtggcagtggtaatagtactggatatcaaattcgtctccagagtcggttgccaaggaaacagggttcta

SEQ ID NO: 70552 - DNA, 201 bp, Homo sapiens
atgatacatatacctggttttacctttccggttgtggaatatcttttggaagatgtaattgaaaaaataaggtatgttccagaacaaaaagaacacagatsccagtttaagaggggtttcatgcaagggcatgtaaatagacaagaaaaagaagaaaaagaagcaatatataaagaacgttggccagattatgtaagggaa

SEQ ID NO: 70553 - DNA, 201 bp, Homo sapiens
taatggtcttagagcaagtcttctagatgactatcaactgccagaaattttgagaactcctttggaagaactttgtttacaaataaagattttaaggctargtggaattgcttattttctgagtagattaatggacccaccatcaaatgaggcagtgttactctccataagacacctgatggagctgaacgctttggataa

SEQ ID NO: 70554 - DNA, 201 bp, Homo sapiens
gtcagacccgtatttgtccagtgttagtcatatcgtacttgatgaaatccatgaaagaaatctgcagtcagatgttttaatgactgttgttaaagaccttmtcaattttcgatctgacttgaaagtaatattgatgagtgcaacattgaatgcagaaaagttttcagaatattttggtaactgtccaatgatacatatacc

SEQ ID NO: 70555 - DNA, 201 bp, Homo sapiens
tgctcctgaggatcatggatacggtactgaagtttctactaagaacacaccatgctcagagaacaaacttgacatccaggaaaagaagttgataaatcaaraaaaaaaaatgtttagaatcaggaacagatcatatattgaccgagattctgagtatctcttgcaagaaaatgaaccagatggaactttagaccaaaaatt

SEQ ID NO: 70556 - DNA, 201 bp, Homo sapiens
atggtcttagagcaagtcttctagatgactatcaactgccagaaattttgagaactcctttggaagaactttgtttacaaataaagattttaaggctaggkggaattgcttattttctgagtagattaatggacccaccatcaaatgaggcagtgttactctccataagacacctgatggagctgaacgctttggataaac

SEQ ID NO: 70557 - DNA, 201 bp, Homo sapiens
ctacgtgcctggggtggttggggggaccctccaggcggccaccatctgtgcctccagccaccagtttctctccacacactacaacctgcacaacctctacrgcctgaccgaagccatcgcctcccacagggcgctggtgaaggctcgggggacacgcccatttgtgatctcccgctcgacctttgctggccacggccgata

SEQ ID NO: 70558 - DNA, 201 bp, Homo sapiens
cagccctggcctggtgggaggacatggtggctgagttccatgaccaggtgcccttcgacggcatgtggattgacatgaacgagccttccaacttcatcagrggctctgaggacggctgccccaacaatgagctggagaacccaccctacgtgcctggggtggttggggggaccctccaggcggccaccatctgtgcctcca

SEQ ID NO: 70559 - DNA, 201 bp, Homo sapiens
cgctacgaggtgcccttggagaccccgcatgtccacagccgggcaccgtccccactctacagcgtggagttctccgaggagcccttcggggtgatcgtgcrccggcagctggacggccgcgtgctgctgaacacgacggtggcgcccctgttctttgcggaccagttccttcagctgtccacctcgctgccctcgcagtat

SEQ ID NO: 70560 - DNA, 201 bp, Homo sapiens
gccgggcaccgtccccactctacagcgtggagttctccgaggagcccttcggggtgatcgtgcgccggcagctggacggccgcgtgctgctgaacacgacrgtggcgcccctgttctttgcggaccagttccttcagctgtccacctcgctgccctcgcagtatatcacaggcctcgccgagcacctcagtcccctgatgc

SEQ ID NO: 70561 - DNA, 201 bp, Homo sapiens
gccctgctcccaccggctcctggccgtctgcgccctcgtgtccttggcaaccgctgcactcctggggcacatcctactccatgatttcctgctggttcccygagagctgagtggctcctccccagtcctggaggagactcacccagctcaccagcagggagccagcagaccagggccccgggatgcccaggcacaccccgg

SEQ ID NO: 70562 - DNA, 201 bp, Homo sapiens
ctgccccaacaatgagctggagaacccaccctacgtgcctggggtggttggggggaccctccaggcggccaccatctgtgcctccagccaccagtttctcyccacacactacaacctgcacaacctctacggcctgaccgaagccatcgcctcccacagggcgctggtgaaggctcgggggacacgcccatttgtgatctc

SEQ ID NO: 70563 - DNA, 201 bp, Homo sapiens
gggggacgtgtggagctcctgggagcagctcgcctcctccgtgccagaaatcctgcagtttaacctgctgggggtgcctctggtcggggccgacgtctgcrgcttcctgggcaacacctcagaggagctgtgtgtgcgctggacccagctgggggccttctaccccttcatgcggaaccacaacagcctgctcagtctgcc

SEQ ID NO: 70564 - DNA, 201 bp, Homo sapiens
tctgttcccagcaccggagaagggggtgctcaggtggaggtgtggggtatgcacctgagctcctgcttcgcgcctgctgctctgccccaacgcgaccgctkcccggctgcccagagggctggatgcctgccggtccccgagcaagcctgggaactcaggaaaattcacaggacttgggagattctaaatcttaagtgcaat

SEQ ID NO: 70565 - DNA, 201 bp, Homo sapiens
acccgcctctgcgcgcccccgggcacgaccccggagtctccgcgggcggccagggcgcgcgtgcgcggaggttctcctcgtccgcccgttgttcagcgagsgaggctctgcgcgtgccgcagctgacggggaaactgaggcacggagcgggcctgtaggagctgtccaggccatctccaaccatgggagtgaggcacccgc

SEQ ID NO: 70566 - DNA, 201 bp, Homo sapiens
acacactacaacctgcacaacctctacggcctgaccgaagccatcgcctcccacagggcgctggtgaaggctcgggggacacgcccatttgtgatctcccrctcgacctttgctggccacggccgatacgccggccactggacgggggacgtgtggagctcctgggagcagctcgcctcctccgtgccagaaatcctgcag

SEQ ID NO: 70567 - DNA, 201 bp, Homo sapiens
gcagggagccagcagaccagggccccgggatgcccaggcacaccccggccgtcccagagcagtgcccacacagtgcgacgtcccccccaacagccgcttcrattgcgcccctgacaaggccatcacccaggaacagtgcgaggcccgcggctgttgctacatccctgcaaagcaggggctgcagggagcccagatggggca

SEQ ID NO: 70568 - DNA, 167 bp, Homo sapiens
ttcgcgcctgctgctctgccccaacgcgaccgctgcccggctgcccagagggctggatgcctgccggtccccgagcaagcctgggaactcaggaaaattcmcaggacttgggagattctaaatcttaagtgcaattatttttaataaaaggggcatttggaatcagc

SEQ ID NO: 70569 - DNA, 201 bp, Homo sapiens
ctggtgttagccgggcggagtgtgttagtctctccagagggaggctggttccccagggaagcagagcctgtgtgcgggcagcagctgtgtgcgggcctggrggttgcatgtgtcacctggagctgggcactaaccattccaagccgccgcatcgcttgtttccacctcctgggccggggctctggcccccaacgtgtctag

SEQ ID NO: 70570 - DNA, 179 bp, Homo sapiens
ctgagctcctgcttcgcgcctgctgctctgccccaacgcgaccgctgcccggctgcccagagggctggatgcctgccggtccccgagcaagcctgggaacycaggaaaattcacaggacttgggagattctaaatcttaagtgcaattatttttaataaaaggggcatttggaatcagc

SEQ ID NO: 70571 - DNA, 201 bp, Homo sapiens
ccgcgtgctgctgaacacgacggtggcgcccctgttctttgcggaccagttccttcagctgtccacctcgctgccctcgcagtatatcacaggcctcgccragcacctcagtcccctgatgctcagcaccagctggaccaggatcaccctgtggaaccgggaccttgcgcccacgcccggtgcgaacctctacgggtctca

SEQ ID NO: 70572 - DNA, 201 bp, Homo sapiens
gccctcctcacctgttgccggcatgcgggtagtattagccacccccctccatctgttcccagcaccggagaagggggtgctcaggtggaggtgtggggtaygcacctgagctcctgcttcgcgcctgctgctctgccccaacgcgaccgctgcccggctgcccagagggctggatgcctgccggtccccgagcaagcctgg

SEQ ID NO: 70573 - DNA, 201 bp, Homo sapiens
gatcgcactgtgggccggggccctggagggctgctctgtgttaataagattgtaaggtttgccctcctcacctgttgccggcatgcgggtagtattagccmcccccctccatctgttcccagcaccggagaagggggtgctcaggtggaggtgtggggtatgcacctgagctcctgcttcgcgcctgctgctctgccccaa

SEQ ID NO: 70574 - DNA, 201 bp, Homo sapiens
cggccatggtgcaggagctgcaccagggcggccggcgctacatgatgatcgtggatcctgccatcagcagctcgggccctgccgggagctacaggccctaygacgagggtctgcggaggggggttttcatcaccaacgagaccggccagccgctgattgggaaggtatggcccgggtccactgccttccccgacttcacca

SEQ ID NO: 70575 - DNA, 201 bp, Homo sapiens
ccaggatcaccctgtggaaccgggaccttgcgcccacgcccggtgcgaacctctacgggtctcaccctttctacctggcgctggaggacggcgggtcggcwcacggggtgttcctgctaaacagcaatgccatggatgtggtcctgcagccgagccctgcccttagctggaggtcgacaggtgggatcctggatgtctaca

SEQ ID NO: 70576 - DNA, 201 bp, Homo sapiens
agggccctggcctcacaaccacagagtcccgccagcagcccatggccctggctgtggccctgaccaagggtggggaggcccgaggggagctgttctgggaygatggagagagcctggaagtgctggagcgaggggcctacacacaggtcatcttcctggccaggaataacacgatcgtgaatgagctggtacgtgtgacca

SEQ ID NO: 70577 - DNA, 201 bp, Homo sapiens
cccacgcccggtgcgaacctctacgggtctcaccctttctacctggcgctggaggacggcgggtcggcacacggggtgttcctgctaaacagcaatgccayggatgtggtcctgcagccgagccctgcccttagctggaggtcgacaggtgggatcctggatgtctacatcttcctgggcccagagcccaagagcgtggtg

SEQ ID NO: 70578 - DNA, 201 bp, Homo sapiens
accattccaagccgccgcatcgcttgtttccacctcctgggccggggctctggcccccaacgtgtctaggagagctttctccctagatcgcactgtgggcyggggccctggagggctgctctgtgttaataagattgtaaggtttgccctcctcacctgttgccggcatgcgggtagtattagccacccccctccatctgt

SEQ ID NO: 70579 - DNA, 201 bp, Homo sapiens
accctgcggctggacgtgatgatggagactgagaaccgcctccacttcacgatcaaagatccagctaacaggcgctacgaggtgcccttggagaccccgcrtgtccacagccgggcaccgtccccactctacagcgtggagttctccgaggagcccttcggggtgatcgtgcgccggcagctggacggccgcgtgctgctg

SEQ ID NO: 70580 - DNA, 201 bp, Homo sapiens
tcacgatcaaagatccagctaacaggcgctacgaggtgcccttggagaccccgcatgtccacagccgggcaccgtccccactctacagcgtggagttctcygaggagcccttcggggtgatcgtgcgccggcagctggacggccgcgtgctgctgaacacgacggtggcgcccctgttctttgcggaccagttccttcagc

SEQ ID NO: 70581 - DNA, 201 bp, Homo sapiens
actggacgggggacgtgtggagctcctgggagcagctcgcctcctccgtgccagaaatcctgcagtttaacctgctgggggtgcctctggtcggggccgamgtctgcggcttcctgggcaacacctcagaggagctgtgtgtgcgctggacccagctgggggccttctaccccttcatgcggaaccacaacagcctgctca

SEQ ID NO: 70582 - DNA, 201 bp, Homo sapiens
ccactggacgggggacgtgtggagctcctgggagcagctcgcctcctccgtgccagaaatcctgcagtttaacctgctgggggtgcctctggtcggggccvacgtctgcggcttcctgggcaacacctcagaggagctgtgtgtgcgctggacccagctgggggccttctaccccttcatgcggaaccacaacagcctgct

SEQ ID NO: 70583 - DNA, 201 bp, Homo sapiens
cctgggcttccacctgtgccgctggggctactcctccaccgctatcacccgccaggtggtggagaacatgaccagggcccacttccccctggacgtccagyggaacgacctggactacatggactcccggagggacttcacgttcaacaaggatggcttccgggacttcccggccatggtgcaggagctgcaccagggcgg

SEQ ID NO: 70584 - DNA, 201 bp, Homo sapiens
tccctgtctccaacttcacctacagccccgacaccaaggtcctggacatctgtgtctcgctgttgatgggagagcagtttctcgtcagctggtgttagccrggcggagtgtgttagtctctccagagggaggctggttccccagggaagcagagcctgtgtgcgggcagcagctgtgtgcgggcctgggggttgcatgtgt

SEQ ID NO: 70585 - DNA, 201 bp, Homo sapiens
ccagagcagtgcccacacagtgcgacgtcccccccaacagccgcttcgattgcgcccctgacaaggccatcacccaggaacagtgcgaggcccgcggctgytgctacatccctgcaaagcaggggctgcagggagcccagatggggcagccctggtgcttcttcccacccagctaccccagctacaagctggagaacctga

SEQ ID NO: 70586 - DNA, 201 bp, Homo sapiens
cgggggacgtgtggagctcctgggagcagctcgcctcctccgtgccagaaatcctgcagtttaacctgctgggggtgcctctggtcggggccgacgtctgsggcttcctgggcaacacctcagaggagctgtgtgtgcgctggacccagctgggggccttctaccccttcatgcggaaccacaacagcctgctcagtctgc

SEQ ID NO: 70587 - DNA, 201 bp, Homo sapiens
cctcccacccccacctgcagctccccgtgagccagccatccacagcgaggggcagtgggtgacgctgccggcccccctggacaccatcaacgtccacctcygggctgggtacatcatccccctgcagggccctggcctcacaaccacagagtcccgccagcagcccatggccctggctgtggccctgaccaagggtgggga

SEQ ID NO: 70588 - DNA, 201 bp, Homo sapiens
tgccatcagcagctcgggccctgccgggagctacaggccctacgacgagggtctgcggaggggggttttcatcaccaacgagaccggccagccgctgattrggaaggtatggcccgggtccactgccttccccgacttcaccaaccccacagccctggcctggtgggaggacatggtggctgagttccatgaccaggtgcc

SEQ ID NO: 70589 - DNA, 201 bp, Homo sapiens
agtgagggagctggcctgcagctgcagaaggtgactgtcctgggcgtggccacggcgccccagcaggtcctctccaacggtgtccctgtctccaacttcayctacagccccgacaccaaggtcctggacatctgtgtctcgctgttgatgggagagcagtttctcgtcagctggtgttagccgggcggagtgtgttagtct

SEQ ID NO: 70590 - DNA, 201 bp, Homo sapiens
cagctcgggccctgccgggagctacaggccctacgacgagggtctgcggaggggggttttcatcaccaacgagaccggccagccgctgattgggaaggtayggcccgggtccactgccttccccgacttcaccaaccccacagccctggcctggtgggaggacatggtggctgagttccatgaccaggtgcccttcgacgg

SEQ ID NO: 70591 - DNA, 201 bp, Homo sapiens
ttttcatcaccaacgagaccggccagccgctgattgggaaggtatggcccgggtccactgccttccccgacttcaccaaccccacagccctggcctggtgrgaggacatggtggctgagttccatgaccaggtgcccttcgacggcatgtggattgacatgaacgagccttccaacttcatcagaggctctgaggacggct

SEQ ID NO: 70592 - DNA, 201 bp, Homo sapiens
gccttccccgacttcaccaaccccacagccctggcctggtgggaggacatggtggctgagttccatgaccaggtgcccttcgacggcatgtggattgacaygaacgagccttccaacttcatcagaggctctgaggacggctgccccaacaatgagctggagaacccaccctacgtgcctggggtggttggggggaccctc

SEQ ID NO: 70593 - DNA, 201 bp, Homo sapiens
tgccttccccgacttcaccaaccccacagccctggcctggtgggaggacatggtggctgagttccatgaccaggtgcccttcgacggcatgtggattgacrtgaacgagccttccaacttcatcagaggctctgaggacggctgccccaacaatgagctggagaacccaccctacgtgcctggggtggttggggggaccct

SEQ ID NO: 70594 - DNA, 201 bp, Homo sapiens
ccccgacttcaccaaccccacagccctggcctggtgggaggacatggtggctgagttccatgaccaggtgcccttcgacggcatgtggattgacatgaacragccttccaacttcatcagaggctctgaggacggctgccccaacaatgagctggagaacccaccctacgtgcctggggtggttggggggaccctccaggc

SEQ ID NO: 70595 - DNA, 201 bp, Homo sapiens
tgaggacggctgccccaacaatgagctggagaacccaccctacgtgcctggggtggttggggggaccctccaggcggccaccatctgtgcctccagccacyagtttctctccacacactacaacctgcacaacctctacggcctgaccgaagccatcgcctcccacagggcgctggtgaaggctcgggggacacgcccatt

SEQ ID NO: 70596 - DNA, 201 bp, Homo sapiens
cacccagctcaccagcagggagccagcagaccagggccccgggatgcccaggcacaccccggccgtcccagagcagtgcccacacagtgcgacgtcccccscaacagccgcttcgattgcgcccctgacaaggccatcacccaggaacagtgcgaggcccgcggctgttgctacatccctgcaaagcaggggctgcaggga

SEQ ID NO: 70597 - DNA, 201 bp, Homo sapiens
tgaccgaagccatcgcctcccacagggcgctggtgaaggctcgggggacacgcccatttgtgatctcccgctcgacctttgctggccacggccgatacgcyggccactggacgggggacgtgtggagctcctgggagcagctcgcctcctccgtgccagaaatcctgcagtttaacctgctgggggtgcctctggtcgggg

SEQ ID NO: 70598 - DNA, 201 bp, Homo sapiens
tccgggctgggtacatcatccccctgcagggccctggcctcacaaccacagagtcccgccagcagcccatggccctggctgtggccctgaccaagggtggrgaggcccgaggggagctgttctgggacgatggagagagcctggaagtgctggagcgaggggcctacacacaggtcatcttcctggccaggaataacacga

SEQ ID NO: 70599 - DNA, 201 bp, Homo sapiens
cacacactacaacctgcacaacctctacggcctgaccgaagccatcgcctcccacagggcgctggtgaaggctcgggggacacgcccatttgtgatctccygctcgacctttgctggccacggccgatacgccggccactggacgggggacgtgtggagctcctgggagcagctcgcctcctccgtgccagaaatcctgca

SEQ ID NO: 70600 - DNA, 201 bp, Homo sapiens
tgcactcctggggcacatcctactccatgatttcctgctggttccccgagagctgagtggctcctccccagtcctggaggagactcacccagctcaccagyagggagccagcagaccagggccccgggatgcccaggcacaccccggccgtcccagagcagtgcccacacagtgcgacgtcccccccaacagccgcttcga

SEQ ID NO: 70601 - DNA, 201 bp, Homo sapiens
gcctgggcttccacctgtgccgctggggctactcctccaccgctatcacccgccaggtggtggagaacatgaccagggcccacttccccctggacgtccartggaacgacctggactacatggactcccggagggacttcacgttcaacaaggatggcttccgggacttcccggccatggtgcaggagctgcaccagggcg

SEQ ID NO: 70602 - DNA, 201 bp, Homo sapiens
ttccaccaggcccacgtcgcgggggagaccgtggcccggcccctcttcctggagttccccaaggactctagcacctggactgtggaccaccagctcctgtrgggggaggccctgctcatcaccccagtgctccaggccgggaaggccgaagtgactggctacttccccttgggcacatggtacgacctgcagacggtgcca

SEQ ID NO: 70603 - DNA, 201 bp, Homo sapiens
cgccggccactggacgggggacgtgtggagctcctgggagcagctcgcctcctccgtgccagaaatcctgcagtttaacctgctgggggtgcctctggtcrgggccgacgtctgcggcttcctgggcaacacctcagaggagctgtgtgtgcgctggacccagctgggggccttctaccccttcatgcggaaccacaacag

SEQ ID NO: 70604 - DNA, 201 bp, Homo sapiens
ggctgcagggagcccagatggggcagccctggtgcttcttcccacccagctaccccagctacaagctggagaacctgagctcctctgaaatgggctacacrgccaccctgacccgtaccacccccaccttcttccccaaggacatcctgaccctgcggctggacgtgatgatggagactgagaaccgcctccacttcacga

SEQ ID NO: 70605 - DNA, 201 bp, Homo sapiens
ccttggcagcctcccacccccacctgcagctccccgtgagccagccatccacagcgaggggcagtgggtgacgctgccggcccccctggacaccatcaacrtccacctccgggctgggtacatcatccccctgcagggccctggcctcacaaccacagagtcccgccagcagcccatggccctggctgtggccctgaccaa

SEQ ID NO: 70606 - DNA, 201 bp, Homo sapiens
gggcctgtaggagctgtccaggccatctccaaccatgggagtgaggcacccgccctgctcccaccggctcctggccgtctgcgccctcgtgtccttggcarccgctgcactcctggggcacatcctactccatgatttcctgctggttccccgagagctgagtggctcctccccagtcctggaggagactcacccagctca

SEQ ID NO: 70607 - DNA, 201 bp, Homo sapiens
tgggtacatcatccccctgcagggccctggcctcacaaccacagagtcccgccagcagcccatggccctggctgtggccctgaccaagggtggggaggccygaggggagctgttctgggacgatggagagagcctggaagtgctggagcgaggggcctacacacaggtcatcttcctggccaggaataacacgatcgtgaa

SEQ ID NO: 70608 - DNA, 201 bp, Homo sapiens
gggggaggccctgctcatcaccccagtgctccaggccgggaaggccgaagtgactggctacttccccttgggcacatggtacgacctgcagacggtgccartagaggcccttggcagcctcccacccccacctgcagctccccgtgagccagccatccacagcgaggggcagtgggtgacgctgccggcccccctggacac

SEQ ID NO: 70609 - DNA, 201 bp, Homo sapiens
tccaccaggcccacgtcgcgggggagaccgtggcccggcccctcttcctggagttccccaaggactctagcacctggactgtggaccaccagctcctgtgsggggaggccctgctcatcaccccagtgctccaggccgggaaggccgaagtgactggctacttccccttgggcacatggtacgacctgcagacggtgccaa

SEQ ID NO: 70610 - DNA, 201 bp, Homo sapiens
acagcttcagcgagccggcccagcaggccatgaggaaggccctcaccctgcgctacgcactcctcccccacctctacacactgttccaccaggcccacgtygcgggggagaccgtggcccggcccctcttcctggagttccccaaggactctagcacctggactgtggaccaccagctcctgtggggggaggccctgctca

SEQ ID NO: 70611 - DNA, 201 bp, Homo sapiens
tcagtctgccccaggagccgtacagcttcagcgagccggcccagcaggccatgaggaaggccctcaccctgcgctacgcactcctcccccacctctacacrctgttccaccaggcccacgtcgcgggggagaccgtggcccggcccctcttcctggagttccccaaggactctagcacctggactgtggaccaccagctcc

SEQ ID NO: 70612 - DNA, 201 bp, Homo sapiens
ttcgacggcatgtggattgacatgaacgagccttccaacttcatcagaggctctgaggacggctgccccaacaatgagctggagaacccaccctacgtgcytggggtggttggggggaccctccaggcggccaccatctgtgcctccagccaccagtttctctccacacactacaacctgcacaacctctacggcctgacc

SEQ ID NO: 70613 - DNA, 201 bp, Homo sapiens
ggagctgtgtgtgcgctggacccagctgggggccttctaccccttcatgcggaaccacaacagcctgctcagtctgccccaggagccgtacagcttcagcragccggcccagcaggccatgaggaaggccctcaccctgcgctacgcactcctcccccacctctacacactgttccaccaggcccacgtcgcgggggagac

SEQ ID NO: 70614 - DNA, 201 bp, Homo sapiens
ccagcaggccatgaggaaggccctcaccctgcgctacgcactcctcccccacctctacacactgttccaccaggcccacgtcgcgggggagaccgtggccyggcccctcttcctggagttccccaaggactctagcacctggactgtggaccaccagctcctgtggggggaggccctgctcatcaccccagtgctccaggc

SEQ ID NO: 70615 - DNA, 150 bp, Homo sapiens
gccccaacgcgaccgctgcccggctgcccagagggctggatgcctgccggtccccgagcaagcctgggaactcaggaaaattcacaggacttgggagattytaaatcttaagtgcaattatttttaataaaaggggcatttggaatcagc

SEQ ID NO: 70616 - DNA, 201 bp, Homo sapiens
gtcctctccaacggtgtccctgtctccaacttcacctacagccccgacaccaaggtcctggacatctgtgtctcgctgttgatgggagagcagtttctcgwcagctggtgttagccgggcggagtgtgttagtctctccagagggaggctggttccccagggaagcagagcctgtgtgcgggcagcagctgtgtgcgggcc

SEQ ID NO: 70617 - DNA, 201 bp, Homo sapiens
acggccgatacgccggccactggacgggggacgtgtggagctcctgggagcagctcgcctcctccgtgccagaaatcctgcagtttaacctgctgggggtrcctctggtcggggccgacgtctgcggcttcctgggcaacacctcagaggagctgtgtgtgcgctggacccagctgggggccttctaccccttcatgcgga

SEQ ID NO: 70618 - DNA, 201 bp, Homo sapiens; identical to SEQ ID NO: 70557

SEQ ID NO: 70619 - DNA, 201 bp, Homo sapiens; identical to SEQ ID NO: 70558

SEQ ID NO: 70620 - DNA, 201 bp, Homo sapiens; identical to SEQ ID NO: 70559

SEQ ID NO: 70621 - DNA, 201 bp, Homo sapiens; identical to SEQ ID NO: 70560

SEQ ID NO: 70622 - DNA, 201 bp, Homo sapiens; identical to SEQ ID NO: 70561

SEQ ID NO: 70623 - DNA, 201 bp, Homo sapiens; identical to SEQ ID NO: 70562

SEQ ID NO: 70624 - DNA, 201 bp, Homo sapiens; identical to SEQ ID NO: 70563

SEQ ID NO: 70625 - DNA, 201 bp, Homo sapiens; identical to SEQ ID NO: 70564

SEQ ID NO: 70626 - DNA, 201 bp, Homo sapiens
tggaggtcggggatgaggcagcaggtaggacagtgacctcggtgacgcgaaggaccccggccacctctaggttctcctcgtccgcccgttgttcagcgagsgaggctctgcgcgtgccgcagctgacggggaaactgaggcacggagcgggcctgtaggagctgtccaggccatctccaaccatgggagtgaggcacccgc

SEQ ID NO: 70627 - DNA, 201 bp, Homo sapiens; identical to SEQ ID NO: 70566

SEQ ID NO: 70628 - DNA, 201 bp, Homo sapiens; identical to SEQ ID NO: 70567

SEQ ID NO: 70629 - DNA, 167 bp, Homo sapiens; identical to SEQ ID NO: 70568

SEQ ID NO: 70630 - DNA, 201 bp, Homo sapiens; identical to SEQ ID NO: 70569

SEQ ID NO: 70631 - DNA, 179 bp, Homo sapiens; identical to SEQ ID NO: 70570

SEQ ID NO: 70632 - DNA, 201 bp, Homo sapiens; identical to SEQ ID NO: 70571

SEQ ID NO: 70633 - DNA, 201 bp, Homo sapiens; identical to SEQ ID NO: 70572

SEQ ID NO: 70634 - DNA, 201 bp, Homo sapiens; identical to SEQ ID NO: 70573

SEQ ID NO: 70635 - DNA, 201 bp, Homo sapiens; identical to SEQ ID NO: 70574

SEQ ID NO: 70636 - DNA, 201 bp, Homo sapiens; identical to SEQ ID NO: 70575

SEQ ID NO: 70637 - DNA, 201 bp, Homo sapiens; identical to SEQ ID NO: 70576

SEQ ID NO: 70638 - DNA, 201 bp, Homo sapiens; identical to SEQ ID NO: 70577

SEQ ID NO: 70639 - DNA, 201 bp, Homo sapiens; identical to SEQ ID NO: 70578

SEQ ID NO: 70640 - DNA, 201 bp, Homo sapiens; identical to SEQ ID NO: 70579

SEQ ID NO: 70641 - DNA, 201 bp, Homo sapiens; identical to SEQ ID NO: 70580

SEQ ID NO: 70642 - DNA, 201 bp, Homo sapiens; identical to SEQ ID NO: 70581

SEQ ID NO: 70643 - DNA, 201 bp, Homo sapiens; identical to SEQ ID NO: 70582

SEQ ID NO: 70644 - DNA, 201 bp, Homo sapiens; identical to SEQ ID NO: 70583

SEQ ID NO: 70645 - DNA, 201 bp, Homo sapiens; identical to SEQ ID NO: 70584

SEQ ID NO: 70646 - DNA, 201 bp, Homo sapiens; identical to SEQ ID NO: 70585

SEQ ID NO: 70647 - DNA, 201 bp, Homo sapiens; identical to SEQ ID NO: 70586

SEQ ID NO: 70648 - DNA, 201 bp, Homo sapiens; identical to SEQ ID NO: 70587

SEQ ID NO: 70649 - DNA, 201 bp, Homo sapiens; identical to SEQ ID NO: 70588

SEQ ID NO: 70650 - DNA, 201 bp, Homo sapiens; identical to SEQ ID NO: 70589

SEQ ID NO: 70651 - DNA, 201 bp, Homo sapiens; identical to SEQ ID NO: 70590

SEQ ID NO: 70652 - DNA, 201 bp, Homo sapiens; identical to SEQ ID NO: 70591

SEQ ID NO: 70653 - DNA, 201 bp, Homo sapiens; identical to SEQ ID NO: 70592

SEQ ID NO: 70654 - DNA, 201 bp, Homo sapiens; identical to SEQ ID NO: 70593

SEQ ID NO: 70655 - DNA, 201 bp, Homo sapiens; identical to SEQ ID NO: 70594

SEQ ID NO: 70656 - DNA, 201 bp, Homo sapiens; identical to SEQ ID NO: 70595

SEQ ID NO: 70657 - DNA, 201 bp, Homo sapiens; identical to SEQ ID NO: 70596

SEQ ID NO: 70658 - DNA, 201 bp, Homo sapiens; identical to SEQ ID NO: 70597

SEQ ID NO: 70659 - DNA, 201 bp, Homo sapiens
tctgcgcgcccccgggcacgaccccggagtctccgcgggcggccagggcgcgcgtgcgcggaggtgagccgggccggggctgcggggcttccctgagcgcsggccgggtcggtggggcggtcggctgcccgcgcggcctctcagttgggaaagctgaggttgtcgccggggccgcgggtggaggtcggggatgaggcagca

SEQ ID NO: 70660 - DNA, 201 bp, Homo sapiens; identical to SEQ ID NO: 70598

SEQ ID NO: 70661 - DNA, 201 bp, Homo sapiens; identical to SEQ ID NO: 70599

SEQ ID NO: 70662 - DNA, 201 bp, Homo sapiens; identical to SEQ ID NO: 70600

SEQ ID NO: 70663 - DNA, 201 bp, Homo sapiens; identical to SEQ ID NO: 70601

SEQ ID NO: 70664 - DNA, 201 bp, Homo sapiens; identical to SEQ ID NO: 70602

SEQ ID NO: 70665 - DNA, 201 bp, Homo sapiens; identical to SEQ ID NO: 70603

SEQ ID NO: 70666 - DNA, 201 bp, Homo sapiens; identical to SEQ ID NO: 70604

SEQ ID NO: 70667 - DNA, 201 bp, Homo sapiens; identical to SEQ ID NO: 70605

SEQ ID NO: 70668 - DNA, 201 bp, Homo sapiens; identical to SEQ ID NO: 70606

SEQ ID NO: 70669 - DNA, 201 bp, Homo sapiens; identical to SEQ ID NO: 70607

SEQ ID NO: 70670 - DNA, 201 bp, Homo sapiens; identical to SEQ ID NO: 70608

SEQ ID NO: 70671 - DNA, 201 bp, Homo sapiens; identical to SEQ ID NO: 70609

SEQ ID NO: 70672 - DNA, 201 bp, Homo sapiens; identical to SEQ ID NO: 70610

SEQ ID NO: 70673 - DNA, 201 bp, Homo sapiens; identical to SEQ ID NO: 70611

SEQ ID NO: 70674 - DNA, 201 bp, Homo sapiens; identical to SEQ ID NO: 70612

SEQ ID NO: 70675 - DNA, 201 bp, Homo sapiens; identical to SEQ ID NO: 70613

SEQ ID NO: 70676 - DNA, 201 bp, Homo sapiens; identical to SEQ ID NO: 70614

SEQ ID NO: 70677 - DNA, 150 bp, Homo sapiens; identical to SEQ ID NO: 70615

SEQ ID NO: 70678 - DNA, 201 bp, Homo sapiens; identical to SEQ ID NO: 70616

SEQ ID NO: 70679 - DNA, 201 bp, Homo sapiens; identical to SEQ ID NO: 70617

SEQ ID NO: 70680 - DNA, 201 bp, Homo sapiens
aacaacagcagcagcaacagcagcagcagcagcagcagcagcagcagcagcagcagcaacagcagccgcagcagcagccgccgcaaccacagacgcagcarcaacagcagccggcccttgttaactacaacagaccatctggcccggggccggagctgagcggcccgagcaccccgcagaagctgccggtgcccgcgcccg

SEQ ID NO: 70681 - DNA, 201 bp, Homo sapiens
tgtcaccacacccatctccattaggagccccagagcacgtctccagccctatgtctggaggaggcccaactccacctcagatgccaccaagccagccgggrgccctcatcccaggtgatccgcaggccatgagccagcccaacagaggtccctcacctttcagtcctgtccagctgcatcagcttcgagctcagattttag

SEQ ID NO: 70682 - DNA, 201 bp, Homo sapiens
ttcttgggcctagtccaggaccaggaccatccccaggttccgtccacagcatgatggggccaagtcctggacctccaagtgtctcccatcctatgccgacratggggtccacagacttcccacaggaaggcatgcatcaaatgcataagcccatcgatggtatacatgacaaggggattgtagaagacatccattgtggat

SEQ ID NO: 70683 - DNA, 201 bp, Homo sapiens
ccctgggaccggatggagagcccatagatgagagcagccagatgagtgacctccctgtcaaagtgactcacacagaaaccggcaaggttctgttcggaccrgaagcacccaaagcaagtcagctggacgcctggctggaaatgaatcctggttatgaagttgcccctagatctgacagtgaagagagtgattctgattatg

SEQ ID NO: 70684 - DNA, 201 bp, Homo sapiens
caattcttgggcctagtccaggaccaggaccatccccaggttccgtccacagcatgatggggccaagtcctggacctccaagtgtctcccatcctatgccracgatggggtccacagacttcccacaggaaggcatgcatcaaatgcataagcccatcgatggtatacatgacaaggggattgtagaagacatccattgtg

SEQ ID NO: 70685 - DNA, 201 bp, Homo sapiens
ttcctcccctgtctcatttctacccagtgagttcatttgtcatataggcactgggttgtttctatatcatcatcgtctataaactagctttaggatagtgycagacaaacatatgatatcatggtgtaaaaaacacacacatacacaaatatttgtaacatattgtgaccaaatgggcctcaaagattcagattgaaacaa

SEQ ID NO: 70686 - DNA, 201 bp, Homo sapiens
aagaatttgacctttttatgcggatggacatggaccggcggagggaagatgcccggaacccgaaacggaagccccgtttaatggaggaggatgagctgccytcctggatcattaaggatgacgctgaagtagaaaggctcacctgtgaagaagaggaggagaaaatatttgggagggggtcccgccagcgccgtgacgtgg

SEQ ID NO: 70687 - DNA, 201 bp, Homo sapiens
aagacggcaatttggaggaaatggaagaggaagtacggcttaagaagcgaaaaagacgaagaaatgtggataaagatcctgcaaaagaagatgtggaaaamgctaagaagagaagaggccgccctcccgctgagaaactgtcaccaaatccccccaaactgacaaagcagatgaacgctatcatcgatactgtgataaact

SEQ ID NO: 70688 - DNA, 201 bp, Homo sapiens
aaaatacaagctgaacgtggatcagaaagtgatccaggcgggcatgtttgaccaaaagtcttcaagccacgagcggagggcattcctgcaggccatcttgkagcatgaggaggaaaatgaggaagaagatgaagtaccggacgatgagactctgaaccaaatgattgctcgacgagaagaagaatttgacctttttatgcg

SEQ ID NO: 70689 - DNA, 201 bp, Homo sapiens
aagctttttgaattgtataagatttatgtctactgtaaacattgcttaatttttttgctcttgatttaaaaaaaagcttcttttgtcaccctgatctcctrtgttaccaatgtgtatcgtctccttctccctaaagtgtacttaatctttgctttctttgcacaatgtctttggttgcaagtcataagcctgaggcaaata

SEQ ID NO: 70690 - DNA, 201 bp, Homo sapiens
ataaaatgctggcccgaggccagcccctccccgaaacgctgcagcttgcagtccaggggaaaaggacgttgcctggcttgcagcaacaacagcagcagcarcagcagcagcagcagcagcagcagcagcagcagcagcagcaacagcagccgcagcagcagccgccgcaaccacagacgcagcaacaacagcagccggccc

SEQ ID NO: 70691 - DNA, 201 bp, Homo sapiens
aggatgaaagcaatgaagaggaggaagaggaagatgaagaagagtcagagtccgaggcaaaatcagtcaaggtgaaaattaagctcaataaaaaagatgasaaaggccgggacaaagggaaaggcaagaaaaggccaaatcgaggaaaagccaaacctgtagtgagcgattttgacagcgatgaggagcaggatgaacgtg

SEQ ID NO: 70692 - DNA, 201 bp, Homo sapiens
aatactatgaattaattaggaagccagtggatttcaaaaaaataaaggaaaggattcgtaatcataagtaccggagcctaggcgacctggagaaggatgtmatgcttctctgtcacaacgctcagacgttcaacctggagggatcccagatctatgaagactccatcgtcttacagtcagtgtttaagagtgcccggcaga

SEQ ID NO: 70693 - DNA, 201 bp, Homo sapiens
agctgaacgtggatcagaaagtgatccaggcgggcatgtttgaccaaaagtcttcaagccacgagcggagggcattcctgcaggccatcttggagcatgargaggaaaatgaggaagaagatgaagtaccggacgatgagactctgaaccaaatgattgctcgacgagaagaagaatttgacctttttatgcggatggaca

SEQ ID NO: 70694 - DNA, 201 bp, Homo sapiens
cctctgtttctgtactctgggtgactcagagagggaagagattcagccagcacactcctcgcgagcaagcattactctactgactggcagagacaggagargtagatgtccacgcccacagaccctggtgcgatgccccacccagggccttcgccggggcctgggccttcccctgggccaattcttgggcctagtccagga

SEQ ID NO: 70695 - DNA, 201 bp, Homo sapiens
aaatgctggcccgaggccagcccctccccgaaacgctgcagcttgcagtccaggggaaaaggacgttgcctggcttgcagcaacaacagcagcagcaacarcagcagcagcagcagcagcagcagcagcagcagcagcaacagcagccgcagcagcagccgccgcaaccacagacgcagcaacaacagcagccggcccttg

SEQ ID NO: 70696 - DNA, 201 bp, Homo sapiens
ggccagcccctccccgaaacgctgcagcttgcagtccaggggaaaaggacgttgcctggcttgcagcaacaacagcagcagcaacagcagcagcagcagcmgcagcagcagcagcagcagcagcaacagcagccgcagcagcagccgccgcaaccacagacgcagcaacaacagcagccggcccttgttaactacaacaga

SEQ ID NO: 70697 - DNA, 201 bp, Homo sapiens
aaacgctgcagcttgcagtccaggggaaaaggacgttgcctggcttgcagcaacaacagcagcagcaacagcagcagcagcagcagcagcagcagcagcarcagcagcaacagcagccgcagcagcagccgccgcaaccacagacgcagcaacaacagcagccggcccttgttaactacaacagaccatctggcccggggc

SEQ ID NO: 70698 - DNA, 201 bp, Homo sapiens
taagctcaataaaaaagatgacaaaggccgggacaaagggaaaggcaagaaaaggccaaatcgaggaaaagccaaacctgtagtgagcgattttgacagcratgaggagcaggatgaacgtgaacagtcagaaggaagtgggacggatgatgagtgatcagtatggacctttttccttggtagaactgaattccttcctcc

SEQ ID NO: 70699 - DNA, 201 bp, Homo sapiens; identical to SEQ ID NO: 70680

SEQ ID NO: 70700 - DNA, 201 bp, Homo sapiens; identical to SEQ ID NO: 70681

SEQ ID NO: 70701 - DNA, 201 bp, Homo sapiens; identical to SEQ ID NO: 70682

SEQ ID NO: 70702 - DNA, 201 bp, Homo sapiens; identical to SEQ ID NO: 70683

SEQ ID NO: 70703 - DNA, 201 bp, Homo sapiens; identical to SEQ ID NO: 70684

SEQ ID NO: 70704 - DNA, 201 bp, Homo sapiens; identical to SEQ ID NO: 70685

SEQ ID NO: 70705 - DNA, 201 bp, Homo sapiens; identical to SEQ ID NO: 70686

SEQ ID NO: 70706 - DNA, 201 bp, Homo sapiens; identical to SEQ ID NO: 70687

SEQ ID NO: 70707 - DNA, 201 bp, Homo sapiens; identical to SEQ ID NO: 70688

SEQ ID NO: 70708 - DNA, 201 bp, Homo sapiens
tttttgctcttgatttaaaaaaaagttttgttgaaagcgctattgaatattgcaatctatatagtgtattggatggcttcttttgtcaccctgatctcctrtgttaccaatgtgtatcgtctccttctccctaaagtgtacttaatctttgctttctttgcacaatgtctttggttgcaagtcataagcctgaggcaaata

SEQ ID NO: 70709 - DNA, 201 bp, Homo sapiens; identical to SEQ ID NO: 70690

SEQ ID NO: 70710 - DNA, 201 bp, Homo sapiens; identical to SEQ ID NO: 70691

SEQ ID NO: 70711 - DNA, 201 bp, Homo sapiens; identical to SEQ ID NO: 70692

SEQ ID NO: 70712 - DNA, 201 bp, Homo sapiens; identical to SEQ ID NO: 70693

SEQ ID NO: 70713 - DNA, 201 bp, Homo sapiens; identical to SEQ ID NO: 70694

SEQ ID NO: 70714 - DNA, 201 bp, Homo sapiens; identical to SEQ ID NO: 70695

SEQ ID NO: 70715 - DNA, 201 bp, Homo sapiens; identical to SEQ ID NO: 70696

SEQ ID NO: 70716 - DNA, 201 bp, Homo sapiens; identical to SEQ ID NO: 70697

SEQ ID NO: 70717 - DNA, 201 bp, Homo sapiens; identical to SEQ ID NO: 70698

SEQ ID NO: 70718 - DNA, 201 bp, Homo sapiens; identical to SEQ ID NO: 70680

SEQ ID NO: 70719 - DNA, 201 bp, Homo sapiens; identical to SEQ ID NO: 70681

SEQ ID NO: 70720 - DNA, 201 bp, Homo sapiens; identical to SEQ ID NO: 70682

SEQ ID NO: 70721 - DNA, 201 bp, Homo sapiens; identical to SEQ ID NO: 70683

SEQ ID NO: 70722 - DNA, 201 bp, Homo sapiens; identical to SEQ ID NO: 70684

SEQ ID NO: 70723 - DNA, 201 bp, Homo sapiens; identical to SEQ ID NO: 70685

SEQ ID NO: 70724 - DNA, 201 bp, Homo sapiens; identical to SEQ ID NO: 70686

SEQ ID NO: 70725 - DNA, 201 bp, Homo sapiens; identical to SEQ ID NO: 70687

SEQ ID NO: 70726 - DNA, 201 bp, Homo sapiens; identical to SEQ ID NO: 70688

SEQ ID NO: 70727 - DNA, 201 bp, Homo sapiens; identical to SEQ ID NO: 70708

SEQ ID NO: 70728 - DNA, 201 bp, Homo sapiens; identical to SEQ ID NO: 70690

SEQ ID NO: 70729 - DNA, 201 bp, Homo sapiens; identical to SEQ ID NO: 70691

SEQ ID NO: 70730 - DNA, 201 bp, Homo sapiens; identical to SEQ ID NO: 70692

SEQ ID NO: 70731 - DNA, 201 bp, Homo sapiens; identical to SEQ ID NO: 70693

SEQ ID NO: 70732 - DNA, 201 bp, Homo sapiens
cgtccgccggccgcgccgccaccccaagctccgcgaaccccgcgcccctttttgttccgcgtcctccagcattactctactgactggcagagacaggagargtagatgtccacgcccacagaccctggtgcgatgccccacccagggccttcgccggggcctgggccttcccctgggccaattcttgggcctagtccagga

SEQ ID NO: 70733 - DNA, 201 bp, Homo sapiens; identical to SEQ ID NO: 70695

SEQ ID NO: 70734 - DNA, 201 bp, Homo sapiens; identical to SEQ ID NO: 70696

SEQ ID NO: 70735 - DNA, 201 bp, Homo sapiens; identical to SEQ ID NO: 70697

SEQ ID NO: 70736 - DNA, 201 bp, Homo sapiens; identical to SEQ ID NO: 70698

SEQ ID NO: 70737 - DNA, 201 bp, Homo sapiens; identical to SEQ ID NO: 70691

SEQ ID NO: 70738 - DNA, 201 bp, Homo sapiens; identical to SEQ ID NO: 70692

SEQ ID NO: 70739 - DNA, 201 bp, Homo sapiens; identical to SEQ ID NO: 70689

SEQ ID NO: 70740 - DNA, 201 bp, Homo sapiens; identical to SEQ ID NO: 70685

SEQ ID NO: 70741 - DNA, 201 bp, Homo sapiens
ctgacaaagcagatgaacgctatcatcgatactgtgataaactacaaagataggtgtaacgtggagaaggtgcccagtaattctcagttggaaatagaagsaaacagttcagggcgacagctcagtgaagtcttcattcagttaccttcaaggaaagaattaccagaatactatgaattaattaggaagccagtggatttc

SEQ ID NO: 70742 - DNA, 201 bp, Homo sapiens; identical to SEQ ID NO: 70698

SEQ ID NO: 70743 - DNA, 201 bp, Homo sapiens; identical to SEQ ID NO: 70687

SEQ ID NO: 70744 - DNA, 201 bp, Homo sapiens; identical to SEQ ID NO: 70680

SEQ ID NO: 70745 - DNA, 201 bp, Homo sapiens; identical to SEQ ID NO: 70681

SEQ ID NO: 70746 - DNA, 201 bp, Homo sapiens; identical to SEQ ID NO: 70682

SEQ ID NO: 70747 - DNA, 201 bp, Homo sapiens; identical to SEQ ID NO: 70683

SEQ ID NO: 70748 - DNA, 201 bp, Homo sapiens; identical to SEQ ID NO: 70684

SEQ ID NO: 70749 - DNA, 201 bp, Homo sapiens; identical to SEQ ID NO: 70685

SEQ ID NO: 70750 - DNA, 201 bp, Homo sapiens; identical to SEQ ID NO: 70686

SEQ ID NO: 70751 - DNA, 201 bp, Homo sapiens; identical to SEQ ID NO: 70741

SEQ ID NO: 70752 - DNA, 201 bp, Homo sapiens; identical to SEQ ID NO: 70687

SEQ ID NO: 70753 - DNA, 201 bp, Homo sapiens; identical to SEQ ID NO: 70688

SEQ ID NO: 70754 - DNA, 201 bp, Homo sapiens; identical to SEQ ID NO: 70689

SEQ ID NO: 70755 - DNA, 201 bp, Homo sapiens; identical to SEQ ID NO: 70690

SEQ ID NO: 70756 - DNA, 201 bp, Homo sapiens; identical to SEQ ID NO: 70691

SEQ ID NO: 70757 - DNA, 201 bp, Homo sapiens; identical to SEQ ID NO: 70692

SEQ ID NO: 70758 - DNA, 201 bp, Homo sapiens; identical to SEQ ID NO: 70693

SEQ ID NO: 70759 - DNA, 201 bp, Homo sapiens; identical to SEQ ID NO: 70694

SEQ ID NO: 70760 - DNA, 201 bp, Homo sapiens; identical to SEQ ID NO: 70695

SEQ ID NO: 70761 - DNA, 201 bp, Homo sapiens; identical to SEQ ID NO: 70696

SEQ ID NO: 70762 - DNA, 201 bp, Homo sapiens; identical to SEQ ID NO: 70697

SEQ ID NO: 70763 - DNA, 201 bp, Homo sapiens; identical to SEQ ID NO: 70698

SEQ ID NO: 70764 - DNA, 201 bp, Homo sapiens; identical to SEQ ID NO: 70680

SEQ ID NO: 70765 - DNA, 201 bp, Homo sapiens; identical to SEQ ID NO: 70681

SEQ ID NO: 70766 - DNA, 201 bp, Homo sapiens; identical to SEQ ID NO: 70682

SEQ ID NO: 70767 - DNA, 201 bp, Homo sapiens; identical to SEQ ID NO: 70683

SEQ ID NO: 70768 - DNA, 201 bp, Homo sapiens; identical to SEQ ID NO: 70684

SEQ ID NO: 70769 - DNA, 201 bp, Homo sapiens; identical to SEQ ID NO: 70685

SEQ ID NO: 70770 - DNA, 201 bp, Homo sapiens; identical to SEQ ID NO: 70686

SEQ ID NO: 70771 - DNA, 201 bp, Homo sapiens; identical to SEQ ID NO: 70687

SEQ ID NO: 70772 - DNA, 201 bp, Homo sapiens; identical to SEQ ID NO: 70688

SEQ ID NO: 70773 - DNA, 201 bp, Homo sapiens; identical to SEQ ID NO: 70708

SEQ ID NO: 70774 - DNA, 201 bp, Homo sapiens; identical to SEQ ID NO: 70690

SEQ ID NO: 70775 - DNA, 201 bp, Homo sapiens; identical to SEQ ID NO: 70691

SEQ ID NO: 70776 - DNA, 201 bp, Homo sapiens; identical to SEQ ID NO: 70692

SEQ ID NO: 70777 - DNA, 201 bp, Homo sapiens; identical to SEQ ID NO: 70693

SEQ ID NO: 70778 - DNA, 132 bp, Homo sapiens
cattactctactgactggcagagacaggagargtagatgtccacgcccacagaccctggtgcgatgccccacccagggccttcgccggggcctgggccttcccctgggccaattcttgggcctagtccagga

SEQ ID NO: 70779 - DNA, 201 bp, Homo sapiens; identical to SEQ ID NO: 70695

SEQ ID NO: 70780 - DNA, 201 bp, Homo sapiens; identical to SEQ ID NO: 70696

SEQ ID NO: 70781 - DNA, 201 bp, Homo sapiens; identical to SEQ ID NO: 70697

SEQ ID NO: 70782 - DNA, 201 bp, Homo sapiens; identical to SEQ ID NO: 70698

SEQ ID NO: 70783 - DNA, 201 bp, Homo sapiens; identical to SEQ ID NO: 70680

SEQ ID NO: 70784 - DNA, 201 bp, Homo sapiens; identical to SEQ ID NO: 70681

SEQ ID NO: 70785 - DNA, 201 bp, Homo sapiens; identical to SEQ ID NO: 70682

SEQ ID NO: 70786 - DNA, 201 bp, Homo sapiens; identical to SEQ ID NO: 70683

SEQ ID NO: 70787 - DNA, 201 bp, Homo sapiens; identical to SEQ ID NO: 70684

SEQ ID NO: 70788 - DNA, 201 bp, Homo sapiens; identical to SEQ ID NO: 70685

SEQ ID NO: 70789 - DNA, 201 bp, Homo sapiens; identical to SEQ ID NO: 70686

SEQ ID NO: 70790 - DNA, 201 bp, Homo sapiens; identical to SEQ ID NO: 70741

SEQ ID NO: 70791 - DNA, 201 bp, Homo sapiens; identical to SEQ ID NO: 70687

SEQ ID NO: 70792 - DNA, 201 bp, Homo sapiens; identical to SEQ ID NO: 70688

SEQ ID NO: 70793 - DNA, 201 bp, Homo sapiens; identical to SEQ ID NO: 70708

SEQ ID NO: 70794 - DNA, 201 bp, Homo sapiens; identical to SEQ ID NO: 70690

SEQ ID NO: 70795 - DNA, 201 bp, Homo sapiens; identical to SEQ ID NO: 70691

SEQ ID NO: 70796 - DNA, 201 bp, Homo sapiens; identical to SEQ ID NO: 70692

SEQ ID NO: 70797 - DNA, 201 bp, Homo sapiens; identical to SEQ ID NO: 70693

SEQ ID NO: 70798 - DNA, 201 bp, Homo sapiens
ccgcctccgcctctgccgcctggattgcattattatttttatccgggttgccgtttgctgcggatggtgcattactctactgactggcagagacaggagargtagatgtccacgcccacagaccctggtgcgatgccccacccagggccttcgccggggcctgggccttcccctgggccaattcttgggcctagtccagga

SEQ ID NO: 70799 - DNA, 201 bp, Homo sapiens; identical to SEQ ID NO: 70695

SEQ ID NO: 70800 - DNA, 201 bp, Homo sapiens; identical to SEQ ID NO: 70696

SEQ ID NO: 70801 - DNA, 201 bp, Homo sapiens; identical to SEQ ID NO: 70697

SEQ ID NO: 70802 - DNA, 201 bp, Homo sapiens; identical to SEQ ID NO: 70698

SEQ ID NO: 70803 - DNA, 201 bp, Homo sapiens
cacagatgatcaagctgaaacgtggaaccaaagggcttgtccgcctcttttacctggatgagcaccggacacgcctccgatggcgaccctctaggaagagygagaaggcaaaaatacttattgattccatttacaaagtgactgagggccggcagtctgaaatattccacagacaagctgaggggaacttcgaccccagct

SEQ ID NO: 70804 - DNA, 201 bp, Homo sapiens
caagtcctaggggtgggagaaccacatcaaatgccacaagcaattgccaggaaaacccctgtcccagcaagtctctctccccaaagcagcatttggctcchgatcctgtagttaaccccacacaagatctgcatggtgtgaaaatcaaggaaaagggtaatcctgaggactttgtggaagggaaaagcatcttgtcaggaa

SEQ ID NO: 70805 - DNA, 201 bp, Homo sapiens; identical to SEQ ID NO: 70803

SEQ ID NO: 70806 - DNA, 201 bp, Homo sapiens
tttaggatgttcttatcccacccataatgagagttgaaaggggatggatagctgctccccatgcccttcccactttttggaataggccgtgagggtgtgasgaagaaggctgtcttttgtacataaggacaaaattgtttgttttacataaattttgttacatatttttgctaatggctttgtatgtaacaagaagcgagt

SEQ ID NO: 70807 - DNA, 201 bp, Homo sapiens
agcagcttccaagccctcaaagtttgaaaggcaaaattctagtgaagggtaagaagttgccttatcaccttggggatgatgcagaggaaggggaagtttcygatgaggacagtgcagatgaaattgaagacgagtgcaaattcaagctccattatagtaatgggaccactgagcatcaggtggaatctttcataaggaaaa

SEQ ID NO: 70808 - DNA, 179 bp, Homo sapiens
cttttccttcagggaaccaagcaactctattttagtactgacatgcattattttcactgtgaattcacttttttattgcatgttcagatgtccctctttgttttttttttttgtaacattaactgcaatgatgttcttcctggaattcatgaaaatataattaaaacacatttttaaac

SEQ ID NO: 70809 - DNA, 201 bp, Homo sapiens; identical to SEQ ID NO: 70804

SEQ ID NO: 70810 - DNA, 201 bp, Homo sapiens; identical to SEQ ID NO: 70807

SEQ ID NO: 70811 - DNA, 201 bp, Homo sapiens; identical to SEQ ID NO: 70804

SEQ ID NO: 70812 - DNA, 201 bp, Homo sapiens; identical to SEQ ID NO: 70806

SEQ ID NO: 70813 - DNA, 201 bp, Homo sapiens; identical to SEQ ID NO: 70807

SEQ ID NO: 70814 - DNA, 179 bp, Homo sapiens; identical to SEQ ID NO: 70808

SEQ ID NO: 70815 - DNA, 201 bp, Homo sapiens
tctcctcctacacttctaatgctgcacaggctggtgagagcctgcagggctgcttggaggaggcgctggtgctgatcccagaggcccagcatcggaaaacrcccacgttcctgggggccacggctggcatgaggttgctcagccggaagaacagctctcaggccagggacatctttgcagcagtcacccaggtcctgggcc

SEQ ID NO: 70816 - DNA, 180 bp, Homo sapiens
ctcatcccactgtctccccagtttgggatcgtgtttgatgcgggctcctcccacacgtccctcttcctgtatcagtggcyggcgaacaaggagaatggcacgggtgtggtcagccaggccctggcctgccaggtggaagggcctggaatctcctcctacacttctaatgctgcacaggct

SEQ ID NO: 70817 - DNA, 156 bp, Homo sapiens
ctcatcccactgtctccccagtttgggatcgtgtttgatgcgggctcctcccacaygtccctcttcctgtatcagtggccggcgaacaaggagaatggcacgggtgtggtcagccaggccctggcctgccaggtggaagggcctggaatctcctcc

SEQ ID NO: 70818 - DNA, 201 bp, Homo sapiens
tcctcctacacttctaatgctgcacaggctggtgagagcctgcagggctgcttggaggaggcgctggtgctgatcccagaggcccagcatcggaaaacacmcacgttcctgggggccacggctggcatgaggttgctcagccggaagaacagctctcaggccagggacatctttgcagcagtcacccaggtcctgggccgg

SEQ ID NO: 70819 - DNA, 201 bp, Homo sapiens
acttcagcgggccctgcgactccaagatgaaacccgaccgcctcaactactgccgccacgtgctggccgcctgggccctgggtgccaaggcattttactayccagaggaagccggccttgccttcgggggtccagggtcctccagatatctccgcctggaagttcactaccacaacccactggtgatagaaggacgaaacg

SEQ ID NO: 70820 - DNA, 201 bp, Homo sapiens
caagaggccctttggcacctgcgaccccaaggattacctcattgaagacggcactgtccacttggtctacgggatcctggaggagccgttccggtcactgsaggccatcaacggctcgggcctgcagatggggctgcagagggtgcagctcctgaagcccaatatccccgaaccggagttgccctcagacgcgtgcaccat

SEQ ID NO: 70821 - DNA, 201 bp, Homo sapiens
ccggtcactggaggccatcaacggctcgggcctgcagatggggctgcagagggtgcagctcctgaagcccaatatccccgaaccggagttgccctcagacrcgtgcaccatggaggtccaagctcccaatatccagatccccagccaggagaccacgtactggtgctacattaaggagcttccaaagggcttctctcggca

SEQ ID NO: 70822 - DNA, 201 bp, Homo sapiens
cttccacctcatcaacaggttcaacaacgaggatgtctgcacctgccctcaggcgtccgtgtctcagcagttcacctctgttccctggaactccttcaacygcgacgtactgaaggccctgtacagcttcgcgcccatctccatgcactgcaacaagtcctcagccgtccgcttccagggtgaatggaacctgcagcccct

SEQ ID NO: 70823 - DNA, 201 bp, Homo sapiens
aggggggacctactcctccccctcctccatgctgtccctgtgggctcacaccggcactgtgcactctactctgcgacgatccccatggaacagccctgcaygcccaggatgaaggggccagaccacgcccctgcctgagaccacggtccaatccagccttcttcccccagggtcccctgcatggctgagagggtgtgggtg

SEQ ID NO: 70824 - DNA, 201 bp, Homo sapiens
agttgccctcagacgcgtgcaccatggaggtccaagctcccaatatccagatccccagccaggagaccacgtactggtgctacattaaggagcttccaaasggcttctctcggcaccacattatcaagtacgagcccatcgtcaccaagggcaatgaggcccttgtccaccacatggaagtcttccagtgcgcccccgaga

SEQ ID NO: 70825 - DNA, 201 bp, Homo sapiens
gcaccatggaggtccaagctcccaatatccagatccccagccaggagaccacgtactggtgctacattaaggagcttccaaagggcttctctcggcaccayattatcaagtacgagcccatcgtcaccaagggcaatgaggcccttgtccaccacatggaagtcttccagtgcgcccccgagatggacagcgtcccccact

SEQ ID NO: 70826 - DNA, 201 bp, Homo sapiens
ctccttcaaccgcgacgtactgaaggccctgtacagcttcgcgcccatctccatgcactgcaacaagtcctcagccgtccgcttccagggtgaatggaacytgcagcccctgcccaaggtcatctccacactggaagagcccaccccacagtgccccaccagccagggccgaagccctgctggccccaccgttgtcagcat

SEQ ID NO: 70827 - DNA, 201 bp, Homo sapiens
ccaagctcccaatatccagatccccagccaggagaccacgtactggtgctacattaaggagcttccaaagggcttctctcggcaccacattatcaagtacsagcccatcgtcaccaagggcaatgaggcccttgtccaccacatggaagtcttccagtgcgcccccgagatggacagcgtcccccacttcagcgggccctg

SEQ ID NO: 70828 - DNA, 143 bp, Homo sapiens
accccagccatgcccgccctcagtcgctgggccagcctgcccrgccccagcatgcgggaggcagccttcatgtacagcacagcagtggccatcttcctggtcatcctggtggccgcactgcagggctcggctccccgtgagag

SEQ ID NO: 70829 - DNA, 201 bp, Homo sapiens
caatgaggcccttgtccaccacatggaagtcttccagtgcgcccccgagatggacagcgtcccccacttcagcgggccctgcgactccaagatgaaacccraccgcctcaactactgccgccacgtgctggccgcctgggccctgggtgccaaggcattttactacccagaggaagccggccttgccttcgggggtccagg

SEQ ID NO: 70830 - DNA, 201 bp, Homo sapiens
tccaagctcccaatatccagatccccagccaggagaccacgtactggtgctacattaaggagcttccaaagggcttctctcggcaccacattatcaagtaygagcccatcgtcaccaagggcaatgaggcccttgtccaccacatggaagtcttccagtgcgcccccgagatggacagcgtcccccacttcagcgggccct

SEQ ID NO: 70831 - DNA, 201 bp, Homo sapiens
ccggaggggtccctggagctctcatggaatgtcagctacacccaggaggccatccatttccagctcctggtgcggaggctcaaggctggcgtcctgtttgsgatgtccgaccgtggcgagcttgagaacgcagatctcgtggtgctctggaccgatggggacactgcctattttgcggacgcctggagtgaccagaagggg

SEQ ID NO: 70832 - DNA, 201 bp, Homo sapiens
gactccaagatgaaacccgaccgcctcaactactgccgccacgtgctggccgcctgggccctgggtgccaaggcattttactacccagaggaagccggccytgccttcgggggtccagggtcctccagatatctccgcctggaagttcactaccacaacccactggtgatagaaggacgaaacgactcctcaggcatccgc

SEQ ID NO: 70833 - DNA, 201 bp, Homo sapiens
ctccaagatgaaacccgaccgcctcaactactgccgccacgtgctggccgcctgggccctgggtgccaaggcattttactacccagaggaagccggccttkccttcgggggtccagggtcctccagatatctccgcctggaagttcactaccacaacccactggtgatagaaggacgaaacgactcctcaggcatccgctt

SEQ ID NO: 70834 - DNA, 201 bp, Homo sapiens
aggctgaggggggacctactcctccccctcctccatgctgtccctgtgggctcacaccggcactgtgcactctactctgcgacgatccccatggaacagcmctgcacgcccaggatgaaggggccagaccacgcccctgcctgagaccacggtccaatccagccttcttcccccagggtcccctgcatggctgagagggtg

SEQ ID NO: 70835 - DNA, 201 bp, Homo sapiens
catttccagctcctggtgcggaggctcaaggctggcgtcctgtttgggatgtccgaccgtggcgagcttgagaacgcagatctcgtggtgctctggaccgmtggggacactgcctattttgcggacgcctggagtgaccagaaggggcagatccacctggatccccagcaggactaccagctgctgcaggtgcagaggacc

SEQ ID NO: 70836 - DNA, 201 bp, Homo sapiens
actccttcaaccgcgacgtactgaaggccctgtacagcttcgcgcccatctccatgcactgcaacaagtcctcagccgtccgcttccagggtgaatggaayctgcagcccctgcccaaggtcatctccacactggaagagcccaccccacagtgccccaccagccagggccgaagccctgctggccccaccgttgtcagca

SEQ ID NO: 70837 - DNA, 201 bp, Homo sapiens
aggactaccagctgctgcaggtgcagaggaccccagaaggcctgaccctgcttttcaagaggccctttggcacctgcgaccccaaggattacctcattgargacggcactgtccacttggtctacgggatcctggaggagccgttccggtcactggaggccatcaacggctcgggcctgcagatggggctgcagagggtgc

SEQ ID NO: 70838 - DNA, 201 bp, Homo sapiens
gcatggctgagagggtgtgggtgccctgttgacctaccctggaccgagtggaccacgacctcgtccatttaaacccggctgactcagtgcagggacagccygcacagtggtccagggtccagccctccgccagccctgttccgcctcactgggtgtggcctggcttctgggacaggcaccatgctgggccggggtgtggaa

SEQ ID NO: 70839 - DNA, 176 bp, Homo sapiens
atgccgtgcgggctaatgagccaataaagctcacacttgggctggcacccactggaggtgggtatgtttgcactccgggccgtcgctccaggagagagaascttgctcctgagcctcctccctgtgccaggcgtggtaccaagtgcttccccctgagcgtcctgaagctgcctcag

SEQ ID NO: 70840 - DNA, 201 bp, Homo sapiens
acaatcactacagccctcacttccaggagatccgcatgttgaagaaggtcgtgtcggtccatccgggagatgtgctcatcacctcctgcacgtacaacacrgaagaccgggagctggccacagtggggggcttcgggatcctggaggagatgtgtgtcaactacgtgcactactacccccagacgcagctggagctctgca

SEQ ID NO: 70841 - DNA, 201 bp, Homo sapiens
ttcctgcagaagtacttccacctcatcaacaggttcaacaacgaggatgtctgcacctgccctcaggcgtccgtgtctcagcagttcacctctgttccctsgaactccttcaaccgcgacgtactgaaggccctgtacagcttcgcgcccatctccatgcactgcaacaagtcctcagccgtccgcttccagggtgaatgg

SEQ ID NO: 70842 - DNA, 201 bp, Homo sapiens
tgcactgcaacaagtcctcagccgtccgcttccagggtgaatggaacctgcagcccctgcccaaggtcatctccacactggaagagcccaccccacagtgycccaccagccagggccgaagccctgctggccccaccgttgtcagcattggtgggggcaaaggctgaggggggacctactcctccccctcctccatgctgt

SEQ ID NO: 70843 - DNA, 201 bp, Homo sapiens
tcaaggctggcgtcctgtttgggatgtccgaccgtggcgagcttgagaacgcagatctcgtggtgctctggaccgatggggacactgcctattttgcggamgcctggagtgaccagaaggggcagatccacctggatccccagcaggactaccagctgctgcaggtgcagaggaccccagaaggcctgaccctgcttttca

SEQ ID NO: 70844 - DNA, 201 bp, Homo sapiens
acctccgactcattggttgtgcaaatgccatgtgcagcctttcctgaggccataggagggcttcctgcagctgagatctatgcaggccatcctctcaacargtgccactccaagggcggtcctcggtgcagcagcatcagcttcacttgtgggggggtgggggaaggggcggtctcagaaatgcaggttcccaggtcccac

SEQ ID NO: 70845 - DNA, 201 bp, Homo sapiens
atcacggatatgtatgaatttttacaggttcgtttttgaattgtgagaggcagttcattagcaaagatgtactgggcagtaactaaacacacatgcaaacrtgtgaatggtggtttattcctcattctgtggatgtttctatgagccaaaatttgatgtctttttttcaaaattgcttatgaaatttccacacaatcgtag

SEQ ID NO: 70846 - DNA, 201 bp, Homo sapiens
ttgcttttgccaggatcttctgcaaaggccaagtgtctacagccaccttcctagagagctgcggggtggccgacctgatcaccacctgttacggagggcgkaaccgcagggtggccgaggccttcgccagaactgggaagaccattgaagagttggagaaggagatgctgaatgggcaaaagctccaaggaccgcagactt

SEQ ID NO: 70847 - DNA, 201 bp, Homo sapiens
ctgcagtgtatcagatctgctacgaaagcagaccagttcaagagatgttgtcttgtcttcagagccatccagagcatacataaagtgaatcatgcaacgtkttgggggaagttctgcctttctgatcaatcttttgggttcacgtggaaaccaggacttggcaacatgatgtttgactgtaatctcatcacggatatgtat

SEQ ID NO: 70848 - DNA, 201 bp, Homo sapiens
tcattcacagaatctgtgatgagatcactgggagagtgcccaagaaagcgctgggaatcaccctcatcaagggcatagacgagggccccgaggggctgaarctcatttctgacatcatccgtgagaagatgggtattgacatcagtgtgctgatgggagccaacattgccaatgaggtggctgcagagaagttctgtgaga

SEQ ID NO: 70849 - DNA, 201 bp, Homo sapiens
tctgtgatgagatcactgggagagtgcccaagaaagcgctgggaatcaccctcatcaagggcatagacgagggccccgaggggctgaagctcatttctgayatcatccgtgagaagatgggtattgacatcagtgtgctgatgggagccaacattgccaatgaggtggctgcagagaagttctgtgagaccaccatcggca

SEQ ID NO: 70850 - DNA, 201 bp, Homo sapiens
cagggagggagacacctagattagcagctcaatttgtactacttcagccaatctgtgaatgtaaaaactacactgttgccttgctaggatccaccctcctrtaatatggaacaaatatctgaatgaaatccaccctaggagacggagtcaaactaaacttgtggtttttcatttaacttttgactacagcatggccccatg

SEQ ID NO: 70851 - DNA, 201 bp, Homo sapiens
tgacatcagtgtgctgatgggagccaacattgccaatgaggtggctgcagagaagttctgtgagaccaccatcggcagcaaagtaatggagaacggccttytcttcaaagaacttctgcagactccaaattttcgaattaccgtggttgatgatgcagacactgttgaactctgtggtgcgcttaagaacatcgtagctgt

SEQ ID NO: 70852 - DNA, 201 bp, Homo sapiens
tgctgactgtgtctcttgaacatacttaggatattctgcacattatggaaaaaggtaaattttagaagtttctgctctactaactgtagatatttatgacyctgcgagttatctatttttataaccacctgtggtccattgttcattttaattcacatttcttatgaagtatggtaacagggagggagacacctagattag

SEQ ID NO: 70853 - DNA, 201 bp, Homo sapiens
tttttctagcctagcaagtcccaaacacattacactgaagagattttggtgaggaaacttgctggagttttcagggaacactgttctaggcttaggtgacygtaggatcactcaagtagacccttcactccctgcgagaaattaggatgaataactacctgtggcattgttggttctgaacttttacagttcaggcctgct

SEQ ID NO: 70854 - DNA, 201 bp, Homo sapiens
ccaggtcccaccctggacttctgaaggggtgtggcatctgtgtttctgatgcttactacaatatgtgaaccactactttagaaaatctgctttaacttggyattcctctaattgtgttccctaggaaatgactgtcccaagagccagtgattattccaggtgttccctggaaaggtcaagtgagtctgggaaacactatgt

SEQ ID NO: 70855 - DNA, 201 bp, Homo sapiens
gcctttcctgaggccataggagggcttcctgcagctgagatctatgcaggccatcctctcaacaagtgccactccaagggcggtcctcggtgcagcagcakcagcttcacttgtgggggggtgggggaaggggcggtctcagaaatgcaggttcccaggtcccaccctggacttctgaaggggtgtggcatctgtgtttct

SEQ ID NO: 70856 - DNA, 163 bp, Homo sapiens
cgaagcgggtcctgccccgctgtcagctgcggcccccggcgccgggcgggggtggccgcgacyattggcggagaggcgaaaggggcggggccgccgccagccgctgcgggcaaggctgaacaggcggaggtgggcagccggccagggaagcacggtccaggcg

SEQ ID NO: 70857 - DNA, 201 bp, Homo sapiens; identical to SEQ ID NO: 70844

SEQ ID NO: 70858 - DNA, 201 bp, Homo sapiens; identical to SEQ ID NO: 70845

SEQ ID NO: 70859 - DNA, 201 bp, Homo sapiens; identical to SEQ ID NO: 70846

SEQ ID NO: 70860 - DNA, 201 bp, Homo sapiens; identical to SEQ ID NO: 70847

SEQ ID NO: 70861 - DNA, 201 bp, Homo sapiens; identical to SEQ ID NO: 70848

SEQ ID NO: 70862 - DNA, 201 bp, Homo sapiens; identical to SEQ ID NO: 70849

SEQ ID NO: 70863 - DNA, 201 bp, Homo sapiens; identical to SEQ ID NO: 70850

SEQ ID NO: 70864 - DNA, 201 bp, Homo sapiens; identical to SEQ ID NO: 70851

SEQ ID NO: 70865 - DNA, 201 bp, Homo sapiens; identical to SEQ ID NO: 70852

SEQ ID NO: 70866 - DNA, 201 bp, Homo sapiens; identical to SEQ ID NO: 70853

SEQ ID NO: 70867 - DNA, 201 bp, Homo sapiens; identical to SEQ ID NO: 70854

SEQ ID NO: 70868 - DNA, 201 bp, Homo sapiens; identical to SEQ ID NO: 70855

SEQ ID NO: 70869 - DNA, 201 bp, Homo sapiens
cggctacattcggcccggccatggcagcggcgcccctgaaagtgtgcatcgtgggctcggggaactggggttcagctgttgcaaaaataattggtaataaygtcaagaaacttcagaaatttgcctccacagtcaagatgtgggtctttgaagaaacagtgaatggcagaaaactgacagacatcataaataatgaccatg

SEQ ID NO: 70870 - DNA, 201 bp, Homo sapiens
tgattttgttctctgctccatattttttaatcccttaagcatttgatgaaacactctttagtgctatatgcattttcttacttttgttaaaaatgtgacarttgtcaaaaaatgcactaaaatgtaaatggagattgaacaagttcactttccagcttataggcaactttatacagacttgaacattttctccagttgttt

SEQ ID NO: 70871 - DNA, 201 bp, Homo sapiens
aagagaaagggtttttcctgccacaggatataacttttttttatataacaagcataacacaccactgcttttggtggaaaagtgcagaatagtatgtaccytttatgaagaaaaatgtaatttacaatattcagtgagaatgttactgctgattttcttttccaaggtgtagaatattctttgatttatagaattcatttt

SEQ ID NO: 70872 - DNA, 201 bp, Homo sapiens
cctgggtcacaagcaatgcctactctagtccaagtgtagtcctggcctcatacaatcatgatggcaccaggaatatcttagatgattttagagaagcttayttttggctaaggcaaaatacagatgaacatgcacgagtaatgtcttggtgggattatggctatcagatagctggaatggctaatagaactacgttggtgg

SEQ ID NO: 70873 - DNA, 149 bp, Homo sapiens
gcggccgctgctgaggcggagactccccgccgccgcttcctccaccccsagtccgccggcctcgcggcgctgagggcgggagcgcgcagagctcttccctcctcctttttcttcctcctcctcctcctcctccgggtccccgcccagca

SEQ ID NO: 70874 - DNA, 201 bp, Homo sapiens
ggtatccaaagttcattttctgtgactcatcaaagtgacaaaagacttgtaacaactttgcctggacttttttcattttacaacagttcatccattcacartgattttgttctctgctccatattttttaatcccttaagcatttgatgaaacactctttagtgctatatgcattttcttacttttgttaaaaatgtgaca

SEQ ID NO: 70875 - DNA, 201 bp, Homo sapiens
gttacctttgctgctaaagatccaatcttctaacgccacaacagcatagcaaatcctaggataattcacctcctcatttgacaaatcagagctgtaattcrctttaacaaattacgcatttctatcacgttcactaacagcttatgataagtctgtgtagtcttccttttctccagttctgttacccaatttagattagta

SEQ ID NO: 70876 - DNA, 149 bp, Homo sapiens
ggaaatatatatagtgttaggtttcacttcttttaaggtttacccctgtggtgtggtttaaaaatctataggcctgggaattccgatcctagctgcagatygcatcccacaatgcgagaatgataaaataaaattggatatttgagaaa

SEQ ID NO: 70877 - DNA, 201 bp, Homo sapiens
agtatgccaagaaacggcccgtgggagaccccttcgatgtcaaaacagaacaggggcctcagattgatcaaaagcagttcgacaaaatcttagagctgatmgagagtgggaagaaggaaggggccaagctggaatgcgggggctcagccatggaagacaaggggctcttcatcaaacccactgtcttctcagaagtcacag

SEQ ID NO: 70878 - DNA, 201 bp, Homo sapiens
atttttcttttcctctttggggatccaaatgatgatgtgcaatttcatgttttaacttgggaaactgaaagtgttcccatatagcttcaaaaacaaaaacmaatgtgttatccgacggatacttttatggttactaactagtactttcctaattgggaaagtagtgcttaagtttgcaaattaagttggggagggcaataa

SEQ ID NO: 70879 - DNA, 201 bp, Homo sapiens
tctttaatatgaaatgctacattatttataattggtagagttattgtatctttttatagttgtaagtacacagaggtggtatatttaaacttctgtaatayactgtatttagaaatggaaatatatatagtgttaggtttcacttcttttaaggtttacccctgtggtgtggtttaaaaatctataggcctgggaattccg

SEQ ID NO: 70880 - DNA, 141 bp, Homo sapiens
atatagtgttaggtttcacttcttttaaggtttacccctgtggtgtggtttaaaaatctataggcctgggaattccgatcctagctgcagattgcatcccmcaatgcgagaatgataaaataaaattggatatttgagaaa

SEQ ID NO: 70881 - DNA, 201 bp, Homo sapiens
tggaaaacgggcagccggacaggaagccgccggccctgccgcgccccatccgcaacctggaggtcaagttcaccaagatatttatcaacaatgaatggcasgaatccaagagtgggaaaaagtttgctacatgtaacccttcaactcgggagcaaatatgtgaagtggaagaaggagataagcccgacgtggacaaggctg

SEQ ID NO: 70882 - DNA, 201 bp, Homo sapiens
cggatacttttatggttactaactagtactttcctaattgggaaagtagtgcttaagtttgcaaattaagttggggagggcaataataaaatgagggcccrtaacagaaccagtgtgtgtataacgaaaaccatgtataaaatgggcctatcacccttgtcagagatataaattaccacatttgccttcccttcatcagct

SEQ ID NO: 70883 - DNA, 201 bp, Homo sapiens
tgacatttctgaccttcccgggacacattcttctggaggctttacatctactggagttgaatgattgctgttttcctctcactctcctgtttattcaccaractggggatgcctataggttgtctgtgaaatcgcagtcctgcctggggagggagctgttggccatttctgtgtttccctttaaaccagatcctggagaca

SEQ ID NO: 70884 - DNA, 201 bp, Homo sapiens
tgaatacgctttggccgaatacacagaagtgaaaactgtcaccatcaaacttggcgacaagaacccctgaaggaaaggcggggctccttcctcaaacatcsgacggcggaatgtggcagatgaaatgtgctggaggaaaaaaatgacatttctgaccttcccgggacacattcttctggaggctttacatctactggagtt

SEQ ID NO: 70885 - DNA, 148 bp, Homo sapiens
gaaatatatatagtgttaggtttcacttcttttaaggtttacccctgtggtgtggtttaaaaatctataggcctgggaattccgatcctagctgcagattrcatcccacaatgcgagaatgataaaataaaattggatatttgagaaa

SEQ ID NO: 70886 - DNA, 201 bp, Homo sapiens
cccgggacacattcttctggaggctttacatctactggagttgaatgattgctgttttcctctcactctcctgtttattcaccagactggggatgcctatrggttgtctgtgaaatcgcagtcctgcctggggagggagctgttggccatttctgtgtttccctttaaaccagatcctggagacagtgagatactcagggc

SEQ ID NO: 70887 - DNA, 201 bp, Homo sapiens
tgactccagtaagaatgtgggaaaaccccctgtgtgttctgcaagcagggctcttgcaccagcggtctcctcagggtggacctgcttacagagcaagccaygcctctttccgaggtgaaggtgggaccattccttgggaaaggattcacagtaaggttttttggtttttgttttttgtttttttgtttttaaaaaaaggat

SEQ ID NO: 70888 - DNA, 201 bp, Homo sapiens
aaatgtcaggaaatggcagagaactaggtgaatacgctttggccgaatacacagaagtgaaaactgtcaccatcaaacttggcgacaagaacccctgaagraaaggcggggctccttcctcaaacatcggacggcggaatgtggcagatgaaatgtgctggaggaaaaaaatgacatttctgaccttcccgggacacattc

SEQ ID NO: 70889 - DNA, 201 bp, Homo sapiens
tacgctttggccgaatacacagaagtgaaaactgtcaccatcaaacttggcgacaagaacccctgaaggaaaggcggggctccttcctcaaacatcggackgcggaatgtggcagatgaaatgtgctggaggaaaaaaatgacatttctgaccttcccgggacacattcttctggaggctttacatctactggagttgaat

SEQ ID NO: 70890 - DNA, 201 bp, Homo sapiens
gggccgagccggtgcgccgcagactagggcgcctcgggccagggagcgcggaggagccatggccaccgctaacggggccgtggaaaacgggcagccggacrggaagccgccggccctgccgcgccccatccgcaacctggaggtcaagttcaccaagatatttatcaacaatgaatggcacgaatccaagagtgggaaaaa

SEQ ID NO: 70891 - DNA, 201 bp, Homo sapiens
acaggggcctcagattgatcaaaagcagttcgacaaaatcttagagctgatcgagagtgggaagaaggaaggggccaagctggaatgcgggggctcagccrtggaagacaaggggctcttcatcaaacccactgtcttctcagaagtcacagacaacatgcggattgccaaagaggagattttcgggccagtgcaaccaat

SEQ ID NO: 70892 - DNA, 201 bp, Homo sapiens
ggaggctttacatctactggagttgaatgattgctgttttcctctcactctcctgtttattcaccagactggggatgcctataggttgtctgtgaaatcgyagtcctgcctggggagggagctgttggccatttctgtgtttccctttaaaccagatcctggagacagtgagatactcagggcgttgttaacagggagtgg

SEQ ID NO: 70893 - DNA, 201 bp, Homo sapiens
tagattagtaaagcgtacacaactggaaagactgctgtaataacacagccttgttatttttaagtcctattttgatattaatttctgattagttagtaaawaacacctggattctatggaggacctcggtcttcatccaagtggcctgagtatttcactggcaggttgtgaatttttcttttcctctttggggatccaaat

SEQ ID NO: 70894 - DNA, 201 bp, Homo sapiens; identical to SEQ ID NO: 70875

SEQ ID NO: 70895 - DNA, 201 bp, Homo sapiens; identical to SEQ ID NO: 70877

SEQ ID NO: 70896 - DNA, 155 bp, Homo sapiens
atttttcttttcctctttggggatccaaatgatgatgtgcaatttcatgttttaacttgggaaactgaaagtgttcccatatagcttcaaaaacaaaaacmaatgtgttatccgacggatacttttatggttactaactagtactttcctaattg

SEQ ID NO: 70897 - DNA, 201 bp, Homo sapiens; identical to SEQ ID NO: 70881

SEQ ID NO: 70898 - DNA, 201 bp, Homo sapiens
atcggacggcggaatgtggcagatgaaatgtgctggaggctttacatctactggagttgaatgattgctgttttcctctcactctcctgtttattcaccaractggggatgcctataggttgtctgtgaaatcgcagtcctgcctggggagggagctgttggccatttctgtgtttccctttaaaccagatcctggagaca

SEQ ID NO: 70899 - DNA, 201 bp, Homo sapiens; identical to SEQ ID NO: 70887

SEQ ID NO: 70900 - DNA, 201 bp, Homo sapiens
tggcagatgaaatgtgctggaggctttacatctactggagttgaatgattgctgttttcctctcactctcctgtttattcaccagactggggatgcctatrggttgtctgtgaaatcgcagtcctgcctggggagggagctgttggccatttctgtgtttccctttaaaccagatcctggagacagtgagatactcagggc

SEQ ID NO: 70901 - DNA, 201 bp, Homo sapiens
aaatgtcaggaaatggcagagaactaggtgaatacgctttggccgaatacacagaagtgaaaactgtcaccatcaaacttggcgacaagaacccctgaagraaaggcggggctccttcctcaaacatcggacggcggaatgtggcagatgaaatgtgctggaggctttacatctactggagttgaatgattgctgttttcc

SEQ ID NO: 70902 - DNA, 201 bp, Homo sapiens
tgaatacgctttggccgaatacacagaagtgaaaactgtcaccatcaaacttggcgacaagaacccctgaaggaaaggcggggctccttcctcaaacatcsgacggcggaatgtggcagatgaaatgtgctggaggctttacatctactggagttgaatgattgctgttttcctctcactctcctgtttattcaccagact

SEQ ID NO: 70903 - DNA, 201 bp, Homo sapiens
tacgctttggccgaatacacagaagtgaaaactgtcaccatcaaacttggcgacaagaacccctgaaggaaaggcggggctccttcctcaaacatcggackgcggaatgtggcagatgaaatgtgctggaggctttacatctactggagttgaatgattgctgttttcctctcactctcctgtttattcaccagactgggg

SEQ ID NO: 70904 - DNA, 201 bp, Homo sapiens; identical to SEQ ID NO: 70890

SEQ ID NO: 70905 - DNA, 201 bp, Homo sapiens; identical to SEQ ID NO: 70891

SEQ ID NO: 70906 - DNA, 201 bp, Homo sapiens; identical to SEQ ID NO: 70892

SEQ ID NO: 70907 - DNA, 201 bp, Homo sapiens; identical to SEQ ID NO: 70893

SEQ ID NO: 70908 - DNA, 201 bp, Homo sapiens
caagttcctaacgagtcttcagaggaggcagcaggaagctcagagagctgcaaagcaaccgtgcccatctgtcaagacattcctgagaagaacatacaagmaagtcttcctcaaagaaaaaccagtcggagccgagtctatcttcacactttggcagagagtatttgcaaactgattttcccagagtttgaacggctgaat

SEQ ID NO: 70909 - DNA, 201 bp, Homo sapiens
tggtggaatgccatggttattaaagtgtgtttgtgatagtgtcgtcaaaaaaaaggtttttgaatagaaattacattctttgacaccctcagttctttcamactttcaactctgcattttattgcattttctcatttaactgttagtatatgtttgaatataggctgactttttttctctattgcactttcttcttttttt

SEQ ID NO: 70910 - DNA, 201 bp, Homo sapiens
aggtcatcaccatgctcaatgcactgtacactcgcttcgaccagcagtgtggagagctggatgtctacaaggtggagaccattggcgatgcctattgtgtrgctgggggattacacaaagagagtgatactcatgctgttcagatagcgctgatggccctgaagatgatggagctctctgatgaagttatgtctccccatg

SEQ ID NO: 70911 - DNA, 201 bp, Homo sapiens
agaagaaaatctaagtatggaagtagaaaataagacttgttcttttggtggatatctcatttttcttgagtatttgtgctgaacattttggtgtatgtctrtgaactaagaatcaagtttttgtctcattaaatatacatatatgaagtgtttttattctacttgaaatatcttgacttaaaaaaaacgactgttagtatt

SEQ ID NO: 70912 - DNA, 201 bp, Homo sapiens
gtcgtcaaaaaaaaggtttttgaatagaaattacattctttgacaccctcagttctttcaaactttcaactctgcattttattgcattttctcatttaacygttagtatatgtttgaatataggctgactttttttctctattgcactttcttctttttttctttttagaaaataagcaattaggggttagatgcaatatg

SEQ ID NO: 70913 - DNA, 201 bp, Homo sapiens
ataagcaattaggggttagatgcaatatgaatataaaatagttctgtaaataccaaatattatttttagttctggaagttaaaaatactctccatagtaaygtgtgttataataataaatatttcttttgtttgacttttttaaaattctacaatggtaaaagctattttaatccatgttagcaatttaattcctattaat

SEQ ID NO: 70914 - DNA, 201 bp, Homo sapiens
gtggagagctggatgtctacaaggtggagaccattggcgatgcctattgtgtagctgggggattacacaaagagagtgatactcatgctgttcagatagcrctgatggccctgaagatgatggagctctctgatgaagttatgtctccccatggagaacctatcaagatgcgaattggactgcactctggatcagtttttg

SEQ ID NO: 70915 - DNA, 117 bp, Homo sapiens
gtgactacattatggaaatgtctaagtattttttccggaacttcaactttttctttttgttttacataaacatttaagcagctaggaacttttagttttarttaggtcagttgaagt

SEQ ID NO: 70916 - DNA, 201 bp, Homo sapiens
cgcgccctggagctgctagagatccggaagcacagccccgaggtgtgcgaagccaccaaacatcccagttaccagtgtccttgaattgatagtggcttctktttgtcagtctcatataagaactacagctcatcaggaggagatcgcagcagggtaagagacaccaacaccatgttctgcacgaagctcaaggatctcaag

SEQ ID NO: 70917 - DNA, 201 bp, Homo sapiens
gtgcgaagccaccaaacatcccagttaccagtgtccttgaattgatagtggcttctgtttgtcagtctcatataagaactacagctcatcaggaggagatygcagcagggtaagagacaccaacaccatgttctgcacgaagctcaaggatctcaagatcacaggagagtgtcctttctccttactggcaccaggtcaagt

SEQ ID NO: 70918 - DNA, 201 bp, Homo sapiens
ttggcaatggcatcagaaggctgatgaacaggagagactttcaaggaaagcctaattttgaagaatactttgaaattctgactccaaaaatcaaccagacstttagcgggatcatgactatgttgaatatgcagtttgttgtacgagtgaggagatgggacaactctgtgaaaaaatcttcaagggttatggacctcaaag

SEQ ID NO: 70919 - DNA, 201 bp, Homo sapiens
tgcgaagccaccaaacatcccagttaccagtgtccttgaattgatagtggcttctgtttgtcagtctcatataagaactacagctcatcaggaggagatcrcagcagggtaagagacaccaacaccatgttctgcacgaagctcaaggatctcaagatcacaggagagtgtcctttctccttactggcaccaggtcaagtt

SEQ ID NO: 70920 - DNA, 201 bp, Homo sapiens
aaatatgttacgaggaagatgaaaacatccttggggtggttggaggcacccttaaagattttttaaacagcttcagtacccttctgaaacagagcagccaytgccaagaagcaggaaaaaggggcaggcttgaggacgcctccattctatgcctggataaggaggatgattttctacatgtttactacttcttccctaaga

SEQ ID NO: 70921 - DNA, 201 bp, Homo sapiens
tcgcagcagggtaagagacaccaacaccatgttctgcacgaagctcaaggatctcaagatcacaggagagtgtcctttctccttactggcaccaggtcaarttcctaacgagtcttcagaggaggcagcaggaagctcagagagctgcaaagcaaccgtgcccatctgtcaagacattcctgagaagaacatacaagaaag

SEQ ID NO: 70922 - DNA, 201 bp, Homo sapiens; identical to SEQ ID NO: 70908

SEQ ID NO: 70923 - DNA, 201 bp, Homo sapiens; identical to SEQ ID NO: 70909

SEQ ID NO: 70924 - DNA, 201 bp, Homo sapiens; identical to SEQ ID NO: 70910

SEQ ID NO: 70925 - DNA, 201 bp, Homo sapiens; identical to SEQ ID NO: 70911

SEQ ID NO: 70926 - DNA, 201 bp, Homo sapiens; identical to SEQ ID NO: 70912

SEQ ID NO: 70927 - DNA, 201 bp, Homo sapiens; identical to SEQ ID NO: 70913

SEQ ID NO: 70928 - DNA, 201 bp, Homo sapiens; identical to SEQ ID NO: 70914

SEQ ID NO: 70929 - DNA, 117 bp, Homo sapiens; identical to SEQ ID NO: 70915

SEQ ID NO: 70930 - DNA, 201 bp, Homo sapiens
caccgcggtctccgcgcctgtctgcaccctgtcgcctgagctgcctgacagtgacaatgacatcccagttaccagtgtccttgaattgatagtggcttctktttgtcagtctcatataagaactacagctcatcaggaggagatcgcagcagggtaagagacaccaacaccatgttctgcacgaagctcaaggatctcaag

SEQ ID NO: 70931 - DNA, 201 bp, Homo sapiens
ctgacagtgacaatgacatcccagttaccagtgtccttgaattgatagtggcttctgtttgtcagtctcatataagaactacagctcatcaggaggagatygcagcagggtaagagacaccaacaccatgttctgcacgaagctcaaggatctcaagatcacaggagagtgtcctttctccttactggcaccaggtcaagt

SEQ ID NO: 70932 - DNA, 201 bp, Homo sapiens; identical to SEQ ID NO: 70918

SEQ ID NO: 70933 - DNA, 201 bp, Homo sapiens
tgacagtgacaatgacatcccagttaccagtgtccttgaattgatagtggcttctgtttgtcagtctcatataagaactacagctcatcaggaggagatcrcagcagggtaagagacaccaacaccatgttctgcacgaagctcaaggatctcaagatcacaggagagtgtcctttctccttactggcaccaggtcaagtt

SEQ ID NO: 70934 - DNA, 201 bp, Homo sapiens; identical to SEQ ID NO: 70920

SEQ ID NO: 70935 - DNA, 201 bp, Homo sapiens; identical to SEQ ID NO: 70921

SEQ ID NO: 70936 - DNA, 115 bp, Homo sapiens
cgggccaaggcggcwgttctcgctccagctcgatgctgcctccccggcccggttgcgctgtagccgctgccgcctctgcctgggtcccttcggccgtacctctgcgtgggggctg

SEQ ID NO: 70937 - DNA, 201 bp, Homo sapiens
attagttcaggctaaatgttgggagctccaaccacatccaagaataaatctggaaacacactgctgggatactgctgttagagcccttcttggccttgtaktcccagaaatgagctccctttccttagcttagaagaatgtgattatatccaggacatcatgttcagaaaacttagtttactttcagcatagaatgcatta

SEQ ID NO: 70938 - DNA, 201 bp, Homo sapiens
tactttttctatgttcaccaagtgtcatgaacctggacgatttgacaaggagagggctgtatctaagtgacatccctctgcatgatgccacgcgcgatctygttcttttgggagaacaatttagagaggaatacaaactcacccaagaactggaaatcctcactgacaggctacagctcacgttaagagccctggaagatg

SEQ ID NO: 70939 - DNA, 201 bp, Homo sapiens
tgtatcccctgtattaaatctcattaaccacaggcagctgttacagaaagctgcattgtttcacattgagctgttacattagttcaggctaaatgttgggmgctccaaccacatccaagaataaatctggaaacacactgctgggatactgctgttagagcccttcttggccttgtattcccagaaatgagctccctttcc

SEQ ID NO: 70940 - DNA, 201 bp, Homo sapiens
gcgcgatcttgttcttttgggagaacaatttagagaggaatacaaactcacccaagaactggaaatcctcactgacaggctacagctcacgttaagagccytggaagatgaaaagaaaaagacagacacattgctgtattctgtccttcctccgtctgttgccaatgagctgcggcacaagcgtccagtgcctgccaaaag

SEQ ID NO: 70941 - DNA, 201 bp, Homo sapiens
ctatggatacagattttcttttgtccttgtccattaccccaagactttcttctagatatatctctcactatccgttattcaaccttagctctgctttctaktactttttaggctttagtatattatctaaagtttggcttttgatgtggatgatgtgagcttcatgtgtcttaaaatctactacaagcattacctaacatg

SEQ ID NO: 70942 - DNA, 201 bp, Homo sapiens
aaagctgcattgtttcacattgagctgttacattagttcaggctaaatgttgggagctccaaccacatccaagaataaatctggaaacacactgctgggayactgctgttagagcccttcttggccttgtattcccagaaatgagctccctttccttagcttagaagaatgtgattatatccaggacatcatgttcagaaa

SEQ ID NO: 70943 - DNA, 201 bp, Homo sapiens
tacagactaggttccagttttctcctaacacgtgccaagcccaggagcagttcttccctatggatacagattttcttttgtccttgtccattaccccaagmctttcttctagatatatctctcactatccgttattcaaccttagctctgctttctattactttttaggctttagtatattatctaaagtttggcttttga

SEQ ID NO: 70944 - DNA, 115 bp, Homo sapiens; identical to SEQ ID NO: 70936

SEQ ID NO: 70945 - DNA, 201 bp, Homo sapiens; identical to SEQ ID NO: 70937

SEQ ID NO: 70946 - DNA, 201 bp, Homo sapiens; identical to SEQ ID NO: 70938

SEQ ID NO: 70947 - DNA, 201 bp, Homo sapiens; identical to SEQ ID NO: 70939

SEQ ID NO: 70948 - DNA, 201 bp, Homo sapiens; identical to SEQ ID NO: 70940

SEQ ID NO: 70949 - DNA, 201 bp, Homo sapiens; identical to SEQ ID NO: 70941

SEQ ID NO: 70950 - DNA, 201 bp, Homo sapiens; identical to SEQ ID NO: 70942

SEQ ID NO: 70951 - DNA, 201 bp, Homo sapiens; identical to SEQ ID NO: 70943

SEQ ID NO: 70952 - DNA, 201 bp, Homo sapiens
cccgggggtcagggcctccccacaggagccctgcagtgtggtagcgccatggctgtctcaaaccaagcaaaggaaggaccctgaggccttcacgctaaccstcctcgagcaactgctgttggaaggcctccctgggcctggcccccaccctctgccacccagtcctcccagctgccatgtttcaaagacgacctttacctc

SEQ ID NO: 70953 - DNA, 201 bp, Homo sapiens
cgtaatcaagcctctggtcacatggctgtcgatgtaggcattctggagtggtgttcagccaagtgaccgggcaaaattgggctgtgaaattgtacttccargcttggatgtaatttttgctctagagagaagcaagtggtgggaaggaggtagcatgacgtgtggtgtgcgggtttccttgctgccgtcacctctccgctc

SEQ ID NO: 70954 - DNA, 201 bp, Homo sapiens
acagttgcacagtgcctcaagccccagagtggctcaccctgtccagacctttgaggatatcaaaggacaaagtgcccaagtctttcctaccttgggggaamctggaacttggaaaggctccctgtcctagtcttgatctgttctgggccaggtcccagcttgagctgcctctgagatttgggctgtgcggatctctggagt

SEQ ID NO: 70955 - DNA, 201 bp, Homo sapiens
agcaccatcccgggggtcagggcctccccacaggagccctgcagtgtggtagcgccatggctgtctcaaaccaagcaaaggaaggaccctgaggccttcasgctaaccctcctcgagcaactgctgttggaaggcctccctgggcctggcccccaccctctgccacccagtcctcccagctgccatgtttcaaagacgacc

SEQ ID NO: 70956 - DNA, 201 bp, Homo sapiens
agggaacgggaacggccatgagcactgcagcgattgcgagaatgaggaggacaacagctacaaccgggggtattggcatcggtccctaaacccacggaagytgattgaagtgaagttctcccacctgagcagaaatatgaccatgcagcgcaccatgaagctctaccgactgccagagactcccaagacagctgggctgcg

SEQ ID NO: 70957 - DNA, 201 bp, Homo sapiens
cctatttctgaagaggcttctgtcttatttgaaggccagcccacacccagctactttaacaccaggtttatggaaaatgtcaggccttccccacaactccygtctaactgctgtcgcccccctacttgctggctctcagaagcctaggggagtccctgtggtcctgaattctttccccaaagacgaccagcatttaaccaa

SEQ ID NO: 70958 - DNA, 201 bp, Homo sapiens
ccagtcaccagtgcgattctggataaagccactgaaaattcgaaccaggaaatggaaccccaccactgttggtccaattttcacacacgtgagaatccctrgcaaagggagcagaactgaaccggctttaccaaaccgccagcgaacttgacaattgtattgcgatggcgtgggctgcgtgacgtcacctccggtcgtgtc

SEQ ID NO: 70959 - DNA, 201 bp, Homo sapiens
tcccacctgagcagaaatatgaccatgcagcgcaccatgaagctctaccgactgccagagactcccaagacagctgggctgcgaccaatggaaacaaaggmcattccagtagtgcaccagctcctcaccaggtacttgaagcaatttcaccttacgcccgtcatgagccaggaggaggtggagcactggttctacccccag

SEQ ID NO: 70960 - DNA, 201 bp, Homo sapiens
acggcaacctgcagtattacctttacaattggaaatgccccagcatgggggcagagaaggttggactggtgctacaataaccagtcaccagtgcgattctrgataaagccactgaaaattcgaaccaggaaatggaaccccaccactgttggtccaattttcacacacgtgagaatccctggcaaagggagcagaactgaa

SEQ ID NO: 70961 - DNA, 201 bp, Homo sapiens
ggagctcttggctggggctgaccctgggcagggactttcctgcagggccagacctgcctgcattctgagacaaagcaatggacggtccgcagaagcagacytcattgattgagtcctttcttccatccccttggcctgctccctgtaggaagtcatcctgccaactgatttaaaagggctctttagccagttgttgccaac

SEQ ID NO: 70962 - DNA, 201 bp, Homo sapiens
gagctgcactctaggagaaggaggggaaccagatgttagatcaggggagggagcaggagtgtccctcccgtcagtgcctacccacctgtgaggcagccttytgatggcctggcccaccttccccagaaccaggggaggcctgaggcttcagttttactctgctgcaaaatgaaggcgggcctgcaagccgactacacctac

SEQ ID NO: 70963 - DNA, 201 bp, Homo sapiens
cccaggtcatggaatggaaacggtgaggccccagtggctgttctggaagaaacagatctcctggcaaaggccccagcatctccctcactgaaaccaggtgsccggctcctcggactctgctttatgttgcggtgagaactctgcccaggtgtgcagggtttggcttgtgggctgcttgctgctcatctgatttttgtccca

SEQ ID NO: 70964 - DNA, 201 bp, Homo sapiens; identical to SEQ ID NO: 70952

SEQ ID NO: 70965 - DNA, 201 bp, Homo sapiens
cgaagtggtgaacacccatggccccgtggagcctgacaaggacaatatccgccaggagccctacaccctgccccagggcttcacctgggatgctttggacytgggcgatcgtggtgtgctaaaagaactgtacaccctcctgaatgagaactatgtggaagatgatgacaacatgttccgatttgattattccccggagtt

SEQ ID NO: 70966 - DNA, 201 bp, Homo sapiens; identical to SEQ ID NO: 70955

SEQ ID NO: 70967 - DNA, 201 bp, Homo sapiens; identical to SEQ ID NO: 70957

SEQ ID NO: 70968 - DNA, 201 bp, Homo sapiens; identical to SEQ ID NO: 70958

SEQ ID NO: 70969 - DNA, 201 bp, Homo sapiens; identical to SEQ ID NO: 70960

SEQ ID NO: 70970 - DNA, 201 bp, Homo sapiens; identical to SEQ ID NO: 70962

SEQ ID NO: 70971 - DNA, 201 bp, Homo sapiens
aacgggtcatggaatggaaacggtgaggccccagtggctgttctggaagaaacagatctcctggcaaaggccccagcatctccctcactgaaaccaggtgsccggctcctcggactctgctttatgttgcggtgagaactctgcccaggtgtgcagggtttggcttgtgggctgcttgctgctcatctgatttttgtccca

SEQ ID NO: 70972 - DNA, 201 bp, Homo sapiens
tgagcactgcagcgattgcgagaatgaggaggacaacagctacaaccggggtggtttgagtccagccaatgacactggagccaaaaagaagaaaaagaaamaaaaaaagaagaaagaaaaaggcagtgagacagattcagcccaggatcagcctgtgaagatgaactctttgccagcagagaggatccaggaaatacagaa

SEQ ID NO: 70973 - DNA, 201 bp, Homo sapiens
gagaccaaagaagctgctgttcttagcaagatgcgcactgcattccacaggtgggaggagtcggagaggcaggggcttgctttgcagccccacagacaacsgttgcacagtgcctcaagccccagagtggctcaccctgtccagacctttgaggatatcaaaggacaaagtgcccaagtctttcctaccttgggggaacct

SEQ ID NO: 70974 - DNA, 201 bp, Homo sapiens
gagacaaagcaatggacggtccgcagaagcagacctcattgattgagtcctttcttccatccccttggcctgctccctgtaggaagtcatcctgccaactratttaaaagggctctttagccagttgttgccaaccttatagggatgagtcccctgtgagattttgcttttccactgcctgggatgatgcagtttgaagag

SEQ ID NO: 70975 - DNA, 201 bp, Homo sapiens
ttgggctgtgaaattgtacttccaggcttggatgtaatttttgctctagagagaagcaagtggtgggaaggaggtagcatgacgtgtggtgtgcgggtttmcttgctgccgtcacctctccgctcatacaggaatgaagccttagccaggaggccaggctcagccctgtgccactcaccgaagccactttctacaggccag

SEQ ID NO: 70976 - DNA, 201 bp, Homo sapiens
acaattatcattcgtctttggtgccattaccctggcaatataaagaaaataagcaacataaaagcaagaacggaaaaggccctttcacacaaataggacaycccttgcccagcactccctccctgaaagccgagggggcgcgagtcaggaggagtgctggtgtcctccaaatgccctttctggacctgggttcttcagcct

SEQ ID NO: 70977 - DNA, 201 bp, Homo sapiens
aagaaactgagaccaaagaagctgctgttcttagcaagatgcgcactgcattccacaggtgggaggagtcggagaggcaggggcttgctttgcagccccasagacaacagttgcacagtgcctcaagccccagagtggctcaccctgtccagacctttgaggatatcaaaggacaaagtgcccaagtctttcctaccttgg

SEQ ID NO: 70978 - DNA, 201 bp, Homo sapiens
aggtcatggaatggaaacggtgaggccccagtggctgttctggaagaaacagatctcctggcaaaggccccagcatctccctcactgaaaccaggtgcccygctcctcggactctgctttatgttgcggtgagaactctgcccaggtgtgcagggtttggcttgtgggctgcttgctgctcatctgatttttgtcccagta

SEQ ID NO: 70979 - DNA, 201 bp, Homo sapiens
tgattgaagtgaagttctcccacctgagcagaaatatgaccatgcagcgcaccatgaagctctaccgactgccagagactcccaagacagctgggctgcgrccaatggaaacaaaggacattccagtagtgcaccagctcctcaccaggtacttgaagcaatttcaccttacgcccgtcatgagccaggaggaggtggagc

SEQ ID NO: 70980 - DNA, 201 bp, Homo sapiens
gggatacgcagcccgtccccaagctgggcgaagtggtgaacacccatggccccgtggagcctgacaaggacaatatccgccaggagccctacaccctgccmcagggcttcacctgggatgctttggacctgggcgatcgtggtgtgctaaaagaactgtacaccctcctgaatgagaactatgtggaagatgatgacaaca

SEQ ID NO: 70981 - DNA, 201 bp, Homo sapiens
agtttacactgccggggtggtactaccaaagcccgttggcacctgcaggtattggcatcggtccctaaacccacggaagctgattgaagtgaagttctccracctgagcagaaatatgaccatgcagcgcaccatgaagctctaccgactgccagagactcccaagacagctgggctgcgaccaatggaaacaaaggacat

SEQ ID NO: 70982 - DNA, 201 bp, Homo sapiens
gaaatggaaccccaccactgttggtccaattttcacacacgtgagaatccctggcaaagggagcagaactgaaccggctttaccaaaccgccagcgaactygacaattgtattgcgatggcgtgggctgcgtgacgtcacctccggtcgtgtctctggtctccgtgttttccagttaattacatcctcatgcagccgtgat

SEQ ID NO: 70983 - DNA, 201 bp, Homo sapiens
cttcagctcagagagcaccatcccgggggtcagggcctccccacaggagccctgcagtgtggtagcgccatggctgtctcaaaccaagcaaaggaaggacyctgaggccttcacgctaaccctcctcgagcaactgctgttggaaggcctccctgggcctggcccccaccctctgccacccagtcctcccagctgccatgt

SEQ ID NO: 70984 - DNA, 201 bp, Homo sapiens
agaaaaaggcagtgagacagattcagcccaggatcagcctgtgaagatgaactctttgccagcagagaggatccaggaaatacagaaggccattgagctgytctcagtgggtcagggacctgccaaaaccatggaggaggctagcaagcgaagctaccagttctgggatacgcagcccgtccccaagctgggcgaagtggt

SEQ ID NO: 70985 - DNA, 201 bp, Homo sapiens
tgtgggttttggtgtggtttgtcagaggctaattctgcagagtttccaaaaccagaagacatcgtatgcttgggatgggggccgtgccacccgtgggaatsctgcccgctctgcagactgctgctagagccagcaactccactaaggtggattttcatcaggggcctgcagggccctcccttttcccattgttcctgcgct

SEQ ID NO: 70986 - DNA, 201 bp, Homo sapiens
ctgagcagaaatatgaccatgcagcgcaccatgaagctctaccgactgccagaggccagtgctgccccgggtgctgggctgcgaccaatggaaacaaaggmcattccagtagtgcaccagctcctcaccaggtacttgaagcaatttcaccttacgcccgtcatgagccaggaggaggtggagcactggttctacccccag

SEQ ID NO: 70987 - DNA, 201 bp, Homo sapiens; identical to SEQ ID NO: 70965

SEQ ID NO: 70988 - DNA, 201 bp, Homo sapiens
cctggagggcatcttccaagcagtttacactgccggggtggtactaccaaagcccgttggcacctgcaggtattggcatcggtccctaaacccacggaagytgattgaagtgaagttctcccacctgagcagaaatatgaccatgcagcgcaccatgaagctctaccgactgccagaggccagtgctgccccgggtgctgg

SEQ ID NO: 70989 - DNA, 201 bp, Homo sapiens
agagggttgctccagttctgatccgagagatcaccaggcgggttcacctggagggcatcttccaagcagtttacactgccggggtggtactaccaaagccygttggcacctgcaggtattggcatcggtccctaaacccacggaagctgattgaagtgaagttctcccacctgagcagaaatatgaccatgcagcgcacca

SEQ ID NO: 70990 - DNA, 201 bp, Homo sapiens; identical to SEQ ID NO: 70972

SEQ ID NO: 70991 - DNA, 201 bp, Homo sapiens; identical to SEQ ID NO: 70952

SEQ ID NO: 70992 - DNA, 201 bp, Homo sapiens; identical to SEQ ID NO: 70953

SEQ ID NO: 70993 - DNA, 201 bp, Homo sapiens; identical to SEQ ID NO: 70954

SEQ ID NO: 70994 - DNA, 201 bp, Homo sapiens; identical to SEQ ID NO: 70965

SEQ ID NO: 70995 - DNA, 201 bp, Homo sapiens; identical to SEQ ID NO: 70955

SEQ ID NO: 70996 - DNA, 201 bp, Homo sapiens
cctggagggcatcttccaagcagtttacactgccggggtggtactaccaaagcccgttggcacctgcaggtattggcatcggtccctaaacccacggaagytgattgaagtgaagttctcccacctgagcagaaatatgaccatgcagcgcaccatgaagctctaccgactgccagagactcccaagacagctgggctgcg

SEQ ID NO: 70997 - DNA, 201 bp, Homo sapiens; identical to SEQ ID NO: 70957

SEQ ID NO: 70998 - DNA, 201 bp, Homo sapiens; identical to SEQ ID NO: 70959

SEQ ID NO: 70999 - DNA, 201 bp, Homo sapiens; identical to SEQ ID NO: 70958

SEQ ID NO: 71000 - DNA, 201 bp, Homo sapiens; identical to SEQ ID NO: 70960

SEQ ID NO: 71001 - DNA, 201 bp, Homo sapiens; identical to SEQ ID NO: 70962

SEQ ID NO: 71002 - DNA, 201 bp, Homo sapiens; identical to SEQ ID NO: 70961

SEQ ID NO: 71003 - DNA, 201 bp, Homo sapiens; identical to SEQ ID NO: 70989

SEQ ID NO: 71004 - DNA, 201 bp, Homo sapiens; identical to SEQ ID NO: 70972

SEQ ID NO: 71005 - DNA, 201 bp, Homo sapiens; identical to SEQ ID NO: 70963

SEQ ID NO: 71006 - DNA, 201 bp, Homo sapiens
aggacatgaaccagccccttgcccactacttcatctcttcctcccacaacacctatctgactgactcccagatcggggggcccagcagcaccgaggcctaygttagggcctttgcccagggatgccgctgcgtggagctggactgctgggaggggccaggaggggagcccgtcatctatcatggccataccctcacctcca

SEQ ID NO: 71007 - DNA, 201 bp, Homo sapiens
ccctgtccccgcgtgcagaccccgggcccggccccggccccccgccaagccatgctgtgcggccgctggagggttgccgccgcccgcccgaggagcccccrgtggccgcccaggtcgcagcccaagtcgcggcgccggtcgctctcccgtccccgccgactccctccgatggcggcaccaagaggcccgggctgcgggcgc

SEQ ID NO: 71008 - DNA, 201 bp, Homo sapiens
ggaggaccagggcgaggagggcgccacactggcccgcgcccagcagctcattcagacctatgagctcaacgagacagccaagcagcatgagctgatgacaytggatggcttcatgatgtacctgttgtcgccggagggggctgccttggacaacacccacacgtgtgtgttccaggacatgaaccagccccttgcccacta

SEQ ID NO: 71009 - DNA, 201 bp, Homo sapiens
acgagatggacctcaatgccgggcgcttcctagtcaatgggcagtgtggctacgtcctaaaacctgcctgcctgcggcaacctgactcgacctttgacccygagtacccaggacctcccagaaccactctcagcatccaggtgctgactgcacagcagctgcccaagctgaatgccgagaagccacactccattgtggacc

SEQ ID NO: 71010 - DNA, 201 bp, Homo sapiens
tgctttccaaggacggggcctcactgtcaccagccacgctcttcatccaaatccgcatccagccctcctgagtagctgggactacaggcacaggccaccamacctggctaatgtttaaattttatgtagagatggcggggggggcgggggtctccctatgttgcccaggctggtctcgagctcctgacctcaagtgatcct

SEQ ID NO: 71011 - DNA, 201 bp, Homo sapiens
tcgcgcacgtggcacaaggagcggctgtaccggctgcaggaggacggcctgagcgtgtggttccagcggcgcatcccgcgtgcgccatcgcagcacatctscttcgtgcagcacatcgaggcggtccgcgagggccaccagtccgagggcctgcggcgcttcgggggtgccttcgcgccagcgcgctgcctcaccatcgcc

SEQ ID NO: 71012 - DNA, 201 bp, Homo sapiens
gggctgccttggacaacacccacacgtgtgtgttccaggacatgaaccagccccttgcccactacttcatctcttcctcccacaacacctatctgactgaytcccagatcggggggcccagcagcaccgaggcctatgttagggcctttgcccagggatgccgctgcgtggagctggactgctgggaggggccaggagggg

SEQ ID NO: 71013 - DNA, 201 bp, Homo sapiens
cgctcttcatccaaatccgcatccagccctcctgagtagctgggactacaggcacaggccaccaaacctggctaatgtttaaattttatgtagagatggcggggggggcgggggtctccctatgttgcccaggctggtctcgagctcctgacctcaagtgatcctcctgccccagcattccaaagtgctgggattacaggt

SEQ ID NO: 71014 - DNA, 201 bp, Homo sapiens
gggggacatgctggtgacacaggcgctggactccccaaatcccgaggagctgccatccccagagcagctgaagggccgggtcctggtgaagggaaagaagytgcccgctgctcggagcgaggatggccgggctctgtcggatcgggaggaggaggaggaggatgacgaggaggaagaagaggaggtggaggctgcagcgca

SEQ ID NO: 71015 - DNA, 201 bp, Homo sapiens; identical to SEQ ID NO: 71012

SEQ ID NO: 71016 - DNA, 201 bp, Homo sapiens
tcccggctccgcaagatccgctcgcgcacgtggcacaaggagcggctgtaccggctgcaggaggacggcctgagcgtgtggttccagcggcgcatcccgcscttcgtgcagcacatcgaggcggtccgcgagggccaccagtccgagggcctgcggcgcttcgggggtgccttcgcgccagcgcgctgcctcaccatcgcc

SEQ ID NO: 71017 - DNA, 201 bp, Homo sapiens
tctggagtcaggtggtgggagtaccagccccccagcccacccacttggcccactcagcccattcaccaggcgctggtctcacctgggtgctgagggctgcytgggcccctcctgaagaacagaaaggtgttcatgtgacttcagtgagctccaaccctggggccctgagatggccccagctcctcttgtcctcagcccacc

SEQ ID NO: 71018 - DNA, 201 bp, Homo sapiens; identical to SEQ ID NO: 71006

SEQ ID NO: 71019 - DNA, 201 bp, Homo sapiens
gctgaggcatgaagccctggggaaactggcagtaggttttggtttttattttttgagacagggtctcgctccgtcgcccaggctggagtgcaatgttgcartcatggctcactgcagctttgaactcccaggctcaagcgatcctcccatctcagcctcctgagtagctgggactacaggcacaggccaccaaacctggct

SEQ ID NO: 71020 - DNA, 201 bp, Homo sapiens; identical to SEQ ID NO: 71007

SEQ ID NO: 71021 - DNA, 201 bp, Homo sapiens
caggctcaagcgatcctcccatctcagcctcctgagtagctgggactacaggcacaggccaccaaacctggctaatgtttaaattttatgtagagatggcggggggggcgggggtctccctatgttgcccaggctggtctcgagctcctgacctcaagtgatcctcctgccccagcattccaaagtgctgggattacaggt

SEQ ID NO: 71022 - DNA, 201 bp, Homo sapiens; identical to SEQ ID NO: 71008

SEQ ID NO: 71023 - DNA, 201 bp, Homo sapiens; identical to SEQ ID NO: 71009

SEQ ID NO: 71024 - DNA, 201 bp, Homo sapiens; identical to SEQ ID NO: 71014

SEQ ID NO: 71025 - DNA, 201 bp, Homo sapiens
atgttgcaatcatggctcactgcagctttgaactcccaggctcaagcgatcctcccatctcagcctcctgagtagctgggactacaggcacaggccaccamacctggctaatgtttaaattttatgtagagatggcggggggggcgggggtctccctatgttgcccaggctggtctcgagctcctgacctcaagtgatcct

SEQ ID NO: 71026 - DNA, 201 bp, Homo sapiens; identical to SEQ ID NO: 71006

SEQ ID NO: 71027 - DNA, 201 bp, Homo sapiens; identical to SEQ ID NO: 71007

SEQ ID NO: 71028 - DNA, 201 bp, Homo sapiens; identical to SEQ ID NO: 71008

SEQ ID NO: 71029 - DNA, 201 bp, Homo sapiens; identical to SEQ ID NO: 71009

SEQ ID NO: 71030 - DNA, 201 bp, Homo sapiens; identical to SEQ ID NO: 71010

SEQ ID NO: 71031 - DNA, 201 bp, Homo sapiens; identical to SEQ ID NO: 71011

SEQ ID NO: 71032 - DNA, 201 bp, Homo sapiens; identical to SEQ ID NO: 71012

SEQ ID NO: 71033 - DNA, 201 bp, Homo sapiens; identical to SEQ ID NO: 71013

SEQ ID NO: 71034 - DNA, 201 bp, Homo sapiens; identical to SEQ ID NO: 71014

SEQ ID NO: 71035 - DNA, 201 bp, Homo sapiens; identical to SEQ ID NO: 71006

SEQ ID NO: 71036 - DNA, 201 bp, Homo sapiens; identical to SEQ ID NO: 71007

SEQ ID NO: 71037 - DNA, 201 bp, Homo sapiens; identical to SEQ ID NO: 71008

SEQ ID NO: 71038 - DNA, 201 bp, Homo sapiens; identical to SEQ ID NO: 71009

SEQ ID NO: 71039 - DNA, 201 bp, Homo sapiens; identical to SEQ ID NO: 71010

SEQ ID NO: 71040 - DNA, 201 bp, Homo sapiens; identical to SEQ ID NO: 71011

SEQ ID NO: 71041 - DNA, 201 bp, Homo sapiens; identical to SEQ ID NO: 71012

SEQ ID NO: 71042 - DNA, 201 bp, Homo sapiens; identical to SEQ ID NO: 71013

SEQ ID NO: 71043 - DNA, 201 bp, Homo sapiens; identical to SEQ ID NO: 71014

SEQ ID NO: 71044 - DNA, 164 bp, Homo sapiens
tctggagtcaggtggtgggagtaccagccccccagcccacccacttggcccactcagcccattcaccaggcgctggtctcacctgggtgctgagggctgcytgggctccaaccctggggccctgagatggccccagctcctcttgtcctcagcccacccctcat

SEQ ID NO: 71045 - DNA, 201 bp, Homo sapiens; identical to SEQ ID NO: 71006

SEQ ID NO: 71046 - DNA, 201 bp, Homo sapiens; identical to SEQ ID NO: 71007

SEQ ID NO: 71047 - DNA, 201 bp, Homo sapiens; identical to SEQ ID NO: 71008

SEQ ID NO: 71048 - DNA, 201 bp, Homo sapiens; identical to SEQ ID NO: 71009

SEQ ID NO: 71049 - DNA, 201 bp, Homo sapiens; identical to SEQ ID NO: 71011

SEQ ID NO: 71050 - DNA, 201 bp, Homo sapiens; identical to SEQ ID NO: 71012

SEQ ID NO: 71051 - DNA, 201 bp, Homo sapiens; identical to SEQ ID NO: 71014

SEQ ID NO: 71052 - DNA, 201 bp, Homo sapiens; identical to SEQ ID NO: 71006

SEQ ID NO: 71053 - DNA, 201 bp, Homo sapiens; identical to SEQ ID NO: 71007

SEQ ID NO: 71054 - DNA, 201 bp, Homo sapiens; identical to SEQ ID NO: 71008

SEQ ID NO: 71055 - DNA, 201 bp, Homo sapiens; identical to SEQ ID NO: 71009

SEQ ID NO: 71056 - DNA, 201 bp, Homo sapiens; identical to SEQ ID NO: 71010

SEQ ID NO: 71057 - DNA, 201 bp, Homo sapiens; identical to SEQ ID NO: 71011

SEQ ID NO: 71058 - DNA, 201 bp, Homo sapiens; identical to SEQ ID NO: 71012

SEQ ID NO: 71059 - DNA, 201 bp, Homo sapiens; identical to SEQ ID NO: 71013

SEQ ID NO: 71060 - DNA, 201 bp, Homo sapiens; identical to SEQ ID NO: 71014

SEQ ID NO: 71061 - DNA, 201 bp, Homo sapiens
gaaggacccgagttctgggcaaaacttaatttggtggccccagccattaaggagaggatgatgaagaagggaagcttgatgctgggctaccagccgcaccrgggaaaggtcaacttcttccgccaggtggtgatcagccctcaagtgagccgggaggacatggacttcctcctggatgagatagacttactgggtaaagac

SEQ ID NO: 71062 - DNA, 183 bp, Homo sapiens
aaacttaatttggtggccccagccattaaggagaggatgatgaagaagggaagcttgatgctgggctaccagccgcaccggggaaaggtcaacttcttccrccaggtggtgatcagccctcaagtgagccgggaggacatggacttcctcctggatgagatagacttactgggtaaagacatg

SEQ ID NO: 71063 - DNA, 201 bp, Homo sapiens
gcctctggcttcatgtagatgcttcttggggtggctcagctttgatgtcgaggaagcaccgcaagcttctgcatggcatccacagggctgactctgtggcytggaacccacacaagatgctgatggctgggatccagtgctgtgctctccttgtgaaagacaaatctgatcttcttaaaaaatgctactctgccaaggcat

SEQ ID NO: 71064 - DNA, 201 bp, Homo sapiens
gatccagtgctgtgctctccttgtgaaagacaaatctgatcttcttaaaaaatgctactctgccaaggcatcttacctcttccagcaggataaattctatkatgtgagctatgacacaggagacaagtctatccagtgtagcagaagaccagatgcattcaagttctggatgacctggaaggccctgggtacattaggcct

SEQ ID NO: 71065 - DNA, 201 bp, Homo sapiens
acagtatgggcaacatgtacacgctctactttctgcagcggcagccgcaggcctggaaggacaagtatatccgggccttcgtgtcactgggtgcgccctgrgggggcgtggccaagaccctgcgcgtcctggcttcaggagacaacaaccggatcccagtcatcgggcccctgaagatccgggagcagcagcggtcagctg

SEQ ID NO: 71066 - DNA, 201 bp, Homo sapiens
tcggctcctggcccctcgggtgacccttcccacacaccagccacagataggcctgccactggtcatgggtagctagagctgctggcttccctgtggcttarctggtggccagcctgactggcttcctgggcgagcctagtagctcctgcaggcaggggcagtttgttgcgttcttcgtggttcccaggccctgggacatct

SEQ ID NO: 71067 - DNA, 103 bp, Homo sapiens
acatgcctggcatctgtctccccttgttcctgagtggccccacatggggctctgagcaggctgtatctggattctggcaataaaagtactctggatgctgwaa

SEQ ID NO: 71068 - DNA, 201 bp, Homo sapiens
aggacatcggctttgaagatggctggctcatgcggcaggacacagaagggctggtggaagccacgatgccacctggcgtgcagctgcactgcctctatggyactggcgtccccacaccagactccttctactatgagagcttccctgaccgtgaccctaaaatctgctttggtgacggcgatggtactgtgaacttgaaga

SEQ ID NO: 71069 - DNA, 201 bp, Homo sapiens
agtcagggctgccttcatggcagtaggctctaagtgggtgactggccacaggccgagaaaagggtacagcctctaggtggggttcccaaagacgccttcasgctggactgagctgctctcccacagggtttctgtgcagctggattttctctgttgcatacatgcctggcatctgtctccccttgttcctgagtggcccca

SEQ ID NO: 71070 - DNA, 201 bp, Homo sapiens
agtgattaacgatattgctaatcttccagtaccaacaattgcagcaatagatggactcgctttaggtggtggtcttgaactggctttagcctgtgatataygagtagcagcttcctctgcaaaaatgggcctggttgaaacaaaattggcgattattcctggtggaggggggacacagcgattgccacgcgccattggaat

SEQ ID NO: 71071 - DNA, 201 bp, Homo sapiens
agggatattctgtgctgctaatcttccagtaccaacaattgcagcaatagatggactcgctttaggtggtggtcttgaactggctttagcctgtgatataygagtagcagcttcctctgcaaaaatgggcctggttgaaacaaaattggcgattattcctggtggaggggggacacagcgattgccacgcgccattggaat

SEQ ID NO: 71072 - DNA, 201 bp, Homo sapiens
gctgggatcatgttgttggccctggtctgtctgctcagctgcctgctaccctccagtgaggccaagctctacggtcgttgtgaactggccagagtgctacrtgacttcgggctggacggataccggggatacagcctggctgactgggtctgccttgcttatttcacaagcggtttcaacgcagctgctttggactacgag

SEQ ID NO: 71073 - DNA, 201 bp, Homo sapiens
accccgaacgtccccaacgtgtgccggatgtactgctcagatttgttgaatcctaatctcaaggataccgttatctgtgccatgaagataacccaagagcytcagggtctgggttactgggaggcctggaggcatcactgccagggaaaagacctcactgaatgggtggatggctgtgacttctaggatggacggaaccat

SEQ ID NO: 71074 - DNA, 191 bp, Homo sapiens
ggacatcttgagctgaagcagggttttgagccactgctgctgctgccattgtcaccatggtctcagctctgcggggagcacccctgatcarggtgcactcaagccctgtttcttctccttctgtgagtggaccacggaggctggtgagctgcctgtcatcccaaagctcagctctgagccagagtggtggt

SEQ ID NO: 71075 - DNA, 201 bp, Homo sapiens
actggccagagtgctacatgacttcgggctggacggataccggggatacagcctggctgactgggtctgccttgcttatttcacaagcggtttcaacgcarctgctttggactacgaggctgatgggagcaccaacaacgggatcttccagatcaacagccggaggtggtgcagcaacctcaccccgaacgtccccaacgt

SEQ ID NO: 71076 - DNA, 133 bp, Homo sapiens
cactgaatgggtggatggctgtgacttctaggatggacggaaccatgcacagcaggctgggaaatgtggtttggttcctgacctaggcttgggaagacaarccagcgaataaaggatggttgaacgtgaatat

SEQ ID NO: 71077 - DNA, 201 bp, Homo sapiens
ttatctgtgccatgaagataacccaagagcctcagggtctgggttactgggaggcctggaggcatcactgccagggaaaagacctcactgaatgggtggayggctgtgacttctaggatggacggaaccatgcacagcaggctgggaaatgtggtttggttcctgacctaggcttgggaagacaagccagcgaataaagga

SEQ ID NO: 71078 - DNA, 201 bp, Homo sapiens
caccgacctgggagtcaccatcctggtaaatagagggttcgttcccaggaagaaagtgaatcctgaaacccggcagaaaggccagattgagggagaagtgsacctcattgggatggtgaggctgacagaaaccaggcagccttttgtccctgagaacaatccagaaaggaaccactggcattatcgagacctggaagctat

SEQ ID NO: 71079 - DNA, 201 bp, Homo sapiens
ctttcttcagtgggtcctgctcctcatccctgtgactgcctttggcttggggacatggcaggtccagcgtcggaagtggaagctgaacctgattgcagagytggagtccagagttctggctgagcctgtccctctgccagccgacccaatggaactgaaaaatctggagtataggccagtgaaggtcagggggtgctttga

SEQ ID NO: 71080 - DNA, 201 bp, Homo sapiens
attgcagagttggagtccagagttctggctgagcctgtccctctgccagccgacccaatggaactgaaaaatctggagtataggccagtgaaggtcagggrgtgctttgaccattccaaggagctgtatatgatgccccggaccatggtggaccctgtccgggaggcccgggagggcggcctcatctcctcctcaactcag

SEQ ID NO: 71081 - DNA, 201 bp, Homo sapiens
aggcagccttttgtccctgagaacaatccagaaaggaaccactggcattatcgagacctggaagctatggccagaatcacaggcgcagagcccatcttcaytgatgccaacttccagagcacagtccctggaggacccattggagggcaaaccagagttactctgaggaacgagcatctgcagtacatcgtgacctggtat

SEQ ID NO: 71082 - DNA, 201 bp, Homo sapiens
ccctgagaacaatccagaaaggaaccactggcattatcgagacctggaagctatggccagaatcacaggcgcagagcccatcttcattgatgccaacttcyagagcacagtccctggaggacccattggagggcaaaccagagttactctgaggaacgagcatctgcagtacatcgtgacctggtatggactctctgcagc

SEQ ID NO: 71083 - DNA, 201 bp, Homo sapiens
gattgcagagttggagtccagagttctggctgagcctgtccctctgccagccgacccaatggaactgaaaaatctggagtataggccagtgaaggtcaggrggtgctttgaccattccaaggagctgtatatgatgccccggaccatggtggaccctgtccgggaggcccgggagggcggcctcatctcctcctcaactca

SEQ ID NO: 71084 - DNA, 135 bp, Homo sapiens
ccctgtccctggataatgcagtatttcaagactgcctttatgctggatcatgtgctactggtataaagttctggccttctaccttaaatgagctcatgacyggttcatcataaaatcctggcttggtttcagtcc

SEQ ID NO: 71085 - DNA, 201 bp, Homo sapiens
ccgacgcgcccgcggagcagcccggcggaagccgctcgcagaacctggagccgggggcggggctctgggcgggactcagcggcgccccggatgcagatgcytcctgcgtcccggaagcgcccgcggggccgggtgcgatggcggcggtggctgcgttgcagctggggctgcgggcggcggggctgggacgggccccggcca

SEQ ID NO: 71086 - DNA, 201 bp, Homo sapiens
agggcggcctcatctcctcctcaactcagagtggggcctatgtggtcactcccttccactgcaccgacctgggagtcaccatcctggtaaatagagggttygttcccaggaagaaagtgaatcctgaaacccggcagaaaggccagattgagggagaagtggacctcattgggatggtgaggctgacagaaaccaggcagc

SEQ ID NO: 71087 - DNA, 201 bp, Homo sapiens
gattgagggagaagtggacctcattgggatggtgaggctgacagaaaccaggcagccttttgtccctgagaacaatccagaaaggaaccactggcattatygagacctggaagctatggccagaatcacaggcgcagagcccatcttcattgatgccaacttccagagcacagtccctggaggacccattggagggcaaac

SEQ ID NO: 71088 - DNA, 201 bp, Homo sapiens
gtggggcctatgtggtcactcccttccactgcaccgacctgggagtcaccatcctggtaaatagagggttcgttcccaggaagaaagtgaatcctgaaacscggcagaaaggccagattgagggagaagtggacctcattgggatggtgaggctgacagaaaccaggcagccttttgtccctgagaacaatccagaaagga

SEQ ID NO: 71089 - DNA, 201 bp, Homo sapiens
gttcgttcccaggaagaaagtgaatcctgaaacccggcagaaaggccagattgagggagaagtggacctcattgggatggtgaggctgacagaaaccaggyagccttttgtccctgagaacaatccagaaaggaaccactggcattatcgagacctggaagctatggccagaatcacaggcgcagagcccatcttcattga

SEQ ID NO: 71090 - DNA, 201 bp, Homo sapiens
cgcagagcccatcttcattgatgccaacttccagagcacagtccctggaggacccattggagggcaaaccagagttactctgaggaacgagcatctgcagkacatcgtgacctggtatggactctctgcagctacatcctacctgtggtttaagaaattcctacgtgggacacctggtgtgtgacagatcagctgctgaag

SEQ ID NO: 71091 - DNA, 201 bp, Homo sapiens
agcagaagcatctgccacaaaagcggaagatgactcctttcttcagtgggtcctgctcctcatccctgtgactgcctttggcttggggacatggcaggtcyagcgtcggaagtggaagctgaacctgattgcagagttggagtccagagttctggctgagcctgtccctctgccagccgacccaatggaactgaaaaatct

SEQ ID NO: 71092 - DNA, 201 bp, Homo sapiens
gaagaatgtcagaagcaaggggtggagtacgtgcctgcctgcctggtgcaccggaggaggaggagggaggaccagatggacggtgacgggcctcgcccgcrggaagccttctgggagcccacatccagtgatgaggggggagctgcaagtgatgacagcatgacagacctgtacccacctgagctattcaccagaaaggac

SEQ ID NO: 71093 - DNA, 201 bp, Homo sapiens
gatggcactgatgactttttgacagacaaagaggatgagaaggcaaagcccccaagagagaaggccactgatgagggcaggagagagacgaccgtgtaccragggctggtccagaagcgcgggaagaagcagttgggctcgttgaaaaagaagttcaagagtcatcaccgcaaacccaagagcttcagctcctgtaaacag

SEQ ID NO: 71094 - DNA, 201 bp, Homo sapiens
gacagccctggtgaggttgaaacactgagacaagccagtcttcatgcagtgagcacttgaatgatcacaggagaagagaacccatgtcctgaagccattgmtcgatcttaccaatattcgggggtaaggaagtaggctaccaggggaatatttgcaaacgcgttgggactagttcggctgtgttaaaaaggtaggtgactt

SEQ ID NO: 71095 - DNA, 201 bp, Homo sapiens
gagggctggtccagaagcgcgggaagaagcagttgggctcgttgaaaaagaagttcaagagtcatcaccgcaaacccaagagcttcagctcctgtaaacarccaggttaataaaagcacatgccgtgaagtttcgagaaagccttcagatatttcccccgctcctgatcaaaccgtgtgtcctctgaatgatcggctgtcc

SEQ ID NO: 71096 - DNA, 201 bp, Homo sapiens
tcgcctccagctcctgcgccttcccctcatcctggccgcgcagctcgtccagccggctctgccgtgcctgcaggcgctccagcagctgccggtagttcctyccggcggcgctggccggggcctgcggacacggacgggcgggctgagctccgggacccctccccgcgccccgcaccccgcaccccgcaccccgcaccccgc

SEQ ID NO: 71097 - DNA, 201 bp, Homo sapiens
atttagatctgtttcccacataaagcaaaaaaatcttagaaattgttttgccagaatcaattggtagatcccacttatcctcccctccctgcaaaggcatyttcccgaatcaggccctagcccacccagggccaggagaaacaggaacacccactaggacggaggcgctgctggtgcagaactggtgctgactgctcacgt

SEQ ID NO: 71098 - DNA, 201 bp, Homo sapiens
ctgtcccccacacccaggaagcagcagggactctgagggactaattctctctggacatggcttctgagtggtcttcagagaagcctagagaagtaacctcrctcactggcatcctgaggggagccccattcaggctgggcaacgctataggatcacactgcatacaacaaacgccattatttattttgatgtgtttccaaa

SEQ ID NO: 71099 - DNA, 201 bp, Homo sapiens
caccagaaaggaccttggaagcacggaggatggggatggcactgatgactttttgacagacaaagaggatgagaaggcaaagcccccaagagagaaggccmctgatgagggcaggagagagacgaccgtgtaccgagggctggtccagaagcgcgggaagaagcagttgggctcgttgaaaaagaagttcaagagtcatca

SEQ ID NO: 71100 - DNA, 201 bp, Homo sapiens
ggaccttggaagcacggaggatggggatggcactgatgactttttgacagacaaagaggatgagaaggcaaagcccccaagagagaaggccactgatgagrgcaggagagagacgaccgtgtaccgagggctggtccagaagcgcgggaagaagcagttgggctcgttgaaaaagaagttcaagagtcatcaccgcaaacc

SEQ ID NO: 71101 - DNA, 201 bp, Homo sapiens
ttatccttgtctcatgacatctgctgccctctaaggcagggctgagggagtctgtcccccacacccaggaagcagcagggactctgagggactaattctcyctggacatggcttctgagtggtcttcagagaagcctagagaagtaacctcgctcactggcatcctgaggggagccccattcaggctgggcaacgctatag

SEQ ID NO: 71102 - DNA, 201 bp, Homo sapiens
cggcgctcacccgtcccagccccgccgcccgcagccccagctgcaacgcagccaccgccgccatcgcacccggccccgcgggcgcttccgggacgcaggargcatctgcatccggggcgccgctgagtcccgcccagagccccgcccccggctccaggttctgcgagcggcttccgccgggctgctccgcgggcgcgtcgg

SEQ ID NO: 71103 - DNA, 201 bp, Homo sapiens
ggcctcctttggtccaccctactttccaccaatcagccaaccaaccttgaccacagagaaaccgtgacttggccaaggtcatttgatgggggctgtcatayggcactaacagggagcgaggtgtggaccaagagacagccctggtgaggttgaaacactgagacaagccagtcttcatgcagtgagcacttgaatgatcac

SEQ ID NO: 71104 - DNA, 201 bp, Homo sapiens
acggaggatggggatggcactgatgactttttgacagacaaagaggatgagaaggcaaagcccccaagagagaaggccactgatgagggcaggagagagaygaccgtgtaccgagggctggtccagaagcgcgggaagaagcagttgggctcgttgaaaaagaagttcaagagtcatcaccgcaaacccaagagcttcagc

SEQ ID NO: 71105 - DNA, 136 bp, Homo sapiens
cctggcgctgctgcatcttctccaccacgccggccrtgcgcttctcccaccggcgctgccgctgcgccctgcgcttctccttgcgcttcagggcctcctgcagcaggcgttcgtcgtcacggatcttcacgccctc

SEQ ID NO: 71106 - DNA, 183 bp, Homo sapiens
cctggcgctgctgcatcttctccaccacgccggccgtgcgcttctcccaccggcgctgccgctgcgccctgcgcttctccttrcgcttcagggcctcctgcagcaggcgttcgtcgtcacggatcttcacgccctccgccttgtagaggaggttggtccacttcatcttcgcctccagctcct

SEQ ID NO: 71107 - DNA, 201 bp, Homo sapiens
gtgacttggccaaggtcatttgatgggggctgtcatacggcactaacagggagcgaggtgtggaccaagagacagccctggtgaggttgaaacactgagayaagccagtcttcatgcagtgagcacttgaatgatcacaggagaagagaacccatgtcctgaagccattgctcgatcttaccaatattcgggggtaaggaa

SEQ ID NO: 71108 - DNA, 201 bp, Homo sapiens
cctcccctccctgcaaaggcatcttcccgaatcaggccctagcccacccagggccaggagaaacaggaacacccactaggacggaggcgctgctggtgcaraactggtgctgactgctcacgtggcctcctttggtccaccctactttccaccaatcagccaaccaaccttgaccacagagaaaccgtgacttggccaagg

SEQ ID NO: 71109 - DNA, 201 bp, Homo sapiens
ggactctgagggactaattctctctggacatggcttctgagtggtcttcagagaagcctagagaagtaacctcgctcactggcatcctgaggggagccccrttcaggctgggcaacgctataggatcacactgcatacaacaaacgccattatttattttgatgtgtttccaaaaatcaaaacgttttcaaacacaactaa

SEQ ID NO: 71110 - DNA, 201 bp, Homo sapiens; identical to SEQ ID NO: 71092

SEQ ID NO: 71111 - DNA, 201 bp, Homo sapiens; identical to SEQ ID NO: 71093

SEQ ID NO: 71112 - DNA, 201 bp, Homo sapiens
ttatcctcccctccctgcaaaggcatcttcccgaatcaggccctagcccacccagggccaggagaaacaggagaagagaacccatgtcctgaagccattgmtcgatcttaccaatattcgggggtaaggaagtaggctaccaggggaatatttgcaaacgcgttgggactagttcggctgtgttaaaaaggtaggtgactt

SEQ ID NO: 71113 - DNA, 201 bp, Homo sapiens; identical to SEQ ID NO: 71095

SEQ ID NO: 71114 - DNA, 201 bp, Homo sapiens
atttagatctgtttcccacataaagcaaaaaaatcttagaaattgttttgccagaatcaattggtagatcccacttatcctcccctccctgcaaaggcatyttcccgaatcaggccctagcccacccagggccaggagaaacaggagaagagaacccatgtcctgaagccattgctcgatcttaccaatattcgggggtaa

SEQ ID NO: 71115 - DNA, 201 bp, Homo sapiens; identical to SEQ ID NO: 71098

SEQ ID NO: 71116 - DNA, 201 bp, Homo sapiens; identical to SEQ ID NO: 71099

SEQ ID NO: 71117 - DNA, 201 bp, Homo sapiens; identical to SEQ ID NO: 71100

SEQ ID NO: 71118 - DNA, 201 bp, Homo sapiens; identical to SEQ ID NO: 71101

SEQ ID NO: 71119 - DNA, 192 bp, Homo sapiens
cccgtcccagccccgccgcccgcagccccagctgcaacgcagccaccgccgccatcgcacccggccccgcgggcgcttccgggacgcaggargcatctgcatccggggcgccgctgagtcccgcccagagccccgcccccggctccaggttctgcgagcggcttccgccgggctgctccgcgggcgcgtcgg

SEQ ID NO: 71120 - DNA, 201 bp, Homo sapiens; identical to SEQ ID NO: 71109

SEQ ID NO: 71121 - DNA, 201 bp, Homo sapiens; identical to SEQ ID NO: 71104

SEQ ID NO: 71122 - DNA, 201 bp, Homo sapiens; identical to SEQ ID NO: 71092

SEQ ID NO: 71123 - DNA, 201 bp, Homo sapiens; identical to SEQ ID NO: 71107

SEQ ID NO: 71124 - DNA, 201 bp, Homo sapiens; identical to SEQ ID NO: 71093

SEQ ID NO: 71125 - DNA, 201 bp, Homo sapiens; identical to SEQ ID NO: 71094

SEQ ID NO: 71126 - DNA, 201 bp, Homo sapiens; identical to SEQ ID NO: 71095

SEQ ID NO: 71127 - DNA, 201 bp, Homo sapiens; identical to SEQ ID NO: 71097

SEQ ID NO: 71128 - DNA, 201 bp, Homo sapiens; identical to SEQ ID NO: 71098

SEQ ID NO: 71129 - DNA, 201 bp, Homo sapiens; identical to SEQ ID NO: 71099

SEQ ID NO: 71130 - DNA, 201 bp, Homo sapiens; identical to SEQ ID NO: 71100

SEQ ID NO: 71131 - DNA, 201 bp, Homo sapiens; identical to SEQ ID NO: 71101

SEQ ID NO: 71132 - DNA, 201 bp, Homo sapiens; identical to SEQ ID NO: 71102

SEQ ID NO: 71133 - DNA, 201 bp, Homo sapiens; identical to SEQ ID NO: 71103

SEQ ID NO: 71134 - DNA, 201 bp, Homo sapiens; identical to SEQ ID NO: 71108

SEQ ID NO: 71135 - DNA, 201 bp, Homo sapiens; identical to SEQ ID NO: 71109

SEQ ID NO: 71136 - DNA, 201 bp, Homo sapiens; identical to SEQ ID NO: 71104

SEQ ID NO: 71137 - DNA, 156 bp, Homo sapiens
gtttgaggctcccctgggaactagagccaggaacagccagtggcactgacaaggggacggagtccaaggcgttattgggccacctgacagctggacagaaraggggcagacacaccgaggatgcgatttaaaataaatgcagatgtttacttggaa

SEQ ID NO: 71138 - DNA, 201 bp, Homo sapiens
gccgtctctgagactactttcagagaagatccttgggctccaggtccagcaggcggagcactgttcaattcaggatgcccaggcagcaatgaggctgtacrtcatggtgaagaaggagtgggagagcatggcccgagacaggcgccccctgctgactgctccagaccactgcagtgacgacgcctagcagtcctgccctgc

SEQ ID NO: 71139 - DNA, 201 bp, Homo sapiens
gacggccatgggcacgcctggccacgctttaccgactgctgaccccctgggccaggtgaggttggggcctgtgggccgccagtccatacggtgctgtcacygcccatcttcggtgacaccctggggtgaggtgctcagcaccttcctctcgaggagccacattttcctcctttgtgttaggggacataacaagctctgctg

SEQ ID NO: 71140 - DNA, 201 bp, Homo sapiens
ttactgtccatgtgtgtttgggcccggatggtcagggtggggagcagggacggccatgggcacgcctggccacgctttaccgactgctgaccccctgggcmaggtgaggttggggcctgtgggccgccagtccatacggtgctgtcactgcccatcttcggtgacaccctggggtgaggtgctcagcaccttcctctcgag

SEQ ID NO: 71141 - DNA, 201 bp, Homo sapiens
tgagaaggtcctccttcctcttgactttgtggtctgaaacctggtcttactgtccatgtgtgtttgggcccggatggtcagggtggggagcagggacggcyatgggcacgcctggccacgctttaccgactgctgaccccctgggccaggtgaggttggggcctgtgggccgccagtccatacggtgctgtcactgcccat

SEQ ID NO: 71142 - DNA, 201 bp, Homo sapiens
attctagtggggcacgctctgcataatgacctaaaggtactatttcttgatcatccaaaaaagaagattcgggacacacagaaatataaacctttcaagartcaagtaaagagtggaaggccgtctctgagactactttcagagaagatccttgggctccaggtccagcaggcggagcactgttcaattcaggatgcccag

SEQ ID NO: 71143 - DNA, 201 bp, Homo sapiens
gtccctgcggtgggtgtgtttcggcctggcctgggcaggcgcttgtgctgccagggcgccgggcccggggaggccggggtctcgggtggccgccggcccakgcgctggacggcagcaggatggggaaggcgaaggtccccgcctccaagcgcgccccgagcagccccgtggctaagccgggtcctgtcaagacgctcactc

SEQ ID NO: 71144 - DNA, 201 bp, Homo sapiens
ccggtttccagccggttgtggagagacgagcgcttccggggactggagcgtgcgtgctgaggtatgcgcaacgcgtgcggggtctcttccggagtcttttmctggacggggtccctgcggtgggtgtgtttcggcctggcctgggcaggcgcttgtgctgccagggcgccgggcccggggaggccggggtctcgggtggcc

SEQ ID NO: 71145 - DNA, 201 bp, Homo sapiens
tactgagaaggtcctccttcctcttgactttgtggtctgaaacctggtcttactgtccatgtgtgtttgggcccggatggtcagggtggggagcagggackgccatgggcacgcctggccacgctttaccgactgctgaccccctgggccaggtgaggttggggcctgtgggccgccagtccatacggtgctgtcactgcc

SEQ ID NO: 71146 - DNA, 201 bp, Homo sapiens
ctgggcttgagggacccagaccaggtgtctgcagtcagctcctgagacacagctggccggcacaacaggtgttacatcaggggtttcctgtggccgtttgractttgagcatttatctaaattaaattggcccagggttggctggtgggtcacccagcagaggcttctccccatagcacgaggatgtgttgcctgggcacg

SEQ ID NO: 71147 - DNA, 201 bp, Homo sapiens
tggtgggcgtgggccctaagggggaggagagcatggccgcccgtgtgtccatcgtgaaccagtatgggaagtgcgtttatgacaagtacgtcaaaccaacygagcccgtgacggactataggacagcggtcagtgggattcggcctgagaacctcaagcagggagaagagcttgaagttgttcagaaggaagtggcagaga

SEQ ID NO: 71148 - DNA, 201 bp, Homo sapiens
gatggtgggcgtgggccctaagggggaggagagcatggccgcccgtgtgtccatcgtgaaccagtatgggaagtgcgtttatgacaagtacgtcaaaccarccgagcccgtgacggactataggacagcggtcagtgggattcggcctgagaacctcaagcagggagaagagcttgaagttgttcagaaggaagtggcaga

SEQ ID NO: 71149 - DNA, 201 bp, Homo sapiens
ttggcccagggttggctggtgggtcacccagcagaggcttctccccatagcacgaggatgtgttgcctgggcacggtgactgcggttattcctggaggtcrgcagacatgccaaccttgggctatttgagctggagaagctatgtgatgctagccggtggctttctgggctaggccccagtttgaggctcccctgggaact

SEQ ID NO: 71150 - DNA, 201 bp, Homo sapiens
aaagagacctcgcctcaagtgaagggagaggagatgccggcaggaaaagaccaggaggccagcaggggctctgttccttcaggttccaagatggacaggarggcgccagtacctcgcaccaaggccagtggaacagagcacaataagaaaggaaccaaggaaaggacaaatggtgatattgttccagaacgaggggacatc

SEQ ID NO: 71151 - DNA, 201 bp, Homo sapiens
ggggttctgcatggctgttagggaacctgaccatctgcagcgcgtctcgttgccaaggatggtctacccccagccaaaggtgctgacaccgtgtaggaagkatgtcctcgtggtgaccccttggctggctcccattgtctgggagggcacattcaacatcgacatcctcaacgagcagttcaggctccagaacaccaccat

SEQ ID NO: 71152 - DNA, 201 bp, Homo sapiens
ggagacggcggagaagcacttcatggtgggccaccgtgtccactactatgtcttcaccgaccagccggccgcggtgccccgcgtgacgctggggaccggtsggcagctgtcagtgctggaggtgcgcgcctacaagcgctggcaggacgtgtccatgcgccgcatggagatgatcagtgacttctgcgagcggcgcttcct

SEQ ID NO: 71153 - DNA, 201 bp, Homo sapiens
ggtgggccaccgtgtccactactatgtcttcaccgaccagccggccgcggtgccccgcgtgacgctggggaccggtcggcagctgtcagtgctggaggtgsgcgcctacaagcgctggcaggacgtgtccatgcgccgcatggagatgatcagtgacttctgcgagcggcgcttcctcagcgaggtggattacctggtgtg

SEQ ID NO: 71154 - DNA, 201 bp, Homo sapiens
tgcgccgcatggagatgatcagtgacttctgcgagcggcgcttcctcagcgaggtggattacctggtgtgcgtggacgtggacatggagttccgcgaccaygtgggcgtggagatcctgactccgctgttcggcaccctgcaccccggcttctacggaagcagccgggaggccttcacctacgagcgccggccccagtccc

SEQ ID NO: 71155 - DNA, 201 bp, Homo sapiens
tcttgtttggttacggggtcctaagccccagaagtctaatgccaggaagcctggaacgggggttctgcatggctgttagggaacctgaccatctgcagcgygtctcgttgccaaggatggtctacccccagccaaaggtgctgacaccgtgtaggaaggatgtcctcgtggtgaccccttggctggctcccattgtctggg

SEQ ID NO: 71156 - DNA, 201 bp, Homo sapiens
gtcttgtttggttacggggtcctaagccccagaagtctaatgccaggaagcctggaacgggggttctgcatggctgttagggaacctgaccatctgcagcrcgtctcgttgccaaggatggtctacccccagccaaaggtgctgacaccgtgtaggaaggatgtcctcgtggtgaccccttggctggctcccattgtctgg

SEQ ID NO: 71157 - DNA, 201 bp, Homo sapiens
tttagcagaacgggtaaactctgtttcctttgtccgtcctgttgtgagtaactgaagcctaggccccgtccccacctcaaatcacacacaccccctccccrccacagagacaccattacatacacagacacacacagaaagacacacacagacacaaaatcacacacacaccctccccgccacagagacaccattacatac

SEQ ID NO: 71158 - DNA, 201 bp, Homo sapiens
ggacgtgtccatgcgccgcatggagatgatcagtgacttctgcgagcggcgcttcctcagcgaggtggattacctggtgtgcgtggacgtggacatggagwtccgcgaccacgtgggcgtggagatcctgactccgctgttcggcaccctgcaccccggcttctacggaagcagccgggaggccttcacctacgagcgccg

SEQ ID NO: 71159 - DNA, 201 bp, Homo sapiens
tgcagcggctcaccagggcctgccaccaggccatgatggtcgaccaggccaacggcatcgaggccgtgtggcacgacgagagccacctgaacaagtacctrctgcgccacaaacccaccaaggtgctctcccccgagtacttgtgggaccagcagctgctgggctggcccgccgtcctgaggaagctgaggttcactgcgg

SEQ ID NO: 71160 - DNA, 201 bp, Homo sapiens
gctttcctgaagctgttcctggagacggcggagaagcacttcatggtgggccaccgtgtccactactatgtcttcaccgaccagccggccgcggtgccccrcgtgacgctggggaccggtcggcagctgtcagtgctggaggtgcgcgcctacaagcgctggcaggacgtgtccatgcgccgcatggagatgatcagtgac

SEQ ID NO: 71161 - DNA, 201 bp, Homo sapiens
tggacgtggacatggagttccgcgaccacgtgggcgtggagatcctgactccgctgttcggcaccctgcaccccggcttctacggaagcagccgggaggcyttcacctacgagcgccggccccagtcccaggcctacatccccaaggacgagggcgatttctactacctgggggggttcttcggggggtcggtgcaagagg

SEQ ID NO: 71162 - DNA, 201 bp, Homo sapiens
agatcctgactccgctgttcggcaccctgcaccccggcttctacggaagcagccgggaggccttcacctacgagcgccggccccagtcccaggcctacatmcccaaggacgagggcgatttctactacctgggggggttcttcggggggtcggtgcaagaggtgcagcggctcaccagggcctgccaccaggccatgatgg

SEQ ID NO: 71163 - DNA, 201 bp, Homo sapiens
tgccaaggatggtctacccccagccaaaggtgctgacaccgtgtaggaaggatgtcctcgtggtgaccccttggctggctcccattgtctgggagggcacrttcaacatcgacatcctcaacgagcagttcaggctccagaacaccaccattgggttaactgtgtttgccatcaagaaatacgtggctttcctgaagctgt

SEQ ID NO: 71164 - DNA, 201 bp, Homo sapiens
aagtctaatgccaggaagcctggaacgggggttctgcatggctgttagggaacctgaccatctgcagcgcgtctcgttgccaaggatggtctacccccagycaaaggtgctgacaccgtgtaggaaggatgtcctcgtggtgaccccttggctggctcccattgtctgggagggcacattcaacatcgacatcctcaacga

SEQ ID NO: 71165 - DNA, 201 bp, Homo sapiens
agccaaaggtgctgacaccgtgtaggaaggatgtcctcgtggtgaccccttggctggctcccattgtctgggagggcacattcaacatcgacatcctcaaygagcagttcaggctccagaacaccaccattgggttaactgtgtttgccatcaagaaatacgtggctttcctgaagctgttcctggagacggcggagaagc

SEQ ID NO: 71166 - DNA, 157 bp, Homo sapiens
agacgcggagccatggccgaggtgttgcggacgctggccggaaaaccaaaatgccaygcacttcgacctatgatccttttcctaataatgcttgtcttggtcttgtttggttacggggtcctaagccccagaagtctaatgccaggaagcctggaac

SEQ ID NO: 71167 - DNA, 201 bp, Homo sapiens
tggcaggacgtgtccatgcgccgcatggagatgatcagtgacttctgcgagcggcgcttcctcagcgaggtggattacctggtgtgcgtggacgtggacakggagttccgcgaccacgtgggcgtggagatcctgactccgctgttcggcaccctgcaccccggcttctacggaagcagccgggaggccttcacctacgag

SEQ ID NO: 71168 - DNA, 201 bp, Homo sapiens
acttctgcgagcggcgcttcctcagcgaggtggattacctggtgtgcgtggacgtggacatggagttccgcgaccacgtgggcgtggagatcctgactccrctgttcggcaccctgcaccccggcttctacggaagcagccgggaggccttcacctacgagcgccggccccagtcccaggcctacatccccaaggacgagg

SEQ ID NO: 71169 - DNA, 201 bp, Homo sapiens
agatgatcagtgacttctgcgagcggcgcttcctcagcgaggtggattacctggtgtgcgtggacgtggacatggagttccgcgaccacgtgggcgtggakatcctgactccgctgttcggcaccctgcaccccggcttctacggaagcagccgggaggccttcacctacgagcgccggccccagtcccaggcctacatcc

SEQ ID NO: 71170 - DNA, 201 bp, Homo sapiens
cctcagcgaggtggattacctggtgtgcgtggacgtggacatggagttccgcgaccacgtgggcgtggagatcctgactccgctgttcggcaccctgcacyccggcttctacggaagcagccgggaggccttcacctacgagcgccggccccagtcccaggcctacatccccaaggacgagggcgatttctactacctggg

SEQ ID NO: 71171 - DNA, 201 bp, Homo sapiens
cggcttctacggaagcagccgggaggccttcacctacgagcgccggccccagtcccaggcctacatccccaaggacgagggcgatttctactacctggggrggttcttcggggggtcggtgcaagaggtgcagcggctcaccagggcctgccaccaggccatgatggtcgaccaggccaacggcatcgaggccgtgtggca

SEQ ID NO: 71172 - DNA, 201 bp, Homo sapiens
caaggacgagggcgatttctactacctgggggggttcttcggggggtcggtgcaagaggtgcagcggctcaccagggcctgccaccaggccatgatggtcraccaggccaacggcatcgaggccgtgtggcacgacgagagccacctgaacaagtacctgctgcgccacaaacccaccaaggtgctctcccccgagtactt

SEQ ID NO: 71173 - DNA, 201 bp, Homo sapiens
ctctcccccgagtacttgtgggaccagcagctgctgggctggcccgccgtcctgaggaagctgaggttcactgcggtgcccaagaaccaccaggcggtccbggaacccgtgagcggctgccaggggctctgggagggctgccggcagccccgtccccctcccgcccttggttttagcagaacgggtaaactctgtttcctt

SEQ ID NO: 71174 - DNA, 201 bp, Homo sapiens
cccgccgtcctgaggaagctgaggttcactgcggtgcccaagaaccaccaggcggtcccggaacccgtgagcggctgccaggggctctgggagggctgccrgcagccccgtccccctcccgcccttggttttagcagaacgggtaaactctgtttcctttgtccgtcctgttgtgagtaactgaagcctaggccccgtccc

SEQ ID NO: 71175 - DNA, 201 bp, Homo sapiens
gcaccccggcttctacggaagcagccgggaggccttcacctacgagcgccggccccagtcccaggcctacatccccaaggacgagggcgatttctactacmtgggggggttcttcggggggtcggtgcaagaggtgcagcggctcaccagggcctgccaccaggccatgatggtcgaccaggccaacggcatcgaggccgt

SEQ ID NO: 71176 - DNA, 201 bp, Homo sapiens
tcctgactccgctgttcggcaccctgcaccccggcttctacggaagcagccgggaggccttcacctacgagcgccggccccagtcccaggcctacatcccyaaggacgagggcgatttctactacctgggggggttcttcggggggtcggtgcaagaggtgcagcggctcaccagggcctgccaccaggccatgatggtcg

SEQ ID NO: 71177 - DNA, 201 bp, Homo sapiens
ggcttctacggaagcagccgggaggccttcacctacgagcgccggccccagtcccaggcctacatccccaaggacgagggcgatttctactacctgggggsgttcttcggggggtcggtgcaagaggtgcagcggctcaccagggcctgccaccaggccatgatggtcgaccaggccaacggcatcgaggccgtgtggcac

SEQ ID NO: 71178 - DNA, 201 bp, Homo sapiens
cttcacctacgagcgccggccccagtcccaggcctacatccccaaggacgagggcgatttctactacctgggggggttcttcggggggtcggtgcaagagrtgcagcggctcaccagggcctgccaccaggccatgatggtcgaccaggccaacggcatcgaggccgtgtggcacgacgagagccacctgaacaagtacct

SEQ ID NO: 71179 - DNA, 201 bp, Homo sapiens
ggccgaggtgttgcggacgctggccggaaaaccaaaatgccacgcacttcgacctatgatccttttcctaataatgcttgtcttggtcttgtttggttacrgggtcctaagccccagaagtctaatgccaggaagcctggaacgggggttctgcatggctgttagggaacctgaccatctgcagcgcgtctcgttgccaag

SEQ ID NO: 71180 - DNA, 201 bp, Homo sapiens
cgaggtgttgcggacgctggccggaaaaccaaaatgccacgcacttcgacctatgatccttttcctaataatgcttgtcttggtcttgtttggttacgggktcctaagccccagaagtctaatgccaggaagcctggaacgggggttctgcatggctgttagggaacctgaccatctgcagcgcgtctcgttgccaaggat

SEQ ID NO: 71181 - DNA, 201 bp, Homo sapiens
cagcgaggtggattacctggtgtgcgtggacgtggacatggagttccgcgaccacgtgggcgtggagatcctgactccgctgttcggcaccctgcaccccrgcttctacggaagcagccgggaggccttcacctacgagcgccggccccagtcccaggcctacatccccaaggacgagggcgatttctactacctgggggg

SEQ ID NO: 71182 - DNA, 201 bp, Homo sapiens
ccccagtcccaggcctacatccccaaggacgagggcgatttctactacctgggggggttcttcggggggtcggtgcaagaggtgcagcggctcaccagggyctgccaccaggccatgatggtcgaccaggccaacggcatcgaggccgtgtggcacgacgagagccacctgaacaagtacctgctgcgccacaaacccacc

SEQ ID NO: 71183 - DNA, 201 bp, Homo sapiens
atcaagaaatacgtggctttcctgaagctgttcctggagacggcggagaagcacttcatggtgggccaccgtgtccactactatgtcttcaccgaccagcyggccgcggtgccccgcgtgacgctggggaccggtcggcagctgtcagtgctggaggtgcgcgcctacaagcgctggcaggacgtgtccatgcgccgcatg

SEQ ID NO: 71184 - DNA, 158 bp, Homo sapiens
agacgcggagccatggccgaggtgttgcggacgctggccggaaaaccaaaatgccacrcacttcgacctatgatccttttcctaataatgcttgtcttggtcttgtttggttacggggtcctaagccccagaagtctaatgccaggaagcctggaacg

SEQ ID NO: 71185 - DNA, 201 bp, Homo sapiens
gaccggtcggcagctgtcagtgctggaggtgcgcgcctacaagcgctggcaggacgtgtccatgcgccgcatggagatgatcagtgacttctgcgagcggygcttcctcagcgaggtggattacctggtgtgcgtggacgtggacatggagttccgcgaccacgtgggcgtggagatcctgactccgctgttcggcaccct

SEQ ID NO: 71186 - DNA, 201 bp, Homo sapiens; identical to SEQ ID NO: 71151

SEQ ID NO: 71187 - DNA, 201 bp, Homo sapiens; identical to SEQ ID NO: 71152

SEQ ID NO: 71188 - DNA, 201 bp, Homo sapiens; identical to SEQ ID NO: 71153

SEQ ID NO: 71189 - DNA, 201 bp, Homo sapiens; identical to SEQ ID NO: 71154

SEQ ID NO: 71190 - DNA, 201 bp, Homo sapiens; identical to SEQ ID NO: 71155

SEQ ID NO: 71191 - DNA, 201 bp, Homo sapiens; identical to SEQ ID NO: 71156

SEQ ID NO: 71192 - DNA, 201 bp, Homo sapiens; identical to SEQ ID NO: 71157

SEQ ID NO: 71193 - DNA, 201 bp, Homo sapiens; identical to SEQ ID NO: 71158

SEQ ID NO: 71194 - DNA, 201 bp, Homo sapiens; identical to SEQ ID NO: 71159

SEQ ID NO: 71195 - DNA, 201 bp, Homo sapiens; identical to SEQ ID NO: 71160

SEQ ID NO: 71196 - DNA, 201 bp, Homo sapiens; identical to SEQ ID NO: 71161

SEQ ID NO: 71197 - DNA, 201 bp, Homo sapiens; identical to SEQ ID NO: 71162

SEQ ID NO: 71198 - DNA, 201 bp, Homo sapiens; identical to SEQ ID NO: 71163

SEQ ID NO: 71199 - DNA, 201 bp, Homo sapiens; identical to SEQ ID NO: 71164

SEQ ID NO: 71200 - DNA, 201 bp, Homo sapiens; identical to SEQ ID NO: 71165

SEQ ID NO: 71201 - DNA, 157 bp, Homo sapiens; identical to SEQ ID NO: 71166

SEQ ID NO: 71202 - DNA, 201 bp, Homo sapiens; identical to SEQ ID NO: 71167

SEQ ID NO: 71203 - DNA, 201 bp, Homo sapiens; identical to SEQ ID NO: 71168

SEQ ID NO: 71204 - DNA, 201 bp, Homo sapiens; identical to SEQ ID NO: 71169

SEQ ID NO: 71205 - DNA, 201 bp, Homo sapiens; identical to SEQ ID NO: 71170

SEQ ID NO: 71206 - DNA, 201 bp, Homo sapiens; identical to SEQ ID NO: 71171

SEQ ID NO: 71207 - DNA, 201 bp, Homo sapiens; identical to SEQ ID NO: 71172

SEQ ID NO: 71208 - DNA, 201 bp, Homo sapiens; identical to SEQ ID NO: 71173

SEQ ID NO: 71209 - DNA, 201 bp, Homo sapiens; identical to SEQ ID NO: 71174

SEQ ID NO: 71210 - DNA, 201 bp, Homo sapiens; identical to SEQ ID NO: 71175

SEQ ID NO: 71211 - DNA, 201 bp, Homo sapiens; identical to SEQ ID NO: 71176

SEQ ID NO: 71212 - DNA, 201 bp, Homo sapiens; identical to SEQ ID NO: 71177

SEQ ID NO: 71213 - DNA, 201 bp, Homo sapiens; identical to SEQ ID NO: 71178

SEQ ID NO: 71214 - DNA, 201 bp, Homo sapiens; identical to SEQ ID NO: 71179

SEQ ID NO: 71215 - DNA, 201 bp, Homo sapiens; identical to SEQ ID NO: 71180

SEQ ID NO: 71216 - DNA, 201 bp, Homo sapiens; identical to SEQ ID NO: 71181

SEQ ID NO: 71217 - DNA, 201 bp, Homo sapiens; identical to SEQ ID NO: 71182

SEQ ID NO: 71218 - DNA, 201 bp, Homo sapiens; identical to SEQ ID NO: 71183

SEQ ID NO: 71219 - DNA, 158 bp, Homo sapiens; identical to SEQ ID NO: 71184

SEQ ID NO: 71220 - DNA, 201 bp, Homo sapiens; identical to SEQ ID NO: 71185

SEQ ID NO: 71221 - DNA, 108 bp, Homo sapiens
tggcctcyccggattctgttaacggtagtggtggcttgttgggatccgttgagtgatgggagagtgtgctctttaacttcggagagagatgcgctctcgtgtagccgt

SEQ ID NO: 71222 - DNA, 201 bp, Homo sapiens
aagaatgtatagatttttatatttgtataataaatattcttctctcctaatttggttgtcttatgttcacttagatttatttctagcccctttgcacttayaaagtggacatttgtggtgcttgctttcattcagtgtttatattttttatgtctttcattgtatcaggaatatgttcagctacaagaaacaaaaatctac

SEQ ID NO: 71223 - DNA, 201 bp, Homo sapiens
gagagggaagcgaggcgctgttagagatctgtcagagaaggcatttcctaagtggaagcaagcagcagcttagccgggattctcttctgagtgggtgccaycccggcttcggacccttgggcgtagagttgcggaagaacctggccgcagaatggtggacctcggtggtggtgttcagggagcaggtattcccggtggacg

SEQ ID NO: 71224 - DNA, 201 bp, Homo sapiens
aggccctttgctacccggggacagtgccttcaggttagtttctgcagaaactctacgcgaaatcttgcaagacaaagagctgagtaaggaacagctagtarcatttcttgagaacgtattaaaaacttctgggaaactacgggagaaccttcttcacggtgccttggaacactatgttaattgcctggatctggtaaacaa

SEQ ID NO: 71225 - DNA, 201 bp, Homo sapiens
gccccacattggaactaagacaggtttgtcaagggctatttaatgagttactagaaaatgggatttctgtgtggcctggttatttggaaactatgcagtcytcattggaacaactttattcgaagtatgatgaaatgagtattctcttcacagttttggttactgaaactactttggagaatggattaatacatctgagaa

SEQ ID NO: 71226 - DNA, 201 bp, Homo sapiens
tttacccaggactctatttatacaaccctgactgacagcctcctttcagcagagtttcaaagaatatgctgaaatacaggaaaacactccccccccccccyttttttttttttttttacattttaggacactgtgaggggaaaggacaattttgaaattccttttcaaggaaaaaaaaggtctttatgctttgccatgagg

SEQ ID NO: 71227 - DNA, 201 bp, Homo sapiens
caagagtgcccagggatcttagcaacatcaattgtgaagagcttggtccattgcctcctggatgggagatccgtaatacggcaacaggcagagtttatttygttgaccataacaacagaacaacacaatttacagatcctcggctgtctgctaacttgcatttagttttaaatcggcagaaccaattgaaagaccaacagc

SEQ ID NO: 71228 - DNA, 201 bp, Homo sapiens
atttacccaggactctatttatacaaccctgactgacagcctcctttcagcagagtttcaaagaatatgctgaaatacaggaaaacactcccccccccccytttttttttttttttttacattttaggacactgtgaggggaaaggacaattttgaaattccttttcaaggaaaaaaaaggtctttatgctttgccatgag

SEQ ID NO: 71229 - DNA, 201 bp, Homo sapiens
acaattggctaaaagaatcatctttaagaaattaagccatttacatgtttgtgtttttctatagcagagcattatattttgcattatatgtttcaacctaktctaagtgggtcttttttacatttttcaagaacggatttcctggaatacagcgatataattttggttgtcaaattcctaatgcaaccatttagtctaaac

SEQ ID NO: 71230 - DNA, 201 bp, Homo sapiens
aggagctcagtgcaaaaatcactttggggcctcattaaccctttagagacaagctttgccccaggctgcggaccagacagatgcttagggaaggttgatamcagcttcagtctctactggattagccctactctttcctttcccctccattatttagtgactctgtaagtaagttaaatacacccttattatttagctgtt

SEQ ID NO: 71231 - DNA, 201 bp, Homo sapiens
gtgtcctgagttctcatctgaaagctttcatatcggttgactgcagatttgatttgtatccactgtcaccagcactgctcacttaggactttctggatccrgacccaggcagcgcacactggactcttgaggaagaaggagactctaattttggattccttggtggaggaaaataaaacactctggtcttgccgccaacga

SEQ ID NO: 71232 - DNA, 201 bp, Homo sapiens
taccaatttgaacagtttaataaactggttctgctctcttctgaatctcatgcctttggcaccttggtaggtgcaggaggagctcagtgcaaaaatcactytggggcctcattaaccctttagagacaagctttgccccaggctgcggaccagacagatgcttagggaaggttgataccagcttcagtctctactggatta

SEQ ID NO: 71233 - DNA, 201 bp, Homo sapiens
agctctttgggaagtcgacagttaaaatggtacagacaccttatggcatagttcccgacgtctatgagaaggagtcccgacacctgatgccttactggggratttagtgccactgaagcctgcgtcagcagcccgagcggggccggcatctgctccccgccgtctgctccctctccactctcttctcaaatggctgacttc

SEQ ID NO: 71234 - DNA, 201 bp, Homo sapiens
gaggagctcagtgcaaaaatcactttggggcctcattaaccctttagagacaagctttgccccaggctgcggaccagacagatgcttagggaaggttgataccagcttcagtctctactggattagccctactctttcctttcccctccattatttagtgactctgtaagtaagttaaatacacccttattatttagctgt

SEQ ID NO: 71235 - DNA, 201 bp, Homo sapiens
ggttgataccagcttcagtctctactggattagccctactctttcctttcccctccattatttagtgactctgtaagtaagttaaatacacccttattatktagctgttaagtaactataatgaaatctgctgcaaaatctctcttggaatccatgtgcccaggattatattagcattatttttaataaatctatatgctt

SEQ ID NO: 71236 - DNA, 201 bp, Homo sapiens
acggggccaccttggtgcactgtgctgcaggggtgagccgctcagccacgctgtgtatcgcgtacctgatgaaattccacaacgtgtgcctgctggaggcrtacaactgggtgaaagcccggcgacctgtcatcaggcccaacgtaggcttctggaggcaactgatagactacgagcgccagctctttgggaagtcgacag

SEQ ID NO: 71237 - DNA, 201 bp, Homo sapiens; identical to SEQ ID NO: 71230

SEQ ID NO: 71238 - DNA, 201 bp, Homo sapiens
gcaggaggacggagccctaaccgcaaccccgcgccgcgccgcgccgatttgatttgtatccactgtcaccagcactgctcacttaggactttctggatccrgacccaggcagcgcacactggactcttgaggaagaaggagactctaattttggattccttggtggaggaaaataaaacactctggtcttgccgccaacga

SEQ ID NO: 71239 - DNA, 201 bp, Homo sapiens; identical to SEQ ID NO: 71232

SEQ ID NO: 71240 - DNA, 201 bp, Homo sapiens; identical to SEQ ID NO: 71233

SEQ ID NO: 71241 - DNA, 201 bp, Homo sapiens; identical to SEQ ID NO: 71234

SEQ ID NO: 71242 - DNA, 201 bp, Homo sapiens; identical to SEQ ID NO: 71235

SEQ ID NO: 71243 - DNA, 201 bp, Homo sapiens; identical to SEQ ID NO: 71236

SEQ ID NO: 71244 - DNA, 147 bp, Homo sapiens
aaatcacatcgaatagttgactgtttaattccttctacattcaaatatctaattaaaatactgtgtgctttgttggaagcatctgctcaaacttttgactkttgtaaatatgcatgcagctgggaagggattcatctaagggataag

SEQ ID NO: 71245 - DNA, 201 bp, Homo sapiens
taatcccaggaaattgcttgaacacaggaggcagaggttgcagcgagctgagatcacgccactgtgctccagcctgggcaacaaagtgagactctgtctcaaaaaaaaaaaaacaaaaaaaaacctttaatgtctggctttgtactttgcagtctgcctgtctaatctgcagtagtcttttgaggaggtggcaccggatat

SEQ ID NO: 71246 - DNA, 201 bp, Homo sapiens
gaagcactatatgaagcatttcatcaataaccctctgtttgcatctaccctgctgaacctgaaacaagcagaggaagcaaaaactgctgacacagccattycatttcactctacagatgaccctccccgacctacctttgactccttgctttctcgggacatggccgggtacatgccagctcgagcagatttcattgagga

SEQ ID NO: 71247 - DNA, 201 bp, Homo sapiens
attagggggtctcggcgagggagtcatcaagctttggtgtatgtgttggccggttctgaagtcttgaagaagctctgctgaggaagaccaaagcagcactmgttgccaattagggaatggaccgtttgggttcctttagcaatgatccctctgataagccaccttgccgaggctgctcctcctacctcatggagccttata

SEQ ID NO: 71248 - DNA, 201 bp, Homo sapiens
ctttggtgtatgtgttggccggttctgaagtcttgaagaagctctgctgaggaagaccaaagcagcactcgttgccaattagggaatggaccgtttgggtycctttagcaatgatccctctgataagccaccttgccgaggctgctcctcctacctcatggagccttatatcaagtgtgctgaatgtgggccacctccttt

SEQ ID NO: 71249 - DNA, 201 bp, Homo sapiens
tcattgaaagccatgcattggaatttgaactccgaagggaaatcaagaggctccaagaatacaggacagcaggcattaccaatttttgtagtgccagaacstacgatcacctcaagaagacacgggaggaagagcgccttaaacgcactatgctctcagaagttctccagtatatccaggacagtagtgcttgccagcagt

SEQ ID NO: 71250 - DNA, 201 bp, Homo sapiens
ggcccttttagaagctgtgatggactgtggctttggaaattggcaggatgtagccaatcaaatgtgcaccaagaccaaggaggagtgtgagaagcactatrtgaagcatttcatcaataaccctctgtttgcatctaccctgctgaacctgaaacaagcagaggaagcaaaaactgctgacacagccattccatttcactc

SEQ ID NO: 71251 - DNA, 201 bp, Homo sapiens
ctatgctctcagaagttctccagtatatccaggacagtagtgcttgccagcagtggctccgccggcaagctgacattgattccggcctgagtccttccatkccaatggcttcgaattcaggtagacggagtgcaccacccttgaacctcactggcctccctggcacagagaagctgaatgaaaaagaaaaggagctctgtc

SEQ ID NO: 71252 - DNA, 201 bp, Homo sapiens
cctcccaggagaattgcttgaacacaggaggcagaggttgcagcgagctgagatcacgccactgtgctccagcctgggcaacaaagtgagactctgtctcaaaaaaaaaaaaacaaaaaaaaacctttaatgtctggctttgtactttgcagtctgcctgtctaatctgcagtagtcttttgaggaggtggcaccggatat

SEQ ID NO: 71253 - DNA, 201 bp, Homo sapiens; identical to SEQ ID NO: 71246

SEQ ID NO: 71254 - DNA, 201 bp, Homo sapiens; identical to SEQ ID NO: 71249

SEQ ID NO: 71255 - DNA, 201 bp, Homo sapiens; identical to SEQ ID NO: 71250

SEQ ID NO: 71256 - DNA, 201 bp, Homo sapiens; identical to SEQ ID NO: 71251

SEQ ID NO: 71257 - DNA, 201 bp, Homo sapiens
cctgaccagcgttgcccatttgaatttcctagcaggccccccaaagtaggtatttcagtaccctgttagagctgaggcgcaggtaaaatgactggcccagkccggtcccaccccgtaaggatttgaacgttggctccacaactcgggagcctgcgcctttcctcctcccaacgtggactcctgcccggcgaagtgcctcac

SEQ ID NO: 71258 - DNA, 201 bp, Homo sapiens
tgagggaattcaaatagaggacttcgattttttaaaaagaatgacgtggaaatgatctgttttccttgtaaaatcatatctcgtagaaaacattttaccaytaccatcacccctagttggttgtgaagtgattgcctcttatccctgaaaggaaactcctgttctgaaaagttgggatgcattagccatcagtgttaggtg

SEQ ID NO: 71259 - DNA, 201 bp, Homo sapiens
aaatcacatcgaatagttgactgtttaattccttctacattcaaatatctaattaaaatactgtgtgctttgttggaagcatctgctcaaacttttgactkttgtaaatatgcatgcagctgggaagggattcatctaagggataagaaatgaaaaagacactctaaggacctgagggaattcaaatagaggacttcgatt

SEQ ID NO: 71260 - DNA, 201 bp, Homo sapiens
gcctcacttccttctcccgggagtcatcaagctttggtgtatgtgttggccggttctgaagtcttgaagaagctctgctgaggaagaccaaagcagcactmgttgccaattagggaatggaccgtttgggttcctttagcaatgatccctctgataagccaccttgccgaggctgctcctcctacctcatggagccttata

SEQ ID NO: 71261 - DNA, 201 bp, Homo sapiens; identical to SEQ ID NO: 71248

SEQ ID NO: 71262 - DNA, 201 bp, Homo sapiens
ggattcatctaagggataagaaatgaaaaagacactctaaggacctgagggaattcaaatagaggacttcgattttttaaaaagaatgacgtggaaatgayctgttttccttgtaaaatcatatctcgtagaaaacattttaccactaccatcacccctagttggttgtgaagtgattgcctcttatccctgaaaggaaac

SEQ ID NO: 71263 - DNA, 147 bp, Homo sapiens; identical to SEQ ID NO: 71244

SEQ ID NO: 71264 - DNA, 201 bp, Homo sapiens; identical to SEQ ID NO: 71245

SEQ ID NO: 71265 - DNA, 201 bp, Homo sapiens; identical to SEQ ID NO: 71246

SEQ ID NO: 71266 - DNA, 201 bp, Homo sapiens; identical to SEQ ID NO: 71260

SEQ ID NO: 71267 - DNA, 201 bp, Homo sapiens; identical to SEQ ID NO: 71248

SEQ ID NO: 71268 - DNA, 201 bp, Homo sapiens; identical to SEQ ID NO: 71249

SEQ ID NO: 71269 - DNA, 201 bp, Homo sapiens; identical to SEQ ID NO: 71250

SEQ ID NO: 71270 - DNA, 201 bp, Homo sapiens; identical to SEQ ID NO: 71251

SEQ ID NO: 71271 - DNA, 201 bp, Homo sapiens; identical to SEQ ID NO: 71257

SEQ ID NO: 71272 - DNA, 201 bp, Homo sapiens; identical to SEQ ID NO: 71246

SEQ ID NO: 71273 - DNA, 201 bp, Homo sapiens; identical to SEQ ID NO: 71249

SEQ ID NO: 71274 - DNA, 201 bp, Homo sapiens; identical to SEQ ID NO: 71250

SEQ ID NO: 71275 - DNA, 201 bp, Homo sapiens; identical to SEQ ID NO: 71251

SEQ ID NO: 71276 - DNA, 201 bp, Homo sapiens; identical to SEQ ID NO: 71258

SEQ ID NO: 71277 - DNA, 201 bp, Homo sapiens; identical to SEQ ID NO: 71259

SEQ ID NO: 71278 - DNA, 201 bp, Homo sapiens; identical to SEQ ID NO: 71248

SEQ ID NO: 71279 - DNA, 201 bp, Homo sapiens; identical to SEQ ID NO: 71247

SEQ ID NO: 71280 - DNA, 201 bp, Homo sapiens; identical to SEQ ID NO: 71262

SEQ ID NO: 71281 - DNA, 201 bp, Homo sapiens
cttgccatgttgtccaggctggtcttgaactcctgacctcacacaatcctcctgccttagcctcctgagtaactgagattacaggcacaagctgctgcacscagctctgtaggtgacttttaaatgattatacaatggaaataacattcattgacatttctgtggtttgaatccagagagatacttcttatagaaaaacaa

SEQ ID NO: 71282 - DNA, 201 bp, Homo sapiens
gaagacaaaagttaaaaacagactttaaaaatactgtcccagaaatgtaattttatgatcccagcatgaatgttattttcatggaatacttgaagtcttayagtcacctgtaccaaacatttgaaatcaactacaagtacatgggactggtgataaatgatcctaaactatcaagtcagtttcaatttgtaggtgcctttt

SEQ ID NO: 71283 - DNA, 201 bp, Homo sapiens
caaataaaggcttcagagccctgattatatcaccaacacgagaacttgccagccagattcacagagagttaataaaaatttctgagggaacaggattcagratacacatgatccacaaagcagcagtggcagccaagaaatttggacctaaatcatctaaaaagtttgatattcttgtgactactccaaatcgactaatct

SEQ ID NO: 71284 - DNA, 201 bp, Homo sapiens
aatcctgcaaatgtaaaaaccaataggcaaagaagaggaacaaaaaggattccaggacaaactgaggtcacatctatgatccttgactttattgtgtctgyttaaagtatctacagtaacctgtatcaacttagtcagtgtattaatactaaatttagctccttcaaagcagttggaactatgtgctacataaatttcagc

SEQ ID NO: 71285 - DNA, 156 bp, Homo sapiens
agaactgtggcgctttctgggtaaagatggacgtccacgatctctttcgccggctsggcgcgggggccaaattcgacacgagacgcttctcggcagacgcagctcgattccagataggaaaaaggaaatatgactttgattcttcggaggtgcttc

SEQ ID NO: 71286 - DNA, 201 bp, Homo sapiens
ggctctggtgaaatgagcaaggactttagagtcaaactggcctggatttgaatcctgatcctcattgcttgtagctgtatgatctggacaaatgacagtarctgtttctaaccttgattttctcatctgtaagatgccaattgtaactcctaaggatactgaggattttttaaaatgcgtgtacagttcctgaccagtggt

SEQ ID NO: 71287 - DNA, 201 bp, Homo sapiens
catgagctcatatatgaaggtattaatgtggatgttattcatgcagagagaacacaacaacagagagataacacagtccacagtttcagagcaggaaaaayctgggttctgatttgtacagccttgctagcaagagggattgattttaaaggtgtgaacttggtgatcaactatgactttccaactagctcagtggaatat

SEQ ID NO: 71288 - DNA, 201 bp, Homo sapiens
ttccggaaagttggagaatctcagaaaagaaaagataaacttcttgcggaataaacacaaaattcacgtccaaggaaccgatcttcctgacccaattgctrcatttcagcaacttgaccaggaatataaaatcaattctcgactacttcagaacattctagatgcaggtttccaaatgcctacgccaatccaaatgcaagc

SEQ ID NO: 71289 - DNA, 178 bp, Homo sapiens
agaactgtggcgctttctgggtaaagatggacgtccacgatctctttcgccggctcggcgcgggggccaaattcgacrcgagacgcttctcggcagacgcagctcgattccagataggaaaaaggaaatatgactttgattcttcggaggtgcttcagggactggacttttttggaaa

SEQ ID NO: 71290 - DNA, 201 bp, Homo sapiens; identical to SEQ ID NO: 71281

SEQ ID NO: 71291 - DNA, 201 bp, Homo sapiens; identical to SEQ ID NO: 71282

SEQ ID NO: 71292 - DNA, 201 bp, Homo sapiens; identical to SEQ ID NO: 71283

SEQ ID NO: 71293 - DNA, 201 bp, Homo sapiens; identical to SEQ ID NO: 71284

SEQ ID NO: 71294 - DNA, 156 bp, Homo sapiens; identical to SEQ ID NO: 71285

SEQ ID NO: 71295 - DNA, 201 bp, Homo sapiens; identical to SEQ ID NO: 71286

SEQ ID NO: 71296 - DNA, 201 bp, Homo sapiens; identical to SEQ ID NO: 71287

SEQ ID NO: 71297 - DNA, 201 bp, Homo sapiens; identical to SEQ ID NO: 71288

SEQ ID NO: 71298 - DNA, 178 bp, Homo sapiens; identical to SEQ ID NO: 71289

SEQ ID NO: 71299 - DNA, 201 bp, Homo sapiens
gtagcattctgtttcaaatgctttttgtttttctgacagtattgttgactgggtcataacattttgagctgtggtttggtggattttcaatttttttttttaaaggtcattcgctgtgctatcttcaaaaccttgagtttggcccccaatttttggcattcaaatgtttaaaagctatttatcttggtttatacaagtttc

SEQ ID NO: 71300 - DNA, 201 bp, Homo sapiens
tacccggtagacccagcacaagggtccttccagaaccaagtgctatggatgccagattggagaggtcagacacctcgccctgctgcatttgctcttgtctrgattaactttgtaatttatggagtattgtgcacaacttcctccacctttcccttggattcaagtgaaaactgttgcattattcctccatcctgtctggaa

SEQ ID NO: 71301 - DNA, 201 bp, Homo sapiens
tcattgctccaggtttgctatttataatcatatttcatcagcctacccaccctccccatctttgctgagctctcagttcccttcaattaaagagatacccrgtagacccagcacaagggtccttccagaaccaagtgctatggatgccagattggagaggtcagacacctcgccctgctgcatttgctcttgtctggatta

SEQ ID NO: 71302 - DNA, 201 bp, Homo sapiens
tcttgcccttgcgcagagccactgtgagaggcggtgggagccaacacccttgggggagggggcagtactgctcggcacatcccagcatcaggtcagatcaytgaaattaaaaaatgtgaattaagttcatatccaccttttggggaagcaggacaaaccaccaccccaccaagtgtgtgacttctccatatcccactgcag

SEQ ID NO: 71303 - DNA, 201 bp, Homo sapiens
acccctctgttgacgtctatgccatgaaaagccatgaaagttcccccaagaaggaggtgtatttcatggccatcattgatatcctcacgccatacgatacmaagaagaaagctgcacatgctgccaaaacggtgaaacacggggcaggggccgagatctcgactgtgaaccctgagcagtactccaaacgcttcaacgagt

SEQ ID NO: 71304 - DNA, 201 bp, Homo sapiens
gatttgggatgagatatggtcagacttgtagataaccccaaagatgtgaagatcgcttgtgaaaccattttgaatgaatagattggtttcctgtggctccytccaaacctggccaagcccagcttccgaagcaggaaccagcactgtctctgtgcctgactcacagcatataggtcaggaaagaatggagacggcattctt

SEQ ID NO: 71305 - DNA, 201 bp, Homo sapiens
tcagctttcctcggttctttggtcctggggaattcgacccctctgttgacgtctatgccatgaaaagccatgaaagttcccccaagaaggaggtgtatttyatggccatcattgatatcctcacgccatacgatacaaagaagaaagctgcacatgctgccaaaacggtgaaacacggggcaggggccgagatctcgactg

SEQ ID NO: 71306 - DNA, 201 bp, Homo sapiens
ggcggggcgtggggcggacggaaccaccggggcggggtgggaggtaacgggacgggcgcgaccatggcgcggtgagggagcgggggtggggatcggtccgsgggaggcctgaggccgctggcttgtgcgctgtctccgccgcccccctctttcgccgccgccgccgccgccccgggcatgtcgtccaactgcaccagcacc

SEQ ID NO: 71307 - DNA, 201 bp, Homo sapiens
tggccccaggaaggggccataggtaggtctgaacaactgccgcaagaccactacatgacttagggaacttgaaaccaactggctcatggagaaaacaaatytgacttgggaaagggattatgtaggaataatgtttggacttgatttccccacgtcataatgaagaatggaagtttggatctgctcctcgtcaggcgcagc

SEQ ID NO: 71308 - DNA, 201 bp, Homo sapiens
tgggagcagagtcgggtttgggagggctttagcaatgagactgcagcctgtgacaccgaaagagactttagctgaagaggagggggatgtgctgtgtgtgyacctgctcacaggatgtaaccccaccttctgcttacccttgattttttctccccatttgacacccaggttaaaaaggggttccctttttggtaccttgta

SEQ ID NO: 71309 - DNA, 201 bp, Homo sapiens
tgcccagccgctttaagtttaaggagtattgccccatggtgttccgaaaccttcgggagaggtttggaattgatgatcaggattaccagaattcagtgacrcgcagcgcccccatcaacagtgacagccagggtcggtgtggcacgcgtttcctcaccacctacgaccggcgctttgtcatcaagactgtgtccagcgagg

SEQ ID NO: 71310 - DNA, 201 bp, Homo sapiens
ctccaagcgcctggagtgctttttagcagagacacctcgttaagctccgggatgaccttgtaggagatctgtctccctgtgcctggagagttacagccagmaaggtgcccccatcttagagtgtggtgtccaaacgtgaggtggcttcctagttacatgaggatgtgatccaggaaatccagtttggaggcttgatgtggg

SEQ ID NO: 71311 - DNA, 201 bp, Homo sapiens
cggctgggctcttggacacctggttctcagagaaccctgtgatgatcacccaagccccaggctgtcttagcccctggagttcagaagtcctctctgtaaakcctgcctcccactaggtcaagaggaactagagtacctttggatttatcaggaccctcatgtttaaatggttatttccctttgggaaaacttcagaaactg

SEQ ID NO: 71312 - DNA, 201 bp, Homo sapiens
tactcaggtgttgggggctagaagggacagtgcgtttaaacaacactcagagctctggccttaaacctgtggccccccaagtctaggagcctcatctcttyctggcagtcatgcgggcaggaggtcctgaaagggaaaacccattcagacaactgttccccaatctaccagccatctgcaggggtcagtgaccgtggccct

SEQ ID NO: 71313 - DNA, 201 bp, Homo sapiens
ctggtctgtggcaggcgccacgagtggcccctgtggctgttctcagtggcagtctcttaagttcccaccacaggcagctctttatcccctctccctacttsactctttctcttgcctgtgcttttggcctcaaacaggcctgctggtagcgctcagggcgtgaggctacactcctgccctgcctttcctgtcttcatggtc

SEQ ID NO: 71314 - DNA, 201 bp, Homo sapiens
acatccacgagctggcccggaagacggaaggctactcgggcgcggacatcagcatcatcgtgcgggactctctcatgcagcccgtgaggaaggtgcagtcrgccacacacttcaaaaaggtctgtggcccctctcgcaccaaccccagcatgatgattgatgacctcctgactccatgctcaccaggggacccaggagcca

SEQ ID NO: 71315 - DNA, 201 bp, Homo sapiens
agatgcagggggtggggaataacaatgatgggactctggttcttggagccacaaacatcccatgggtgttggattcggccatcaggaggaggtttgaaaarcgaatttatatccccttgccggaggaagctgcccgcgcccagatgttccggttgcatctcgggagcactccccacaacctcacggatgcaaacatccacg

SEQ ID NO: 71316 - DNA, 112 bp, Homo sapiens
gggtaaggcagtcaggcgggtgttcaccactgccttttcttcctctgagcgtgagaacactgaacccagccactgcccctgggtccctgtcctggaaatgrtctaataaatc

SEQ ID NO: 71317 - DNA, 201 bp, Homo sapiens
acatccacgagctggcccggaagacggaaggctactcgggcgcggacatcagcatcatcgtgcgggactctctcatgcagcccgtgaggaaggtgcagtcrgccacacacttcaaaaaggtgagtgcccgcggccactgctgagaaaaatctcatagtaagagcgggatgttcggttttttttttcccagctcctggtcct

SEQ ID NO: 71318 - DNA, 201 bp, Homo sapiens; identical to SEQ ID NO: 71315

SEQ ID NO: 71319 - DNA, 161 bp, Homo sapiens
ccggccctgtcctaagtgctgggaagatatgagtgaccaacagacaaaaatcctagaccttccgttgttggtggggagacagtcaacacagtcagtgagtktctcagaggatggagatggagcagggttaggagagaggtgtctcgggcatggagggaagg

SEQ ID NO: 71320 - DNA, 201 bp, Homo sapiens
atgcagcccgtgaggaaggtgcagtcggccacacacttcaaaaaggtgagtgcccgcggccactgctgagaaaaatctcatagtaagagcgggatgttcgkttttttttttcccagctcctggtcctgctccccggctgctcaggtgacacagtctctgaggcctcctggagagccgagggccagtgccatgggggctgca

SEQ ID NO: 71321 - DNA, 201 bp, Homo sapiens; identical to SEQ ID NO: 71314

SEQ ID NO: 71322 - DNA, 201 bp, Homo sapiens; identical to SEQ ID NO: 71315

SEQ ID NO: 71323 - DNA, 136 bp, Homo sapiens
gggtaaggcagtcaggcgggtgttcaccactgccttttcttcctctgagcgtgagaacactgaacccagccactgcccctgggtccctgtcctggaaatgrtctaataaatccttttcccttcttgagctacccaa

SEQ ID NO: 71324 - DNA, 201 bp, Homo sapiens
ggctggccttggcgcccccttcccctacccagagcgcaggcaggcaggggggtcccgccgcgccccttcagcatatgccggtgcagctgacgacagccctkcgtgtggtgggcaccagcctgtttgccctggcagtgctgggtggcatcctggcagcctatgtgacgggctaccagttcatccacacggaaaagcactacc

SEQ ID NO: 71325 - DNA, 201 bp, Homo sapiens
aaatcaaaaacaggcaggtacaggtagtgggctcacaacgtttgacctcgactggtttttctaagttattttgtacatttttcagcagcaaaaccaaacttggtcttcagctttatccccgtttcttgcaagggaagagcctttatacaattggacgcattttggtttttcctcattgagaattcaaatcctcttttgtat

SEQ ID NO: 71326 - DNA, 201 bp, Homo sapiens
ccgaaaaaccattgtggtgaacttcattggcctcattcctgtgtccatctgggtggcagttctcctgggagggctggcctacacagcttattgccaggacrtgttcagtgagacagagctagccttccttgtctctggggctatactgtatggctgctactgggtggccctcctcatgctatatctggccatcatcgcccg

SEQ ID NO: 71327 - DNA, 201 bp, Homo sapiens
caaatcaaaaacaggcaggtacaggtagtgggctcacaacgtttgacctcgactggtttttctaagttattttgtacatttttcagcagcaaaaccaaactgggtcttcagctttatccccgtttcttgcaagggaagagcctttatacaattggacgcattttggtttttcctcattgagaattcaaatcctcttttgta

SEQ ID NO: 71328 - DNA, 201 bp, Homo sapiens
tcaaatcaaaaacaggcaggtacaggtagtgggctcacaacgtttgacctcgactggtttttctaagttattttgtacatttttcagcagcaaaaccaaattgggtcttcagctttatccccgtttcttgcaagggaagagcctttatacaattggacgcattttggtttttcctcattgagaattcaaatcctcttttgt

SEQ ID NO: 71329 - DNA, 201 bp, Homo sapiens; identical to SEQ ID NO: 71324

SEQ ID NO: 71330 - DNA, 201 bp, Homo sapiens
caatcagcgccccggactgcaccagagccatggtcggcagaagagcactgatcgtactggctcactcagagaggacgtccttcaactatgccatgaaggargctgctgcagcggctttgaagaagaaaggatgggaggtggtggagtcggacctctatgccatgaacttcaatcccatcatttccagaaaggacatcacag

SEQ ID NO: 71331 - DNA, 201 bp, Homo sapiens
ccttagcctggatttccttctaacatgttatcaaatctgggtatctttccaggcttccctgacttgctttagtttttaagatttgtgtttttctttttccmcaaggaataaatgagagggaatcgactgtattcgtgcatttttggatcatttttaactgattcttatgattactatcatggcatataaccaaaatccgac

SEQ ID NO: 71332 - DNA, 201 bp, Homo sapiens
ttatcaaatctgggtatctttccaggcttccctgacttgctttagtttttaagatttgtgtttttctttttccacaaggaataaatgagagggaatcgacygtattcgtgcatttttggatcatttttaactgattcttatgattactatcatggcatataaccaaaatccgactgggctcaagaggccacttagggaaag

SEQ ID NO: 71333 - DNA, 201 bp, Homo sapiens
ctccatgtactctctgcaagggatccacggggacatgaatgtcattctctggccaattcagagtggcattctgcatttctgtggcttccaagtcttagaayctcaactgacatatagcattgggcacactccagcagacgcccgaattcaaatcctggaaggatggaagaaacgcctggagaatatttgggatgagacacc

SEQ ID NO: 71334 - DNA, 190 bp, Homo sapiens
gtcacacacacccctacaatcccctcccccagccccgagagacttttcttgacttccaccagttgctccggcgggtgagagtggagaggsccctccttcatcccccaggctccctcccttcctggagctgcagcctcagcatcctccgcccagcaccccaggattcaggcgttgggtcccgcccttgtag

SEQ ID NO: 71335 - DNA, 201 bp, Homo sapiens
caatacttaaaaatagtcttccacaaaaaatactttatttctgatctatacaaattttcagaaggttattttctttatcattgctaaactgatgacttacyatgggatggggtccagtcccatgaccttggggtacaattgtaaacctagagttttatcaactttggtgaacagttttggcataatagtcaatttctactt

SEQ ID NO: 71336 - DNA, 201 bp, Homo sapiens
agaaatttggcctttctgtgggccatcacttgggcaagtccatcccaactgacaaccagatcaaagctagaaaatgagattccttagcctggatttccttytaacatgttatcaaatctgggtatctttccaggcttccctgacttgctttagtttttaagatttgtgtttttctttttccacaaggaataaatgagaggg

SEQ ID NO: 71337 - DNA, 201 bp, Homo sapiens
gattcttaatgaaaaaagaggtacaggatgaggagaaaaacaagaaatttggcctttctgtgggccatcacttgggcaagtccatcccaactgacaaccasatcaaagctagaaaatgagattccttagcctggatttccttctaacatgttatcaaatctgggtatctttccaggcttccctgacttgctttagttttta

SEQ ID NO: 71338 - DNA, 201 bp, Homo sapiens
gtggtttggagtccctgccattctgaaaggctggtttgagcgagtgttcataggagagtttgcttacacttacgctgccatgtatgacaaaggacccttcyggagtaagaaggcagtgctttccatcaccactggtggcagtggctccatgtactctctgcaagggatccacggggacatgaatgtcattctctggccaat

SEQ ID NO: 71339 - DNA, 201 bp, Homo sapiens
ttgtaaacctagagttttatcaactttggtgaacagttttggcataatagtcaatttctacttctggaagtcatctcattccactgttggtattatataawtcaaggagaatatgataaaacactgccctcttgtggtgcattgaaagaagagatgagaaatgatgaaaaggttgcctgaaaaatgggagacagcctctta

SEQ ID NO: 71340 - DNA, 201 bp, Homo sapiens
cagccaatcagcgccccggactgcaccagagccatggcagaagagcactgatcgtactggctcactcagagaggacgtccttcaactatgccatgaaggargctgctgcagcggctttgaagaagaaaggatgggaggtggtggagtcggacctctatgccatgaacttcaatcccatcatttccagaaaggacatcacag

SEQ ID NO: 71341 - DNA, 201 bp, Homo sapiens; identical to SEQ ID NO: 71331

SEQ ID NO: 71342 - DNA, 201 bp, Homo sapiens; identical to SEQ ID NO: 71332

SEQ ID NO: 71343 - DNA, 201 bp, Homo sapiens; identical to SEQ ID NO: 71333

SEQ ID NO: 71344 - DNA, 201 bp, Homo sapiens; identical to SEQ ID NO: 71335

SEQ ID NO: 71345 - DNA, 201 bp, Homo sapiens; identical to SEQ ID NO: 71336

SEQ ID NO: 71346 - DNA, 201 bp, Homo sapiens; identical to SEQ ID NO: 71337

SEQ ID NO: 71347 - DNA, 201 bp, Homo sapiens; identical to SEQ ID NO: 71338

SEQ ID NO: 71348 - DNA, 201 bp, Homo sapiens; identical to SEQ ID NO: 71339

SEQ ID NO: 71349 - DNA, 201 bp, Homo sapiens
cagatgtgtgttcattgagaagtaggttactagaattatgttactgtgtcttattggttcaatgatgatttctctggcatattagacttttattttttccyccatggaagcacttgaggaaataaatagtacactggctgttttctgccagcaactgtggtgatttttctccctgtcctttgagaattgctagtctgcttc

SEQ ID NO: 71350 - DNA, 201 bp, Homo sapiens
taggacactcttctgatgccagagaaatgctaaagcagtactacattggtgatatccatccgagtgaccttaaacctgaaagtggtagcaaggacccttcmaaaaatgatacatgcaaaagttgctgggcatattggattttacccatcataggcgctgttctcttaggtttcctgtaccgctactacacatcggaaagca

SEQ ID NO: 71351 - DNA, 201 bp, Homo sapiens
ttaaccttgtacttgcacacttggatatatttgggagtaattttaggagatttctggctgacttttattatcagggatatgggtttagtaaagcttttatytttagaaaaatgtttgtatgcattataagatgctacttttaagacaatattgaaaaaaactttggttattatttaacaaaagtggtatgacttgatgctt

SEQ ID NO: 71352 - DNA, 201 bp, Homo sapiens
ctcttcactggtttccatgagtacccttatatttcacaactttctgttcataagttatagtgacattgctctttggtaaaaatgcctgctttccaatactttgattgcatattagacattcttaacagggcggcagtctagtgttgaaagttttatttttccatttttcttttaagtaaattttttttaaaaaattctgat

SEQ ID NO: 71353 - DNA, 201 bp, Homo sapiens
tcttcactggtttccatgagtacccttatatttcacaactttctgttcataagttatagtgacattgctctttggtaaaaatgcctgctttccaatactttgattgcatattagacattcttaacagggcggcagtctagtgttgaaagttttatttttccatttttcttttaagtaaattttttttaaaaaattctgatt

SEQ ID NO: 71354 - DNA, 201 bp, Homo sapiens
ttaagtaaaattggtgtttttgttatttttaaggtaaatgccaatgcaaaaggtatgtttttctacttcacattggttttcttttcctgtttacatctgcwcttgttttttgctgagagccagaggaaaagataattagactttgtctcttccacccatgaaatcccccagtacccagggcttcttctgaactactgccga

SEQ ID NO: 71355 - DNA, 201 bp, Homo sapiens
cttcactggtttccatgagtacccttatatttcacaactttctgttcataagttatagtgacattgctctttggtaaaaatgcctgctttccaatactttgattgcatattagacattcttaacagggcggcagtctagtgttgaaagttttatttttccatttttcttttaagtaaattttttttaaaaaattctgattt

SEQ ID NO: 71356 - DNA, 201 bp, Homo sapiens
ttcactggtttccatgagtacccttatatttcacaactttctgttcataagttatagtgacattgctctttggtaaaaatgcctgctttccaatactttgattgcatattagacattcttaacagggcggcagtctagtgttgaaagttttatttttccatttttcttttaagtaaattttttttaaaaaattctgattta

SEQ ID NO: 71357 - DNA, 201 bp, Homo sapiens
gaattatgttactgtgtcttattggttcaatgatgatttctctggcatattagacttttattttttcccccatggaagcacttgaggaaataaatagtacmctggctgttttctgccagcaactgtggtgatttttctccctgtcctttgagaattgctagtctgcttctgagccattgtcatatccagcagggagcagct

SEQ ID NO: 71358 - DNA, 201 bp, Homo sapiens
tcaaactaaagccaagcctgaagataacttgaatcagttgtaaaagtgtgttggcaatgtccgaaattgaatgaaaaacatctggcttataagaaatgttwaagaactaccatcttaagtaaaattggtgtttttgttatttttaaggtaaatgccaatgcaaaaggtatgtttttctacttcacattggttttcttttcc

SEQ ID NO: 71359 - DNA, 201 bp, Homo sapiens
aagttagaaagtgcatccactttggggcgaaaactagagacttgcttgggggctgcagaagtgccctctcctcgaatcctgccagttgcattcttcccccytggagccaagacgattggccagacatcacctcagatctgagaccagcgtcttccatctctcagagccttactcccaaagtacctgctcactgttccgtgt

SEQ ID NO: 71360 - DNA, 201 bp, Homo sapiens
gaatgaaaaacatctggcttataagaaatgttaaagaactaccatcttaagtaaaattggtgtttttgttatttttaaggtaaatgccaatgcaaaaggtwtgtttttctacttcacattggttttcttttcctgtttacatctgcacttgttttttgctgagagccagaggaaaagataattagactttgtctcttccac

SEQ ID NO: 71361 - DNA, 201 bp, Homo sapiens
ctgatgccagagaaatgctaaagcagtactacattggtgatatccatccgagtgaccttaaacctgaaagtggtagcaaggacccttcaaaaaatgatacrtgcaaaagttgctgggcatattggattttacccatcataggcgctgttctcttaggtttcctgtaccgctactacacatcggaaagcaaatcctcctgag

SEQ ID NO: 71362 - DNA, 201 bp, Homo sapiens; identical to SEQ ID NO: 71350

SEQ ID NO: 71363 - DNA, 201 bp, Homo sapiens; identical to SEQ ID NO: 71352

SEQ ID NO: 71364 - DNA, 201 bp, Homo sapiens; identical to SEQ ID NO: 71353

SEQ ID NO: 71365 - DNA, 201 bp, Homo sapiens; identical to SEQ ID NO: 71355

SEQ ID NO: 71366 - DNA, 166 bp, Homo sapiens
taacagggcggcagtctagtgttgaaagttttatttttccatttttcttttaagtaaattttttttaaaaaattctgatttagggctggtcttgaactccyggcctcaagtgatccacccgccttggcctcccaaagtgctgagattacaggcgtgagccaccgcc

SEQ ID NO: 71367 - DNA, 201 bp, Homo sapiens; identical to SEQ ID NO: 71356

SEQ ID NO: 71368 - DNA, 201 bp, Homo sapiens; identical to SEQ ID NO: 71359

SEQ ID NO: 71369 - DNA, 201 bp, Homo sapiens; identical to SEQ ID NO: 71361

SEQ ID NO: 71370 - DNA, 201 bp, Homo sapiens
tggtcctgatgggatggagcctggagacgtcattgagagtaactggaatgaggttgacgacagctttgatgacatgaacctctcagagtccctcctccatrgcatgtacatctacagttctgagaagccctctgtcatccagcagaaggtggactggctcactgcgaagatgcatgctcgagatttcaccgtctctgccat

SEQ ID NO: 71371 - DNA, 190 bp, Homo sapiens
gaaaagcaaggaagggagccctctggggccgtagcggtcaggagggatggagaattggaattcaacacgtagtgtccttgggttctcatggaaagtcttcygtccctttgacttttgaaaatacagttaccaacccgccactgctaaatttgaactggcttaaaaataataaaaatactaaaaaatacaa

SEQ ID NO: 71372 - DNA, 201 bp, Homo sapiens
tggaggagttgcaggccgcctccgtgcacagtgatgagagggagctgctccagctgctgtccaccccgcacctgagggctgtgctcatggtacatgacacrgttgcccagaagaattttgaccccgttctcccgcctctgcctgacaatatcgatgaggattttgatgaggaatcggtgaagatcgtccgcttggtgaaga

SEQ ID NO: 71373 - DNA, 201 bp, Homo sapiens
tgtccaccccgcacctgagggctgtgctcatggtacatgacacggttgcccagaagaattttgaccccgttctcccgcctctgcctgacaatatcgatgargattttgatgaggaatcggtgaagatcgtccgcttggtgaagaacaaggaacccctgggtgccaccatccggcgggacgagcactcaggggctgttgtgg

SEQ ID NO: 71374 - DNA, 201 bp, Homo sapiens
gggctacctcaaagggcactatgtggctggtcttcggaggagcttccggctgggctgtagggagagactgggtggctcgcaggaaggaaagatgtcctccrgagctgagtctccggagctgctgacttacgaagaggtggccaggtaccaacaccagcccggagagcggccccgcctggtggttctgatcgggtctctggg

SEQ ID NO: 71375 - DNA, 201 bp, Homo sapiens; identical to SEQ ID NO: 71372

SEQ ID NO: 71376 - DNA, 201 bp, Homo sapiens; identical to SEQ ID NO: 71373

SEQ ID NO: 71377 - DNA, 201 bp, Homo sapiens
cgtgctggtgaaggaggatctccagggtgcctacagccagctcaaagtggtcttagagaagctgagcaaggacactcactgggtacctgttagttgggtcrggtaactttatcccagaacatccaagctggacgggaccttgaagatcatctagtccagactccctcattttaccatcaaggaatctcaagcgcagagagg

SEQ ID NO: 71378 - DNA, 201 bp, Homo sapiens
cggagctgctgacttacgaagaggtggccaggtaccaacaccagcccggagagcggccccgcctggtggttctgatcgggtctctgggagcccgactgcaygagctgaagcaaaaggtggtggctgagaacccacagcactttggcgtcgctgttccacataccaccaggccccgaaagagccatgagaaggaaggagtgg

SEQ ID NO: 71379 - DNA, 201 bp, Homo sapiens; identical to SEQ ID NO: 71374

SEQ ID NO: 71380 - DNA, 201 bp, Homo sapiens; identical to SEQ ID NO: 71372

SEQ ID NO: 71381 - DNA, 201 bp, Homo sapiens; identical to SEQ ID NO: 71373

SEQ ID NO: 71382 - DNA, 201 bp, Homo sapiens; identical to SEQ ID NO: 71377

SEQ ID NO: 71383 - DNA, 201 bp, Homo sapiens; identical to SEQ ID NO: 71378

SEQ ID NO: 71384 - DNA, 201 bp, Homo sapiens; identical to SEQ ID NO: 71374

SEQ ID NO: 71385 - DNA, 201 bp, Homo sapiens; identical to SEQ ID NO: 71372

SEQ ID NO: 71386 - DNA, 201 bp, Homo sapiens; identical to SEQ ID NO: 71373

SEQ ID NO: 71387 - DNA, 201 bp, Homo sapiens; identical to SEQ ID NO: 71377

SEQ ID NO: 71388 - DNA, 201 bp, Homo sapiens; identical to SEQ ID NO: 71378

SEQ ID NO: 71389 - DNA, 201 bp, Homo sapiens
gctgacctggctggtgttttttggcatctactcgaccatctggcccaccattcccattgctccagatatgagaggacaggcaactatggtcctgagctccrcacacttctggttgggattatttctggttcctactgcctgtttgattgaagatgtggcatggagagcagccaagcacacctgcaaaaagacattgctgga

SEQ ID NO: 71390 - DNA, 153 bp, Homo sapiens
cccccgccgtccccgcgcggtcgcccaccccggcccgacaagcagcttgggcrtccagcccggcccggtccctgcagggagggagcgcaggagctgggggcggctctcccggggcggggctcgctccacaagcgccaggggccgcgcggggcg

SEQ ID NO: 71391 - DNA, 201 bp, Homo sapiens
tgaatgtgagcacctggagcccttactaaacaacctgcctggagccctgttctctgctctggttgccaaaccagatttttggatggcctaaatacttgtgrgcaactgttactggtgaaaaatgggagtggagagcatgttttggattttcactgtggggaaatgaatgaatttatcacatgactgtgcagcgaaggagca

SEQ ID NO: 71392 - DNA, 201 bp, Homo sapiens
cctgtctgctgtcacatctgtgcctggattgcttaaatattgtttgtgatggggaggttttaatctggtgatgcagagggaagcagggctgtgggggcacrtttaattggctcccagcagcgtggggggtgcttctatggtgtgtggggttttttgttgcctccctctagaagtgttaccgttttcacgtcctattaatgt

SEQ ID NO: 71393 - DNA, 201 bp, Homo sapiens
gtgtcacacacaacccctcccctggggcagggtggactggactaggttgcatacgctggctgtcagctcagcaaaaatgccacatggggcttgtcactccrccagacactcactgactcacgggctggcaggtcacgctcggttagcgctccagggcctgactctggattgagctaaactggcagaatccactcaggccaa

SEQ ID NO: 71394 - DNA, 201 bp, Homo sapiens
agaatccactcaggccaacccttggtctactgctgtgtacagacagcccagtcctgtgttgagtctctcttctcctggatgaccctgcaaaaggaagagascagttgtactgtgggcttagttctgggtttccactgcacactgacacgtgccagcaagggtagctgtggaaaacacgtatcaggagagcagagtagtctg

SEQ ID NO: 71395 - DNA, 201 bp, Homo sapiens
attgcttaaatattgtttgtgatggggaggttttaatctggtgatgcagagggaagcagggctgtgggggcacgtttaattggctcccagcagcgtggggrgtgcttctatggtgtgtggggttttttgttgcctccctctagaagtgttaccgttttcacgtcctattaatgtcctctggttgttaaattacagcagcac

SEQ ID NO: 71396 - DNA, 201 bp, Homo sapiens
aagctgctttggtgaaaggagctaaaaagctgggctttgtcttcacagccagaacaccattctcagtcatcatagaagcgatgggacaggaacaaacattyggaatccttaatgtcctggaattttctagtgacagaaaaagaatgtctgtaattgttcgaactccttcaggacgacttcggctttactgtaaaggggctg

SEQ ID NO: 71397 - DNA, 201 bp, Homo sapiens
tttgtcaaacagttagctctgtcttgaacttgaagccttccaaatcagaattatgtatttaagtgtgtgtttgtgtttgtttggggtttttgtttcttacrttagagttcatattttctgggatttaaggatacaggtgtattttcctattctcttgagaagtagactaaacaatatttgcagtgatgacagacgcacaca

SEQ ID NO: 71398 - DNA, 201 bp, Homo sapiens
gtctgttgtattcttaagagatagcctgatatgtggtttataggtgaatcaataaacaccaacaacaacaaaaaaaaaaaaaaaaaaaaaggaagaaaagmaaaaaaggaaaccagccctgtcatggaatttctctccttccctgcacagtaaagacttttgggttttcatggataaaatcaatgtcagtactgaaactcc

SEQ ID NO: 71399 - DNA, 201 bp, Homo sapiens
gggtatgctttttctcaagaagaacacggagctgttagtcaggaagaagtcatccgtgcttatgacaccaccaaaaagaaatccaggaagaaataagacaygaattttcctgactgatcttaggaaagagattcagtttgttgcacccagtgttaacacatctttgtcagagaagactggcgtcagcagccaaaacaccag

SEQ ID NO: 71400 - DNA, 201 bp, Homo sapiens
tgcagacttcactgtaggcaggttgctctcctgctttgattcctgttttgtgtgtaaaattggcataaacttcttgattgcagtgaaatcacaaaattctmtatcggggtggtcaacctgagaacatttattggaacctcttagccacatttccagcagggcaaaccaactgatgccctggaagagtcttccgcaccctct

SEQ ID NO: 71401 - DNA, 201 bp, Homo sapiens
gctttgattcctgttttgtgtgtaaaattggcataaacttcttgattgcagtgaaatcacaaaattctctatcggggtggtcaacctgagaacatttattkgaacctcttagccacatttccagcagggcaaaccaactgatgccctggaagagtcttccgcaccctctccaggtgcactcggcccagtcctgccgccgtg

SEQ ID NO: 71402 - DNA, 201 bp, Homo sapiens
ggtgcactcggcccagtcctgccgccgtgtccaggcgcccctcacccccacacctgctgcatggctggccacaccactcagtgcatggcggccgatgggcmgccaacccaaacccgcgcctttccttgttccactgcagactcagatacagatgcgaaaaattccttcttccaccgcccttctcgttctgtaaagaaagaa

SEQ ID NO: 71403 - DNA, 201 bp, Homo sapiens
tactgacatggtttcctttctgtatcccatcagtgttagacacaggtacctatcagaatacggcatatcctgaattatctaagacaaggaagtgaagagcrgaatcactgactttcccaactgcagagtcccacacttaaatctcaacagaacctagatgtcttcaggcatgaatgtgagcacctggagcccttactaaac

SEQ ID NO: 71404 - DNA, 201 bp, Homo sapiens
accacagaagtcctcagaaggagaaggaaggacacggagacactgagaggaggacacagaggaatcgccaccagatctttgcagtagaaactctgaaatargccttgagacccagacaattgtcatgatcagcccagtgtgtatgagagcttaaacaagaccttcacacacagttctaattgaaaagaattccaaacattt

SEQ ID NO: 71405 - DNA, 201 bp, Homo sapiens
ctgtgaggtgtgaaattaaaaacattatgtttcaccaatatttaaacatcagtactagttgtcctgggagaaagggaaaggagttttatgttgcgtgagaggcccatcctgtgtaattggagcagggcacacttgcttcctgttgagttaactcagaggttaagtccaacgggccacatgcagacttcactgtaggcaggt

SEQ ID NO: 71406 - DNA, 201 bp, Homo sapiens
ggtttctttgcacacccagaaaggtgatggccaagatacagaggagaaacgaaaactggaattgaatgtgcattaggcatcttaactattcatattttgtytcatttgggaactaagcctatttggaaagagtggattagaaattgaattctttgtcaaacagttagctctgtcttgaacttgaagccttccaaatcagaa

SEQ ID NO: 71407 - DNA, 201 bp, Homo sapiens
ggcccttatcctattgaaggaggactctttggatgccacaagggcagccattactcagcactgcactgaccttgggaatttgctgggcaaggaaaatgacrtggccctcatcatcgatggccacaccctgaagtacgcgctctccttcgaagtccggaggagtttcctggatttggcactctcgtgcaaagcggtcatatg

SEQ ID NO: 71408 - DNA, 201 bp, Homo sapiens
gtcatgctaccgactatttatttgttggaaatattgtttacacatatgttgttgttactgtttgtctgaaagctggtttggagaccacagcttggactaarttcagtcatctggctgtctggggaagcatgctgacctggctggtgttttttggcatctactcgaccatctggcccaccattcccattgctccagatatga

SEQ ID NO: 71409 - DNA, 201 bp, Homo sapiens
gaaaagcagaggagagttatctgagaaatactcagtgggtctttggcatagttgtttatactggacacgacaccaaactcatgcagaattcaaccaaagcrcctctcaagagatcaaatgttgagaaggtgactaacgtgcagatcctggtgttgtttggcatcctcttggtcatggccttggtgagctcggcgggggccc

SEQ ID NO: 71410 - DNA, 201 bp, Homo sapiens
tcctattgaaggaggactctttggatgccacaagggcagccattactcagcactgcactgaccttgggaatttgctgggcaaggaaaatgacgtggccctsatcatcgatggccacaccctgaagtacgcgctctccttcgaagtccggaggagtttcctggatttggcactctcgtgcaaagcggtcatatgctgcagag

SEQ ID NO: 71411 - DNA, 201 bp, Homo sapiens
ctttggatgccacaagggcagccattactcagcactgcactgaccttgggaatttgctgggcaaggaaaatgacgtggccctcatcatcgatggccacacmctgaagtacgcgctctccttcgaagtccggaggagtttcctggatttggcactctcgtgcaaagcggtcatatgctgcagagtgtctcctctgcagaagt

SEQ ID NO: 71412 - DNA, 201 bp, Homo sapiens; identical to SEQ ID NO: 71401

SEQ ID NO: 71413 - DNA, 201 bp, Homo sapiens; identical to SEQ ID NO: 71402

SEQ ID NO: 71414 - DNA, 129 bp, Homo sapiens
agggaaaggagttttatgttgcgtgagaggcccatcctgtgtaattggagcagggcacacttgcttcctgttgagttaactcagaggttaagtccaacgggccacatgcagacttcactgtaggcaggt

SEQ ID NO: 71415 - DNA, 201 bp, Homo sapiens; identical to SEQ ID NO: 71400

SEQ ID NO: 71416 - DNA, 201 bp, Homo sapiens; identical to SEQ ID NO: 71389

SEQ ID NO: 71417 - DNA, 201 bp, Homo sapiens; identical to SEQ ID NO: 71391

SEQ ID NO: 71418 - DNA, 201 bp, Homo sapiens; identical to SEQ ID NO: 71392

SEQ ID NO: 71419 - DNA, 201 bp, Homo sapiens; identical to SEQ ID NO: 71393

SEQ ID NO: 71420 - DNA, 201 bp, Homo sapiens; identical to SEQ ID NO: 71394

SEQ ID NO: 71421 - DNA, 201 bp, Homo sapiens; identical to SEQ ID NO: 71395

SEQ ID NO: 71422 - DNA, 201 bp, Homo sapiens; identical to SEQ ID NO: 71397

SEQ ID NO: 71423 - DNA, 201 bp, Homo sapiens; identical to SEQ ID NO: 71399

SEQ ID NO: 71424 - DNA, 201 bp, Homo sapiens; identical to SEQ ID NO: 71398

SEQ ID NO: 71425 - DNA, 201 bp, Homo sapiens; identical to SEQ ID NO: 71400

SEQ ID NO: 71426 - DNA, 201 bp, Homo sapiens; identical to SEQ ID NO: 71401

SEQ ID NO: 71427 - DNA, 201 bp, Homo sapiens; identical to SEQ ID NO: 71402

SEQ ID NO: 71428 - DNA, 201 bp, Homo sapiens; identical to SEQ ID NO: 71403

SEQ ID NO: 71429 - DNA, 201 bp, Homo sapiens; identical to SEQ ID NO: 71405

SEQ ID NO: 71430 - DNA, 201 bp, Homo sapiens; identical to SEQ ID NO: 71404

SEQ ID NO: 71431 - DNA, 201 bp, Homo sapiens; identical to SEQ ID NO: 71406

SEQ ID NO: 71432 - DNA, 201 bp, Homo sapiens; identical to SEQ ID NO: 71407

SEQ ID NO: 71433 - DNA, 201 bp, Homo sapiens; identical to SEQ ID NO: 71408

SEQ ID NO: 71434 - DNA, 201 bp, Homo sapiens; identical to SEQ ID NO: 71410

SEQ ID NO: 71435 - DNA, 201 bp, Homo sapiens; identical to SEQ ID NO: 71411

SEQ ID NO: 71436 - DNA, 201 bp, Homo sapiens; identical to SEQ ID NO: 71389

SEQ ID NO: 71437 - DNA, 153 bp, Homo sapiens; identical to SEQ ID NO: 71390

SEQ ID NO: 71438 - DNA, 201 bp, Homo sapiens; identical to SEQ ID NO: 71391

SEQ ID NO: 71439 - DNA, 201 bp, Homo sapiens; identical to SEQ ID NO: 71392

SEQ ID NO: 71440 - DNA, 201 bp, Homo sapiens; identical to SEQ ID NO: 71393

SEQ ID NO: 71441 - DNA, 201 bp, Homo sapiens; identical to SEQ ID NO: 71394

SEQ ID NO: 71442 - DNA, 201 bp, Homo sapiens; identical to SEQ ID NO: 71395

SEQ ID NO: 71443 - DNA, 201 bp, Homo sapiens; identical to SEQ ID NO: 71396

SEQ ID NO: 71444 - DNA, 201 bp, Homo sapiens; identical to SEQ ID NO: 71397

SEQ ID NO: 71445 - DNA, 201 bp, Homo sapiens; identical to SEQ ID NO: 71398

SEQ ID NO: 71446 - DNA, 201 bp, Homo sapiens; identical to SEQ ID NO: 71399

SEQ ID NO: 71447 - DNA, 201 bp, Homo sapiens; identical to SEQ ID NO: 71400

SEQ ID NO: 71448 - DNA, 201 bp, Homo sapiens; identical to SEQ ID NO: 71401

SEQ ID NO: 71449 - DNA, 201 bp, Homo sapiens; identical to SEQ ID NO: 71402

SEQ ID NO: 71450 - DNA, 201 bp, Homo sapiens; identical to SEQ ID NO: 71403

SEQ ID NO: 71451 - DNA, 201 bp, Homo sapiens; identical to SEQ ID NO: 71404

SEQ ID NO: 71452 - DNA, 201 bp, Homo sapiens; identical to SEQ ID NO: 71405

SEQ ID NO: 71453 - DNA, 201 bp, Homo sapiens; identical to SEQ ID NO: 71406

SEQ ID NO: 71454 - DNA, 201 bp, Homo sapiens; identical to SEQ ID NO: 71407

SEQ ID NO: 71455 - DNA, 201 bp, Homo sapiens; identical to SEQ ID NO: 71408

SEQ ID NO: 71456 - DNA, 201 bp, Homo sapiens
tcttattaagaggtacacagcttagaaatactcagtgggtctttggcatagttgtttatactggacacgacaccaaactcatgcagaattcaaccaaagcrcctctcaagagatcaaatgttgagaaggtgactaacgtgcagatcctggtgttgtttggcatcctcttggtcatggccttggtgagctcggcgggggccc

SEQ ID NO: 71457 - DNA, 201 bp, Homo sapiens; identical to SEQ ID NO: 71410

SEQ ID NO: 71458 - DNA, 201 bp, Homo sapiens; identical to SEQ ID NO: 71411

SEQ ID NO: 71459 - DNA, 201 bp, Homo sapiens; identical to SEQ ID NO: 71456

SEQ ID NO: 71460 - DNA, 201 bp, Homo sapiens; identical to SEQ ID NO: 71389

SEQ ID NO: 71461 - DNA, 201 bp, Homo sapiens; identical to SEQ ID NO: 71391

SEQ ID NO: 71462 - DNA, 201 bp, Homo sapiens; identical to SEQ ID NO: 71392

SEQ ID NO: 71463 - DNA, 201 bp, Homo sapiens; identical to SEQ ID NO: 71393

SEQ ID NO: 71464 - DNA, 201 bp, Homo sapiens; identical to SEQ ID NO: 71394

SEQ ID NO: 71465 - DNA, 201 bp, Homo sapiens; identical to SEQ ID NO: 71395

SEQ ID NO: 71466 - DNA, 201 bp, Homo sapiens; identical to SEQ ID NO: 71396

SEQ ID NO: 71467 - DNA, 201 bp, Homo sapiens; identical to SEQ ID NO: 71397

SEQ ID NO: 71468 - DNA, 201 bp, Homo sapiens; identical to SEQ ID NO: 71398

SEQ ID NO: 71469 - DNA, 201 bp, Homo sapiens; identical to SEQ ID NO: 71399

SEQ ID NO: 71470 - DNA, 201 bp, Homo sapiens; identical to SEQ ID NO: 71400

SEQ ID NO: 71471 - DNA, 201 bp, Homo sapiens; identical to SEQ ID NO: 71401

SEQ ID NO: 71472 - DNA, 201 bp, Homo sapiens; identical to SEQ ID NO: 71402

SEQ ID NO: 71473 - DNA, 201 bp, Homo sapiens; identical to SEQ ID NO: 71403

SEQ ID NO: 71474 - DNA, 201 bp, Homo sapiens; identical to SEQ ID NO: 71405

SEQ ID NO: 71475 - DNA, 201 bp, Homo sapiens; identical to SEQ ID NO: 71404

SEQ ID NO: 71476 - DNA, 201 bp, Homo sapiens; identical to SEQ ID NO: 71406

SEQ ID NO: 71477 - DNA, 201 bp, Homo sapiens; identical to SEQ ID NO: 71407

SEQ ID NO: 71478 - DNA, 201 bp, Homo sapiens; identical to SEQ ID NO: 71408

SEQ ID NO: 71479 - DNA, 201 bp, Homo sapiens; identical to SEQ ID NO: 71456

SEQ ID NO: 71480 - DNA, 201 bp, Homo sapiens; identical to SEQ ID NO: 71410

SEQ ID NO: 71481 - DNA, 201 bp, Homo sapiens; identical to SEQ ID NO: 71411

SEQ ID NO: 71482 - DNA, 201 bp, Homo sapiens
cgatgtcgggatgatccagacagcccacgtgggtgtgggaatcagtgggaatgaaggcatgcaggccaccaacaactcggattacgccatcgcacaggtgytgggacaccccctggctaggtgcttaaggtcagggagaagcagtgatttacagctgtcgccttctctgtagttatgagaggggtgctgtccaggaccacc

SEQ ID NO: 71483 - DNA, 201 bp, Homo sapiens
ttgatgaaaattccagcaaccttccttacagtagcaataatagaggattcgtgcctgttagagccatagcgcttgagcaggcaaacaggcctcatctgccrtgctccttgggctctcatcttcataaggaggacagtattgtgggaagatgtagcaaaaggtatcctgtgggtccttttattcatgtttgtttcatgtctt

SEQ ID NO: 71484 - DNA, 123 bp, Homo sapiens
aggaaaaatggctacacaccccttcaacctgaaatcaggagtcactcctcaacgtcactcaaggtcatggacgatagtgtaaagaggtatcgtagggtcayggaccatcgtgtaaaagggtat

SEQ ID NO: 71485 - DNA, 101 bp, Homo sapiens
waacttatcagaagtcaacttatccttgttgacttatccttgttacagtttcaggaggtgcaaatgttcattgatgaaaattccagcaaccttccttacag

SEQ ID NO: 71486 - DNA, 201 bp, Homo sapiens
ctcgtgcgccggctcctgcgccgccgcgccggggctgctgctcctgggctctgggtcccgcgccgcacacgacccgccagccctggccacagctccggacsggacgccccccaggctgccgttccgggcgccgccagccaccccactggcttcaggcaaggagatggccgagggcgctgcgagcccggaggagcagagtcc

SEQ ID NO: 71487 - DNA, 201 bp, Homo sapiens
acaagggcctcgcttggtaccgggacctgatgcccagaaccctggacgggcagatcaccatggagaagacgcccagttacttcgtcacgcgggaggccccygcgcgcatctcggccatgtccaaggacaccaagctcatcgtggtggtgcgggacccggtgaccagggccatctcggactacacgcagacgctgtccaagc

SEQ ID NO: 71488 - DNA, 201 bp, Homo sapiens
ccacagctccggacgggacgccccccaggctgccgttccgggcgccgccagccaccccactggcttcaggcaaggagatggccgagggcgctgcgagcccrgaggagcagagtcccgaggtgccggactccccaagccccatctccagctttttcagtgggtctgggagcaagcagctgccgcaggccatcatcatcggcg

SEQ ID NO: 71489 - DNA, 124 bp, Homo sapiens
agttcgcctctgcagcctctgcgrggaagtgccggggctgctcgaggctcagttcttaggactgcaaggaggcagccccggcgtgcggcggtgcgcacagtctagagtggccagggcgcgagag

SEQ ID NO: 71490 - DNA, 111 bp, Homo sapiens
agttcgcctcygcagcctctgcggggaagtgccggggctgctcgaggctcagttcttaggactgcaaggaggcagccccggcgtgcggcggtgcgcacagtctagagtggc

SEQ ID NO: 71491 - DNA, 201 bp, Homo sapiens
tcataagcaattaattcactaagctgcctagccacactctttagagagttagcttcataatctgttaacattccaaagtgtttaactctagtatttcgttytcttcttcacaattgatggtgcttctattttttcttctcccctacctgttatatttaaaacaaagaaaagcacaacttgagatttttgttgttacgggta

SEQ ID NO: 71492 - DNA, 201 bp, Homo sapiens; identical to SEQ ID NO: 71486

SEQ ID NO: 71493 - DNA, 201 bp, Homo sapiens; identical to SEQ ID NO: 71487

SEQ ID NO: 71494 - DNA, 201 bp, Homo sapiens; identical to SEQ ID NO: 71488

SEQ ID NO: 71495 - DNA, 124 bp, Homo sapiens; identical to SEQ ID NO: 71489

SEQ ID NO: 71496 - DNA, 111 bp, Homo sapiens; identical to SEQ ID NO: 71490

SEQ ID NO: 71497 - DNA, 201 bp, Homo sapiens
accccaggcccttctggtcttagaggaaggactgggccaacaaagagcaccatgggagaatggcagtggtggcatttagtgaagacaatttagtatgaatstctgcaaaagatttttttgatagcgttgagtgtctgaaagtcccattatttttcttttttctttttccccagtaacactttctagctccacggataagga

SEQ ID NO: 71498 - DNA, 201 bp, Homo sapiens
atgcagagaaaattcctggtgaatccacacagaagctttctgaagtagcaaaggaatgcagcatatatctcattggaggctctatccctgaagaggatgckgggaaattatataacacctgtgctgtgtttgggcctgatggaactttactagcaaagtatagaaagatccatctgtttgacattgatgttcctggaaaaa

SEQ ID NO: 71499 - DNA, 201 bp, Homo sapiens; identical to SEQ ID NO: 71497

SEQ ID NO: 71500 - DNA, 201 bp, Homo sapiens; identical to SEQ ID NO: 71498

SEQ ID NO: 71501 - DNA, 201 bp, Homo sapiens
agaccccagatggggttcactgtttggtgggcttcaccctcacccataggagattcaattataaggacaatacagatctaatagagttcaagactctgagygaggaagaaatagaaaaagtgctgaaaaatatatttaatatttccttgcagagaaagcttgtgcccaaacatggtgatagattttttactatttagaata

SEQ ID NO: 71502 - DNA, 201 bp, Homo sapiens
gtccgaaagtagaagaacacagaaggcaggccaggggcactgtgagatggtaaaagagatctgaagggatccaggggatcatggacattgaagcatatctkgaaagaattggctataagaagtctaggaacaaattggacttggaaacattaactgacattcttcaacaccagatccgagctgttccctttgagaacctta

SEQ ID NO: 71503 - DNA, 201 bp, Homo sapiens
ggaagagaatggattctggtatctagaccaaatcagaagggaacagtacattccaaatgaagaatttcttcattctgatctcctagaagacagcaaatacyaaaaaatctactcctttactcttaagcctcgaacaattgaagattttgagtctatgaatacatacctgcagacatctccatcatctgtgtttactagtaa

SEQ ID NO: 71504 - DNA, 201 bp, Homo sapiens
caccagttatcaactgacgacctatcatgtatcttctgtacccttaccttattttgaagaaaatcctagacatcaaatcatttcacctataaaaatgtcawcatatataattaaacagctttttaaagaaacataaccacaaaccttttcaaataataataataataataataaaaaatgtattttaaagatggcctgtgg

SEQ ID NO: 71505 - DNA, 201 bp, Homo sapiens
gaagagaatggattctggtatctagaccaaatcagaagggaacagtacattccaaatgaagaatttcttcattctgatctcctagaagacagcaaataccraaaaatctactcctttactcttaagcctcgaacaattgaagattttgagtctatgaatacatacctgcagacatctccatcatctgtgtttactagtaaa

SEQ ID NO: 71506 - DNA, 201 bp, Homo sapiens
ccagatccgagctgttccctttgagaaccttaacatccattgtggggatgccatggacttaggcttagaggccatttttgatcaagttgtgagaagaaatyggggtggatggtgtctccaggtcaatcatcttctgtactgggctctgaccactattggttttgagaccacgatgttgggagggtatgtttacagcactcc

SEQ ID NO: 71507 - DNA, 201 bp, Homo sapiens
aaagcttgtgcccaaacatggtgatagattttttactatttagaataaggagtaaaacaatcttgtctatttgtcatccagctcaccagttatcaactgaygacctatcatgtatcttctgtacccttaccttattttgaagaaaatcctagacatcaaatcatttcacctataaaaatgtcatcatatataattaaacag

SEQ ID NO: 71508 - DNA, 201 bp, Homo sapiens
ttgtcgatgctgggtttggacgctcataccagatgtggcagcctctggagttaatttctgggaaggatcagcctcaggtgccttgtgtcttccgtttgacrgaagagaatggattctggtatctagaccaaatcagaagggaacagtacattccaaatgaagaatttcttcattctgatctcctagaagacagcaaatacc

SEQ ID NO: 71509 - DNA, 168 bp, Homo sapiens
gtagctctgactcctcaggcataaaatgggaataatgcttttacagtttagtggcggaactaaactcccaaaattatttgttatatggatcaagtaataaygtcagtaatgtttttggtacaaagtcattatttaataaaagttattgttccatcttgcttgcccccc

SEQ ID NO: 71510 - DNA, 201 bp, Homo sapiens
aaatcatttcacctataaaaatgtcatcatatataattaaacagctttttaaagaaacataaccacaaaccttttcaaataataataataataataataawaaatgtattttaaagatggcctgtggttatcttggaaattggtgatttatgctagaaagcttttaatgttggtttattgttgaattcctagaaaagtttt

SEQ ID NO: 71511 - DNA, 201 bp, Homo sapiens
ttcacctataaaaatgtcatcatatataattaaacagctttttaaagaaacataaccacaaaccttttcaaataataataataataataataaaaaatgtmttttaaagatggcctgtggttatcttggaaattggtgatttatgctagaaagcttttaatgttggtttattgttgaattcctagaaaagttttattggta

SEQ ID NO: 71512 - DNA, 201 bp, Homo sapiens
tgctgcatcgggctgggagagaaagctcgcgggtcccaccgggcctcctacccaagtctcagcgcgcttttcaccgaggcctcaattctgggatttggcarctttgctgtgaaagcccaagtgggtaaccaacagcttggaggacccgagtggattcgattctctctcactcctcggccactcaactgctccttgtccctg

SEQ ID NO: 71513 - DNA, 155 bp, Homo sapiens
aatccaactgcttatgaaaagtactaatagaacttgttaacctttctaaccttcacgattaactgtgaaatgtacgtcatttgtgcaagaccgtttgtccmcttcattttgtataatcacagttgtgttcctgacactcaataaacagtcattgg

SEQ ID NO: 71514 - DNA, 201 bp, Homo sapiens
ctttttcataattactctacttcccagtaaccctaaggaagttgctaacttaaaaaactgcatcccacgttctgttaatttaattctcataagtagcattsatgtaataaacaggtttttagtttgttcttcagattgatagggagttttaaagaaattttagtagttactaaaattatgttactgtatttttcagaaatc

SEQ ID NO: 71515 - DNA, 104 bp, Homo sapiens
ttcacgattaactgtgaaatgtacgtcatttgtgcaagaccgtttgtccacttcattttgtataatcacagttgtgttcctgacactcaataaacagtcaytgg

SEQ ID NO: 71516 - DNA, 201 bp, Homo sapiens
aagcaatcttttatacaataattgaagtgttccctttttcataattactctacttcccagtaaccctaaggaagttgctaacttaaaaaactgcatcccasgttctgttaatttaattctcataagtagcattcatgtaataaacaggtttttagtttgttcttcagattgatagggagttttaaagaaattttagtagtt

SEQ ID NO: 71517 - DNA, 201 bp, Homo sapiens
tctaaatagcactttttggggttcaagaagtaatcagtatgcaaagcaatcttttatacaataattgaagtgttccctttttcataattactctacttccyagtaaccctaaggaagttgctaacttaaaaaactgcatcccacgttctgttaatttaattctcataagtagcattcatgtaataaacaggtttttagttt

SEQ ID NO: 71518 - DNA, 201 bp, Homo sapiens
caaaagatggcatgaattgatgcttgacaaggcaccaatgctaaaggttatagtgaattctctgaagaatatgataaatacattcgtgccaagtggaaaarttatgcaggtggtggatgaaaaattgcctggcctacttggcaactttcctggcccttttgaagaggaaatgaagggtattgccgctgttactgatatacc

SEQ ID NO: 71519 - DNA, 201 bp, Homo sapiens
cagccgcttaatgaactgctgcatcgggctgggagagaaagctcgcgggtcccaccgggcctcctacccaagtctcagcgcgcttttcaccgaggcctcarttctgggatttggcagctttgctgtgaaagcccaagtgggtaaccaacagcttggaggacccgagtggattcgattctctctcactcctcggccactcaa

SEQ ID NO: 71520 - DNA, 201 bp, Homo sapiens
gcctgcaaagatgtgtctgaaccgcaccagccaagagaatatctcatttgaaaccatgtatgatgtcctgtcaacaaaacctgtcctcaacaagctgaccrtatacacaaccttgatagatgttaccaaaggtcaattcgaaacttacctgcgggactgccctgacccttgtataggttggtgagcacacgtctggcctac

SEQ ID NO: 71521 - DNA, 201 bp, Homo sapiens
cagaaaggaatcattggatgtatatgaactcgatgctaagcagggtagatggtatgtggtacaaacaaattatgaccgttggaaacatcccttcttccttratgatcgcagaacgcctgcaaagatgtgtctgaaccgcaccagccaagagaatatctcatttgaaaccatgtatgatgtcctgtcaacaaaacctgtcct

SEQ ID NO: 71522 - DNA, 201 bp, Homo sapiens
tggatttccaaagaaacaacaaaactgtcttcaaggcttcaagctttgctggctatgtgggcatgttaacaggattcaaaccaggactgttcagtcttacrctgaatgaacgtttcagtataaatggtggttatctgggtattctagaatggattctgggaaagaaagatgccatgtggatagggttcctcactagaacag

SEQ ID NO: 71523 - DNA, 201 bp, Homo sapiens
cccttgcctctaaatagcactttttggggttcaagaagtaatcagtatgcaaagcaatcttttatacaataattgaagtgttccctttttcataattactstacttcccagtaaccctaaggaagttgctaacttaaaaaactgcatcccacgttctgttaatttaattctcataagtagcattcatgtaataaacaggtt

SEQ ID NO: 71524 - DNA, 201 bp, Homo sapiens
gttgacaaatgacagatcttttttttttccccctatcagttgatttttcttatttacagataacttctttaggggaagtaaaacagtcatctagaattcaytgagttttgtttcactttgacatttggggatctggtgggcagtcgaaccatggtgaactccacctccgtggaataaatggagattcagcgtgggtgttga

SEQ ID NO: 71525 - DNA, 201 bp, Homo sapiens
cgatgctaagcagggtagatggtatgtggtacaaacaaattatgaccgttggaaacatcccttcttccttgatgatcgcagaacgcctgcaaagatgtgtytgaaccgcaccagccaagagaatatctcatttgaaaccatgtatgatgtcctgtcaacaaaacctgtcctcaacaagctgaccgtatacacaaccttgat

SEQ ID NO: 71526 - DNA, 201 bp, Homo sapiens
tccaaagactaagactcgcggcaggttctctttgagtcaatagcttgtcttcgtccatctgttgacaaatgacagatcttttttttttccccctatcagtwgatttttcttatttacagataacttctttaggggaagtaaaacagtcatctagaattcactgagttttgtttcactttgacatttggggatctggtgggc

SEQ ID NO: 71527 - DNA, 201 bp, Homo sapiens
ccgaacactgcagctgtctgaccttccaaagactaagactcgcggcaggttctctttgagtcaatagcttgtcttcgtccatctgttgacaaatgacagaycttttttttttccccctatcagttgatttttcttatttacagataacttctttaggggaagtaaaacagtcatctagaattcactgagttttgtttcact

SEQ ID NO: 71528 - DNA, 201 bp, Homo sapiens
cggcctctgagacatgaagacaccatctccatgtgaccgaacactgcagctgtctgaccttccaaagactaagactcgcggcaggttctctttgagtcaawagcttgtcttcgtccatctgttgacaaatgacagatcttttttttttccccctatcagttgatttttcttatttacagataacttctttaggggaagtaa

SEQ ID NO: 71529 - DNA, 201 bp, Homo sapiens
taaacaggtttttagtttgttcttcagattgatagggagttttaaagaaattttagtagttactaaaattatgttactgtatttttcagaaatccaactgyttatgaaaagtactaatagaacttgttaacctttctaaccttcacgattaactgtgaaatgtacgtcatttgtgcaagaccgtttgtccacttcattttg

SEQ ID NO: 71530 - DNA, 201 bp, Homo sapiens
atgtaataaacaggtttttagtttgttcttcagattgatagggagttttaaagaaattttagtagttactaaaattatgttactgtatttttcagaaatcmaactgcttatgaaaagtactaatagaacttgttaacctttctaaccttcacgattaactgtgaaatgtacgtcatttgtgcaagaccgtttgtccacttc

SEQ ID NO: 71531 - DNA, 201 bp, Homo sapiens
cagtatgcaaagcaatcttttatacaataattgaagtgttccctttttcataattactctacttcccagtaaccctaaggaagttgctaacttaaaaaacygcatcccacgttctgttaatttaattctcataagtagcattcatgtaataaacaggtttttagtttgttcttcagattgatagggagttttaaagaaatt

SEQ ID NO: 71532 - DNA, 201 bp, Homo sapiens
gaaaagttatgcaggtggtggatgaaaaattgcctggcctacttggcaactttcctggcccttttgaagaggaaatgaagggtattgccgctgttactgawatacctttaggagagattatttcattcaatattttttatgaattatttaccatttgtacttcaatagtagcagaagacaaaaaaggtcatctaatacatg

SEQ ID NO: 71533 - DNA, 201 bp, Homo sapiens
ggattcaaaccaggactgttcagtcttacactgaatgaacgtttcagtataaatggtggttatctgggtattctagaatggattctgggaaagaaagatgycatgtggatagggttcctcactagaacagttctggaaaatagcacaagttatgaagaagccaagaatttattgaccaagaccaagatattggccccagcc

SEQ ID NO: 71534 - DNA, 201 bp, Homo sapiens
aatccaactgcttatgaaaagtactaatagaacttgttaacctttctaaccttcacgattaactgtgaaatgtacgtcatttgtgcaagaccgtttgtccmcttcattttgtataatcacagttgtgttcctgacactcaataaacagtcattggaaagagtgccagtcagcagtcatgcacgctgattgggtgtgtacat

SEQ ID NO: 71535 - DNA, 201 bp, Homo sapiens
aaactgcatcccacgttctgttaatttagtaaataaacaagtcaaagacttgtggaaaataggaagtgaacccatattttaaattctcataagtagcattsatgtaataaacaggtttttagtttgttcttcagattgatagggagttttaaagaaattttagtagttactaaaattatgttactgtatttttcagaaatc

SEQ ID NO: 71536 - DNA, 201 bp, Homo sapiens
ttcacgattaactgtgaaatgtacgtcatttgtgcaagaccgtttgtccacttcattttgtataatcacagttgtgttcctgacactcaataaacagtcaytggaaagagtgccagtcagcagtcatgcacgctgattgggtgtgtacatctgtgttggtttggaggaggggggttattatcaagaaatacaagctgaaca

SEQ ID NO: 71537 - DNA, 201 bp, Homo sapiens
aagcaatcttttatacaataattgaagtgttccctttttcataattactctacttcccagtaaccctaaggaagttgctaacttaaaaaactgcatcccasgttctgttaatttagtaaataaacaagtcaaagacttgtggaaaataggaagtgaacccatattttaaattctcataagtagcattcatgtaataaacag

SEQ ID NO: 71538 - DNA, 201 bp, Homo sapiens
tctaaatagcactttttggggttcaagaagtaatcagtatgcaaagcaatcttttatacaataattgaagtgttccctttttcataattactctacttccyagtaaccctaaggaagttgctaacttaaaaaactgcatcccacgttctgttaatttagtaaataaacaagtcaaagacttgtggaaaataggaagtgaac

SEQ ID NO: 71539 - DNA, 201 bp, Homo sapiens; identical to SEQ ID NO: 71518

SEQ ID NO: 71540 - DNA, 201 bp, Homo sapiens; identical to SEQ ID NO: 71520

SEQ ID NO: 71541 - DNA, 201 bp, Homo sapiens; identical to SEQ ID NO: 71521

SEQ ID NO: 71542 - DNA, 201 bp, Homo sapiens; identical to SEQ ID NO: 71522

SEQ ID NO: 71543 - DNA, 201 bp, Homo sapiens
cccttgcctctaaatagcactttttggggttcaagaagtaatcagtatgcaaagcaatcttttatacaataattgaagtgttccctttttcataattactstacttcccagtaaccctaaggaagttgctaacttaaaaaactgcatcccacgttctgttaatttagtaaataaacaagtcaaagacttgtggaaaatagg

SEQ ID NO: 71544 - DNA, 201 bp, Homo sapiens; identical to SEQ ID NO: 71524

SEQ ID NO: 71545 - DNA, 201 bp, Homo sapiens; identical to SEQ ID NO: 71525

SEQ ID NO: 71546 - DNA, 201 bp, Homo sapiens; identical to SEQ ID NO: 71526

SEQ ID NO: 71547 - DNA, 201 bp, Homo sapiens; identical to SEQ ID NO: 71527

SEQ ID NO: 71548 - DNA, 201 bp, Homo sapiens; identical to SEQ ID NO: 71528

SEQ ID NO: 71549 - DNA, 201 bp, Homo sapiens; identical to SEQ ID NO: 71529

SEQ ID NO: 71550 - DNA, 201 bp, Homo sapiens; identical to SEQ ID NO: 71530

SEQ ID NO: 71551 - DNA, 201 bp, Homo sapiens
cagtatgcaaagcaatcttttatacaataattgaagtgttccctttttcataattactctacttcccagtaaccctaaggaagttgctaacttaaaaaacygcatcccacgttctgttaatttagtaaataaacaagtcaaagacttgtggaaaataggaagtgaacccatattttaaattctcataagtagcattcatgt

SEQ ID NO: 71552 - DNA, 201 bp, Homo sapiens; identical to SEQ ID NO: 71532

SEQ ID NO: 71553 - DNA, 201 bp, Homo sapiens; identical to SEQ ID NO: 71533

SEQ ID NO: 71554 - DNA, 201 bp, Homo sapiens; identical to SEQ ID NO: 71512

SEQ ID NO: 71555 - DNA, 201 bp, Homo sapiens; identical to SEQ ID NO: 71534

SEQ ID NO: 71556 - DNA, 201 bp, Homo sapiens; identical to SEQ ID NO: 71535

SEQ ID NO: 71557 - DNA, 201 bp, Homo sapiens; identical to SEQ ID NO: 71536

SEQ ID NO: 71558 - DNA, 201 bp, Homo sapiens; identical to SEQ ID NO: 71537

SEQ ID NO: 71559 - DNA, 201 bp, Homo sapiens; identical to SEQ ID NO: 71538

SEQ ID NO: 71560 - DNA, 201 bp, Homo sapiens; identical to SEQ ID NO: 71519

SEQ ID NO: 71561 - DNA, 201 bp, Homo sapiens; identical to SEQ ID NO: 71518

SEQ ID NO: 71562 - DNA, 201 bp, Homo sapiens; identical to SEQ ID NO: 71520

SEQ ID NO: 71563 - DNA, 201 bp, Homo sapiens; identical to SEQ ID NO: 71521

SEQ ID NO: 71564 - DNA, 201 bp, Homo sapiens; identical to SEQ ID NO: 71522

SEQ ID NO: 71565 - DNA, 201 bp, Homo sapiens; identical to SEQ ID NO: 71543

SEQ ID NO: 71566 - DNA, 201 bp, Homo sapiens; identical to SEQ ID NO: 71524

SEQ ID NO: 71567 - DNA, 201 bp, Homo sapiens; identical to SEQ ID NO: 71525

SEQ ID NO: 71568 - DNA, 201 bp, Homo sapiens; identical to SEQ ID NO: 71526

SEQ ID NO: 71569 - DNA, 201 bp, Homo sapiens; identical to SEQ ID NO: 71527

SEQ ID NO: 71570 - DNA, 201 bp, Homo sapiens; identical to SEQ ID NO: 71528

SEQ ID NO: 71571 - DNA, 201 bp, Homo sapiens; identical to SEQ ID NO: 71529

SEQ ID NO: 71572 - DNA, 201 bp, Homo sapiens; identical to SEQ ID NO: 71530

SEQ ID NO: 71573 - DNA, 201 bp, Homo sapiens; identical to SEQ ID NO: 71551

SEQ ID NO: 71574 - DNA, 201 bp, Homo sapiens; identical to SEQ ID NO: 71532

SEQ ID NO: 71575 - DNA, 201 bp, Homo sapiens; identical to SEQ ID NO: 71533

SEQ ID NO: 71576 - DNA, 201 bp, Homo sapiens; identical to SEQ ID NO: 71512

SEQ ID NO: 71577 - DNA, 201 bp, Homo sapiens; identical to SEQ ID NO: 71534

SEQ ID NO: 71578 - DNA, 201 bp, Homo sapiens; identical to SEQ ID NO: 71535

SEQ ID NO: 71579 - DNA, 201 bp, Homo sapiens; identical to SEQ ID NO: 71536

SEQ ID NO: 71580 - DNA, 201 bp, Homo sapiens; identical to SEQ ID NO: 71537

SEQ ID NO: 71581 - DNA, 201 bp, Homo sapiens; identical to SEQ ID NO: 71538

SEQ ID NO: 71582 - DNA, 201 bp, Homo sapiens; identical to SEQ ID NO: 71518

SEQ ID NO: 71583 - DNA, 201 bp, Homo sapiens; identical to SEQ ID NO: 71519

SEQ ID NO: 71584 - DNA, 201 bp, Homo sapiens; identical to SEQ ID NO: 71520

SEQ ID NO: 71585 - DNA, 201 bp, Homo sapiens; identical to SEQ ID NO: 71521

SEQ ID NO: 71586 - DNA, 201 bp, Homo sapiens; identical to SEQ ID NO: 71522

SEQ ID NO: 71587 - DNA, 201 bp, Homo sapiens; identical to SEQ ID NO: 71543

SEQ ID NO: 71588 - DNA, 201 bp, Homo sapiens; identical to SEQ ID NO: 71524

SEQ ID NO: 71589 - DNA, 201 bp, Homo sapiens; identical to SEQ ID NO: 71525

SEQ ID NO: 71590 - DNA, 201 bp, Homo sapiens; identical to SEQ ID NO: 71526

SEQ ID NO: 71591 - DNA, 201 bp, Homo sapiens; identical to SEQ ID NO: 71527

SEQ ID NO: 71592 - DNA, 201 bp, Homo sapiens; identical to SEQ ID NO: 71528

SEQ ID NO: 71593 - DNA, 201 bp, Homo sapiens; identical to SEQ ID NO: 71529

SEQ ID NO: 71594 - DNA, 201 bp, Homo sapiens; identical to SEQ ID NO: 71530

SEQ ID NO: 71595 - DNA, 201 bp, Homo sapiens; identical to SEQ ID NO: 71551

SEQ ID NO: 71596 - DNA, 201 bp, Homo sapiens; identical to SEQ ID NO: 71532

SEQ ID NO: 71597 - DNA, 201 bp, Homo sapiens; identical to SEQ ID NO: 71533

SEQ ID NO: 71598 - DNA, 201 bp, Homo sapiens
tgctgcatcgggctgggagagaaagctcgcgggtcccaccgggcctcctacccaagtctcagcgcgcttttcaccgaggcctcaattctgggatttggcarctttgctgtgaaagcccaatggacagaggactgcagaaaatcaacctatcctccttcaggaccaacgtatttcccgtcagtgataatcaggtacagaggt

SEQ ID NO: 71599 - DNA, 155 bp, Homo sapiens; identical to SEQ ID NO: 71513

SEQ ID NO: 71600 - DNA, 201 bp, Homo sapiens; identical to SEQ ID NO: 71514

SEQ ID NO: 71601 - DNA, 104 bp, Homo sapiens; identical to SEQ ID NO: 71515

SEQ ID NO: 71602 - DNA, 201 bp, Homo sapiens; identical to SEQ ID NO: 71516

SEQ ID NO: 71603 - DNA, 201 bp, Homo sapiens; identical to SEQ ID NO: 71517

SEQ ID NO: 71604 - DNA, 201 bp, Homo sapiens
cagccgcttaatgaactgctgcatcgggctgggagagaaagctcgcgggtcccaccgggcctcctacccaagtctcagcgcgcttttcaccgaggcctcarttctgggatttggcagctttgctgtgaaagcccaatggacagaggactgcagaaaatcaacctatcctccttcaggaccaacgtatttcccgtcagtgat

SEQ ID NO: 71605 - DNA, 201 bp, Homo sapiens; identical to SEQ ID NO: 71520

SEQ ID NO: 71606 - DNA, 201 bp, Homo sapiens; identical to SEQ ID NO: 71521

SEQ ID NO: 71607 - DNA, 201 bp, Homo sapiens; identical to SEQ ID NO: 71522

SEQ ID NO: 71608 - DNA, 201 bp, Homo sapiens; identical to SEQ ID NO: 71523

SEQ ID NO: 71609 - DNA, 201 bp, Homo sapiens; identical to SEQ ID NO: 71524

SEQ ID NO: 71610 - DNA, 201 bp, Homo sapiens; identical to SEQ ID NO: 71525

SEQ ID NO: 71611 - DNA, 201 bp, Homo sapiens; identical to SEQ ID NO: 71526

SEQ ID NO: 71612 - DNA, 201 bp, Homo sapiens; identical to SEQ ID NO: 71527

SEQ ID NO: 71613 - DNA, 201 bp, Homo sapiens; identical to SEQ ID NO: 71528

SEQ ID NO: 71614 - DNA, 201 bp, Homo sapiens; identical to SEQ ID NO: 71529

SEQ ID NO: 71615 - DNA, 201 bp, Homo sapiens; identical to SEQ ID NO: 71530

SEQ ID NO: 71616 - DNA, 201 bp, Homo sapiens; identical to SEQ ID NO: 71531

SEQ ID NO: 71617 - DNA, 201 bp, Homo sapiens
ggcatgaattgatgcttgacaaggcaccaatgcctggcctacttggcaactttcctggcccttttgaagaggaaatgaagggtattgccgctgttactgawatacctttaggagagattatttcattcaatattttttatgaattatttaccatttgtacttcaatagtagcagaagacaaaaaaggtcatctaatacatg

SEQ ID NO: 71618 - DNA, 201 bp, Homo sapiens; identical to SEQ ID NO: 71533

SEQ ID NO: 71619 - DNA, 201 bp, Homo sapiens; identical to SEQ ID NO: 71512

SEQ ID NO: 71620 - DNA, 201 bp, Homo sapiens; identical to SEQ ID NO: 71534

SEQ ID NO: 71621 - DNA, 201 bp, Homo sapiens; identical to SEQ ID NO: 71535

SEQ ID NO: 71622 - DNA, 201 bp, Homo sapiens; identical to SEQ ID NO: 71536

SEQ ID NO: 71623 - DNA, 201 bp, Homo sapiens; identical to SEQ ID NO: 71537

SEQ ID NO: 71624 - DNA, 201 bp, Homo sapiens; identical to SEQ ID NO: 71538

SEQ ID NO: 71625 - DNA, 201 bp, Homo sapiens; identical to SEQ ID NO: 71519

SEQ ID NO: 71626 - DNA, 201 bp, Homo sapiens
ggtacaaacaaattatgaccgttggaaacatcccttcttccttgatgatcgcagaacgcctgcaaagatgtgtctgaaccgcaccagccaagagctgaccrtatacacaaccttgatagatgttaccaaaggtcaattcgaaacttacctgcgggactgccctgacccttgtataggttggtgagcacacgtctggcctac

SEQ ID NO: 71627 - DNA, 201 bp, Homo sapiens
tagaacagttctggaaaatagcacaagactcgatgctaagcagggtagatggtatgtggtacaaacaaattatgaccgttggaaacatcccttcttccttratgatcgcagaacgcctgcaaagatgtgtctgaaccgcaccagccaagagctgaccgtatacacaaccttgatagatgttaccaaaggtcaattcgaaac

SEQ ID NO: 71628 - DNA, 201 bp, Homo sapiens; identical to SEQ ID NO: 71522

SEQ ID NO: 71629 - DNA, 201 bp, Homo sapiens; identical to SEQ ID NO: 71543

SEQ ID NO: 71630 - DNA, 201 bp, Homo sapiens; identical to SEQ ID NO: 71524

SEQ ID NO: 71631 - DNA, 107 bp, Homo sapiens
ggtttggaggaggggggttattatcaagaaatacaagctgaacatcgtatctgaattaaataacaagggttatgtaagtgggttattaaatatgactaaayggtcac

SEQ ID NO: 71632 - DNA, 201 bp, Homo sapiens
cgatgctaagcagggtagatggtatgtggtacaaacaaattatgaccgttggaaacatcccttcttccttgatgatcgcagaacgcctgcaaagatgtgtytgaaccgcaccagccaagagctgaccgtatacacaaccttgatagatgttaccaaaggtcaattcgaaacttacctgcgggactgccctgacccttgtat

SEQ ID NO: 71633 - DNA, 201 bp, Homo sapiens; identical to SEQ ID NO: 71526

SEQ ID NO: 71634 - DNA, 201 bp, Homo sapiens; identical to SEQ ID NO: 71527

SEQ ID NO: 71635 - DNA, 201 bp, Homo sapiens; identical to SEQ ID NO: 71528

SEQ ID NO: 71636 - DNA, 201 bp, Homo sapiens; identical to SEQ ID NO: 71529

SEQ ID NO: 71637 - DNA, 201 bp, Homo sapiens; identical to SEQ ID NO: 71530

SEQ ID NO: 71638 - DNA, 201 bp, Homo sapiens; identical to SEQ ID NO: 71551

SEQ ID NO: 71639 - DNA, 201 bp, Homo sapiens
ggattcaaaccaggactgttcagtcttacactgaatgaacgtttcagtataaatggtggttatctgggtattctagaatggattctgggaaagaaagatgycatgtggatagggttcctcactagaacagttctggaaaatagcacaagactcgatgctaagcagggtagatggtatgtggtacaaacaaattatgaccgt

SEQ ID NO: 71640 - DNA, 201 bp, Homo sapiens
ccaggaagctgtggggagaccagaggatcaagctgaagtgaagccagtgaagagcccacctgtggaaggacatggcggggcgaggcacagccagtgcattyctgcctgcgaacaggccctcccagcagctttgccgcctctccatcgtcttgggcccttgctcaaatagctgtgggactgaatttcacagaaaagaatata

SEQ ID NO: 71641 - DNA, 201 bp, Homo sapiens
tgattcttggaactgtaaagattacaacccaaagtctcccaggaagctgtggggagaccagaggatcaagctgaagtgaagccagtgaagagcccacctgyggaaggacatggcggggcgaggcacagccagtgcattcctgcctgcgaacaggccctcccagcagctttgccgcctctccatcgtcttgggcccttgctc

SEQ ID NO: 71642 - DNA, 201 bp, Homo sapiens
gaagaggaaatctattgtttgggggaaaaaaaacatcagtttgatttctctaggggttcttttatgtgatttttagctaagtggtgtgccaggttttcagygacataccaaatggaaataagaggatattgatcacgagtgtgatgctgagtacctttctgcatatactggattgtactttgtgtaaagtaaacatactca

SEQ ID NO: 71643 - DNA, 201 bp, Homo sapiens
tcagtttgatttctctaggggttcttttatgtgatttttagctaagtggtgtgccaggttttcagtgacataccaaatggaaataagaggatattgatcaygagtgtgatgctgagtacctttctgcatatactggattgtactttgtgtaaagtaaacatactcagttttgctgttcagacaagcgtgatctttttcatg

SEQ ID NO: 71644 - DNA, 201 bp, Homo sapiens
gggttcttttatgtgatttttagctaagtggtgtgccaggttttcagtgacataccaaatggaaataagaggatattgatcacgagtgtgatgctgagtasctttctgcatatactggattgtactttgtgtaaagtaaacatactcagttttgctgttcagacaagcgtgatctttttcatgggtgatgagtgggtacat

SEQ ID NO: 71645 - DNA, 201 bp, Homo sapiens
tttgtgtaaagtaaacatactcagttttgctgttcagacaagcgtgatctttttcatgggtgatgagtgggtacatagatggctgcacacagttctcaggraagagacccacaggctccagcgggcaggtgggtgggacgcttgctgaagtgcagttccccagacccagagctgaattcactgaatctgcagtatgatgca

SEQ ID NO: 71646 - DNA, 201 bp, Homo sapiens
gcttcactcattgccctgatgtctgtccagaagaactagaaaagatgattcaagtcgtggatgaaatagatagcattacaactctgccagatctaactccrcttttcatcagcattgacccagagagggacacaaaagaagccatcgcaaattatgtgaaagaattttctcccaaactggttggcttgactggcacgagag

SEQ ID NO: 71647 - DNA, 201 bp, Homo sapiens
gtggggagaccagaggatcaagctgaagtgaagccagtgaagagcccacctgtggaaggacatggcggggcgaggcacagccagtgcattcctgcctgcgracaggccctcccagcagctttgccgcctctccatcgtcttgggcccttgctcaaatagctgtgggactgaatttcacagaaaagaatataatttccatag

SEQ ID NO: 71648 - DNA, 201 bp, Homo sapiens
tccctcacaactcatactggggagcgtaaaactgacaaggactacttgggtcagtggttattgatttattttggcttcactcattgccctgatgtctgtcyagaagaactagaaaagatgattcaagtcgtggatgaaatagatagcattacaactctgccagatctaactccacttttcatcagcattgacccagagagg

SEQ ID NO: 71649 - DNA, 201 bp, Homo sapiens
ccctcagcactgcgaggccgccacccccgtggtcgcagaagggccccggagactccacgcgcccctcgaagcccgggcctgtttcctggaagtctttagcratcacatttgctattggaggagctttactggctggaatgaagcacgtcaagaaagaaaaggcagagaagttagagaaggaacggcagcgacacatcggca

SEQ ID NO: 71650 - DNA, 201 bp, Homo sapiens
tcgcggactcgagttttggggcccagccgaggggactgcgagagtcttgctgaggcagttctgcgcgcggcaagcggaggcgtggcgtgcctcggggcgcyctggctattgcctgggaacccggcccctcagcactgcgaggccgccacccccgtggtcgcagaagggccccggagactccacgcgcccctcgaagcccgg

SEQ ID NO: 71651 - DNA, 201 bp, Homo sapiens
gagccagtccagtgacacaggatgaccttcagtatcacaacctcagcaagcagcagaatgagtccccgcagcccctcgtggagacgggaaagaagtctccrgaatctctggtcaagctggatgcaaccccattgtcctccccacggcatgtgaggatcaaaaactggggcagcgggatgactttccaagacacacttcacc

SEQ ID NO: 71652 - DNA, 201 bp, Homo sapiens
gctccccatcaagccctttacttgacctcctaacaagtagcaccctggattgatcggagcctcctctctcaaactggggcctccctggtcccttggagacraaatcttaaatgccaggcctggcaagtgggtgaaagatggaacttgctgctgagtgcaccacttcaagtgaccaccaggaggtgctatcgcaccactgtg

SEQ ID NO: 71653 - DNA, 201 bp, Homo sapiens
tcagctcaccccgatgggagaaggggatgagctcagtgggcaggaggacgccttccgcagctgggccgtgcaaaccttcaaggcagcctgtgagacgtttsatgtccgaggcaaacagcacattcagatccccaagctctacacctccaatgtgacctgggacccgcaccactacaggctcgtgcaggactcacagccttt

SEQ ID NO: 71654 - DNA, 201 bp, Homo sapiens
ccatagagatggcctgtccttggaaatttctgttcaagaccaaattccaccagtatgcaatgaatggggaaaaagacatcaacaacaatgtggagaaagcyccctgtgccacctccagtccagtgacacaggatgaccttcagtatcacaacctcagcaagcagcagaatgagtccccgcagcccctcgtggagacgggaa

SEQ ID NO: 71655 - DNA, 201 bp, Homo sapiens
acccccgtgtttcaccaggagatgctgaactacgtcctgtcccctttctactactatcaggtagaggcctggaaaacccatgtctggcaggacgagaagcrgagacccaagagaagagagattccattgaaagtcttggtcaaagctgtgctctttgcctgtatgctgatgcgcaagacaatggcgtcccgagtcagagtc

SEQ ID NO: 71656 - DNA, 201 bp, Homo sapiens
tcctggtggaactctcctgtgaggatggccaaggcctgaactacctgccgggggagcaccttggggtttgcccaggcaaccagccggccctggtccaaggyatcctggagcgagtggtggatggccccacaccccaccagacagtgcgcctggaggccctggatgagagtggcagctactgggtcagtgacaagaggctgc

SEQ ID NO: 71657 - DNA, 201 bp, Homo sapiens
cctccagtccagtgacacaggatgaccttcagtatcacaacctcagcaagcagcagaatgagtccccgcagcccctcgtggagacgggaaagaagtctccrgaatctctggtcaagctggatgcaaccccattgtcctccccacggcatgtgaggatcaaaaactggggcagcgggatgactttccaagacacacttcacc

SEQ ID NO: 71658 - DNA, 201 bp, Homo sapiens
tgcccccctgctcactcagccaggccctcacctacttcctggacatcaccacacccccacccagctgctgctccaaaagctggcccaggtggccacagaaragcctgagagacgaggctggaggccctgtgccagccctcagagtacagcaagtggaagttcaccaacagccccacattcctggaggtgctagaggagttc

SEQ ID NO: 71659 - DNA, 201 bp, Homo sapiens
aggtggccacagaaaagcctgagagacgaggctggaggccctgtgccagccctcagagtacagcaagtggaagttcaccaacagccccacattcctggagytgctagaggagttcccgtccctgcgggtgtctgctggcttcctgctttcccagctccccattctgaagcccaggttctactccatcagctcctcccggga

SEQ ID NO: 71660 - DNA, 201 bp, Homo sapiens
ttccccagctgtgcatcgacctgggctggaagcccaagtacggccgcttcgatgtggtccccctggtcctgcaggccaatggccgtgaccctgagctcttygaaatcccacctgaccttgtgcttgaggtggccatggaacatcccaaatacgagtggtttcgggaactggagctaaagtggtacgccctgcctgcagtgg

SEQ ID NO: 71661 - DNA, 201 bp, Homo sapiens
tggccaacatgctgcttgaggtgggcggcctggagttcccagggtgccccttcaatggctggtacatgggcacagagatcggagtccgggacttctgtgaygtccagcgctacaacatcctggaggaagtgggcaggagaatgggcctggaaacgcacaagctggcctcgctctggaaagaccaggctgtcgttgagatca

SEQ ID NO: 71662 - DNA, 201 bp, Homo sapiens
cttcgccaccaagcaggcctggcgcaatgccccacgctgcattgggaggatccagtggtccaacctgcaggtcttcgatgcccgcagctgttccactgccygggaaatgtttgaacacatctgcagacacgtgcgttactccaccaacaatggcaacatcaggtcggccatcaccgtgttcccccagcggagtgatggcaa

SEQ ID NO: 71663 - DNA, 201 bp, Homo sapiens
tcccgtccctgcgggtgtctgctggcttcctgctttcccagctccccattctgaagcccaggttctactccatcagctcctcccgggatcacacgcccacrgagatccacctgactgtggccgtggtcacctaccacacccgagatggccagggtcccctgcaccacggcgtctgcagcacatggctcaacagcctgaagc

SEQ ID NO: 71664 - DNA, 201 bp, Homo sapiens
accacacccgagatggccagggtcccctgcaccacggcgtctgcagcacatggctcaacagcctgaagccccaagacccagtgccctgctttgtgcggaaygccagcggcttccacctccccgaggatccctcccatccttgcatcctcatcgggcctggcacaggcatcgcgcccttccgcagtttctggcagcaacggc

SEQ ID NO: 71665 - DNA, 201 bp, Homo sapiens
tacaggctgagctgcctggaggaggaacggctgctgttggtggtgaccagtacgtttggcaatggagactgccctggcaatggagagaaactgaagaaatygctcttcatgctgaaagagctcaacaacaaattcaggtacgctgtgtttggcctcggctccagcatgtaccctcggttctgcgcctttgctcatgacatt

SEQ ID NO: 71666 - DNA, 201 bp, Homo sapiens
ctgcagcacatggctcaacagcctgaagccccaagacccagtgccctgctttgtgcggaatgccagcggcttccacctccccgaggatccctcccatcctygcatcctcatcgggcctggcacaggcatcgcgcccttccgcagtttctggcagcaacggctccatgactcccagcacaagggagtgcggggaggccgcat

SEQ ID NO: 71667 - DNA, 201 bp, Homo sapiens
tgcagcccagcagcctggagatgtcagcgctctgagggcctacaggaggggttaaagctgccggcacagaacttaaggatggagccagctctgcattatcygaggtcacagggcctggggagatggaggaaagtgatatcccccagcctcaagtcttatttcctcaacgttgctccccatcaagccctttacttgacctcc

SEQ ID NO: 71668 - DNA, 201 bp, Homo sapiens
taaagctgccggcacagaacttaaggatggagccagctctgcattatctgaggtcacagggcctggggagatggaggaaagtgatatcccccagcctcaaktcttatttcctcaacgttgctccccatcaagccctttacttgacctcctaacaagtagcaccctggattgatcggagcctcctctctcaaactggggcct

SEQ ID NO: 71669 - DNA, 201 bp, Homo sapiens; identical to SEQ ID NO: 71652

SEQ ID NO: 71670 - DNA, 201 bp, Homo sapiens; identical to SEQ ID NO: 71653

SEQ ID NO: 71671 - DNA, 201 bp, Homo sapiens; identical to SEQ ID NO: 71654

SEQ ID NO: 71672 - DNA, 201 bp, Homo sapiens; identical to SEQ ID NO: 71655

SEQ ID NO: 71673 - DNA, 201 bp, Homo sapiens; identical to SEQ ID NO: 71656

SEQ ID NO: 71674 - DNA, 201 bp, Homo sapiens; identical to SEQ ID NO: 71657

SEQ ID NO: 71675 - DNA, 201 bp, Homo sapiens; identical to SEQ ID NO: 71658

SEQ ID NO: 71676 - DNA, 201 bp, Homo sapiens; identical to SEQ ID NO: 71659

SEQ ID NO: 71677 - DNA, 201 bp, Homo sapiens
tcactcagctgtgcatcgacctgggctggaagcccaagtacggccgcttcgatgtggtccccctggtcctgcaggccaatggccgtgaccctgagctcttygaaatcccacctgaccttgtgcttgaggtggccatggaacatcccaaatacgagtggtttcgggaactggagctaaagtggtacgccctgcctgcagtgg

SEQ ID NO: 71678 - DNA, 201 bp, Homo sapiens; identical to SEQ ID NO: 71661

SEQ ID NO: 71679 - DNA, 201 bp, Homo sapiens; identical to SEQ ID NO: 71662

SEQ ID NO: 71680 - DNA, 201 bp, Homo sapiens; identical to SEQ ID NO: 71663

SEQ ID NO: 71681 - DNA, 201 bp, Homo sapiens; identical to SEQ ID NO: 71664

SEQ ID NO: 71682 - DNA, 201 bp, Homo sapiens; identical to SEQ ID NO: 71665

SEQ ID NO: 71683 - DNA, 201 bp, Homo sapiens; identical to SEQ ID NO: 71666

SEQ ID NO: 71684 - DNA, 201 bp, Homo sapiens; identical to SEQ ID NO: 71667

SEQ ID NO: 71685 - DNA, 201 bp, Homo sapiens; identical to SEQ ID NO: 71668

SEQ ID NO: 71686 - DNA, 160 bp, Homo sapiens
cactaaaggcacaggaatggaaaactgagaaaagatttattggcctcaccaattcctttggttttggtggtactaatgcaacactttgtattgctggactrtagaacatataatttgtaattaaatactgatttttaaatgctatatgtgaagaaattat

SEQ ID NO: 71687 - DNA, 201 bp, Homo sapiens
ttgtaatgggagaaggtgcagctgtgctggtgctggaagaatatgaacatgctgttcaaagaagagcccggatctatgcagaagttttgggctatggactytcaggtgatgctggtcacataactgcccctgatcctgaaggagaaggtgccttaaggtgtatggctgctgctttaaaagatgcaggtgtgcagcctgagg

SEQ ID NO: 71688 - DNA, 201 bp, Homo sapiens
ccacagcctgtaccacaggagctcatgctgtgggagactcatttagatttatagcccatggtgatgctgatgtgatggtggctggaggtacagattcttgyattagccctttatctcttgctgggttttccagagcccgggctctgagcacaaactcagatcccaagttggcatgtcgaccatttcatccaaagagagatg

SEQ ID NO: 71689 - DNA, 159 bp, Homo sapiens
actaaaggcacaggaatggaaaactgagaaaagatttattggcctcaccaattcctttggttttggtggtactaatgcaacactttgtattgctggactgyagaacatataatttgtaattaaatactgatttttaaatgctatatgtgaagaaattat

SEQ ID NO: 71690 - DNA, 156 bp, Homo sapiens
acttggccgggtcccgaggcccctggccggcgggctcggacgttaggagcagaacyagctccaggtcccggtctgtccgggcgtcgctgccctctgaagctcaggccggacgccccagtccctggccgaacaaggtgccgcggcccacccaccccg

SEQ ID NO: 71691 - DNA, 119 bp, Homo sapiens
ggcctcaccaattcctttggttttggtggtactaatgcaacactttgtattgctggactgtagaacatataatttgtaattaaatactgatttttaaatgytatatgtgaagaaattat

SEQ ID NO: 71692 - DNA, 160 bp, Homo sapiens; identical to SEQ ID NO: 71686

SEQ ID NO: 71693 - DNA, 201 bp, Homo sapiens; identical to SEQ ID NO: 71687

SEQ ID NO: 71694 - DNA, 159 bp, Homo sapiens; identical to SEQ ID NO: 71689

SEQ ID NO: 71695 - DNA, 119 bp, Homo sapiens; identical to SEQ ID NO: 71691

SEQ ID NO: 71696 - DNA, 160 bp, Homo sapiens; identical to SEQ ID NO: 71686

SEQ ID NO: 71697 - DNA, 201 bp, Homo sapiens; identical to SEQ ID NO: 71687

SEQ ID NO: 71698 - DNA, 201 bp, Homo sapiens; identical to SEQ ID NO: 71688

SEQ ID NO: 71699 - DNA, 159 bp, Homo sapiens; identical to SEQ ID NO: 71689

SEQ ID NO: 71700 - DNA, 119 bp, Homo sapiens; identical to SEQ ID NO: 71691

SEQ ID NO: 71701 - DNA, 201 bp, Homo sapiens
gagataattataaaattcagtgacctttgagaacctgaacattatagaaaagctggcaataatcaaggacttactgaagtagtctgttggttcagtgcatscttagttggcagttaccaccctgtgctagcatatttcttttgctagctatccatcatgtaaccctcatgaaaattatctttatacgtggactataataaa

SEQ ID NO: 71702 - DNA, 201 bp, Homo sapiens; identical to SEQ ID NO: 71701

SEQ ID NO: 71703 - DNA, 201 bp, Homo sapiens
cggggtgggtgggccgcggcaccttgttcggccagggactggggcgtccggcctgagcttcagagggcagcgacgcccggacagaccgggacctggagctrgttctgctcctaacgtccgagcccgccggccaggggcctcgggacccggccaagtcccacccccgctcgagaaaaggaagtttctttgcagttgtgactt

SEQ ID NO: 71704 - DNA, 135 bp, Homo sapiens
cggagagcgaggggcggcggcggcgcccgctggcrctcaagcatggcggcggcggcattgggcagctcctcaggctcggcgtccccggccgtggctgagctctgccagaacaccccggagacctttttggaggcc

SEQ ID NO: 71705 - DNA, 201 bp, Homo sapiens
ggccaaggtgggcggattgcttgagcttaggagtttgagaccagcctgggcaacatggctaaaccccgtctctacaaaaaaattaaaaaattagccaagcrtggtggcagacacctgtagtcccagctacttggagggcagaggtgggaggatggcttgagcccataatcatgccactgcattctagctttgatggcgaag

SEQ ID NO: 71706 - DNA, 201 bp, Homo sapiens; identical to SEQ ID NO: 71703

SEQ ID NO: 71707 - DNA, 201 bp, Homo sapiens
cccttattttgtggcagatgctatgaaagatgcaacatgtggcctgttcacagctacataattgtgacctgtgtggggaccaccttcgtgctctgtgacaycttctcaactcaccttttttactctttgaggccttacagctcttcacagtacaaggatgccaagggactccataaatgaactgataggctgggttctcca

SEQ ID NO: 71708 - DNA, 201 bp, Homo sapiens
aaccctttaagaattcgtggaggtaatcgccttggatgagagtaatttccttcattctcctgtcagcaaaattgcacttctagaggtctaagggaccttgyagattttgggaattgggaggcaagtttgattattcattttgaataagtacccacctcaactcttcagatcaaatgatctgaagggacatggtgtgggggg

SEQ ID NO: 71709 - DNA, 201 bp, Homo sapiens
aagggaaaatatattgagcccttattttgtggcagatgctatgaaagatgcaacatgtggcctgttcacagctacataattgtgacctgtgtggggaccamcttcgtgctctgtgacaccttctcaactcaccttttttactctttgaggccttacagctcttcacagtacaaggatgccaagggactccataaatgaact

SEQ ID NO: 71710 - DNA, 101 bp, Homo sapiens
rctcaagcatggcggcggcggcattgggcagctcctcaggctcggcgtccccggccgtggctgagctctgccagaacaccccggagacctttttggaggcc

SEQ ID NO: 71711 - DNA, 201 bp, Homo sapiens; identical to SEQ ID NO: 71701

SEQ ID NO: 71712 - DNA, 201 bp, Homo sapiens
ggaccccgcccctgccggtggctgcggtagctgctgcgcgctgaggcgcctgctcagtgtgggacgcggagagcgaggggcggcggcggcgcccgctggcrctcaagcatggcggcggcggcattgggcagctcctcaggctcggcgtccccggccgtggctgagctctgccagaacaccccggagacctttttggaggcc

SEQ ID NO: 71713 - DNA, 201 bp, Homo sapiens; identical to SEQ ID NO: 71701

SEQ ID NO: 71714 - DNA, 201 bp, Homo sapiens; identical to SEQ ID NO: 71712

SEQ ID NO: 71715 - DNA, 201 bp, Homo sapiens; identical to SEQ ID NO: 71701

SEQ ID NO: 71716 - DNA, 201 bp, Homo sapiens; identical to SEQ ID NO: 71712

SEQ ID NO: 71717 - DNA, 201 bp, Homo sapiens; identical to SEQ ID NO: 71701

SEQ ID NO: 71718 - DNA, 201 bp, Homo sapiens; identical to SEQ ID NO: 71703

SEQ ID NO: 71719 - DNA, 135 bp, Homo sapiens; identical to SEQ ID NO: 71704

SEQ ID NO: 71720 - DNA, 201 bp, Homo sapiens
tgcaggagaagaggcattgactccatcagttcctataaataaaggtcccaaacctaagagggagaagaaggagcctggtaccagagtgagaaaaacacctrcatcatctggtaaacctagtgcaaagaaagtgaagaaacggaatccttggtcagatgatgaatccaagtcagaaagtgatttggaagaaacagaacctgt

SEQ ID NO: 71721 - DNA, 201 bp, Homo sapiens
attcaggaactccttcaggcccagattttaattatattttaaatatgtctctgtggtctcttactaaagaaaaagttgaagaactgattaaacagagagaygcaaaagggcgagaggtcaatgatcttaaaagaaaatctccttcagatctttggaaagaggatttagcggcatttgttgaagaactggatgtagtggaat

SEQ ID NO: 71722 - DNA, 201 bp, Homo sapiens
caattaaaggtaaagttggcaaacctaaggtgaagaaactccagttggaagagacaatgccctcaccttatggcagaagaataattcctgaaattacagcyatgaaggcagatgccagcaaaaagttgctgaagaagaagaagggtgatcttgatactgcagcagtaaaagtggaatttgatgaagaattcagtggagcac

SEQ ID NO: 71723 - DNA, 201 bp, Homo sapiens
ataagaacatgacttgtattaaagtttctattgatcctgaatctaacattataagcatttggaataatgggaaaggcattccagtagtagaacacaaggtrgagaaagtttatgttcctgctttaatttttggacagcttttaacatccagtaactatgatgatgatgagaaaaaagttacaggtggtcgtaatggttatg

SEQ ID NO: 71724 - DNA, 201 bp, Homo sapiens
ggtaaaggccgaggggcaaagaaaaggaaagcatctggctctgaaaatgaaggcgattataaccctggcaggaaaacatccaaaacaacaagcaagaaacygaagaagacatcttttgatcaggattcagatgtggacatcttcccctcagacttccctactgagccaccttctctgccacgaaccggtcgggctaggaaa

SEQ ID NO: 71725 - DNA, 201 bp, Homo sapiens
ctgccacgaaccggtcgggctaggaaagaagtaaaatattttgcagagtctgatgaagaagaagatgtgcccaaagagcacaaacatttttcaacaaatakcttgtgttgtccttttgtcttctctgtctcagacttttgtacatctggcttattttaatgtgatgatgtaattgacggttttttattattgtggtaggcc

SEQ ID NO: 71726 - DNA, 201 bp, Homo sapiens
ttgatcaggattcagatgtggacatcttcccctcagacttccctactgagccaccttctctgccacgaaccggtcgggctaggaaagaagtaaaatatttygcagagtctgatgaagaagaagatgtgcccaaagagcacaaacatttttcaacaaatatcttgtgttgtccttttgtcttctctgtctcagacttttgta

SEQ ID NO: 71727 - DNA, 201 bp, Homo sapiens
acatcttcccctcagacttccctactgagccaccttctctgccacgaaccggtcgggctaggaaagaagtaaaatattttgcagagtctgatgaagaagawgatgtgcccaaagagcacaaacatttttcaacaaatatcttgtgttgtccttttgtcttctctgtctcagacttttgtacatctggcttattttaatgtg

SEQ ID NO: 71728 - DNA, 148 bp, Homo sapiens
gtgcggtgttatgccggacaagagggaggtgaccgtggcggcggcggyggcggctctgtttattgtccctctcggtgtgtgtgtgtgaggaaatcggggctgcagcgaggctaaggctgcctttgaagcagcggcggcgaccgggacg

SEQ ID NO: 71729 - DNA, 201 bp, Homo sapiens; identical to SEQ ID NO: 71720

SEQ ID NO: 71730 - DNA, 161 bp, Homo sapiens
aatttccctaatggcttgtgaacaagtaaacaaaaacttaacactgaaaagtgtttctgccttggaggctatcattactgtaaaaaaattttttttaactaactgtgtagttatgtcattaaacaagtaataaaccacttttaatttaaagtgacattaac

SEQ ID NO: 71731 - DNA, 201 bp, Homo sapiens
acattaaaaatggaactgtgttctctgtctctttactgaagataaaggtgtagtaaaagctcccacacacctttaaaataaatatattttattctttgccmggagactccatggaaaaaggtaaacagtatatgaacatagaaagcattgttaaacaaacaatctcaatgtacaaacagagccagtgaaagtacatcacag

SEQ ID NO: 71732 - DNA, 201 bp, Homo sapiens; identical to SEQ ID NO: 71721

SEQ ID NO: 71733 - DNA, 201 bp, Homo sapiens
gtatatgaacatagaaagcattgttaaacaaacaatctcaatgtacaaacagagccagtgaaagtacatcacagacttgctaatatatcaaaaaaaaaaaattccactagtgcttaaatgagaactaagaaactgacacttgtatctgttaaccactctaccacagctttcactctgcttcatagtgattgaacaaggtca

SEQ ID NO: 71734 - DNA, 201 bp, Homo sapiens; identical to SEQ ID NO: 71722

SEQ ID NO: 71735 - DNA, 201 bp, Homo sapiens; identical to SEQ ID NO: 71723

SEQ ID NO: 71736 - DNA, 201 bp, Homo sapiens; identical to SEQ ID NO: 71724

SEQ ID NO: 71737 - DNA, 158 bp, Homo sapiens
ttccctaatggcttgtgaacaagtaaacaaaaacttaacactgaaaagtgtttctgccttggaggctatcattactgtaaaaaaattttttttaactaactgtgtagttatgtcattaaacaagtaataaaccacttttaatttaaagtgacattaac

SEQ ID NO: 71738 - DNA, 201 bp, Homo sapiens
gaagtaaaatattttgcagagtctgatgaagaagaagatgatgttgattttgcaatgtttaattaagtgcccaaagagcacaaacatttttcaacaaatakcttgtgttgtccttttgtcttctctgtctcagacttttgtacatctggcttattttaatgtgatgatgtaattgacggttttttattattgtggtaggcc

SEQ ID NO: 71739 - DNA, 201 bp, Homo sapiens
ttgatcaggattcagatgtggacatcttcccctcagacttccctactgagccaccttctctgccacgaaccggtcgggctaggaaagaagtaaaatatttygcagagtctgatgaagaagaagatgatgttgattttgcaatgtttaattaagtgcccaaagagcacaaacatttttcaacaaatatcttgtgttgtcctt

SEQ ID NO: 71740 - DNA, 159 bp, Homo sapiens
tttccctaatggcttgtgaacaagtaaacaaaaacttaacactgaaaagtgtttctgccttggaggctatcattactgtaaaaaaattttttttaactaactgtgtagttatgtcattaaacaagtaataaaccacttttaatttaaagtgacattaac

SEQ ID NO: 71741 - DNA, 201 bp, Homo sapiens
acatcttcccctcagacttccctactgagccaccttctctgccacgaaccggtcgggctaggaaagaagtaaaatattttgcagagtctgatgaagaagawgatgatgttgattttgcaatgtttaattaagtgcccaaagagcacaaacatttttcaacaaatatcttgtgttgtccttttgtcttctctgtctcagact

SEQ ID NO: 71742 - DNA, 148 bp, Homo sapiens; identical to SEQ ID NO: 71728

SEQ ID NO: 71743 - DNA, 160 bp, Homo sapiens
atttccctaatggcttgtgaacaagtaaacaaaaacttaacactgaaaagtgtttctgccttggaggctatcattactgtaaaaaaattttttttaactaactgtgtagttatgtcattaaacaagtaataaaccacttttaatttaaagtgacattaac

SEQ ID NO: 71744 - DNA, 201 bp, Homo sapiens; identical to SEQ ID NO: 71720

SEQ ID NO: 71745 - DNA, 161 bp, Homo sapiens; identical to SEQ ID NO: 71730

SEQ ID NO: 71746 - DNA, 201 bp, Homo sapiens; identical to SEQ ID NO: 71731

SEQ ID NO: 71747 - DNA, 201 bp, Homo sapiens
attcaggaactccttcaggcccagattttaattatattttaaatatgtctctgtggtctcttactaaagaaaaagttgaagaactgattaaacagagagaygcaaaagggcgagaggtcaatgatcttaaaagaaaatctccttcagatctttggaaagaggatttagcggcatttgttgaagaactggataaagtggaat

SEQ ID NO: 71748 - DNA, 201 bp, Homo sapiens; identical to SEQ ID NO: 71733

SEQ ID NO: 71749 - DNA, 201 bp, Homo sapiens; identical to SEQ ID NO: 71722

SEQ ID NO: 71750 - DNA, 201 bp, Homo sapiens; identical to SEQ ID NO: 71723

SEQ ID NO: 71751 - DNA, 201 bp, Homo sapiens; identical to SEQ ID NO: 71724

SEQ ID NO: 71752 - DNA, 158 bp, Homo sapiens; identical to SEQ ID NO: 71737

SEQ ID NO: 71753 - DNA, 201 bp, Homo sapiens; identical to SEQ ID NO: 71738

SEQ ID NO: 71754 - DNA, 201 bp, Homo sapiens; identical to SEQ ID NO: 71739

SEQ ID NO: 71755 - DNA, 159 bp, Homo sapiens; identical to SEQ ID NO: 71740

SEQ ID NO: 71756 - DNA, 201 bp, Homo sapiens; identical to SEQ ID NO: 71741

SEQ ID NO: 71757 - DNA, 148 bp, Homo sapiens; identical to SEQ ID NO: 71728

SEQ ID NO: 71758 - DNA, 160 bp, Homo sapiens; identical to SEQ ID NO: 71743

SEQ ID NO: 71759 - DNA, 201 bp, Homo sapiens
ggtctggacctgccttcccaggcccttctgtgggggtgaaggtggggaaggcctgcggcgcccagatcactgccttagcagtagtcttgcctgttcagtgyaaggggcaggttttggggggaggaattcttagcgcaaggacgggcctcagccctgtcgcctccagggggccgctgacccaggtggggagagggcagaaga

SEQ ID NO: 71760 - DNA, 201 bp, Homo sapiens; identical to SEQ ID NO: 71759

SEQ ID NO: 71761 - DNA, 201 bp, Homo sapiens
ggttttaaggttgaatcccagctctgccccttaacagtcatgagacctgctgcccccgagagcaggccgtgctgccctggcaaatggggagtttcctgagrggtgggtgggtggcagagccccagccttgcctagggcacctacccgagagcggctactgtgacctccccacagggcaatgggcatgagcgagacttcatg

SEQ ID NO: 71762 - DNA, 201 bp, Homo sapiens
tagaaggtgtcggggcctggttttaaggttgaatcccagctctgccccttaacagtcatgagacctgctgcccccgagagcaggccgtgctgccctggcaratggggagtttcctgaggggtgggtgggtggcagagccccagccttgcctagggcacctacccgagagcggctactgtgacctccccacagggcaatggg

SEQ ID NO: 71763 - DNA, 201 bp, Homo sapiens
ctgcaccattactgctgtggctttgtgctagttggggccctgccttgggttcttgcgaccccgaactcctgagccaggtcacatgtggacagtcctttacrgtttgcttttcacatccctgatcccaaccagtcccaccacagacttgagagggtggcagagcgggatttcttcctctgatagggaacctaagagcactgg

SEQ ID NO: 71764 - DNA, 201 bp, Homo sapiens; identical to SEQ ID NO: 71759

SEQ ID NO: 71765 - DNA, 201 bp, Homo sapiens; identical to SEQ ID NO: 71759

SEQ ID NO: 71766 - DNA, 201 bp, Homo sapiens; identical to SEQ ID NO: 71759

SEQ ID NO: 71767 - DNA, 201 bp, Homo sapiens
gcccgatgtcccccttgcagtggaccaggcatggctggagggccactgtgacggccgcatcggcatcttccccaagtgcttcgtggtccccgccggccctyggatgtcaggagcccccggccgcctgccccgatcccagcagggagatcagccctaatgatgctgtgtccatgatgcttttaataaaaacaacccccactg

SEQ ID NO: 71768 - DNA, 132 bp, Homo sapiens
gtgtcagtcttgctctgtcctacagggctgcyggcaatgggggggcctggccccggcccctgtgaggaccccgcgggtgctgggggagcaggtgcagggggctccgagcccctggtgactgtcaccgtgcag

SEQ ID NO: 71769 - DNA, 201 bp, Homo sapiens
gcctgccccgatcccagcagggagatcagccctaatgatgctgtgtccatgatgcttttaataaaaacaacccccactgcagtctcaccctccaagtgggkgtgggaggccgggctggcccagcagaagcccccaggcctggactccatccatctgctcagacaacagcagggagagcgggggtccaggtggggcagctcc

SEQ ID NO: 71770 - DNA, 201 bp, Homo sapiens
gaccaggcatggctggagggccactgtgacggccgcatcggcatcttccccaagtgcttcgtggtccccgccggccctcggatgtcaggagcccccggccrcctgccccgatcccagcagggagatcagccctaatgatgctgtgtccatgatgcttttaataaaaacaacccccactgcagtctcaccctccaagtgggt

SEQ ID NO: 71771 - DNA, 201 bp, Homo sapiens
agcaccgtggtgcccggggtgtggggggcttagagctcggcctgtgctgtgagcagacgtggcacccagaggccacgcctgggtaacgccctgcagagccygatgtcccccttgcagtggaccaggcatggctggagggccactgtgacggccgcatcggcatcttccccaagtgcttcgtggtccccgccggccctcgga

SEQ ID NO: 71772 - DNA, 201 bp, Homo sapiens; identical to SEQ ID NO: 71767

SEQ ID NO: 71773 - DNA, 132 bp, Homo sapiens; identical to SEQ ID NO: 71768

SEQ ID NO: 71774 - DNA, 201 bp, Homo sapiens; identical to SEQ ID NO: 71769

SEQ ID NO: 71775 - DNA, 201 bp, Homo sapiens
tcctctaccaggtggtggcccagcacagctactccgcccaggggccagaggacctgggcttccgacagggggacacggtggacgtcctgtgtgaagagccygatgtcccccttgcagtggaccaggcatggctggagggccactgtgacggccgcatcggcatcttccccaagtgcttcgtggtccccgccggccctcgga

SEQ ID NO: 71776 - DNA, 201 bp, Homo sapiens; identical to SEQ ID NO: 71770

SEQ ID NO: 71777 - DNA, 201 bp, Homo sapiens
ggtggacgtcctgtgtgaagtggaccaggcatggctggagggccactgtgacggccgcatcggcatcttccccaagtgcttcgtggtccccgccggccctyggatgtcaggagcccccggccgcctgccccgatcccagcagggagatcagccctaatgatgctgtgtccatgatgcttttaataaaaacaacccccactg

SEQ ID NO: 71778 - DNA, 132 bp, Homo sapiens; identical to SEQ ID NO: 71768

SEQ ID NO: 71779 - DNA, 201 bp, Homo sapiens; identical to SEQ ID NO: 71769

SEQ ID NO: 71780 - DNA, 201 bp, Homo sapiens; identical to SEQ ID NO: 71770

SEQ ID NO: 71781 - DNA, 201 bp, Homo sapiens
aagctctcagaaaaatctctagtggtggctgccgtcgctccagacaatcggaatcctgccttcaccaccatgggctggctttttctaaaggttttgttggygggagtgagtttctcaggatttctttatcctcttgtggatttttgcatcagtgggaaaacaagaggacagaagccaaactttgtgattattttggccgat

SEQ ID NO: 71782 - DNA, 201 bp, Homo sapiens
gctaaaagagtctctctctaagtatgtaatatacaagaaatacaattcaaagagatgttcctataagtacattttttacacggcatatatttaaaaaggakgccccttttaatataaaattccggttatataccaatatggttaattagcatttacactatagtttgaacgtattttaaatagcatgatgtgtatacaatg

SEQ ID NO: 71783 - DNA, 201 bp, Homo sapiens
ctgccttcaccaccatgggctggctttttctaaaggttttgttggcgggagtgagtttctcaggatttctttatcctcttgtggatttttgcatcagtggraaaacaagaggacagaagccaaactttgtgattattttggccgatgacatggggtggggtgacctgggagcaaactgggcagaaacaaaggacactgcca

SEQ ID NO: 71784 - DNA, 201 bp, Homo sapiens
ccgcagaagctgtgcccctagaaagaggtggtgcggagtaccaggctgtgctgcccgaggtcagaaaggttcttgcagacgtcctccaagacattgccaaygacaacatctccagcgcagattacactcaggacccttcagtaactccctgctgtaatccctaccaaattgcctgccgctgtcaagccgcataacagacca

SEQ ID NO: 71785 - DNA, 201 bp, Homo sapiens
gggaaggagggcaccgggtcccagcactggcttactggcctggcagagttccagttaatgtcaccagcactgccttgttaagcgtgctggacatttttccractgtggtagccctggcccaggccagcttacctcaaggacggcgctttgatggtgtggacgtctccgaggtgctctttggccggtcacagcctgggcaca

SEQ ID NO: 71786 - DNA, 201 bp, Homo sapiens
aggccctgaatacagaagggtcactttcttagtggccaaagagcagttgttgacattgatgtctaattattgaacacgaccagtcattttactgagctgcrgtgaggaaacactgaccatagaagatcaagccaaatgagggattgcaaatttcctgattcttttgaattaggattccagatgggggcctcatttctacag

SEQ ID NO: 71787 - DNA, 201 bp, Homo sapiens
ctttatgaaaacctcaacattgtggagcagccggtgaacttgagcagccttgcccagaagtatgctgagaaagcaacccagttcatccagcgtgcaagcascagcgggaggcccttcctgctctatgtggctctggcccacatgcacgtgcccttacctgtgactcagctaccagcagcgccacggggcagaagcctgtat

SEQ ID NO: 71788 - DNA, 201 bp, Homo sapiens
agtatgctgagaaagcaacccagttcatccagcgtgcaagcaccagcgggaggcccttcctgctctatgtggctctggcccacatgcacgtgcccttaccygtgactcagctaccagcagcgccacggggcagaagcctgtatggtgcagggctctgggagatggacagtctggtgggccagatcaaggacaaagttgacc

SEQ ID NO: 71789 - DNA, 201 bp, Homo sapiens
cttcctgctctatgtggctctggcccacatgcacgtgcccttacctgtgactcagctaccagcagcgccacggggcagaagcctgtatggtgcagggctcygggagatggacagtctggtgggccagatcaaggacaaagttgaccacacagtgaaggaaaacacattcctctggtttacaggagacaatggcccgtgggc

SEQ ID NO: 71790 - DNA, 201 bp, Homo sapiens
agcggggcagctggagagtttggagccctgcagactgtccgcctggagcgttacaaggccttctacattaccggtggagccagggcgtgtgatgggagcayggggcctgagctgcagcataagtttcctctgattttcaacctggaagacgataccgcagaagctgtgcccctagaaagaggtggtgcggagtaccaggct

SEQ ID NO: 71791 - DNA, 201 bp, Homo sapiens
gcgcagattacactcaggacccttcagtaactccctgctgtaatccctaccaaattgcctgccgctgtcaagccgcataacagaccaatttttattccacraggaggagtacctggaaattaggcaagtttgcttccaaatttcatttttaccctctttacaaacacacgctttagtttagtcttggagtttagttttgga

SEQ ID NO: 71792 - DNA, 201 bp, Homo sapiens
ccagcttacctcaaggacggcgctttgatggtgtggacgtctccgaggtgctctttggccggtcacagcctgggcacagggtgctgttccaccccaacagyggggcagctggagagtttggagccctgcagactgtccgcctggagcgttacaaggccttctacattaccggtggagccagggcgtgtgatgggagcacgg

SEQ ID NO: 71793 - DNA, 201 bp, Homo sapiens
gacgataccgcagaagctgtgcccctagaaagaggtggtgcggagtaccaggctgtgctgcccgaggtcagaaaggttcttgcagacgtcctccaagacaytgccaacgacaacatctccagcgcagattacactcaggacccttcagtaactccctgctgtaatccctaccaaattgcctgccgctgtcaagccgcataa

SEQ ID NO: 71794 - DNA, 201 bp, Homo sapiens
gctgaggtgggtggatcactaggtcaggagtttgagaccagcctggccaacatggtgaaaccccatcgctactaaaaaatacaaaaattagccgggcatgstggcgctcacctgtaatcccagctactcgggaggctgaggcaggagagaatcgcttgaaccggggaggtggaggctgcagtgagccgagatcgcaccact

SEQ ID NO: 71795 - DNA, 201 bp, Homo sapiens
agagttccagttaatgtcaccagcactgccttgttaagcgtgctggacatttttccaactgtggtagccctggcccaggccagcttacctcaaggacggcrctttgatggtgtggacgtctccgaggtgctctttggccggtcacagcctgggcacagggtgctgttccaccccaacagcggggcagctggagagtttgga

SEQ ID NO: 71796 - DNA, 201 bp, Homo sapiens
atcccagctactcgggaggctgaggcaggagagaatcgcttgaaccggggaggtggaggctgcagtgagccgagatcgcaccactgcactccagcctgggygatggagcaagactccatctcaaaaaaaaaaaagtcagtttaggctgggcgcagtggctcacacctgtaatcccagcactttaggaggctgaggggggtg

SEQ ID NO: 71797 - DNA, 201 bp, Homo sapiens
ggcccaatccccttcctctccttttaagggtgaaatgactgcatttaaaagaagttaaagagttcctcctgtcccctataaccacaaggaaacaaaaaaatatataaaaacctcaaaaatgcattgccatgattttattattagtgtccaaaatgggactcccaagtaataaatgatttattccagccacagccaaaaaag

SEQ ID NO: 71798 - DNA, 201 bp, Homo sapiens
cgtgctggacatttttccaactgtggtagccctggcccaggccagcttacctcaaggacggcgctttgatggtgtggacgtctccgaggtgctctttggcyggtcacagcctgggcacagggtgctgttccaccccaacagcggggcagctggagagtttggagccctgcagactgtccgcctggagcgttacaaggcctt

SEQ ID NO: 71799 - DNA, 201 bp, Homo sapiens; identical to SEQ ID NO: 71781

SEQ ID NO: 71800 - DNA, 201 bp, Homo sapiens; identical to SEQ ID NO: 71787

SEQ ID NO: 71801 - DNA, 201 bp, Homo sapiens; identical to SEQ ID NO: 71788

SEQ ID NO: 71802 - DNA, 201 bp, Homo sapiens; identical to SEQ ID NO: 71783

SEQ ID NO: 71803 - DNA, 201 bp, Homo sapiens; identical to SEQ ID NO: 71789

SEQ ID NO: 71804 - DNA, 201 bp, Homo sapiens; identical to SEQ ID NO: 71790

SEQ ID NO: 71805 - DNA, 201 bp, Homo sapiens; identical to SEQ ID NO: 71792

SEQ ID NO: 71806 - DNA, 201 bp, Homo sapiens
gcgcagattacactcaggacccttcagtaactccctgctgtaatccctaccaaattgcctgccgctgtcaagccgcataacagaccaatttttattccacraggaggagtacctggaaattaggcaaggagaagaaacaactggctcatgcccagcttcctggcactgaatgggcacacaggcctcaggacaaactttctt

SEQ ID NO: 71807 - DNA, 201 bp, Homo sapiens; identical to SEQ ID NO: 71793

SEQ ID NO: 71808 - DNA, 201 bp, Homo sapiens; identical to SEQ ID NO: 71795

SEQ ID NO: 71809 - DNA, 201 bp, Homo sapiens; identical to SEQ ID NO: 71784

SEQ ID NO: 71810 - DNA, 201 bp, Homo sapiens; identical to SEQ ID NO: 71798

SEQ ID NO: 71811 - DNA, 201 bp, Homo sapiens; identical to SEQ ID NO: 71785

SEQ ID NO: 71812 - DNA, 201 bp, Homo sapiens; identical to SEQ ID NO: 71786

SEQ ID NO: 71813 - DNA, 201 bp, Homo sapiens; identical to SEQ ID NO: 71781

SEQ ID NO: 71814 - DNA, 201 bp, Homo sapiens; identical to SEQ ID NO: 71782

SEQ ID NO: 71815 - DNA, 201 bp, Homo sapiens; identical to SEQ ID NO: 71783

SEQ ID NO: 71816 - DNA, 201 bp, Homo sapiens; identical to SEQ ID NO: 71784

SEQ ID NO: 71817 - DNA, 201 bp, Homo sapiens; identical to SEQ ID NO: 71785

SEQ ID NO: 71818 - DNA, 201 bp, Homo sapiens; identical to SEQ ID NO: 71786

SEQ ID NO: 71819 - DNA, 201 bp, Homo sapiens; identical to SEQ ID NO: 71787

SEQ ID NO: 71820 - DNA, 201 bp, Homo sapiens; identical to SEQ ID NO: 71788

SEQ ID NO: 71821 - DNA, 201 bp, Homo sapiens; identical to SEQ ID NO: 71789

SEQ ID NO: 71822 - DNA, 201 bp, Homo sapiens; identical to SEQ ID NO: 71790

SEQ ID NO: 71823 - DNA, 201 bp, Homo sapiens; identical to SEQ ID NO: 71791

SEQ ID NO: 71824 - DNA, 201 bp, Homo sapiens; identical to SEQ ID NO: 71792

SEQ ID NO: 71825 - DNA, 201 bp, Homo sapiens; identical to SEQ ID NO: 71793

SEQ ID NO: 71826 - DNA, 201 bp, Homo sapiens; identical to SEQ ID NO: 71794

SEQ ID NO: 71827 - DNA, 201 bp, Homo sapiens; identical to SEQ ID NO: 71795

SEQ ID NO: 71828 - DNA, 201 bp, Homo sapiens; identical to SEQ ID NO: 71796

SEQ ID NO: 71829 - DNA, 201 bp, Homo sapiens; identical to SEQ ID NO: 71797

SEQ ID NO: 71830 - DNA, 201 bp, Homo sapiens; identical to SEQ ID NO: 71798

SEQ ID NO: 71831 - DNA, 201 bp, Homo sapiens
tgctgaggtggctgtcgccgggccgcggacgctcccccgggcggggttgagtcggcgctcagctgcttctctttcaaccaggactgcacatccctagcaaytggaactaaagccgggtataagctgttttctctgagttctgtggagcagctggatcaagtccacggaagcaatgaaatcccggacgtctacatcgtggag

SEQ ID NO: 71832 - DNA, 201 bp, Homo sapiens
cattgtatacacatcatgctatttaaaatacgttcaaactatagtgtaaatgctaattaaccatattggtatataaccggaattttatattaaaaggggcmtcctttttaaatatatgccgtgtaaaaaatgtacttataggaacatctctttgaattgtatttcttgtatattacatacttagagagagactcttttagc

SEQ ID NO: 71833 - DNA, 201 bp, Homo sapiens
tggagtggctacatgggaaagatgtttatggctgctaccaactacctccctacccaggtgtcagacatgatgcatcaggacagggcttttgccactgcacrcttgaacttctccggacagaggaacatctgtaccctctcaacgatccagaagttgccacggctgctagttgcgtcatccagtggacacctttatatgtac

SEQ ID NO: 71834 - DNA, 201 bp, Homo sapiens
gagcccccgatggaggccgaggccgcggacgctcccccgggcggggttgagtcggcgctcagctgcttctctttcaaccaggactgcacatccctagcaaytggaactaaagccgggtataagctgttttctctgagttctgtggagcagctggatcaagtccacggaagcaatgaaatcccggacgtctacatcgtggag

SEQ ID NO: 71835 - DNA, 201 bp, Homo sapiens; identical to SEQ ID NO: 71832

SEQ ID NO: 71836 - DNA, 201 bp, Homo sapiens; identical to SEQ ID NO: 71833

SEQ ID NO: 71837 - DNA, 201 bp, Homo sapiens
agatggcggacgaggagaagctgccgcccggctgggagaagcgcatgagccgcagctcaggccgagtgtactacttcaaccacatcactaacgccagccartgggagcggcccagcggcaacagcagcagtggtggcaaaaacgggcagggggagcctgccagggtccgctgctcgcacctgctggtgaagcacagccagt

SEQ ID NO: 71838 - DNA, 103 bp, Homo sapiens
ctcctctgttcagtcgcaaaggtgaacactcatgcggcccagccatgggccctctgagcaactgtgcagcaccctttcacccccaattaaacccagaaccmct

SEQ ID NO: 71839 - DNA, 201 bp, Homo sapiens
gccatttgaagacgcctcgtttgcgctgcggacgggggagatgagcgggcccgtgttcacggattccggcatccacatcatcctccgcactgagtgagggkggggagcccaggcctggcctcggggcagggcagggcggctaggccggccagctcccccttgcccgccagccagtggccgaaccccccactccctgccacc

SEQ ID NO: 71840 - DNA, 201 bp, Homo sapiens; identical to SEQ ID NO: 71837

SEQ ID NO: 71841 - DNA, 105 bp, Homo sapiens
ctcctctgttcagtcgcaaaggtgaacactcatgcggcccagccatgggccctctgagcaactgtgcagcaccctttcacccccaattaaacccagaaccmctgc

SEQ ID NO: 71842 - DNA, 201 bp, Homo sapiens; identical to SEQ ID NO: 71839

SEQ ID NO: 71843 - DNA, 201 bp, Homo sapiens
tggattttaaaagttttttattatgcattatatcaaatctaccactgtatgagtggaaattaagactttatgtagtttttatatgttgtaatatttcttcwaataaatctctcctataaaccaccctgggtgggtattcgtgatttgcacgggacttctggctgaggtcagacaggaacaagctcttccatgctgaaggcg

SEQ ID NO: 71844 - DNA, 201 bp, Homo sapiens
gtaagcacggtcacctgtgtcccatcgacaccggcctcatcgagaagaatatcgaactcttcttttctggttcagcaaaaccaatctatgatgatgacccrtctcttgaaggtggtgttaatggcaaaaatcttggccccataaatgaatggtggatcactggctttgatggaggtgaaaaggccctcatcggcttcagca

SEQ ID NO: 71845 - DNA, 201 bp, Homo sapiens
tcagctaaaataaaggaggaggaagctgctaaggactagttctgccctccggtacatggtgtttgtggccttggctgacatgaagctgttgtgtgaggttygcttatcaactaatgatttagtgatcaaattgtgcagtactttgtgcattctggattttaaaagttttttattatgcattatatcaaatctaccactgta

SEQ ID NO: 71846 - DNA, 201 bp, Homo sapiens
ttaacagaaaaggaatgtgtgaaggagaaattgaatctcttgcacgaatttctgcaaacagaaataaagaatcagttatgtgacttggaaaccaaattacrtaaagaagaattatccgaggagggctacctggctaaagtcaaatcccttttaaataaagatttgtccttggagaacggtgctcatgcttacaaccgggaa

SEQ ID NO: 71847 - DNA, 201 bp, Homo sapiens
ccatcctcagggaccacatctgtaaggacatgagtgcattggtggctgcccgcatgcggcacatccccttggccccagggtcagactggcgcgatctgccyaacatcgaggtgcggctctcagacggcaccatggccaggaagctgcggtatacccaccatgacaggaagaacggccgcagcagctctggggccctccgtg

SEQ ID NO: 71848 - DNA, 201 bp, Homo sapiens
atatatccacagcaaagtgaaagtcatctacaaagccccctccgaaaactgggccatggagggaggcatggatcccgagtccctgctggagggggacgacrggaagacctacttctaccagctgtggtatgatcaagactacgcgagattcgagtcccctccaaaaacccagccaacagaggacaacaagttcaaattctg

SEQ ID NO: 71849 - DNA, 201 bp, Homo sapiens
tccgatggagaggctaagcctgaaccttcacctagccccaggattacaaggaaaagcaccaggcaaaccaccatcacatctcattttgcaaagggccctgycaaacggaaacctcaggaagagtctgaaagagccaaatcggatgagtccatcaaggaagaagacaaagaccaggatgagaagagacgtagagttacatcc

SEQ ID NO: 71850 - DNA, 201 bp, Homo sapiens
tggagacgagaaagatgagaagaagcacagaagtcaacccaaagatctagctgccaaacggaggcccgaagaaaaagaacctgaaaaagtaaatccacagrtttctgatgaaaaagacgaggatgaaaaggaggagaagagacgcaaaacgacccccaaagaaccaacggagaaaaaaatggctcgcgccaaaacagtcat

SEQ ID NO: 71851 - DNA, 201 bp, Homo sapiens
atgcgcccatatttgggctgatgcaggagaagatctacatcagcaagattgtggtggagttcctgcagagcaattccgactcgacctatgaggacctgatmaacaagatcgagaccacggttcctccttctggcctcaacttgaaccgcttcacagaggactccctcctgcgacacgcgcagtttgtggtggagcaggtgg

SEQ ID NO: 71852 - DNA, 201 bp, Homo sapiens
atggatcccgagtccctgctggagggggacgacgggaagacctacttctaccagctgtggtatgatcaagactacgcgagattcgagtcccctccaaaaayccagccaacagaggacaacaagttcaaattctgtgtgagctgtgcccgtctggctgagatgaggcaaaaagaaatccccagggtcctggagcagctcgag

SEQ ID NO: 71853 - DNA, 201 bp, Homo sapiens
gggaccctgcggcccaggcgttccggctgaacaaccccggctccacagtgttcacagaggactgcaacatcctgctgaagctggtcatggctggggagacyaccaactcccgcggccagcggctgccccagaagggagacgtggagatgctgtgcggcgggccgccctgccagggcttcagcggcatgaaccgcttcaatt

SEQ ID NO: 71854 - DNA, 201 bp, Homo sapiens
tcacagaggactccctcctgcgacacgcgcagtttgtggtggagcaggtggagagttatgacgaggccggggacagtgatgagcagcccatcttcctgacrccctgcatgcgggacctgatcaagctggctggggtcacgctgggacagaggcgagcccaggcgaggcggcagaccatcaggcattctaccagggagaagg

SEQ ID NO: 71855 - DNA, 201 bp, Homo sapiens; identical to SEQ ID NO: 71843

SEQ ID NO: 71856 - DNA, 201 bp, Homo sapiens; identical to SEQ ID NO: 71844

SEQ ID NO: 71857 - DNA, 201 bp, Homo sapiens
atgcactgatgttgtgtttttaacatgtcaatctgtccgttcacatgtgtggtacatggtgtttgtggccttggctgacatgaagctgttgtgtgaggttygcttatcaactaatgatttagtgatcaaattgtgcagtactttgtgcattctggattttaaaagttttttattatgcattatatcaaatctaccactgta

SEQ ID NO: 71858 - DNA, 201 bp, Homo sapiens; identical to SEQ ID NO: 71846

SEQ ID NO: 71859 - DNA, 201 bp, Homo sapiens; identical to SEQ ID NO: 71847

SEQ ID NO: 71860 - DNA, 201 bp, Homo sapiens; identical to SEQ ID NO: 71848

SEQ ID NO: 71861 - DNA, 201 bp, Homo sapiens; identical to SEQ ID NO: 71849

SEQ ID NO: 71862 - DNA, 201 bp, Homo sapiens; identical to SEQ ID NO: 71850

SEQ ID NO: 71863 - DNA, 201 bp, Homo sapiens; identical to SEQ ID NO: 71851

SEQ ID NO: 71864 - DNA, 201 bp, Homo sapiens; identical to SEQ ID NO: 71852

SEQ ID NO: 71865 - DNA, 201 bp, Homo sapiens; identical to SEQ ID NO: 71853

SEQ ID NO: 71866 - DNA, 201 bp, Homo sapiens; identical to SEQ ID NO: 71854

SEQ ID NO: 71867 - DNA, 201 bp, Homo sapiens
acccacaggacgtggttcaggccattgtcaacgtcatcagctcgactcgaccacccctgcgccgacagaccaacatccgctactcgccgctgaccacgctyaaaaccgtggattcctctggcagcctgtatgtgcgaacgacccaccgcctcctcttccgctgtccacgcctcctcaaccttggccttcaatgtctgtcct

SEQ ID NO: 71868 - DNA, 201 bp, Homo sapiens
agacactggaggcagctgctggggaggctctggggcagaccctcaccgtggcccagctggacgtgtgcagtgatgagtcggtggcccagtgtctcagctgyatccagggagaagtggacgtgctggtgaataatgctggaatgggcctggtggggcccctggaggggctcagccttgctgccatgcagaatgtctttgaca

SEQ ID NO: 71869 - DNA, 201 bp, Homo sapiens
agaatcccagaagggcctttattttcaggcatagactcctctgtggtcacagctggagcacagagagggaccctgggaacttggcctgggaagcccagagyaggaagccacagctgtctctgggaaagcaagggaggcttcctggaggaagcggcattgttatgagccttgaaggaagagacagactctgctacattcaac

SEQ ID NO: 71870 - DNA, 196 bp, Homo sapiens
caacctcgtgacttcatgatcctgggcctgagaacacaggaatgattcatagcccaccccccacctccatgcatacaccagagctctgtggaccaaggggwcattcctggtcacacactccatcagcaaaatgtatttgagcacacaccagcaatgtatgtatattttttccattaaatatatatttataaccaca

SEQ ID NO: 71871 - DNA, 201 bp, Homo sapiens
gggaggcttcctggaggaagcggcattgttatgagccttgaaggaagagacagactctgctacattcaacctcgtgacttcatgatcctgggcctgagaayacaggaatgattcatagcccaccccccacctccatgcatacaccagagctctgtggaccaaggggtcattcctggtcacacactccatcagcaaaatgta

SEQ ID NO: 71872 - DNA, 201 bp, Homo sapiens
ctcgctatccagctgctgcagttcaacatcttcatctccctggtggagccaggccccgtggtcaccgagtttgaggggaagcttctggcgcaggtttctayggctgagttcccaggcactgaccctgagaccctgcactacttccgggacctctatctcccagcctccaggaagctgttttgctccgtgggacagaaccca

SEQ ID NO: 71873 - DNA, 201 bp, Homo sapiens
gccttgctgccatgcagaatgtctttgacaccaactttttcggagctgtccgtctcgtcaaagctgtgcttccaggcatgaagaggaggcggcagggccabatcgtggtgatcagcagtgtcatgggcctgcagggtgtcatcttcaacgatgtctatgcagcttccaagttcgccctggagggattcttcgaaagcctcg

SEQ ID NO: 71874 - DNA, 201 bp, Homo sapiens
ttgctgccatgcagaatgtctttgacaccaactttttcggagctgtccgtctcgtcaaagctgtgcttccaggcatgaagaggaggcggcagggccacatygtggtgatcagcagtgtcatgggcctgcagggtgtcatcttcaacgatgtctatgcagcttccaagttcgccctggagggattcttcgaaagcctcgcta

SEQ ID NO: 71875 - DNA, 201 bp, Homo sapiens
gaacttggcctgggaagcccagagcaggaagccacagctgtctctgggaaagcaagggaggcttcctggaggaagcggcattgttatgagccttgaaggaagagacagactctgctacattcaacctcgtgacttcatgatcctgggcctgagaacacaggaatgattcatagcccaccccccacctccatgcatacacca

SEQ ID NO: 71876 - DNA, 201 bp, Homo sapiens
gtctcgtcaaagctgtgcttccaggcatgaagaggaggcggcagggccacatcgtggtgatcagcagtgtcatgggcctgcagggtgtcatcttcaacgaygtctatgcagcttccaagttcgccctggagggattcttcgaaagcctcgctatccagctgctgcagttcaacatcttcatctccctggtggagccaggcc

SEQ ID NO: 71877 - DNA, 201 bp, Homo sapiens
aacttggcctgggaagcccagagcaggaagccacagctgtctctgggaaagcaagggaggcttcctggaggaagcggcattgttatgagccttgaaggaagagacagactctgctacattcaacctcgtgacttcatgatcctgggcctgagaacacaggaatgattcatagcccaccccccacctccatgcatacaccag

SEQ ID NO: 71878 - DNA, 201 bp, Homo sapiens
gctccgtgggacagaacccacaggacgtggttcaggccattgtcaacgtcatcagctcgactcgaccacccctgcgccgacagaccaacatccgctactcrccgctgaccacgcttaaaaccgtggattcctctggcagcctgtatgtgcgaacgacccaccgcctcctcttccgctgtccacgcctcctcaaccttggcc

SEQ ID NO: 71879 - DNA, 201 bp, Homo sapiens
ctgcctgacaagttccagtttgagctgacgctggaggaggaagaggaggaagaaatatcaatggcccagataccgtgcacagcccaagaggcattgactgmgcagggattgtcaggagtcgaggaagctctggatgcaaccatagcctgggaggcatccccggcccaggagtcgttggaagttatggcacaggaagcatcc

SEQ ID NO: 71880 - DNA, 201 bp, Homo sapiens
ctgccctggcactgccccccacgggccccgagtccctgacccacttccccttcagcgatgaggacacccgtcggcaccctccgggcagatctgtcagcttygaggcagagaatgggccgacaccatctcctggccgcagccccctggactcgcaggcgagcccaggactcgtgctgcacgccggggcggccaccagccagc

SEQ ID NO: 71881 - DNA, 201 bp, Homo sapiens
ggccacccacccctgcctgacaagttccagtttgagctgacgctggaggaggaagaggaggaagaaatatcaatggcccagataccgtgcacagcccaagrggcattgactgcgcagggattgtcaggagtcgaggaagctctggatgcaaccatagcctgggaggcatccccggcccaggagtcgttggaagttatggca

SEQ ID NO: 71882 - DNA, 201 bp, Homo sapiens
ggaggcagtgtatttgacacagcaggcacagtccacaggcagtgcacctgtggctccggatgagttctcgtcccgggaggaattcgtggttgctgtaagcyacagcagcccctctgccctggctcttcaaagcccccttctccctgcttggaggaccctgtctgtttcagagcatgccccgggcctcccgggcctcccctc

SEQ ID NO: 71883 - DNA, 201 bp, Homo sapiens
agaccatgcagacctatcgctctgtcagcgagatggcctcgcacaagttcaaaaggatgttgaaccgtgagctcacacacctgtcagaaatgagcaggtcyggaaaccaggtctcagagtacatttccacaacattcctggacaaacagaatgaagtggagatcccatcacccacgatgaaggaacgagaaaaacagcaag

SEQ ID NO: 71884 - DNA, 201 bp, Homo sapiens
tttgcacaatcccggcgatactcctggcgatactgactagaaagtcagggagctgggggagctgttcactttaggatacgggggtggtatggaagggagcrttcacaccgccagcctcgggcctgggatttgaggagggccctagacctcctccactctccatcccctttcccttccactttgggttcactttgaattttc

SEQ ID NO: 71885 - DNA, 201 bp, Homo sapiens; identical to SEQ ID NO: 71879

SEQ ID NO: 71886 - DNA, 201 bp, Homo sapiens
ccgtcttcttcgccagcccgtccccaactttccgcagacgccttcggcttctccgcagctgccaggatttgggccgccaggcttgggctggggctggcttygaggcagagaatgggccgacaccatctcctggccgcagccccctggactcgcaggcgagcccaggactcgtgctgcacgccggggcggccaccagccagc

SEQ ID NO: 71887 - DNA, 201 bp, Homo sapiens; identical to SEQ ID NO: 71881

SEQ ID NO: 71888 - DNA, 201 bp, Homo sapiens; identical to SEQ ID NO: 71882

SEQ ID NO: 71889 - DNA, 201 bp, Homo sapiens; identical to SEQ ID NO: 71883

SEQ ID NO: 71890 - DNA, 201 bp, Homo sapiens; identical to SEQ ID NO: 71884

SEQ ID NO: 71891 - DNA, 201 bp, Homo sapiens; identical to SEQ ID NO: 71879

SEQ ID NO: 71892 - DNA, 201 bp, Homo sapiens
agcagagctccaggcgccgaaaggaagctgcagagcccggcccgggggcgattggcccgcagcgcccccgggtctgtccccggggcgccatggccctaccscggccgggcgcacccgcggggccctgggctcgctggcttgcgcgcagctgagcggggtgtaggttggaagggccagggccccctggggcgcaagtggggg

SEQ ID NO: 71893 - DNA, 201 bp, Homo sapiens
accggcccggcctgcgcacgacccgcatgtcctggccctcgtccttccatggcactggcaccggcagcggcggcgcgggcggaggcagcagcaggcgcttygaggcagagaatgggccgacaccatctcctggccgcagccccctggactcgcaggcgagcccaggactcgtgctgcacgccggggcggccaccagccagc

SEQ ID NO: 71894 - DNA, 201 bp, Homo sapiens
agtaagccagcctctccctcccccaagcatttcagacaaggatcggtggctgcagagcgcacccgtcttcgggaacggcgtctgtgtccctgtctgtctgyttctatttccacacgtccctgtctgtctccacgcgcctctgcctgtgcgtcccccatctgtgcccaagccgccgtctctctgcgcccggcccccgcacat

SEQ ID NO: 71895 - DNA, 191 bp, Homo sapiens
cagatgttaccatttattaaatatttactgagtgccagacactattctgttcaatatggtttgatctcatttcattctcacatggaccctrtagggaatatcattccatttcacagaaaagaaactgaggctcacagagtttaagacactgacccatggccgcacagcaataatcttcagcgcctgggtgc

SEQ ID NO: 71896 - DNA, 201 bp, Homo sapiens; identical to SEQ ID NO: 71881

SEQ ID NO: 71897 - DNA, 201 bp, Homo sapiens
ttattaaatatttactgagtgccagacactattctgttcaatatggtttgatctcatttcattctcacatggaccctgtagggaatatcattccatttcamagaaaagaaactgaggctcacagagtttaagacactgacccatggccgcacagcaataatcttcagcgcctgggtgccaaggtaaagtaagccagcctct

SEQ ID NO: 71898 - DNA, 201 bp, Homo sapiens
cggcccccgcacatcggagctatttcgggtttaaggcttaaaagcccaacagctcggaggagacgcttcctccggcagatgcgtttggcttggtcttgtakgaggccctggccctgccgacatggccaccgcagtcccaacggcgcgctaggttggcgagatgaagaggagtcgcagtgccctgtccgtggcagggaccgg

SEQ ID NO: 71899 - DNA, 201 bp, Homo sapiens; identical to SEQ ID NO: 71882

SEQ ID NO: 71900 - DNA, 201 bp, Homo sapiens; identical to SEQ ID NO: 71883

SEQ ID NO: 71901 - DNA, 201 bp, Homo sapiens; identical to SEQ ID NO: 71884

SEQ ID NO: 71902 - DNA, 201 bp, Homo sapiens; identical to SEQ ID NO: 71879

SEQ ID NO: 71903 - DNA, 201 bp, Homo sapiens; identical to SEQ ID NO: 71881

SEQ ID NO: 71904 - DNA, 201 bp, Homo sapiens; identical to SEQ ID NO: 71886

SEQ ID NO: 71905 - DNA, 201 bp, Homo sapiens; identical to SEQ ID NO: 71882

SEQ ID NO: 71906 - DNA, 201 bp, Homo sapiens; identical to SEQ ID NO: 71883

SEQ ID NO: 71907 - DNA, 201 bp, Homo sapiens; identical to SEQ ID NO: 71884

SEQ ID NO: 71908 - DNA, 201 bp, Homo sapiens; identical to SEQ ID NO: 71879

SEQ ID NO: 71909 - DNA, 201 bp, Homo sapiens; identical to SEQ ID NO: 71881

SEQ ID NO: 71910 - DNA, 201 bp, Homo sapiens; identical to SEQ ID NO: 71882

SEQ ID NO: 71911 - DNA, 201 bp, Homo sapiens
tctgcgagacctgctctaagccttggctggtgggctggtgggaccagttcaaaaggatgttgaaccgtgagctcacacacctgtcagaaatgagcaggtcyggaaaccaggtctcagagtacatttccacaacattcctggacaaacagaatgaagtggagatcccatcacccacgatgaaggaacgagaaaaacagcaag

SEQ ID NO: 71912 - DNA, 201 bp, Homo sapiens; identical to SEQ ID NO: 71884

SEQ ID NO: 71913 - DNA, 201 bp, Homo sapiens
caccagactgaaggggaccacctcaccctgctagctgtgtacaactcctggaagaacaacaagttctccaacccatggtgctatgagaactttatccaggstcgttccctgcgccgggcccaggacattcgcaagcagatgttaggcataatggacagacacaagctggatgttgtttcctgtggcaagtccacagtccga

SEQ ID NO: 71914 - DNA, 201 bp, Homo sapiens
cattgcatcaacttcaagaaagggacaatttgtgcagctccaggatgggaaggtggagtgggtgagcatcttgtgcagggacatggtgagtgccctgatgycccagctagcaggagctactgtgctcatctaaagtgtttgccccacttcccaccccgtctccagcccctgtactttggcttgacctcgtggaaatattta

SEQ ID NO: 71915 - DNA, 201 bp, Homo sapiens
ccctctggagccaatgctatgcaaaatgctcatcatgtctgtgcatctgggctgcagtgaggaaatgctgaccattgtatccatgctgtctgtgcagaacrtcttctataggcccaaggataaacaagcccttgcagatcagaagaaggccaaattccaccagactgaaggggaccacctcaccctgctagctgtgtacaa

SEQ ID NO: 71916 - DNA, 201 bp, Homo sapiens; identical to SEQ ID NO: 71913

SEQ ID NO: 71917 - DNA, 201 bp, Homo sapiens; identical to SEQ ID NO: 71914

SEQ ID NO: 71918 - DNA, 201 bp, Homo sapiens; identical to SEQ ID NO: 71915

SEQ ID NO: 71919 - DNA, 201 bp, Homo sapiens; identical to SEQ ID NO: 71913

SEQ ID NO: 71920 - DNA, 201 bp, Homo sapiens; identical to SEQ ID NO: 71914

SEQ ID NO: 71921 - DNA, 201 bp, Homo sapiens; identical to SEQ ID NO: 71915

SEQ ID NO: 71922 - DNA, 201 bp, Homo sapiens
agcgaatactgttttgctaatttattatgctttcagagggtttggttcattttacttttccaaagatgttggtgatgtaaagttaaattctcgtgaaataraaaggtctgtacagttgataagtgtagacttttgtgttccacattataaaagtggtttgatctctaaagtactttcttgacattgttatttcaaaagtag

SEQ ID NO: 71923 - DNA, 201 bp, Homo sapiens
acgagctccgctttcgctacagcatggtggcctactggagacaggctggactcagctacatccgatactcccagatctgtgcaaaagcagtgagagatgcmctgaagacagaattcaaagcaaatgctgagaagacttctggcagcaacgtaaaaattgtgaaagtaaagaaggaataatctgtaagttatggatttattt

SEQ ID NO: 71924 - DNA, 201 bp, Homo sapiens
acaagtctggagatgcagtgttttgaatttagccctttttctaggggctctctgtctaatctcataattctgagtaatgagacctggttttatgttgggtkgttttgttttaacagtaagctaacagaaaatcatttagcctcactcggctcagagctgccagactgcatctaatgctgagattttgcaaagtcctggggg

SEQ ID NO: 71925 - DNA, 201 bp, Homo sapiens
cctactggagacaggctggactcagctacatccgatactcccagatctgtgcaaaagcagtgagagatgcactgaagacagaattcaaagcaaatgctgaraagacttctggcagcaacgtaaaaattgtgaaagtaaagaaggaataatctgtaagttatggatttatttagaagaacagttgcatcttaagtttttgga

SEQ ID NO: 71926 - DNA, 201 bp, Homo sapiens
cttattgtcccgacacttgacctgtaggttttactgaattctcagcacagagcgagcagggaggcagagccgattgagtggaagagggtgcctctggaaamcagcaggttaggagcccttggagtcctccgcctcggagctgtcatcctgctgttggcaagttagggcacctcagttcagtgctgtggcccccaagattaa

SEQ ID NO: 71927 - DNA, 201 bp, Homo sapiens
acgagctccgctttcgctacagcatggtggcctactggagacaggctggactcagctacatccgatactcccagatctgtgcaaaagcagtgagagatgcmctgaagacagaattcaaagcaaatgctgagaagacttctggcagcaacgtaaaaattgtgaaagtaaagaaggaataatctaccctgactaaagcttgaa

SEQ ID NO: 71928 - DNA, 201 bp, Homo sapiens
ttgaaagggcttgggcaagtaaaacaccattgcaaagttaactgcctgattttaactgtttttggagactggagaaataaatttgaactggaaattttgamacaccattctaggatcagttctcacatggtacttaagctcacaatgatttatcagggccactgtcagcaatgccgaggataagccgaaaagaacatcttt

SEQ ID NO: 71929 - DNA, 201 bp, Homo sapiens
cctactggagacaggctggactcagctacatccgatactcccagatctgtgcaaaagcagtgagagatgcactgaagacagaattcaaagcaaatgctgaraagacttctggcagcaacgtaaaaattgtgaaagtaaagaaggaataatctaccctgactaaagcttgaaatgctacatttccaaggtgaagatgtgtgg

SEQ ID NO: 71930 - DNA, 201 bp, Homo sapiens
acatctttgttctcggcttctgggaatgacttattgtcccgacacttgacctgtaggttttactgaattctcagcacagagcgagcagggaggcagagccrattgagtggaagagggtgcctctggaaaacagcaggttaggagcccttggagtcctccgcctcggagctgtcatcctgctgttggcaagttagggcacct

SEQ ID NO: 71931 - DNA, 201 bp, Homo sapiens
ataaacttcctgcctccagcagtgctgggtagctggcaggatgactgtgcccagtgatgaggtgaccccagtcagaccaacttaatgagtatcccactaaytagttggatgatgtttgaagctgtcagttaatctcttagttcacatcgttcttgtgagcaaagtgaaggaatcggataagctctaaatttcggtgatgct

SEQ ID NO: 71932 - DNA, 201 bp, Homo sapiens; identical to SEQ ID NO: 71927

SEQ ID NO: 71933 - DNA, 201 bp, Homo sapiens
cctactggagacaggctggactcagctacatccgatactcccagatctgtgcaaaagcagtgagagatgcactgaagacagaattcaaagcaaatgctgaraagacttctggcagcaacgtaaaaattgtgaaagtaaagaaggaataatctaccctgactaaagcttgaaatgctacatttccaaggtttgggaagtaaa

SEQ ID NO: 71934 - DNA, 201 bp, Homo sapiens
ggaccaagacgtgatgattgccagcaaggtagcagtggtagcaggctatggtgatgtgggcaagggctgtgcccaggccttgcagggttttggggcctgcrtaatcatcaccgagactgaccccatcagtgcactgcaggctgccatggaaggctatgaggtgaccaccatggacgaggcctgtcaggagggcaacatctt

SEQ ID NO: 71935 - DNA, 201 bp, Homo sapiens
caaactgccctacaaagttgctgacatcggcctggccacctggggacacaaggccctagacattgtggagaatggatgccgggaacatgcagtggctgtctttgccgaggctggcatgccagtgttcacctggaagggcaaaatgaaagaggggtacccgtggtgcattgaacagacactgtacttcaaggacgggcccct

SEQ ID NO: 71936 - DNA, 201 bp, Homo sapiens
aaactgccctacaaagttgctgacatcggcctggccacctggggacacaaggccctagacattgtggagaatggatgccgggaacatgcagtggctgtctttgccgaggctggcatgccagtgttcacctggaagggcaaaatgaaagaggggtacccgtggtgcattgaacagacactgtacttcaaggacgggcccctc

SEQ ID NO: 71937 - DNA, 201 bp, Homo sapiens
caaaatgaaagaggggtacccgtggtgcattgaacagacactgtacttcaaggacgggcccctcaacatgattctggatgatgggggtgaccttaccaacmtcatccacaccaaatgacaccaagtggaccaagacgtgatgattgccagcaaggtagcagtggtagcaggctatggtgatgtgggcaagggctgtgccca

SEQ ID NO: 71938 - DNA, 201 bp, Homo sapiens
acccgtggtgcattgaacagacactgtacttcaaggacgggcccctcaacatgattctggatgatgggggtgaccttaccaacctcatccacaccaaatgrcaccaagtggaccaagacgtgatgattgccagcaaggtagcagtggtagcaggctatggtgatgtgggcaagggctgtgcccaggccttgcagggttttg

SEQ ID NO: 71939 - DNA, 201 bp, Homo sapiens
gatgggggtgaccttaccaacctcatccacaccaaatgacaccaagtggaccaagacgtgatgattgccagcaaggtagcagtggtagcaggctatggtgrtgtgggcaagggctgtgcccaggccttgcagggttttggggcctgcgtaatcatcaccgagactgaccccatcagtgcactgcaggctgccatggaaggc

SEQ ID NO: 71940 - DNA, 201 bp, Homo sapiens
ggagtcccttatagatgacaccaagtggaccgtgatggtgcagattgcgctgtggacccacccagacaagtaccccattggggttcacttcctgcccaagwagctggatgaggcagtggctgaggcgcccccctgggcaagctgaacgtgaaattgaccaagctaactgagaagcaagcccagtagctgagcacgtcccgt

SEQ ID NO: 71941 - DNA, 201 bp, Homo sapiens
gacatcggcctggccacctggggacacaaggccctagacattgtggagaatggatgccggctgcagcatcttctccacccaggaacatgcagtggctgtctttgccgaggctggcatgccagtgttcacctggaagggcaaaatgaaagaggggtacccgtggtgcattgaacagacactctcatgtcgggcatctgaggc

SEQ ID NO: 71942 - DNA, 201 bp, Homo sapiens
acatcggcctggccacctggggacacaaggccctagacattgtggagaatggatgccggctgcagcatcttctccacccaggaacatgcagtggctgtctttgccgaggctggcatgccagtgttcacctggaagggcaaaatgaaagaggggtacccgtggtgcattgaacagacactctcatgtcgggcatctgaggca

SEQ ID NO: 71943 - DNA, 201 bp, Homo sapiens
ccagtgcaatcctgaaggtgcctaccatcaacgtcaatgactccgtcaccaagagcaaaatttgacaacctctatggctgccaggagtcccttatagatgrcaccaagtggaccgtgatggtgcagattgcgctgtggacccacccagacaagtaccccattggggttcacttcctgcccaagaagctggatgaggcagtg

SEQ ID NO: 71944 - DNA, 201 bp, Homo sapiens; identical to SEQ ID NO: 71934

SEQ ID NO: 71945 - DNA, 201 bp, Homo sapiens
cagctttgtggggagtaactccttcaaccaggtgatggtgcagattgcgctgtggacccacccagacaagtaccccattggggttcacttcctgcccaagwagctggatgaggcagtggctgaggcgcccccctgggcaagctgaacgtgaaattgaccaagctaactgagaagcaagcccagtagctgagcacgtcccgt

SEQ ID NO: 71946 - DNA, 201 bp, Homo sapiens
caaaatgaaagaggggtacccgtggtgcattgaacagacactgtacttcaaggacgggcccctcaacatgattctggatgatgggggtgaccttaccaacmtcatccacaccaagtacgtacccacagctcatgtcgggcatctgaggcatctctgaggagaccaaaaccggggtccacaacctacacaagatgatggcca

SEQ ID NO: 71947 - DNA, 201 bp, Homo sapiens
ccagtgcaatcctgaaggtgcctaccatcaacgtcaatgactccgtcaccaagagcaaaatttgacaacctctatggctgccaggagtcccttatagatgrcaccaagtggaccaagacgtgatgattgccagcaaggtagcagtggtagcaggctatggtgatgtgggcaagggctgtgcccaggccttgcagggttttg

SEQ ID NO: 71948 - DNA, 201 bp, Homo sapiens
tgacaacctctatggctgccaggagtcccttatagatgacaccaagtggaccaagacgtgatgattgccagcaaggtagcagtggtagcaggctatggtgrtgtgggcaagggctgtgcccaggccttgcagggttttggggcctgcgtaatcatcaccgagactgaccccatcagtgcactgcaggctgccatggaaggc

SEQ ID NO: 71949 - DNA, 201 bp, Homo sapiens
tggcagtggagagggaagagtggaaatttgacactctgtgtgacctctacgacacactgaccatcactcaggcggtcatcttctgcaacaccaaaagaaargtggactggctgacggagaaaatgagggaagccaacttcactgtatcctcaatgcatggagacatgccccagaaagagcgggagtccatcatgaaggagt

SEQ ID NO: 71950 - DNA, 201 bp, Homo sapiens
ttgctctcggtgactacatgaatgtccagtgccatgcctgcattggaggcaccaatgttggcgaggacatcaggaagctggattacggacagcatgttgtygcgggcactccagggcgtgtttttgatatgattcgtcgcagaagcctaaggacacgtgctatcaaaatgttggttttggatgaagctgatgaaatgttga

SEQ ID NO: 71951 - DNA, 201 bp, Homo sapiens; identical to SEQ ID NO: 71949

SEQ ID NO: 71952 - DNA, 201 bp, Homo sapiens; identical to SEQ ID NO: 71950

SEQ ID NO: 71953 - DNA, 201 bp, Homo sapiens
caggacttctacgtctcacccaccttccaggacctcctgaaccgcaccacagctggtcagcccacgggctggtacaaggacctccgtcattactactaccrggcgcgctgggagctctacgaccggagccgggacccccacgagacccagaacctggccaccgacccgcactttgctcagcttctggagatgcttcgggac

SEQ ID NO: 71954 - DNA, 201 bp, Homo sapiens
agcctgccgctgctgctcagccaagctggtgtgcgcacaggcatcatcgggaagaagcacgtggggccggagaccgtgtacccgtttgactttgcgtacayggaggagaatggctccgtcctccaggtggggcggaacatcactagaattaagctgctcgtccggaaattcctgcagactcaggatgaccggcctttcttc

SEQ ID NO: 71955 - DNA, 201 bp, Homo sapiens
cagcctcctctttcgcaatgccttcacctcggtcagcagctgctctcccagccgcgccagcctcctcactggcctgccccagcatcagaatgggatgtacrggctgcaccaggacgtgcaccacttcaactccttcgacaaggtgcggagcctgccgctgctgctcagccaagctggtgtgcgcacaggcatcatcgggaa

SEQ ID NO: 71956 - DNA, 201 bp, Homo sapiens
caagctggtgtgcgcacaggcatcatcgggaagaagcacgtggggccggagaccgtgtacccgtttgactttgcgtacacggaggagaatggctccgtccyccaggtggggcggaacatcactagaattaagctgctcgtccggaaattcctgcagactcaggatgaccggcctttcttcctctacgtcgccttccacgac

SEQ ID NO: 71957 - DNA, 201 bp, Homo sapiens
ccttctgtgagaagtttggcaacggagagagcggcatgggtcgtatcccagactggaccccccaggcctacgacccactggacgtgctggtgccttacttygtccccaacaccccggcagcccgagccgacctggccgctcagtacaccaccgtcggccgcatggaccaaggagttggactggtgctccaggagctgcgtg

SEQ ID NO: 71958 - DNA, 201 bp, Homo sapiens
gtacgggctgcaccaggacgtgcaccacttcaactccttcgacaaggtgcggagcctgccgctgctgctcagccaagctggtgtgcgcacaggcatcatcrggaagaagcacgtggggccggagaccgtgtacccgtttgactttgcgtacacggaggagaatggctccgtcctccaggtggggcggaacatcactagaat

SEQ ID NO: 71959 - DNA, 201 bp, Homo sapiens
ggggcggaacatcactagaattaagctgctcgtccggaaattcctgcagactcaggatgaccggcctttcttcctctacgtcgccttccacgacccccacygctgtgggcactcccagccccagtacggaaccttctgtgagaagtttggcaacggagagagcggcatgggtcgtatcccagactggaccccccaggccta

SEQ ID NO: 71960 - DNA, 201 bp, Homo sapiens
gctgctgctagtcctggggctctgccgggcgcgtccccggaacgcactgctgctcctcgcggatgacggaggctttgagagtggcgcgtacaacaacagcrccatcgccaccccgcacctggacgccttggcccgccgcagcctcctctttcgcaatgccttcacctcggtcagcagctgctctcccagccgcgccagcct

SEQ ID NO: 71961 - DNA, 201 bp, Homo sapiens
gcgcacaggcatcatcgggaagaagcacgtggggccggagaccgtgtacccgtttgactttgcgtacacggaggagaatggctccgtcctccaggtggggyggaacatcactagaattaagctgctcgtccggaaattcctgcagactcaggatgaccggcctttcttcctctacgtcgccttccacgacccccaccgctg

SEQ ID NO: 71962 - DNA, 201 bp, Homo sapiens
tgtgagaagtttggcaacggagagagcggcatgggtcgtatcccagactggaccccccaggcctacgacccactggacgtgctggtgccttacttcgtccscaacaccccggcagcccgagccgacctggccgctcagtacaccaccgtcggccgcatggaccaaggagttggactggtgctccaggagctgcgtgacgcc

SEQ ID NO: 71963 - DNA, 201 bp, Homo sapiens
ggaggctttgagagtggcgcgtacaacaacagcgccatcgccaccccgcacctggacgccttggcccgccgcagcctcctctttcgcaatgccttcacctsggtcagcagctgctctcccagccgcgccagcctcctcactggcctgccccagcatcagaatgggatgtacgggctgcaccaggacgtgcaccacttcaac

SEQ ID NO: 71964 - DNA, 201 bp, Homo sapiens
cgcacaggcatcatcgggaagaagcacgtggggccggagaccgtgtacccgtttgactttgcgtacacggaggagaatggctccgtcctccaggtggggcrgaacatcactagaattaagctgctcgtccggaaattcctgcagactcaggatgaccggcctttcttcctctacgtcgccttccacgacccccaccgctgt

SEQ ID NO: 71965 - DNA, 201 bp, Homo sapiens
gtacaccaccgtcggccgcatggaccaaggagttggactggtgctccaggagctgcgtgacgccggtgtcctgaacgacacactggtgatcttcacgtccracaacgggatccccttccccagcggcaggaccaacctgtactggccgggcactgctgaacccttactggtgtcatccccggagcacccaaaacgctgggg

SEQ ID NO: 71966 - DNA, 201 bp, Homo sapiens
ccccaggcctacgacccactggacgtgctggtgccttacttcgtccccaacaccccggcagcccgagccgacctggccgctcagtacaccaccgtcggccrcatggaccaaggagttggactggtgctccaggagctgcgtgacgccggtgtcctgaacgacacactggtgatcttcacgtccgacaacgggatccccttc

SEQ ID NO: 71967 - DNA, 201 bp, Homo sapiens
gccgggcactgctgaacccttactggtgtcatccccggagcacccaaaacgctggggccaagtcagcgaggcctacgtgagcctcctagacctcacgcccrccatcttggattggttctcgatcccgtaccccagctacgccatctttggctcgaagaccatccacctcactggccggtccctcctgccggcgctggaggc

SEQ ID NO: 71968 - DNA, 201 bp, Homo sapiens
ggcactgctgaacccttactggtgtcatccccggagcacccaaaacgctggggccaagtcagcgaggcctacgtgagcctcctagacctcacgcccaccakcttggattggttctcgatcccgtaccccagctacgccatctttggctcgaagaccatccacctcactggccggtccctcctgccggcgctggaggccgag

SEQ ID NO: 71969 - DNA, 201 bp, Homo sapiens
cactggccggtccctcctgccggcgctggaggccgagcccctctgggccaccgtctttggcagccagagccaccacgaggtcaccatgtcctaccccatgygctccgtgcagcaccggcacttccgcctcgtgcacaacctcaacttcaagatgccctttcccatcgaccaggacttctacgtctcacccaccttccagga

SEQ ID NO: 71970 - DNA, 201 bp, Homo sapiens
caccatcttggattggttctcgatcccgtaccccagctacgccatctttggctcgaagaccatccacctcactggccggtccctcctgccggcgctggagsccgagcccctctgggccaccgtctttggcagccagagccaccacgaggtcaccatgtcctaccccatgcgctccgtgcagcaccggcacttccgcctcgt

SEQ ID NO: 71971 - DNA, 201 bp, Homo sapiens
tctttggcagccagagccaccacgaggtcaccatgtcctaccccatgcgctccgtgcagcaccggcacttccgcctcgtgcacaacctcaacttcaagatkccctttcccatcgaccaggacttctacgtctcacccaccttccaggacctcctgaaccgcaccacagctggtcagcccacgggctggtacaaggacctcc

SEQ ID NO: 71972 - DNA, 201 bp, Homo sapiens
ggccgagcccctctgggccaccgtctttggcagccagagccaccacgaggtcaccatgtcctaccccatgcgctccgtgcagcaccggcacttccgcctcrtgcacaacctcaacttcaagatgccctttcccatcgaccaggacttctacgtctcacccaccttccaggacctcctgaaccgcaccacagctggtcagcc

SEQ ID NO: 71973 - DNA, 201 bp, Homo sapiens
catcttggattggttctcgatcccgtaccccagctacgccatctttggctcgaagaccatccacctcactggccggtccctcctgccggcgctggaggccragcccctctgggccaccgtctttggcagccagagccaccacgaggtcaccatgtcctaccccatgcgctccgtgcagcaccggcacttccgcctcgtgca

SEQ ID NO: 71974 - DNA, 201 bp, Homo sapiens
actggccggtccctcctgccggcgctggaggccgagcccctctgggccaccgtctttggcagccagagccaccacgaggtcaccatgtcctaccccatgcrctccgtgcagcaccggcacttccgcctcgtgcacaacctcaacttcaagatgccctttcccatcgaccaggacttctacgtctcacccaccttccaggac

SEQ ID NO: 71975 - DNA, 201 bp, Homo sapiens
tccctcctgccggcgctggaggccgagcccctctgggccaccgtctttggcagccagagccaccacgaggtcaccatgtcctaccccatgcgctccgtgcrgcaccggcacttccgcctcgtgcacaacctcaacttcaagatgccctttcccatcgaccaggacttctacgtctcacccaccttccaggacctcctgaac

SEQ ID NO: 71976 - DNA, 201 bp, Homo sapiens
gaggccgagcccctctgggccaccgtctttggcagccagagccaccacgaggtcaccatgtcctaccccatgcgctccgtgcagcaccggcacttccgcckcgtgcacaacctcaacttcaagatgccctttcccatcgaccaggacttctacgtctcacccaccttccaggacctcctgaaccgcaccacagctggtcag

SEQ ID NO: 71977 - DNA, 201 bp, Homo sapiens
cagctacgccatctttggctcgaagaccatccacctcactggccggtccctcctgccggcgctggaggccgagcccctctgggccaccgtctttggcagcyagagccaccacgaggtcaccatgtcctaccccatgcgctccgtgcagcaccggcacttccgcctcgtgcacaacctcaacttcaagatgccctttcccat

SEQ ID NO: 71978 - DNA, 201 bp, Homo sapiens
caggggcactgccgtcatggcaggggacacagttgtccttgtgtctgaaccatgtcccagcacgggaattctagacatacgtggtctgcggacagggcagygcccccagcccatgacaagggagtcttgttttctggcttggtttggggacctgcaaatgggaggcctgaggccctcttcaggctttggcagccacagata

SEQ ID NO: 71979 - DNA, 201 bp, Homo sapiens
cgacacactggtgatcttcacgtccgacaacgggatccccttccccagcggcaggaccaacctgtactggccgggcactgctgaacccttactggtgtcayccccggagcacccaaaacgctggggccaagtcagcgaggcctacgtgagcctcctagacctcacgcccaccatcttggattggttctcgatcccgtaccc

SEQ ID NO: 71980 - DNA, 201 bp, Homo sapiens
gtgctccaggagctgcgtgacgccggtgtcctgaacgacacactggtgatcttcacgtccgacaacgggatccccttccccagcggcaggaccaacctgtmctggccgggcactgctgaacccttactggtgtcatccccggagcacccaaaacgctggggccaagtcagcgaggcctacgtgagcctcctagacctcacg

SEQ ID NO: 71981 - DNA, 201 bp, Homo sapiens
ggaaattcctgcagactcaggatgaccggcctttcttcctctacgtcgccttccacgacccccaccgctgtgggcactcccagccccagtacggaaccttstgtgagaagtttggcaacggagagagcggcatgggtcgtatcccagactggaccccccaggcctacgacccactggacgtgctggtgccttacttcgtcc

SEQ ID NO: 71982 - DNA, 201 bp, Homo sapiens
ccaggagctgcgtgacgccggtgtcctgaacgacacactggtgatcttcacgtccgacaacgggatccccttccccagcggcaggaccaacctgtactggycgggcactgctgaacccttactggtgtcatccccggagcacccaaaacgctggggccaagtcagcgaggcctacgtgagcctcctagacctcacgcccac

SEQ ID NO: 71983 - DNA, 201 bp, Homo sapiens
ctctacgtcgccttccacgacccccaccgctgtgggcactcccagccccagtacggaaccttctgtgagaagtttggcaacggagagagcggcatgggtcstatcccagactggaccccccaggcctacgacccactggacgtgctggtgccttacttcgtccccaacaccccggcagcccgagccgacctggccgctcag

SEQ ID NO: 71984 - DNA, 201 bp, Homo sapiens
gccgccatgagctgccccgtgcccgcctgctgcgcgctgctgctagtcctggggctctgccgggcgcgtccccggaacgcactgctgctcctcgcggatgrcggaggctttgagagtggcgcgtacaacaacagcgccatcgccaccccgcacctggacgccttggcccgccgcagcctcctctttcgcaatgccttcacc

SEQ ID NO: 71985 - DNA, 201 bp, Homo sapiens
cgccaccccgcacctggacgccttggcccgccgcagcctcctctttcgcaatgccttcacctcggtcagcagctgctctcccagccgcgccagcctcctcmctggcctgccccagcatcagaatgggatgtacgggctgcaccaggacgtgcaccacttcaactccttcgacaaggtgcggagcctgccgctgctgctcag

SEQ ID NO: 71986 - DNA, 201 bp, Homo sapiens
ccagctacgccatctttggctcgaagaccatccacctcactggccggtccctcctgccggcgctggaggccgagcccctctgggccaccgtctttggcagscagagccaccacgaggtcaccatgtcctaccccatgcgctccgtgcagcaccggcacttccgcctcgtgcacaacctcaacttcaagatgccctttccca

SEQ ID NO: 71987 - DNA, 201 bp, Homo sapiens
ggacgccttggcccgccgcagcctcctctttcgcaatgccttcacctcggtcagcagctgctctcccagccgcgccagcctcctcactggcctgccccagyatcagaatgggatgtacgggctgcaccaggacgtgcaccacttcaactccttcgacaaggtgcggagcctgccgctgctgctcagccaagctggtgtgcg

SEQ ID NO: 71988 - DNA, 201 bp, Homo sapiens
gccttggcccgccgcagcctcctctttcgcaatgccttcacctcggtcagcagctgctctcccagccgcgccagcctcctcactggcctgccccagcatcrgaatgggatgtacgggctgcaccaggacgtgcaccacttcaactccttcgacaaggtgcggagcctgccgctgctgctcagccaagctggtgtgcgcaca

SEQ ID NO: 71989 - DNA, 201 bp, Homo sapiens
gatcccgtaccccagctacgccatctttggctcgaagaccatccacctcactggccggtccctcctgccggcgctggaggccgagcccctctgggccaccrtctttggcagccagagccaccacgaggtcaccatgtcctaccccatgcgctccgtgcagcaccggcacttccgcctcgtgcacaacctcaacttcaagat

SEQ ID NO: 71990 - DNA, 201 bp, Homo sapiens
acactggcattgctgggtggtgatgcccgtcctctggcttgggttaattcttcggtgacactggcgttgctgggtggcaatgcccatcctctgccttgggytaattcttcggtgacactggcgttgctgggtggcgatgcccgtcctctggcttgggttaattcttggatgacgtcggcgttgctgggagaatgtgccgtt

SEQ ID NO: 71991 - DNA, 201 bp, Homo sapiens
agaccatccacctcactggccggtccctcctgccggcgctggaggccgagcccctctgggccaccgtctttggcagccagagccaccacgaggtcaccatrtcctaccccatgcgctccgtgcagcaccggcacttccgcctcgtgcacaacctcaacttcaagatgccctttcccatcgaccaggacttctacgtctcac

SEQ ID NO: 71992 - DNA, 201 bp, Homo sapiens
gttaattcttcggtgacactggcattgctgggtggtgatgcccgtcctctggcttgggttaattcttcggtgacactggcgttgctgggtggcaatgcccrtcctctgccttgggttaattcttcggtgacactggcgttgctgggtggcgatgcccgtcctctggcttgggttaattcttggatgacgtcggcgttgctg

SEQ ID NO: 71993 - DNA, 201 bp, Homo sapiens
ccctctgggccaccgtctttggcagccagagccaccacgaggtcaccatgtcctaccccatgcgctccgtgcagcaccggcacttccgcctcgtgcacaamctcaacttcaagatgccctttcccatcgaccaggacttctacgtctcacccaccttccaggacctcctgaaccgcaccacagctggtcagcccacgggct

SEQ ID NO: 71994 - DNA, 201 bp, Homo sapiens
cgccggtgtcctgaacgacacactggtgatcttcacgtccgacaacgggatccccttccccagcggcaggaccaacctgtactggccgggcactgctgaayccttactggtgtcatccccggagcacccaaaacgctggggccaagtcagcgaggcctacgtgagcctcctagacctcacgcccaccatcttggattggtt

SEQ ID NO: 71995 - DNA, 201 bp, Homo sapiens
ccaggacttctacgtctcacccaccttccaggacctcctgaaccgcaccacagctggtcagcccacgggctggtacaaggacctccgtcattactactacygggcgcgctgggagctctacgaccggagccgggacccccacgagacccagaacctggccaccgacccgcactttgctcagcttctggagatgcttcggga

SEQ ID NO: 71996 - DNA, 201 bp, Homo sapiens
ctttggctcgaagaccatccacctcactggccggtccctcctgccggcgctggaggccgagcccctctgggccaccgtctttggcagccagagccaccacdaggtcaccatgtcctaccccatgcgctccgtgcagcaccggcacttccgcctcgtgcacaacctcaacttcaagatgccctttcccatcgaccaggactt

SEQ ID NO: 71997 - DNA, 201 bp, Homo sapiens
catccacctcactggccggtccctcctgccggcgctggaggccgagcccctctgggccaccgtctttggcagccagagccaccacgaggtcaccatgtccyaccccatgcgctccgtgcagcaccggcacttccgcctcgtgcacaacctcaacttcaagatgccctttcccatcgaccaggacttctacgtctcacccac

SEQ ID NO: 71998 - DNA, 201 bp, Homo sapiens
ttcggtgacactggcattgctgggtggtgatgcccgtcctctggcttgggttaattcttcggtgacactggcgttgctgggtggcaatgcccatcctctgscttgggttaattcttcggtgacactggcgttgctgggtggcgatgcccgtcctctggcttgggttaattcttggatgacgtcggcgttgctgggagaatg

SEQ ID NO: 71999 - DNA, 201 bp, Homo sapiens
ccgcaccacagctggtcagcccacgggctggtacaaggacctccgtcattactactaccgggcgcgctgggagctctacgaccggagccgggacccccacragacccagaacctggccaccgacccgcactttgctcagcttctggagatgcttcgggaccagctggccaagtggcagtgggagacccacgacccctgggt

SEQ ID NO: 72000 - DNA, 201 bp, Homo sapiens
tggtacaaggacctccgtcattactactaccgggcgcgctgggagctctacgaccggagccgggacccccacgagacccagaacctggccaccgacccgcrctttgctcagcttctggagatgcttcgggaccagctggccaagtggcagtgggagacccacgacccctgggtgtgcgcccccgacggcgtcctggaggag

SEQ ID NO: 72001 - DNA, 201 bp, Homo sapiens
caccgacccgcactttgctcagcttctggagatgcttcgggaccagctggccaagtggcagtgggagacccacgacccctgggtgtgcgcccccgacggcktcctggaggagaagctctctccccagtgccagcccctccacaatgagctgtgaccatcccaggaggcctgtgcacacatcccaggcatgtcccagacaca

SEQ ID NO: 72002 - DNA, 201 bp, Homo sapiens
ggcttgggttaattcttcggtgacactggcattgctgggtggtgatgcccgtcctctggcttgggttaattcttcggtgacactggcgttgctgggtggcratgcccatcctctgccttgggttaattcttcggtgacactggcgttgctgggtggcgatgcccgtcctctggcttgggttaattcttggatgacgtcggc

SEQ ID NO: 72003 - DNA, 201 bp, Homo sapiens
cctacatcatggccttcacgctggacgggcgcttcctgttgccggagaccaagatcggaagcgtgaaatacgaaggcatcgagttcatttaactcaaaacrgaaacactgagcaaggccatcaggactcagcttttatccagtcccgggccccatagtggtgcgggcactggacccccgggccccacggaggccgcggtct

SEQ ID NO: 72004 - DNA, 201 bp, Homo sapiens
attgtggccctcaaatccgaggaggacagcggcagagtcgcctcctacatcatggccttcacgctggacgggcgcttcctgttgccggagaccaagatcgraagcgtgaaatacgaaggcatcgagttcatttaactcaaaacggaaacactgagcaaggccatcaggactcagcttttatccagtcccgggccccatagt

SEQ ID NO: 72005 - DNA, 201 bp, Homo sapiens; identical to SEQ ID NO: 55186

SEQ ID NO: 72006 - DNA, 201 bp, Homo sapiens; identical to SEQ ID NO: 55187

SEQ ID NO: 72007 - DNA, 201 bp, Homo sapiens
agcgttggctgggcctcggcttcgctggagtgtactccagggtgaaggcagagtgggatttgagacccaggtagtggaggaagcgaaggaagtgaacgctraatgtgacgcatttctgaagagctcagctgtcaccgggcatagcctggaagccccaagtctgttctgactttgcctggctgtctccttgacccgcctcct

SEQ ID NO: 72008 - DNA, 201 bp, Homo sapiens
gcttcccacgttgccagctgggacaggggagatggagtaattttgctgtggaaagacttcacgtcttgccgaatgaaagtcccgcctgtctgtcacgctgrtgcccgtgcagctgtctgagcacccggaatggaatgagtctatgcactccctccggatcagtgtggggggccttcctgtgctggcgtccatgaccaaggc

SEQ ID NO: 72009 - DNA, 201 bp, Homo sapiens; identical to SEQ ID NO: 55189

SEQ ID NO: 72010 - DNA, 201 bp, Homo sapiens; identical to SEQ ID NO: 55190

SEQ ID NO: 72011 - DNA, 201 bp, Homo sapiens; identical to SEQ ID NO: 55191

SEQ ID NO: 72012 - DNA, 201 bp, Homo sapiens
ggagacagaaacaaacaaaccgataactgtatacaatactctaacgtcagagggaccacagagcaccagcctgcatggaacttccttcctcactcagcttyccacgttgccagctgggacaggggagatggagtaattttgctgtggaaagacttcacgtcttgccgaatgaaagtcccgcctgtctgtcacgctgatgcc

SEQ ID NO: 72013 - DNA, 201 bp, Homo sapiens; identical to SEQ ID NO: 55193

SEQ ID NO: 72014 - DNA, 201 bp, Homo sapiens
tttcaaccatgatcttggaagtagtgaagaatagcgttcatagctgggaccatgttactcagggcctcgtagaacttggtttcattttgatggattcataygggccaaagaaggttcttgatggaaaaactattgaaaccagcccaagtctttctagaatgccaaaccagcatgcatgtaagctcggagctaatatcctgt

SEQ ID NO: 72015 - DNA, 201 bp, Homo sapiens
agaagtccaaggtgaacctgatgcagcacatgaagctcagcacctcacgagacttcaagatcaaaggaaacatcctagacatggttcttcgagaggatggygaagatgaaaatgaagagggcactgcatcagagcatgggggacagaacaaagaaccagccaagaagaaaaggaaaaaataaatgaaatgcctgagttaat

SEQ ID NO: 72016 - DNA, 201 bp, Homo sapiens
gcctgagtttgggagcctgcaccaccccgatgaagctccacgggagcaaatacagagcctccaggcagtgctatggtccaggctggcttcgtttttccaargagcctttggtgagttcaattatctggtaaatatccagcgcttcacctgaaagatagtgcaaattggttaggatgccacctcaagaactgtaactgagag

SEQ ID NO: 72017 - DNA, 201 bp, Homo sapiens
gaatgcactctatagaataaattctctttaaacatttcttctgtggttgaagtaggggacaggtacaggtagaatatttgaagctctgctgccttcatttytgaaacatcatatcacattcactctggacacagggcaccttataaactgaaattagcctagaatatagcctgagtcaagagtggattctctggggcccca

SEQ ID NO: 72018 - DNA, 201 bp, Homo sapiens
acctgaaagatagtgcaaattggttaggatgccacctcaagaactgtaactgagagctcagaagtgagcaaaggagcttaatgctaaggtcaaaaggagartgaaaggttgagaacaattgccacgaacggtaatgttacatgttaggagggtctgttttctttttatataagtgtgtcttagatatattttaaatagaaa

SEQ ID NO: 72019 - DNA, 101 bp, Homo sapiens
tgaaacatcatatcacattcactctggacacagggcaccttataaactgaaattagcctagaatatagcctgagtcaagagtggattctctggggccccar

SEQ ID NO: 72020 - DNA, 201 bp, Homo sapiens
agcctccaggcagtgctatggtccaggctggcttcgtttttccaaggagcctttggtgagttcaattatctggtaaatatccagcgcttcacctgaaagayagtgcaaattggttaggatgccacctcaagaactgtaactgagagctcagaagtgagcaaaggagcttaatgctaaggtcaaaaggagagtgaaaggttg

SEQ ID NO: 72021 - DNA, 201 bp, Homo sapiens
aatagaaaataagctttctgatttacttgtttggtatttaaagcacagtttgtttttctgtcacctatagagtgcaagaatgcactctatagaataaattmtctttaaacatttcttctgtggttgaagtaggggacaggtacaggtagaatatttgaagctctgctgccttcatttttgaaacatcatatcacattcact

SEQ ID NO: 72022 - DNA, 201 bp, Homo sapiens
ggttccccctgctctgaggaagctggaacacttaggagacgtaagatatacacttgttgtatccagttggtggaatcgggggatttgcagaaagaaatagygtctgagatcataggattactgatgctggaggctcaccattttccaggaccattattggttgaattagccaatgagtttattagtgctgtcagagaaggc

SEQ ID NO: 72023 - DNA, 201 bp, Homo sapiens
aaatagaaaataagctttctgatttacttgtttggtatttaaagcacagtttgtttttctgtcacctatagagtgcaagaatgcactctatagaataaatyctctttaaacatttcttctgtggttgaagtaggggacaggtacaggtagaatatttgaagctctgctgccttcatttttgaaacatcatatcacattcac

SEQ ID NO: 72024 - DNA, 201 bp, Homo sapiens
tcctagacatggttcttcgagaggatggcgaagatgaaaatgaagagggcactgcatcagagcatgggggacagaacaaagaaccagccaagaagaaaagraaaaaataaatgaaatgcctgagttaatgtgaactttggggcttctgcttcatttttacccaacaagcaacaatgccccttgtcctgtagtccacaccga

SEQ ID NO: 72025 - DNA, 201 bp, Homo sapiens
aattatctggtaaatatccagcgcttcacctgaaagatagtgcaaattggttaggatgccacctcaagaactgtaactgagagctcagaagtgagcaaagkagcttaatgctaaggtcaaaaggagagtgaaaggttgagaacaattgccacgaacggtaatgttacatgttaggagggtctgttttctttttatataagt

SEQ ID NO: 72026 - DNA, 201 bp, Homo sapiens
tatcatcatgcaactgggaactctgcttacatttttccacgagctggtgcagacagctctgccatcaggcagctgtgtggacaccttgttaaaggacttgkgcaaaatgtacaccacacttacagcccttgtcagatattatctccaggtgtgtcagagctccggaggaattccaaaaaatatggaaaagctggtgaagct

SEQ ID NO: 72027 - DNA, 201 bp, Homo sapiens
caatccctaacctcatctttgccatagaacagtatgaaaaatttctcatccacctttctaagaagtccaaggtgaacctgatgcagcacatgaagctcagyacctcacgagacttcaagatcaaaggaaacatcctagacatggttcttcgagaggatggcgaagatgaaaatgaagagggcactgcatcagagcatgggg

SEQ ID NO: 72028 - DNA, 201 bp, Homo sapiens
tggtatttaaagcacagtttgtttttctgtcacctatagagtgcaagaatgcactctatagaataaattctctttaaacatttcttctgtggttgaagtasgggacaggtacaggtagaatatttgaagctctgctgccttcatttttgaaacatcatatcacattcactctggacacagggcaccttataaactgaaatt

SEQ ID NO: 72029 - DNA, 201 bp, Homo sapiens
tcagtttgtgcagatgttatcctggacatcaaagatttgcaaggaaaacagccgggaggatgccttgttttgcaagagcttgatgaacttgctcttcagcytgcatgtttcgtataagagtcctgtcattctgctgcgtgacttgtcccaggatatccacgggcatctgggagatatagaccaggatgtagaggtggagaa

SEQ ID NO: 72030 - DNA, 201 bp, Homo sapiens
attactaatagaatgattaagagtgagctggaagactttgaactggataaatcagcagatttttctcagagcaccagtattggcataaaaaataatatctstgcttttcttgtgatgggagtttgtgaggttttaatagaatacaatttctccataagtagtttcagtaagaataggtttgaggacattctgagcttattt

SEQ ID NO: 72031 - DNA, 201 bp, Homo sapiens
acaatttctccataagtagtttcagtaagaataggtttgaggacattctgagcttatttatgtgttacaaaaaactctctgacattcttaatgaaaaagckggtaaagccaaaactaaaatggccaacaagacaagtgatagtcttttgtccatgaaatttgtgtccagtcttctcactgctcttttcagagtcttgctat

SEQ ID NO: 72032 - DNA, 201 bp, Homo sapiens
gtctttctagaatgccaaaccagcatgcatgtaagctcggagctaatatcctgttggaaacttttaagatccatgagatgatcagacaagaaattttggarcaggtcctcaacagggttgttaccagagcatcttctcccatcagtcatttcttagacctgctttcaaatatcgtcatgtatgcacccttagttcttcaaa

SEQ ID NO: 72033 - DNA, 201 bp, Homo sapiens
gacccaaggagataagatctctctacaagaaccactggattatctgctgtgttgtattcagcattgtttggcctggtataagaatacagtcatacccttamagcagggagaggaggaagaggaggaggaagaggcattctacgaagacctagatgatatattggagtccattactaatagaatgattaagagtgagctgga

SEQ ID NO: 72034 - DNA, 201 bp, Homo sapiens
ctcctctgaaattagaagcttgtattctgacccaaggagataagatctctctacaagaaccactggattatctgctgtgttgtattcagcattgtttggcytggtataagaatacagtcatacccttacagcagggagaggaggaagaggaggaggaagaggcattctacgaagacctagatgatatattggagtccatta

SEQ ID NO: 72035 - DNA, 201 bp, Homo sapiens
ccaggcagtgctatggtccaggctggcttcgtttttccaaggagcctttggtgagttcaattatctggtaaatatccagcgcttcacctgaaagatagtgsaaattggttaggatgccacctcaagaactgtaactgagagctcagaagtgagcaaaggagcttaatgctaaggtcaaaaggagagtgaaaggttgagaac

SEQ ID NO: 72036 - DNA, 201 bp, Homo sapiens
caaaaagcacagctgaaagcctgagtttgggagcctgcaccaccccgatgaagctccacgggagcaaatacagagcctccaggcagtgctatggtccaggmtggcttcgtttttccaaggagcctttggtgagttcaattatctggtaaatatccagcgcttcacctgaaagatagtgcaaattggttaggatgccacctc

SEQ ID NO: 72037 - DNA, 201 bp, Homo sapiens
tcctgctactgaaaaatggctggccttaggcaagcccttttgcaaaaagcacagctgaaagcctgagtttgggagcctgcaccaccccgatgaagctccaygggagcaaatacagagcctccaggcagtgctatggtccaggctggcttcgtttttccaaggagcctttggtgagttcaattatctggtaaatatccagcg

SEQ ID NO: 72038 - DNA, 201 bp, Homo sapiens
ccagcttgatgcccgaaaatctgcagttgctgggtttttgctgctcctgaagaactttaaagttttaggcagcctgtcatcctctcagtgcagtcagtctstcagtgtcagtcaggttcatgtggatgttcacagccattacaattctgtcgccaatgaaactttttgccttgagatcatggatagtttgaggagatgctt

SEQ ID NO: 72039 - DNA, 201 bp, Homo sapiens; identical to SEQ ID NO: 72014

SEQ ID NO: 72040 - DNA, 201 bp, Homo sapiens
atagtcttttgtccatgaaatttgtgtccagtcttctcactgctcttttcaggtccagcaatgagtttatgcgctatgcagtgaatgtagctctgcagaargtacagcagctaaaggaaacagggcatgtgagtggccctgatggccaaaacccagaaaagatctttcagaacctctgtgacataactcgagtcttgctat

SEQ ID NO: 72041 - DNA, 201 bp, Homo sapiens; identical to SEQ ID NO: 72015

SEQ ID NO: 72042 - DNA, 201 bp, Homo sapiens; identical to SEQ ID NO: 72016

SEQ ID NO: 72043 - DNA, 201 bp, Homo sapiens; identical to SEQ ID NO: 72017

SEQ ID NO: 72044 - DNA, 201 bp, Homo sapiens; identical to SEQ ID NO: 72018

SEQ ID NO: 72045 - DNA, 101 bp, Homo sapiens; identical to SEQ ID NO: 72019

SEQ ID NO: 72046 - DNA, 201 bp, Homo sapiens; identical to SEQ ID NO: 72020

SEQ ID NO: 72047 - DNA, 201 bp, Homo sapiens; identical to SEQ ID NO: 72021

SEQ ID NO: 72048 - DNA, 201 bp, Homo sapiens; identical to SEQ ID NO: 72023

SEQ ID NO: 72049 - DNA, 201 bp, Homo sapiens; identical to SEQ ID NO: 72024

SEQ ID NO: 72050 - DNA, 201 bp, Homo sapiens; identical to SEQ ID NO: 72025

SEQ ID NO: 72051 - DNA, 201 bp, Homo sapiens; identical to SEQ ID NO: 72026

SEQ ID NO: 72052 - DNA, 201 bp, Homo sapiens; identical to SEQ ID NO: 72027

SEQ ID NO: 72053 - DNA, 201 bp, Homo sapiens; identical to SEQ ID NO: 72028

SEQ ID NO: 72054 - DNA, 201 bp, Homo sapiens; identical to SEQ ID NO: 72029

SEQ ID NO: 72055 - DNA, 201 bp, Homo sapiens
tgtattctgacccaaggagataagatctctctacaagaaccactggataaatcagcagatttttctcagagcaccagtattggcataaaaaataatatctstgcttttcttgtgatgggagtttgtgaggttttaatagaatacaatttctccataagtagtttcagtaagaataggtttgaggacattctgagcttattt

SEQ ID NO: 72056 - DNA, 201 bp, Homo sapiens
acaatttctccataagtagtttcagtaagaataggtttgaggacattctgagcttatttatgtgttacaaaaaactctctgacattcttaatgaaaaagckggtaaagccaaaactaaaatggccaacaagacaagtgatagtcttttgtccatgaaatttgtgtccagtcttctcactgctcttttcaggtccagcaatg

SEQ ID NO: 72057 - DNA, 201 bp, Homo sapiens; identical to SEQ ID NO: 72032

SEQ ID NO: 72058 - DNA, 201 bp, Homo sapiens; identical to SEQ ID NO: 72035

SEQ ID NO: 72059 - DNA, 201 bp, Homo sapiens; identical to SEQ ID NO: 72036

SEQ ID NO: 72060 - DNA, 201 bp, Homo sapiens; identical to SEQ ID NO: 72038

SEQ ID NO: 72061 - DNA, 201 bp, Homo sapiens; identical to SEQ ID NO: 72037

SEQ ID NO: 72062 - DNA, 201 bp, Homo sapiens; identical to SEQ ID NO: 72014

SEQ ID NO: 72063 - DNA, 201 bp, Homo sapiens; identical to SEQ ID NO: 72015

SEQ ID NO: 72064 - DNA, 201 bp, Homo sapiens; identical to SEQ ID NO: 72016

SEQ ID NO: 72065 - DNA, 201 bp, Homo sapiens; identical to SEQ ID NO: 72017

SEQ ID NO: 72066 - DNA, 201 bp, Homo sapiens; identical to SEQ ID NO: 72018

SEQ ID NO: 72067 - DNA, 101 bp, Homo sapiens; identical to SEQ ID NO: 72019

SEQ ID NO: 72068 - DNA, 201 bp, Homo sapiens; identical to SEQ ID NO: 72020

SEQ ID NO: 72069 - DNA, 201 bp, Homo sapiens; identical to SEQ ID NO: 72021

SEQ ID NO: 72070 - DNA, 201 bp, Homo sapiens; identical to SEQ ID NO: 72023

SEQ ID NO: 72071 - DNA, 201 bp, Homo sapiens; identical to SEQ ID NO: 72024

SEQ ID NO: 72072 - DNA, 201 bp, Homo sapiens; identical to SEQ ID NO: 72025

SEQ ID NO: 72073 - DNA, 201 bp, Homo sapiens; identical to SEQ ID NO: 72026

SEQ ID NO: 72074 - DNA, 201 bp, Homo sapiens; identical to SEQ ID NO: 72027

SEQ ID NO: 72075 - DNA, 201 bp, Homo sapiens; identical to SEQ ID NO: 72028

SEQ ID NO: 72076 - DNA, 201 bp, Homo sapiens; identical to SEQ ID NO: 72029

SEQ ID NO: 72077 - DNA, 201 bp, Homo sapiens; identical to SEQ ID NO: 72030

SEQ ID NO: 72078 - DNA, 201 bp, Homo sapiens; identical to SEQ ID NO: 72031

SEQ ID NO: 72079 - DNA, 201 bp, Homo sapiens; identical to SEQ ID NO: 72032

SEQ ID NO: 72080 - DNA, 201 bp, Homo sapiens; identical to SEQ ID NO: 72033

SEQ ID NO: 72081 - DNA, 201 bp, Homo sapiens; identical to SEQ ID NO: 72034

SEQ ID NO: 72082 - DNA, 201 bp, Homo sapiens; identical to SEQ ID NO: 72035

SEQ ID NO: 72083 - DNA, 201 bp, Homo sapiens; identical to SEQ ID NO: 72036

SEQ ID NO: 72084 - DNA, 201 bp, Homo sapiens; identical to SEQ ID NO: 72038

SEQ ID NO: 72085 - DNA, 201 bp, Homo sapiens; identical to SEQ ID NO: 72037

SEQ ID NO: 72086 - DNA, 201 bp, Homo sapiens; identical to SEQ ID NO: 72014

SEQ ID NO: 72087 - DNA, 201 bp, Homo sapiens
ctcttttcagggatagtatccaaagccaccaagaaagcctttctgttctcaggtccagcaatgagtttatgcgctatgcagtgaatgtagctctgcagaargtacagcagctaaaggaaacagggcatgtgagtggccctgatggccaaaacccagaaaagatctttcagaacctctgtgacataactcgagtcttgctat

SEQ ID NO: 72088 - DNA, 201 bp, Homo sapiens; identical to SEQ ID NO: 72015

SEQ ID NO: 72089 - DNA, 201 bp, Homo sapiens; identical to SEQ ID NO: 72016

SEQ ID NO: 72090 - DNA, 201 bp, Homo sapiens; identical to SEQ ID NO: 72017

SEQ ID NO: 72091 - DNA, 201 bp, Homo sapiens; identical to SEQ ID NO: 72018

SEQ ID NO: 72092 - DNA, 101 bp, Homo sapiens; identical to SEQ ID NO: 72019

SEQ ID NO: 72093 - DNA, 201 bp, Homo sapiens; identical to SEQ ID NO: 72020

SEQ ID NO: 72094 - DNA, 201 bp, Homo sapiens; identical to SEQ ID NO: 72021

SEQ ID NO: 72095 - DNA, 201 bp, Homo sapiens; identical to SEQ ID NO: 72022

SEQ ID NO: 72096 - DNA, 201 bp, Homo sapiens; identical to SEQ ID NO: 72023

SEQ ID NO: 72097 - DNA, 201 bp, Homo sapiens; identical to SEQ ID NO: 72024

SEQ ID NO: 72098 - DNA, 201 bp, Homo sapiens; identical to SEQ ID NO: 72025

SEQ ID NO: 72099 - DNA, 201 bp, Homo sapiens; identical to SEQ ID NO: 72026

SEQ ID NO: 72100 - DNA, 201 bp, Homo sapiens; identical to SEQ ID NO: 72027

SEQ ID NO: 72101 - DNA, 201 bp, Homo sapiens; identical to SEQ ID NO: 72029

SEQ ID NO: 72102 - DNA, 201 bp, Homo sapiens; identical to SEQ ID NO: 72028

SEQ ID NO: 72103 - DNA, 201 bp, Homo sapiens; identical to SEQ ID NO: 72030

SEQ ID NO: 72104 - DNA, 201 bp, Homo sapiens; identical to SEQ ID NO: 72033

SEQ ID NO: 72105 - DNA, 201 bp, Homo sapiens; identical to SEQ ID NO: 72032

SEQ ID NO: 72106 - DNA, 201 bp, Homo sapiens
acaatttctccataagtagtttcagtaagaataggtttgaggacattctgagcttatttatgtgttacaaaaaactctctgacattcttaatgaaaaagckggtaaagccaaaactaaaatggccaacaagacaagtgatagtcttttgtccatgaaatttgtgtccagtcttctcactgctcttttcagggatagtatcc

SEQ ID NO: 72107 - DNA, 201 bp, Homo sapiens; identical to SEQ ID NO: 72034

SEQ ID NO: 72108 - DNA, 201 bp, Homo sapiens; identical to SEQ ID NO: 72035

SEQ ID NO: 72109 - DNA, 201 bp, Homo sapiens; identical to SEQ ID NO: 72036

SEQ ID NO: 72110 - DNA, 201 bp, Homo sapiens; identical to SEQ ID NO: 72037

SEQ ID NO: 72111 - DNA, 201 bp, Homo sapiens; identical to SEQ ID NO: 72038

SEQ ID NO: 72112 - DNA, 201 bp, Homo sapiens; identical to SEQ ID NO: 72014

SEQ ID NO: 72113 - DNA, 201 bp, Homo sapiens; identical to SEQ ID NO: 72087

SEQ ID NO: 72114 - DNA, 201 bp, Homo sapiens; identical to SEQ ID NO: 72015

SEQ ID NO: 72115 - DNA, 201 bp, Homo sapiens; identical to SEQ ID NO: 72016

SEQ ID NO: 72116 - DNA, 201 bp, Homo sapiens; identical to SEQ ID NO: 72017

SEQ ID NO: 72117 - DNA, 201 bp, Homo sapiens; identical to SEQ ID NO: 72018

SEQ ID NO: 72118 - DNA, 101 bp, Homo sapiens; identical to SEQ ID NO: 72019

SEQ ID NO: 72119 - DNA, 201 bp, Homo sapiens; identical to SEQ ID NO: 72020

SEQ ID NO: 72120 - DNA, 201 bp, Homo sapiens; identical to SEQ ID NO: 72021

SEQ ID NO: 72121 - DNA, 201 bp, Homo sapiens; identical to SEQ ID NO: 72022

SEQ ID NO: 72122 - DNA, 201 bp, Homo sapiens; identical to SEQ ID NO: 72023

SEQ ID NO: 72123 - DNA, 201 bp, Homo sapiens; identical to SEQ ID NO: 72025

SEQ ID NO: 72124 - DNA, 201 bp, Homo sapiens; identical to SEQ ID NO: 72024

SEQ ID NO: 72125 - DNA, 201 bp, Homo sapiens; identical to SEQ ID NO: 72027

SEQ ID NO: 72126 - DNA, 201 bp, Homo sapiens; identical to SEQ ID NO: 72028

SEQ ID NO: 72127 - DNA, 201 bp, Homo sapiens; identical to SEQ ID NO: 72029

SEQ ID NO: 72128 - DNA, 201 bp, Homo sapiens; identical to SEQ ID NO: 72030

SEQ ID NO: 72129 - DNA, 201 bp, Homo sapiens; identical to SEQ ID NO: 72106

SEQ ID NO: 72130 - DNA, 201 bp, Homo sapiens; identical to SEQ ID NO: 72032

SEQ ID NO: 72131 - DNA, 201 bp, Homo sapiens; identical to SEQ ID NO: 72033

SEQ ID NO: 72132 - DNA, 201 bp, Homo sapiens; identical to SEQ ID NO: 72034

SEQ ID NO: 72133 - DNA, 201 bp, Homo sapiens; identical to SEQ ID NO: 72035

SEQ ID NO: 72134 - DNA, 201 bp, Homo sapiens; identical to SEQ ID NO: 72036

SEQ ID NO: 72135 - DNA, 201 bp, Homo sapiens; identical to SEQ ID NO: 72037

SEQ ID NO: 72136 - DNA, 201 bp, Homo sapiens; identical to SEQ ID NO: 72038

SEQ ID NO: 72137 - DNA, 201 bp, Homo sapiens
acgaccctgcatggaccccgggccccagcctcctcagcctgcagatgcgggtcacacctaaactcatggcacttacctgggatggcttccctctgcactaytcagagcgtcatggctggggctacttggtgcctgggcggcgggacaacctggccaagctgccgacaggtaccaccctggagtcagctggggtggtctgcc

SEQ ID NO: 72138 - DNA, 201 bp, Homo sapiens
cttacacctcatgcttgtggccatgaagtggctgtttgaagagtttgccatagatgggcgcttctgcatcagcatccatgacgaggttcgctacctggtgygggaggaggaccgctaccgcgctgccctggccttgcagatcaccaacctcttgaccagtaaaattcctagttcatatggatgaattaaatattaccgttc

SEQ ID NO: 72139 - DNA, 201 bp, Homo sapiens
gtaaaaccccttccaacccaactgggatggaaaggagatacgggattccccagggtgaagcgctggatatttaccagataattgaactcaccaaaggctcyttggaaaaacgaagccagcctggaccatagcactgcctggaggctctgtatttgctcccgtggagcttcatcggggtggtgcaggctcccaaactcaggc

SEQ ID NO: 72140 - DNA, 201 bp, Homo sapiens
agagctctgctgttgactacttacacctcatgcttgtggccatgaagtggctgtttgaagagtttgccatagatgggcgcttctgcatcagcatccatgaygaggttcgctacctggtgcgggaggaggaccgctaccgcgctgccctggccttgcagatcaccaacctcttgaccagtaaaattcctagttcatatggat

SEQ ID NO: 72141 - DNA, 201 bp, Homo sapiens
cacctcatgcttgtggccatgaagtggctgtttgaagagtttgccatagatgggcgcttctgcatcagcatccatgacgaggttcgctacctggtgcgggrggaggaccgctaccgcgctgccctggccttgcagatcaccaacctcttgaccagtaaaattcctagttcatatggatgaattaaatattaccgttccatg

SEQ ID NO: 72142 - DNA, 201 bp, Homo sapiens
ctagttcatatggatgaattaaatattaccgttccatgttgatctgccactcagaaccagtttgggaaccatgatctatcctgattattgggtgcatgttygcctacaagctgggtctgaatgacttgccccagtcagtcgcctttttcagtgcagtcgatattgaccggtgcctcaggaaggaagtgaccatggattgta

SEQ ID NO: 72143 - DNA, 201 bp, Homo sapiens
ctggtgccagcagccccacccagagagactggcaggagcagttagtggtggggcacaatgtttcctttgaccgagctcatatcagggagcagtacctgatycagggttcccgcatgcgtttcctggacaccatgagcatgcacatggccatctcagggctaagcagcttccagcgcagtctgtggatagcagccaagcagg

SEQ ID NO: 72144 - DNA, 201 bp, Homo sapiens
cagggcaggaagagcaggggcactgatctacacagtaagacagccactactgtgggcatcagccgtgagcatgccaaaatcttcaactacggccgcatctrtggtgctgggcagccctttgctgagcgcttactaatgcagtttaaccaccggctcacacagcaggaggcagctgagaaggcccagcagatgtacgctgcc

SEQ ID NO: 72145 - DNA, 201 bp, Homo sapiens
gcatctatggtgctgggcagccctttgctgagcgcttactaatgcagtttaaccaccggctcacacagcaggaggcagctgagaaggcccagcagatgtaygctgccaccaagggcctccgctggtatcggctgtcggatgagggcgagtggctggtgagggagttgaacctcccagtggacaggactgagggtggctgga

SEQ ID NO: 72146 - DNA, 201 bp, Homo sapiens
gtttcctttgaccgagctcatatcagggagcagtacctgatccagggttcccgcatgcgtttcctggacaccatgagcatgcacatggccatctcagggckaagcagcttccagcgcagtctgtggatagcagccaagcagggcaaacacaaggtccagccccccacaaagcaaggccagaagtcccagaggaaagccaga

SEQ ID NO: 72147 - DNA, 201 bp, Homo sapiens
tcggcctggtattcctggtgcagccagcggctggtggaagagcgttactcttggaccagccagctgtcgccggctgacctcatccccctggaggtccctaytggtgccagcagccccacccagagagactggcaggagcagttagtggtggggcacaatgtttcctttgaccgagctcatatcagggagcagtacctgatc

SEQ ID NO: 72148 - DNA, 201 bp, Homo sapiens
ggacaacctggccaagctgccgacaggtaccaccctggagtcagctggggtggtctgcccctacagagccatcgagtccctgtacaggaagcactgtctcraacaggggaagcagcagctgatgccccaggaggccggcctggcggaggagttcctgctcactgacaatagtgccatatggcaaacggtagaagaactgga

SEQ ID NO: 72149 - DNA, 201 bp, Homo sapiens
gctcatatcagggagcagtacctgatccagggttcccgcatgcgtttcctggacaccatgagcatgcacatggccatctcagggctaagcagcttccagckcagtctgtggatagcagccaagcagggcaaacacaaggtccagccccccacaaagcaaggccagaagtcccagaggaaagccagaagaggcccagcgatc

SEQ ID NO: 72150 - DNA, 201 bp, Homo sapiens
gtggctgcccaggtcagctctgccccgtgctgtgatcaggcaccccgactatgatgaggaaggcctctatggggccatcctgccccaagtggtgactgccrgcaccatcactcgccgggctgtggagcccacatggctcaccgccagcaatgcccggcctgaccgagtaggcagtgagttgaaagccatggtgcaggcccc

SEQ ID NO: 72151 - DNA, 201 bp, Homo sapiens
atgcatggctgcacagcctttgggtggatgacactgcagggcaggaagagcaggggcactgatctacacagtaagacagccactactgtgggcatcagccrtgagcatgccaaaatcttcaactacggccgcatctatggtgctgggcagccctttgctgagcgcttactaatgcagtttaaccaccggctcacacagcag

SEQ ID NO: 72152 - DNA, 201 bp, Homo sapiens
caggaagagcaggggcactgatctacacagtaagacagccactactgtgggcatcagccgtgagcatgccaaaatcttcaactacggccgcatctatggtkctgggcagccctttgctgagcgcttactaatgcagtttaaccaccggctcacacagcaggaggcagctgagaaggcccagcagatgtacgctgccaccaa

SEQ ID NO: 72153 - DNA, 201 bp, Homo sapiens
ggaagcaccgtgaggaccgaggatttggggtggaaggcaggcatggtcaaacccatttcactgacaggagagcagagacaggacgtgtctctctccacgtyttccagccagtaaaagaagccaagctggagcccaaagccaggtgttctgactcccagcgtgggggtccctgcaccaaccatgagccgcctgctctggagg

SEQ ID NO: 72154 - DNA, 201 bp, Homo sapiens
aagctgccgacaggtaccaccctggagtcagctggggtggtctgcccctacagagccatcgagtccctgtacaggaagcactgtctcgaacaggggaagcwgcagctgatgccccaggaggccggcctggcggaggagttcctgctcactgacaatagtgccatatggcaaacggtagaagaactggattacttagaagtg

SEQ ID NO: 72155 - DNA, 201 bp, Homo sapiens
ggcggcgggacaacctggccaagctgccgacaggtaccaccctggagtcagctggggtggtctgcccctacagagccatcgagtccctgtacaggaagcaytgtctcgaacaggggaagcagcagctgatgccccaggaggccggcctggcggaggagttcctgctcactgacaatagtgccatatggcaaacggtagaag

SEQ ID NO: 72156 - DNA, 201 bp, Homo sapiens
caactgggatggaaaggagatacgggattccccagggtgaagcgctggatatttaccagataattgaactcaccaaaggctccttggaaaaacgaagccakcctggaccatagcactgcctggaggctctgtatttgctcccgtggagcttcatcggggtggtgcaggctcccaaactcaggctttcagctgtgctttttg

SEQ ID NO: 72157 - DNA, 201 bp, Homo sapiens
tctgactgcccgtggtggccccaaggacacccagcccagctatcaccatggcaatggaccttacaacgacgtggacatccctggctgctggtttttcaagytgcctcacaaggatggtaatagctgtaatgtgggaagcccctttgccaaggacttcctgcccaagatggaggatggcaccctgcaggctggcccaggagg

SEQ ID NO: 72158 - DNA, 201 bp, Homo sapiens
cgctggatatttaccagataattgaactcaccaaaggctccttggaaaaacgaagccagcctggaccatagcactgcctggaggctctgtatttgctcccrtggagcttcatcggggtggtgcaggctcccaaactcaggctttcagctgtgctttttgcaaaagggcttgcctaaggccagccatttttcagtagcagga

SEQ ID NO: 72159 - DNA, 201 bp, Homo sapiens
tttcctggacaccatgagcatgcacatggccatctcagggctaagcagcttccagcgcagtctgtggatagcagccaagcagggcaaacacaaggtccagycccccacaaagcaaggccagaagtcccagaggaaagccagaagaggcccagcgatctcatcctgggactggctggacatcagcagtgtcaacagtctggc

SEQ ID NO: 72160 - DNA, 201 bp, Homo sapiens
catgatctatcctgattattgggtgcatgtttgcctacaagctgggtctgaatgacttgccccagtcagtcgcctttttcagtgcagtcgatattgaccgstgcctcaggaaggaagtgaccatggattgtaaaaccccttccaacccaactgggatggaaaggagatacgggattccccagggtgaagcgctggatattt

SEQ ID NO: 72161 - DNA, 201 bp, Homo sapiens
agatgggtgtctcctacctgcctgtcaaccagaactgggagcgttacctggcagaggcacagggcacttatgaggagctccagcgggagatgaagaagtcrttgatggatctggccaatgatgcctgccagctgctctcaggagagaggtacaaagaagacccctggctctgggacctggagtgggacctgcaagaattta

SEQ ID NO: 72162 - DNA, 201 bp, Homo sapiens
atgaggttttccagcagcagctaccgctcttcttggagaggtgtccccacccagtgactctggccggcatgctggagatgggtgtctcctacctgcctgtyaaccagaactgggagcgttacctggcagaggcacagggcacttatgaggagctccagcgggagatgaagaagtcgttgatggatctggccaatgatgcct

SEQ ID NO: 72163 - DNA, 201 bp, Homo sapiens
tctctctccacgtcttccagccagtaaaagaagccaagctggagcccaaagccaggtgttctgactcccagcgtgggggtccctgcaccaaccatgagccscctgctctggaggaaggtggccggcgccaccgtcgggccagggccggttccagctccggggcgctgggtctccagctccgtccccgcgtccgaccccagc

SEQ ID NO: 72164 - DNA, 201 bp, Homo sapiens
gcttgtggccatgaagtggctgtttgaagagtttgccatagatgggcgcttctgcatcagcatccatgacgaggttcgctacctggtgcgggaggaggacygctaccgcgctgccctggccttgcagatcaccaacctcttgaccagtaaaattcctagttcatatggatgaattaaatattaccgttccatgttgatctg

SEQ ID NO: 72165 - DNA, 201 bp, Homo sapiens
atgttgatctgccactcagaaccagtttgggaaccatgatctatcctgattattgggtgcatgtttgcctacaagctgggtctgaatgacttgccccagtyagtcgcctttttcagtgcagtcgatattgaccggtgcctcaggaaggaagtgaccatggattgtaaaaccccttccaacccaactgggatggaaaggaga

SEQ ID NO: 72166 - DNA, 201 bp, Homo sapiens
acaagctgggtctgaatgacttgccccagtcagtcgcctttttcagtgcagtcgatattgaccggtgcctcaggaaggaagtgaccatggattgtaaaacmccttccaacccaactgggatggaaaggagatacgggattccccagggtgaagcgctggatatttaccagataattgaactcaccaaaggctccttggaaa

SEQ ID NO: 72167 - DNA, 201 bp, Homo sapiens
atttctttctggaggaacgcccataaacgtatcagctcccagatggtggtgtggctgcccaggtcagctctgccccgtgctgtgatcaggcaccccgactrtgatgaggaaggcctctatggggccatcctgccccaagtggtgactgccggcaccatcactcgccgggctgtggagcccacatggctcaccgccagcaat

SEQ ID NO: 72168 - DNA, 201 bp, Homo sapiens
tcggtgtggactacaggacaaggggcattgttgcttgttgggtaaaaatgaagcagaagccccaaagttcacattaactcaggcatttcatttattttttycttttcttcttggctggttctttgttctgtcccccatgctctgatgcagtgccctagaaggggaaagaattaatgctctaacgtgataaacctgctccaa

SEQ ID NO: 72169 - DNA, 201 bp, Homo sapiens
gttgcccatcgagggggctggggcccctggtgatcccatggatcaggaagacctcggcccctgcagtgaggaggaggagtttcaacaagatgtcatggccygcgcctgcttgcagaagctgaaggggaccacagagctcctgcccaagcggccccagcaccttcctggacaccctggatggtaccggaagctctgcccccg

SEQ ID NO: 72170 - DNA, 201 bp, Homo sapiens
cccaaagccaggtgttctgactcccagcgtgggggtccctgcaccaaccatgagccgcctgctctggaggaaggtggccggcgccaccgtcgggccagggycggttccagctccggggcgctgggtctccagctccgtccccgcgtccgaccccagcgacgggcagcggcggcggcagcagcagcagcagcagcagcagca

SEQ ID NO: 72171 - DNA, 201 bp, Homo sapiens
cccaggaggccggcctggcggaggagttcctgctcactgacaatagtgccatatggcaaacggtagaagaactggattacttagaagtggaggctgaggcmaagatggagaacttgcgagctgcagtgccaggtcaacccctagctctgactgcccgtggtggccccaaggacacccagcccagctatcaccatggcaatg

SEQ ID NO: 72172 - DNA, 201 bp, Homo sapiens; identical to SEQ ID NO: 72137

SEQ ID NO: 72173 - DNA, 201 bp, Homo sapiens; identical to SEQ ID NO: 72139

SEQ ID NO: 72174 - DNA, 201 bp, Homo sapiens
cttacacctcatgcttgtggccatgaagtggctgtttgaagagtttgccatagatgggcgcttctgcatcagcatccatgacgaggttcgctacctggtgygggaggaggaccgctaccgcgctgccctggccttgcagatcaccaacctcttgaccaggtgcatgtttgcctacaagctgggtctgaatgacttgcccca

SEQ ID NO: 72175 - DNA, 201 bp, Homo sapiens
agagctctgctgttgactacttacacctcatgcttgtggccatgaagtggctgtttgaagagtttgccatagatgggcgcttctgcatcagcatccatgaygaggttcgctacctggtgcgggaggaggaccgctaccgcgctgccctggccttgcagatcaccaacctcttgaccaggtgcatgtttgcctacaagctgg

SEQ ID NO: 72176 - DNA, 201 bp, Homo sapiens
cacctcatgcttgtggccatgaagtggctgtttgaagagtttgccatagatgggcgcttctgcatcagcatccatgacgaggttcgctacctggtgcgggrggaggaccgctaccgcgctgccctggccttgcagatcaccaacctcttgaccaggtgcatgtttgcctacaagctgggtctgaatgacttgccccagtca

SEQ ID NO: 72177 - DNA, 201 bp, Homo sapiens
tcagcatccatgacgaggttcgctacctggtgcgggaggaggaccgctaccgcgctgccctggccttgcagatcaccaacctcttgaccaggtgcatgttygcctacaagctgggtctgaatgacttgccccagtcagtcgcctttttcagtgcagtcgatattgaccggtgcctcaggaaggaagtgaccatggattgta

SEQ ID NO: 72178 - DNA, 201 bp, Homo sapiens; identical to SEQ ID NO: 72143

SEQ ID NO: 72179 - DNA, 201 bp, Homo sapiens; identical to SEQ ID NO: 72144

SEQ ID NO: 72180 - DNA, 201 bp, Homo sapiens; identical to SEQ ID NO: 72147

SEQ ID NO: 72181 - DNA, 201 bp, Homo sapiens; identical to SEQ ID NO: 72146

SEQ ID NO: 72182 - DNA, 201 bp, Homo sapiens; identical to SEQ ID NO: 72145

SEQ ID NO: 72183 - DNA, 201 bp, Homo sapiens; identical to SEQ ID NO: 72149

SEQ ID NO: 72184 - DNA, 201 bp, Homo sapiens; identical to SEQ ID NO: 72148

SEQ ID NO: 72185 - DNA, 201 bp, Homo sapiens; identical to SEQ ID NO: 72150

SEQ ID NO: 72186 - DNA, 201 bp, Homo sapiens; identical to SEQ ID NO: 72151

SEQ ID NO: 72187 - DNA, 201 bp, Homo sapiens; identical to SEQ ID NO: 72152

SEQ ID NO: 72188 - DNA, 201 bp, Homo sapiens
agcagcagaccgggaagcaccgatttggggtggaaggcaggcatggtcaaacccatttcactgacaggagagcagagacaggacgtgtctctctccacgtyttccagccagtaaaagaagccaagctggagcccaaagccaggtgttctgactcccagcgtgggggtccctgcaccaaccatgagccgcctgctctggagg

SEQ ID NO: 72189 - DNA, 201 bp, Homo sapiens; identical to SEQ ID NO: 72154

SEQ ID NO: 72190 - DNA, 201 bp, Homo sapiens; identical to SEQ ID NO: 72155

SEQ ID NO: 72191 - DNA, 201 bp, Homo sapiens; identical to SEQ ID NO: 72156

SEQ ID NO: 72192 - DNA, 201 bp, Homo sapiens; identical to SEQ ID NO: 72157

SEQ ID NO: 72193 - DNA, 201 bp, Homo sapiens; identical to SEQ ID NO: 72158

SEQ ID NO: 72194 - DNA, 201 bp, Homo sapiens; identical to SEQ ID NO: 72159

SEQ ID NO: 72195 - DNA, 201 bp, Homo sapiens
agatcaccaacctcttgaccaggtgcatgtttgcctacaagctgggtctgaatgacttgccccagtcagtcgcctttttcagtgcagtcgatattgaccgstgcctcaggaaggaagtgaccatggattgtaaaaccccttccaacccaactgggatggaaaggagatacgggattccccagggtgaagcgctggatattt

SEQ ID NO: 72196 - DNA, 201 bp, Homo sapiens; identical to SEQ ID NO: 72161

SEQ ID NO: 72197 - DNA, 201 bp, Homo sapiens; identical to SEQ ID NO: 72162

SEQ ID NO: 72198 - DNA, 201 bp, Homo sapiens
gcttgtggccatgaagtggctgtttgaagagtttgccatagatgggcgcttctgcatcagcatccatgacgaggttcgctacctggtgcgggaggaggacygctaccgcgctgccctggccttgcagatcaccaacctcttgaccaggtgcatgtttgcctacaagctgggtctgaatgacttgccccagtcagtcgcctt

SEQ ID NO: 72199 - DNA, 201 bp, Homo sapiens; identical to SEQ ID NO: 72163

SEQ ID NO: 72200 - DNA, 201 bp, Homo sapiens; identical to SEQ ID NO: 72166

SEQ ID NO: 72201 - DNA, 201 bp, Homo sapiens; identical to SEQ ID NO: 72167

SEQ ID NO: 72202 - DNA, 201 bp, Homo sapiens
gaggaggaccgctaccgcgctgccctggccttgcagatcaccaacctcttgaccaggtgcatgtttgcctacaagctgggtctgaatgacttgccccagtyagtcgcctttttcagtgcagtcgatattgaccggtgcctcaggaaggaagtgaccatggattgtaaaaccccttccaacccaactgggatggaaaggaga

SEQ ID NO: 72203 - DNA, 201 bp, Homo sapiens; identical to SEQ ID NO: 72168

SEQ ID NO: 72204 - DNA, 201 bp, Homo sapiens; identical to SEQ ID NO: 72169

SEQ ID NO: 72205 - DNA, 201 bp, Homo sapiens; identical to SEQ ID NO: 72170

SEQ ID NO: 72206 - DNA, 201 bp, Homo sapiens; identical to SEQ ID NO: 72171

SEQ ID NO: 72207 - DNA, 201 bp, Homo sapiens; identical to SEQ ID NO: 72137

SEQ ID NO: 72208 - DNA, 201 bp, Homo sapiens; identical to SEQ ID NO: 72139

SEQ ID NO: 72209 - DNA, 201 bp, Homo sapiens; identical to SEQ ID NO: 72174

SEQ ID NO: 72210 - DNA, 201 bp, Homo sapiens; identical to SEQ ID NO: 72175

SEQ ID NO: 72211 - DNA, 201 bp, Homo sapiens; identical to SEQ ID NO: 72176

SEQ ID NO: 72212 - DNA, 201 bp, Homo sapiens; identical to SEQ ID NO: 72177

SEQ ID NO: 72213 - DNA, 201 bp, Homo sapiens; identical to SEQ ID NO: 72143

SEQ ID NO: 72214 - DNA, 201 bp, Homo sapiens; identical to SEQ ID NO: 72144

SEQ ID NO: 72215 - DNA, 201 bp, Homo sapiens; identical to SEQ ID NO: 72147

SEQ ID NO: 72216 - DNA, 201 bp, Homo sapiens; identical to SEQ ID NO: 72146

SEQ ID NO: 72217 - DNA, 201 bp, Homo sapiens; identical to SEQ ID NO: 72145

SEQ ID NO: 72218 - DNA, 201 bp, Homo sapiens; identical to SEQ ID NO: 72149

SEQ ID NO: 72219 - DNA, 201 bp, Homo sapiens; identical to SEQ ID NO: 72148

SEQ ID NO: 72220 - DNA, 201 bp, Homo sapiens; identical to SEQ ID NO: 72150

SEQ ID NO: 72221 - DNA, 201 bp, Homo sapiens; identical to SEQ ID NO: 72151

SEQ ID NO: 72222 - DNA, 201 bp, Homo sapiens; identical to SEQ ID NO: 72152

SEQ ID NO: 72223 - DNA, 201 bp, Homo sapiens; identical to SEQ ID NO: 72153

SEQ ID NO: 72224 - DNA, 201 bp, Homo sapiens; identical to SEQ ID NO: 72154

SEQ ID NO: 72225 - DNA, 201 bp, Homo sapiens; identical to SEQ ID NO: 72155

SEQ ID NO: 72226 - DNA, 201 bp, Homo sapiens; identical to SEQ ID NO: 72156

SEQ ID NO: 72227 - DNA, 201 bp, Homo sapiens; identical to SEQ ID NO: 72157

SEQ ID NO: 72228 - DNA, 201 bp, Homo sapiens; identical to SEQ ID NO: 72158

SEQ ID NO: 72229 - DNA, 201 bp, Homo sapiens; identical to SEQ ID NO: 72159

SEQ ID NO: 72230 - DNA, 201 bp, Homo sapiens; identical to SEQ ID NO: 72195

SEQ ID NO: 72231 - DNA, 201 bp, Homo sapiens; identical to SEQ ID NO: 72161

SEQ ID NO: 72232 - DNA, 201 bp, Homo sapiens; identical to SEQ ID NO: 72162

SEQ ID NO: 72233 - DNA, 201 bp, Homo sapiens; identical to SEQ ID NO: 72198

SEQ ID NO: 72234 - DNA, 201 bp, Homo sapiens; identical to SEQ ID NO: 72163

SEQ ID NO: 72235 - DNA, 201 bp, Homo sapiens; identical to SEQ ID NO: 72166

SEQ ID NO: 72236 - DNA, 201 bp, Homo sapiens; identical to SEQ ID NO: 72167

SEQ ID NO: 72237 - DNA, 201 bp, Homo sapiens; identical to SEQ ID NO: 72202

SEQ ID NO: 72238 - DNA, 201 bp, Homo sapiens; identical to SEQ ID NO: 72168

SEQ ID NO: 72239 - DNA, 201 bp, Homo sapiens; identical to SEQ ID NO: 72169

SEQ ID NO: 72240 - DNA, 201 bp, Homo sapiens; identical to SEQ ID NO: 72170

SEQ ID NO: 72241 - DNA, 201 bp, Homo sapiens; identical to SEQ ID NO: 72171

SEQ ID NO: 72242 - DNA, 160 bp, Homo sapiens
tgcgtacacgtcacttccgaggcgggaggatgaagttgattgactatggtctctccggcwaccaggaagagtctgccgaaggtgaaggccatggacttcatcacctccacagccatcctgcccctgctgttcggctgcctgggcgtcttcggcctcttcc

SEQ ID NO: 72243 - DNA, 178 bp, Homo sapiens
tgcgtacacgtcacttccgaggcgggaggatgaagttgattgactatggtctctccggctaccaggaagagtctgccraaggtgaaggccatggacttcatcacctccacagccatcctgcccctgctgttcggctgcctgggcgtcttcggcctcttccggctgctgcagtgggtgc

SEQ ID NO: 72244 - DNA, 158 bp, Homo sapiens
cgggaggatgaagttgattgactatggtctctccggttcttccaggaagagtctgccraaggtgaaggccatggacttcatcacctccacagccatcctgcccctgctgttcggctgcctgggcgtcttcggcctcttccggctgctgcagtgggtgc

SEQ ID NO: 72245 - DNA, 123 bp, Homo sapiens
gttcttccaggaagagtctgccraaggtgaaggccatggacttcatcacctccacagccatcctgcccctgctgttcggctgcctgggcgtcttcggcctcttccggctgctgcagtgggtgc

SEQ ID NO: 72246 - DNA, 201 bp, Homo sapiens
cgtgtcagaccctgcagagttacacccaggctgacgaggaccctcagatgtccatggttgaagactgtcatgcgtcagaacataatagccctatctcctcygttcagtctcaccccagccagtcagtccgttcggtcagcagtcccaacgtgcctgcccttgagagtggctacacccagatcagcccagaacaaggatccc
